United States Patent Application Publication US 2015/0052636 A1 - sequence listing, part 23

SEQ ID NO: 80114 - DNA, 932 bp, Citrus sinensis
  Intron number 1 from transcript orange1.1g009605m (locus o range1.1g009605m.g) derived from phytozome v7.0 (chr-ID sc affold00046; pos 196126 to 197057)
ggagcgagtttggtggtggcacccttcatatcaaggtcctttttttaattattaaacatctttttcatataattgcttttatgcttatttgagaacttcttcgttgctgagtgccttttagtttccttttttcttttgtgttcttttgaagtttattgcttaacttgagctgttttgccattcatattttgttctaaggatgaaaatttgaattttgaggttcatttcttggaaatttggcatgtgggttttttattttacttttaaaaatttgttctttctgtagttatctgattattttgaggatatttgggagagtgggatttggtttagttcaatttttgggttaatgatcattttttatttaaaaactgtgtagttgtgggtggttttctgacgattctgtctggtctaacggaagtccggaacattggttattgaaaagttaatttcatttttgaatttgagctgtttctttattgaggaagtttaggactgttgggtagctttgtagatggtgacttctggagctagtattgaaggatttttgaagggattgcgataggttagatgatgtttgaacagatattttgccctgttaaggaaaatgtggatacttcttttccttcctaaacaaaatcaaatacgtgaatttttgcttgtgactagcaatttttcttgagaattttgatttatgtcgtactgatggttcctgtcatgatcgattcataatatcaagacataggcatcatctttaaggggtgtacgtttaaagctactatcaaacttcttttctcatatttatgctatatggaagttcaataattttactactacagtttcctatgtgatgagctggacaattggttgttacaatttttggtactctgaagtttgtaaaagagttctttccgttcatatccaggttagtg

SEQ ID NO: 80115 - DNA, 427 bp, Citrus sinensis; identical to SEQ ID NO: 80004
  Intron number 2 from transcript orange1.1g007534m (locus o range1.1g002555m.g) derived from phytozome v7.0 (chr-ID sc affold00067; pos 85002 to 85428 reverse strand)

SEQ ID NO: 80116 - DNA, 796 bp, Citrus sinensis
  Intron number 1 from transcript orange1.1g037662m (locus o range1.1g037662m.g) derived from phytozome v7.0 (chr-ID sc affold10670; pos 1197 to 1992 reverse strand)
ccataaataaggtggtaaagaaaagtcttcaaaatattaatcatgtgaaatacctccatctctcaaatagattatttgatttgactagatcaaataggaaatatcttactggaaaaaaaaaaaaaagacgattggctgtcacatctacaaaaagtaaaagatagcacaccaaggataatagtccttatctgacacgcctaaaacctgctaagacaacatttgcagagatcttctggatcattctacaatgtacaccatttgcacaagaaaacaaaccacgttaaataacgtccttcttactcccaaaatatgttcttaacaaggcaaaaatcatgataaaggtgaaagaacaagagaatcttgaaaatgatagcaaaatcatcactataaatgtgccacagggtaggacaattagggtactctatatataaagacactaagattcttcttttctcatatatacaataaacacacacactccacgaaaaagactgaggtctcattcaatctccacctgccattttagagagcttgcaagttcctacaccataaataatcaaagtggttgacttgagtgtcgaagtgtgatctctggccaccgctggcttcacctctaacattcttttcattgttttgcaagtctaaggtgtccttgcatgctttttcactccattactgtcatcctcacactgcgattaagtgaggtaccctatatcttgaaaataaatttattattttagccaagtgttcctcttacttaggggtgggcaaaatcgggttcgggtcgggttcgggt

SEQ ID NO: 80117 - DNA, 741 bp, Citrus sinensis
  Intron number 3 from transcript orange1.1g028839m (locus o range1.1g028839m.g) derived from phytozome v7.0 (chr-ID sc affold00070; pos 407280 to 408020 reverse strand)
caggttagtgctgtttttgtttgcatagaattgtctaattacggtgtgtctgtcagctttttggctattaaaaggttttggttgtgaattatgtaagatgttgtgttatgtgaatatttcagattgatgcaaaatgatcactgtgtattaaaaatatctttttcttattatcaaaaggttttggttgtgacgtacagtgttactgttccttttcttaggaaggtagtattcttgtatttaaggagtaaatctaatgaaagtttcttgaagaatgaagaaggaaactatgattaatgtgtgaatcaaatcattagagaatgtttattgcttgagaatgaatatattggaatgcttaatgttggataatgtggcgaatgtgaggagtttaaccagccaggtttaagatgatgcaatgaatgaaattatgctgtgatctcctgtttcatcctttccaacacagcaacacgtcttttgacaggaagttgatgataaagttcttttccaagttcatggttattatgtacaacaattttctcaaggccacgttgagcatcattatagctattactgttccatttgttgcatgcacttctggcatttgttgttacgctggtgtaacaaacttcaatgtactgaaccttgttgggttctggtaccatttcttctgtacaaatcttctttctgatttaccttcagctaagcctattgtatttctcttcgtgtattagctttacataaggg

SEQ ID NO: 80118 - DNA, 692 bp, Citrus sinensis
  Intron number 1 from transcript orange1.1g027336m (locus o range1.1g027336m.g) derived from phytozome v7.0 (chr-ID sc affold00070; pos 476447 to 477138)
atcaattcaaattttgttcctgctttcccaaaaaggtaacagataattctgtaatcggtttgttttcccgagaaaatccgagagaaaataattttcttttttctttgcgatttctcggcggccaattcgagttcaggttgttgctagatctattgattagttttccggatttggttaatagattttgaatcttaatctcttttaattgggacttgaactcgaattgcatgattggatcttagattgtttaattttgccatctaatgctctaaagttttgatttttattatgattgattgcagatagatggggtgcttgtgtaaagtttgtattttattttatagcgatgagttgattgttgtatgatgttttatttcatacaaaaactttgaaagttttgatattttggaaacttcttatttgtagtgttgtgttttgctaattgagtatgtaaatactaaaattcattgctgtaagatttgagttgttgttgcatcattaagaaaactgttgctgttgctgttgctgttgttaatgctggtgtttgagactgtatgtcatgactgaaacatttagaattatgttttcatattatattgcttctgtgtatctttgctgctgatggaatattgcttttaattatgattgtgaatacagatattgattggcaggtataacaacttttgcgagtt

SEQ ID NO: 80119 - DNA, 733 bp, Citrus sinensis
  Intron number 1 from transcript orange1.1g021266m (locus o range1.1g021266m.g) derived from phytozome v7.0 (chr-ID sc affold00026; pos 338340 to 339072)
ttcctgttgttactggcgttatcattgccagtggggtaataagacttataaccttcttaattattgcatatattatgatttttagtgattgttatttttattgtttatttggggagtaaatatggattgagattttattgttgtggaatggaatcactagtcataaaagttaagagctgttttgtcaaatattaaatatcggccgccacgtgttgcgtagggggtcaacgtgtggtgtgacactggtgctcgacagcccagccacatcacgtatggatgtagtgctgcgctttgatgctacgaggaaatatggttggcccctcagcaactggctatagcttttagctcgatggtaacgcctaatcggctaatcccaacaccaaatttcacaattaaccgaagcacagtacttcacaaattgtttttgacatttctcaggcttttaatccttattagttttctcttctacattagctttgaatgttcacgagttaatttcatatgctgataactgaagaacggtgaacaaattacataccggtgaaacttgtaagcgtaaacattgaactggctcttttgtgaatggactctgttcgctcggtggcattacatcgaaaaagaaatattcctttatgttttttgttattcaaatggtggtgttatctagtgaccttgttgtttcctcttaccgggtgaagggagaaccaagttttcatctatttggattcataat

SEQ ID NO: 80120 - DNA, 582 bp, Citrus sinensis
  Intron number 4 from transcript orange1.1g032265m (locus o range1.1g023922m.g) derived from phytozome v7.0 (chr-ID sc affold00060; pos 471812 to 472393)
actatctaaaccaggttggttgatttattcattgatatagtttttgttgctgaataatacttttttttttaattctgtgctttttcttggtgatgaatatatgatgatgaattgtctagtttaaaatttttaaggaattgggtaaaactttgatgaattttcatctgtttaatatgctcgtatagatagagtgtgttgtgaaaagaatggaagaaaagaagcaagtcaatctggaagtttttgagtggtttcaaacccatgttcttgattccaagctggaacctagtgttggacacgaagagcttgtgagtggttccgatgtaattctgctggtgttgcttgttcacttttctgatcttttgatagtttgtttagtatgttactaacccataatcatcacttggatgctatatattgtcatatataacttcttttctttttctttttttactgtgtattttaattctcttttgatgttatcttttcactttgattatttatatagcttttagaacgattcttacaatttttattctcttttctgcagtgttcactcttatcaattgtggggaaagtgaagga

SEQ ID NO: 80121 - DNA, 943 bp, Citrus sinensis
  Intron number 1 from transcript orange1.1g034584m (locus o range1.1g032890m.g) derived from phytozome v7.0 (chr-ID sc affold00175; pos 247051 to 247993 reverse strand)
gcagcgtttgggcccagagctccaatttccctcaggttataccaaatctctcttgtttatctcttcgattttatttaccgatctgctgttaatttattgttacgttccattttctaattgcacggatctgattgttccaatttttttttttggcttaattgataattattagcattcagattagtttgttgccatgatttgaatcaaaagtaaaaatgaaaatgttagatttacgtttttagattgtaaaaattaagaattttactgaaaaccagaataaattatgaaactgtaagtataaaaatcaaaacttgtatatgatgatataggttgtatttgcttgtggctttacaatgaccatttcgtaattcactattaatcttgagaaaattatagaattttcaaataaaaaatagataaaaaaaaatgtgttgctaatgttaagactgtcaagggcatgtttgttaatgttgagtttctgattaattttgcaaacacaacagctaaagtgtttatgagcactcagtctctaatgattccaattccaccacagctgtggcttaaaagccatatctcctcaattccaaagataaattaaatgattttggagattttttatttttgtgttttctatatgcaattttattgtttttgttctcagaaaatttttgttggaaaaatgctatccagggaactttctcaaatcatcaaaatacaaatttttaatttcttatttgcatttacgcaatggatgtttaaaacagttttgaaaaatgatactgaatggaccctaattttctttgctggacttcacctttggtttaagatataatttttcattcctttctgttgctgtagattaggtggtgagattttgtgtttatttttaaatgtttgttatttgcttttactgcagttcaagcctgaagagattgctgcaatc

SEQ ID NO: 80122 - DNA, 979 bp, Citrus sinensis
  Intron number 2 from transcript orange1.1g005900m (locus o range1.1g005900m.g) derived from phytozome v7.0 (chr-ID sc affold00296; pos 112612 to 113590 reverse strand)
tgacaactggaggtttataaatttattttgggttaatatgtatatctgatagttttatctatcaagctgatctccagttggttgttttgtgaatgataaaattcaagtatgtttgtgcatcatccagaatttgaactgtgcagttgaaaatacaaaccaagacatggcaactgtatgtcgtccatccctttgtccctccttgaatgagcaacagcctcgtcaataaccattttagcagtcacctcaactcactttcttatctattggtcatagagttatttaaaagaaaaaacttgacattaaaaaatgtatcctcggctgagaaaaaaatggtctcattagtattctgaattagccttctaaaatatcaattttctgtttttcttattcctgctttctatggggttgtttaggtcaagcggtgttggtttttacctctgagctacaactttttccattgtaggatctgcatttgctgaggttggattggactagggtatgataggtttggatggcctgggttcaaaagcttttcgaggggacctttgagcataaaatgataattgctctttcttgtgtgctttttcttttcggtttttcatgattgatcaatcaattcacaaatcatgattgaatatgctgatgcaatttgtgagtcaattggatgctaattgggccttctatatagtcctaatattccttcaactgttcaaaggcatatgacctagaaaacaaagtttgggatttttttttaaacttttttgctaggtcataggtatttaaataacctaagcttttgaaacaagatcacaactttagttatattatttttgtctggaactaaggtgttgttcgattataatttaaattgcaaaagaatttttgttaatgccattcaaattggtttaagctgtagatctatgtgtgaattttttgaccttctctctggtctttcctccttcctcaggaccaataccgg

SEQ ID NO: 80123 - DNA, 508 bp, Citrus sinensis
  Intron number 1 from transcript orange1.1g005900m (locus o range1.1g005900m.g) derived from phytozome v7.0 (chr-ID sc affold00296; pos 113699 to 114206 reverse strand)
ctgaccctttgcctccatatccagcttctgtcaaggtttattttcataacacgaaaagctcttttcttttcacttttcacttttcacttgacatgattacttggttggttgtattttgattgatttcaattttgtttttgaatatattcgtttatatatatatttatatatatggatatctgttctgatgctctctctctctatatttatatatatagtggaaaagtgtgaattggtgtctatagagtgggaatgatgtctgctgctagactgcatttttgcatcatgccactctagtattaatgctctttatgttttggatgtattatcaatcttgaatttcaatgaaatttgattttttcttttttgactaaatggacgttctttgtgtacaaaatagaattctttgcatgtaagttgtgaaaccaccaaggcttaggaatttgtaatttacgatgggcagttgaatgatgttcatagagtaaaaattggctgttgcaggacggct

SEQ ID NO: 80124 - DNA, 487 bp, Citrus sinensis
  Intron number 3 from transcript orange1.1g001334m (locus o range1.1g001334m.g) derived from phytozome v7.0 (chr-ID sc affold00070; pos 514748 to 515234 reverse strand)
cagtaggtaagatcctttccaatttgttgtgcaaatactcttacaaatatcaatagttcatttgaagataaaagtatatttaacagcactttgaatgggcaattacgaaaattcaaaaagatctgaactaaatactacattattattaattaatctcaaattcttatctaatcatgctggcatactactgtcttcaagtcaacatgattctctgatgttctttcgacttaaattatcatggaatttgtggtatggcccctggaagtatgtaaagatcaaaatacaaaataccgtgcttcggaatctgttatttgtttatttttttaataatgaaatttctctgcattcatagccgaaaaaaaaaagaaaaaaaaagctatcttattgcatatgctcatttctctttctttcttttggttaaattttcaactcttttgtatgaaatgttgtagataattgacactttgctcggtaaggtcgttaagga

SEQ ID NO: 80125 - DNA, 554 bp, Citrus sinensis
  Intron number 3 from transcript orange1.1g029223m (locus o range1.1g029223m.g) derived from phytozome v7.0 (chr-ID sc affold00117; pos 265441 to 265994 reverse strand)
ctgttgcctcttgctagatttcttccgcaaccaaagtgagttttctgtccctatccgtcactctgttagaaacaatgagtcattttacctagtaaagaatctgttatgttgttgaagatgttctgtgtcccattggtactaaactcctcctagagttgaaccttcaattcgtggtgcagaatagttccttctctcctggggtgagacatcaccttcatgggagcatatgaggttattgattgaaccttttaattaaccaacaacagacctttggatgacctggcaccagttcagtggtgcaagtcattcctaaggagttggttattactttgaccgcctgcacttgcccgagttagttggcttttgatcagtgaggtagtttctgttctattcctgatccgccaagatgtattacatcttcgcattaggctgtcgttgcctatatggtccttgagtgacatgcagttatttatttatttttaataaatcaaataatgatggcatgcattattattgcaggggacaggcacaagctggtgcaagaggtggccgtg

SEQ ID NO: 80126 - DNA, 759 bp, Citrus sinensis
  Intron number 1 from transcript orange1.1g007864m (locus o range1.1g007864m.g) derived from phytozome v7.0 (chr-ID sc affold02915; pos 6603 to 7361)
atccaattctcacccttcgtttgatcaaaaatcaggtatgagtctcactccttcgtcttcaagaatcctggacttttaagttatgtttgagaggtaggattaagtgtaggattggactaattattgggacaaaatattaatacatgtttggcatgctcacttggattagattaatggactaaattcaaattttaatcctgattcatgggattgcttatcctaatttttatgtgggttgagttaggactagataatgtcaaaaaaaaaaaagaaaaaaaatgtttgtccatttataatatcttccattatttattacatcattttatttataacttaaaaattatttgtttatttattgttttaattaagtaatttattttttattcatgatttacataaaagttattcattaatttattatttgaataattttatttattttatttaatgaaatgatatgtctcatttgaaataacctataatttaaataatttatatttctttattataattatgacaacccaataattaattgtgtgtgtgtgtataatattaattttatttttaattaattataatatttcttgttaaatatctacaaatagtttatatttaaattcaaatattaatgtaaatactatttaatttcatgtaaatttaatttaacataatccaatcccatatcataccaaacataaccaattaattgcagtataattattttcttatactgacttagaattttttttattgtagtta

SEQ ID NO: 80127 - DNA, 399 bp, Citrus sinensis
  Intron number 1 from transcript orange1.1g032684m (locus o range1.1g032684m.g) derived from phytozome v7.0 (chr-ID sc affold00026; pos 1194913 to 1195311)
tgctcccttccctctccccaaatatcaccagaaaggtacgtctatatctctgccttcgatacatttggtatctgtttatgataatgaatgatacccattctttaattaattattttatgagtttcatctcaatttatttgattttatatacacacatatacatacattcatacatatataaataatatgtacggatttttttttttttttttaaggacgtggtaataagttgtatggtttaaatagtttaataggttattgcactgactttattaagctataggagttaagaacatctttttaggaaaaaaaaagaaaagaataaagactgagaaggaccatatatattctcagttaatttagtttacttacgtactcacatatataagcagatagtag

SEQ ID NO: 80128 - DNA, 718 bp, Citrus sinensis
  Intron number 1 from transcript orange1.1g027108m (locus o range1.1g025910m.g) derived from phytozome v7.0 (chr-ID sc affold00117; pos 232470 to 233187)
agaagctttacatcttctattctataacatgtatgtattgtatttcttatgctactctttctttctttctttctctctctgagacagattagctttagagagaaagaagatttgtactgatttttttgcatgttcaagctctagatcttgatgatatttgatacaatcatctgtgattcctttgttattttattttgtctggtgaacgaattcatcagcttcagttttgattttctctctaaattttacgttttctgactcctctgaattgcaccaatcaacaaaagggggaaaaaaaacacccagattggagaatccatcttttttgtgttcttcatcttcaattttactatcttcttgatttgatttgattttcacttctgggttttttgagttcatgaagaaaagcttttgatttgaagaaagctaaacattctttcctgtcatttttttccgaaagaagaagactcactgaattagccaaagaaaaattccatcttttcagttcaccgcatctattttgtttttgttttccctccctcacttctgagtttttaatctagaaaaaatacattggatttgctgacaaaacggctgaattagccaaaattttgttcttttccttgattttcctcttctgggtctgttttggaaacccaacttgatgtataaacaagctgaaatttttctgggtttttatggttttttggctgtagga

SEQ ID NO: 80129 - DNA, 1028 bp, Citrus sinensis
  Intron number 1 from transcript orange1.1g023169m (locus o range1.1g023169m.g) derived from phytozome v7.0 (chr-ID sc affold00123; pos 87311 to 88338)
gatcccagccacgctctctgggatctgcccactatgtctcaaagctctctcttgttttctcaatgttatgaattttgaatgcatagaatgtagaaagaaacatatattcatttatgttttgaatgaatttcttgagaatgtatctgtggccagtgaagtaatgaagaggcttgaatcatcgaagtataaaaacacatgatactaacacgttgcagtgatctatagtttattgtcagttgtttctaggacaagtagttgattagttttgaaaccagttcggtttacttagaattggaatctggtgcggagatgttccctcagaaataatacaatcccatcgtcgactctcctaaactttgtggcagcttaagatatccagttatgagaattatgtagaaatgatagttctttttatgcttcacccgttgcatattaaaactgtgaacgacatttgttgtctattccgccaaataattcccctcttaaattgagcatatgaacacttcttgttgagcttatggacatggttttactcaagaaaatcagctgcatcaaacaatcaagcctaaacttaattgatggattggcagattgtgaaaaacctcgatgaaacagaaagcttctagttgcaggcaattgatggattggcagattgtgaaaaacctcgatgaaacagaaagcttctagttgcaggcaaacagtcgtgggattatgaataaaaaagaaattaagtgcttgtcactggctgtactcttcaagcttcatataaatcattcaggattttaaagagcacaggcaacgcaaacatgcactgctggctgctgccatcaacattataatgcatggacaaccgcatacgcttgtgatactagacgaaaacagaaataatgaagctgcttctcttgattccgcatttttctttagatcaaaagttaaatttcatccattcaaaaaagaaaagaaaagaaaagaaaaggttacatttcgtttccagcacccatagagtgacctcatattgcagaggataa

SEQ ID NO: 80130 - DNA, 306 bp, Citrus sinensis
  Intron number 2 from transcript orange1.1g027804m (locus o range1.1g025599m.g) derived from phytozome v7.0 (chr-ID sc affold00046; pos 190937 to 191242)
gctctcagcttgaagactttgcccgcaagcacaaggtcaaattttcttctttttttctttttcgtgtttaaatttcatgggttcggctaaattttgttaattgatatgggaatctgcgtaattgctaaacatgtgttcaatttgattaaattaatgactgtatggtgaaatttaagttatttacgcattgaaattgttgaacgagtggatggtttgtatgagaactagttgaattcggttgaaatgttgttctttttgttggaaaaatatgaaactgagatgagagttgaaatgggtcgatgcaga

SEQ ID NO: 80131 - DNA, 797 bp, Citrus sinensis
  Intron number 3 from transcript orange1.1g027804m (locus o range1.1g025599m.g) derived from phytozome v7.0 (chr-ID sc affold00046; pos 191372 to 192168)
aacttggtgagtgtatcgtctgcttgagttgtgctgcatctctcatgagtcaattcatttgtgttttaggtgtcatgttgtattcattgttggtagaagaatttcaaatgcatttataaacacagtctcagcaagggaaacatttgcacatttaacctttagttagccacattgtagataaatgaagaatatgaatcttttttgtatgaaatttgcccactaagatataaatatcccagaattctttacatgtaaatgctgatattttaattgagattttgtgttcaagttaagggtgaggaggattctctgtatgcatataatatgcgaatttgtgagatcattcatactaaaggcttgtgttgtccactatataatactaaataataatttgaagccggttcttcttgcatatctgaaagagttggattagtgcacttatacttttaacttcctgcatttggcttaattcatgctttgcaactaggatattaacttgatctcttttgactcctggaccacagatggcaaaacttagagaggcctctatatcagatttgaatttacaactataattcttaagaacaaactttgcaacattgctgcaacaagtatacatgtgcatgaaatcttaatttatgacttgtaaactaatctgttgactgttgtctagttatttatagacgtagattccctatgttatagagtgtttttcataatgttataagttaacactgaaataaaaagagtttggctagacaggggttcaaattgttgagatttgcttggcaacaaga

SEQ ID NO: 80132 - DNA, 933 bp, Citrus sinensis
  Intron number 2 from transcript orange1.1g040593m (locus o range1.1g040593m.g) derived from phytozome v7.0 (chr-ID sc affold00051; pos 235334 to 236266)
ctttgaagactggacgtcgtaaagttagtgtaagtgtgttaacttttttttaactgtgttattgaaagatgtgacgtggtaatcttggagctaaatgtgatgatatgtaaactacccatcggcacctcaggcttctatctttttctaatgtcatattgtttggtagcttgatcattgctggaaaacagataatgttatttaatgttgtggtagagagcaccacctaataatttgattatggtttgggttatcatttgccttgtagagtgttccaagctagttggacatcaagtatgttaaactttatccttttcacttgataataggttactaatttaggggaacgatggggaaattgcaaacttgtttcaggtggatgggttttatcttaggccaaattgtcatagtttggttcatttcttgtgaaagatttgtccagcctttcccgtaatgtaataagataaatgcaatgtctgaaatattccagtttcaaatgttgcagtgtaaattatggagggaaaagcaaggacgattttatgttttcctctagccctttggtttatgtaaccaagatatgtatttggcttgagaacaaggcctatcaccactggttagtaggcagccttacgaagacttaggtcttgggttcaagtctcatatagtgcgtgtgtatttcattatatttaaaaataaataaataaataaagatacatgtttggcttacacaagcattacttgcatctgaaaccatcaacatgttagttttgctctacttgacaaacagaaatggaaaatctttttttcatggtttgaatgagcagatgctttatcatggtcatgataattcaaacacaattaccttttcagattctgaagccactttcctcttgttgtgtaggtcaaaagtctcgctgctgagctttgtctagacag

SEQ ID NO: 80133 - DNA, 439 bp, Citrus sinensis
  Intron number 2 from transcript orange1.1g047591m (locus o range1.1g047591m.g) derived from phytozome v7.0 (chr-ID sc affold00010; pos 333652 to 334090 reverse strand)
caattatttgggtcttcgtgataatcagttgacaggtagcaccaaactatcagagcctttgattcaatgttccatcaatgatgtttgatgcacagaattaatatgatgaatctctctcaacgccacacttctttttatattctgttacaattttaaaagaatcaacttatatacaatttggggctgtaattactgcataaaattttctataattattgaaatcaatcctactccgtttgaagaagcttgattttcaacttgactaaactttgcccatgtttctagttgtagttccttttgaatatacatcaagcatttaaattcatacttgagcttggttttgcacattatggcaggggaaataccacatgaaattggcaacctacagaatctgaagcttttagatttcggtgccaacaacttaaccggtctcatacct

SEQ ID NO: 80134 - DNA, 615 bp, Citrus sinensis
  Intron number 2 from transcript orange1.1g009188m (locus o range1.1g009188m.g) derived from phytozome v7.0 (chr-ID sc affold00415; pos 54921 to 55535)
gtggaagagatcaaattccttctcgaacattgcaggttagatcttgctttaccatgattaatggctatagtttcataagagcataggattgattgtttggtctatgatgaaaaaagaaaaggaaaaaaaaaattgttggcttcagtttttgctgatctggatatctatcatcttcttctcattgagttttctctgtttgatttctttggtatgctgacttatcatatctcacatgtaatgtggaaaatatatagtatctaattaagtttaaactaattatttacaattaaggcctagcagttgcttgggttattgcttaaaagatttcatgacatggatggatacctgtacttttctggacatataaattattgcacttagagtgatggagcaatatcagcgaatactagaatcagcttctgggaatgcgagggtttctgttatcagaactggaaatgtggggtcaaacctgttcatgcttcttctgcagttctttgtccttctactagactaagtgctatcattaacattgactagtgaaaattttagcataatttctaggatctataatgtttcttgtcatctaattgcaacagatattacaaggtcacactg

SEQ ID NO: 80135 - DNA, 1038 bp, Citrus sinensis
  Intron number 2 from transcript orange1.1g031006m (locus o range1.1g031006m.g) derived from phytozome v7.0 (chr-ID sc affold00035; pos 488761 to 489798 reverse strand)
gtcctcatcgcaagcttcttctacgcagtggtaaaaataaataaataaataaaaaataagaccaacaaactccatttttgatcttttaagttttctttttcttctgtgggtcatgaaacaagacgaattttgttatgaaacgttgctgagatgatgcgtacgatttgctgttgtgtgttttgtggtcggattggcccacgtcttttttttttacttctcttatgcttgagtctaaagtgcgccgttagggttttagatattgaatgaggatagctattaactagttgtactagtagtggttctgctgctattttttgtttggcaaaagtgctgctgctattgagagagtatcttttttcctttttttggatgggatcggcggatcgccgatcattataataatatatcctatcagcagctttcatcgcctgctttttgtgtgacctttctgcttgattcctgtgactgatttgcgcaccgggtctcatgcgtgcattagcaaattctcatttttcttgataccttgcatctgggttgggttctgcatgagtgactttgaatgtgaaatgaagaaaaagtgattcaattttcattgttaattaataaaaaaaaaaaaaagagaggagcaaaaggcattttccttcaatcgtattagccttttttgtgttgcttgtgtcgcaatcgtattagccttttttgtgttgcttgtgtcgctttctttgcatcccaataattcctgtgaatcacctcctaaaagtgtattttgtctgtaaatgcttcctgcattggtgggttttgtccttgtgggtctttttctttagcattggaaatgtttctcttttatgcaaaagtgtcacatgttttcaaaagccataatagtagctggctataagcctttaagcctttcactatctctcgattcattaaaatgtccctgttcttttgtttttttgctaatgtgactagtgcctagtgcctagtttaattaattaaacattaacagccaaaaccaaagcagcaaagaagaaagaaccagag

SEQ ID NO: 80136 - DNA, 435 bp, Citrus sinensis
  Intron number 1 from transcript orange1.1g010859m (locus o range1.1g010859m.g) derived from phytozome v7.0 (chr-ID sc affold00114; pos 203399 to 203833)
gggtgtctctcttcttcgcttcttcaattcccccatccttcactctcctccatcaaactcattcatgcacatcaaattctcataacacaaccataaacaataattattaagtttttattttatttttgctcccctttatatatatattttttcccaatatccaaagcttctcatttttcacacgcatatttaaacaaattatataaataagagagaaaagagaatcatttacttttgttttttcagagagaatataaagattaaagaagtctcttgctttctgatccaatgccctctcttgtttcagtttcctttgactattgactctcttcccaataccaaagttaccttctctatttgttttgtgaaccaaagttttgatttatatttgttgttgttgttgttgttgttattattattattatgtagagagaa

SEQ ID NO: 80137 - DNA, 999 bp, Citrus sinensis
  Intron number 2 from transcript orange1.1g018414m (locus o range1.1g018414m.g) derived from phytozome v7.0 (chr-ID sc affold00152; pos 268813 to 269811)
gcgcgtggctcggtggacagctcttctctgccgtataataaattgcaatttttctttgttatcaatcataatgcttgttgttaacaataaacgttaatttttttatttggtatgttttgtcaaataatcataaatatttatttaatatcataattttttaaaattttttagttgttgtttgtttattttttaaataatatttttaagattaattaaattttttctttttattagtaaaaatttaaattttgagtttttgttctggaggttaaaatatttttaaaaaatgttatatatttaaatttttttatttattccataattttattttatttcttttcgtaacatgattgtaaaaaatttatttattaaaataaagttataatttttaataaaaattatttttattaacaatcaaataattaaatttttttaataaaaacttagaaaaattctactaccaaaaattttatttaagcaagctttatagttctgtatatggcttatgataataattaattatatgctaaaagctctgttaaagatatctccaaaaagctctgttaaggacatcagttcgtgtcaaaaagagacttgctggagggtggtgggtctgatggtccctcttgtcattattaaggaaataattaagtttatttttatttatctaattattggaaattccgatttggaatcgagttatttcttcactttaatattgagatgagtgaaatgggacaatatcttggttaaatgaggagttttgtaatttgggtcacctgtaacgcattagtatcatatttggactcttaatattctatttatgtctcatacaaatcaaacctttatgatttgattttatcacttcattagaattgctgccacacaacagagtatccgagatttcgtacaaaacaatctaggtctaaattggagttaattgaattgcctgtaatttgaacaggttgtgcgcaaaccagcccacatcttccttgacga

SEQ ID NO: 80138 - DNA, 1001 bp, Citrus sinensis
  Intron number 1 from transcript orange1.1g016485m (locus o range1.1g010141m.g) derived from phytozome v7.0 (chr-ID sc affold00117; pos 294853 to 295853)
gacacaaggtattctttgattcttacgtgattacattattgtttgaacagtggatgtgttaaactagaacgcttgatcaatttatttgcttaatttgttgttatagcttttgcaattaaagcattggcctattaatgtgaatgacgtggctggtagtgtaatcaagccatttgttggtctacaaacccttatgggtgaactgtggtttcttatcccaaaaaaaaaaaagaaaaaagaatgaaaacaacttataggtaaactcaaatgtaagctgttgtccttgcttgtttctgtgaatttcatacaatcaatgaggtgggcagtgaggatatctttattatatggtttatatataggcataagctttctagagttgaagagagaaattgttcacactgcatcacagcattcagttttatgggtttaacaggggaagtatcattctgttgtagtactcacccttcctgaggttatggtgcgaaggtaatcagtggaatggcttctctagagatgtaattcctcccaagcttcagttggcttatgagtctacctttttacccctatatgtttatgattatgctacttagcttgaagaagaaattagaatgactcagtttttctcgccccaaccctatcaatctatcattttccattttgatgtcctttttacagaaaaagattgttgtagttgttatttgtcagcacaaacatttgttgaaactttttaactgaggatctgtaaatttttgaaaagctttgtgcattgtctttgttcaacagtcagttaaaactgagtcttccaagtggttgctttctgactcatcaataattttcagtggagctttgaccacttaatttaacaagaatttagttcttatactgggtcattagtttttcattcttgctaggtctgcggtttggaatttttctggataaatattttctgttatatttcttgctgagttggtgctttcttctttactgatagggccttggtgata

SEQ ID NO: 80139 - DNA, 1032 bp, Citrus sinensis
  Intron number 1 from transcript orange1.1g010167m (locus o range1.1g010171m.g) derived from phytozome v7.0 (chr-ID sc affold00016; pos 43146 to 44177 reverse strand)
tgagtggtcttgttctggatttaaagcattaaaaggtcagtcgggttttcagtttcaactccgtttgttttgttttgttctgttttatatgtgtgtatgggtatattgcttcatttcgcatctgtttgattgatttgtttattattgtgggttagcttaatttatactcgttcaaaatatgtatatacctgtgtcacactgaccagacaattctcttatcttatgtccaacctacgtctgtgttcctatttacattctcttgcataaggctcactgttctgttaaagagaaatttggtttgagagagaaggtatcacttctgtgttcgtaatggaaaacatgtcttagctatcaaattctgatgaagcatatgatcattgaaatttgaatgtcacaaggtacagtttgtggtattgttgtaacataaacaaggctcaatttacgtccttctattttgcttggaatctataactttttttttcaaatatctcaacactaaataaggctctttaaaggatctgacttccgtaggagtcaagaatattatgattgctaatgctttcatcagtctttcttatattttcttgatgtaagcttcatatccttagaccattcttttgtatgatttctgtgtatattgtttgtcatcctttactctgattttattgaaagattcattcagatctaaaatatgttgttgaatagaatatggttggatgatgaatgttcaattgtggagctaagaattcgattgatgatcttcatttgtctatcctatttgggaacttgactctaaatggattctcttggtgttctatagacgtgctttgagaaaacaactgaggagctacgaatagtagtctctaagtgtaagtgttttcttttttaaccaatccttggaaaccattgatgatgttgttatgtcactcaactatgcttatctctacctcattaagctgtctattattttcatgaattttttatactaatataatttgttagtttcatatactgcaaatgttaatgccaggg

SEQ ID NO: 80140 - DNA, 974 bp, Citrus sinensis
  Intron number 1 from transcript orange1.1g012432m (locus o range1.1g012432m.g) derived from phytozome v7.0 (chr-ID sc affold00169; pos 208076 to 209049 reverse strand)
cagatccctcaaggtcacattttgctttgatttgattgttaacatttctttggaatcttttattttgcagtgtagggaagggttaatgatatttttagtttatagggagaaatgataactaatttatcttgttcaagtttgatgatccttggtaattgataacatgtagttatatttcttcatggaaacttaagagtcagcctttgttggtttaatgggtctccgaatgtcttaaagagtaatcattaatcctaaagacccttttattgctgtagttaattacatacatctattaaaaccatcaagaattttagtttggccataaaggcttttaggtttatctaaccacttgaactgattcttttgaagggaaaatttctgagatttaagtaatagaagagacagctcgtaagtgttgtatcaatttaagatttattttctctcccaaggctaatttgtttatcccacatgcattcaaatggcctaggatcttcatgctggccttttgtacttccctgtaatgtgccgtctttggcggcaaaaaccagctcacggcacctttagttggtcactattgttgctgttctatgttggggtgctagtagttaagttgatatcatttgtaattcacttttgtcagcttcttgtcttattcacttttgagattaaggtaaagctggtgaaatgcaataagtacctgtttgtcctgaaatggagctgatcaccaataatggttgtgtatgacttaatgattagcatggtggatttggttgtgtaattgaggcaatacaaacttgacctgttgatattatctattgattaatatttttgccagtatattaagctgtaaatgctcattttgggagttctgaaatttgtgattaaataagcattttcttcactgctatcaaaatcacttagacatattgcaattatttcttccaaatcgctaacttgtcatatttttataacag

SEQ ID NO: 80141 - DNA, 517 bp, Citrus sinensis
  Intron number 1 from transcript orange1.1g013265m (locus o range1.1g012220m.g) derived from phytozome v7.0 (chr-ID sc affold01740; pos 8996 to 9512)
gccacctatagagatcagatcagtcgccttatcaggtccttatttttttcatgctttcttatatcattagctgagtttgtatggtgatatatattgaagcaagcgtggtctgtattaaaagtactgatttttatttgatttcttcccttttcttctcagatgcgacttatgggtttgtagttttttgtcaattaattaaattaatcagataattacatttagctgtacatcctggaacattaattgtatctaaatccttgttcatcgatctgggtaattttctaaaagacagttttatttttcttaaataaatttacaatatcaccacgttctggtttcccgtaggaggcagatggagtctctccctcagagcataggctacattcctatatttatttatattatgctggtatagattttatgtcttcatttactaaattaatttgcttatctaacttgcctgtttggatcaactctctcaggtagcacctgcatttacaaaaaaagcgaaagaaaa

SEQ ID NO: 80142 - DNA, 770 bp, Citrus sinensis
  Intron number 1 from transcript orange1.1g004354m (locus o range1.1g004133m.g) derived from phytozome v7.0 (chr-ID sc affold00685; pos 61558 to 62327 reverse strand)
caggtggtaattaatatatttgatttagtgttttgcaaacgttgttcaagtgcgtttttgtgaattatgagtgcttttgacattagcatgtaattgacattttaaagtgctttaccggaaaaatcacttgacaggtgcttttaccaaaagtgcttaaaagaagactcccagacatatacccttcatatgcaatttccaatagccacttttaacttctatgattaaagtggttttactcaaaaactctattttttttttatttgacaaatacttatttttgttggtttctgcggaattgcagtagttgatagtgtggtttttgttgatgggattagaaagtaacctgttagagcatcttttatgttgaggagtggattctaatttttataatttgtagaaaatcttagggtggtacttgtggttagttcactctagggttggggaaagatttggtgtatacaagaaagaagtaaagatgttatgtggatgaaaagaaattgaaaaagtttctgagtcaatgagaagtgtaattttttggatacggggaagcataatcagtgttattaaagcgtgtttactgcaaaatgttgttattgcttgctagttgatttttgtaacttgcgtatcttcattaatgatttttcatgtgattgatgcttcaaatttgttgacaatatggttgttagtatgcgtttctttctctaatttttaatacttctaccagttcatggatgagaccttcgatgttattcttgataagggtggattgg

SEQ ID NO: 80143 - DNA, 891 bp, Citrus sinensis
  Intron number 1 from transcript orange1.1g043973m (locus o range1.1g043973m.g) derived from phytozome v7.0 (chr-ID sc affold01407; pos 7114 to 8004 reverse strand)
tataaggtaagctaaactctctattacactcttttaatttttacccaatttctagatttatcctctattaatacacttttgatatttggaaataacacacacacgcgcgcatgcgggcatactctctcttgtttattttggttaaatatgtaattaatgcataattaatatacaatataaaccgtattaatcaatggtctaaaaatagtgagagaagaggtattgtgtaaaagacgagagcttttaattagcccaaccctaaataataaataagcaaggagagcaagtacagaaaagatcttgctcaacaagtagctaataataatatatagctaccagaaacatgtcaagacattgatgagaaaatggaacaattagttttcccggtcgagaaattctcgatgaacaagccgctctaagtttaagttttgagggagaagattgctgtagtaaaatagagttgtgacggtggctgatggctgagacactagtgccgtcactaacctcactagtgacctaagtatcattgtcacaattgactgcagaaaaaaaaaaaaacttaaacatactcgggggggaaaacaaaaaaggccattaggacaagtaaaaatagtatgccattctttgttatagaactggagaaataattaattaccacgatcgtcaagaatgaagaagaagatgggggcgggtgtgggcaggagtcatgttgaaggaaggcttactcacaaaccttgcaaaaagacaggcaagttgctctaagatttactcgtaatatgtgtcccgttgattattaatttgatttccactgagctttgattcttaaactaatgtaattatatttggaaaatttcaggtagactatatattaggtgtaaacccattaaaaat

SEQ ID NO: 80144 - DNA, 745 bp, Citrus sinensis
  Intron number 3 from transcript orange1.1g001761m (locus o range1.1g001761m.g) derived from phytozome v7.0 (chr-ID sc affold00004; pos 172704 to 173448)
agaaggtattgtgcttgtgttacatgcacatatgttcattcttgtagtttcatggtggtatatgggcatatggcctttcttactacctaatgttgtctgcaacaagaattttagcttcatggtgggaaaacttatcgggtgaagaaggtatataagaggtattagtctctgagaattctcagcggaggacataaaacctgtttgagcagccctctgcacagagagtttctaaaaattagtgtcttgagcactctgtacagaatgttgaaatctctgtgcagtgagttgtctgtccgtgtttctacaaaatgtggacgtcagtgggagaggactcattaaaaccattgacgagctgttgtgaagctcaggacatacttgcttgttttggttatcttgggcctttgaatagctaatagtactttccttctagttcccttgacgctgccctatacttgcactcacttgcctgagaggagaaaaataattttcagatttgcaaacaaaaagaaaattatcctttataaaatgattgacatgaaatcacttaatgttttgtgaatgagtgatgctatgtgtcttagtggcttaggttcctatcctattcattcattaagggtgctttgaatatcataaaatcctttatccgcagtttgctttttcttttgctgttttagcttatcaagctgtattgtatcaactgcttttaattgtgttacagtttaagatagaaaagctggtcacagct

SEQ ID NO: 80145 - DNA, 1022 bp, Citrus sinensis
  Intron number 2 from transcript orange1.1g011893m (locus o range1.1g011518m.g) derived from phytozome v7.0 (chr-ID sc affold00007; pos 2380977 to 2381998 reverse strand)
gtagaactgtaagtttaaacatttaaatactcttaacatcttttaattcagaccaatagtattgcatttcttctggttctgtgatagttttttttccccttctttttcttaaagaatgaatttgatgtaattctgtttagtgttatgagggtcttttactatatatagtgatgtttgattggtaacatgtcaattttgagtaagaacaacacaattaagatgcaaggtatttctgaaaagaaatatgacatgtgaatagtcctgaacattgacaatttcaaagtgcttttttttccaaattaatcactgataggagattcttctgtcaatcttggaaagactttaattaaacaattagaacaacagatcctccttcatatagcatgggtctgtgcgtcggagtactctcattataaattttctgttggctatgtggagttgtagttaatgacttatgcaatgatgaaaaagtaaaagtcatggacacaaatcaaaaggtaccataggtcagaaactattgtagtcaaggtagaatcttctgtgcacttaatgctttgatactttgattatgataggctggcaaaagattatcttgagcacgatgtcatttatcaaggctcaccgagcagtatgttgagctgctgatcagtcttttgagacttacatcaattagactaggcatgtgtaataaaaaattttaaaaagaaattctaaaagaacaatataatttttttttctttttgtttagaaaaaacatttctatccctccccagtagcctaatcatatcttattgcagctccagcatccaaagaaattagaatgacttaatttcaggaatgtaggagcagatgtctgtatgttttgtgttgagcattatttttgagcaccaatcttgtactgtacaaattaaaacatagaactttgagtgatggatatctggatatgaagttgtattctagttcattttttcattttctagcttgtggtcattaggttgaggcaaagaaagctgttcctaggg

SEQ ID NO: 80146 - DNA, 592 bp, Citrus sinensis
  Intron number 1 from transcript orange1.1g007773m (locus o range1.1g007773m.g) derived from phytozome v7.0 (chr-ID sc affold00127; pos 346466 to 347057)
atttagtttcagttcttcatttcagctcctccgaggtatttttttattttaatttatttttaatattttattgcctttggatttgattgtaaagattctacattgttctaatgtgtttggtatatagaataattaagatttttatatatatctttgttgatcgcttgaatccgctgttattttttatgatttaatggaaataagcttagatttcgattatttgttactgctgagaaattgttaaataaattattaattacagaaatcaggatattatgctttgagaagtctccctaaataagtcaccctaaatcgagtcttattcaacagttttgcttggtcaaattacatgttattttcttttatatttagaaatataattcattttactctacaaaaaacaaaaaaaaaacttattttcacttgaaaaagaagagaattgaatagaaaatgagcagctttattattttttttcatcaagcatttagtttctgaaaagttggacatagtagcgtgtcttgtcatttctgatcgccgaaattttttgtttattgtagggatttggtcttgaagaggctacataaaccctagc

SEQ ID NO: 80147 - DNA, 466 bp, Citrus sinensis
  Intron number 1 from transcript orange1.1g010731m (locus o range1.1g009063m.g) derived from phytozome v7.0 (chr-ID sc affold00004; pos 2310746 to 2311211 reverse strand)
cctctagagccaacaattcctcgtttcgctttagagtaagtaactcctttcaggctcagcggcttcgttctttcaacactttcagcaaaatttcactgaaagtattttcatttcaggtttctaaagaacttgtacttgtctagtttgttcttttgtatgactaataatgataatttgtgtgcctggagtttttattttaggtccgtttatataattgctcacttagattgatgaatgactaggactagaagaaatattggaaaatttgtgtttaatcactgttctattgtcggtacaatcaaagaattttttaaactaataaagtttttattgcaatattttagcttaaaattttggttcgtgaatcatgatcttcatttaaaatttaaaaaaaaagttaagcaccactgatttttttatttttttgacagggagctctatttgttttgatagttgaaatctatct

SEQ ID NO: 80148 - DNA, 397 bp, Citrus sinensis
  Intron number 1 from transcript orange1.1g045628m (locus o range1.1g045628m.g) derived from phytozome v7.0 (chr-ID sc affold00175; pos 142749 to 143145)
aggcagtccctctttgatcaggttttgtttttattttttcttcttaacatcttttgtaaaactttcatcaatcatcacacattcaactccaaaaaaaactcaatttttaattttctccctccatggagttgcattttttgaataaattaatgtgttcgtacaacttaaacttattaacatactgaagataaacatggaatggataaatatatcgacatgtgtatgcacatgtcgtcaagacattaatacaagtaattggtcactttaaaattttttatttttatacttttacttcattttgttgcatgtgtgtgtgtgtgtgtgtgtgtgtgtgtgtagaagatttgagatggaaaataaattggttaaattggtgggacatttcagggacatcttg

SEQ ID NO: 80149 - DNA, 526 bp, Citrus sinensis
  Intron number 2 from transcript orange1.1g013768m (locus o range1.1g004913m.g) derived from phytozome v7.0 (chr-ID sc affold00051; pos 574083 to 574608 reverse strand)
tcttaccaaaatctagagattcagatcctgtagtggtaatcaaatttaatgacttctgtttttgtccatactgattactgagtgttagatattgttttttatttatcttttgtggttgaatgatgtattctgattttgatttcgtatggtcaaatttatttttcttatcggcttgtgcaagatctaaaactttctatagcataaatagggaatctaataaattaccatttaatatctacacccaagcttcgcatggtagaaactttatttaaaatttagtataatgctgttaaaatcacactcgcctagatctgtttctctacatattttcccgtgatttgtttttctgcttatcttctgtaaatatatttggtggagataacatatgttatgcatcatcattttttttttttttaactgttaggcagatgctcttaacttttttatgacaccttcccagcattgcacattttaacattcttaaggggcagttttacagggttcaggttggtttacaatcaccaga

SEQ ID NO: 80150 - DNA, 575 bp, Citrus sinensis
  Intron number 1 from transcript orange1.1g013768m (locus o range1.1g004913m.g) derived from phytozome v7.0 (chr-ID sc affold00051; pos 574684 to 575258 reverse strand)
ggtgagttttctctaattttttcgtttacttctcaattttttttaattaatttcagtttgttcttttgacttttgacctggcatttttttttccattttggtgatagtgagaatttaatgaaatgtgacatttttttttttttacgattaacgattgatcaataatttggagcttttggcgattgtttatgcgtgtttaattaacgctgcgttggttattttcgtaatcatgatcgatcaagtgcaaatctcggattgagtttaattggcaaaatgtgtaaattcttctccaaatcagttttgatttggaaagagacgagatttaggattatagaacgtttattattgaagctaaggggttttcttttcataaatgcaacatgaaatgtaatgccgtaataagcggaaatagtttgacattcactttgctagcatgctttatatgctttttatggtatctcacacaatagcagtattctcgatcgatataatatcgtcacaatgatttatttatttataaacgggaaggataaaaatgtcctgggatccttaataaatttgtttctttatgcaga

SEQ ID NO: 80151 - DNA, 628 bp, Citrus sinensis
  Intron number 4 from transcript orange1.1g027676m (locus o range1.1g022818m.g) derived from phytozome v7.0 (chr-ID sc affold00007; pos 1858396 to 1859023 reverse strand)
ctggttttggccattttgcaattgcaactgaagatgtaagtgtcgtaaaatatttactgattttgagcactggtttttatctaagcactgaaattgacctagcataccatggaattttaaggtttacaaactggttgaaaacattcgtgccaagggtggcaatgtcactagagagcctggtccacttaaaggtggaacaactcacattgcctttgtgaaggatcccgatggttatatttttgaactcatccagagaggtccaactcctgaaccactctgtcaagtaatgcttcgcgttggcgatcttggtcgctccatcaagttctatgaaaaggtagtatgacaaaaggtctatcttctgcttggatgctgtatgagtaactggatctcttactcccatttcttgctaaacctgttgcaatgggtgtgtttaactgtgaatccagtggttcatttccatcgctaaagctgttgtggatcatcttgcattatgccagcacttttttcgttattgtccaacagtggatcaattgtagtagttatcaaatctgcttatagtttgctttttaatccaaaggatctgccattaaatgatgttgtgtttgttgggtctctgcaggctttgggg

SEQ ID NO: 80152 - DNA, 506 bp, Citrus sinensis
  Intron number 1 from transcript orange1.1g027676m (locus o range1.1g022818m.g) derived from phytozome v7.0 (chr-ID sc affold00007; pos 1859536 to 1860041 reverse strand)
tgcgacttcactccgactttctggtaagctctcttttcttcctcttgttttggtctttttgatctccgacctttcataaacttggatcggctccaatgcgactgatatttgtgtctcttgttagtttttatgttaatttttgctatgactgacggctgaggcttacgttacgtttctgaattatgctggagacttttatttgatacgtttctattctatcggatcaagaagcgtctcatttttttttcctttttagcaatttttttaaaaccaaaattatgaaaatcatatttttgaaattaaaaaagtgatttttatctgaaaatcatttttcaatgtcgcatcttacgcttcttaaagtttgggttactgttatctcaagtctacacatccgtaattgtgtcatgaaattaatgcttgtgtgttgcttagactgatgatttgtgtttgtcttattattcatatttacatcgttgtgaatggaaacagagtgattccatatcaaa

SEQ ID NO: 80153 - DNA, 454 bp, Citrus sinensis
  Intron number 1 from transcript orange1.1g000533m (locus o range1.1g000533m.g) derived from phytozome v7.0 (chr-ID sc affold00151; pos 30753 to 31206)
ctttccacaaatccaagactcttgacaacaaatacgtaagcccatttcgttaattttcagtaattcgatcgtctcttttactcttttgttgagattaattgtagaacaagaagggctgggttgggttgggttagggtttttgattctctgttttgtttgcatttgaagaaactgtctgttggtttacagttgagtgaattatactctagtaaaatgaattgtgtgtgtttcttcatttagttttggagaacttgagtgaaagaaaagccgtgattgaagtcaaataatgtgctattgctatgtttgagtagtaaaaaccctagaattgcaagtttatttaagtgacccaagttaggcgctagggtttttgttggttttgcaatgtgaattacttggactggagtatttggaatttgactgtgtggcttttgtttgtctgcattgtttggtttag

SEQ ID NO: 80154 - DNA, 488 bp, Citrus sinensis
  Intron number 1 from transcript orange1.1g014825m (locus o range1.1g014823m.g) derived from phytozome v7.0 (chr-ID sc affold00025; pos 96627 to 97114 reverse strand)
ctatttctccatcagcttcaatctcagcacgattagtacgtatttctttttaatttcaatatcctgatcagcaatttttttaacttttttcggccttttttagctcggcatttgatattactttcgatcactagtttttaccacttttttggtgtcttatgtaattttctttgatttttctgtctgcaaagctttataatcatctgatctatgtatggatttgttttttgaaatcaattttatgggattatcaatttaatatgtacacgaatttgcaatactttttttttcttaaaaaaaatagagagataaccctttttgggcctttgcaaatttgatcatagtatgtgctaggtcatttatagagttatcttcttttcgattcttattaaaagttttaggtaaatttttcatctttttgtcgctgagaaattaattttttttttgttttagttttttctttttatagatttcttgattacaggtat

SEQ ID NO: 80155 - DNA, 907 bp, Citrus sinensis
  Intron number 1 from transcript orange1.1g027978m (locus o range1.1g027978m.g) derived from phytozome v7.0 (chr-ID sc affold00225; pos 158763 to 159669)
aaggtctttcttctattgggtttgttttatttgtattttattttgattgccttgattctgtttgcttgttagcttacgaatcatgaaaaaaaaaaaaaaaacgcttgaggttttatgatccaaacttatgataattcagacttagtgctaatgtttattcgcattgatgcagtttgatttcgggtgcgatagtgtaatcgatcatccttggtgatgaaatttgaaatcaaacgtaatagaaagaacgggaaaatttgctgaaattttggatgccttcttaatgggacaattggagtgatatgaattagtgagtttggatgttaggcttattaatcattgcatgctgtaagcacttgtgtgttcttagagatgatgaaataaaaggacatacagcttttcttctattgtttctgggctgtattggtgctaaattgttgctatgattgtatatctctgatcaaattttccgtgaatttcgttagacttatgcacttgttgtggtctgagttttattgaacgctaaattgtttattttgtatatcccaaaatgattgcaagttttggttaacttctgataattggcatactgtatgagaccggttggtattccaggtggcactttaaagctaagaatggtataatattagctctgatttgctccaattgatgctcaagtgtttcttgcaattgtctttcatgttattatgctgcttaacttttagacttccattgacatacattgctaatggtgtttcttgtgtattatgctgcttaattttggccctttgttccacaaacgcacacatcttattgacatctcacttcttcagaagtatgtttattcattccatgattttgaggtgtttgagcagtccctgggtacatcgttggagaaactgagttagaa

SEQ ID NO: 80156 - DNA, 797 bp, Citrus sinensis
  Intron number 2 from transcript orange1.1g026293m (locus o range1.1g026293m.g) derived from phytozome v7.0 (chr-ID sc affold00007; pos 579177 to 579973)
catatcttccaattccattccagcatttaggagaggtgcatctttgttgagatttctaatgattttttttttcaataatgtgtacaaataaacgcatgctttgagtttcattagatatctaatatgataatggaagaatgtggtatttttgtgctttgctggaacggagaaagaaagaattttgacacaagtagttgagacaagggatctgcagctgttctcactttgtttgattacttttgctttctttagtttgtagaatttcacgtctagtccttagttgtttccctaggaatggttcttctgcaagagcaacaatattgatctcttgcatagaaatttctggacttcttattagcagtatatttccagagaagaggcttcttaattttgtgagtgcaggtattctttggattttggtacaactgcattctgaaggtctcaggctgttgtttctttgaatttaaaagcctaaacaatatccatcctcaatccccagtaaaacagttaaatgagactagataacaaaccaaacctcatatattctcttattacctgagactatttcattgtgaaccttttttcattagctatcatgatgttgaacatctaaattttgtgattcttcataccgtccaaacttttggaagatttctacttatgtcggtctttcttaaagttttgtatttagtggtgtttatagtatgcatttagtgccttaattgtgattattgtttcattagcaataattagctgatgaggttgcagggtcaatacctggtgtctcttttgagcaa

SEQ ID NO: 80157 - DNA, 651 bp, Citrus sinensis
  Intron number 2 from transcript orange1.1g044023m (locus o range1.1g044023m.g) derived from phytozome v7.0 (chr-ID sc affold00016; pos 500205 to 500855 reverse strand)
acgaagaagtcctacttcaaaaaccgaaggcaggggtacgtcactttctgcagtgcctttgtttttagtaggtggtcacagtctgaatgcattttgttttgaattaacttcttgaagtagattagctttttcgtaggtttatatggtggtttgaaattttggacatagagttgaatgtatttttagaaatactagggattggtgacgctaataccagctaatttcaactgaaattttggacatagagttgactgtatttttagaaatactggggattggtgtgaataatacctgttaatttcaattcagaatttatgattctgtgttaccaaacttagtactaggaatgttctatactaagcatgggtaagtgataaaggaatcttgatattttatttacttcaatgttgtgttgaaatactgttgtcaactgttcccttgatatgattgcactaaaagaagctgcatgtttgtatggcttccaatttcttagtaatttctttttattctatttaccttggattatctaatgagtctgaattggcaaattttgttttatttgattttgaagattactagagtgatgcttttttaatgttcaccataatgattgcagcttctgaagcccgctttcacaattatacgggataa

SEQ ID NO: 80158 - DNA, 428 bp, Citrus sinensis
  Intron number 1 from transcript orange1.1g031459m (locus o range1.1g031459m.g) derived from phytozome v7.0 (chr-ID sc affold00016; pos 619831 to 620258 reverse strand)
gaactttgctggtaagtcttgtttctgcttgttaattttccaagtccaagattcccctttgtaccacgattcaaattaatcgcacctgacattaataatatttcattatccgtcaactttttaacttcataattagtgttgattttttttttttttacaatggtcagattttactatttcaaaagtatatatatcaaattatttaactttgtaatgtcagagtggttcatgacaaagaactgattaatttcgagcgggggaaagaaaaggcttggtcatttttctcattaatcattacatccttggtcatttttctcattaatcattacatcgtgcatgttgttcgtaaagcgtaacatagataagctaacgaagattcaatgtaattcacaggtggtgatttcaagcattcgaagcaaagaattgat

SEQ ID NO: 80159 - DNA, 394 bp, Citrus sinensis
  Intron number 1 from transcript orange1.1g007290m (locus o range1.1g007073m.g) derived from phytozome v7.0 (chr-ID sc affold00528; pos 85268 to 85661)
attccactctgaaaaggtacttgtgcaaatttttaatctttttcggttctcatcttgatttgttctttgccaattcttacactccacatgatcttgctttctgtgtcggttgatttcttgtttgtttaaggttctgagttttgtttgatttatgagaaaatgatgaaaaaacaaatgaaccttttgatttctggatgatgcccagtaaagcaaatacagattttgctttaaaaggtgggcaatattgattttttttttcttttaatttttggatgattcccatagaagcaaatacaagctggtgaagacttagtttagtttacttttccaagaattatgctcaatttcttagtatttaagtttgaatttctgctttatcagctttcgggacccc

SEQ ID NO: 80160 - DNA, 958 bp, Citrus sinensis
  Intron number 2 from transcript orange1.1g034236m (locus o range1.1g033468m.g) derived from phytozome v7.0 (chr-ID sc affold00225; pos 50882 to 51839 reverse strand)
acctccgcctcagattcgaagccaacaaacacgtggtacattcccatttgctcttcttaaaaaaattatttttaatttctgatttttttttcaatgttcaaatatcttgcttgctagcgttttatttctgaattataacaatttagtggaatttccatgtggactagaatgcattttattaatttatgggtgcgtgtgaaggaaattaattatggtaaaaactaattacgagaaaagtagtaatagttaaagtgtttgattggtatagctgatctaatgggcataagtgcttatttaattttatttaaatttttgttgtttttttagtagagtttttgaagattaaattattttatttctactaggaaaagttcaaatttagactttgggagtagaggttgaattttttttttaaatgttaaaatgtctaaaatatcttgtacttatttgataatgctatctaattatttttataccataactttaaaaaacttgtctattaatgtaattttgtagtctttagtaaaagcgcttcttgacaatcaaataactagaattattttggtaaaaactttacttataaaagctctactagcaaaagctctacttaaataaattttatttgaagaaaacggagccaaagtattatgaagtgctgtcttgctaccatgaggttttgcaaattatttatgggtggtatcattagttactattaagtggaatgcagtcttcctcctgtttagttatcatctcagatgtagtaaatctggctaaagtctctttgtgtaagcttgccgaagttcgggcattgaactttctgaactatgttgtaaattggttcttgtggtcgtgcttgcattacttgtgagtgacggctcagtttttgtgctaatatttttctttctattaatagggtatctggtgatgttttgtttggttgatatgcagacggaccttg

SEQ ID NO: 80161 - DNA, 896 bp, Citrus sinensis; identical to SEQ ID NO: 79848
  Intron number 1 from transcript orange1.1g009039m (locus o range1.1g009039m.g) derived from phytozome v7.0 (chr-ID sc affold00004; pos 3770752 to 3771647)

SEQ ID NO: 80162 - DNA, 882 bp, Citrus sinensis
  Intron number 1 from transcript orange1.1g015856m (locus o range1.1g009067m.g) derived from phytozome v7.0 (chr-ID sc affold00027; pos 385477 to 386358)
gtcttgggctgtccccatttgcattggtgtaacgtgtaagtaagccactcaatttttatttgatgttaagttgcttcgtgcagatgtgtttgaattttggcctctgtgggaattcttgaatctatattgaagcgttttgagctttctttcttgttctatttttgtgtggattttatttccgtcgcattgcttctaatgctccaagatagatcccatttgatatggctatatcttggaatgatttcaggatttggaagaattaatgggagattcatatattgatggagaaatttttgaaactccttcgactgtaagtaattatatccatgtgatatattaagaactaatggggagattcttatggtaacagtttcaaaagagtcaacaaaatgagggattagattgtaaattcatttattattagggtctttctcttatcgcatccgcctaaagaaatggaaaattcaataatctcccagcctgtagaatgactaattaaatgattgcttgaatttaacttggcccagttgcttgtgtattagtcatcatcacttttctttgattaaagctcagctgtcttggtctgatataggtcctcttatcaggtctgttatgatgttgtggagttcacaggtccttttgattatcttggtttcttctcgtcaattgacaacatcttcacctgtctctggacattagctacttatataagtcaccaattcattcatttcattggtgagttttcatttttcttacatgtatggatgctgctgtgcatatgggactgttgttattgcagttgcaccttcaaaattgttatgttcttaagtaaatttttttttttttttagggggagtcctgtaattaccatatttttggatc

SEQ ID NO: 80163 - DNA, 760 bp, Citrus sinensis
  Intron number 1 from transcript orange1.1g044776m (locus o range1.1g044776m.g) derived from phytozome v7.0 (chr-ID sc affold00038; pos 721167 to 721926 reverse strand)
ggtttggtaagtttgtcataggtgacactgtagatttctacttgtgttgaattctgtttaaatttgattgttgcttcagaagtaatcaactttgtgcagtgattgactgtatcatttacttttcaatactagaagaacatttatcattgtgtaaagagtatgcactctcaaccttagtcttggtggcactattttttcagggttggtttgattgtaatattagttgtgaaaatttttatctactagcacatcttcgttagagccttgtgaatcaaatgcaatatgtactacttcaccctgccttagtgagtgacataatttatcatgcatctatatacacttgttacatatattcctgcttcatcctttattttgatcatactcgaactggaattaggattgcagaagacatttcatcactgattcggcttgcagtatggtttgaaaatgttgacaaggttatgcatttatggataagactgtatgtgccctgctttcgtattagatataatacttgtccccaaaactgcataagacagccataaaccccatactatcatacttccaggtaatagaatgccagttaaaaatcaagaggattctggatcaaagatgtaatattggactgcgagcgccggttttattttttacaaattataatttttcaactggaaatcaaatagattgtaatagtttgaaagattctacatgtagatgacattgtactaagatgcatacatggtgtaacattattcaaagt

SEQ ID NO: 80164 - DNA, 483 bp, Citrus sinensis
  Intron number 1 from transcript orange1.1g045076m (locus o range1.1g045076m.g) derived from phytozome v7.0 (chr-ID sc affold00807; pos 17505 to 17987)
cgacgccgtttttgatcttatagctcttcccgtatgtattgcagctcacctcagctcatgctaatttatgtgatgtttttataattatagatgattattgctgatactgaatggtaagctaaataattcgtcattaagtcatcttcattttattttcgattgaaaatgaaaaaataataattttgagcaaagaaaaatatagaaaatgtttattttgttttatttttatttttaaattttttgggatttccttattgtgattgttatcattcattatatggtcctagttaaatgtttcaagttgttgtagtttgtgaaaatcttttcgatatttattctggcatgtacatttttcctttcaatttattttgttgctgatactttgattatgatatatccttttttgtttcccttggagggtggcatgcctggtgctacaaatctgaaaggatctgaagtattagaaaccattgtgaagaaggc

SEQ ID NO: 80165 - DNA, 998 bp, Citrus sinensis
  Intron number 4 from transcript orange1.1g023808m (locus o range1.1g017503m.g) derived from phytozome v7.0 (chr-ID sc affold00010; pos 2006853 to 2007850 reverse strand)
atcactcacattacaacaaggatagcaggaacaacgtatgcaatcttccaactctcctgctgcttgctatatgtcgtttgatattgtatcttttttgctttggtttaacactacaaaattgctgcttctcagttccctatgaaactttcattgccatgagttcagtgtagcaagttgttagtgtctgcagtgtatttcctaaattcagtgggtttgtttaccagaccattaagatacttattctgaaattaattgtcttgtgtatcctgctatccatgccactgtttgtgtgagggtatgtcaagaaggatttttgtaattacagcttataagatgttaatttatggtataccttctgaaagtcatgttgtgagaaagcttattatcagcataattaggtaatgcgaactacgtacatgagagtggaacccgagaaaagagaccagtaaaccagagaaaatgagtttgaacaaaaaagacagtatccattgtagatactacaaagaacaaaagttcctcaatatgtatgttgaagataatctaattaggaagatgtgaagatagtgttgttgtcaataataccaataagaatttttatggattcctatttcttgacttatcactagtgcttttttttcaatatagtttgaatatattgatatgttcccattgattgttctacaaagtccacccccaacttccatcttccccactcttcttgaagtgactgtacctgaattacatttttcttttccttttcttttataattttcactaaaaaattatggcacgggctagatgaattgatgcgaccatatgtaacttgaactttcccttctaatgaacttgttaggctttgagacaaccaaatcaggagaattgtgtcaaatattgtcatcagtcctcctattagtccttgtataaactgaagtgatggaaaatgtagattactaaatcccatggttttattatttgcagtggctatttggcaccagagt

SEQ ID NO: 80166 - DNA, 619 bp, Citrus sinensis
  Intron number 2 from transcript orange1.1g023808m (locus o range1.1g017503m.g) derived from phytozome v7.0 (chr-ID sc affold00010; pos 2008777 to 2009395 reverse strand)
gagcgctgagcgtgaggctccacaaggcgtaggtgaggacttgaatgagttcttgtactgaacattacatgatatgttattggagctaatgaaaactgaaacctcgttaattgttccatgatagttacatatatgtagtagatttcgatgagattgacattgcttttcttgttgtcactgtggctttatttccttggattgtatgagctatatgatttaatcaatactttcattttgatgtgagatttataccattactaagaaagaatgggtcttgatatgaactgccaaccaatttgacatgtttgagtgtttttcttatatcactttgtacaaacagcaaatgaaagttctatgccggattataaagttatgaagttgcatttgtctatttcttcctgaaatcttaggcctattatggtgaaatggaagttattgtgagaaactgttctaaatgacccagtttaagcagtttgagtacacaatcttaattttaagtgatcttcttaccattttagatttgatttagttcaaaatcccattataaatttaactgctcagcttcttttggttggttctaagtaaattttgttgctctggctaggggaattactgagga

SEQ ID NO: 80167 - DNA, 547 bp, Citrus sinensis
  Intron number 1 from transcript orange1.1g014146m (locus o range1.1g012837m.g) derived from phytozome v7.0 (chr-ID sc affold00272; pos 176606 to 177152)
gtgaaatcatcagcgccgactctgtccaggtctaatctgaggctttttaattattattttttcattcttatcttaaatggagagagtttaagtaattatgaagtgggtagagctttgttttattgattggatattgtctgggatgaaaatgaagagtcaacgaaaaaaaagaatgtcaacttttgagtttttttttttttggttttatgttttaacttttaactggcaagtgttttgggataaattcgcctgaagggttcagtcagaatagatactactaattcattttttgaaacttcgatgaatggattgtttctgcttaggtatggttaagccatggttttacctaaatcatagtgttatcagatactgcctattcagattggttgccatgtgctcgttaggttttgttcgcataatattgtgtattagtgcgacccttttctctgtggttgtaacaagtactggaatctctctgaaagtgggttgattaagtgttctttgtgttacaggtttatcgaggtcttgatattgggtctgcaaagcc

SEQ ID NO: 80168 - DNA, 706 bp, Citrus sinensis
  Intron number 1 from transcript orange1.1g027397m (locus o range1.1g027336m.g) derived from phytozome v7.0 (chr-ID sc affold00070; pos 476447 to 477152)
atcaattcaaattttgttcctgctttcccaaaaaggtaacagataattctgtaatcggtttgttttcccgagaaaatccgagagaaaataattttcttttttctttgcgatttctcggcggccaattcgagttcaggttgttgctagatctattgattagttttccggatttggttaatagattttgaatcttaatctcttttaattgggacttgaactcgaattgcatgattggatcttagattgtttaattttgccatctaatgctctaaagttttgatttttattatgattgattgcagatagatggggtgcttgtgtaaagtttgtattttattttatagcgatgagttgattgttgtatgatgttttatttcatacaaaaactttgaaagttttgatattttggaaacttcttatttgtagtgttgtgttttgctaattgagtatgtaaatactaaaattcattgctgtaagatttgagttgttgttgcatcattaagaaaactgttgctgttgctgttgctgttgttaatgctggtgtttgagactgtatgtcatgactgaaacatttagaattatgttttcatattatattgcttctgtgtatctttgctgctgatggaatattgcttttaattatgattgtgaatacagatattgattggcaggtataacaacttttgcgagttggacttgccgagta

SEQ ID NO: 80169 - DNA, 318 bp, Citrus sinensis
  Intron number 3 from transcript orange1.1g009022m (locus o range1.1g009022m.g) derived from phytozome v7.0 (chr-ID sc affold00026; pos 579902 to 580219)
acttatgtcagtgtattttttttaattttctttttaattttaaattgtcattattctgtttacttaatctccgcgtgatacttgtatgtgcaaatggttgttatgtgtcaaattatgtcccaaggagtaaagtcgctgacactggtttcctttgagtttgtgctgactgtctatagtattcattgtgcgcttgatgagtatgtgctatatctgatgctgacttattttgctctccattttatgcttagctgttacattatagtgttgggttttgtgtgattatcttcatattgaatttgctgcaattctcttcaatag

SEQ ID NO: 80170 - DNA, 778 bp, Citrus sinensis
  Intron number 1 from transcript orange1.1g046679m (locus o range1.1g046679m.g) derived from phytozome v7.0 (chr-ID sc affold01076; pos 28421 to 29198 reverse strand)
gcaagttgcattttcagctgttaaggaagcaacaggtatgctatcttctgaatacattacatagatagataaataaatcagtaaatgtggacgtacagttgatataagatcgattgataactttttcaactgtatgaatggtaaaaacatttcttgattagtatttttcatattatatgagaaaaagaaacttgaatgtgattcagttgcctcaaataacatttcagagattggcatttagagctgttgaactgttgaataatttcatcatgctataagaactccaaggtaaactacctgttcctgtgttgggagagactcaatggaaggccttgataattttgaaacacttctatttggaaacttgtttatttcctcaactgattatatattgactattagacatctgacatgaagcatataaattctcttttggaagcagccattattagggtattctgagcaagttagtctgcagttagagttgtttcagcttataaacaatgtatttaacttttaaattcattcaatgacttagtttttgaggatcttaacttctggagttttatttcatgtgcattttcactgagccaagttttcaacattcgaacattatgaattaattaactgtctatgtcccaatgaatagtgagatactctggcctcccctatcaaatgctgtgtccttgactggttttgaatatttataattaaatttttgctcttttgtttttacacttcaaaaagacttgctgatggttgaatatggttattgtag

SEQ ID NO: 80171 - DNA, 391 bp, Citrus sinensis
  Intron number 1 from transcript orange1.1g001127m (locus o range1.1g001127m.g) derived from phytozome v7.0 (chr-ID sc affold00415; pos 117716 to 118106)
caggccgttgattttgaccgtcaatttcctaataagtgagtgcagttcaagattccttttctctttattttaattcgaagataattgatttgagttctaatttttatgtgacttgtttatttcatttttgcgagaaattaaaattagctgacactcaagagtagaaagatttgtttcattttttgctgaattgattaaagccctaataactgaattaaatttatcatttatctctctccgtgaaattgcttagaaaagcaaaattgaacattataattgtaatctgtcacaactgaaaactcgtaatcaaacatcaatatatgtaagcttaataatacgattgattttaatttcaggagtagggattcaaattcaattccaattgaatccc

SEQ ID NO: 80172 - DNA, 702 bp, Citrus sinensis
  Intron number 1 from transcript orange1.1g002039m (locus o range1.1g002031m.g) derived from phytozome v7.0 (chr-ID sc affold00025; pos 202835 to 203536 reverse strand)
ccctctctttcatctctcttgtactcgtttcgttggtacgtgttctccattaattaatattaacgataataatactaataataaaataacatcttaaacagactattattattattattgcattattttataaatttaactcgttaataatacgtatttaaaatgatgaatgccttaacaggtagaggcattatttattcaattaattgttaattgcgtcttttcatttcttctcctcctcctttctcgatcatttcagttttcgagcgggtggattatatcctgctgggaagttctcgagctctgtttgtgtaaattttatttttttccttcaatttattcaattatctccagctgtattggcttctgggatataatcaatcaattgatttgctatctcctgagtttcgttgtgatataaaataaaaaatatagacaggtgtgtactgggtacaaacaagcatacttgaatgaatttattgaattgactttaagaagacaattgcgatcgtgggttttttttttaaccccctaaaaacaaaatgaacttattgtctctgtgatgtgaaactccagctctcaagtgaataatgtgtaaaacgaattatttaatttgctattgcagtgctagatactcatttttccatgtgtttgctttttctttcagcagaggttggtatacctagttattcttgtattcaa

SEQ ID NO: 80173 - DNA, 695 bp, Citrus sinensis
  Intron number 4 from transcript orange1.1g043519m (locus o range1.1g043519m.g) derived from phytozome v7.0 (chr-ID sc affold00445; pos 129954 to 130648 reverse strand)
atttacttgtgtaagctacttctacgacttaccactggcggtccatgccctaaaaactgaaataattaattcttctgtatttgatgttttctgatttttctcaaaattgttgttttggggtcccctccttgccaagaatataatagaagatcaggatttcgctatttgccccccgaaaaaggattggtgggacaattttgtgttgacaatcagttaaagaacaatcctgcacttccaacctgagtgtgtactggttgtggtagccttaattttttgttccataattctattgctgcctataaatccattcttgaagggatgcccttttcttttttgttggatcccctcacatggatcttaatttaactgtaagttgaccctcatactttacagaataaaaaattagctgtgaatgtttgctctatttttctcatgcttacaatgcaaaacttttcacaatattgtaaattttccgccagaattcagctatgttttattttcctatcagataaggcttattcataaatacgatctctgcagagtaagggatgtagccagctatttgtaggagatgcagaaaaaatccccagtgaagtttgatggggttgttgttatgagagtcgaccaccaatgaacacgagatacgcctttgatgcctagtcttgacgagcttgccgatcacattccctcatcgc

SEQ ID NO: 80174 - DNA, 549 bp, Citrus sinensis
  Intron number 1 from transcript orange1.1g007825m (locus o range1.1g006875m.g) derived from phytozome v7.0 (chr-ID sc affold00010; pos 1645517 to 1646065 reverse strand)
ggccagccggacaggaaacgacctgctttggccaggtaattattattattatttttccttaataaataatttttttattcatttttattaactttggttggttaatttattagtcggttagcgagtagaattcgtttgagtttgttcgttgaatcttgacttggatataagtaacttttaatttggttgaaaatatgcaagtttgaaagagaatattcttaatttaattacagagagaaccgaaagctaggaactgattttggcttctaacggacaagaagtaatagtatgagcattttttttttcaagttcgtattcagattagatgtattctgaaacttgatcctgtagagacagaaaggtaaatttgagtaattggttgactctggtgtcagtcatattgattctgtgatgaaatgacctaggacctttgcatttgtttggcataactaggaataactgaggagcttttaagaatgtttttgttgctaatcttgttgttgtggtgatggttgcacttgcagtggttgtcgctgtattcagtgcaaa

SEQ ID NO: 80175 - DNA, 526 bp, Citrus sinensis
  Intron number 1 from transcript orange1.1g006993m (locus o range1.1g002316m.g) derived from phytozome v7.0 (chr-ID sc affold00361; pos 44630 to 45155)
agatattggaggttcgcttcttgtgaacttctgttactttgattttgtgttgttgttttggtttctctaaaaatttatatttctttgtttatgattggtgattaaatttcataattaattagaagtaatggactatgaatgaaaccacttcaatgcactaaagtgtaaactgaaacatgtcagttggatttcatacctttgtaatggaaggatgttgaaggcctttgtcaagatttcttcaaaattaacctcttcttttgggagtaaatttttaatccatattcatgtttagcacaagcggtattcatatatgcatgattctcagtgctacgctgcagttcatgcaataatattgcatccatttttcaattgtcatccatacagagaaaaacactaacacatgtgcttcaagttaaataatttctgacatttttcattgtaatcaatcaattgattgaacttcctcctttgtttgtcttcattctttagagaaaaactggtggattggtgatttggagatctggca

SEQ ID NO: 80176 - DNA, 772 bp, Citrus sinensis
  Intron number 1 from transcript orange1.1g008950m (locus o range1.1g008950m.g) derived from phytozome v7.0 (chr-ID sc affold00349; pos 109160 to 109931)
atcaagttgaggtaacatttattattgttattattattattattatcaggattcaaaatgttcttgcatcatcacttgtttattcatttgttgatattgtaacttgtttttattaattgttagttttgttaccttcattgtgaccatttgttgttaaagctaaatttcacatgtgaaatggggattctgcttcaagtggagattttatttgattttttacaaccctgtttcgttgtttgtaatttgtaatatgcaatttgtgttcattcaaattcatttgtttcgaattttatattataactgcatttctggtgaatatggctgtacaattgctgaccattctctatgcgggggatttctggcttttgattgaataaattatctttgaattttactgaaatgaatgaaaagacaattcacttatattgaatgggtcactgcagcaatttgacaattcgttgagtggtgataaagtctttgatgggtagcttctagaaaatccatgaaaatttcctctttctgaatcactatttttagatgaaatgtaaagtgagtgtagcacgattcacttgcaagtgtaaacatattaaatttctagactgttcattacatttctgttcgactgctataatcatattaatcagcattgaagtgcaaagtttcttcagagcaatttgaaatttttggattctctgtctttgtgagatgaaactgtttgcaaaatattattgatgcaggaaccacttgttacgccactttgtgagttggatac

SEQ ID NO: 80177 - DNA, 407 bp, Citrus sinensis
  Intron number 1 from transcript orange1.1g033479m (locus o range1.1g033479m.g) derived from phytozome v7.0 (chr-ID sc affold00038; pos 656299 to 656705)
ttccttgtaagtagtaataagtaaagcctctctctttatgttctgatttgttgttgatgactggctgatccagtgataagattgttgatttttgcttgctttttgtttgaatcaacttgaattcgtattcgttctggattctcctttgagaccatctggatttaaagttcttcttttacataatggaattttttttttcatatgtattgtttatttggttagtccacttcatgagttctttattgctgggttaattgtatttgtgaattaatcaaggtttaagactttgtgcactttgttgttttgtgatttgagatttactttgcgtatttatttataagcgcaatacaatggaaaatttcttccatatgtcattattgttcctttttagggttttaaattgtaga

SEQ ID NO: 80178 - DNA, 792 bp, Citrus sinensis
  Intron number 3 from transcript orange1.1g021847m (locus o range1.1g021847m.g) derived from phytozome v7.0 (chr-ID sc affold00299; pos 115414 to 116205)
gggctttcccaaggtaacaatcttcggaataactgatggatgtcttcagtttgtgatgtgtgatcacttgaattcccaaaacattttccattgagtttcttaatatagtatttaagaaccatatattctatcatttggagtaattattaagtatccgtcctatgaacagccggcagctctaagttatggccttcattgtaatgtaggaactatgcaattcaccttaatgaattcaatctcttcttttgcccatgatacgaataaccatgtcatcattttttttcacaacacattaatggttgatgattcaattcaatgccccatactggattttaagtgtttgaactgttgtttgaatcaattttcaaacaatgttatctttttaccaataactttcgctattgttgaaaaatttcagaagttatagttggaattgcttaacttcaaagccagttaaaaatttcaatgaactttactgggatagctgtctgaactctgaaaacatgttaaacaagtgagtttgcatgataatctctataaatactctataaatacgttcgactgtaaggtctcatgataatctctataaatactctataaatacgttcgactgtagggtctcataactatctgcttttaaaactttcgtctggtacgtttcagacacaatatgatatgtgatacgtggttagtctgctttgcaccttggtttttaattagttccagtataatattggcttgttaccattttgaacagagtgataattcttcgttcagcttattcgcaatagc

SEQ ID NO: 80179 - DNA, 439 bp, Citrus sinensis
  Intron number 1 from transcript orange1.1g025395m (locus o range1.1g025395m.g) derived from phytozome v7.0 (chr-ID sc affold00010; pos 2087844 to 2088282)
aaagtccattgcatccgaggtattaaatttcttttttttctttaggtgtcatgacttcttttctgttgattagacttattatgagccctttccgtacttatggctgtggctttttaactaaactgaagttatgttataattgtttgctgaaaaatttataatgcctttatcatttttataaagatattagttacaaatcacatttatatttttatatcacacttacactctttaaagctacgggacctccggcgagtccggccttatgcaaattcacttcacagcacttaatctcacgaattaaaaagttaaaggaatcattcaattgtcctaatcaagatatagtattgatcagcaagcatgctcgatcaattgaaacaaacgcaagtgaaatacttgaaattggtttgatttgaaatgtatcaggtctatagttgta

SEQ ID NO: 80180 - DNA, 843 bp, Citrus sinensis
  Intron number 1 from transcript orange1.1g039627m (locus o range1.1g039627m.g) derived from phytozome v7.0 (chr-ID sc affold00476; pos 77004 to 77846 reverse strand)
ttggaagtttccttcctttctacctatcagtccaggttagttcatagaacttgcaaacatccatcattcattattgttgtcagttaaatttccgggcttccacttttataaaaatgtcaattgagtattttctgagatggaaaattatcaattgttggtccgaattatcttacctcaaaagtttgaatttgtacggcggtttatgcaaagtttaccgattgtatcagtttttcacatttccattaacaatcagcttttcacatttccattaacaatgttaaaagcgtcttgctcttgaagtgtagtttaatgacaggtgaaaaaattgatacttttagcaatcattgaggtaaaaaaatgataattattggataaaaaattgatttttttggcaaatgacaagatattaaatgtccaaatcactgttatgacatcatcaatagttaatctctattaatgacaagaaggaaaagtgatataatttgttgatgaacaaattaaaatttttgggatatgttttaaagattgagaaaacttgataatttctctattggaaaatgattattagggcattgagagggcaagcgggcaagggtaaagtaattaaatagtcataacattattttgggggctgactttaattataagcataaatcaacgggttgaacagatagttgtttttggtttgacacaagttcaattttaatttcaaattgaaaattgatgctgcaatatctcttataattaagttctaaaatatgctgtgagttcaattcttattctgcattttcattttctttcaacattacaggaaaattgctttgctactgtcggttgacatac

SEQ ID NO: 80181 - DNA, 590 bp, Citrus sinensis; identical to SEQ ID NO: 79777
  Intron number 1 from transcript orange1.1g032232m (locus o range1.1g032195m.g) derived from phytozome v7.0 (chr-ID sc affold00067; pos 514900 to 515489)

SEQ ID NO: 80182 - DNA, 500 bp, Citrus sinensis
  Intron number 2 from transcript orange1.1g004879m (locus o range1.1g002589m.g) derived from phytozome v7.0 (chr-ID sc affold00007; pos 1382095 to 1382594)
gcagtgtatttgtgcctgagcttaaggaatctctggtatttcttttttctgtagatttgaattttatagctgactgttatttcttaatccagcaattgagtatgcgacatgttccacgcaagtactttatcattcagataactgactggaaatgatgacttattattttattttgatttgtactttgcaatgcaacttgtagttggtatttgtagtttaatttgacaatgaacattggtaaaactaaggaagtttaatttgacaatgaacattggtaaaactaaggaagtttctttcttccaggtcttaaattgcgatggtggagaggagctttcaacttcccaattagataatctgataagcatgataagaaatgctgagaaaagtaattacttttagtgtgtcttttctttggtttggtgtcttgttatcaatttttggaggattatatgcgtgtccaattgctcattgtacatatatttcagatatccttcttctca

SEQ ID NO: 80183 - DNA, 880 bp, Citrus sinensis
  Intron number 1 from transcript orange1.1g025785m (locus o range1.1g025770m.g) derived from phytozome v7.0 (chr-ID sc affold00415; pos 64036 to 64915 reverse strand)
tggaaacaagaggtgttgaatccatgactgtaacttcttgactgttttgttgagatgggttgttttctctagtactgttttggtcattgattggggttccatcaaatggttatctcagtttatgtatttcccaacttcgctatttagaacttgctacacttgagtttcacaataatcatagctgccagatcaacctgtatgatgatggtttcacaatgattttagtccacaacatattttttgttgttgatagaagttttagatttcctggttagttaaatcctattaaccattatatattgtatttgaaacttgtattaatatatcataacatctatgtgacgagtcagtgcataatctgtgtggatgtgctcgctctggattattgaaatcctcttcttttttctgtcaacagtagtgggagaaagaatcatctaaaagggtttattcttgtccgaggactatttcgtttattattttctttttgtcttgtttatttattgcctgtgatgaaatgttgaacgggtctacacacacacacacacacacacacactaagtgagtcgctcagatgtcctccagtgtccgaatgtttggaaaaattgtatcataggtgggctggaatgattttcaggttcaggctgtaattctgttcttttatgccaaagaaatcaagttccctgttcctagtctatgccttaagataaatatacatacaagtgcaacattttgtagtattttatgaaaatttaggttcttgagtaggattcttacaattgcctgttgaagtagttttgaatgttgccaaaccaattaaattaacatgctcttttggttgtcttgttgtagttttttccttttttcttgaaagattggaaga

SEQ ID NO: 80184 - DNA, 708 bp, Citrus sinensis
  Intron number 1 from transcript orange1.1g005099m (locus o range1.1g005099m.g) derived from phytozome v7.0 (chr-ID sc affold00430; pos 60468 to 61175 reverse strand)
gcaagcagtttgctgctgaagagatttcggcccaggtaaataatatatgtgagatgaaatgtgttgtatttttaggggtattgttgaatttttgtttatgttattttttttttgtttagtttgctttggaattacttgtggttttttttatttctattgagaatttgagattttggaatgtgttgtttgggtgtttggattgggtgctaattagtttagtgatggtttttagtttgagttggaaatttctggttttaggaagtgattctgcagtgaaagaaaatgtaggtgtctgcatcttgttgaattttggtttttggattagggaaataggttttggttaatgttggcttctatatggaacaataatttcttcttgcaagttgaagagacaagtacttttatgttgattagttaggtgtgtcaatgggtggttctataaactttgtttacatatttagggaattttgtttggcagcagatgtggtcacactgaagattggttttgtaagacattcatatatgtgcatgaatacatgtgaaagtgtgaacaatttgtattcacatgcatttgtaatctgtgatatgcgtgctggctatgaattaataaacaacatgattacttcatcttaattggtctatttgaaggttaccttatatcatttgtttactctttgttactgatttaggtcttgagaaagcttgtcg

SEQ ID NO: 80185 - DNA, 959 bp, Citrus sinensis
  Intron number 1 from transcript orange1.1g007249m (locus o range1.1g007260m.g) derived from phytozome v7.0 (chr-ID sc affold00007; pos 2598326 to 2599284 reverse strand)
gcaaagcactgaagttttttgatacttgagatcaggtttttttttttttttggagtctgttgtgttttgcttgatgggtttttgttcttatgttttagcttttgtatctgggtatgcacttaggttgttgttttggatctgtgttggctccaaacaaaaagatgtgatttttgtgatcaagatctgatttttatgttagcttgagccttgatgatcatgcttgtattatcgattgtgatgatatttcattatctgattgagattagctagctgaggtttgtcttttaactgcattatttagctggatgacttaacttaattagctgattttgtagcttttttttttggtgatcctatccttgaatcaattttgttgttacttctgtatctcttcttcttcttattattattattattattttatatgtatgatgttcttttgaggactgattgcgctattgaggaggatgttgtgatctttttttaatctaatctgcccccgcaccccccctttttttccttatcagtattatttgtctgaaaaggtctgctcattctgtgcttgaatcttcttatttcgttggggtaaattaattgtatttagttattgggtgttaataagttcttcttctgtttggttatcaaagtttgcatcttggatccttttattgaaaaagatgtctctaagtttagtggctaatgcgtgtccatacttagctatgagctgatttttaggccacctgttgaatattttcgattttctttcttaattcaggtttcaaatatgcatggagaaacctctctctctctctctctctctctttttcttctgggcattttagaaagatatattgtcgtatccgagtgcagcatgttgtcttaccctagtttgatgtctctaataaacttggttgctgtgtgcagatttgggagagaatttgctaggcttttgattgctg

SEQ ID NO: 80186 - DNA, 1012 bp, Citrus sinensis
  Intron number 1 from transcript orange1.1g047245m (locus o range1.1g047245m.g) derived from phytozome v7.0 (chr-ID sc affold00081; pos 299575 to 300586 reverse strand)
tttccaaaatcgcaggtattcaaatatgacactcaaactgcactgttacttattaaatttttaggtctgtgcatgatgcaaggtatagtgaattttaagtaatgctgatgatggagatacaagaagtatctcacttttgaaattcgtgatcagtgagtctctccgcaagctcccattaataattaaagctttggtacttgcttttggttttcccttagtttctttgaattgtgagaatgggtacaatttaatcctatcgttattagcaactcagatttttgatatacatggacattgtacttgtatggagcttttaattttatctcttgctcttggtgtttatggtattaactagaccctggatgtatgtgatatttgattaccagtatcattcctgatttgtgtgtttatgttgatgccatgaacttaatctgtaggaatgatggtatttaggctaaaatttcagttttattcttaggtgaatgtcagattttaacggtccaacctaagaagaaacctgcatttatcaaaatttgatgcttttaggtgaaatcaagcccttgggattagttttaagcaattttttttatcagttttgttctctcttgtttcgtctctgctttccttggggaaagaaattacatttccgtaattgaagattgttatctagctcttgtacttttttcatgaattcttatagctttgccacgaggtctgctgctagcttgatttttctggtttactggattttcttgatactgttagatggtctgactcaaggatctttctctaataatgaacttcatctttgacatcttttttttttttaatacttatcatcattttttttctctttttctttctttatcgcggcttggggtggggggtgggggggaggaggttgaaacaattgcttgaataattacgtaccgctataatgatgaggacttttttccccctcctttttgttttgatagctatacagataagagcgacatcttcagctttggga

SEQ ID NO: 80187 - DNA, 687 bp, Citrus sinensis
  Intron number 4 from transcript orange1.1g015563m (locus o range1.1g013023m.g) derived from phytozome v7.0 (chr-ID sc affold00007; pos 222057 to 222743 reverse strand)
tggtgagctgggctgtgggccttcccaagcgagctgtaagtggacctattaaagcccactaatttgtgccaattgatcactagtatttcattgagatcgatttctttgattttcggtagactttccatttaccacttgccatattcacagtgtttgacgatgtatgaactgctgctggttcgattcgattcatatgaatgaattaattaatatttgcttagccacgtggtgtttgtgtatttcttcttgcattaccaaggtcattggaaatgattttgattttgagagttttattgattacatatcacattcatgattaaacaattaataaaaatgtaaatatttaaacatgtcttgatcacacattacagtagctgtgcatcagcccatgtgtagcatgctttctggaagcttaagaggaatttaaatacttttgcatgccgagcttggaaaacaattgcaggtagaaactgattaatcatgtcagacatatgtttgatttaaaagactgatattattattatgttgagtcataaattaataatctttattgcaacgttgagttctcaattgtctcattgcgattttctcccagaaatgtgtactcataatatcacataactgtattttttgtgtagcctattgattcaaaactcctgaagctcttaatccctgttgctgtgtgtc

SEQ ID NO: 80188 - DNA, 490 bp, Citrus sinensis
  Intron number 1 from transcript orange1.1g003021m (locus o range1.1g003003m.g) derived from phytozome v7.0 (chr-ID sc affold00132; pos 122259 to 122748 reverse strand)
cgcattcacgcctcctcctcttcttcttccaacaggtgatttcatttcaaataattcatatgattacgtggcatttgagttgaatttaagtttatataatggcgccgatcaactttttgtttaatggaactagaccggagaaatgtcaaatttcttttgagtatttatttttacttatttattatgaatgttgttattgttcttcttcttcttcttcttcttcttcttcttattattattattattatagaattgaaatatcgagtgattttgagattaatgtaactgaaaataaaggtgttaaactgagtgcatgcagttgctggagcttgtgtttatagagtaaatggcagctaccctgcctttttcaagctacgtttaaaatgaattttgaatttttcttttcaagttgcttacaagtactactatgctctcactctgatcattattttcaggaaattgattccctgcaatctttggtggttccatt

SEQ ID NO: 80189 - DNA, 756 bp, Citrus sinensis
  Intron number 2 from transcript orange1.1g012739m (locus o range1.1g012739m.g) derived from phytozome v7.0 (chr-ID sc affold00067; pos 141661 to 142416)
gaggtgagtgtgagattgtgacttcatttactatctatttgtattcatttgctctctctctctctctctatctctctctttgtttccttcgtttattcctttcttgcttttccttcctcttaatatatatcgtgcattacaaatctcaataaaaatcaatgttaattctaataaaaatatgcttataattggaggtttctggattaaatgttcactctttccactcttgacaatgtaaacaatctcacaattaatgtaactctttcttcatttcatatttatgatgcaaaatctcaaaaaaaattcgttattattggtcataattattctgtatgtttcttaaaattttcattacagttataagagttgttgtaatgtaaaatttaatgagtctaatgtacaattaaggaagtttaacaaaaaaatttagataactaatttgggggggggggggtggctcaccgttgtaacaaacaaataacaacagttgtaaggtagtctggtctcatttaaaaaaggcactcgtatgttaattttgactttctagtttctaatcatgttgattatgatttaagcaactaaaaatagagttgacttagaaactcttctctctcactcaaattgtttatttatctaatcattaacttttctaaagtatatatggcttctaattcaaacttgctcacgggtgcaaagacaaataacaagttgtcgaatgtaggttgatttgttaagccgcttgcattctcctcaatt

SEQ ID NO: 80190 - DNA, 697 bp, Citrus sinensis
  Intron number 2 from transcript orange1.1g034932m (locus o range1.1g034932m.g) derived from phytozome v7.0 (chr-ID sc affold00004; pos 3382179 to 3382875 reverse strand)
tccatccaggtacgcagtacgctgctgctaatgcagtaatgttattagattgctcttctaatcttatcctctttatcatttcctacttatctgatcagtttgattgtcatgtaaaagtcaaaatatcgaatctcgatttttgggtttagaatggttgattttaattaaagaattggttaagttaacaagcaactcaatttgtatgaatggtttgtactttgtgaatttatgtgtatctttttggaataaaaacatatattttatctatgtatattaaaatttgtatctttttgtcttttatcctattcctaactaatcacggatctctctaagaacacacacatatatatatagaggccagcattgtcagatgtggaggaaaatcattaatgttgaatttcacatgagcaattgaggcaactcaaattgctttgaattatttgtgcccaaggtaaagggattagaaaactggttttactattgctccttagtcagttattttgttgaccatggacactgttggtggttatcgcagtcacagactgcgaattgctgtgttgcttgggtacaatacttgtcactgtcgtcttcttgatgttgtgatgtttagttattcaattgtgaagagggatgaatgtaacagtgatgagagaaaatcatttttttggttttgttgctgttgattgcagtgcaaggt

SEQ ID NO: 80191 - DNA, 533 bp, Citrus sinensis
  Intron number 2 from transcript orange1.1g013091m (locus o range1.1g013091m.g) derived from phytozome v7.0 (chr-ID sc affold00060; pos 595556 to 596088 reverse strand)
tgcaaagtaagttatacaatctctctcctatccattcaattacccagtttcatagagagcagataattttttgtttgaagaatcaaaaccaacctctttatatgataaaacatgttttcattgtgtacctactctcccatgatgagtaaaaactgataatcatttgcataatttagacttcaaagcttcttcttaggcaagtaagatgatactttcttggacgttaagtgaggccgagcattatattagcttaatcggtagaaatttctgaaatgcattaagtatcttttgaatttgtcctgctaatttgtggttatatcttaagttttggtcctgctacataatattagcttaatcagtagaaagttttgtaatgcattaagtatatcttgaatttgacctgcttatttgtggttttatcttaagttttggggtcctgctactcgttggatacataattaactttttcctcattctttaactgactaactaatgacataatgtgcatgcgtggtttttgtagttgtggagcc

SEQ ID NO: 80192 - DNA, 265 bp, Citrus sinensis
  Intron number 2 from transcript orange1.1g048390m (locus o range1.1g048390m.g) derived from phytozome v7.0 (chr-ID sc affold00224; pos 197117 to 197381 reverse strand)
cggtggttgctatcaggtagtttataaataaaatattgtttaatgaaaattaatcaattaatattgctttgtatacaagaaatcaaatatgcttaaccctttttatggttcacgtcatacgtacttattaaaatattcttcacgtttttttttactgattctaaatcttttcacagtttattattttgttagatgtgacattgagactacttaattaagagtggtgcatgtttgttagtttggtcaagtgcacaaagcatccagc

SEQ ID NO: 80193 - DNA, 553 bp, Citrus sinensis
  Intron number 2 from transcript orange1.1g044126m (locus o range1.1g044126m.g) derived from phytozome v7.0 (chr-ID sc affold06205; pos 1545 to 2097 reverse strand)
agattagcagacgccattattggctctgataccaagtagaaaatcaataatatttgaaaacagagaaaactttctttgttttattatcacaaaatcataactacaatgaatctgtacattatttcttttatatacatgagtagcagatttaactaactctacaactaattacaatagctaatgagctgattataactatctaacaaactaatgagcacaaggaatgctgtaacagattttcctaatcttcacgtgtgcaagagattacaaaaccaccaggctccagctagcaagccatgtcatcaacttgtatctgtaagctgcaggtgttacaatcctctgcttcactgaccattctacacatatgagcttccttaacaactgtaacccctgaaaaattcaacagcatcctacatcaattctaccaagtaataatgaactttcttaggagcattatcattttgtttttttttttttccccaaaaaaataactcatatctttgaatatggatttccagaaatcctcaagcagagatactgaaaacttcagtga

SEQ ID NO: 80194 - DNA, 965 bp, Citrus sinensis
  Intron number 1 from transcript orange1.1g039560m (locus o range1.1g039560m.g) derived from phytozome v7.0 (chr-ID sc affold00004; pos 1223095 to 1224059)
tccggtcgtctcagtcatttttctggcagaaaaaggtgattatatattttgtacattttgatatttaaatcgatctacactcttggcatttgagaatttgctataattattttcaaatgaataagtataagagcatcttgatgagtttctattcatcctgattttgttgccattgattagtattgattctgtgagatctttcatggctatcgtttatcctataataataataataggcgctttccactatttctgaaaagttcatgtctaaattggtttctatatcaaaaatacaaaacaatcaatttcttgtttatattttttctttcaattaattttacaaaacttgtgtaacgcaaattactagagcctaaaatggtatcacgatctcactaggccatagccacataaattgtaataattaaattgtaatctacatgaaataatgccatttacatatgtgccgacgaacatcgttctttctttttctttgggatcaattaataattctctgcatattatatttaattaaagaagaaaaaaagttcgtgaattaggttgtaagcatccctagtgaaactaccgtactagcactagtattttcttcgggttctcgcttgttagctccacatgcacagagatgcaccccttttctttgtttattttatttatttgttttgaatttatgcagctgctaacttatgttatatgcgacttacagcaacccatacctagttaccttgaaaatttttcaaaccatcaacaactgcaaaactacataggcttttggttttggctacgtacaacatatgtttcacttaaaaatcatttattcgttgaacaaaacaaataaactacatggggttttcatttttctcactttgattccaatttcttatgcctgctgcaatcatttattcgttgtttcacttaaaaatccaggatcgaggacgtgttttctcgct

SEQ ID NO: 80195 - DNA, 989 bp, Citrus sinensis
  Intron number 2 from transcript orange1.1g003046m (locus o range1.1g002382m.g) derived from phytozome v7.0 (chr-ID sc affold00115; pos 76803 to 77791)
aaagaagccaaaacaaacccagaagtatgatcctcttaaattattaaagtttgctgccgctgcatgacttgatttaaccttctcttagacaaagcttatttaaattttatcagaagcacgacccttgaaatttttgcttaatcgtattgttactcacatatgttattttagttcataattacatggttttaggctttttaatgattcagtagaatggcaagcattgctgatggaattttaattccaatcccattcctttccaattgtctcttgctcgtgaagatgtgatttcataaggcttaagatgaaggcagggcaaaatcttgcagccacaaaatgcgttttggaattcgtattttccttaaaatttaactgatgttaggtgatccttatgacccatctaagttctttccattgagcttgattgatgtttcttggagacgcattaaaacatgaaaggtcaagaaaataattcatattttcgaaagtggctgaaatcttttaactaatttgtttcaatcattgactaataattgaagatgatccctttcatatatttaccagggttaatgtattttaactattatatccttttttttttccctacattaatcatggagatgtaatccgctctttctaatgtcaaattaataataaggaaggtgttcccaaggttgtgttgttgtaggaatgagttttctaaggatgtaaatggtctcatttgattctcacttctcgtaaaccatgattcaatattacactggtgtggtctcttttagttctcacttctcgtaaagtattattcaattttacactggtggtgtgtgtaattcaggaatgtggttggcaaagtctgcttttttaatagaatttcattgtgtttaaaacttaaaatttgaaatgtatccagttattctatactagtagtgctaacacattgcatatgtgattcaggttttgtgagtttgaactgtgggggtaacgaaaat

SEQ ID NO: 80196 - DNA, 796 bp, Citrus sinensis
  Intron number 1 from transcript orange1.1g010433m (locus o range1.1g010433m.g) derived from phytozome v7.0 (chr-ID sc affold00027; pos 304932 to 305727)
atcttggtgtttctggtctgttttttcaattattgtttattctttttccctcatttctaattattcattaacgttttcacttccattctgggtttattctgtttcttcttgttgtttctttgcgaagtgttgttagaatgtttatcaactcatgaacttgagttttttttttcttttttctttttccgttcatcaagtttttaaagaacaaaaaagaaatttatttgttattgttagtatcatcatcaagactgtttttgtttctggagtcatcattttatgataaccaatgtaatttttcttttgtttatattctcattatcattcttgtcattttgactgatattacaaaacttagaactattacttatatatatatatatatatattattattattatttttttctttttcctcacaagttggaccttagttcaaatattttcccaaaataaaaatagcaataatatttattttttaggccagtctgtttatcttgacttgtttagctttaaaacaaatggcaacaaccatctgtttgtgatcacgatgattgtggatttttcgtttttggggtcgttgagtttcattatgcatcttcaataattcagtaaagttagaaattgcaatacagtccattgatgtgcagcctcacctacacacggaccccacatttgtttatcattatgtttcctccaatccaaatcaacaaagaaatggtggtgcccttgtacaattaatcaaagaataattagaaacttgtaattgaatttcatgttcaggtggagtgacttcg

SEQ ID NO: 80197 - DNA, 872 bp, Citrus sinensis
  Intron number 2 from transcript orange1.1g019393m (locus o range1.1g019393m.g) derived from phytozome v7.0 (chr-ID sc affold00004; pos 3222620 to 3223491 reverse strand)
acacatactgttttttcgacatttggaaagataaggtgtgtgtgtgttgctgtggttttgttgctgtttatctaatttggactggggttgatgtgctttgagttaaaaggaaagaatagtgattcaaagtttggttcgttgttaattattgcaacgggtttatgccttttggaaaagttaaaagattttgcatggaaaatgtaggacgaaccatttttagaggattataagctgtaagatgttgaactctacatggatgccgatattagttttgtgattttggttttagatttggggttgaaatctttggtagatttctgagtattgaattgcattaagtttttgtctttttccccctctaggaaataatggatatacttttctacttcggtgaacattatgtatgtcaattatcaatttagttttcaagctgtgatgcagtctcattcctctatacttgacctacgcagctggatagcgatatatttgcataacttgcaataattaaaattgaaatatattccttgaaggtttcttcttaggatgtgtgtctaaatcctcattctgtggttgaatggtttgagtagttttgatgctattcatttcactttgttagttttcacaactcaaaaagcacagagaaaatcatctgactcataaagtttttactttgctattgaaaacaatggctttgtcataatcgaatatttctgttcatactatggcacctttaccatatttcagctgctctgtgtgcgcacacatttcgcttctcagaagactgtgttgctgacattagaatttggtgtgatataatctgattgcttatcatccttgtggtttcgtttaactcataatcaataggaatctta

SEQ ID NO: 80198 - DNA, 822 bp, Citrus sinensis
  Intron number 2 from transcript orange1.1g015038m (locus o range1.1g015038m.g) derived from phytozome v7.0 (chr-ID sc affold00016; pos 66600 to 67421)
gaagactgaagttaaggaccaaggtgctcccttggacatctgcttatgattttgttataaaatgtcattgatatatgatatcaacttagatcactggacactccatttggcatgtttcttttttccttttttttttctcttatttatttgtgctagccactcatagttcatttgttcacgtatcattgttatgatctctctacatactttttgtgtatgtgcttggcactcacttaacaatttagtgctttaacatttcctttcccagcctcttttaaattcctttgtgaatgaagtttaagtcaggttttagtgtaacatatgtaaaggtgaagttgcatgaaatcaagaactaaattggagaaataccactccacatcttgtattttatctatacgtaattatctgtttcataaagaacattttgaccaatacaaaatgtcaaggaaactctccttttgacaagccaagtctccttaatattctatatctattactattgtggtcaaggaattggaccctaggtagttagtaggagaaatttctttccagctaggtaggggtcaatggattgtttatccaatctaatcttctctttaagacgattatagtctgattaaagcttgaaatcaaatgcagatatgcacccctgagttttgcctcagaaaaagggggaggaacagggctgggtactatattacgtttagaaaagaactgccgatgtgtgattgtaaaatttctttttctttacttctagatgcagtggtgcgctttgctgtatacctgttctcaaatcctcttcttttggtttgctttccagga

SEQ ID NO: 80199 - DNA, 551 bp, Citrus sinensis
  Intron number 2 from transcript orange1.1g017679m (locus o range1.1g017679m.g) derived from phytozome v7.0 (chr-ID sc affold00036; pos 450343 to 450893 reverse strand)
ccgtgactgtaatcctctcccacaacgaaattgctgtaagcatctctccttcctcatccatttgattttgatgcatgcagcaacacctggcctggctcttagtataatggaactgtttgtttggtgaccatgattgaaagacttaacttctattcgttgaatatagatagatatttgatatccacatgctggttgtctggccggcttaatcgtttttgagttttcaattgcaatcaaaaacttggattttccaatttaaaatttaaacttcaataattttgattcttattagtcgaaagaggctcgggtttgattatcctattttactttgtatttatgttgaatcgatgagtcactaggtatatcaagagagagattatcttcttcttgctgaaaatactgttaaattactttctctactgttatcatcatcatcctgagttgtcttttcattttaatcattttgttttccttttatgcctcctttaagatcctatgtggttgatatttgaggttcaccacagccaatctacagaccgctaccgtaatag

SEQ ID NO: 80200 - DNA, 632 bp, Citrus sinensis
  Intron number 2 from transcript orange1.1g031806m (locus o range1.1g030353m.g) derived from phytozome v7.0 (chr-ID sc affold00312; pos 57567 to 58198 reverse strand)
aagctagtgaagctgatcaccacacagaagtcagcgtaagtaaatatgaaatgttctatttatataaacaaatgcctggttttctagtaatgattattgaatttgcatttgttattcatgttttcattgtgcgtggttagtttaagtattgctcttcttgcttttggaaatattttccccccaatattcatgtttagattttattcttaagtggtattttcattcagtcatcttaagcaaccttaacctgctactggtcttttctaccttattacaacatctctgagtctctggcttctgcaccactccttctgtggagccttcttcttcatctttcaatcaaaatagccaatgccccctcttttaagttagcccttggaagttcctttagatttttctcagttagcatttaatcatcatcagccagtcctttttttttccccccttttctttcaatattctttttctcgacaattctattcaaactcacccatttctttgaaaaattggtaggatagggttcggttccacattcatttatctactcattatgatgtgtgaaggatttgatttatgtcttaagcactgaattttttttttcattaaattgcagcccattaggaagattgctg

SEQ ID NO: 80201 - DNA, 719 bp, Citrus sinensis
  Intron number 1 from transcript orange1.1g031806m (locus o range1.1g030353m.g) derived from phytozome v7.0 (chr-ID sc affold00312; pos 58223 to 58941 reverse strand)
acccccaaagacacccttgacctacgcgataaactgtgagtattttattttattttttttttcaattgtgattcttatttcggaaattttgtttcctggggtttttcactttagtgcttgtacattatgctgtaactgattgtactctccgttgccgctagtgtaatgttgatgacaaaattaacaaacaaataacacttcttaattaaccattggttgattaatgtgattaaaaatatgtgcttttcaattttcatcactgttgatgctgttctggtttttttttaaaaataaatttatattttttttcttcttttgcggatgaagtttggtgtagtagaaattgcaaattgtcaatttaccggaggttatagtaacttgtgataaatttttttccatcgttttcttcctaatcttaaatttaactggtcaactttttagcctgacttttctctttgtctgaaatttatgaagaaactagagcgaaaatctgtgatttgttttcatctactgttattttttcttaattctcaagtacttttcatggattacaaaaacaacgggcatatgccttttgaccttgtatattttagattcctttgatatcttgaggtactatagaaagtaaaatttgaatcgtttgtgtgtgtttgtaactttttattgctttgaattggctggcagacacaaaacaaggctacatattgggcaattggtga

SEQ ID NO: 80202 - DNA, 663 bp, Citrus sinensis
  Intron number 2 from transcript orange1.1g027216m (locus o range1.1g025385m.g) derived from phytozome v7.0 (chr-ID sc affold00151; pos 67870 to 68532)
ctcaagtttctatcaacctttctatccaaaaggtatggctattattatttggcccttttcttccatttgttccaaatttatcactacaggtcacttaagtattttaggaactaatgcacattagttaattgtttactaaacactttgttgtaattttgaaaccaacttagctaataagcatagtatttacaattgaacatttgttaccgttcatcgggcatgcggcattttgcatgcttgtgtttaattcttgaaaaaaaaaatcaaattaaatgcctcccaatcaattatgaaacttttaaagtctaaaacattaaatcatttgtattttacataaactcaaaatcatttttttaatgatttaatttttaattgtcaaaccacttaaaggttatgagaaattaatattgagcaaaatgtaagttacagataatgcgacttagcagctgccctaaaataaattgatttaattgtagaattgctacaaactatcgtgcactaagtaattatttattttatccatctcattatatcacatgatgagttgtataaacgtcacgtatatgttgcatcaattgcgatataaactggacatcccaattttatatatatacaacactactctaaagttctatttatttgttttaatctgtttactatagc

SEQ ID NO: 80203 - DNA, 872 bp, Citrus sinensis; identical to SEQ ID NO: 79653
  Intron number 1 from transcript orange1.1g034388m (locus o range1.1g034332m.g) derived from phytozome v7.0 (chr-ID sc affold00016; pos 196275 to 197146)

SEQ ID NO: 80204 - DNA, 443 bp, Citrus sinensis
  Intron number 1 from transcript orange1.1g014905m (locus o range1.1g014905m.g) derived from phytozome v7.0 (chr-ID sc affold06551; pos 791 to 1233)
ggtaatctctcaatttgctttcttattaattttttttaattattattattattttttatttttctacgccaatgccttttgtttcttttgatctatgttaaacgttattttcaaaaaacaaacgaaaaaaaaaacttttttgtgagtcttgtaataatggggggcctcctctgttcttttttggcgggtatgtaatgcttattttgaatgtcagcatgatgactttggatcttcaacatcggcatagtggataatgccattgcatttaacgtgctaaatggattagttgcttgtgagaaattaaaatgcaattgaaacaacaatctaattgtgaggcgttgccgccgttgatgtttattatgtatgaattttatcaattgtctttgtcgaaaagctggctgaactggttttggcaatagccggagactggttgcagggtccgt

SEQ ID NO: 80205 - DNA, 859 bp, Citrus sinensis
  Intron number 2 from transcript orange1.1g040345m (locus o range1.1g040345m.g) derived from phytozome v7.0 (chr-ID sc affold00060; pos 11043 to 11901 reverse strand)
taactgacttcttccaaaggtaaccctacaactttgtcggtgctcacatctaatagtactgtttgcatttatcctacattttaattttcagaattcagttcttggggtgtaggactggaggattgaccactgttctttgtaactgttatgtgtgttagctcattgatgtttttttgtatggaaatgattattatatttcccatgattgatcataaaaacttaatggggactggacccatttgtgattttgtggatgtaaactccagactaaactttgtgcgagtaaatcaaagccaacttgaaaggatatcttccaccggttaccaatgttgtcatgaatattctttagccttcactcataattacatattgactgagttaattttctggatatgtgtttactcctagttcttgtttttttctgaagaaagtgattgtgatttcacataagttggaatattccatgttgaaatataaaacagtgtgttctgtagttaatattatgctgctaccagcgaaagatagtttgcagggaaaaaaaaaaaatcaagcgtttagactcatccaaagggttgagcgagtgcacaattattgatcttcatgccctctctatctctctctaagttgataatgtggaccagcaagtcaatatttggtaattgcactacacgctgccgcttgtcatggtgcatgtgtctgtgcgtgaaatattgccctctcacgaaacaatattatgatgctgcttaatgttcttacagtggtgcctaagttactttttacgactcatccagcattatttggttctgaaactaactttggtttctcatttattcatttcaggcatttaacagtgacctga

SEQ ID NO: 80206 - DNA, 895 bp, Citrus sinensis
  Intron number 2 from transcript orange1.1g006942m (locus o range1.1g006942m.g) derived from phytozome v7.0 (chr-ID sc affold00273; pos 18884 to 19778 reverse strand)
tgtgctttcatttctcatcgcagctaatttatgtcagtattattaacctaaaagtttcaagctaacacatatgcgattgcagataaaccaattctcaagttatatcgtccatgtatagcttgttttaaccaaaattttcttttaaaaacctcaaggctagcaagctctaaaccataattcataaacatatgtttttgacaactctgatacggaagctactttggtgcgaatgtttgaaacaaaattctgtgtggccacagagtttacaacattacaaaagttgttcacgaaaattataaaatttgacattccgcacctgagttttcgctgtgatacgtatttttgaaattccttgacatgaacattaatcaaataaattccttctttttttgtacccattctttaataaaaaaatttattactttaatacccattaataaaataaaaattttagataaaataatataattaattctttgtttaaaaaatgtttacacataacgcaaccaacttactgaaaccccaatagaaatatattagaagggcaaaatacttcgaagatgaacccattatcatgcaatagtttggaactcttgaccatatcgaaacgaacaacctgttcttcttgactatccaccgcattaatttaattgattacctcgattgtgttagtaattttatcgaatgcatatttaattgtttaaatatacacatttaatttttttttggctgctttcatataatgtgatccgctaaaccaaattcctgtttctactgttgattgcttggttatactttcgtcatgttatcttcgtttatatatgtatatatatgatgctcgaattatatagagatcaaatacatcgccaccactctgactttgttcatgaatcag

SEQ ID NO: 80207 - DNA, 878 bp, Citrus sinensis
  Intron number 1 from transcript orange1.1g019538m (locus o range1.1g019538m.g) derived from phytozome v7.0 (chr-ID sc affold00004; pos 3991179 to 3992056)
aagaagcttgattctatacctcatttcatatccaggcatgtctctttctttctctttagtcatttctacgtgtttggttgctgagaaagtaagaaaagtttaaaagtctttgaattttaatgtcctgcccactgcacgtaaaaagtaggaatacccaaacgaagttaacaacagttttttttttgttctctaatgcattcattaatttcttaaatacccatttgaaaattttaatctgctagtgaaatgttgattcgacgtaaaactgagttgtttgatgaaaccgcttgttcttgtttagttattatcagattttttattggcagtttttgattgtgatatggtagctttaggataaacagcctctgatctctttgattgtgaactaagattttgtaagaaaatttggcttccaaatgattcattaaagttctttattaaattgacaaatttctttggtttttcgtttgtgattatgaattgtgtgtcttgctgtcatatgggattaatgagtctatgaagtgccgttatgctaagcttgtttggtgtgaactgaactgtaagtggctggaagaattattggtccttatgttttgagtcagtttggcttttgagaaattataagttatcacctcatcttagccagatggtttaattagatttagatttgttttttcttttcctccgatccttaatagtgaagaattaggtttttgaagtcttgaattttccatttaagctttttatgtcatatgcaattgagttgtttggctagagagattgaagaatctatgacattgtgagtgaaacatatgatgttaaacccagtttcattaaattgattctgttttttgttttcaggtcataggcaagtgctt

SEQ ID NO: 80208 - DNA, 364 bp, Citrus sinensis
  Intron number 1 from transcript orange1.1g024740m (locus o range1.1g019814m.g) derived from phytozome v7.0 (chr-ID sc affold00067; pos 76217 to 76580 reverse strand)
tttgttgtttcgtgtcccaagttcaggttcgttcctaagaaaattttagaaaaggaaaaaaaatcattaatcgttccgaaaaacaaaaaactaaaaagaaagagaaaaaaaaataaaaatcccttgattctctcaaaaccctaaaaggggaaggttatattttccaaaatcggatctttttatttcattctttcactgtacggtattaataataacccagaaaaagagaaaaaataaaaagctttttattcatcagtgcctattagatctcttaccaaataaaaggaaaaaaaaatccctaaaaagattttctttttctttcttttcaggggtttcaatctgggtgaaggaggaaaaagcaaaa

SEQ ID NO: 80209 - DNA, 584 bp, Citrus sinensis
  Intron number 1 from transcript orange1.1g038033m (locus o range1.1g038033m.g) derived from phytozome v7.0 (chr-ID sc affold00051; pos 63448 to 64031)
caagattggattggcattcgttgtacaggccttaggtaacattattgctctgcttttgcaccaaaaatttgagacttgaaaaaaattaactgttaaatttaagctaatggtttatttctaatttgtttcaggatattggatttctttgcctcttgctctccctgtaatcgccttcggaaagcaattaagtagggatacaggtacatcatttacagctctgcttataataaactgaaatcaaagaggttaatttagatgctaaatattgagaatgactctgaaaattttattttcatcttatgttagatggaatcctcggcacggtagaaactgtagcttctacggtagctgtttctagcttgggctgagtggtaagggaaccattttcaacgttcaaaattattcaggctatgtttgtaactcttttgatttggcttaatctaaggcataacaactaaaactagttgacaggctcgtatttactagctgcctacccacgtatgctttgacaatgttgtttagtttcctaaggtagaaaatcgttcttattgcgtgttaattgtttcttctctcagggtttgtgt

SEQ ID NO: 80210 - DNA, 1015 bp, Citrus sinensis
  Intron number 1 from transcript orange1.1g018506m (locus o range1.1g018506m.g) derived from phytozome v7.0 (chr-ID sc affold00010; pos 163243 to 164257 reverse strand)
ccaatttgaggtgatattgttttctttaacagccttaatgcatcattttatactttgaaactattggtttttggttatttgaaggttatacttatacgtgatcataaattcttatttgggttgtgatattattaattattgatgggtttgtttcattttcgtcttcttaatttctttggttgttgtatgtttttcgctcaatcagtttgaatttgagaaatctttatacatgttgcttgtttccattgaaaagatacataaccaagctctgggtgagctcttctgaattgggtatatatgcgggaaaaatgaagtagtttctgtttctgttgtgcccaaaggatttttgcttgtgttaacggatatgatgtatgggtatttcagttgaaagattcataataaattttgatatgccgaacacagtgaggtatgtaaagttatttatgtactaattgctttatttgtaagattgtatctcatgtcatggagttatacctgatttagacttctgtgctgcagaattaacattttagcttggaattttggttgttggatcagtcaaatttatgcataaacttgaaactattggtaaaggatgcaaagtagctgttgaattggaaatggtgccaattttaaggcagttatactcaaacgagtcatgctttgcactgaaacattggaacatgtaacctggttttggccattcattgtgctcaagacatgctttaccaggcactacgatgctcttttttgatcaagtatttgagaattgagaaatgaagctggaccattttatttatttgtttatttattatttttgtgtgtatatgtgtcagctggagtttctgttgaaaatgcagctgtttccatctgtattctctcagaattatttagtggaagtttatgcctttctctcatgattttatttctttcatggtgcattttttttctaactggttatatttatcagtgtacttatgtatgacagagcgttggattcattgggctgggaaac

SEQ ID NO: 80211 - DNA, 522 bp, Citrus sinensis
  Intron number 1 from transcript orange1.1g037904m (locus o range1.1g037904m.g) derived from phytozome v7.0 (chr-ID sc affold00593; pos 29051 to 29572 reverse strand)
ctggaaactgcagtagattgtgggaggaagcagatgtatgcaatgtattattacaaaacacaagtaaatgttcagttaggttgaaaacttgcaattttgggatcatgataatttatttaactagttaactctttgcatagttttatcaatattttctttctttcattttttccccacttattttttgttataatgtttaggaaactgatgtagttgaagcatcatatttgattgctttagcaacaaagagatgcatgtcactgataaagcctttctaatgtgaccaatcaaacttcacaagagtagaaaatttagaggagctgatttctgaacgatttacaaggttgcatgagattcactcattttttctgcttcaaagaagctgattttgttgaatttgaaacggtgtacaagtctttcaactcttccaggcaagatctttatgaaatctcttaagacacttgttctttctggctgcttgaaattgaagaaatttccagacattgtgggaagttctttcgg

SEQ ID NO: 80212 - DNA, 767 bp, Citrus sinensis
  Intron number 1 from transcript orange1.1g013191m (locus o range1.1g013191m.g) derived from phytozome v7.0 (chr-ID sc affold00035; pos 542130 to 542896)
tggtcagaacttatcaagcctggaaaggcagcaatgtaagtttttgttactcttttaacattcttttatcttggattttattatttgttcttggttttaagatctgattttttatttatttatttttttgtgttaagctaaatggcatttaaatttagtttgggaaaagaaaaaatgtttgtggctttgatcttgctgtgagtgagtcaatcagtttgttattgaattggcttagtggttgacttgttgttcttgattggaacttttttttttctttttaaagcttagttgatctgataatttctctattataattagttttcttggttatgtacttaagctcatacaggcatttaaatcaatttgttgcttttttgtactcatcagcttaaaaaatcagggttttgttctcacactgcaatcggttttagtaactttaatagaaacgaatttgggacattgaaatgcagtggaactaggacgtagtaatcgtgaatttattatagatgtatttgctactgggagagcattcccaaatggcatgactgtaatcggcagtgcaagcacggtattaagcaacttaatgtttgacttgggggaatccctttgcagtttcaatcaattaaaacatcaatgcatataatctcacattgaaatgttctccgacgtctgtgcgcatggatacactaattatgctcatgttttttgaatcttggttattccatttttcaggtattctttcttggggggaggcttatttttggacc

SEQ ID NO: 80213 - DNA, 302 bp, Citrus sinensis; identical to SEQ ID NO: 79433
  Intron number 1 from transcript orange1.1g015635m (locus o range1.1g015635m.g) derived from phytozome v7.0 (chr-ID sc affold00007; pos 1004592 to 1004893 reverse strand)

SEQ ID NO: 80214 - DNA, 350 bp, Citrus sinensis
  Intron number 1 from transcript orange1.1g033150m (locus o range1.1g030930m.g) derived from phytozome v7.0 (chr-ID sc affold00004; pos 957611 to 957960 reverse strand)
cttccctgtctttccctgtttccaagcagcctcaggtgatttccttacagttcatattatttaaactttctatttttaatatatattttcttatttcctaattatgtattcattcattgtacggtttgtttgggtcacttatttgttcctacttacaatcccttcgtcttcattttggtttcgattttttttttctctctctgatttaatttaatgaaatatggatatttaagcaaccgcttctttccatctcatgtataattaaatgaaaaaaactgattctttttgtttatttcttggttaattttgattaaatggtgttgtgagcagtatcccggtctgagcattca

SEQ ID NO: 80215 - DNA, 957 bp, Citrus sinensis
  Intron number 2 from transcript orange1.1g004015m (locus o range1.1g002446m.g) derived from phytozome v7.0 (chr-ID sc affold00152; pos 58470 to 59426 reverse strand)
aagtgcttctaaggaaagtgtagttctggctgaaagtaggtaaaccttagttttttggttatgaacaagtgccagctgtgtaattcttattctgcttatattgacatgtccaagttgattttggcctttaatttgaatgcaactgtcaagtttagatgatttgtgggttgtatatatcttttttaaaaagttttgaaccgatgtaattttgtatttatgagtggatacataaaaaaattccatatgcccatgcagagattattattggatatttagattttgggatgtggaataagcaggagttctctttccagttttccaagtgggtattctgactttggggtggatttcgatggacagttataatgtggcatgcttattttaaattatctattagttgaatttgcgggtggatgtttatactttagtttatttttggtatatagcaatgtgtgtatgcggtaatctgttttattattttgggctgagtggttggtggtggcattttgatgcaatctatcgagttgacaagagtttcggtatgtttatcattttgtcatctaagttttatgattgcggaattagttcacttgtggtacctggtaaaacaattgtggctcgtggggtgatcttttaccaaaggagttgaggatttgagcttgttcattgacttttgcgatatggtatgagttgaatctctggaaacttgtttttctgtttattttgaaatttgttttgaaattttttgaaaagaacgctggcttttattaactttttcttttgtgctcagtatggatggctatgctgctgtctttcctgttgatgttattcttatggcacgattcttgctaatttgagtacttgaaattatgatctgagagttgaaatggctcataccaaatttcatttttatgatataaaggtgctttgggctgggtttgacaaattagagagtga

SEQ ID NO: 80216 - DNA, 947 bp, Citrus sinensis
  Intron number 2 from transcript orange1.1g039737m (locus o range1.1g039737m.g) derived from phytozome v7.0 (chr-ID sc affold00232; pos 96590 to 97536 reverse strand)
ggagaaactaaagcaaatagaaggtaaagtttcacgaaaacatgcatctgcttctatgcggggcatatttgagaagtacatgttttaaatttcttttaccatttcctttgattagcctgtttgatgaaaaatttaatcataattcttgcttttaagaaacaagaaattaaaggaatattagataaacattttttggcaactctgttctcaaaataatttgtgaattgaattctaaactctaatgtaaaaaaaaaaaaaaattcaaataattagcaatatatatatttttttcacttgtgtacacttcacgcttggtacaaaatgttttacacagttttattataggaaaagttttacataggttttattatgggaaaaggattcagtattgatgtgaatttttgatgagtaataaattaataattattagataagaaaaatacaaaataaaagacaaaataaattttaaccattgattttatagcttactgtgtttatggtttctccatttcaacgccagttggaatggttgttgcccgatcaattgtacatattttatgttataaatattgtatcaaatagaaatgttataatttaggatctagattttgttcaaatctgaaaaaattattaagttatatagtttaatagtgtaatgacattatactattaaatcatatgtcttaataactttttaggctttaataaatctaggattttgaatcagattaataatattgaatcaattgcattctcaaaaattaaaaatgttaaaaatacactcatattttggatttatccgaattttttaaaatattttcagatcacaagtcaaacttaagcacaatttttttttaaaaaaatttctatgactataagcctctcccaaaattatgaaatttgcctgtaatttatttaagttgtatgcttttacaggggaggcagaa

SEQ ID NO: 80217 - DNA, 537 bp, Citrus sinensis
  Intron number 1 from transcript orange1.1g001380m (locus o range1.1g001380m.g) derived from phytozome v7.0 (chr-ID sc affold00004; pos 3706600 to 3707136 reverse strand)
ggaactggtaaatttgctttttgattttcattgattaaaatactagttcataatgtttgtatttgatgatagaattatttttttattttagtattgctaattattggtttaataaaccctttgaccttgactgttagtgacttttgggattgaataatttaatagtttttgtttaaattgaagacccatttgatttgcgtgtgaaatatgaagttgctttgtgtttatggttttgaaaaatcccttgcgtaatcccatcggcatggcaatgatgacctgctgaacaagcgttttctgatgtgaaattgatataaattgcttttgttttcttttgggttagtctttaaattcctaattttgataaattgtaatgtaaagagaactgtattttaccctgtgctggcaagtgtggatgcgatacaccaatatattctttttgatatattgacttggatttcaaagacaccccaatcaaattacattttctttgccaatgcactaggcgaagccaatttcttaggaggggtagcttctgtt

SEQ ID NO: 80218 - DNA, 615 bp, Citrus sinensis
  Intron number 1 from transcript orange1.1g038006m (locus o range1.1g038006m.g) derived from phytozome v7.0 (chr-ID sc affold00004; pos 1479353 to 1479967)
cggtcaaaaatatcaagagaaaatcgagcagagaggttaggattcagtttagcttaaaagatacttataactaacaagatcaaaattaaactagttaattaacaaaataattatatttaaatctcagtttatatatatatatttatttatttatttaaaaaaagaatataatatataaaagaaatttcctagtcagatcccctctcattctcgctctctgctttttattcagcgcaaggtggtgtgtgcacactcgacttcattttcatggcgagcgacagccgcccgtacggcgcatacacttttgtataaccgtctgtatcaaaccagaaaaaaaaataaaaaaaaaacatttctctcactctctcatttgcgtactcaaaacagaaaagagagggggaaaaggaaaaaaaaaaaaaaacgaaagccaaaatataaaatatcctcttcgtatgtagtgttttggttgctttctgacgttgtttcgtgtgtgtttttgcgtttcatatttagtaacgtggtaatagtattgctgctgctgctgctgctgttgttgttgttgagacgatggataagcaagccgaaaaggaggaaaagagagtgataaaagaaagg

SEQ ID NO: 80219 - DNA, 294 bp, Citrus sinensis
  Intron number 1 from transcript orange1.1g006723m (locus o range1.1g005934m.g) derived from phytozome v7.0 (chr-ID sc affold00026; pos 1145079 to 1145372 reverse strand)
gtcccttatccttctggtcttggcattttaacactgtaagtgaatggttaagcccattagtcaatatctcgctgcctttaattttatattttattcgtattcttctatttatcattggtgcatacgtgtgcgtgcatggatttgtttgcacatattcatagctttgacttttcatttcccagagtttagctttggttggtcaataatttgtactgcgtgtgtttctaagactctactaagtcactgagcatactgatcatggatgcagaagatcaaccagctgatacagataaa

SEQ ID NO: 80220 - DNA, 1022 bp, Citrus sinensis
  Intron number 1 from transcript orange1.1g025880m (locus o range1.1g025880m.g) derived from phytozome v7.0 (chr-ID sc affold00010; pos 2056096 to 2057117)
ccaacactctgtaagtgtgtatttttctttttttttcttttaaatttggtgctttgctatgaaattttgttttcttagattacgatttttttggtgaaaaaaaaaagattatgattttggtttcaattttgaattttattgtgaaattcagcttcgtttcttcatgagctgctctcagtcgtttgcatttgattgttattcctgcaagtttgaaattttgtcttgaaataatttgtttttagtgaaaagttgctgtttttgtgtgtttgtcttagcatttactcattgtttcctcgattggtatatgattttttttttctttagtaatcgagatacacacatgtatatgttttccataggggataaggtagggagttgtttgtaattttgcgggtggatttctgggtgtgaccgctctgggtcttcacagttatctttacttgaagtgatgtgcgtgtgtgtatctaagtataaaactcaaatgtgaaaggggttgttctactgcacagcttcacttttgctgtagctttgtctgagtgtgtagggtggtggggaatcttttttgatatcttgataaattgtgttcaccattgttcacatggccaaatgggttccacttgattatggcgctgctgtcacattgtattcgtatttatattgtgataagggcatagtgagggtcagatgattatgcttttctggtcccagctcctaaaatatccaattcatagtatttttttagtactatttactttgtttttggaagttaaattttagctgtaagtttggtatttggttttggcaacttagaagagcttatcatccttgaaatatttaaaattattttttgataggtgggtttttatccaaaacctgcagtgctggatactgtaattattctttgaatgtctgagttgtagcttgttcacttagtaaattgtttgctatatttgatgtgattctgtttaatttctaaccccaccactatatggttttcagggcatcggattttccaagggagt

SEQ ID NO: 80221 - DNA, 513 bp, Citrus sinensis
  Intron number 2 from transcript orange1.1g016108m (locus o range1.1g016108m.g) derived from phytozome v7.0 (chr-ID sc affold00026; pos 743309 to 743821)
tctccactttcaagttcttggtaagtctacgattggtatgtatatgtatatatatacatacatacatacatacatatacaaacacccacactgcaactctgttttctgccaaatgaacacaaattaggccttagctaaaaaaaaaatcagatttgttcaagagaaggtgaggatgaaagctatgtgctaaacaatgctgcaatgtatacattctcctacaatttgcaaatctgtaaactgaaactacaattttgtgtggattccatgcaaaagcttttttagcttttttttttgtttttgtttttgttgcttactagtttggccaatgaatgaaaagaaaatttgtttgaaaagacttggcttcggcaaattgatgccaactgcaggtcattagtctcatttcatgtaggcttcaaaaggtcaaaaatgcaatcatatgtgttatttcctttttaactttctcttcttttcatggacttattattatgataaattgataatcgatgcaggatt

SEQ ID NO: 80222 - DNA, 653 bp, Citrus sinensis
  Intron number 2 from transcript orange1.1g015127m (locus o range1.1g010785m.g) derived from phytozome v7.0 (chr-ID sc affold00169; pos 253765 to 254417 reverse strand)
gaagaaattgaaggagggagagggagacaagagaggtgaatattctttataccttttcatttttgaagtcaaagtctgttgagttttatcatatgtaatgaatctggaatttttttaatgctttttcgttttgaattctcttttgcatataggttctgcaaatcgagtcaaaaaaattgcttttttattttatttaaatttgattttttaaggatttttggtagtcaaaatggatatttaatatagctaatttttggaaggtgagaactactattctgggatttctgtccagataactgatgtcgagttagtttgcatgagatgtcttttggcgttaagatgttttactttatgacgtgggtttgatgtttctattcagataagcaaggggtttattttccctggttggattggacgatttctgacttgagtgaagatggatgttgtattttgatggtgaagaagatcagagacttacaggatggattccacattctaacttaacaatgccccactgcatcttggtttttcttgataggctgagttgagcattttcttgtctatctttgatgctgcttctgccttgaatgagtagctactggttttggattcttaagtgtatgacagatatacttctttgtaccatataagtt

SEQ ID NO: 80223 - DNA, 648 bp, Citrus sinensis
  Intron number 1 from transcript orange1.1g041014m (locus o range1.1g041014m.g) derived from phytozome v7.0 (chr-ID sc affold00114; pos 141532 to 142179)
aagtgttgccagtgtttcctccgttttccgttcatgtatttttgagcttatctagatagtgttgcaagtgtttcctttcatcgtctccttgcactgatacgccgttcaaacatcttcgtccgttcaacgaagtcctagcaaggtaaaggttctgaatcttttcttaattgcttggattttctcaatgaagaattttgtactctgttttcacatgcacaaattagccaatatagaaattgaatggggtctgtcatagaatatgattcgatcttccttgtgggctttgatttgggtggttcttttgagctactgtcgtgataatagccaatcaactatttatttgtgatttgtttggatgcaaaaattgaatggatctgcccttgatatttgtttgtgatttttcctttgtttcagctattttatttgctttcctgaaatattcttcctagttaatgagtctttttcctttggtttttttgtttcggctattttatttgctttcctgaaatattcttcctagttaatgagtctttttcctttggattttctggaatttgctttgatttggttcaaagagtctccttttattttgaatatcaataatatttggcagcagattgtgattttggtggaaatactcttctatat

SEQ ID NO: 80224 - DNA, 644 bp, Citrus sinensis
  Intron number 1 from transcript orange1.1g041935m (locus o range1.1g041935m.g) derived from phytozome v7.0 (chr-ID sc affold11299; pos 1077 to 1720)
gcatttttgttatttgctatcatcctctgcttcaggtgatttcttctcctgctctgtcgttgtttgtatctcaatcaaattctataactggaatatgcaaaagtttcgaatttttatttctatctgcttgcattgataacatcgcggcatatgcactagttaaagatcaaacagaaacagagctcaggaaaaagtttcttctgccatcatatttgaaaattcatgtaaaatgtagacagtaatcagcaaaaaggtgattcgcaatttgattttttttatgaaattaattgttaggttggagttgccaattaacaattttaaccacctttgactttgaaggaattagagatatggtcatacagaggcaacactgtttctgcaagtagtcctctcttttctttttattatattttatttagttattatttattatttattttttggtttactctgcttcttctttttacgtttctcaaattttgaatttcattgcttttgaacatacgacagtctgttatgtggcgaccctggttcttaattaaggttgtgaaatattattgtaaaagatgatttattcaatttgagtaattcgtttgctttgataatgatagtaattttttattttgacaatttgcaaggtgaga

SEQ ID NO: 80225 - DNA, 811 bp, Citrus sinensis
  Intron number 2 from transcript orange1.1g046458m (locus o range1.1g046458m.g) derived from phytozome v7.0 (chr-ID sc affold00010; pos 661572 to 662382 reverse strand)
cttttaagccttcaaattggttcggaaagcccaaggtgaacatgcgttagtaatattaaatctgtttctgtgaatcatgaccttcttaggagctttaaatgacatgggcctctggtaagctgtatgagctatcggagttgttgtttccatttccttcggcaggaatttagatataaactgtagatttgatgaaatctgatgcgggagtttctatgctgattattgcatgtgtaataaaataattagtccttgaggcaatagctctccttccaggatcatatttcaacaaagtgttttatctgtacgtttgttcaagcttaatatgcaagttaagtctcaaaaaaaaaatgtggatattttatcttcttgtgaatcctccatgactttttaccatttctttcctccaacacattgatcttatttactgacatgatttggttcaaagaatgatcattctactgtcttatatccattttttaaaaaagaaagcttataaaaacaacttgaacaagtgaatgggaataacttcggcggtttcacatgtcattccctctttgtaatttttcatagctggtggaaaatatacaatatctcattctttgatatattatttctgctttctatcgtatccatatcaagtgtaaaagattaaataagaagaatataaaattttcacctacctcaattcaaattgtatactctttcgattttgcaatgacagagacctaatacaataatcaaggtatctgacatatgcttttcaaaattttgtgcagctggccagttcattggcttgtgcccaaagaggttg

SEQ ID NO: 80226 - DNA, 644 bp, Citrus sinensis
  Intron number 1 from transcript orange1.1g046458m (locus o range1.1g046458m.g) derived from phytozome v7.0 (chr-ID sc affold00010; pos 662563 to 663206 reverse strand)
tctggcgggactgtggatcctacgcctgctgcgaggtacctaattgcttctttgtttcttgcactcattcgcagcttcctgatctcaatttagggttttgtttgggttaaattttttgtgggtttttgaaattagggttttggtttgggtttttatgtggtaatgtgcatgtcaatttgcggagtttgtcttaggattctcgatgattgtgtttttgggatgcttgcttagacagtggaagcaaatttttgtatgtcaaaatttaaaaatcacaaactttattccgcttacttattaataaatggaagttaatgaaaatgaaattaagtcaatgttacggtcctggaatgcttattctcgataatacatgcgggcatttactatccggatatcttgaactgtgtaaataatttttaattttcatattttggtttgttgggtacgtgtttttgggctttgcatgttgttctttgcaggatggtggttgttgtgaatcttgtttggttgctttgaaagtgaaagaaattaggtgctcgaatgtgagggttttaacttttttgcatgctataaatcgtctgaagaagttctaacttataatgcatttttcagttctgctggtgcatcttctcctgctgctccagcca

SEQ ID NO: 80227 - DNA, 738 bp, Citrus sinensis
  Intron number 3 from transcript orange1.1g035973m (locus o range1.1g035973m.g) derived from phytozome v7.0 (chr-ID sc affold00004; pos 1487536 to 1488273 reverse strand)
gggacttccgcaaggtaaatgcttctaatctttgtgactcagctgtgtaaaggaatgattacaatttggttataattaatgctcctcccccccccccccccccccaacaaaaaaaaaaaagcgcttcagttatctcatatatattcaaaataatatctgatttatatatgcatctaaatggtggttggtttgtgattagcaacttgatgcttgagtgtgtgatgatctaattctaatgcccctgaagcagatgatgttgcaatgtaacaacttatatgggtagaaacttttggttttgatagaaataatttttttcttttgcttcattgttttgagtctcatgtgctaataatgcttgattcaattgattggaaaacaaattttgtgaccagagtgatgccagtactgcttgaaactagttctgagtcacaatgaaagatactttggttggtgggtgaaaactggatgtggaaaggcagtatgtgaaagagatcagttacttacaatgatttagtagcttactatatgaaagtctaacttgggattctggaattgcccgctttttttttatttgtcagaggattcttgtagtcttccgtagttttctcattttatctcatttgtctttctgcattacatgttcaatgaagtcatcattttttaagcattgtgattgactgacttcattgtatattcatgtacactagcttttgctaccccttgtgactgcctaccgat

SEQ ID NO: 80228 - DNA, 928 bp, Citrus sinensis
  Intron number 2 from transcript orange1.1g041275m (locus o range1.1g041275m.g) derived from phytozome v7.0 (chr-ID sc affold00070; pos 2812 to 3739 reverse strand)
ccgagactctcagtgtcagctcaggtgcagaccaggtatatttctaaattttctaaatgggtaaaagtttgatactcatgttattctaaaccagagagatgaattggtaaggttcaatgaatttgttctgatgaaccccatacatgtgctaggttttcccctccactgtgattgtttaacttaattgaattttcatgatagtggaatgcattgtttaatatccatgtttgaggattgtgtatggttaatcctttcataacgacttattttgatcttgttgtgatacagtagaaaatgtgcttcttgacgtctgtatttgtcctgttactagtctatgatcatgcaatctgcttctaatatatttgtagtttgctcaacttccttacatattctttcaaaatctaaagatgctcgcttgactggatatggtccatgggcattaaatgagagaccatgaagtctgtaaattaaaacaatgatccaaatgggtatcccctttctcctaatgttgaatgtaggatgccactagtttgtttatgattgagctctgttctaacatgattgctgtcaacaaatattcttgatcacttattctgaatggaatcttctcagtaatgaatggatctcagagtttcattaggcctaaatattttcaacttttaacaatttaatggaggatgatttggtgaaggtgttaataaattctctcatctgacacctactgtggcaaaattcataactgggtgtccgaccaaagttcttaattgcctttacttgtgcattttctttttgaggatgttaaaattgatacaaatgcacagcctagtggctggataattcttaattcttatccagaaccaagcagatgcttctctttaaaattgtttttgtagatgtttatacttactcaaaatatttctgttttcag

SEQ ID NO: 80229 - DNA, 556 bp, Citrus sinensis
  Intron number 1 from transcript orange1.1g011912m (locus o range1.1g011518m.g) derived from phytozome v7.0 (chr-ID sc affold00007; pos 2382213 to 2382768 reverse strand)
ttctcccactttcccatctgggttctctctctttggtaatttttctcttcaaaatctttgcctttttgggtttcttcatcaaaaacttgatctttgtcttttttttttaatattctttgataccagttttattaactttttcctttttttttttgctttgtttttaggaatcctgggttctgggttgattgatatttgatcggtgaacggttcgatgttattggattgaatccaggattgcccttttgttcttttatatcgatattaatatccaagttttgccttttttttgtttacaaggtactctctttgttttatccgcattatgagtttttgtattggatgatcgcttttttaccactgtattcagttttatgttgtttgaaatgcaaggcaagtctatactgaattgtattacttagatccagtgcatggcttgatttctagataataagacttgatttttctttttgtatgaaaagacgatcatgtggaggtttgcgacatgcctttctgattggtgggatgtttgtatttgtatatgtgattttgtaga

SEQ ID NO: 80230 - DNA, 876 bp, Citrus sinensis
  Intron number 1 from transcript orange1.1g014327m (locus o range1.1g014327m.g) derived from phytozome v7.0 (chr-ID sc affold00557; pos 72806 to 73681)
gaactagcactcattgatccaaagcgtgcaaagaggtattattagaaatcctttgaatgatcttttgttttgtcgctaactcagaattgagttagtttacatcttcaagcataaaataagcataagatacttgttaaacgtattgatattacccatactagagtactgctcccttggagtatatttattccttgcatactcatttttttgataatgtatgaagatctcatgtcatgaagtttctagggagaaaatagctcctcctacatattgttagtgctcattgttctcatagtaagaatagtcaaccagggaaagtcccattaggaagtgcaaggggcactgcagatgacttcctagtctagttccgtgctgttctaattaaaatgaagaatcgcaggcggtaaagctccgtaaaacctttctttgaagattctgggcagaaccaaatgcctaacaccttcttctgcattgaaaaattctgatagttctcatctagaagtttgataactatccctggccattgtgcctgcactcattctctatcctagaagatgcccgtcaggaagtgggttgtgaatttatacagctatttgctctatcctcatggatctttctattatcttcgatatgctttagcaagatctttattatctgtatgattctctcttctgatgattattctgattctttctcttctgatgattattcttgtcctccttcttttgtttgttgtctacctatattatttcatatttccgtaagagactaaagaaacaaactacaatttactattttatgcattttatattaacactacaaactctctgcaatgtgatagaatctgggcaaataggcagtcagctgcaaggtcga

SEQ ID NO: 80231 - DNA, 398 bp, Citrus sinensis
  Intron number 1 from transcript orange1.1g023576m (locus o range1.1g023576m.g) derived from phytozome v7.0 (chr-ID sc affold00025; pos 320576 to 320973 reverse strand)
ctcagtccgccgattatccttcttctacggcaagagtaagtcatttccctcaaattttgcgtctataatttctgtttgtttcgactaaattagttatctctgttcgcttagcgttttgaaccttggaaaattttaataatgagaaaggtagctagttagttagttttttcgtatcttactatttattttagggtttctttttctttgtttgattgttactctgatgggctctgttgatgaaatctcattaattttacttattttctggcggttaatagttatttatctttaaacttgccaaagcataatcattgtttcttttggtatgttttctgatgtcaataactgtttctttgcgcacagagtcgtgattctcaagggttagtaccagtgacagt

SEQ ID NO: 80232 - DNA, 498 bp, Citrus sinensis
  Intron number 1 from transcript orange1.1g002829m (locus o range1.1g001863m.g) derived from phytozome v7.0 (chr-ID sc affold00046; pos 653522 to 654019 reverse strand)
ggtgcgtgtgtgtgattgcaagaatttttttccattagtttctgtgaacatgtgatcgattttgtgtaagaatttttttgctttagtaatgactgatgtgttagttcgcctttctgcttttttttttcttttaagaaattgggttttaacgatggttggagtgtttctgatttagctgacaagaaatggcgggaaatggacttgaattcttttccgatttggggagtttgtgggtgaacatgtgcaagttgggctttttttctttttttaaattttggctagtgatttgagcattttatttggttgatgaaaaatggtggaaaaggcaaatgcatccatgaatttttcaatattgtggttgaatttgaatgaagatggaaatggaacctcggatggtgtgctctattaaaatgtaaataatccatgagacatgaatttcattatcagtttgatgttgagtaacttgtttattcttttaattgatttcagctcctgaaa

SEQ ID NO: 80233 - DNA, 736 bp, Citrus sinensis
  Intron number 1 from transcript orange1.1g033567m (locus o range1.1g032690m.g) derived from phytozome v7.0 (chr-ID sc affold00123; pos 233681 to 234416 reverse strand)
tttttcaccagatctgataatattgtacgtatttttcgatttataatatatcttatttgtttatttactcagccgtgagatatagtaactagctagctaggtatttaaatacatactaattctgataaaatacatgcagatctatagatctggatcaacagtaaaggctttcattcaatgggtaatcaagttttcaggattcaaaagcatgtttacttcggccctttttttttgctttaatttgttagttgcttaatttggatgaacctttttaagcttttatgctttgacattttcttaccatcttgctgtattttctttatcattctttctctgtatatcttattaataaatatatcatgcatccttgtgggggtggagagtgattagaataccccataattaattaactaccatctccgtggtgctagctggcttctcgaaacagttttatagggtaactttgtgctagcttgtttcaaatgctttcacataaaggaagcactcatggataagataaatgtacatatgagttaaataatctcttgcatatatatacaatatgtaggagggttaatttccttcatccacatatatgtgtgtgtgtgtgcacatatatatatatatacatccatttatgattttttaattaattaagttatatggggatgcatgacagaatgagcaaattaattcttagcttttgtatatatatgttataataacagggatcaaa

SEQ ID NO: 80234 - DNA, 783 bp, Citrus sinensis
  Intron number 1 from transcript orange1.1g006276m (locus o range1.1g003309m.g) derived from phytozome v7.0 (chr-ID sc affold00081; pos 315101 to 315883 reverse strand)
tttcgcaagcaggtattatttatacaatttcttttctaagttttttacctttatgctgctttattttgtttgattagcaagaatatttagcgcttaggagtgaatcatttgtaacttttggttataatttggacttagtgtggcatcttttatggttaattagcaaaaaaaaatggaatattaagttgcctattttattgagtagatttgaatatccataactgacgagattttagagaatccagcgcttgacatactgtataaaatgttagggcttttagaagaaaaattatggtcttaaattattataatatgcggctttaaagaattcattgtattaagtaacttaaaattttttttttctagtttgtttatatgtaggaatgtatattaccaggttgatgaattttgcttccgcttattggctgtaaatgtctggttactagaattatagcagatatgttagggtgaggccaatttggctttcttcttttcttgattaaacttggccgaaggagaattagacatcaactagtttgtttttcatttgattaacaggttataactagccattgttacatactgttgatttggaaggaggtcaagtcactaaattctaaatttggttacacacacatactcacacataagactataggattttgtctactaattgtatctctaaagtgtttttgtccatttttgcataactatatgttgactattacctgtttcgttggtggaacagatacaaggcttggaggaaagtgctgaagtgttaag

SEQ ID NO: 80235 - DNA, 967 bp, Citrus sinensis
  Intron number 1 from transcript orange1.1g013883m (locus o range1.1g013883m.g) derived from phytozome v7.0 (chr-ID sc affold00004; pos 753097 to 754063 reverse strand)
acaccatccagaagaccaatcttcagcctcaacaggtttccccattttccaatcttttcattttcagctccttttagtcaacgtctgtgtcatctgatccggattgtctctgcctctgtgtgtgtgtgtgtgtcaagattttcagtcattttctgatttcttgtttcttttggttaactggtcaaatcagtagttaaattgtgaatttaatttcagctgggaagtttattattttcactaattattgatagctatggttatttattttcgtttgtttaaaatatgaaatggcgagggggtactttgaacctgtgtagggttaatatctggcgtagcataatatcatccctacctatatgcaattaacctgcttagttgtcttgacgtggcgatggtttcacgccaaggatggaatcagttgagaaattggagctctatatttcttcgcatatttttctcctgctctatatgcttaaatgagagaattctgttgatacattattggacgtgaacgctatcatgattccagaaagcattttctttgaccttgtgctctagttttgccaattgattctttttttttttcaaatatcgaagttcgttttgccgattccaaatggtgggactaattataaccaaatttattatcactttatggttccaagagtcgtgcaatcataataggagtacactattgccttgggtcaaaagtttgcacttgaacaagtttctaactttaaacaaacgctttctatattcttgctgtcggtcatcagaagcaagctattctatttcccttcatgtgcatgattgtggcatggcttagtgttgcataattcaaaaatcctgtcacctttaatcagtcgtgtcataaacaaaaagatcttgatctgtttatctgtttgtctgatatgtatgcctctatttctcaggttgctaagcgcttggagaagtttaaaactacaat

SEQ ID NO: 80236 - DNA, 890 bp, Citrus sinensis
  Intron number 1 from transcript orange1.1g025794m (locus o range1.1g025794m.g) derived from phytozome v7.0 (chr-ID sc affold00025; pos 184016 to 184905)
aaggtatatacatttatattcttaattataatgaattagttatgtgcgtgagctacctagtgtggattattaattccatcatcatgcttcaatgaacatgtccatgcatgcatgattcgatatctttctttctttttctttttctggttaattgttggcttgcgagttatcctcccttcaaatgttctattttccgatcatacattcctgcaagacattaacattaaatttctagccaatatcaaacgaatgtatggcgagtatataaatggtcagtttcagaatattaatttgagacttttttttccttttccgtatagctattttaatttagcacaattgtaccacacgcatatttagagtttggagacattggttgagtataatagctagctagctagtataattctataatggatacaattttatttcaaataaatttaagagattattcgcatattaaggagaatatcaaaaattctttgcaagatgcaacctctaacatatattgatgccaaaaatgaattatcagattcaactttctgattatataattgtgatgatgaccttaatcaatcttttatctagaatcattttatccagcacttagtaaatatggatgataaagttgatggcatctcatttcgctttcatgaactaatttgtgcatgttttgctggcaccaatattaattacataacgtgtggtgtaatccatccactacattgtcccagccattaattaattctagatatattataacttaagcactaatgagctagctagcaacttgaaatattatttacatatgttaattagtctgttaatataaattaagttgattaaattaataaaatttttgtttgttaaataattgattacacaggaca

SEQ ID NO: 80237 - DNA, 198 bp, Citrus sinensis
  Intron number 1 from transcript orange1.1g039174m (locus o range1.1g039174m.g) derived from phytozome v7.0 (chr-ID sc affold00115; pos 5755 to 5952)
ggaatctcacatttggtttgttatttttctttttatatatataatatatatataaaaattcattaaaatagtagtcaaaacttttttgctttttgtttctgttgaagatttttttaaagttcaccttttttttaaatatttgtgtgtgtttttttttaatttctgcagggattgtgggaagcaagtctatttgggtaa

SEQ ID NO: 80238 - DNA, 907 bp, Citrus sinensis
  Intron number 3 from transcript orange1.1g028120m (locus o range1.1g028120m.g) derived from phytozome v7.0 (chr-ID sc affold00123; pos 137050 to 137956)
tctgttgagaaaggatctccaaatcgcctaaacaagtaagttagcaagatacccgagttgtttctgttgagaaaggatctccaaatcgcctaaataactgtttagatgatcaataaacagttttctgctatcatccaatcccagtgaaccccttgttgtagtttattttttctgttgagaaaggatctccaacggatatttatatttgtgacaaatagattgaaagtttttcgttgtgtgatgtttgtgagaatttctggtggttttgtttggttgttgcaagaggcatttgactgctgtgactgtaattttgtagcttgatacaaacccaaatgctcagagtgaaaactgagaaaaatggaattttgatgtaaaattgaatatattttaagcttagacattcaaaaaaaaaaatgattttatctttgtttttgtttaattattgagtttgcaacagatgatttcagtttagagaaagaaaaaaaaaaggtaatttttgcttgagatataacatgcttggttaccgaaaatgtgggaaaaagaaaacttgaaacctgactacattttgggtccgtaaagatcccagtttctttacttagtttgccattaatttctttagagccaaaccaaagatttggaaacactaatgatgctgcttcttcccatgaacttctagcctgtttggatttgagaaagtgtgagaataagaaaatattgatttaataggttgtccaaactgaagaattggagtggttaatgcttgtaatcaagttctgtctagttccattttctcatgatttttcatgaatcagaagaagattttgcaacttaagttgctaatggtttgtattctcatgtgctaatggtttattatctcatgtctggctgcaggaactccgatttgcca

SEQ ID NO: 80239 - DNA, 457 bp, Citrus sinensis
  Intron number 2 from transcript orange1.1g035800m (locus o range1.1g035800m.g) derived from phytozome v7.0 (chr-ID sc affold00016; pos 693615 to 694071 reverse strand)
gcaagcgggctttttctttgttaccacttggtaagatatttactatctcattttataatattttgctttaatattgcagcaagttggaagaattatatcaaatcatttgcgtattattattgcatttctagtagcatttgtgaccaaaaacattgattcaagatttgcaaagcgttactcttctcacaaaagaaaatggcaggcataagttttgtaggaatctttgcttttctcatttgtctgagaacaaagaaagccaaagctttgaagcaagcctaagaagccctttgttggcattgtgtttcagctttactttaaaagtacagcggttatattgtttgataagcgaattcacagcaattgtagattaaaagctacgacttcttaatccagggctctaatactgtttcggtttcttccaggatttgttttgctgttggggagattctgttgttaa

SEQ ID NO: 80240 - DNA, 842 bp, Citrus sinensis
  Intron number 1 from transcript orange1.1g036588m (locus o range1.1g036588m.g) derived from phytozome v7.0 (chr-ID sc affold00767; pos 60618 to 61459 reverse strand)
ttttttctgggaccataccaaaagaaattggcaacgtgacaaagcttatgaggttatatcttcgagggaacaaactccaaggtatgatcaacgagtttaattagttgatgaaaatttataatgtctcacttttattaatcctgtcagccaataattatttaattctatgagtaaattttttttatctttcttcaggctaaaaactttttttagttcctttttttcttcttgagtgccggttaataagttaaaacagttaacgcatttgttactcatggattttaggagaaattccagaggagctggggaatcttgacgaaataagaggagttatggttacaaaataatttcttaactggaaccattccttcatcaatcttcagtctttcttctttatcgagattagatttgtcacgaaataacttgacaggtcacttccctaacgatatgcacatgtgaaatcttcatcttcttcgtaattttacatctcccattacaaattctcttatggggacatgtcatgtcattccactatttaacattatcttgttatttgtcagaaatctatgagattatgcagaattttgtaaattatgttatagcatatagtctattaataaacagtttcttaaacaggcaccattccttgcgctggacatttatttcagctgcaatggcttgatctcagtgataaccaactctctggttctttcccctctttcaaattcaagatgcctcttctacaagttcttgatttgagttccaatagactatctgctgaactccctgcaaatttttgcaacaatcctccttttctggaagaactttatttgtccaaaaat

SEQ ID NO: 80241 - DNA, 776 bp, Citrus sinensis
  Intron number 1 from transcript orange1.1g011880m (locus o range1.1g007584m.g) derived from phytozome v7.0 (chr-ID sc affold00007; pos 1181003 to 1181778)
acgactttcgccgacggtgcttcgattcggtttgggtaagttctttcaaaacgcttaaccctagctatatcacaactttttctctttatttttaatcgttttacgcgtaattttgatcactcttatgatttagtgcgtttccgagtttcgaattgaagaaatcgaagtttgcgagttctgatatcttgattgagtgtataaatatacgcacttttggtatactcttgatatttgatatgttaatttatatgggttggtgtcgaatttggaggtttttttttactcacttattgttgactgttgttggagggacgcgaaaccctagtttatttttcccttctgtttgatacttggatttggtgaaattgagttgcaagatttattattattgttaaaataagttttgggcggtgttatttcttatttttctattgggctttgatctatttcgacctgttgtatttttagagaatttgggtgcgaatggtctaccaaaacgtagctctttcccttctgtttgattctttgggtttggtgaaattgagttgttagatttatggttcttcactaaattaaactttgggctttgatctactttagccactgttaatattaccagtgaatttgaggtgcaatctcatttcctgagtgtctcttttcagaacccagagtgtactgataacattcttcgccataatcatatgattctgcatctaatggctcttgagatgcttatctgttgtaaaatttgtaacaggagtcttgctgagttatcc

SEQ ID NO: 80242 - DNA, 697 bp, Citrus sinensis
  Intron number 3 from transcript orange1.1g043542m (locus o range1.1g043542m.g) derived from phytozome v7.0 (chr-ID sc affold00004; pos 3199702 to 3200398 reverse strand)
cacctcttctaaaggtctggatctgttctttgctcttgtcaccaacaactttgctgattcgtcttagaaactactgtgactcagtcagcgtaaagcatgaattgtcaatgaaaaaaaccagtaaagtcattaaaaataaaccgtagattaagcaaattaaaactttttgaccgttccttgtgtcagtggtttccttttttctttttcttttttcagttgaaagataacattaaataggttcttaaggcgctatgatgttatgatatttataaatctgtttggctacactttcaacttacatttgacagcgcttttggccatttattattaattagcttgctgccaacagcaactgtggcttaaagtcacctctagaaaggtgtaatatcagtaagagcttgagggtctgtttggcagctgtggttctacaacttaagttgtttgataagtacttaaatcaaagtggtttaattaaaacactcatatgatctttactatttttattaaaataatctttaagaaatatacttattccctagacaatttcctctacactaataaagcttccaacccaatcatttattgacttctaagccgcaagtagtctcttgttttatctgcttgcttcgtcgtgtaaactttcgttttatgcaatcaaacaattgactgatatttactatctttcagcccaagtcgt

SEQ ID NO: 80243 - DNA, 422 bp, Citrus sinensis
  Intron number 1 from transcript orange1.1g020321m (locus o range1.1g020321m.g) derived from phytozome v7.0 (chr-ID sc affold00010; pos 890831 to 891252 reverse strand)
agtcgtttggtttctgggcctttcattgcttggtattatgttttgttttctcttgattgtattattattatttttctaaaactttttcttttgctgtcgttgtttgaggatgaagtattgttctttatgtttcgtttggttgctgtaaaaaatgagagaagaaaaaaaagtagtgagtagaattttagataatggggtaaaatgagaggaaattaaaaggccatctatactataattttagtacaattcatggaggatgcttttctttgaggcaatgttgatggcatcaacttgtagtttcttatgtttgtcgtttcagcatttgttatttatgagacctttgtttctttaatttcttctatgaatgaatctgtcactccgtggattagaggggaagggtgattaacaagtttcattccagg

SEQ ID NO: 80244 - DNA, 505 bp, Citrus sinensis
  Intron number 2 from transcript orange1.1g024985m (locus o range1.1g024985m.g) derived from phytozome v7.0 (chr-ID sc affold01467; pos 23146 to 23650 reverse strand)
attacttgggtcctgagtgtccaaagcctttaaaggtttgtttctgaaaggcaatagttttcgataatttcattagtcattttgatcaagttgtctttctttggttcttttctgaagttttagactccttgaaggttggactattggaagtttagtatgaatataatttaagaatttgcctagtgaagaggcagctactgctttgtagccactaattttgattgggtcagtgcttttcactggaatttatgcagagtattattattattattattttctgttatacggaatgctgatcaccttttaggatctttaaatttgatggacgtaaaaggttattgtaagttgtcaaaccataaggagaatggaattgattattaaaatttgattatggcttgcccttaaatagtttttgaggatgcatgatattaagtactaacaatcacaataaaaacaaattttgtcagctgatcatttttccattcttttaggaaatccttcaact

SEQ ID NO: 80245 - DNA, 880 bp, Citrus sinensis
  Intron number 1 from transcript orange1.1g032837m (locus o range1.1g032837m.g) derived from phytozome v7.0 (chr-ID sc affold00046; pos 204869 to 205748 reverse strand)
gaaaaactcttactttgctatagttattgagactggtaactttcgttttttttttttttggtcttcttttttgactttttttatttagcttctttttgcgttgagctttctttctgcagatccagggtggtaactttgttagagagtctttcagttttgatctttattgaagttctttactaatgtgtgcgtgtgagagttaaaaaatttttcctgtggaaaattgttgcttgatttggcaatccaatagttggatgagaaacaagcaaatgaatgcttggcaacttcgcatcaagactatgttttcaaccatataaactgaaaagagatcctttataatctatggtgatatttttgcttctcttgggaggttttagtttatgtccccgctttatgtttttcattgattgatttatattacaggtggtcgtccggcttaacctcaccatcttggtgttttgaaaaaagaaaaagagaaatctatgggtttgagaaaaattatgattaaggtcaagtatgcacataaaaatagatttaagtgattcatcagtaaatgagtgaaattgtgaacattagaggtcagaaattttgatatattgactaattttttgtttcttttctttttttttgggttgtctttctttcttttgatgcaataatgtaagatttttgatttagtgctgagttttatgctgttgttacagtttgcgcgtaaaagtagatttcagtgattcataagtaaatgagtgaaattttgaacattagaggtcagaaaatttgatattttggctaatttttttgtttcacaatttttttctttttggctgtctttcttcttttggtgcaataatgcaagaatttcgatttcgtgctgagtttt

SEQ ID NO: 80246 - DNA, 746 bp, Citrus sinensis
  Intron number 1 from transcript orange1.1g023788m (locus o range1.1g016272m.g) derived from phytozome v7.0 (chr-ID sc affold00004; pos 2990677 to 2991422)
gtcaatctttgcgagttggttctgcttttctcaaggtttgttgttaggcttttcaccttagtcaagatatcttggacctggagtttcttcttaatagtcaataattcaagattgcgtcaagtttgaatcattgaaccaatcaacgttttattacttttaaagttgaagttacttaacacatttaccttcttgaacttttgtagtccggagatttctgtagatacacgtcccaggctgctgcttctctgcaacaagattgtgaaccatctgcttacaggtaactgtgtgttacaaaagtacaaataaatgtaaaccatctctacagcattatttcaatgctttggttataaaataacagcaattatgtacactcgatgtccgaaccatgcaaatgaatgagttcaatctgtaatgctctccatttttgaattctgtgccttggtttgaacaactcctatagcttgaactgtttgtaacaatggtaaaatatcaaggagcgaaggaattatttgtaaattgtgtacgtatctgttctcttgccctcactgtattgtccttatgatttttgcttttgttctttagcgacgatgagagtgctgatcatatggactgggataaccttggctttggtcttacaccagcggactacatgtacaccatgaaatgttctaacgactattttgagaaaggacggctgagtcgctatggaaagattgagttgagcccttcttcaggagtcttaaatt

SEQ ID NO: 80247 - DNA, 969 bp, Citrus sinensis
  Intron number 1 from transcript orange1.1g002905m (locus o range1.1g002235m.g) derived from phytozome v7.0 (chr-ID sc affold00025; pos 459192 to 460160)
aaatcatcaatttcactcaacgctcatcacaagaggttcgtttctttctctctctattttcttagatcctgtggatttgttgattcattttctcggcagccaaactgaacatttgttaattttctcgttcgattttggttattcatggtgtttcatttttcttatctaactccaggtaatgttacgcttctatgtcatgcttctacattctacaggcgcttgaactgattttttttttttttctttgaagttgaaattgttaatctagcatgtagattttcgattcgtgatgtgaattgagagaattcagttatagcttttgataggactattagcaactatgagatcttgatgtagctaatcattgtcgtattttgtgtgtgtgtttaatatgtttttacttagcccgaattgttgaattatctttaaatttcaatgttagatctgatctggttgaggcatatgcatttaatgcctgtttaacttgtaacttatccttttaatgctgattagggctggattaagacttgtttcatttctgtttttctctagttatttgaaatcacaagggaggtggataggattttgtgtgaggtctggtctaaaaattttccttagtctccgctttctaaagcacatgcacatgcacactgagattgatatggagagcagataatagaattgttgtgttattggaaaatgaacactaggacagtttatcatatgattggaaatgtatcttgtattttggcatctgttgcactgatggttgactaatgtgatgattattgatgatgtctaattcttccataatttaattgtgttctaattttgcttagctgaattatttgatttttctagaataataacggaacacgtaacttggaaaatttgatctttttgtatcaagttattcataggattgttttttacatgaattttaaatgacagaaaagactatctgcaaaa

SEQ ID NO: 80248 - DNA, 442 bp, Citrus sinensis
  Intron number 1 from transcript orange1.1g012096m (locus o range1.1g012096m.g) derived from phytozome v7.0 (chr-ID sc affold00026; pos 1024306 to 1024747)
tgtacaaaacgggcatttccctgttgaactctcaggtatgtacggttgccccaagaactaatatttgtttaaaactattctcttttgttactaacttcagattaattaatgcgtccactttcgttaattactacaactatctattcacatacatttatatatgcttgcatgaacagtagttgttctcttctgcaatgtttgcacttcatcgaatgaacatttaaaatcaagcaatacagaatttttttcccccaatgacaaaaagtaaaacaatattgtatatgctttaaatttcattgtctatgcacttgaggattttcataaacgtatatccatttatagtagcaagctacctacttgtaatcaaatcgttctgcttaattgaacttatgtttgggttattacagaaaggggagaagaggtagtggactacattccagga

SEQ ID NO: 80249 - DNA, 433 bp, Citrus sinensis
  Intron number 1 from transcript orange1.1g018730m (locus o range1.1g018590m.g) derived from phytozome v7.0 (chr-ID sc affold00067; pos 434482 to 434914 reverse strand)
ccacttctaatgtacttgtaagtgtagagccaatattaattacactgttgcttcatacaaatatttaggtactggccaactatcatagccaatttgtacacattgatcttcatagtcttctatcttcgttaggtttctatttttctcttttctcttttgggcttgttccatatgtgaagctttttaatattcgtttaaatttgttcgcgcaagggctaattgcttttagatcaaacgtccaatattatcaataacttttaaatttgttattaatgatttgcattgtgtctggttaattcacagctttaatacagaataggtgcaattattgatcggcgatattgctcactgaacaattttttattttcggataatagctgtaaattaaagtgattttcctgtcttattttttggcttgtaggctgtgatacct

SEQ ID NO: 80250 - DNA, 925 bp, Citrus sinensis
  Intron number 2 from transcript orange1.1g022427m (locus o range1.1g022427m.g) derived from phytozome v7.0 (chr-ID sc affold00433; pos 63984 to 64908 reverse strand)
ctatcagcagactcttgctaccttgaattttgcaggtttcctcctcaaccccttttactttttctatctcggttttgtttaatttgttaatattttattttttttaatatatttgttttgactgcctcattgtctcaaaacttattcgtataaagaatttggagaggaaaaaaaaagttttgattttatttgaggagacaaaacaatataagagttattagtctccaaataaacatttcaatatcttacataatagctgctcttttgaattattaagttgaatataggatttagtatatcaattgcaaatactagatgaagtggattcatacttaaaaatgttgagtgcatttggtcatgtatatgacaccattcgtgtgggcagtgagaataagggattgcattatcttgtattgctggatggttactttcatcaaattgtgcctgttacagttaatttttggtgggaaagttttggtagtattttactttgatcgagaggataactgccttgtggtgtaatcaatttagttgcatacagatatatattttccatcaaagtttgtaatttcacttattctttgtgtcctttctccccttcccccacgaatggcttgctgtttgccatgttttttagtatacttggtatagaaaatgaactcaatttaactttctgcactcacaacaggtatgctcaatacaaactaaattggttatgcgtgttcttttaaaactatagataggggccatgactgtcttactttggggtgttgttagttgatggcgaagtggcactgttgtgctacaaagagccgcttgtcttcttctattccttcaccagatcatttgtcttttagcgctcgatttacttcagatttgattgcctgtagattcaaaaacactaaaggaagagaagagggaggaa

SEQ ID NO: 80251 - DNA, 815 bp, Citrus sinensis
  Intron number 3 from transcript orange1.1g029608m (locus o range1.1g029608m.g) derived from phytozome v7.0 (chr-ID sc affold00238; pos 241823 to 242637)
gttaggtgtggtttacttttgttatgattctcagaatttcagcttcttgcctttttttcatcatttaggaaagacatgatcatttagtttgccgatttggatgtattggtactttcagtcgctagtaaacttggcaatatgaagcttgtttctaatctaataggctttgtttcgtcttgtgtgtgcgctatcatgaggcttcgtggttagatatgaattttatattggatgttccacaaatctgtatttagatgcttgtgcaggttgcaatacaattcagagttgttggattaatactagtgaaacttagaaatgcaaaataaagaagtacatctgtttatttgaggcaattatattgattcttttttcttttcttgtttttgtgttttggactgttaaaatgtccctatctggtgctagtatattctgatgatgagttaagagcacactaaaaggtgttattaaaagatcactttagtttactagagacatcaaaatattttttcttaaaaaatggtatacatgttatgttgtttttgaaatgatagatgaaatttaagttttaataagatgtgaatgaatattcatccaaacagttttaaagctggatgggcaatgtgctgcctgtttatcctctgctttcaataattttgttttgttttgcaggaaataatgcttatattgccctttaattcttaagtgttctgtggtttttgacaatattatctaggaggttatgtgttttgtttactaaaggttttgctcttttggcttttgtagctaatattgtatttggatctgggtcacttattggc

SEQ ID NO: 80252 - DNA, 620 bp, Citrus sinensis
  Intron number 2 from transcript orange1.1g033483m (locus o range1.1g032000m.g) derived from phytozome v7.0 (chr-ID sc affold00004; pos 2506738 to 2507357)
tgctggttccccattgcgcaatcctcctcagccaggtaccatgcatatttctttatgtgttgcttgtcgcattggtagccttgttttgcttggccttttgcatcccttcctttttttgaagggaagggaaggtcctttgatgttaactgtaagctgatagtatgtataataccgtagatttacatgatcactagttctatccttgaggaagggaaatttccgttaaaagcaaaacatcattttttgggctagtaaactttagtaaataatctaatgcagagggtgtcaaatgttttcttttgtttgctggtatgctaatttgcatcatctcgcagcgttatcctagctaagaaaattgaatttatttgcatagctcttctgtgagtgcagtttaaatttgtgggtaagagtggcttttgttatgcatgtgcatgatagtcttatacactcaagtgatgtggggtttcgtattatatgggcaggattcttctgtggttttatgttattgatgtcagagggtcaatcagaataatttccatttaccaggcttcttttaatgttgcttattattgtttctgctgaaatttgatggttctttgaattgtttactgtagccgcac

SEQ ID NO: 80253 - DNA, 685 bp, Citrus sinensis
  Intron number 1 from transcript orange1.1g020727m (locus o range1.1g020754m.g) derived from phytozome v7.0 (chr-ID sc affold00004; pos 1724784 to 1725468)
atttgctttaggttcgttttcctgtgaccttgattagttagttttggtgccctttgctcactttctctgtaaaagtttccttgtaattcaatatcttttgattctcatgcgcctgatagtttatctaggcaattttatcaagtgggttttgttggatctctaaagctgctttatttgtgtcttttatgcatcaaattttacttatttgtcagtttttttcttgcccaaattaccaaaccatggattttcctatcatgtttcccaagtctggtccttgctttgttattatcggagaaataaaaggagtcccatttttcacccttttgttcttgctgtatttatctgagactttttctttagtaattcttttcccttttttgcatattgaattctcctttttcactaggtgtgttcattttgttggcaaattgtcagtttccttatgctttcttgttatacaaagaataattcttcactttgtttcaatggaatgtaaaaactggtgatatttttgtaggcgataacatctcctacttctcatggtctgtttgtgataattggttatcattaacgttcattgttgaggcactgtctcatataagttctatgtggacatttatagaatgagtctaactttgaatatttttgctactttttgtgtattcagtaccttaaggtagattaa

SEQ ID NO: 80254 - DNA, 710 bp, Citrus sinensis
  Intron number 1 from transcript orange1.1g038885m (locus o range1.1g038885m.g) derived from phytozome v7.0 (chr-ID sc affold00081; pos 127227 to 127936 reverse strand)
tgctgacaacactcccaaaattgagcgaatatctggtactttcttttcttttccttattgttattttggatgatttttaattgctttgcttacaacgtttgaattgggtacctttgaataaatccatttgctgaaacttccctattctttagggcttaataataatgtgattcaactctcaataacagcattgttattattattttgataagaataacggtattatttgattttcttagacaagtgggttttttaacttagtttttaatgagctctgggcatcatcaagtaatttcaccataactgcagattagtaaaccatctaattgtgaaaaaatttcagtcattcctagacgaggacaattctaatattaacattatacaaggaacatgaatgtgattggataattgtgttgatttatttgggcatttaatgatcaacttctttcagaatatttcagttccgttgtactttttgataatattgcatcttctgttcgtatgtctttctaaaatcctgttgagatggatttttcttaagttggtggcctaggttgtcatagcatttctgttccttcattggaactgattttgttgtatcgaagttgttgggaaagtgataatttagaaaattcttaaccaagtttacttaatgggactgtaaagaatcaaaattttcacttactttgatgttataggaagtgctggcg

SEQ ID NO: 80255 - DNA, 470 bp, Citrus sinensis
  Intron number 1 from transcript orange1.1g026275m (locus o range1.1g026281m.g) derived from phytozome v7.0 (chr-ID sc affold00016; pos 1151554 to 1152023)
attggatctgggattttcctgccttcatttctaaggtaatttcacttttttattttcttattttgtggttttcaattttactccttcaaatttttatatgtatttttgtgttctttgctttctttcaaggttactttagattcttgcttattttgtttttcgcagcctggcagctggatttgtacttttgataaattttcaaacaacattgtattttgtaacgtctagtcctttacgctttctttttcatttttgaagttggcgtctgatgactgtcatcttttgctatagatggtaatggtattgtgttaaagaagcaattttgttacgtgggtttgtacaaagcttgatcgttcctgttgagtgggttagtgaagatattggagtttatgccgtttccatttatgtttttgaattgtgactgtgattctgaattttttttttattattattccgtgttggatcggcag

SEQ ID NO: 80256 - DNA, 344 bp, Citrus sinensis
  Intron number 3 from transcript orange1.1g027938m (locus o range1.1g023919m.g) derived from phytozome v7.0 (chr-ID sc affold00169; pos 102131 to 102474)
aaccattcttggctttggctcatcaacttctttaagtaagttgctcttcttcttcttcttcttctaatgttttgacctgtggattggattatatatcatggtacaaacacaacggtgtttacataataggtacaggtggagttaaattgatcatgttcaagcattttggaggtccccatttgcttttctctagttccatattacatgaacggattgttcagctttgactttcaaatcttttttcagattctatttttagcttcagctcaattgtagttcttctacgttatagagagtctaattttttgtgactttaatcttatttcagcgctattcaagttatt

SEQ ID NO: 80257 - DNA, 775 bp, Citrus sinensis
  Intron number 1 from transcript orange1.1g047994m (locus o range1.1g047994m.g) derived from phytozome v7.0 (chr-ID sc affold09616; pos 873 to 1647)
gttagatttttgcttatgcagtgtgcttaatttcatttgtataaaaaaaaatttttgagaagtaaatttcatttttttaaaaaatatagcccacccaaaaaaataatgctagtttcgccactgtacccaacctaaatatattcacttaaaagggacaagagaaggactccatttttctttttctttctcttcaactctcttgagctcgagtcacaacttgtaattgattcaattcaaatcagaaaattcagtgaaaaaaacaaccaaccataagttaaagtattggatatgcctattgatcctctaataattactttaaatactttattgttctacacactcatctattattctattaaatttaaaaaattaagttatactttgtacggtctttaaaatactaaaaatccttaagcatgttaaattaattacatttatttactcaaaacaatactcaaagaaaattctttaaaaaaattaagcatatagtactgaagtttttattgacaaatcgacaaatcctaatataatttatttctatcccctacctcttccaaatttaaacttggagtgattaagagaataataataataataataaattgtttagaaaaccactaaccaaaccctatatcatcatatcatatcatatcaattttgttacaaattagttattaatattttgataatttagtgaccctcattcaaccgaaattggatagctttttgtaatggggaaggtattcgcatccaacccgttatctctaaacgtacc

SEQ ID NO: 80258 - DNA, 613 bp, Citrus sinensis
  Intron number 1 from transcript orange1.1g010233m (locus o range1.1g010233m.g) derived from phytozome v7.0 (chr-ID sc affold00007; pos 1951886 to 1952498 reverse strand)
tgcgttacgagtcgactttgatctttcaagtttcggtgagtaatgtcttattcaacttttaaattctgaagttttgtttctatataaattattgctctattttttaatattatttgatcgaatttattatattacattgtgaaaatttctcggtgacttctggcgggtaaacgtgaatttacggtggattccggcgagcttctctccataaacggccaatcaagttgtttattgcatattacgtttcattttttttgtccggttttctctgctttgaaacgagcaggttttaaaaaaaaaaaatcaatttttgattgttttgtatgtgtagttaatttctgaactgcttagctaaaacttgtactgttcaaatatttttttctgatggaatcagtatattttcttttattgctttatcttaaaaaaaaaatcaaatttttatcatttttgttctgagggtattgagtaatgaatgctgaataaagaatggttgtgaattagaattattctgcattgtgaaaagcattttcatctaatttgaatgtaaatgttagtcgtttatattgtcttcactgaagttgaattttgaatgatgtgcactttttaggcgatc

SEQ ID NO: 80259 - DNA, 947 bp, Citrus sinensis
  Intron number 1 from transcript orange1.1g016503m (locus o range1.1g012045m.g) derived from phytozome v7.0 (chr-ID sc affold00004; pos 824009 to 824955 reverse strand)
gtgattgctgacttgggaggtctaggtacttctaatttgttctgctaaattacctagactgcatttgcaaatttcagattgggtttcctttacatatcatataaagctacctttttttgtttgacattgtttccatcttttgtttttttctctttggaattttattatttggttaaatatgaatgataagtcatttcatcgcactcacatagtgagttagaattctaataaatatgaagttctggtagtgccgacaagatttactgatttagctaattattagtggctttatggttaaagagctgtggtctaccactaaagtgatctaaaatggctcgcatctgaatctatcctagattttcctgtagcagcatacatacttatttgagctcttgatttgcttgtaaacgagaggatctttttttatcatgctcaatgaatttcaaaacagggtccgtgtaagatgattcatgatcagcagaaagtcaatatgtgccaaatgttttctgaaatccatggcatcattcatgaggtcaacatagtctgcatgtaaactattttaaaatttgataagaaaaaaattgaagatatagcttttggttccttatgtatgatgatttcatttatatgagtctctgtctgtcttacatcacttggagcagacttggatgcagataacggttttatgcttgtatccttgaattttgaagcttgaattttctgttaaaaatatttgtgcaggtggcatcacttgttcttttgcgtacatatgtacgtttatcaaaagaggagtggttgggattgggaatcacttacagaacctgcaaataaattgttgtcattattagcgtttaaatcactattattgcatatattcttggtttctgaaccaacgccataacttaattgcagttgcctctgataacttgcaaaaagctcgtggccgg

SEQ ID NO: 80260 - DNA, 645 bp, Citrus sinensis
  Intron number 2 from transcript orange1.1g038880m (locus o range1.1g038880m.g) derived from phytozome v7.0 (chr-ID sc affold00004; pos 3568158 to 3568802 reverse strand)
agagatccattcagtatcttatccgctcaggagtaacatctgtcaatctttcttctttacttccttagtgtcgtacccttaattatagggtaaatacttgtttagttcttaggattttggctaatattacctacttagcttttctatttttaaaaaaattattcaaacatttctatgaatgttacttccatttttatagctgttgaattttttgactgatatatatatatatatatatgtatgtatgtattaaaattaaaaagaaaagatagagaattattaagtagattttaatgaaaactagtatacaatcgggatattttgcactttttttaataaaaaaataactggtcaattgacttaaactttatggatgaataatttaaaagaaaaaaaaatctataattaaaagagcattttacatgtactcatttactcaaaagtccaaaatatcactattgtttgtctgtgtttcctgaattgttctctgcgtttaacttgttaaattttagtaatattttgagtaatttttttaaataactactctaaagtgtgaggactaaagacgaatttatccatatacttttcaaaatttaatttgatgtgatctattgtaggaccctaaatttgaaaacaatccgtaca

SEQ ID NO: 80261 - DNA, 489 bp, Citrus sinensis
  Intron number 2 from transcript orange1.1g027295m (locus o range1.1g025457m.g) derived from phytozome v7.0 (chr-ID sc affold00007; pos 2267649 to 2268137 reverse strand)
gcttcttggaagtgtggattttgaatctgttggaggtaaaagttgtgaattttgtagattttcttctcatgttctttggttggattctgaggtactgaggacagaacaacaattttaatctttttgtatctttatttacctcaacaccatcaaaatgtttcattttgatttatgtttctggggcaaaaaacatttagattttgctgcgttttctttatggtttttgttatttgatacatcagatactctgagatggcaaaagtcagtttttattaaaatttatctcctgtttggtggtttatattcgaggggtccttcttgtttttgtcaactagagatgagaattatttgagttctttcatctgataaccaatattcatatgcttgttaatgggataaatttcatctgtgtctctcacattttttttctacccatcattgtggtatcatgtagaatctctagaaccagaggtgaagatcctgagcctc

SEQ ID NO: 80262 - DNA, 413 bp, Citrus sinensis
  Intron number 1 from transcript orange1.1g015182m (locus o range1.1g010547m.g) derived from phytozome v7.0 (chr-ID sc affold00010; pos 2078097 to 2078509)
gagaaaatacagaggaaacaaaagaggtaaggaagtgaaaatcggaatgatttttatatagaaaaaaaaaggagatgacaagtagattatagcatgttttgaattaatatataaaacagttttcttttttttttaaaaaagaaaatatctgaagagatttctggagaagtatttcaaagagatggtgtaaaaatgttttttttttggaaaggggaaagcacataaaatgtttttttgcaacaagcactttttaagtttcatccctctttcgaactaatcttctcggcacaaaacagaacataattggtgtgttctgctatcaaatttgattttagccactggaaggtgatcgcttctttgttgatttatgtgttgcagttatctcacagtgagtgcagtctccttccttacaa

SEQ ID NO: 80263 - DNA, 775 bp, Citrus sinensis
  Intron number 2 from transcript orange1.1g017070m (locus o range1.1g017070m.g) derived from phytozome v7.0 (chr-ID sc affold00010; pos 234815 to 235589 reverse strand)
ctgactctactctcaggagtgctcctctgtttaaggtaatcaatcagttttattgtgtttttgagattgattaagacaataagctgctatttttattaagtgaatgcaatatttatattctgtacgagcacagtattttttatttatggctttcttttttgtatttctgggttatgttgtggtgtgctcgtgttagatcaaactagttaacactgcttttcattttagttatggcacttttcatttgatctatacgccgggagaaatgtcatttgtgcttgtgttgggcatatatatcgttttcttgtgcgattctcaagtgttttcgttcacttgtgggattcacaagtgttttctttatcttgcgtgattctaaagagttttctttatacattttatcttgattattgtgtttttgtgtcatgttaggatgctggtcttaggcttttgaatactattgattgcaataatcagaatgttggatccaggtgtttaggtggcaagagagcctcgtttgtagttcacaatctctaactacttctctatcttttgggatattgatctaaagtgcatctgcatatcaacgtcttgcaaatattagttgctagccgtactggccaatgtgagacgttctgtgtgcacgacccataaatttacgttgagaaaaatcctatgtgaagagatcctttggttattgactgtaatgatcttaccttctctgtttcctttgcattttgttgttacagacacaaaatttaagattgggtgaaaaatc

SEQ ID NO: 80264 - DNA, 325 bp, Citrus sinensis
  Intron number 1 from transcript orange1.1g020744m (locus o range1.1g020729m.g) derived from phytozome v7.0 (chr-ID sc affold00047; pos 261794 to 262118)
gccttttaccttccccacttctctcagacacactggtgactgtctttcaatttcattcccttttcaatgcgtatgcttacgttttttcttttgtctgctttgtctttgtgtaatttgatatacccattaagctctttttttttttttgaacatgtgatattgtgtgtgttagctgaaacatatgcaagagctaagaaaacgatggataagaattaaaagaaggtttctttattgaatcttgatttaaagtttgttactttataagggttttgatttgttttgcattgaagcttcagggatacgtcacctgatacaagctgtaaag

SEQ ID NO: 80265 - DNA, 906 bp, Citrus sinensis
  Intron number 1 from transcript orange1.1g002025m (locus o range1.1g001688m.g) derived from phytozome v7.0 (chr-ID sc affold00016; pos 1295637 to 1296542)
ccgccatcaagatacaggtcgggttcatcgaatttgaatttgaatttaatagtcattgctacattgctgcattgcatgtgtatgtgatgctatttgcatttgcccaaggtgcaatgatcgttctagtgtatgtagattacttgttctattcactattttacgttggtattttttttggatttattttatgatgaaatgtgatgtgaataaagttaatgtgtgttaattattagaaaaagaatgttagttgatctcaccaagaataatttataagaagcaaaatgaatatgtggaaggttttgtattttagtgatgcgatggtctaattttagtacggccaatttttcatatcgagtgatgaacagagtcttcgcgattggcactggaggtgactaattatgtttgtcgttttactgtctctatctattttaaagttatatttggaaagacatttattttcgtaaggttgaagctacgcaattaggtttagtcaagtgaaccgaacattgaaaaccttgtgaaagttttgcagatgctggtagttttctagcaatggacaagtttagtgaagtgtaatttcactttcttgtggataagctttatagattagtagtttgacataaattttctgtgaaattttggctcaatcatttacttcagaattctccaagttgtgattgctatctatgtgtatgtgcatgtctgtaatttattcatatcacgattataatttttatcttataattgtgggtgtcacaaggacacgcttgctcagtgtatggtaacttatataaactagttgagtgaatcttttctttggatgggcaattcaaatctttgtaatgtaatttttgccaagtgttaactaaatactatctacagaaatgcttcagagggaaaaaagca

SEQ ID NO: 80266 - DNA, 271 bp, Citrus sinensis
  Intron number 1 from transcript orange1.1g034949m (locus o range1.1g034933m.g) derived from phytozome v7.0 (chr-ID sc affold00385; pos 162842 to 163112 reverse strand)
gctgtcggagacagtgagttgagacttgttttttatttttcattaatttttggcctgaattaaattattcaaattaattaagttgtgattaatactttagttatttaatttaataaattttatagcacatgttttaatttttttcttctattcaatgttcatagtatttatttgatttgatttctgtcatggtgatggtgtattggtattgttgcaatgttgctaatgaaattttgtttgttagtttaaaaggatgcacgattggtagttg

SEQ ID NO: 80267 - DNA, 990 bp, Citrus sinensis
  Intron number 1 from transcript orange1.1g030105m (locus o range1.1g030105m.g) derived from phytozome v7.0 (chr-ID sc affold00038; pos 877471 to 878460)
aagactcgtgaggctgctaagcgcaatcgcagaaggtttcctttttatttatttgttttttgtgattatgaagagaaaaagataagatttttggtagtttttgaatgaaatacttaataaatttcagaaatttattgaaattgagacagcttgttgtacgttaggcttaaacaagtgggcaattttccatttttcatgtttgggttctgagaaaatttattgaggaaaaacaaaaatatgggtttttcttgatgcttgttgcactaccttttgttatgtctgaactaataattgatattctagcttattggaaaagctaatttgctggtttaatagatatcaagagatggctactgcaatttgattagtgatgcttagcagtgtggaccgagtatctagtgtcttttgcgagctcccgatggttcccctactaattgaatgtatctaatgtagagggactttgacagtaccagttcatcacttagcattggttcatcaaaaaaattggagcactaaaatttttgatatcatttttcttggagactgaattatacaatattgcattgatatacacagatgtattttacaggcatgtatactattacagaatacagcgcaaactaccccctgaattgttatttttgtttgtttatgtcattatgtggggttatttaatttgtgcatctctcgtttatatatcttgggacggttaaaagtggctatatttactgtggtgttgatatattatgctgttcaacatttgcttctttagtggtgatatggtggcttctacgtgactataaatctgtattgtttgggtactcaagtcatgttgatatattttctctgtttagtagatgtctagctttttgtatccatgaggaatttctttttgcatgtttatctgacagattttcttgatagagattacttatttgctcatttttatgatcaggcgttctcaatttagaggtccggtccagaacaggc

SEQ ID NO: 80268 - DNA, 930 bp, Citrus sinensis
  Intron number 3 from transcript orange1.1g018012m (locus o range1.1g013023m.g) derived from phytozome v7.0 (chr-ID sc affold00007; pos 222000 to 222929 reverse strand)
aacaagaggatttacaattacttcccatatccttagtgagttcgcttcgttgggttcacacttcctatttcgttttgtttgacgatgtgaattttatcaaaaacccttttccgttttacgtatgaaagtttgttctgtgcagttttgtgtccgttattcatttgttggttggggtggtttactgtttggtgagctgggctgtgggccttcccaagcgagctgtaagtggacctattaaagcccactaatttgtgccaattgatcactagtatttcattgagatcgatttctttgattttcggtagactttccatttaccacttgccatattcacagtgtttgacgatgtatgaactgctgctggttcgattcgattcatatgaatgaattaattaatatttgcttagccacgtggtgtttgtgtatttcttcttgcattaccaaggtcattggaaatgattttgattttgagagttttattgattacatatcacattcatgattaaacaattaataaaaatgtaaatatttaaacatgtcttgatcacacattacagtagctgtgcatcagcccatgtgtagcatgctttctggaagcttaagaggaatttaaatacttttgcatgccgagcttggaaaacaattgcaggtagaaactgattaatcatgtcagacatatgtttgatttaaaagactgatattattattatgttgagtcataaattaataatctttattgcaacgttgagttctcaattgtctcattgcgattttctcccagaaatgtgtactcataatatcacataactgtattttttgtgtagcctattgattcaaaactcctgaagctcttaatccctgttgctgtgtgtcatgcattgggccatgttaccagcaacgtgtcttttgcagcagttgctgtctccttta

SEQ ID NO: 80269 - DNA, 560 bp, Citrus sinensis
  Intron number 2 from transcript orange1.1g039913m (locus o range1.1g039913m.g) derived from phytozome v7.0 (chr-ID sc affold11043; pos 920 to 1479 reverse strand)
cggcctaaggttattagcattagtggattcttttggtgaagatattaaagccaccaaggctcaaatgtaattaatcaacgaaagtaagtgtttggcttggttttgtggttctctttggatgttctgtttatgtttttatgggtttttgaagatggctcacaggtattagcaccaataagtgctttttataaatcctggtcctaaatttgtaaaaaaaaagttaatgcgcttggtttattgttaattaaaaaaaaaaaagtcctttcctttggcatttatcatgcatttgaaaaaaaaaattattccactgtaattcataaagatatatttttccccggatccccggttacattaaagcgttgatacgaatatccgttgtgattataaaaaagttaatcaatccgaatattcaataagtggtaaattggcacaaaaacaattaagtcacgaacttgcatatagtgcattaaattgaagagcataaagaattttgtaatgcagtccagcaatcaaaaaccattttacaacaccattaaaaaatcattgcagcactattgctg

SEQ ID NO: 80270 - DNA, 579 bp, Citrus sinensis
  Intron number 1 from transcript orange1.1g023835m (locus o range1.1g023835m.g) derived from phytozome v7.0 (chr-ID sc affold00026; pos 928517 to 929095 reverse strand)
caactggtgctgccacaactacaacagtatagtgatcatctatccttttttttccccctttcttcttcttcttttatattttctgttaatttctaatgggatggtatgctgctatcagcaatcagcaacatatatatgtctgagagcgattctcttataattggaacaagaattagatagaattaattctggtaatatcattaagcaatcttcaaatcatcatctgtctagccagctagcgagctctttaattaacattgaaattggaagattctaatctttgcacttaatttgctcctagtatagtatgattttgtttttcgttttaaataaaaataaaaaatttgttgttttgacttggtaagcactccaataagagggtttacatatttaatctttgtgaaaggaaaattcctccactagagatcactacatagtgctagagatcgagagatcaaattgaccattaatattaaactgttgatttgacaattatttagtagttgatagttttgcccatttcttgttttgtttctactgttagcgtaagatttgtttctagctccaactcggagtgcg

SEQ ID NO: 80271 - DNA, 656 bp, Citrus sinensis
  Intron number 1 from transcript orange1.1g001387m (locus o range1.1g001387m.g) derived from phytozome v7.0 (chr-ID sc affold00010; pos 479808 to 480463 reverse strand)
ttcaccagcccgcaagaactcaatctcatcattgcgtaacatctcttcctctttttcttattcttcttattatctgtttatttgagtatttatttgattaatttcatctccttgtttcagatatttcgttctgattgtattttcctgctctagggttttgattcatccaatttttgtttgttctcttcatttcctgttaactgagcttctattaatttaatcagcaaaattttctattgtttggtttataaattgctcatttatgattcttgcttactttttagttgattattgttctcgttgttgctgttattattattattatttacatttgttcattattaagttgtaattcattttaacagtgcatttttttccctgcgtgggacttataataatgtaattgagaaaaaaaaatttgttcccattcggtgtatattgctttgctttggaacagattgtgctaaatctaattttttttcgttatatatttgctgaaagatctgtgaaagaattgttgtgtggttcattctggtgtcacgagtacaattttgaactaattattttgcgccattttcaaatttagttggattttgtgttgaaaatgcattttgatccattggcagtctatttatagttcaatcttctttcaggaa

SEQ ID NO: 80272 - DNA, 413 bp, Citrus sinensis
  Intron number 3 from transcript orange1.1g014812m (locus o range1.1g014812m.g) derived from phytozome v7.0 (chr-ID sc affold00148; pos 348703 to 349115 reverse strand)
cagctaagcggcgacttctgtcagctgttgtcaaggtagaatccggaatgtttattatatctgttaattaccaagtcatttgagttcattttcatctgttttttttagctttatataaaaggggggggggggggagtgcccttgtttcatgatcaatgctggattgtctgctctgtttcattcataataaattaaaatatatgaagaggaaataccagttaagtgttgtgtgcttttgcagttttttctcttttccaaatgatttgcaaagggcctgaaatttaagccatgacagttaggttcagttgaaggaaagctttgttattattaatatttttctcttaattttgcttgattggatagactaactagtgttgtactgaataatgtttgttttgtaatgaagttggagg

SEQ ID NO: 80273 - DNA, 833 bp, Citrus sinensis
  Intron number 2 from transcript orange1.1g011569m (locus o range1.1g009684m.g) derived from phytozome v7.0 (chr-ID sc affold00026; pos 1175770 to 1176602)
tgtctggttgctttcctgacattacagaaacactggtattcattccgttttcatgcataaatccatctatgactataacaacttttggatattattatctctatgttctgaaatttccaattccatccgacatgttcaaatagataaaataaccagatataatatgggttgttctttttcgagctattatgtacctttcaagagtccttcgtcttctgcctggggtattagtcttagtttctgcataaaccagattctaatttttttggatccttctaccttatatatgatgttcatgtaactctttttcttcatcacccagatttcatcttctttaatgtctttgaagcatttgaatgctcaagtgcatcattcctcagagggcgactcacgcccagagcagggtgaccaactgttagaatctaccagtgaatcatcttgtattgagtcaacaatggaggtatctctagatttcttctcctgcggagattttaacctttgatcttgctcggaacacatagccacattctactttcaacttgtagagttttggtccatcttaattagcgatgccattattttcttatttttagttttagaatctcatcgaatttgacctattctggtgaacgaaatgacaatatagaagtacttatgttctttatgcaatgatgtagtggggagaatttacaaattcgaaactgaaccacatatatcctaacttaattcgaaagactgtgttggttgcctgcttgttcacaaaagaaactgcattaggaaggcatcctttgttttgatggttcaaattttaatatatgatattttgcatcagt

SEQ ID NO: 80274 - DNA, 708 bp, Citrus sinensis
  Intron number 1 from transcript orange1.1g022309m (locus o range1.1g022309m.g) derived from phytozome v7.0 (chr-ID sc affold00038; pos 193870 to 194577 reverse strand)
aagataaagattctccaggtcagtcttcgttaatttcttttcttactctcgttttattttattcttttgttcatgtttctgtttcttgagcacattgtgatatgaaatggcctcaactgtttcttctaattataatttcttttctgggtttgaggagttttgattggtgaatattaaaccaattaaagatgacatcatactgcgaatagaaaaatcaaaatttgcccttgaacaaatgatgctcattacgtaacaaatccaagtgcaaaagagaaaattatgtattttgagattcaatccccttcaaccattaacgtaaagattggtcaacaggtttataagagaactgtccagttgatataattatgtattccgagattcaatttccttcaacgattaacataaagattagttaacagggttataaaagaattgtccagttgattaatccttgaaaagcctcgccatctttgatagctgaccttagcaatagttcataaagtcatgatttttctttctttctttctttattattattattattttaataatctgatgcactgtactgaatttgagtctggaaacctctgaactttatctgctgttacaaattggaatctcatggttcatgcctgaaaatttaattaaggctgtgttttgtttaatgaatcaggtccttcaagaatcgatacagttgagagacaggaa

SEQ ID NO: 80275 - DNA, 754 bp, Citrus sinensis
  Intron number 1 from transcript orange1.1g002038m (locus o range1.1g002031m.g) derived from phytozome v7.0 (chr-ID sc affold00025; pos 202832 to 203585 reverse strand)
ttcagccgtcgtcctgctctgtaacagctttaattgttagtgctttgctccctctctttcatctctcttgtactcgtttcgttggtacgtgttctccattaattaatattaacgataataatactaataataaaataacatcttaaacagactattattattattattgcattattttataaatttaactcgttaataatacgtatttaaaatgatgaatgccttaacaggtagaggcattatttattcaattaattgttaattgcgtcttttcatttcttctcctcctcctttctcgatcatttcagttttcgagcgggtggattatatcctgctgggaagttctcgagctctgtttgtgtaaattttatttttttccttcaatttattcaattatctccagctgtattggcttctgggatataatcaatcaattgatttgctatctcctgagtttcgttgtgatataaaataaaaaatatagacaggtgtgtactgggtacaaacaagcatacttgaatgaatttattgaattgactttaagaagacaattgcgatcgtgggttttttttttaaccccctaaaaacaaaatgaacttattgtctctgtgatgtgaaactccagctctcaagtgaataatgtgtaaaacgaattatttaatttgctattgcagtgctagatactcatttttccatgtgtttgctttttctttcagcagaggttggtatacctagttattcttgtattcaatat

SEQ ID NO: 80276 - DNA, 404 bp, Citrus sinensis
  Intron number 2 from transcript orange1.1g030193m (locus o range1.1g030193m.g) derived from phytozome v7.0 (chr-ID sc affold00016; pos 1447066 to 1447469)
gttaggggagatcgttaccaccatccccaccattggtatgttttcttttacttttgaattgaattagatagctatgattgttcttcttatgtatgtattcaaattaatgtgtgaaaagaagaatcaaatggctagactattcactgctgcttcagcacttgtgctagggtaattttatacaagcttaggttctaatgacatttttaatatctaatatttggttatttcactttctgaattgtttttcgagacaagatctaatactcttgataaatttggtaaattaaaagaacttggtgatgcaacacaacagaattcatcccttatgtttattattttcgcttctcttttattatattttcgtgtcatagaatgattcttttaatctgttatgacaggtttca

SEQ ID NO: 80277 - DNA, 952 bp, Citrus sinensis
  Intron number 1 from transcript orange1.1g015834m (locus o range1.1g009067m.g) derived from phytozome v7.0 (chr-ID sc affold00027; pos 385477 to 386428)
gtcttgggctgtccccatttgcattggtgtaacgtgtaagtaagccactcaatttttatttgatgttaagttgcttcgtgcagatgtgtttgaattttggcctctgtgggaattcttgaatctatattgaagcgttttgagctttctttcttgttctatttttgtgtggattttatttccgtcgcattgcttctaatgctccaagatagatcccatttgatatggctatatcttggaatgatttcaggatttggaagaattaatgggagattcatatattgatggagaaatttttgaaactccttcgactgtaagtaattatatccatgtgatatattaagaactaatggggagattcttatggtaacagtttcaaaagagtcaacaaaatgagggattagattgtaaattcatttattattagggtctttctcttatcgcatccgcctaaagaaatggaaaattcaataatctcccagcctgtagaatgactaattaaatgattgcttgaatttaacttggcccagttgcttgtgtattagtcatcatcacttttctttgattaaagctcagctgtcttggtctgatataggtcctcttatcaggtctgttatgatgttgtggagttcacaggtccttttgattatcttggtttcttctcgtcaattgacaacatcttcacctgtctctggacattagctacttatataagtcaccaattcattcatttcattggtgagttttcatttttcttacatgtatggatgctgctgtgcatatgggactgttgttattgcagttgcaccttcaaaattgttatgttcttaagtaaatttttttttttttttagggggagtcctgtaattaccatatttttggatcatgatggctgtttcatcagtttattttcactgcagaggatattatactcagagatatcagtagattctca

SEQ ID NO: 80278 - DNA, 655 bp, Citrus sinensis
  Intron number 1 from transcript orange1.1g009518m (locus o range1.1g009518m.g) derived from phytozome v7.0 (chr-ID sc affold00152; pos 216419 to 217073)
atcatcttgttcactttgctttcaagcctttcaaggtaattttttttttcaataattcgcccgattcttcataaatttttatttaatttgttaaaagtggattcttgattagattgaatttttcgtatattgcgtttttttatttatttacgaggttaggtatttttttatccatagaaagtaatttgtttgttgacatattgtgaattacataaaaaattttattatcgttctgtggaattgtggctgttcttgagtcctatagcgcttttgtagtattagatttatcagtacagtctttgatttgttttcttttaaaacccagatatatatagtttttctttatgtgatttgaagacccaattgttatattatgtgattaacaatttgatatattatgtatatcaaatttaatgcatgtcaacacaaagtattaccatggaaggctctttatgattgtcttgtttcttttcccttgataatatattggttcttgggaattctttggtaattatgaaactaatcaaatatcaaaaacccttcattgagaattttgactcatatttttgaaattgatagtatgactcatgtttcagtgaggaggtaaatgatttttattagcaaatctgatgttatgttcttttggttctaacag

SEQ ID NO: 80279 - DNA, 742 bp, Citrus sinensis
  Intron number 4 from transcript orange1.1g026496m (locus o range1.1g026496m.g) derived from phytozome v7.0 (chr-ID sc affold00136; pos 310702 to 311443 reverse strand)
ttgctgtcgagaaacgcattacttcaccactgctggtttgtttaattcttgttgtgctttttctttacttgtaaatgcttggtcttgtgtgagtatatatatccgtaaatttcatgcttctacaattctttaggcatgtgctttaatgtactacaaagcaaaaaaatatcagtccctcatcaggagggcaataaaatgcatattaaaggatcatgattcacattaatcgtttggatagaaaaagggcaatgttattcaaaataacaacatgtgattaagataaatagcttttaaaagccaaatagcaacaaacccaaaggacaagcctgggcattgatataccgaaagcagatattcttctatgacgatggaagcaaattctgcagccaacacacatatatccccaccatatgtcttaattgggctgggatgtttacatatttatgagatatgtgtatggtttgatgtttacatatttatgagtttctgtacagtctgagtccaggaatctaatttgatgtagggttttcaattggagtgcagttttgcattcgtggtgaaaaactgtttttgacttgttatatgacaataaggaaaagtttgtatgtagataaaatggtatgatgacatttgcttatgtttgcagttagaggttgcaattttttgaagccatcatttatttgatgttcttttttcatttcctaattttatgtttcaggagcccagcagtgtggagaagatt

SEQ ID NO: 80280 - DNA, 739 bp, Citrus sinensis
  Intron number 2 from transcript orange1.1g019166m (locus o range1.1g019166m.g) derived from phytozome v7.0 (chr-ID sc affold00079; pos 307334 to 308072)
ttcctggttagtttattttattcatcgtctgcttcgtggtgtttagctgaagcactttctcatgtcatgaaagtaattgcagtgcctcttcttttttttttttaaaggagattggtgctttcttaagaagtatttatggaatcgaaatttcttttaggccccatctgctattgtgattttgtggattaatgtgaatcaaaagctatagggattaaataaaacttgatagtgtttggtaaatattacttacaaaagtttatattttttacaaaaataataagggtaatataggatcttctttggacaaatgtcgagtaaaatcaccttaacttgcagatgacaaaccacattagtaagtgtttgccaaatattttgcagctggagcttgtagacgtcaactccaagcagagcctattgtactttttcttttggggggcccgggggagggggggaggggggagggaaaaaaatcaaattgcacttgatattcattcttatttgatacagtttccctgaactagagatgagtgcctttgggatataggaagcatttttaggttgataagtagttttgacaaagcactgtataaattggtagactatgttttatctactttgttacccttgtcactagtggatctatggatataaactatggtttttgatctttctactcgcattatgcttgacctctttacatttgttgattgcaggtcctgaagttgagcgactggcggct

SEQ ID NO: 80281 - DNA, 940 bp, Citrus sinensis
  Intron number 1 from transcript orange1.1g025894m (locus o range1.1g025894m.g) derived from phytozome v7.0 (chr-ID sc affold00072; pos 342992 to 343931 reverse strand)
gatagtaagttttgattagggctgatttgttcaaggtgaagaatcggtgtgtatcgggtaaagcaaattagagatacacaaaacaactttgagattttccattttgagttgagtaaaatgacatggagtaggtcattttggttgtgttggcttgatacaacttgaagcaatgccgttttggttcagtgaatcacgtgttatacacgtgcatataaaagcttctcgaagtctgttattgaccgttgaaatcacgagcctgttacatacaatttgaggctgcttctgagttagttacagagattttaaagcagttggttctggtagaacaaaccaaggggggttgagagccatatagacaaaaattgcttcaataggattcttgttctatgatttgtgctctgtaattctcatataaaagctcttgaataattcaataaagctgatcatacctttggtggatgtaagttcctgagaaatagttgaaccatgtaatcctcattgttatctagttcttttgattcttttactcagttttggttgtcattcaatcttgttaaacttctatctaatttgtccttggtagtatcttgtttgatttattttaaggtcttgggcagtgactgaagttcttgtgatctaagctctttagttactacaattacattattgaacagataaagatgttatacctatatattatgagtgattaaatttaataaaattaaaataataaaaaacttgttagtagctggagtaacttggccttttgtaattatccatcaccttttctgctttcacttcacatcaatcaatcttgcatataaaattctacatttgctagattatactaagctatatagaatcaatttcaattcaaagtaatcacattcacatttcacacctaccactagccaccaaccgtagtggcccactcatcagc

SEQ ID NO: 80282 - DNA, 752 bp, Citrus sinensis
  Intron number 2 from transcript orange1.1g036989m (locus o range1.1g036989m.g) derived from phytozome v7.0 (chr-ID sc affold00007; pos 425669 to 426420 reverse strand)
tccatttggtcagtaaattctccttttcggttctagctgattctttcagattcgttccaatcgcattcatatgcttaattagttgcctcttgagtaaaaaagaaaaaaaaatcaagtagcagataaatttctaatgggatatattaaggctcatttgatttattacaactatataatccgagttattagataaagacactttgaatgcttgctttcttccaatattttgtttaaaaggttaaaaaaaaaaaaagactctgtaaagttgccataaaagcaaagcagactccactaatagttcctctgattcttggtaaataatagagacattcaacttctcactggctattctctcatttctctgaactagcttagtactattttctgatattgacgatgcttccaaagtagaaagattttagagaaaaattgttgtctcattttccactaaacaaccaaacttaacaagctgttttcaacaggacaaaaacagagaaatacatatttccatgtgcccaatttgtctgctaatgatatattttgtcgtaagctgatcctgactatcaatatatttatttaattttagttatccaaagacgtaattaaatcatttcaccgtaaatgccaagaccatttttgcttttgttattattgtttgaaattgatgtaacatcctatcttcataaccttagagaaatattcaaaatattgttgcaggctgggggtccttattaccaagttaagaaagggag

SEQ ID NO: 80283 - DNA, 638 bp, Citrus sinensis
  Intron number 1 from transcript orange1.1g035424m (locus o range1.1g035435m.g) derived from phytozome v7.0 (chr-ID sc affold02775; pos 10548 to 11185 reverse strand)
ggttgcgccctcttgcatactctttattggcccaggtaacaaatctttattttgtatttgtgttcttttattgttgattctatcttgctttttgcataaaaaagggaaaatttctctaattaatcacaatgacaagaaactcccgaattattttgaagttttctataaggtaatgttgaaacttggctgttcaatttcccaaaatcgtttcagttttgaaaaaatccaccgctcatgtgctctggtacagaaggtaaagatgaaaataacttgtttgattttgaaaattaaatccgttgctccttattattccttcatttattggctttttccatttattatgcatagttaacaatggaaattgatctctcaatgccttgggttttgacctaactaaaatttgggttctttaaaatcgaaggtggaggttaatttggctgattttggatgatgaatttatcactgacaaatcaaattgattgagtttagataaaagaatatgccattttatggtgtctttgctctctttgaagtttatagcaaattcttgtaattttaggttcaaatatgtgcatggtgaaaaattaagttaattgattgttttaatggatttgcatgaccagtttttgcacaatatt

SEQ ID NO: 80284 - DNA, 617 bp, Citrus sinensis
  Intron number 1 from transcript orange1.1g030623m (locus o range1.1g030623m.g) derived from phytozome v7.0 (chr-ID sc affold00197; pos 182253 to 182869)
gatcgggcgaaagaactattagacaattccacaaggttagtgcaatacgactacatctacctaattttctgattgttggaatcaatatgaaagatacaatgacttttagaagtgttgtaactagcataacagtccgtcattctagatacggtatctttggatggagttcttgagacaatcattctattggtcaggttctttaatcttgctttgcttaatttattcatttcattaggtgcattgaatttccataagcaaggttttatgtcaggggtttctttttgtgtcatttctatgtccgtggcttagttttatgcttccattttggcatcttttttgcgctattagctgtccgttgaaaataggtagatccccttgcaaagctagtgccccaaaatgtttcactgatacttcaaggatccctggtgcctcaatgtgtttcactcatttaaataatgattaattgcaatgaagatgttattgatattataactgaaagtttatctggacaaattcagggctatggtgactttagtttagtttgttgattttgttaagaatgtatcttgatattgtggatgcatttgacttttctctccttgataggatagcacgac

SEQ ID NO: 80285 - DNA, 549 bp, Citrus sinensis
  Intron number 1 from transcript orange1.1g033500m (locus o range1.1g033431m.g) derived from phytozome v7.0 (chr-ID sc affold00004; pos 631307 to 631855)
tccctacgcccacgcctcctgctggtacttttttttttcactcgtttcatttttaattattttatttaaataaataaataataatattctataatgagttatttacaaatattattcttctaaattattggatttttatgagcaccttatttcactctaaactcttgtagcatgaaaaaatattcacaggtgactttttgtttcttaaaagctttatgccaatttttgggtattatgtaatgtagtgatgctcatttgaatcagtggcatttgaaatcgaacaaaatgatgtgaagacatttatgtgcgtggatcatttatgaattacagttaccacttcactttctatttatacacgtgagcttagtagaatataatatcaaaactaacttgctgaattaacaaactcttaaacaacttgttgactggccgtccacatcagctgctgacttggcattgatacttagtgaggtagcttttgatcatctgggctaacactctgtaattactttcatttttgtgttatagcaggagaagctgcgaaggagg

SEQ ID NO: 80286 - DNA, 635 bp, Citrus sinensis
  Intron number 1 from transcript orange1.1g028376m (locus o range1.1g028376m.g) derived from phytozome v7.0 (chr-ID sc affold09623; pos 287 to 921)
ttgtaaatgtaagttttatgcaatcaaaggatggttttgctaatgccttacaagaataattctgcatattacaaaacttagctcaaaagattcatcctaaatgagatgatacatgatgtggcactcatcaattgattaatgaatgtttcataattattaaaataaatttattgcaattcacatggtgagttctatgggatgaatcttttgagaaacattctcggatagctagtataattgtataaattagtgtatggaactcagcgaggaggctacgtaatgaaaaattatcaatcataatgtcgaatgaaaagatattcttctggaaacaaaaagatcagttgcttttatgagcatcttcatcaattcacatgtatgatcttgcctaaacagtttaattggatgaacatgccattaatcattcccgttattttctacttgtggaatcctgtaattgagtaaacaaaggccatagggttaaatcttttgctacttacccctgctcctctttctttattggtgtgtgacctttagactttctcagtttctcaactttctgaaggattttctctttacctgatagtgccactgatggactttttattcgaatttttctttccccaggtttttttgca

SEQ ID NO: 80287 - DNA, 882 bp, Citrus sinensis
  Intron number 3 from transcript orange1.1g030957m (locus o range1.1g030957m.g) derived from phytozome v7.0 (chr-ID sc affold00051; pos 245001 to 245882)
ctgagacacgtacgttccgttattttatgcaagggctttttaggaatttcatttggttatttctttttatttttcttttttactgttggttatccttccttggaagttcgatactttgcatgaaaaaatgaaatatcccgtgtatttggactatgctgtagtagaggttaggtatggggaaaaaaagggaatgaaaagttgaaaatgagagaaaatgagcttatcattaaatgggccaatggggtatatgtggggagcccacccggcggccatcactcttcaagtctcacccattacgttttattgatggatacggtgggatttaggcggtgtttattttcgagactatacgactgtgccatctcgttgtcacctactccattcgtccattgtcgaatataaataaaactcatgccctcaacagtataaggataaggcgtgaatccgagcctccatgagagcacatttcaaatttcagtctctttcaaaatattttgattgctaaaaaaaagggggaaaaaaagtatgttagttcacaacttacacgattcgtgccacttgatagacagtgggcagttgttgctttctcgatcatatgcttgctttattatcactgatgttttaagcacacgataggcctgcagttgctttatgggcttgccttatcttggggatcatggcatgtgttttatggattcctcttggtattaaagctatagagtttctagggcccaagcaattgtgtgagggtggtcctgtgttttggtactttagcggtagttgcattagctttggtgaattgtgatcaagtttaagttgctaaaatttgtttcattttgatttgcagatactgaagaacaccacggcgagccgaagaggagg

SEQ ID NO: 80288 - DNA, 386 bp, Citrus sinensis
  Intron number 1 from transcript orange1.1g020568m (locus o range1.1g020582m.g) derived from phytozome v7.0 (chr-ID sc affold01513; pos 16748 to 17133)
gtttcgcgcagatttagcacgaacgcgaattttaggtagcattaaaattaattttcaattttatatttcctttttaaaaaaaataaagatttcttctttttatctttttttcttcaatttgtctcttattgatttaatttaataacatatatgaatatttttagggtttcttttatggtaacttgttgtgatcacggcgttttgttgatcatctattataactgaatcactcaactgaagaagtatttaaatgactgggctgattgggtgatttgaatttttataatttcatttccttttttgggtttggtttatcactgaagccagtttagtctgtcaagaatatatttgtttcattgaatttccctctgcagttgcagttttgc

SEQ ID NO: 80289 - DNA, 393 bp, Citrus sinensis
  Intron number 1 from transcript orange1.1g015112m (locus o range1.1g015112m.g) derived from phytozome v7.0 (chr-ID sc affold00047; pos 235289 to 235681 reverse strand)
tgacttgctggctaatttggtaataaaataatgaaaaataataattttatattctttccttggtcccttgtttgattttccaaatgcatcatttttcgttttcttgtatggtatgtttaaaatatttaataacctcttcctttccttacaagtccacacatctttaaatgtatttaaatatgcatataacattatactttaatgtgtatttaattcattatcgccggttttgatgcttcttgctcagatcaacaaagccagatgttttgccaagcttcagtttctttgtgttttggcaattaacatgattggccctggttttgtatactgattttcttgttgaatgctgatctgacagatatattttgaagtgtaatttggaattctgaggga

SEQ ID NO: 80290 - DNA, 425 bp, Citrus sinensis
  Intron number 1 from transcript orange1.1g004369m (locus o range1.1g004369m.g) derived from phytozome v7.0 (chr-ID sc affold00004; pos 2671180 to 2671604)
aacccagcagctctcttgccaccctaaaggataaggtaccttttgttttccactccactcttcattttctttttccaattttaattctgcccactgaaggttgagcatcaattcttcagacatcttttgaagattatatcttagaattaacaaattgaaactagaataattagctaactagtatttcggaagtgcttttacttgctttgatttgaagaaatgaaggggtgaaagtttggtatcagaggctgagtgaccctgtctttcaattattcaagtgctagttttggtttctttgttttcgtcatcttaatttattaagaaattttcattagggccttgttatttctttctgcaagcgctgacgccaagccctatgttatatcacagaatcacaccgtttcatatcagagaagtgggagtaa

SEQ ID NO: 80291 - DNA, 800 bp, Citrus sinensis
  Intron number 1 from transcript orange1.1g046765m (locus o range1.1g046765m.g) derived from phytozome v7.0 (chr-ID sc affold00004; pos 3892941 to 3893740)
tcccacagagcaaaattttgctccttttgtgggtggtgacattgattaaactgtataactttttaaactaactgttttaaaatcgttatcgcatggggatgtagctcagatggtagagcgctcgcttagcatgcgagaggtacggggatcgataccccgcatctccaattcggattactaatttttttatattttttacgtccattttgacagacaaaagctcttatccgcttctccattccaacacttagaaaaggaaatgaaagtcataaagtttcaaagcaagtgcaagttggtgacttacacacaccaacttcactctctctgtctccaaccatttgctgctaatcatatatcaaaactatcaaccaaccttgataatattgtttaatcagctcaatttccactgtaaacaggcatgtgacatgtggtctagtactttcttggacaacttttgttgcctacaaatccgtaacgccaatactattagtttcataaagttatcatttatataaaccttcaccacccactagcagatatttcttattgcttaggggttacagcttcttaatcattatgacacactcagttttgccaaaaccaaattcattcatcatgtccgttttgatcttcatagccatatcttgctgctgctgcttctcaggtcattatcatcatatatgtgtatatgtatggttaccttggaacactatgtgtgcttcttctctttagtcattcagtatacatatttttttcatttctcatcaagctattcataactcatgcatgaacaggatcat

SEQ ID NO: 80292 - DNA, 478 bp, Citrus sinensis
  Intron number 3 from transcript orange1.1g009837m (locus o range1.1g009837m.g) derived from phytozome v7.0 (chr-ID sc affold00007; pos 800744 to 801221)
tggttagtctatactcagctctgcacttgctttatttaattgaagctggattccattgtgatgcgaaaaagagtccttcagtcaatttttgtgtgacccacctagtggcctttgctattaactattgtaagcgtgtacctagaatacatattacaggattgagtagaaatttaaaaatgccagccaaaccagtggtggaatataagtatttgactcgagttcaataattgtactggggtatgtttgaatgacttttgttttgtcttttttttcttcggttaaatagtaacataaggatcttacaacagataagcacaaagccactcacttataagtcagctgccactattaactaaaagctaattttggctcacccccattcacacatactctaatcttgtgggggagtattaattttattatgccttaaagcaatcgctaattgtcttgtttatgtttatagagatttcttaacaca

SEQ ID NO: 80293 - DNA, 943 bp, Citrus sinensis
  Intron number 3 from transcript orange1.1g001158m (locus o range1.1g000392m.g) derived from phytozome v7.0 (chr-ID sc affold00349; pos 57890 to 58832 reverse strand)
caggattcagccacggtaattgctttacagtttggttgcacatttacaagatcatttcgacatcttcgctgttatgactccccaaatggcaattggtatatggtcaaatggtttgttaatacaagcaaattggaatatacaaatcttagaatatttgggttgatgcatggtttgttgaatgtcaatatatgttccaaaaaaaaaaagacgtgaagggtttagctcaaatgttcagtctttacatggttgtaaactaagattggtaagattccagtccttttcgtaggaacctaaatcattaactatatacgtgaggagtttgtataaataagattttgtttgtggccgttaccacatccatgtgtcagctatatgggtgctgaaaaagtagtctgaaagtttttcactctttacctcggagtacatagtgttatagcacaaatttcaaagttggcatttcacaagttgatcatacgagaacaatattgttaaactttaatttcatcagaagaagtaaaatagagtagcaatattaagtagacaatagtcctgactgaaagagctgctggcttctgattttatttatttaagaattgcatgcaagtttaaatttcaacgagaggttatgttctcatctactaataatactgtaaacgtttacatgattaggtgatgttgattttacatgttcatttagagaataaaattgttgtcgcttccacaactgtcattaaattaatctttatcctgcccttagaattttttgaattgaatgtattgttgctgagatgctttccatacgctgcagcaggaaggattttcctgaagtttacatttcactctttctacatcattaattttttcaaggattacatagctttctttctccaacctaggttttaattgtggggaagctgctaactttggaactccacagtggctt

SEQ ID NO: 80294 - DNA, 813 bp, Citrus sinensis
  Intron number 1 from transcript orange1.1g026055m (locus o range1.1g026027m.g) derived from phytozome v7.0 (chr-ID sc affold00772; pos 57630 to 58442 reverse strand)
tcttctacggccaggggacacgacacttaaactctgtgagtcgactcagatttcattagcccttaagcttccattttcattctaatcgatatatgctgcccttcgtagattttcagcctttgatcttgttcaaactttctgctttgttgttatttttgtgatcatgttgcttttttgccgttttatccatctgggcatttttttcgtttgttgaaatatactgatctttttttttcaattttgttatgtattatgcttttggttggtgagaatatgtaaagaggaaagtaaaagaaagaagaaaagcctattacaattaattcatttcattgagcttgaatcaaaatctgtatcattaataattaatctgaagaaggctcaatttatgtcttttgtttttttttttctgaaagaagagttttgagggcaaatttttaactatgattgagatggaagtgatgattatttccccagatgatcgacaatgattataatgtgcgatttttctctttttgagaatccaagccagtattctgatccatctccatgtcattttaactaactattccactttcattaatattggtcaaaatttttacttttaggttattatattttgtaatgtaggtttctgaatattagagaagatacaagtagcttcaatgttgttagggatgtttaatgttgctatgataaaaatgtctatttgggactgttataggattcgagtatgttttgattttatggcatgcacgtttattgttttactaagctagaccttattctgaatgtgggtttgttattattatagag

SEQ ID NO: 80295 - DNA, 603 bp, Citrus sinensis
  Intron number 3 from transcript orange1.1g022495m (locus o range1.1g021838m.g) derived from phytozome v7.0 (chr-ID sc affold00007; pos 1495029 to 1495631)
gcctggttgggatttgtttgctccttggaaggcaagttggttttgtatctcttcagtagataatctgtacttgttttgattacgtagactcatatccatgttgaaagacaaccattttgcaattgctggtacaactatgcccacaccttttctcttgtcagtcattgctctaaaatttcaatctgttcttgtgtcaatccatggacaaatgcacgcatgttgttgtacagggatgcacatgattaatcttacctgtgtttatcttacttgcttacatctttgtttatgacttcagaagtgtattaccaaacgattattgggttaggggttatagtttcatatttggtattaattcttgaaatgatgaaatccgtcgttagtctagtggagttatgtatacagcctttcatattaagttccacggttttatcgttaacatgcatgatgcatcccagaattcaatcctccatcttgattggatgcatgaaagtttgttgtttcatattttcatcttccggactatttggtagattatgcgctgtagttttatgtagcttatgaatttcaggttgataattttggcacagtaaaccttgttgaagc

SEQ ID NO: 80296 - DNA, 516 bp, Citrus sinensis
  Intron number 1 from transcript orange1.1g044222m (locus o range1.1g044222m.g) derived from phytozome v7.0 (chr-ID sc affold00241; pos 180997 to 181512)
tactccattccttcacaaactgttcaaggattgtatgtatgtcagcggactcatattctcttttacttgtttccaatttcagtaggtaacagcctatccactcattggttgaacggtgtcattatttacaaagttaatttagaaggttcgttagagttataattataaactaaaaattggattttgattataaatatcagtgaaaagtataacatgaaaagttggttcttgaaaatttttatgggttaaaacataattttaatctccttcgaacaaagaaaaaactaattataggtctgggatatcgacgttgcagctttccttgggctttatccgttattctttgtttattatgaagaaactttatatattgtgataagcgttatatatcgtgataaactgataaacgtttttaaacattaatgctattggagaaacgtcggtgaggtagtgtggactacaagtggatcccgatgatgctcagccatttctttgtgggactacaagtggatcccg

SEQ ID NO: 80297 - DNA, 621 bp, Citrus sinensis
  Intron number 1 from transcript orange1.1g011721m (locus o range1.1g011721m.g) derived from phytozome v7.0 (chr-ID sc affold00010; pos 149011 to 149631 reverse strand)
tgagggccaagcgtgctcaggttccttttcttttgatttcatttcttgctcctgtttcgatttttcacatttcgttcactttcattgactgttctttctgtattattcttgaattcttacaattatcttcccttaaggtttacgaagcctacgtcaatattaatttgacaatgtaatcttcttcttgtttgaagttgctttctttaatggacaaaacttgcacagcaatacaccatgtaaatgtattattgattacttctttgctaagttattgatggcgtgttcccttttcttgcaaattacggtttggcttaaagtctgaaactgacaaaataaaaaaaattaaaataaaaagcaacattatttagaatgtagaaagtgtttttactcaaaatcagtcaaaagggctttctgcaaaatcagaaaggaaatggagaactttggtttctatacgtcatttgttctatacaatctgcttgcttagtattctaaaattatccctttacagatctttactgaaagttagagtgaatttatcaacgttctatttgcttagctgttctgatgctgaaattttccaattcagttggtggagaaagatccaagtagggccatttccct

SEQ ID NO: 80298 - DNA, 439 bp, Citrus sinensis
  Intron number 1 from transcript orange1.1g035016m (locus o range1.1g035016m.g) derived from phytozome v7.0 (chr-ID sc affold00189; pos 182578 to 183016 reverse strand)
gagctgtagaacagagcctgcgttctgctcggtaactctactaatactctcttttcatttctgttgttttcttgacgtactttgatcattataaaaattgagataaaattttaaaggatcccttgttgattggagtgattcgtctaaatgggtagttaattttccctagagttaaaggttaaggaaatgatgagatggtgggtatgcaaatgcaaacataatcaagcaaggtatctgcaagtcgttgtaaatgatgaaatttattgaacaaaatgagagcaaatgtgttccaagtttctgtcaatatgtgagattgatttgtctatgccaatgcacatttggaacagaagagaagagacttgtttctgaaattgtcgtctctaattaattatacgtgtcatgttttgattcgtgtaaatattactgcagaccacccaag

SEQ ID NO: 80299 - DNA, 670 bp, Citrus sinensis
  Intron number 1 from transcript orange1.1g011121m (locus o range1.1g011121m.g) derived from phytozome v7.0 (chr-ID sc affold00004; pos 3300161 to 3300830 reverse strand)
tctaattagtagacttgagaatctacaggaaactggtaggtgctactttgactaactacattctttatgctttactctcttgttatttagttgttacaagcattaagcatgtcaaattttaaaatcagaggccgtaaaagctatcagtaggagtgggcacaaaacccgttgccctaaagaaaataaaaccaaactgaactcattttggtttggtttggttcataatttttaaaaataaccattcggttcagctcagttcggcagaaaaacctaaccgaaccatgctcgtgcccatgcccacacctatctatcagaactgggtattgaacttatccataaccattgaatagtgggtggagaacattttaccttattggaagatgaaagcaaaatcataggtcttttacacaacaaagaaccagtatagtctaaggcaaactattcttggttactttaaaattcttccagttcctactatctgagaatttttatttttggaactttatttaaatctcaaacccaaatctttttattacaaatgcaaataaggaaccctccataagtttggatgtttggtaactatcttgcatcaccttttgtgcatgatcttaatttcagtcgttctctaatattgtttaaataagtttatgatgaacttccttggtgcagg

SEQ ID NO: 80300 - DNA, 750 bp, Citrus sinensis
  Intron number 3 from transcript orange1.1g023623m (locus o range1.1g023623m.g) derived from phytozome v7.0 (chr-ID sc affold00117; pos 144733 to 145482)
aaaggtattcagtaaccttgtgcagttttcataatattgcttcaagcatgcatgtttccggcaaagatattcttttatttcttccttttttttccccctttcttttgtaagttaaggattataactgtgcttcagcaaaaaggaacaaaattactcacgagaaagctggagcattatgttgtacaaaataactctcaccacatagactataaattgtgttacatgttcatgactagtcccaggttttattgtcttgtggttagagaattcaataaaaatattaaaactaagttactaaatatatcaaacctgttggacttggttggatgcaaattattagcagacagaggcttctgatgaggaaggcctgaagtgtatttaatgattcaatctttgagctgcaagctgtttactggtttctgcaagccattaatgacatttattgatatatgtagagatatatatctgacatttagcgacatatgtagagatatatgtttaacgttctgcatatttgcctgtttaagtggattggtgaattacagaaactttcttccttgtccatgaaactggaatagcctgctcccttgtaggtgaaagtccagaaattatgttatcgtactgtttataaatgtaataaggatttgcctatatctatatatacacacacatttttttttaaatgcctttcatacatttgatttatatttatgatagaattttttattatcgttagcaatcaagaagcga

SEQ ID NO: 80301 - DNA, 403 bp, Citrus sinensis
  Intron number 1 from transcript orange1.1g038343m (locus o range1.1g038343m.g) derived from phytozome v7.0 (chr-ID sc affold00407; pos 24756 to 25158)
ttccggaaatattctcaaataaatcttgttttgaggtaagttattggttaaataacattccctatttgaaattactaactgttgctaaggtttcttgacccattaataacttaagctagttccttttgttgaaacaccaaattactaattttttttacaatcatttgatcgtacaactctaaaaagatggcagggaataaataagaaatgactggcttttctacttcactatttattttgtaccacataaagagttcttttcctttctcgcttgttgatttgatcatgtctgtaggcctcctatacactcaagtttcgttttctgattctctgttgctttttctttttcaatttttttgtttttacaggttggttcaggtgttggtttggttggaatttgtct

SEQ ID NO: 80302 - DNA, 179 bp, Citrus sinensis
  Intron number 1 from transcript orange1.1g004514m (locus o range1.1g004514m.g) derived from phytozome v7.0 (chr-ID sc affold00189; pos 211553 to 211731)
cttctctctctatcaccatctgggtttcaactgaggtatgttcattttattttattttgaatgtttagtattaatttattagaatttaataatgttttaagtttttgtgtattttcttctaaatgttgactgttaaaaacttgaaagagttaattttgtttcatgaatcagggttgttg

SEQ ID NO: 80303 - DNA, 345 bp, Citrus sinensis
  Intron number 2 from transcript orange1.1g008507m (locus o range1.1g006056m.g) derived from phytozome v7.0 (chr-ID sc affold00123; pos 291918 to 292262)
agccaggtttccattcatctcttatatgcttatatgtttgcaatggcatttacagtttctacttttctttttctttttttatgaaaattagttcttgatttgtaaattcggctactttgctgggattctaaactaattgaagtggggattaattttagtttcttagtgatatgttttgtagtatggctgttacttcatagggaacctattcttcgttttaaactgttttgcaatcattgttatttaagtagtgtttatccaattgtcaggttattgggttgtgtttttttgagttatttccttacttggatcagcatttgaaatgtgggttataggtacatcggc

SEQ ID NO: 80304 - DNA, 796 bp, Citrus sinensis
  Intron number 2 from transcript orange1.1g002447m (locus o range1.1g002447m.g) derived from phytozome v7.0 (chr-ID sc affold00004; pos 2951380 to 2952175)
acaattctgcagcactggtatgtttattttgtttgggttattaggttcatttgttgattctcatttggctttcctttttcttgcttgttttcttatggctggatggggtgtttcgtgtcttcaaatattcctgcacacttgttcaacttacaacgttgagggaaatcaccattgttttattttcgctaatttatggcactaccaagtttaatttagtacttggggattttagtgggctggcattttatgatttgatttttagcgttgtaacttgtaaatcaatgtcttacttagtaatgaactgaaaattgcatcaaaggaagccgaatacagaatttaattggaattatggtgagacaatgtcagtagtaaattttggtaatgcagttttggtctgattaccacaattaaatatgaggttgtgggaagctattgaagattgcattgattaataactgacagtatttgacatcaaatgcccaagccatatgaagcaattcatctgatttcatgatttcttcttcattcctcatatttgatggcaaatgatatgtcgagcttggccactcaatttctgtgtgcctgctgtatcagttactacacattatattgcacattttcacttttcactttctaattgaagctctcattatattgcacattttctcagtatattttgtgatacctgggtattctgagcttgtgcattaaggaagttcattgtgctgcttaagtttcatgacttctacttttgctgacagattgcagaacataacaagatcaatttaagcactag

SEQ ID NO: 80305 - DNA, 610 bp, Citrus sinensis
  Intron number 1 from transcript orange1.1g029944m (locus o range1.1g028783m.g) derived from phytozome v7.0 (chr-ID sc affold00016; pos 478691 to 479300)
gccaactccagtacgtcttgcttttaatttctctttgcaatttcatcattctatttatcgtttttgggtagtttatatgttctttcatagacttgattatgtgaatctaagttattgtgaaccctagatctggtagctgaaaggttttgtgagggctatattacaaattaatttatcgataatagagaaaagctattgttaccttagtggtttttttcatcaagtgtgatggcttatatgagtatttaatcttcttcttcttttttcaccttagggtttaattatgtggtgatggacttgatatatcaaagtttaggtggcagtttaattgttatacaagtttaagaaatgagcttctagtgagattttttgttattgattatttcagcgtaggatattaacttggagcatatttttggtgagcaaagcaatgattatttttggaaataacaaaagtagaaaaaaattattgtgactggcttgtgcttctgcttaattttgaagcataggatcttctcatctgtgtgtgaaagccacatcacttcaaaatctgaaataccctctttgctgttgccgagtgcagggcagaacattaggaaattggtgaagg

SEQ ID NO: 80306 - DNA, 723 bp, Citrus sinensis
  Intron number 2 from transcript orange1.1g032526m (locus o range1.1g032126m.g) derived from phytozome v7.0 (chr-ID sc affold00025; pos 660060 to 660782 reverse strand)
ttagattgtaggtacttgtaccttttatttttatttgattttttatttctgcttttggtaatagtgagtcatattgcaaattgtttgttctagggttttgaatagttcttttgaaagcctcatagttttttggtggttagtggccgattctggagttagagctcgaggagagtgtagttgactgttattttgtaatgtgacttagagatttcaaaggaaataactaaatgggatgtattttgatgatatttgcaaataaaagaaaaagttccaaagttcccaattgttggcttgtgggtggttgaccttggacaatttagttgaccgagatgaattttaggggaaattagtttttgttttgaagttttggttggtaattgttctagctattttgtttgagttcttttattctcatgagttgcctttaactggaagaaaaacaaagaattaggtcatataagtggttctcttccataaagagatgtgtcgatttcattgttttttgactgtattgcctatcatggttatctcttgtatgccattgaagaatgcttgatagttttcttttgaaagtatccttctgttgctttgctatttgttgctagaaaatccaattgattttataacctattacttgtgaaggttgtatctgatcataatatagaaattgctgtctttgtttttgcagaattaggctggtagctgttgctacgcagaagtttg

SEQ ID NO: 80307 - DNA, 837 bp, Citrus sinensis
  Intron number 1 from transcript orange1.1g023551m (locus o range1.1g023418m.g) derived from phytozome v7.0 (chr-ID sc affold00047; pos 509762 to 510598 reverse strand)
aaggtatctttttatctttcattacaattcttattatcataggtacccacttgtcgcatgaagttgagattgacatggcaccattgtttttcatgtttttgactgtatgggtagcaactgggttcttgtaatttaaccttctggatgcaaaagattcattttttttaagaatgcccttaatgttaaaatttggttcagctgagagctggagaagtcagagtttcagaatttgaccgctagtatacaaaattgaattaaatattaagatggattcaggttcatgcttagcaatgaagaggaggattgaggaaaatggaaaagttctgtctgtgtaaggtggcggttatcttgattacttagtttatcctttcagacaacttattttaggccacacttttatcctagtcgaggggatgcactcgcgatgcatcaaggccaattccatccgtggcttcccaccccagtttgtccaaattaaggaatcccctcagaaatgtgtgtgagaggagtagaacccttgatctcttgcttccaatccaaggctaaaccaatggggctgtgatgtagggactttttttaatttataaggtggatagattatgcactaacatggttgtattgttgaataagttttttaatttcatctttattattgatttaagaaggaacaagttgtatgtatcaaccaccgttaccttgtcttacttcaaaaacaaagtagtggatggttaatattttatagtgtcaacacttttcttccctttgtctttttcaactatggagctctttgtgattgcaggagaaagtattgggctcatctcctgattctggaaaagg

SEQ ID NO: 80308 - DNA, 479 bp, Citrus sinensis
  Intron number 5 from transcript orange1.1g040575m (locus o range1.1g040575m.g) derived from phytozome v7.0 (chr-ID sc affold05783; pos 1305 to 1783)
tccatatccagagatcttcttcagctgtatagaaggtgcgtagtacataacctcattcattgtcctcttgtaatatttattttcatttttatttgtacatgtatgtttttctcatctgtttccacatgctactgaacaagtatgttttcttcttttgtagtatttataacatatgaagtagtaaaactctgttttcccatatcaattttatggttgccctttttttttgtgttgaatgcctgcctggtagatctaaattctgttcctcaaccacagggcgtgaatattttggtttggtctctgaagttagtagctgcaagaatttgtgctgtctcctttgatttcttctttgtaaatatggctggcatgaacaagctgaaaattacttcccagctccccctcttttttttttttttcctaactttttttgttttgaacaacctggaactcacaaggatctcactctcttttatgtgcag

SEQ ID NO: 80309 - DNA, 458 bp, Citrus sinensis
  Intron number 1 from transcript orange1.1g029613m (locus o range1.1g029630m.g) derived from phytozome v7.0 (chr-ID sc affold00117; pos 246724 to 247181 reverse strand)
ggaagctctaaggtattggatttctttctgtgaatgtgagtgttttttatcccaaattgtggtttccttttgatgttatttttgtgatttaacaacagataatctttcgaaatgcgcattttttgctgattattgtggaaccattgttcccatttcaagcgtatataattcactgttcgacctttagattagatcatggtatattctggaaaaagcattgatttttgcatcaggctatgtaaagcacttggagggtaatctttattttggcatataatgattctgcattgttatctttagtgtttcggttgattctttggtgaattgatgtgtgggttgttctgtgagaatattttcttctttgatgaagagatcttgatgggttgaaaccattgaatgaattgaatgtttgtgtgcctgtagaagaagggggaagtgaagatataacatttttgtga

SEQ ID NO: 80310 - DNA, 941 bp, Citrus sinensis
  Intron number 1 from transcript orange1.1g014980m (locus o range1.1g014980m.g) derived from phytozome v7.0 (chr-ID sc affold00175; pos 231610 to 232550)
tcttcaggggctttttggtaagtaggtttttgttttttattcatttaattgccattttctagtagttggttttctagtcaaagtagttggttttgccatgtgggtaatttgagatctccaatgctgcagtttatttaggaatgttgcattttcatctttttttttccccttataggtatgtttgtggtgcactttcaaatattttggttttttattcgtgttattgaagcactttgcttacatcttacttttgtgtctgcccttaaaagctggaagctagatttcaaatggtaatgaaattgtacatagttttctttggagtcaatgaaaggtggatatgttttcttaacattctctgtaacttagaaatctaatagtgcttgatttttgttgcggaagtgcttttcttaacttttactacattctcttttacttggaaatgtaatagtgctttatatatgttgtggtagtgcttttcttagttttcacttttgtgtctgccaccagaagctggaaatgtatacaataaactgctgcttatcagcatttacactttgggctcaatgtaatgggttgttttcaactttcttttttgacacagcaaattttcttcttcttgttctgttttgctttttggtcacccatactgctgtacataattttagtttttgaaacttgaagatttgtttttactgaattggagtatgattgctgtcactgttgcctttaggtgaatcaatttggttatgattgccattgcttttgcttgctctaatgctatatttctgagtacaatttttttttttactttagtgatgttgcctatgaatctgctaaatcccttgatctggtagaaaatagttctacagtcttatttattgaatctcaatgtaattaaattttcaggcccggaaagcccttcgagctttgaagggattggt

SEQ ID NO: 80311 - DNA, 407 bp, Citrus sinensis
  Intron number 1 from transcript orange1.1g015750m (locus o range1.1g015750m.g) derived from phytozome v7.0 (chr-ID sc affold00271; pos 14965 to 15371)
acagctttaatcaactggcattggagtttcctcatgttgggttggcttaatccctagattttcacttaatttttgtcttgcttttttttttttccccaaatcttttttcggactctccaaagtaaaattttaacccaaatcccaaaacaagagaaagaaattttttttaaaaaaaaaacttagtaaactctgttactctgtgtatactactcatacatatttattgatcccttaaattattatttatttgttttttcttgtcatggttgtattcactcttttgaatacattcttgttctttcaaatataagctgaaaaagatcctttttttttgttgcttcactcgttttcctctaaatattccgaactttaattggtgtatgtgcgagttatatagagagtgaaaa

SEQ ID NO: 80312 - DNA, 653 bp, Citrus sinensis
  Intron number 3 from transcript orange1.1g028480m (locus o range1.1g028480m.g) derived from phytozome v7.0 (chr-ID sc affold10475; pos 519 to 1171 reverse strand)
ataatagtcatctcaaggtgagttattgtatattgtaattgccttttaataagttaaatatttattttccaaagaagttaataactgaaaaagtttctgctaatttgttgtgttattgaataaaagaagaatccttgtaatctgaagcactactaatcccacattcccacttcttttgactagtaattatatacatatttatatttttatcattgcatagaattgataattgaggctaaatacactctagaaatcaggaaatggtcttgtttttacattcttaaaactcgaaaagggtatcagtttttgtttctagcgatgtgggttataagctgttgaagcaaacttgctctttcgaattaaggtacattatggtatgttgtctggtacggagagatacaagtgtgtgaaagtcattattaaaaaaacatcatctggtgtttgactgtggttggtcattattaactgaataaaggctaatattcttgttatttaatttgatgcatttctatttttattcatgtaaggagtaccatagtcgaaacacaagaattattatcgtcttacttatttgtggtttggtaaatatattagtgatcttaactatccttctttttggtcacagtgtggctctgttgcggaaacagttgcat

SEQ ID NO: 80313 - DNA, 610 bp, Citrus sinensis
  Intron number 2 from transcript orange1.1g031661m (locus o range1.1g030270m.g) derived from phytozome v7.0 (chr-ID sc affold00025; pos 867226 to 867835)
ccgaagccaattggaaatctcaggtactttcttttatcaaatctcaatcttttattctttcttttcttacgtatttaattttttttttcttttaattgggtggatcagatcttatgtgtcagctgataaaagtttcgaatggtgaaggaaaagatttgtttttaagttgaaaattttagttgttttagtttagattcggtacgagatgggattttgacttgtaatgatgattttgagttgtttgtttggtagttgaaggtgaaattggtgagaatgttacaattttgtttgtaaaaagtactgaatttgttgaaattgagtggtgttagggtttcagaaagcttggtgatgctacaggggaattgtaaggatattatgttttggcattatgattttggtttctgctgtaagcattttatttttattttaaaaatttttcggattggaatgtcggagtgctgattatgcactatactaactcatgccgttaatgagtttaagtagcactagttactattttggaagtggttaaaagtaatgttaattgatcatctagttttattctatatgagcagaaagcttgggaagtggcacaagcccctttcaagaa

SEQ ID NO: 80314 - DNA, 520 bp, Citrus sinensis
  Intron number 3 from transcript orange1.1g031661m (locus o range1.1g030270m.g) derived from phytozome v7.0 (chr-ID sc affold00025; pos 867920 to 868439)
gcagcctataagtgctctacaaggggttggaaagggtaagcaccaaggaatttttaattttggatgttaccaatttgtgtgatcaaacttctttctgtttcccttctttgtatatattcattaagagagagagatagaagaaagaaaaagggggaatcaagatggaaaccccactttggcctacaagaaattcttctctcttaccactactcgtagatgtcaaatgatattaatgattgaagtaccattaaatcatgtcattctttggcatcttttgtttcttgtcttccagaagagtatacatttagaatatctgcttttattaacaaattccctagtgttttggtagatctatgtctttagactatttatcttgccaatttgttatatggatttagagtgtttcaaatctgtatgtgatattcttcaacttatgcatctactgaagatctaaaatatttaccaagttcactttgattttgcagtttttgagccttacaaggacagtaaagtagatctt

SEQ ID NO: 80315 - DNA, 347 bp, Citrus sinensis
  Intron number 1 from transcript orange1.1g000130m (locus o range1.1g000057m.g) derived from phytozome v7.0 (chr-ID sc affold00046; pos 334645 to 334991 reverse strand)
aacccagctcactatcagctgttaaaggtccaatgcttcttttcacacaattccgtatcacaaaaaaaaaaaaagtctcacatttgggtttttgtgatgattcaatcaattttcgttgtagtcattccctcgagttgtagttaatttagctgcatcagagcctctaactaaatttttttcctcttaattttattttatacttattggttttattgccctctcagtcatccatcaaacagaaaataatgtttgattgataacttgaaaaactagttatttgaagttatttttgatatgatgaaagtgtaccaaattgcttaattgtgttttttctattaatcgcagat

SEQ ID NO: 80316 - DNA, 970 bp, Citrus sinensis
  Intron number 1 from transcript orange1.1g048288m (locus o range1.1g048288m.g) derived from phytozome v7.0 (chr-ID sc affold00465; pos 90746 to 91715 reverse strand)
cagtatatcggtggccagaaggagaaatttgtgaggtatggtttgtggatatattatctcatcttttatttgttattgtatttgtttgaaagatatttcatgtcattgatcacaaatcctcgaggtcttgttcaaacgtgttatacaactatcaattcatttccatgcatggtctatacacggctcctaatcctatctgctaaagcttgattatacaaattgatgaactcagataactatttaacaatggatcttattttttaaaacagttttaagcggaaaagattaatggaatgcatgtcctgcatgcaaaaactgttgtgtttatatgtattttgatgcgctataggagaaaagatttgtggaattcttttatgagcgagaaaactgtgttattgaaaaaatgtgcaggattcaaggatgagttatttgtgaattcatttcactgataagctctgtgaccccacagtctaagatgttcttgcaactcttcagtatactattagttatgatttgcataaaattgaaatgacttcagtttttcttctttattcttttgaaaataaatttccggcagattaatggaacagttaaatttcattttgattttgaaaagatagcaaccttgtgtatggcttactagctctatgcctctttctgatgaatcactttgttaaaagtagtctgcacaataagccaatataattgtacatcaggcgagaggcaaaaatgatttgcaattcagaaatcgataaattttatttgaagatgatatttgtgattgtctctcttccagttaaaggaatctgagcaatgatcaatgcaatgcttttatgttgtacattttgcttttatttcctattttttgattttcctctttcatttttttcttatcaatattgtacacatacttgtgtacggggtgaagtcagcatctgatttccccttgtgttggtaacccgtaggttgg

SEQ ID NO: 80317 - DNA, 650 bp, Citrus sinensis
  Intron number 1 from transcript orange1.1g033744m (locus o range1.1g033744m.g) derived from phytozome v7.0 (chr-ID sc affold00046; pos 638615 to 639264 reverse strand)
tcgaagtctctttacttctcacactttcatttcaggtctgtctcttaatctgttctttttgtttttaatatgtatttattttgcaaatacaattaaattaatctgttcaatggatatcaattttatttctttgattgaattgttaatccttcgtcatttgcttaatgggttttgagagcttctcgttactgtttctgggtttgatcacaaagtgtagcgatcttttcttgaggaaaaaattttcttagtgtttagctatcagtttgcttttggaaaattgtaagacatggatttggttattgtagtgtgttttaatttcttgaacatacttctccttatgatgtatgtgataatcatgttaatcgatgtgtatcaatatagcgtgtttgataatatgcaattttatcatgcatgtgttttaattggtaaatgattttgataatatgcaattttattatgcatgtgttttaattgctagatgatttgtaacatttgttttttaaaattctaatgattttattgtttcttatgatggcttttgcgtgactaattatctaccatggtggctttgatttgatgttgcagtacttttgcacaggaaacttctaagctgaccttcgaaggttttaggtcttctataagcaaagtac

SEQ ID NO: 80318 - DNA, 659 bp, Citrus sinensis
  Intron number 1 from transcript orange1.1g015945m (locus o range1.1g015464m.g) derived from phytozome v7.0 (chr-ID sc affold00007; pos 1847684 to 1848342)
ctctggctttcacaaggatttgaatcttcttcctagtgagttaatttataatttatgccctccttttgtggtgaattatgagttttattatgttgcatgccatttaattttcccaattaaggatcattagcctaaataaatggttctttcatttgtgctgtgtagggatgaaaatgaataaacgttcatgaccagttagttggcaatattgatgtattttagggttcttaacttgtagctctaggaaaccaaatttacttcatgttgaatattttgataatgtttaaacgctaattttgtgagtatcagaatgtgaattgttgtaaagatgattttatctaatgcaatatccaaaagctcctacaggctacagttccttatcaaagatttcactcatggttgttatgtgtcatacatttaaatctttttggggatgagccattttcttgaagttcacatatgtcattgatctacttcatttttgatgaactgtaatttactggacttcacatattggagatgaatatgatgctggatactaaaggcaaattatgactctttcgtgccactgcttctttccatcttccctttctctcctccttttatggcacattttcttagctctagtatatggacaaattgcagaacccttgtctata

SEQ ID NO: 80319 - DNA, 669 bp, Citrus sinensis
  Intron number 1 from transcript orange1.1g022664m (locus o range1.1g022589m.g) derived from phytozome v7.0 (chr-ID sc affold00147; pos 25304 to 25972 reverse strand)
caccccattgaaaggtacccatttgcttgtaccctgacacttttaaccattgcgggagagtaatcctggacttgactatcctcaaactataggtttgagcggttgtttcagagaaactatttattacatgtaaaatatctccccataatcatctctgaaatacgaagaatgccagttcttgcaggattaacacccttaaaaattatgtttaatcttctatagcttgctatgaatctggattcctttcgtaaattttggcttgcatattctggcattcaggaagcccaactgctcttgcgtgaaggggatacaaaaattattggtgctaaatagggaatagaagctgatttgaacttttttgctaaacaaagtagtcattgctaaaagatgatcacgagattaagtcaaaatttttgccgccatatcaactcactttaggttcttgtagaaatttttggaaggacaattcatgctgaatatcatatacgaaagtcaataaaaattttcatgggttcaaaacttagtgacaatgttcacatttgtttcaaacaggaattgcatataatcagaaaaatatctgcctttcttttgaatttttctgtttttatctaaacaggtgttccctataaactttatttaacaagctcatcgttataacatccagggagc

SEQ ID NO: 80320 - DNA, 643 bp, Citrus sinensis
  Intron number 1 from transcript orange1.1g038691m (locus o range1.1g038691m.g) derived from phytozome v7.0 (chr-ID sc affold08821; pos 687 to 1329)
attcctttggatgtaggtctttttgttttttttttgtttgtccgcttaatttattaattaaaccttgtacattgttcttttaatgcattttgattgaatgaagcctgcttgtcacttgacacgacgcataatatgtttgattgggcagttgcattaagttttatttgaccataatgtgttatatttctgttcttccatggtatctagagactcgacatgtagtggcaccacaaaattaagccttgatgtagatttaatgtgtcacgatgttttcatcaggcagtaataatttccatggatcttcgtaggagtaaattagagggagtttaattcaagaatatttgttttgaaattaatttctataggtcagtaggtgaagttccatagatgatgatcataattggctaattaacttttgtattaacttagctaatatgagtattcaccggtgatcattacgtggtctgagctggtcattaccagctaaatgactcacattgtataaggagaaagtttctttgatggactaagctagttcttggagttggagattgcttttttattttgaataattatttcatacatacaatcgtttaaactttgtgcagggagaatcccttttgcatttcttgaagatatccat

SEQ ID NO: 80321 - DNA, 689 bp, Citrus sinensis
  Intron number 1 from transcript orange1.1g031895m (locus o range1.1g031895m.g) derived from phytozome v7.0 (chr-ID sc affold04530; pos 990 to 1678 reverse strand)
ctcttaccgtctccaacacttggattcacgccaaggtcatccctcaccgttttcttattttgattttttttcttttaaattttctaattagtgtgagatagatcatagataagggtgggttgaaagatagatagaccgatagatattagatagaaatagaatgtttgtcaatagaccaaagaataggaatcgctatgccctttggttaggttttcttcttattgatatgatacgttatagattttgttgttggatccctgtcctgtccaatatacatgctaattgctgtattctgaaactgttaaatagcattatagagtttgttaattctcggtgatttgatttggctattatcagtggctgtggaccactcttgagatggtttgacctccagcaataagagttgtatagtgttcatgtccaagattttctgataattagcctacaggttgttaagaatccaatcccttggtctatcctttctgtgacaaactttacacttgttcctgctttgatgatgctgtctctttcccatctgattgaaattgatttaggattaggaacctatactcaggcaaatgacagggggatgctattaacgtcttccgctttaatttgctcttgctgtttctgagtccattgttttgttgacaggacgctggcattagtggattgaacagcaaaacaca

SEQ ID NO: 80322 - DNA, 980 bp, Citrus sinensis
  Intron number 1 from transcript orange1.1g015040m (locus o range1.1g015040m.g) derived from phytozome v7.0 (chr-ID sc affold00060; pos 250569 to 251548)
gccgtcctgtgagtctccctaccatgtctttcgaaattaattatctttttggcttatttaatttgattttgtcatgttattttttgaaagccttattctttacttgtcaattggtggtgggatgtcctaggttcttacttcttattgagtttcactatttgattaatcaacggttgatttttactggtggtgggtgattagggtttgcttctgttgcttcaaaatttgtttttgagtttctttttgattggtaataaaattttaattttggtgacttgcccgtgtttagcatgcttaattggtggtcatagtgaggttcttgacttatttgattaacaaatttattttgttgtatttagtatggtttttttttttggggggttatgtctgtgtgaattttttactttcataattatggcattgctccgtttgtttctttacatgtacttgctctgttttgtttttgaatacttctgcccaaattggtaaatttgttggtttactacttgtcatcttgaaaaataagttttggtgttaaactgtctaataagataatatctgaaatggtcactgttgtaccctcctcctaatagatttaacttttgggttggatttcctaacatttggtatggctaaaaccgttaaggccgacatatcgttgcttgagtgcaagttatttgctatcctgattggcctagatattattaattttttttctattggactaaatagaaagctgttcatattctggttggttgtttctttatattatttgtttttcctcatttatacgtagttcttcatacagaacaagttgactattatagtagacctactgttcacgttcatacgcacatgtaaatatatgtagacatgttcatacacacgtaaaaatatgtaaacatgtgtatgtttttcagcatttaatttgctttggctacataggtggaggcaaagagggctctgtcaagagaagaaca

SEQ ID NO: 80323 - DNA, 695 bp, Citrus sinensis
  Intron number 1 from transcript orange1.1g035832m (locus o range1.1g035832m.g) derived from phytozome v7.0 (chr-ID sc affold00038; pos 562645 to 563339 reverse strand)
ctggcggaatctcctgcgattattcttgccttgaagtgaggtttttttttcttgcttctttaatattgttcaaaatatattgttgttagtttaaatttttgtcaagctgcgtacatatacttcttagctgattgctttctacgaaataacgagcgaggcactcgatatatatattttttttgtattgaacgtaatgagcttgatattttgggagtacttggctgttaagtaaaaagtataatttatcagattgagacctcccaaaagtgtaattcttttgaaatagttattataataatttggtgatgataatatgtgaaatcttatttttatttgcttgtaatagttttgatttgtgacgtaattgtgaataattattatttatttgtttccccctgcatgtagccggcgttgctaattggcttttgtttctagcattttagtgataggataatttttaaacggggaacatatctttacaaccattcatgataatggcatgtgaattctacaaaatggaaatgtttggatttcagtgttgccgagagtatatagcagtagttaattgtttggaatttgctcgctttttatgcttcatgtattagtattaacagcttctttgctataattgaatataaagttgatggttctggaagttactaagaaaatataaaatgttacttttaaggttaggg

SEQ ID NO: 80324 - DNA, 756 bp, Citrus sinensis
  Intron number 1 from transcript orange1.1g008051m (locus o range1.1g008051m.g) derived from phytozome v7.0 (chr-ID sc affold00010; pos 1571929 to 1572684 reverse strand)
gtcttgctgctattgctactaactgcaagtaggttcctctcgctcgtcccctcccttcgtttattttttttccaaaattctttgagattcttgcttagtagctttctttacttttcctaaaatgcataatttcggattctgattccaagtactgaataacataggattattattcacttatttggtaaaaaattaaaaattaaaaaataactgtaaaccatgcggtgttaattaaaaaataatactataacatcatatagttttaaagttagtatatctttattgttatctttattaggtcagaaatttcaattcaaatatcactactctatccaaaatcctccatcccaaaagtttatccacatctcatcttgttggatcaaaagacaccctgaagaattagtttactacttcacatctcatttggtatattattgtaattatttttttttaatttattcttgtgaagttcatgtacgccagtacaacacatcccaacattgcacggttgcacccacatggttatcttgatggttgaaactccgaacagttctcttttcaagaaattatcaaaatcactaaaattaacgtaaaacccaatacggacccaatagtgatccccgcaactgcaccgtagaaggactactgtttttggctttctcattatttctcatgcgggattttgctcatcgtgtactgtaaacttctgaactcaatttgtatacaggaatttgactgagcttgacattcaggaga

SEQ ID NO: 80325 - DNA, 482 bp, Citrus sinensis
  Intron number 3 from transcript orange1.1g041347m (locus o range1.1g041347m.g) derived from phytozome v7.0 (chr-ID sc affold00114; pos 315300 to 315781 reverse strand)
cttcactctccttgcagcacaattggaggaactaggttcttcttatggagctttaccagctcatgacagcctctaggactcggccattgctacatccaaggacctgctggcgcgtttagcaatagagcattgtgtccatgaggttcataattctcattaattttcttttttggtttgctttattagaaggtacctaacagcataatggaagtgaaatagtactgaaattctgctcatggctttgaataaacaaatcatgttactaacaaaggcattccaccatatccaacttcttacaaaatgcagcattttgtttggggtaaggtgtgtttattgtttcagtatatatatgttctttttaccgaataagaaaaggattattgatctctagaatgcttcctagagtcaagtttccaaataaggcattaatgaatgataatttgatgaatatattgtattatacttgcaagccaggggactta

SEQ ID NO: 80326 - DNA, 428 bp, Citrus sinensis
  Intron number 1 from transcript orange1.1g029247m (locus o range1.1g027364m.g) derived from phytozome v7.0 (chr-ID sc affold00007; pos 1631870 to 1632297 reverse strand)
ctcttattaactctgagattcataccttggagaaggttggttttccatttttgattttttttgcttttcttttctttctttctttctttctttcttgctctctcttcccccccccccccccccaaaaaaaatgtaaatggatactgtttttcatttctgcttttggagtatgaatttcctaacgagacgtgtgtgtgtgtgatgttttcacttgtcgccctgtttggcatgtttcattgaatagaaagaaaaaaggaaattctattaaaatgatttatgattaattgtagcagaatattaaatgaatcatttaacattgtttgttatcattttgtgtctggtacgcatcatgttttaggatttatgaattaatatgatggaaatccttacttgtagcttttggataccataccaccattgttcgttta

SEQ ID NO: 80327 - DNA, 555 bp, Citrus sinensis
  Intron number 1 from transcript orange1.1g022284m (locus o range1.1g022284m.g) derived from phytozome v7.0 (chr-ID sc affold00463; pos 39349 to 39903)
caggtcctcccctttttcttcaaaaaaaaataaaataaaataattaattaaaatctcattcttatttctaacaaaattaatcattaatcattaatttgcgtaggtacgtgtatctgcatttgaatgtggttttataggaagtgcatttctaaaatcactttttataatatttttatctgttagataaacaaaaaagcacttttagcagccaaatgggctgttgtaaatttgatttttgtgaaatcaggaaattcgatgctttgttaatagaagtatatagttttttttttcgttttttaatatatttgtctcaaggagatattcaatattaaataattttttggctggtggcttttgaaagttatacatgtgttgaccgtcaacagtacttgtaaaaatctaaaagatggctttatctgttgggactttcaaagctgtgtgggcggcatttttcaaatgccaatgataaaaagagttcctttggtgaagtagatattgatatatttttttaatacttcagattgacccagcaaagtacaagagcattacgtctgg

SEQ ID NO: 80328 - DNA, 656 bp, Citrus sinensis
  Intron number 1 from transcript orange1.1g018716m (locus o range1.1g018716m.g) derived from phytozome v7.0 (chr-ID sc affold00501; pos 28116 to 28771 reverse strand)
agagtttctgtaagtgaagattcttcagaggtaaaatccttcattgttgatgcggattgcatgacttttggaactttaattccgggttttgttcttctatgcaatttgatcatgtgggctgatactcatttacttaattacacacgttattacctgttttgaaaaaaaaaagattttgtaaatgttttatatgatctgttggtataatcaagcttaaaatagcttatttagttttgttaaatttcttcattattaattgattcatttggtttttttaggggattcaattggagatgtgtgttgatcttgtgatgtttgtctttctagatgttaaattattattattttttgttatcaatgcttaaaagtttcattttttccttccacttaacctgattcttcagttggttttgacttcctatgtatttttttattggaattttgtctttggttgtactagttattgatgatgcttggagtttctggtcatagattttgagctggaaagtggaaattaattcttaattacttcaatctgcattgcttgttattactactttaatttctttagtaaatgatctagttgttaattgtaaacagttcgccccctttccccaacaggttgttatatcttgagtgtagtttgaaaagatcaa

SEQ ID NO: 80329 - DNA, 904 bp, Citrus sinensis
  Intron number 1 from transcript orange1.1g047191m (locus o range1.1g047191m.g) derived from phytozome v7.0 (chr-ID sc affold02288; pos 7276 to 8179 reverse strand)
gtgcctggttggataagcagttacgctggtgggcctcgttttaattgaacccaaacactatttgtcatttactataacgaaacgccagccgttgaccatataacctttttttggagaaagacaaacaacccaaaacggaagttgaagcatcttctacggtacagtatccactcccaaggcagtgccaatttctccttttggcaatcgcagcgcttaccaaaatcagcaattgatgcttctttggaggtcaataatttttgtccttggcttgaatcgacatccttcgtggcggaaagcgaaatgcacttacttggtgtgtacaattggtaagtgacctatttcattctagggtttcgattctacatatatacatcctgcaactggggttatttttgtagccgttgtccgtgtgttaattccatgtaataatgttttatttaatttatggccatattacatgtagtacattgtaaaaataattgagtaactaatgtacactgctcttcttagctgaaaaaattggtaaattcctgcccccgaccttcgtttcatgtacagtgaccaaataagcccaaataaatttcatattttgtttacagtttatgaacatgcaatgtagttggatttgtaccacgcacatgcagttggagggttagtgttgcattagttcgtgcattaacacttctgtccaagtttttcatagattctgtgttaatgaaaaaatcataattaactaattcataccctgttatttcaataatgaacatctccttccatgccaggctgggatacaactttgatcatgagtcattcagcattaagggttcggaaatcaaagagatttatgcaaaaataaactgaggttaaagcatataggatcaacgctttacctgattcagttctc

SEQ ID NO: 80330 - DNA, 253 bp, Citrus sinensis
  Intron number 1 from transcript orange1.1g037896m (locus o range1.1g037896m.g) derived from phytozome v7.0 (chr-ID sc affold00224; pos 26098 to 26350)
aaacaactcaacttgcagttcatacggctctcaaggtagattaatttctgtaaactccttaattattgtcgtttctccttcttcctcttgatattcaatccaattcatgcaacacccttttacagatacttcatttgtgtttggtttctttcttgggggtgttttattttacctttctgaaccatggaagcagtgcattcacaagtcaaaactagattttgatgtaagtgttgatttttttttttcaatgcag

SEQ ID NO: 80331 - DNA, 351 bp, Citrus sinensis
  Intron number 2 from transcript orange1.1g037896m (locus o range1.1g037896m.g) derived from phytozome v7.0 (chr-ID sc affold00224; pos 26496 to 26846)
atcctatttcagccctcaaccaaaccctaaagtaagcaatatcaaaataaattatcatagttctgttcttttctcctaatgaagataagctcaaagcttctttaatgtctcaaatcgttactttcaaggacaaatctgcatgcgggtttagcctttttctgcaatcagtaccttttaagaaacaaaaacctgatgaaaacaaatttaaaatgccttgaaaaccatgctaataatgttttggaaatgacaaaagaagcatgcatggataaagattttttggttgcgtgcgtttgtttcttattatttatacattttttaatggaatcaatgtcgtgttgcaggaatttgggc

SEQ ID NO: 80332 - DNA, 865 bp, Citrus sinensis
  Intron number 1 from transcript orange1.1g034618m (locus o range1.1g034618m.g) derived from phytozome v7.0 (chr-ID sc affold05579; pos 2402 to 3266)
aagcagatacaggaagtcttgtccattaaaaacacgtaagctcttttatctcggtattgcctttgtattttcatttgagttagtagcagttgttttcatgtcttggcagctttgatttatgttctcttttagcttcttcttggtaattatttggcccttttctctttaccgtggcatgatttctttatcaaccttttttgttgtttcccatatgtttggtgtttattcagacgattcaaaattccagactcttattggaatatgaatatcgggtgttgacctgatatctgccagactgtggattgtcgagactagacgagactagctgtgaattttaggcaaatattaaatatacgacaaagaagtatcatttttctgcaagtacatgcttgttgtaaagtgctttatggcttggcagggatgagtttgtgttgggggtggaaatattttgtgtgcttttgttgcctgtagatgtggcataagtaaatttcactctgttttccttttcgtagaaattggttaaaaccctggtttatagcaaaggcttttgagggatagaagaaatgattttcttttactagtttagggtgtctcttcgccagtgctattatggatccgctgcttgtcctagaatgcttttctccttttgctgactatctgtctttccttgtttgttgtcttattctagatatggttttaaagaccgtctatagtttagtgatctaagacctaaaccaaatttgctttagaacgacaaacctaagaattgttttaggtctcagcatgtgaaattatgctctcacgtcctgactttttaagtggtgttgcagggaaattgcaaaacatctttctctaccacctgtta

SEQ ID NO: 80333 - DNA, 733 bp, Citrus sinensis
  Intron number 1 from transcript orange1.1g004292m (locus o range1.1g003277m.g) derived from phytozome v7.0 (chr-ID sc affold00010; pos 967856 to 968588)
gcattgccgaagcaatttgcaccaggattctcgaggtttgttgattgtttatttgtactatgcggctgcttcaatcttgttaaattttaaatttggacttgtaattttgttgcataatctaggatttgaagtttcttgaagttttcaaaatcccctattttgtaattttgcagtttcagcattctgagtttcatcctgcattgctgtatttttaagaaattattggaagatatatggagaatgaacaaaaaaatagtttttcccactagtggtgaactgctgaattcatactttccagttaattatgataaaatagtacaattctttggttttcaaccttgtattttgggtaaggttgataggaaaaagtggggaaattgaacgtaatcaacattttgattttgtttttccgttttcagatatggcggtgtttatgtacgctctaagttttatatttgctttctgttgtttgtgcttaggccccagttaatcacaaactgccgtcgttgtatcttttggacagtatagttaagaacatcaataaagaatatgttaggtacttttcttcccgtttacctgaggtgagtgcatcatagcttatgtttccattaattgctggttattttcagataacatctggactttgctttttgaggcacatattctaataaaaaaattttatttcacaatctttctaggttttttgtgaggcatacaggcaagttcatcctga

SEQ ID NO: 80334 - DNA, 507 bp, Citrus sinensis
  Intron number 1 from transcript orange1.1g026739m (locus o range1.1g026739m.g) derived from phytozome v7.0 (chr-ID sc affold00036; pos 364245 to 364751)
ccgcggctgctggctttcttcaacctccttctcaggtaacttattcttcaatctctattcctctttgcattttcttcttttgtatttcgtccgttttatctaaaattgaaactgtttggctccctctgtttcctggatctacggttagatgcttcattttgtaataaaaataccatttttctattaggcttctttgattgtaggttcctttaagagcctcgtgcatcattattctggttaatgttctttgcccaacgcatttgtaattatatgtttctcgattttggttttgtttcggattttttgtttttggttctgttgtcttttaattctagaatagttgatatttcaatgtgaatggtgtttaagttcaattagaaacgagttttgaatttgggtgctgttagttagggttttattcttgttcccccaaaagttcgattttgggatgttaatttgttcccattttcgacagctatttcgcctgctgttttaattatttgtgtt

SEQ ID NO: 80335 - DNA, 366 bp, Citrus sinensis
  Intron number 3 from transcript orange1.1g023313m (locus o range1.1g017904m.g) derived from phytozome v7.0 (chr-ID sc affold00046; pos 761635 to 762000)
caggtataattttctctattattaagcttggttggtttgtgatgcagaatttgtgagataatcaagcacgatttgttacttgctttctataataacttattgcgattgccttgtcatttgatttgaaaccttctctgagtttgtttcttgataacataatccagataatgtatgatgccctcatttgagccatagaaacaatttctcatagcatgatttcattttgcatgtattcttactttatgtttttcttgtgcttttgagctattgattcacttagtttagctcttataggttatctgctgataatttatattttgtgtgaagatagcactggagcttgaggcgtgatcttgaaattgtaat

SEQ ID NO: 80336 - DNA, 884 bp, Citrus sinensis
  Intron number 2 from transcript orange1.1g031757m (locus o range1.1g031757m.g) derived from phytozome v7.0 (chr-ID sc affold00557; pos 11863 to 12746)
tcagtcggcagcttattcagaccatttcggtgagttcagttcatcgctgcttatctgacaatctttctcatttgctcagagtttctagggtttagtgaaaatttcaagtttaggatgtatatgacctttgtagatgtttttgttggtggtttttctttttttttttctttaattttttaatctaagtaagcagtatacctagcaatgtatcctaatcctctagaatgaaagcaacgacgagtacattgacaatattttacaagagaaatcttagtagagaatagaattttaatcttttaatgtctctttttgttctcgcagaaaatgaatggagctatgggaatgactgattaatttgttgcactactccatataacagtaggtgttatgtaataggaactgaatgaaataatttatcctctatggagtctttcaatttcatctagaaaatagttttcggattttgatttcttttcgctttctctgggaagaaacgtgtttatgaatggagcaaatgcatataagaacattacttttgagaagaaaaaaggccttagttattaaggtgtaaagttctgtatgctaattgaacattatttttacatttttatcagacgcgacatcaggttaattggagatttaagaattttcaggttctcaatatttgtaaatttagtcttcagtgatttgagtttgttgtcttgtgcattaatttggcggcaatgttttctccttgatctgattgcccagttgatttatttgcaaagctcagtcaagttctgttacaagttttttggtgtcttaaatgatatatttgcattgatacctagtggaggaatatggttgaaacaaaccgttagtgtcatattgtattctgcagtttc

SEQ ID NO: 80337 - DNA, 898 bp, Citrus sinensis; identical to SEQ ID NO: 79740
  Intron number 1 from transcript orange1.1g006061m (locus o range1.1g006063m.g) derived from phytozome v7.0 (chr-ID sc affold01047; pos 27719 to 28616)

SEQ ID NO: 80338 - DNA, 494 bp, Citrus sinensis
  Intron number 1 from transcript orange1.1g022859m (locus o range1.1g022859m.g) derived from phytozome v7.0 (chr-ID sc affold00051; pos 720973 to 721466 reverse strand)
caggctcttggtacaccgacaattgtaagtcttcataacgcagtactttaatttccaaacaatttattttctatctttagactctgtttgatttcgaggagacgctatgattttatttacgtattgttgaggaattgtagtttataagtaacacttgctccggtaactgacgaaaggtagcctttttccccccttcaataaagaaataaatattttattacattttatttttaggaatagtaggatgtgattgtgaaatttatccaaatttggctgcttacagttgattttttttttaattttattttaatctttatatttgcttagctagggcttgtttgtgaatgttctacttttgctaaattttcagaagtacctgctagcaaaagtgtttcgagcaattcaatctgaaacatacctaaatgtcctctgtaaatagttatgttttgattttctatcccttttgtcagctaaaagattagcagaagagctgg

SEQ ID NO: 80339 - DNA, 367 bp, Citrus sinensis
  Intron number 4 from transcript orange1.1g039460m (locus o range1.1g039460m.g) derived from phytozome v7.0 (chr-ID sc affold02244; pos 6741 to 7107 reverse strand)
gagcaaacggctaaccgtttaagtctagagagcatgtttgctgttctggataaaaagccgtttaataaaacggctcaccgtttattgagaaaatggctaaccgtttatttccaaaaaggcgtcaattggaaaaacggttagcaagaatgaaaatttcaattgtcaatcgatgcaaattcaaaccaaaagagtgtcttcgaagaagtacgatttctaatggttgtattctttcaaataaacatcttcttcattaaagaaagacgcacaattagattgattatcagattttgtaggtttcatatatgttctggaaatacaatcttttttgctagagattgtattcaggatttgatatatcttgggggta

SEQ ID NO: 80340 - DNA, 783 bp, Citrus sinensis
  Intron number 1 from transcript orange1.1g012231m (locus o range1.1g012231m.g) derived from phytozome v7.0 (chr-ID sc affold00004; pos 2327026 to 2327808)
agttggagcaagagaacgacactcttaaggttcactttttgcattatatattgtaggatctgaatcattaatcatcttgcattttgactagaatattcaatgtctgttttgctgattatagagtttaagtaaagctgatttaaagtgattctaagtgtttttggtatatgtagatacattaaataaatgtgaatcctgaaaatgaattttgttaatatagcttagtgggataattgctgttgatgcaatatgtagttcatagattagaaaagtaaagaaattatagaaatagaaatggaaatttctggaattttgatgttttgattaggtagggctcataagactgaagcttattaactattatttattgaacggagtaattggattttgttgttgaagatctgaagaatttctatactgaaaacgagatggatgaagaacattgtgtctatttggttttgtttatgcttaatccaaggtcgcacatttgaagttttgtgtttggaccagagaatgacaacaattgatgaatgttgtccttatgatttttcaaaggagctgatgccagcaaatctatttaaacaccaagttttcgattgagtttcttgtgtagccacttttcgtttatatgcatattctagaaactaacagctgagccttaacgattagaattatatatattttttgccttgattgcatagtaatgaaactaggtacactgttttcttactgttcctgcaactggcagagggaaattgaggaactgaggttcaaagtggccag

SEQ ID NO: 80341 - DNA, 634 bp, Citrus sinensis
  Intron number 1 from transcript orange1.1g028441m (locus o range1.1g028441m.g) derived from phytozome v7.0 (chr-ID sc affold00010; pos 1681442 to 1682075 reverse strand)
ttcacgacaatcaaagccgcgtttcaactactcttgtaagtcttttctttctttcaagtctttcttctctcctttcctctctggggccttttcttttcatcgatttagccatgatctgaggtgaaagattagtcgctgcatttgatattttgatttgtaattctgggttactttacttttagttttatgtatttttatgacctgtttctttgttagtctcgtcattttatcttttcatgtaccgcaatttaacagaagcatctgctacgtttttgtctttgctgattatctatcgtaatatatttgcattttaatttctggctgtaatctaaaaattacttttattgtgtttaattgaatttatgcatttgttatcctagaatactccgtataattttttgtatattgagaagattaagtggatttgattgattttatctcattttcttgcctttattctgttgcattttttcttgcagtgaagaagattagttctctttgcgcgtgtcccgttctcttctccaatcctccactattgcttaaaaaagaaaaaaaattaaaaaaaaacccaaaatttatccaacccctcaaacagtatatacttataaatagattaatacatctaaatacccca

SEQ ID NO: 80342 - DNA, 622 bp, Citrus sinensis
  Intron number 1 from transcript orange1.1g043682m (locus o range1.1g043682m.g) derived from phytozome v7.0 (chr-ID sc affold00082; pos 271756 to 272377)
ccctctgttctgctttgctttgctctgtttggttggtgagaaaaatattacggaatcaaaaaaaaaaaaataaaggggaaagaatgagagttttgacacactgtttctgggttgggctattctctaatgtttcatggatggaattatcaaaattttgattctgaaattctttttaaaatataccttcaagaatatggctgagtttagtaattagtttctattcatcttgctcctcgtttttgccaatttcaaatatctgatattgaaatttccttttcatgctctcaactttttgcttgaaactttagattcttatcaatttctaggaattggaacattaccttcttctttttgaattctatgttagtatgcatgctgtataatatgtttattcgtattttaattcttttgtgaatatcaggaattcaatcaatttattttttggttcagtttttaaataataatatgggacatctgaatagaattatttatttattttttcattacaaattcactatcaaaatttttcccccttgttctgctttattgctctgtttttatactctgttttttcactctgttttcagattcagtacccagaatccaaggccttccgggagtt

SEQ ID NO: 80343 - DNA, 882 bp, Citrus sinensis
  Intron number 2 from transcript orange1.1g009657m (locus o range1.1g009657m.g) derived from phytozome v7.0 (chr-ID sc affold00007; pos 2662600 to 2663481 reverse strand)
cagcaaccaccaccgccaacgccaaggtattcttccttcacacttcaatttccctctttcgcattccttccgttaattaaatgtaccaaattgctttgctttagatggcgtttgttgacagctcatctcttaccccctccccttctttactgtaaccttcactttcccggcaactactacaactaattcaattaaaaagcacacacaaaaaaaatatatatatatgtatataatgaaaaacaataattagtagaggatagagcatttgattcgcctttactttaggaatcctatggcgttcaaatttgatttgaccagacctcatgtttctttctgcatttgtgtctcctttccttcattatctatcattccccacaaatttttttttcccccaaaaaagatttcacataggacgaggtttgcccatttactttttttttttattttttccatcaaaacctgtaaccaccatgttcatcaggaaaaaaaaaaaaaaaaaagtcccatattcaaaccatcacagcattcataattaatcatatttcaaatccacaacacataacaatgtcaatgtggggcatgagcagtgctgcttccagtcttagcatgtgacactcctccataccattcgccctattgtttttcctcctgtcccatatcttgctattgctagcacccattttgctcacattatttctacggactcttctatttttttcacccttagatacaattctttcaacagtgcccttttttgttttcatcactttgtaatcttttccctttggaggtgttgcagaatgtggagtagaccattacatgtgatgatatatatatgattcagtgctttttatttgctttctggcagaacttgtgcgcaat

SEQ ID NO: 80344 - DNA, 722 bp, Citrus sinensis
  Intron number 1 from transcript orange1.1g028803m (locus o range1.1g028803m.g) derived from phytozome v7.0 (chr-ID sc affold00060; pos 490228 to 490949)
cctcctaaggtccgttttcacatttcctctttcaactattgttatgattatattagagaaactcataaagaaagttagatagtgaatattgttcacattggcattcaaaagaaattgctaggaaaattccaaactggccctggctcgtataaatattgtaaccctttattctgtgtgttacccggaagttgtcgcatatttgaggcgtcacatcagttgtacaatattctgctataagcaacatcctcccaagtaatgatgaaaccgagattttgattaagaaggaccatatatagcggagaaacaaaaaaaaactgttaacttgatagatcaaaatataaaatttattgaagaaatctcaattaagacccttattttcgatcaatagaacattttttcacctagggttaaggtaaatttaatcttcaacatagtttcgcctctatttccattcgtgtatttaggctaaaaaattattcgacaagttggtagtgacatttcaattaataaaattatatttgttatattacctgtggtaggttatagaagcttagttataaccttaaatgcgtagctcatactaaaaattagctcttaatgaaattatctccttgacagctgcatattaatgaaattatttttatatatagtattggttttatttatttattgatattttggttacaggaggactgggtattgtgtagagtttttcacaagag

SEQ ID NO: 80345 - DNA, 704 bp, Citrus sinensis
  Intron number 1 from transcript orange1.1g015504m (locus o range1.1g015504m.g) derived from phytozome v7.0 (chr-ID sc affold00025; pos 861971 to 862674)
tgttgatttggattacctctgctgagatcactcaagtaatgagttatttatagttttttttgcccttttcatttgattctttggttttgtttgttggtttccacagaacctttttatttcctcaattttacgatgtttctttgcatgcgctgcatatgatgatttgggtagaattgtattaacatttttgaatgggaactttttattgttcataagtgatgtgtatgttgcaatgggaactaggaatagtgcgtttaaagcgctgaactgtttttgccattttgatattgatgtaaagtaattttcactgttttaagggaatggattttggttaatattgattgtaactagataaatcccattatgcaatatgtatgaaggactcgtgttgtaaattcaatgtactgatggctcaaaaaaagctattaaatcgacttaggttgctatgagctataactatatcggtaacatactacattttacttccacaaaattagttcattcctggtatggaggagcaaaatttgtacaattgtaaattagaatcaatgtgattttcaagaataaacttattactcgatgaactactcatttgctaattcttggtctgtaggattaatccgtgactaaaattttagaatttcaactcatactgcttattttctgcagaaaattttcacggagtataggcaaccatttgcact

SEQ ID NO: 80346 - DNA, 834 bp, Citrus sinensis
  Intron number 1 from transcript orange1.1g019750m (locus o range1.1g019726m.g) derived from phytozome v7.0 (chr-ID sc affold00010; pos 229660 to 230493 reverse strand)
aagaaccacacatttcaattcacaggtgaattctaagtccctttctttctttctttttttgcagatctctctttctttcattttcactttaatcttttgcttttcatttctgtttataaatgtttgcaatgattgttatctgttaacaaactttcaacggttatctattatcgatgtatgataatacattaataattcatgggaaatcattttttatttatttataatgatgatttgaggttgatatgttgttaacttggtttgattaaatgtgttgtcaatcttttttatgtcatttgggattgagattatttgggttctgagcttttaataaagtttttgtttttttcagtggaattatttttcgtgattttcatttgtggaagagttacaaatcacccttcattttcttggcaaccaaacaaatagttcccctacttccttttttgggtatgttttcttccgagctgagggacatcagatgcaatttgctgttatattgataattttgattactccaatgatctcatacacccacttgcagttttgaaacgtttttcacgttggaattgccacgtttcactggtgtctttttcatttttgctggtatagatagtatttgttaattttattcatgtgcaaggtttgtagatattattaggattaatcctgttgatatttgtgcactttctcttctgtttttttttatatcagagtttacatcgaggtgtaaatggtttagtccttagaattacttttgctgagctgagttgcttttctttttctttgtggatgatattttccaggcttctctgtgaatatagtcctttttga

SEQ ID NO: 80347 - DNA, 585 bp, Citrus sinensis
  Intron number 1 from transcript orange1.1g038093m (locus o range1.1g038093m.g) derived from phytozome v7.0 (chr-ID sc affold00004; pos 2424764 to 2425348)
gctagagcggaaggtattaaaaaagtgacttgtagactgcttagtgtgtagaaggacaataatgttttggtttgaatttgataatgtggtcagtgatttgaaaaggtgtctcacattatattatgggaagaagaccaacattgactatattttagtataggaaagtgaattgaaggggcattctttcttgtgcaatgattaatgagtttttctttgtttcttacctaaaagaaaagtttaattgcacagaaaattttttgactgaaacttctcctttattttattttcttgttctattgccatgttaaagaacttcttagtgcctggttgtgtttaattgttttgcttgcaaacgaatgacattgtcatttgttatcattatagatatagggtcgttaatgattgatttttgagaaccttgctgatcttcttttgctaataagacataagttctggtacaccagcattgggtgctgagggaccaagtaattttagttaggttttgttcagaaacccctttcttcctgacagcacattatacgatcttttgtacttttgttcctttactttgcagtggagaaggtg

SEQ ID NO: 80348 - DNA, 428 bp, Citrus sinensis
  Intron number 4 from transcript orange1.1g021783m (locus o range1.1g016612m.g) derived from phytozome v7.0 (chr-ID sc affold01224; pos 19931 to 20358 reverse strand)
caaccaaccctcgacaacaaatttgtgacattcgtgtaagacatttagctttttaaaattatgaatcttgtttattagtacatttaggttgttcgatcgcttgcttaaccttttgatgtttattaatctgattatatgtaaattatcacgctcaagaacttacagattatgcctgtgctctgatgcttccatgataatttagtatactgggtcgtttgggttctttaaacgataagctctgctaaaacaatggacaccatgctcattttctcttcttatttggatatatatatatatatattttggatactttgatttatctttagatttatgtatctttggtttccactgctgtcgttaaataaaatggggtgatgctaattacagaattcttttccatttcatataatttgtagaaaattgcagaa

SEQ ID NO: 80349 - DNA, 507 bp, Citrus sinensis
  Intron number 1 from transcript orange1.1g030606m (locus o range1.1g030606m.g) derived from phytozome v7.0 (chr-ID sc affold07924; pos 1574 to 2080 reverse strand)
actgacactcaatctcctcccgccaaaacggtgcgtgtttctttctttctttctcttgacttgtaattttctagtttattgttattttaatgaaatgggtctcttcaaaatttgagtttgagggttagaatctatatgcaatcaattatatgtagaatttagggttttgactgatgagtatcggtagataagtatccaataccgcgatataagaggttttgctttttgcaaattagtgtttgctatgcaagtcatctgtaaaaatatctttcttgtcattttctaattgatttatattttaatcaaatgggatgtctgcaaaatttattagggtgtctgacataatttgattttgagttcaggatctctacatgatcaattatatgtgggaaatagggtttgctttttcaatgtagtgttggttttgcaagttgtgtgtgacaatgtattttgggtggttttggatgtgcaggtgagggttgttgtaaaaggcagggtgcagggtgt

SEQ ID NO: 80350 - DNA, 722 bp, Citrus sinensis
  Intron number 4 from transcript orange1.1g032647m (locus o range1.1g032647m.g) derived from phytozome v7.0 (chr-ID sc affold05899; pos 2119 to 2840 reverse strand)
gacctaaaaaacggtataggaaatcagtggattaatagttctatgctgctgctatgactataatttactttagaagttcatatgctttggaaagaatatttaggacagagaatagaaagacattatcattatctgtataagatgtcctttcgccatatccaaagcattggcattatacttaaagttgtgcaatcttcttatatatcaatagtgcagtaaaaccatctgaagcttttattacctaaagatgtactaatcatttattagtgttctactaggttgacattgaaaatcacttggtaaaatcttgatgttctctaagacaaaatgtaatgcctaataatagtatttgggatctaatattaccgtatcctccttcagcctgtgactagcaagcccttacaactctgtttataggtttgaacccatgttttgcttatggaaaaggggagtatggacaaggttcaaattccattggcttactaagcaatacatacaaacaaacgtatctgcatgttgaagttctattttccctcatttatgcattaaaagttttatagggttctatccatcttttttccgaaattgatttttgtttctagttcattttgattgatgcagtgctgattaagtttatattctccatctttaatttttattgagatatctttgatgttgctccttcagtaggccaaggtggagacttggaaataaagaactct

SEQ ID NO: 80351 - DNA, 1019 bp, Citrus sinensis
  Intron number 1 from transcript orange1.1g023905m (locus o range1.1g023905m.g) derived from phytozome v7.0 (chr-ID sc affold00238; pos 135801 to 136819 reverse strand)
tgtttctgggactactatcggcaagggttttcaaggtatcttctttcacgcacactctttcagcttagtttgaatgcatggttttggtttggtttgggctaaggtatgtttatgattgaggtttggtgtagtcgttaagtagagcattagctgtcaagtacaagtgaataaaatctcttggatagtacaagaagttttgtgttcgaattctccttacatgggtggggaggtggtttattgacttaacacgtcagttaccgtgctttcagagttcagttgaagcacaattgtttcaatcatatgcctgaggggtatgttgggatgtgaaggaaatattttgttttgtttgaggtattggaatctattggagagttgattttgagagattcacttttgaatttggatgagatggttgaattttaatgtatgtaactgttactatattgatgcgggatgtttgatgctattgtgggatgggagtgttttatgtgtcagatggtgtgatttgcgtggctttcttgactgggatcacggttataaccctggcagctctaaacgatatcaaagaaaaccgactcttggataggaacaaagttgagaaatcattatgtttactttaccaacattcttaagctaaaagacagagatgctgatgcatggcttttatatttttataagttatgttgaacagcagccattaggtatcaagttaccataagatgtctccgcaacgttatgaggattgaactttggagaaactcttcttttcctagtttattgagtgtgttataatcaatcgtgttgagtccggcagtagaacgtcactgtgtcagtgaatcagcatcagttttaacttactgttcttttctaatatgaaattttaatcctatttgtgtggagaatgtattttctgctgtgtcaataactttgaattccttaataattgaccctgatttgttctctctctttttctatatcccacaggtggcattaagcggcacaatttcagaaggggtgcg

SEQ ID NO: 80352 - DNA, 617 bp, Citrus sinensis
  Intron number 1 from transcript orange1.1g005217m (locus o range1.1g005158m.g) derived from phytozome v7.0 (chr-ID sc affold00123; pos 262959 to 263575)
gctactactgttgctcctgctgtagaaagtatcctttcacaaaatagcgatctgggtattgtttaattcccttgtttctcgtctggatcgaatttggtttctgttaatttttggttcttaatttcgtagatccgtgtcaaaatttaggtttttacgcgtttaaattacggttttcatggtgacttgttcgtttgtgaagaagttgttttcttgggaagtttgtgttgttcagaattattgtaatttgtttgtcgctacgtggtcttgtttatttttggtttcttctaaatgaattgatgagtgtttgtttttattctagttgggattagggttgttggttgctcgtgtggactacagtatggtagttatattgttttcaacagggatcttgattttactgttcaaacattgaattcaaaattatatgcttgttattggactgtagtttaagcattgcgatttataagttgaggttgtttgtaaatggaattttgtaaattgaagcatgtatgattgtcttgatattggcttttggctagcaaatttgtttcctttacttttttcttccaatagaagcatcagatttgctgcagaaattgtctttagattcgcagacc

SEQ ID NO: 80353 - DNA, 428 bp, Citrus sinensis
  Intron number 1 from transcript orange1.1g043688m (locus o range1.1g043688m.g) derived from phytozome v7.0 (chr-ID sc affold02287; pos 8299 to 8726)
cttggcttgggcatcaagatttacggctttggtaatgttccatatatcaagatttcagttattttggttcaatattcagccctctgcactgtttgattttatggtagtgcatacattaaatgcatgataatatcagcttgcatgcaattatgttcataataatatgatcagtgctacgtgaaaactaagagattgatggtgtaacaagaacaatgaaagaaacagatcacttgaaatgatataatatcagcagcaaacatgaaagcataaaggaacaagattatgcatttagctatcttatttaaaaccacaatcatgagtaccaggtgctcataacttgaagactaaatccacctaagacatgccagagtttgaatacatcttcattggcaaattaactagccttatcattcattttgcagggatat

SEQ ID NO: 80354 - DNA, 940 bp, Citrus sinensis
  Intron number 1 from transcript orange1.1g021579m (locus o range1.1g021579m.g) derived from phytozome v7.0 (chr-ID sc affold00395; pos 66917 to 67856 reverse strand)
atcaggtgatctatgtcttcctttctctttttattttttaaaattttaacatttaattttcgttccctaattatcgttttaattctgattgctgatgatgatgtggtttacttgctaataattgtccctttacttttaatttagggtttgttaatcagatttgactctctctgatttttttttttaacttatcattatttattcgtgtggtttgattaatttcgaaaaatcacttttttgttagggtgcaagtattttagggtttgtgatgaatttggctagtttgttgaatgaatgtacttggaatgaattccccagctagaaaatcatagaattttagggaaaaaaattagtttttctatttttgtagcttattggaggcattcatgagctgaagtgagtttgtttagatcatatttaaatctactcctagcttttgtgtaatgttttgtgaatcatgtttcagtattgtgctatttgggaggagttaaattgctgaaatggttttaaagtattgagtttttttactgatcttcttattttaaaaaaaatgtgttaatttaatcttacaacatcgtaaacatggtctttcatttaagcattcatttgtacgcaagatcttctcttgaggttctttgtaatttcccttaatatattacttcagttcagaacttaaataacattgggttggaaatgcaaatacattataaggtgatgtaattttaatttaattagtatgataattatgttgctatgactctgtttttggactaatgagtaaccccttgaaacatacatataattttttttcctttttgtgagggttagtattgttcattattgaaatttgaatgaagatgtttttcttcatgtttattctgaactcttgattgatttgatgccagaaatcatcctatataccttttgccgcttttgtggt

SEQ ID NO: 80355 - DNA, 588 bp, Citrus sinensis
  Intron number 1 from transcript orange1.1g034376m (locus o range1.1g034376m.g) derived from phytozome v7.0 (chr-ID sc affold02339; pos 1111 to 1698)
tgaaggtttgtcctgcgaattttgagattccttcactataaacatcaatcatgcatgagtcatagctagtgagcaaattttgagattccttcagtataaatatgaattgttttgattcaatatgttgttttaattcataatttcagtggcttggcagtttatctatacatgtctttaacaaagttttaccacaaacacagtgcaaacccagtgtttatttaatcaattacaattagtttttctagcgactaacttttttgcaattttctaaataaatatatacatgacaaaatttgattatttactgttgcatgacaaaatgtggtagaatatcaatatagaatttcttgagttttagacataaaacagagtcaggccgtagaatgaatgtacgaagaaattatcatcatctgatgactgaaaaaatatcatcacgtttgttttaatgatgctgtgctttattcaaaatcatttcttctaatagagaagcaatcaataatggtgtcaattcttgaaccagtggaaagcaattaattttcttcatttgttttcttgcttggctgtgaaatagcccatttgttgcaggca

SEQ ID NO: 80356 - DNA, 809 bp, Citrus sinensis
  Intron number 1 from transcript orange1.1g041154m (locus o range1.1g041154m.g) derived from phytozome v7.0 (chr-ID sc affold00314; pos 36779 to 37587)
gtaatttttaaaataaatatatatatcacagaaaattcttcgaaatattttaaaatttcttgaaaattagatattaacgaaatgaaaactaatgtgatgatacatgcccgtgattgaatttggagtcaatgcccatgaagaagaagaaaaatgacgcacatgaaacccagaaagaaaagtttggagctggcaaatttataattcaaagtcaaataatttgttgcttacttgtaacgttagaaaatttaaaacaaaaaaaaaaaaaagaaaggtggcatctgaggcatccttaaatatcacgagatgataaagaagcaataaataacattagagggtaataaaaaatgggccccatgaagcaaagcacgtgcatggatgcatcaaagttcgtagagagagtaggagagagatgatatcaaaatttctgaagaagaaataaagagaaaaaagcaaatgccaaacaaaaagatattattattgttattaatattctaatctataaatgttaattaaattcacaggagatggaaagacgagtgaatgtgttggaggttcaaagccctcggcgaaggatccgatgcacgcatcatcaatcttctcattcattcctctcagctcaagctgttaaaaccgttttaattccttttttgtttttcatttctctctctctctcaaaccccatcaatcaaatcattaaagaaacacaaaaaacattggtgatttgagatgatttagtcaatatacacatgccattgttttcatgcatgttctcagaattggaccaaaaattttcttgctgtgatagcgag

SEQ ID NO: 80357 - DNA, 810 bp, Citrus sinensis
  Intron number 1 from transcript orange1.1g039129m (locus o range1.1g039129m.g) derived from phytozome v7.0 (chr-ID sc affold00297; pos 160390 to 161199)
atgtgagttttgcttgatgttcaaagcctgagaatagaatagtggctgccagttcaatctgcctgtacaaaagtcacgaaattataacaccgaacaattaggcacttttgaaccctgctgctaacaactcagaaaatttatcctcgtctcgtagagaaagaaagtatggaaggatttaagagaactctgaatctttaaaacctttacttgatctttgtggtcagtacaagagctgcttcaacaatttgatgtatgctaagcattaccacttgtctgcacctgtattgctgagtcctatcatgttgaatcagcagcagaataacaatcttggagaagccacctggcaatccctacagttgaagtcaaaggcttttatcaaagtgaatgcaagtggtgatcctatgaatcctcccatgccatgcaatgcttttagttcagaagatatttattttaaagcattttctgggcttttctgtttttagtttctacttgcaatattaacattaacatgccatccatatgcctgcacttatgcttaaatcttgtagaattatcattcaaatggagagaatccattgtcagggagaggtaggtctcaagcaacaggggcttatatttagagatacactcataaaaatggctaggtgacagttccaatagagacaaatacagctccaacagagacaaatttgtcaggagaagacagtcaccagctctctaaaaaagaatttccaattctggcaaatacgaaatctgcctacttggattctttttaatcccaattatctgtttggggtccttgtagagcca

SEQ ID NO: 80358 - DNA, 526 bp, Citrus sinensis
  Intron number 6 from transcript orange1.1g042199m (locus o range1.1g042199m.g) derived from phytozome v7.0 (chr-ID sc affold02254; pos 12803 to 13328 reverse strand)
cggtaatttactacaccttaatgcaaactattttgtttactatgtactctttgtttcacaaaagtcctctattgcattcatcatgcattcctctgttagaagtcttgatattccagcaaattgagctttctctattctctaataagtttggcttataaactacctgtatatttgtttggttttgcgttttgaagtttagaattgtaatttgtgtcgtctcctatttatagtctgctagtatgctgattgtttatgaatattaaaaatatcgtggatgactactcttatctgtcaaaatgttgcggaaatctgattacttctcatcggggagtttaattttgaatcctagatttattttacagttgtgagtttctagctgccaggtcttcatactgataatatgattcttccatttatgatttgatgatcatataggttcgaagattaattctttttcaataagataacttcttctcatccatctcttgcagcttaaccaagccattggttcaatcgaagcaattgc

SEQ ID NO: 80359 - DNA, 679 bp, Citrus sinensis
  Intron number 4 from transcript orange1.1g034943m (locus o range1.1g034944m.g) derived from phytozome v7.0 (chr-ID sc affold00025; pos 1059650 to 1060328 reverse strand)
tggtcaggttagtcaatgtgggaagcaaaaatcaagattaacactatacttcctcaaattaactgtactgttttaaaaaatagttaaattgtgtattctatattgttgaaaagataaatttgccaagtttctgtggaatcttacgaagtcaaattcagatttcttttcttaaagatattcaagattttgccaacaaaggttataaccatcagaaattctgcacaaggctgaaagttttgaatttactggcatcaatgcttcaagaattgattaacaagcgtcatatcactggaaagttcagtgagtccggagtttaatggattttagaatgttcgatttgaagttttctacatcaaaatgtgattgaatgagtgttaaactactcagatttgttgttgaaaccaaatttgaagtcaaattgtgttttgttttgttctctttcatctcattacaactaagatctttaattttaatttgatttaagttctaaaatgaaagagatcatgtcctaagcttcgagggatgttctaagttgtttatgtaaaggtaataggcagtgattttagaataatgtgtgtgattttgagagtgtaacttagaagaatggtcttgtttaaagttccttctttaaactctatattttttaggtggatttcttatagtggcgggttaggaagcg

SEQ ID NO: 80360 - DNA, 582 bp, Citrus sinensis
  Intron number 3 from transcript orange1.1g034943m (locus o range1.1g034944m.g) derived from phytozome v7.0 (chr-ID sc affold00025; pos 1060371 to 1060952 reverse strand)
gtggatttcaaaatctcaggtaattagataagttcttagtggataacactcaccacactgttaattgtctctgtgtagatggggctagggttttactgagttgagttggaaatgagtgataacttttgtttttgttaggtttaatgtcttttgttgaataagaatgataaattttgaatgtttttcttttgagtttgtccttccacttggtttcagttaggtataattggtatttgatctgcctggagatgtagcttcaagcatttaaaatgaatttagggtatgaatatattttcttgtccttcctggatttttaaggacatgaattggctaatactttcggtagaattaggagatcgaatgaccaattaatagatgcctctcgattaagactatctccttcattatttatgcttaccttgcacatgtatacagcatggtaatataattgagtagatttatgttgggttcttgaacaatttggattttgttgaaatttcaattattggaagtttgtctctttaagcccgaggtctatttttcctggtgattacgtgacacaggagtgtttagagactcttc

SEQ ID NO: 80361 - DNA, 707 bp, Citrus sinensis
  Intron number 2 from transcript orange1.1g040361m (locus o range1.1g040361m.g) derived from phytozome v7.0 (chr-ID sc affold00004; pos 2448903 to 2449609)
tggtcagctgtgttgcaggtattttctatttgtaaatatgataattctttttatagtttattctgaatgcctttaggcctatgattgtaggctggtatttgatatttgagatgtagtcatacatctaagaatgtttaagccatcatagcacaacggtaaatgaagttaatatctcttgttgttcctaatataagtggaagctaggaattgaatgtttgtggataccaatattgaccattgtattgtcgttcctctaccatttgtccaagagagttgtacttaataatcaagtagaacaacgcataatggtgaatgcaatgtaacttattggaattattacagggataaaattgattaacatcaagcttttcggagccttgttattctttgatcccttctagacttttgttgggaatttcatgtttcaaacgtatatacatgatttttatgaacacgtctcagataagaattgaagtcaaagctgaatttttgagtctcattaacaagaatgcccgaatgcttgggtattctattacatccttggtgaaaatgaaatgctaggaacatacaggcctcttgtgagaatgtggcatcttcattataattcctttttgtcatgttcagtgttaataaatactctttgagataatctcttgtttgttcttttcgtacaccaaaaagtattactttcactgcagtgaccaccg

SEQ ID NO: 80362 - DNA, 493 bp, Citrus sinensis
  Intron number 2 from transcript orange1.1g028539m (locus o range1.1g025714m.g) derived from phytozome v7.0 (chr-ID sc affold00082; pos 306236 to 306728 reverse strand)
gcgcgtaagtatccttactgattattctttgaattttcagaatccttccaagtaattgatgaaaagttatattccaaatttttttcatgcaactctcttttgtcatgcctttaacaactagcttttccggctatgcctgttttatgttggcatgatggtttcaatgtgtcaatcctctctgtgtggctggttggaatcttttgaaggttgagtaaaatagaaagaagtaatttgcattctgttaaagatgttgattttgtcttcttgaaaacactaccgagctttttgctaaggcagagtttctgaaattcatttttgtcacttgttcaacataagtttgatgaagtgaattcccgcctgagcaatgagttttattcactgccgtgactatctaatgtttttccaatatgcaaattttgtttatatgatgtgtggtactgtacattttgtttgtgcttatgaaatttgctcttgtaggctatatttgagagat

SEQ ID NO: 80363 - DNA, 886 bp, Citrus sinensis
  Intron number 2 from transcript orange1.1g004999m (locus o range1.1g004999m.g) derived from phytozome v7.0 (chr-ID sc affold00047; pos 202426 to 203311)
cacggcgtgcggattcctttgagaagctggataaagtatgttccttcactgattattgtggtgcataaatattgtcatatagtgtttatttgcacatcgatattgtcctttttgaattttctgttgtgatgaattagtaattgcttgatagttttattatcagttttgtatctggataaagaatgataataagttatctagagagggaacatttaccaaacagctctaactttgtgtcataagctctcaaggtttccttaaaaaaaaaattatttctggtcatatatctatggagttatttatggtacatgtgtataatacaaatctatccttagatgaaattatgattttaacttttggattttgttcaagaatgtgaagtatagcctgggaaacatccaagaagcatcaccatgaattcagattcttatagaactatccattctacttctgcagagttcaaataatgttcagagtaatagttagttcttatagaaaaccagttaatgttagggagaactgaactttggtgggtaatttgagtgtaactgactaggtatgaagaaacttgaagatattgcacactaatgcgcatgattttagatgattgaaatttgtggattatgatgcgtatcaacagttttaagcatacatgcatgtttgcttgtgtaatatttgactgcttgctaggtcttggattatgcatgctacttctctttaaaattaagctgatactgcacttttggaattttagctaattttgtgcccatcactacttttctccttccccttttttgactactattttgctaatatttacattttttgtttttgtttttgtttttggggagtccctttctattttttccagatcattctatttagt

SEQ ID NO: 80364 - DNA, 977 bp, Citrus sinensis
  Intron number 2 from transcript orange1.1g002752m (locus o range1.1g002678m.g) derived from phytozome v7.0 (chr-ID sc affold00117; pos 388926 to 389902 reverse strand)
gattcagtcaagtgagatcaaggacaagaaggttagtctcagtctttttcatcatgctttcctccagtcttccatttgcgtgactgcatagttctgagatcaagagatgtgctattgtctgggaattattaattttaattgttttggcttggttaaattctgctcatgcatgctcaagtaccgtaaccgcattattttaattagtctagtacttttgaactttagctgtgctgccattttttgtttttgtctttgactagtattttaactataaaattgtgtagcttagatgtgtttttggtacatcaaacttgaaacattcctcaaaactaaggaaaacatcatgtgttacttatacagttttgcctcacatgtctttgtacgacagttgatttatgcttctagggaaatagacaacaggattggtcatgaaagtagtttagtaagggaaagctattaaagatatgtcttatgattctaccacagttgttgatgacttaattttacattgttgaaatcaatatatttgctttcatgtattggtctaaggctttaataatttatcattgtgttgtgtgcaactccttgttgcatagctttatgaggttaatagttgagtgaactgggtagtttgacctgtgctttaatattatgtttctataaacaacatatacacactcgaagagtgaatggtgcatccatctacataggctttatgatgccaaggatttttagtgttttcatttttttccctatttattttgtaccttggcatgattcattttaagatcgactaaagagaataaatgtttgtgtcacatctggtatccgatgtctgctatagatttttcaatttctttaatagttgtattgatttagcatattagctattttatggagttggggtcggcagttaatctttttcttttggtatatgttgacataggtcagtgcctcttatgagcaggctctggtgg

SEQ ID NO: 80365 - DNA, 898 bp, Citrus sinensis
  Intron number 3 from transcript orange1.1g039829m (locus o range1.1g039829m.g) derived from phytozome v7.0 (chr-ID sc affold00026; pos 998084 to 998981)
gcttttacgccattgctgcaaaggtacccaaaatccttgccgttttgtgcatgctacctactattattagatcaaccgatgagacgacaccgtattatttcaattttagtctccaattttatgcttcgtcttcgtttatattgacacaatttatagctctgtattacacctggttcttcagtactatttaggattttacaaaaagatgctgacgaatttttggaattcgaataatggggcaatggttgaactggattttgaattttgtatttatatgtatacagtgagtctaagagaacatataagaggtgcattattacaagtgattgttctttggtggatcatagatgtagtaatttcagaaatcatagtaaacatgtgatttcagaagaagcagacatttgtggttgctccattccaacactctctaaaattaaagattgatcatcttatagcgatgtccataactatcttatgcctcttgttacggttttccagttatgttttaattgtaacgctttatggtttcctccacaaaatttgtgtttaactcctaatgagaagttgagaacgatattgtatttattcactcctaggccctcacctgaatttggcttgaagttcacctccaaggcattgtctccagcaacctataataaatatccatacaaattacagaaaatgttggattatatgatttgttaatgatgcatgaacattcttcctgccctttatttctacattaccgatttgagttggattttccatttacaggtctattgtcaactgtgcctgacttttgctttacttcactgtctggctcattgaacttctttttgatttctcaaggatcaagtgcctctgttcattttgtttctgaacgtttgcttatacaggc

SEQ ID NO: 80366 - DNA, 298 bp, Citrus sinensis
  Intron number 2 from transcript orange1.1g002034m (locus o range1.1g002031m.g) derived from phytozome v7.0 (chr-ID sc affold00025; pos 202835 to 203132 reverse strand)
gtttcgttgtgatataaaataaaaaatatagacaggtgtgtactgggtacaaacaagcatacttgaatgaatttattgaattgactttaagaagacaattgcgatcgtgggttttttttttaaccccctaaaaacaaaatgaacttattgtctctgtgatgtgaaactccagctctcaagtgaataatgtgtaaaacgaattatttaatttgctattgcagtgctagatactcatttttccatgtgtttgctttttctttcagcagaggttggtatacctagttattcttgtattcaa

SEQ ID NO: 80367 - DNA, 627 bp, Citrus sinensis
  Intron number 1 from transcript orange1.1g000267m (locus o range1.1g000251m.g) derived from phytozome v7.0 (chr-ID sc affold00016; pos 861492 to 862118 reverse strand)
cgcagcgttttgcatttaaatcaactctattgctggtaattatttaattcataatgttaaattgtttattttatgtatttttctagggcttctgcgtattggatcctaaattgtgttaatttggttcaattttatgtatatttgattagtttgtggtagtagcaagtgcatggaatgtgaatttagggtttcttgttttgattgcagagacgagtggcatttatggaatttgtcagttcatggtttcaacaaaagtgtagaagaaaattccaaatgtgttgggactgtccatctggttaatttacatttgactcgttgcaaaggtttttaatttagtatttgttgtaccaattgactgtatatttgattagggtgaattgattggttgagttttgatgtggatagttcaggattttgtgcaagtttgctaacgcattgtgaatttacttaacatttgtttatcaattacttgtgttttatttagggtttttaagatcttaatctttaggttcttaacttcttcattaggtcatagtgttactgcttatgtactaatgattgtaaagtaaattgttcttactttctttttccctcttcattttgcttgtaaaatttacaggaacagat

SEQ ID NO: 80368 - DNA, 341 bp, Citrus sinensis
  Intron number 1 from transcript orange1.1g030228m (locus o range1.1g030228m.g) derived from phytozome v7.0 (chr-ID sc affold05700; pos 197 to 537)
acgctgaactccaggtactattgcagcatctaatcttcactttaatctccaaatatgtgaaaccatgtttacaagtttacatatatattgtacgtgtacatgctccattcttttcgagggagacttcttctttattgtacttgtaatggaggtttttgggagataatcccacaatttttagaatagttttcaaacaaccttattcatgaactagtttgagtaaaacttaatggtaaacaaatgtctatagtattacattttgttttttgggaagcgacatcaagaattgatggtaaacaagttatattttgaaaattaactttttcgaatgctgcataggg

SEQ ID NO: 80369 - DNA, 444 bp, Citrus sinensis
  Intron number 2 from transcript orange1.1g028724m (locus o range1.1g028724m.g) derived from phytozome v7.0 (chr-ID sc affold00027; pos 172171 to 172614)
gttaccatcctagcatcacggtatatttataattcattttgtttctattttgagccacagtttcttttcatcaataacattgatgggtcattttgtatatattttttacctgatttttctttcaccactttggtgtttatttttcttgcgtaattaatgatgatgtactaagtattttgttaaggaaatagtattgccttgatataagcagttttttttttttgaatttgaagtgaaatctatatagacgttgaagaatcttttgaatcgatcatttctaattctgtgcaagtttttgcttatttattggtcctaaccctagctggattaacaaatgaatttgttgcaagatttttgcttctttttggttaattaattacggattatgctaatgatcttgaatggttcctaaattaatttttcaaaatttaattccttatacag

SEQ ID NO: 80370 - DNA, 359 bp, Citrus sinensis
  Intron number 1 from transcript orange1.1g025630m (locus o range1.1g025630m.g) derived from phytozome v7.0 (chr-ID sc affold00070; pos 254120 to 254478 reverse strand)
taccggcgcaccttcaaggacaggctctcacagaggtccctgtctcttctcttgaaatttctttagtatttgtgttgtttgttagttgtcttttttttttttactccatgaacttgagaaattatgtacagaaagtttgaacttttaacctacatatgctgccatatagaacagttaccagttaataatgaaatagaaaagctagaaggacacatatgagctgtatttctaaagactcaaatatacaacagaaatatatacatatttgtgcattcttatttacaagttaatggaaaagatttaaaacttgattatcacggcaaggaagcaaatatatatatatattttcatttgcagat

SEQ ID NO: 80371 - DNA, 884 bp, Citrus sinensis
  Intron number 2 from transcript orange1.1g027136m (locus o range1.1g027136m.g) derived from phytozome v7.0 (chr-ID sc affold01439; pos 17246 to 18129 reverse strand)
agtgcttttacttctcatcgccgctaatttatacggtcagtattattaactttaacgtttcaagctaacacatatgattcacatataaaccaattctcaagttatacttccatgtaaagcttgtcgaaccaagttttttcttttaaaacctcaaggctagctaaggctaaacaataactcataattaacatatgtttttgacaactctgatagagcggccttctgtggtgaaaatgtccgcatgaaattctgtatggacgaggagtttacaacgttataaaaattattaacaacattctaaaagtagacagcctgcacttgagaattttactctgaagcatatttttcaaattctatgcacatgaacattaatcaaataaattcttagtgcccattctttaataaattttttattactttgatgccattaataaaataaatatttcagataaataatatgaataattttttgtttaaaagaaaattactcacaagacaaccaacttaaactacgatagaaaatattgggagggcataatttttcgaagatgaacccattaattatcatgcaatggttaagaactcctcacggaatcgagcagaacgacctgttcttcctgactatcgaacactgcattaatttaatcggttatcccattgtgttagcaattttatcgaatgcacatttaattgtttaaatatatacacttaaattttgtttgccgctttcacataatgtgcttcgctaaaccaaattcctgtcactgttgattgcttggttattctttggttttgttatcttcgtttatatatttctcatatgatgctcgcattgtatagagatcaaatacatagccaccactctgacattgttcatgaatcag

SEQ ID NO: 80372 - DNA, 630 bp, Citrus sinensis
  Intron number 1 from transcript orange1.1g018090m (locus o range1.1g015464m.g) derived from phytozome v7.0 (chr-ID sc affold00007; pos 1847684 to 1848313)
ctctggctttcacaaggatttgaatcttcttcctagtgagttaatttataatttatgccctccttttgtggtgaattatgagttttattatgttgcatgccatttaattttcccaattaaggatcattagcctaaataaatggttctttcatttgtgctgtgtagggatgaaaatgaataaacgttcatgaccagttagttggcaatattgatgtattttagggttcttaacttgtagctctaggaaaccaaatttacttcatgttgaatattttgataatgtttaaacgctaattttgtgagtatcagaatgtgaattgttgtaaagatgattttatctaatgcaatatccaaaagctcctacaggctacagttccttatcaaagatttcactcatggttgttatgtgtcatacatttaaatctttttggggatgagccattttcttgaagttcacatatgtcattgatctacttcatttttgatgaactgtaatttactggacttcacatattggagatgaatatgatgctggatactaaaggcaaattatgactctttcgtgccactgcttctttccatcttccctttctctcctccttttatggcacattttcttagctctagtat

SEQ ID NO: 80373 - DNA, 717 bp, Citrus sinensis
  Intron number 1 from transcript orange1.1g013327m (locus o range1.1g013313m.g) derived from phytozome v7.0 (chr-ID sc affold00016; pos 913476 to 914192 reverse strand)
gtttctcttctctttgcttcacttcactgtgtaatgtaagtatctctaccttatcatttttatttttgttctgtttagacgcaaaatatgggagaaatatctataaataaatatatatttttttccagataaaagatgtgttttcttccacccttctggaagctaataaaataggcattcttttacttgtttgtgtattaaagtggtgtgttgatgggcttttatgtatcttaagtcaagtctctgtttggttgctaagaaattagaggaaaacaagaagagtaactttatttctgttaagtcaaaaaaaaaaaaattatggtaaactaatccaagtagctttgcaaaacttaagtttgtggaattgtttaatgaagcttcgaaatgcgatttactcactaatctttcttattggtgccatagtttgtgagaaatttctgctatttgatttttagaatgcaaaaattaacctataatatgatattagaaattggattttctatacttgtttttctctccatcaaatggatagtgcttaacagttttctttttctttcttttttttttgggttggcttattttcttttgaactgcttaattcctggctctgcgttcaatttactgttagattgcttgatttaaatattcactcacattgttgtttttgttatttttatctaagaatcttcaggccttctacagtattagtgttggatt

SEQ ID NO: 80374 - DNA, 472 bp, Citrus sinensis
  Intron number 1 from transcript orange1.1g021316m (locus o range1.1g021316m.g) derived from phytozome v7.0 (chr-ID sc affold02116; pos 10188 to 10659)
agcgccttaagtactccgctccacgcttcaccaaggtcgtcttctctctcttctctctcgctcttctctttttagtttcttttattaattgattatcattattagtctagaaataagcttgcggactgtaatgtgccacgtcattgcttgcatgagtgaataaacgtgtacaactaaaaccctagaccctagtgtgttgttgttgtactgtctactgagaaatagtagagactgccttattacatgcacctttatggtacaatccttgtaaaattttttgttactaaaccctttgatttttggaggtttattgtgtgggtaatgattaccgccagaacactgggcggaattaatgaaattttttctggttccataattaataggttctgtataggagttcagtatgactttttattgacttgagcgttgaatgatgctttttctttcataataatattaggaaggcgggttg

SEQ ID NO: 80375 - DNA, 982 bp, Citrus sinensis
  Intron number 1 from transcript orange1.1g026117m (locus o range1.1g026117m.g) derived from phytozome v7.0 (chr-ID sc affold00004; pos 583291 to 584272 reverse strand)
caccagcagccaagaaggtaacatttctttttttctttttttttttgggggggtgaaatctatcaattgttgggttggcttcttacgtttttgccaatatttagtggttaattaaatgggaattattatttgaataatgacaaaagaatggtcaaagatgagctcgccggctgttgctcagtcaagcagcagtgctatttagagatcaagaatcttttttcagttttctgttcctttgcacaactgatgagcatatttcagaatttaattatttttagttaatgaaaaaataaagactgaggaatcaggccgatggtgaatatttgcagataatttcgtaaactcttcataacaccagaagttttgtcctagttttggtagttgagatttggtctctttgttgcatcataactctctgttttcaacttaaaaattcataaatttcaaccgaagttggtgagggagcggcattaattattactcactacatcatctagattttccataggctttctgccaaaaagaaaaataataataaattaataataataacaagagtaataatggtcttttttttaaaaaaaaagaataatggtctttttgaaaattcatgtaataggtattatttcttgctaatcatatttctaattttataattaataataaacacagcatgagtgtttacgtgtttgtccttgtcattcatgtcaacacacgcatagaagatagaagatagaagatgtcttctctttttctttttttctctctctctctctctctctctctctctctctctctctctttctctctctttcttgaacagtaagcactaatcaaaatccatatcattattattaaaatttttacagttgctttcttattttgtgccttttttttctttacttttcgctggaatcagccataattcacactccaatattatttagcttttgcagactctttcatctcaataaagtttgaa

SEQ ID NO: 80376 - DNA, 510 bp, Citrus sinensis
  Intron number 2 from transcript orange1.1g023711m (locus o range1.1g023711m.g) derived from phytozome v7.0 (chr-ID sc affold00026; pos 218210 to 218719)
cttctgagtcacgcaagaaacaaggtacagaaaactggaatagccgcttcaatatccttttccgattttaatgggtcacttcagggaatttggtttgatttggtgggcattttgctttttctttccatggttgttggggtggttaaaggttcactcattaggtttactttaactttgtattttcagtaatttattagattataacttgtttggttctgattctttagattccaatctagttttcatgttattagattctatcttgtctcatcaatcaatggtttctagaatgctactggccaagttatatatatataattctagaagtgtacacttggaatcttcccttttctggtccacttgttttgttttattgttaggattaattttgtaaccttatcaagaaattgtgacttgtgactttgtgaggttcgaactaacatcattattgttttttgtttctttttctttaaaaaataaaaaaaaatttgtttgttgggtctatatagg

SEQ ID NO: 80377 - DNA, 606 bp, Citrus sinensis
  Intron number 1 from transcript orange1.1g040908m (locus o range1.1g040908m.g) derived from phytozome v7.0 (chr-ID sc affold00243; pos 204657 to 205262 reverse strand)
tatcaggagaattgcctgaggagcttggaagtctagtcaaccttgaaaaattgtaagacatacgcgattcatataaatttatatgaccctttattttccaaatcaaaatcctgaagaaaaatttatatctattagtttgatgatttggctcggtattgctcttgttacagtcatattaactcaaacaattttactggggagttgcctcaaacatttgctaagttgaccaatatgaaggatttgtaagcttatgatttttcttactctttcactgtctcctttcttgaatttagatccagtgctgatctcagttgtgctgtttattgaaacatttaatgacagtgtttaaaacagtacatgattattaatttattttattttgtccttttgttattttaaataatgcagtcgaattagtgataaccaattcacaggagagatacccagttttattcagaattggacaaagcttcacacattgtgagagctaactttgttttttcttttatatacactataagaagattatgtgtatggtgactaatgaaataaatattatatgcgctaacagattcattcaggcaagtggtttggttgggccaattc

SEQ ID NO: 80378 - DNA, 918 bp, Citrus sinensis
  Intron number 1 from transcript orange1.1g034121m (locus o range1.1g031900m.g) derived from phytozome v7.0 (chr-ID sc affold00182; pos 230026 to 230943)
ctcaaatcctaattgttttagtacaattgatatccatcaaacttaattccatgattttcctcttgtggattgtggagatccattaaggatcaactgttgtctatgatgaaatataagtacaaagaaaaaagtatcaatcttatggagaagatgcattccctaaagaagaacaatatttctttggaagtttgatctcttttttctttcaccacaaaaataaatacccgaacttttcgaatattctccacaaatgtagaaagttccaacattttgttatagccttggaaaattgtgaaactaaaattttgaaacataattacaaattatgagattgtgcggctgaaggattttgttaaaaaataaataatgagtttttgattgaaatcctattaaaaaataattaattttatattcagctatttatgtaatatcattgaacataaggagtttagatagatattaatagcactactctaaaaacaaaattttatctcaggcattaagtagtgagctagctttcataccagttgtaacattttatgcccaaaatttaagtgtctgctctgaatacatatggcctatcacaattttgttcttaaccttggaaatctaaatgcttctacttaattagaagaacctatgactgatagattaacctagtctataacgagctagttcagatacaaattgtataacgagctagttcagatacaaattgtacgtagtctaactaagtgatattatctactttgagcatacgatctctcctatttatataaataagggtatttttggtacttctttgcttgaaaacttattgtctgaaagcacatcacttataaagaagctgcataaaggggatctctttttgttgtttgtttagctcgaaagcagtacctacgccattttgagcaagga

SEQ ID NO: 80379 - DNA, 704 bp, Citrus sinensis
  Intron number 2 from transcript orange1.1g026418m (locus o range1.1g026418m.g) derived from phytozome v7.0 (chr-ID sc affold01438; pos 301 to 1004)
atccagtaagtctgtttttaaattatatttttggttttgttattttaatttcccttttcctgtttggttgccaagaaaataaaatggattacattgaaactgggaaaatttcgatcgtcttaccaactctttaagaaaataacaaaatgaatgccacgtcattacaatacatgcaaaaagaaaacaagagacagtgctacgtatcatttgctttgttgacaacgaaaagcacttaattttgtctggtctccacaacattctttcatcggatggtagatagtgagtcctgtattgtcccctaacttttctttttattaaataaagaataaaatgaaaacatatctcatcgaattcttgataatcaggtgcgttatttatccttttgttagaattcttaagccgcgtttatttacttttatttgattaataaaaaaaaattcacgcgataaaaatcaaacagaaaagacatgtatacagcgagagtatttaagattgtttatcgttcataaacattttttttaataatgtagaaaccctcagtgggtcattataaagaaatttggaacaacatataatatgattttagtgctttatgtgctttaaaaaaaaaaaaaattgtataaagtgggttaaccgtttatatacatgataatggtggttggggtggttaatgatgataattttgtttaatgatgaaggaacaa

SEQ ID NO: 80380 - DNA, 640 bp, Citrus sinensis
  Intron number 1 from transcript orange1.1g008643m (locus o range1.1g005446m.g) derived from phytozome v7.0 (chr-ID sc affold00025; pos 324361 to 325000)
cacgcctgaaacagtacgattagatttagtgtcctgtaattatttttatttatttatcttttcgtgttcttgatattcgatgttcgccttctgtaaacttggctgttagtttcgttacgagttatgaaaaatttggcttacgtagtcaagttttctgttgacaactgggcttcatatcaagagcttctcataaagcacttcattcaagtgctttcttcaccacataagctttttgtggtttgtactgtaattgcatattttttgacctgtgctgacatattctttgtcgaggattaaagtgtcgggatacagatatatgatattctgtgtgtgttggggagtgctttctgtaaaaagaattgcttcatagttaagcactttctgaaaaagcagatatctatagcttcttcaacagcacttgactgacttcaccatatctttctggaaaatcaacggcaaaatgtttcactctatacatgtcattataaacactttccttcaaactgtactccacagcataaaaagaacattttactatttaaaagtgctttcagcacaatcttgcattttggcttgaatttgattgtgttgttgttgataattaggtgaggaacaaggtattggaatctagaggggctgt

SEQ ID NO: 80381 - DNA, 760 bp, Citrus sinensis
  Intron number 2 from transcript orange1.1g026595m (locus o range1.1g023412m.g) derived from phytozome v7.0 (chr-ID sc affold00004; pos 1572381 to 1573140)
cttcgtactcgaaggtgagttttttttttttgggttgattctttgctgattttctttctgtttttcctttttaaagctaggtaattgactttggggctacagttggtattattttggagggatatatatattgtgatactcaattttagtagggttttgagaattctcattggttttgaattcagttgttggattcaagtgagaattgatcccatttatgtcttttgcatgttgaggtaatttgatcatcattctttgtggtgcgtgctgagtttaatttttgggctggaggtggggttaactaggttatattgatcttatggtggttaagatttgggttatttgataagtttgatctgctttgaggtttttaactacttgtgtgctgtgttcttggagatactgaagctcggtgcacactttattgaaatttaaaatgttatctttgtcatcgtaatcatagtttagcttaaccttgtttgcaatgttaagtgaaccaacagcatactttttgctaataagcttctctgtttggtcttaatatagggagttaagtgaataatggatttgctctgaagtaggaagatttaaattcttctattgaccgtttcttaaccagtctaccatgttctgaaatttgctagaaaaatccagtcattaagaaataaagagatgcggagttaaattcatttctttgtatgcttggggtgttatatttgatattacttttccatgtgcacaatgttattgcagctgtctg

SEQ ID NO: 80382 - DNA, 836 bp, Citrus sinensis
  Intron number 2 from transcript orange1.1g031795m (locus o range1.1g031795m.g) derived from phytozome v7.0 (chr-ID sc affold00007; pos 188902 to 189737 reverse strand)
gttggacctctgaaggtaattcctttagcttttatgtatgtttttatttcagtgttttgagctactgcttgatattcaattatttttttatccgggttttatttgtattcggtttgttggttgattgttgatttgattttttatgttgttttgttcatttgatctgcttttatcaatttgactttaatttgaaccatggaaattggtcactgtggtcatgtaatattttggctatggagtggggtgttgttttatagatcattgtatgtaggcgctatttaatctgcacataattttatcttgagggctcaattaaggttcagttcactgaaatttgtgcttgagttagggaaggctgtgtttggactagaaggccacagttttaagatgaagagtgtttcctctttagtcactcaactcaaaccaattgtgtttttgggcttattttgaattggtaatttgatcaggactactctgtcatcttaaacacatatgaaattaggatactcttttgagaatacttgatcttcgtattgaggtgatttgacatttgcaggaaattcacgtctaaacttgctttcaatcatactcttctctaggcatttaaactgaatcataaattaaatgaaaactaatgtgtgggtcattgtccagaagaaattaggtgcaagtaatagttgaacatgaactcctaaggtcaaaggttttacaatctttttgcctctttatctgaactatttcttgtctttaccaagattggtaaacccatctctctatctctggcgtacaatgaaagaatgcatatcctttccttttgtagggcaagacaagactag

SEQ ID NO: 80383 - DNA, 355 bp, Citrus sinensis
  Intron number 1 from transcript orange1.1g045945m (locus o range1.1g045945m.g) derived from phytozome v7.0 (chr-ID sc affold00433; pos 50184 to 50538)
gagagcataatcttcttccattgagaaaaaaagatggaagaatgttcactgacattataatcatattactaatattctcattatttgttttttgggatacttcttggtttaactcgtaaaatctttttgggtagtacagtaagatttggagttcaaacctcgcccttatcgggtgtttgattagtccttaagaatatattggttcttttgaaagctgattagcttttactctgaggccaattcttttgatgctgtggagaagtgtgcttgattccatctatgaattattttctagtgcgttttttgtttttttttttaataatttcaacctttggttttgggttcaggtatagaa

SEQ ID NO: 80384 - DNA, 1050 bp, Citrus sinensis
  Intron number 1 from transcript orange1.1g045199m (locus o range1.1g045199m.g) derived from phytozome v7.0 (chr-ID sc affold00067; pos 69915 to 70964 reverse strand)
ttgctgaaattcagagatcagatcaggaatttactgtaagaacttacatccctcaattttaagtgcaggattctgcagtttgacaagaaattgttttcttcagatgggtttaattttgttagtgagttcttattttcatttggtaatatcatgtgtctgattgttagtgggtgtctgattgttagtgggttgcattagattttttatttttccttctattttcctttctaaatctttcatgtgtgacccagttaattctcagaattgtaggatgaaattccctcattaatcgtttagatgattgttaataaattctcatattgagagcaattgttgaggggaggaaattttcaatcaaaacttttgaatgtctgacttttgctttgtcgaaattaaaatttttttatgcttttcaagggcggtcgtgattaagaaagaagttggctcttaattctctattctaatggatgtatcatttgcacgtgaatgcaactttactgtatcttcaaactatgaccaacttaaactctgctgacaggttcaagaaaacaaatggaagtaatgagccagagcctggcaccttgatttggcttctctttattggcatgctatgtactgtttgaccaaccgtacctggcaatattggttcatcaccgtcctagcaagagactgagggatgtaacacaagttgatcatgcaatgatatttcttcctcagcttgggagtccgatgacatctgcaagcactgacaggtggtggagctttggggtagtgggacattttggatcaatggacatggaggtttctgaagaatattaaatgagtcttcatattccccaacattgacaagtcctactactagtcccaccttccccatggctatgcttttgaaaccatacatatagcgaccagttcaagctgagatgtcatgcttttacaagaagcaacattgcatttcaattagtagatgatcatttctcagcaacttattatcattgctcttcacccctggaagagatacccgaaatctttgtccacctggagatttct

SEQ ID NO: 80385 - DNA, 845 bp, Citrus sinensis
  Intron number 2 from transcript orange1.1g044735m (locus o range1.1g044735m.g) derived from phytozome v7.0 (chr-ID sc affold00082; pos 376330 to 377174)
tttacatcaaagtaatgtttctacaactttagatgtgtacatgcatgcattttgtttcaggctgttttttatccttttgctgtgatttcggtcagtttcgtttttatatgaatgctgttactctgatgcaaactaaggttttaacatgtgctaatattgtgaaaaatttgattgtgtattttgatctttattcctatcctaggtccttttcaccattatgtttttctgttatctttctagtgtttcattttcttgataggattttttgtctaagattctcatgttcctcaatctgtcaaataaaggtggggtttatcaatctcatgaaccattattgttttatattattgtcttgtgaagtaggcaatctggctaaaagaaatagagcttattatagtcttctgatctaacggccctataagggggcaagtacttgatcctgacgtaaatctaactcagaattgtccttaacatatggtcctgcaataagtctatataggtttgttattctgataaagaattaactgttgatgggtaatcagaatagtcgctcactcaagttagtgaatattccttcatagtagatcagagttttgttataaggtaccagccaaatactgtccagcaatactttgtgaaattatttttgcatcttcttcaagttcacttttgtgagcatgaagacttattgatgggattgaaaattttctaatgtttctcacttttttatgagtgacattatttactgtagcttgggatgtctgcctgcttatatttttgtgatatcaatgttttactaagtactactaatcttgcagaaagttgagcaagagaaattggagaag

SEQ ID NO: 80386 - DNA, 909 bp, Citrus sinensis
  Intron number 1 from transcript orange1.1g014333m (locus o range1.1g014333m.g) derived from phytozome v7.0 (chr-ID sc affold00123; pos 382543 to 383451)
aggtactctgcactgtaaatgtcgttgtccattagcatacatagtatatatatatgtgtgtgtacacacacaaacatttcttttacgttaataatttgatgctccctttcctaataataataataataatttaatgctccatctcagttacgatctcgacccaccataatgtcatgcgtcacgtaccttcatctctgcatttgccgtcctcactttgttctcttgaatatataacatgctcagatgtgtacaatattagacgtgcatttgcaatagactattaaaatattagacgtgcatgtaaagctctctagtctctttgcaggtcatgtgtacaatgaaagcttcaaattcaatatatataattacaataaatcacataggctatagacgtgtagtacggggcaaatttgattttcttaataatttggtatcttttttaagtgtttttttatcatctaacctgcttatttaaagtgattattttgataacgttcgaatataaatatggatctcataatcccaataagggctaatgaaaaaaatttatgaacttgagaaacagatttcattgagtggggagagctgttcggtttcaccattgtatatgtagcagttaataatatacaataattcaattttgtttatatattttacatgatcataattcaaataattcaataaggatcttgatataaaatattgtttttttttttttattaactgcataattgttaatgtgagagcttcgatcatggaagatgatggtccttatccatttaagtctatcctcaataagactaatgattacttactcggcaaatatgcataatcttttcatggtttactcaaaacttctattgatcttctctaattcttgcctaaaaaatatataaaaggatttgatag

SEQ ID NO: 80387 - DNA, 354 bp, Citrus sinensis
  Intron number 1 from transcript orange1.1g025313m (locus o range1.1g024012m.g) derived from phytozome v7.0 (chr-ID sc affold05747; pos 3379 to 3732 reverse strand)
aagaaacttctcgtgagcttgctcgtatgtgatttcttcgctctgttattacttatttggttatctggttttaatgtcgctaggcaatgttttttaagttctttgttggtgattttgcaatttgtgccactgatttattattttaagatagggtcattagttatgaggtgtgtaagtttatatccaacaatatattggattggattctttttgtttaattgagatttcacaattagattgaattttgatttttacactcatttatttgctgtaggcttgcctggtgtcttgactgtaaggcctgacccagattataattctgtgaaaaaagattatagttgtttagatattcag

SEQ ID NO: 80388 - DNA, 737 bp, Citrus sinensis
  Intron number 2 from transcript orange1.1g048675m (locus o range1.1g048675m.g) derived from phytozome v7.0 (chr-ID sc affold00004; pos 3370988 to 3371724)
tgtgtccacttctcagccatctgattcggagtccggtatgaattcaccttatttgtataacatatatatttttttaaatttttagttgtttctactttgcaattttatctgttttttatgtgaaaaacaaaaaagagagagatagactgagatgtgaaattgaatctctttggagccagaaaactcatgattttgggagcaatagttggcaggaactagcttcttcgataatatgctgaatttttgcttttgcttgtctatgtttgttgatacttttgcaaacgatggtgcacatggattatcattattacagctaaaaaatatgatgctgtaaaagtgaatttaaacaaattgttttaaaatgaagagtgatttctgagcatgctctatctcttcctctccctctcactttctttcatagcaagatttcttttggaagagtttgtcctctaaagcctgatcaatagttctgcatgcatagggttgtaacagaacaattaattctcgaggaatgtgattttgctgccttcatccattcttttgctttttcttgattttacctttgaagttattttattaattttcttgggaagaaaaagtcatgtagtactaatacactgttggctttcttctatctccattccattgcttctatctgccacttatccgttttttgatgtctcctgctgaaaattgcaacagcattggttcaaggaaacgacagcagtaataccttg

SEQ ID NO: 80389 - DNA, 429 bp, Citrus sinensis
  Intron number 1 from transcript orange1.1g010396m (locus o range1.1g008955m.g) derived from phytozome v7.0 (chr-ID sc affold00733; pos 37807 to 38235)
caccttactattttctgtttgtttctcgagaaaatgtacgtgggttattccaattccattgttttagtcttctttctattatatctctgcaggaaatgtaatcgtttgtcgcactttcaaatgggttacttcctttctgtttgcttgttgagaaaaaagcggaaaaattttgaaatttatttcttatatcttagtgcgttttttgtttgtttgttttttggttttgttatttttgaattgggttttgtcgttttcttgaattatattctttcattttccttcagtctcccggcagccacaacatgagtttatattatattaatctcttgatttgtctttaatttctttatgtgccattgtcattcttttttcaaatgctgagctggtaactgaaaccttttcttctataatcagaattgaagggtggct

SEQ ID NO: 80390 - DNA, 868 bp, Citrus sinensis
  Intron number 1 from transcript orange1.1g013465m (locus o range1.1g008469m.g) derived from phytozome v7.0 (chr-ID sc affold00232; pos 77463 to 78330)
tcttctccttcaacttcagctctctcttctcctccgtaagaaaaaattctcttcaattttgaatgttctttgtagtatatatgtgtgtatataatcaatggcttacaatcaatttaataattctatttctagttatgatgcttttattttatttattttttaattgaggtcccgaggagattctttttcttttaatttttaaataagttgattagatccaacatgctaatggatgttgagattttgtattgaaatttactttgttcgtaaaacaagacaagaaaagttgatttttttttccagctgctttaaggctttgttttagtttatgctattgtaagggatttaacaagtgataaagaagggattgcagctttataattgtgattagatatgtgtaacaaaacttttccttacggcattatgagatctgctataattattcatatagaagttgaatcaaggagcttctgtttctcatcttcattgtttaaaactgttggaaaatcccaattttcgtatggtctaagaaaggattatgtccaagaaggacctcaatagggattcactgaatagatgctttccccaacgatttctgtacacaaggaaaatgtttgtagtatattatcaattgaactctttaccagggaattttgaaaatttggtactttttatgctcagaaaaatggagttattttggtaatctgttgatattcattttaaaagttctccatatgcaaacctcaactaaaaatgcagtgatctgtactatgttggctagtgttctcaactttatttttctgttttctctgttggacagtgttaaatttaattttgttacattaaattttttgcagagcatgcagaa

SEQ ID NO: 80391 - DNA, 553 bp, Citrus sinensis
  Intron number 1 from transcript orange1.1g015463m (locus o range1.1g015463m.g) derived from phytozome v7.0 (chr-ID sc affold00254; pos 82304 to 82856)
gactgattttgcttttacttccaacaacaggtcagtttatgatcctgggttgtgcctttttttactggttttttggacttttttttgggtgatccatgtgatttttatggtcaccgatacagtacaatttagaaaatttaattttgtgttttctttaagggatcaagatccaagccaaaccatggtttaatttttgcttcattgatattttggatgcatttgattttagttatacatgatataaatcattagtttgtcttcttagaaagcgttgcaggggtttacttttgacagtatatttgatatcgttcaagaaaacttatttagtgtcaatctgattcttgaaaattaagtttatcttaatacaattaagcttcaagtttcttggtctgccgaacggtgaattgaactattaattaagttcacatgtaacttggcaccatctgatttaattcctcaagtgaagagtgggttgaatttagctatgtaactgtccttgtttcttctaaaccatctgatttccattggcaattctgagatacaggtcggaact

SEQ ID NO: 80392 - DNA, 756 bp, Citrus sinensis
  Intron number 2 from transcript orange1.1g014540m (locus o range1.1g014545m.g) derived from phytozome v7.0 (chr-ID sc affold00036; pos 475450 to 476205 reverse strand)
aataattttgagctcgggcatcaataggatcatctgtaagtttggcttactatgtgggtctgattaagagaaagagaaggctgttaagatactttttatcttaatctatctttaactacttcatacaaaaattgtcatgtctgatctgttgaacgctgaactattcccgatacctggaaattattatttatgatgcagtgcttgttgcctttactctgtgataaatgaataaataataaatattagctgatgataattaggacttgcatgggaccaggtgagcagcatttatattgctctatgatgtctggttttagacagtgatctcataaattgtattgaaaagcaccatttttaactgctgtgtctttgttgttctaaagagccattgaacagataattagccttaaatacataaaaatatacccatgaattggattcaaatttagctagttcatatgaacaatggagaagggaaatctacgagattattgttatcttcttacataggcatctcataataaagctttgtcatttaagtaactgatttttatttcttactggtcgtttctcacctataaatagttaacagtggttatgtcactggttgccattagtttaatgatcatgtctgaaggattttcctgtttggttctgatattgattgtaatttgaattttatttagctgcattaccaacttatagatgcttagcttttttttcacttttgcagaaggaagtaaagcaaaataagaa

SEQ ID NO: 80393 - DNA, 1037 bp, Citrus sinensis
  Intron number 2 from transcript orange1.1g038267m (locus o range1.1g038267m.g) derived from phytozome v7.0 (chr-ID sc affold00004; pos 521361 to 522397)
tggcggcgccaatcggagactttatatctctcaaggtttcaaattctcattctctggctttaatgttaattcaaatgtgtacgttgttatagtgtatttacataactgactgacttgtgacagcgcatgttagtttgtatttaatgatttgaaaaagaaatcaacttattatgagaatacataacttgaccaggtatttatgttttctttttttaatcttttttgtaacaataaattatgtgttgggaaccacaacatttggctaactgtttgttttcttgatttttcgtagccatcaaaacagatggtgatgaggcatagggtggtatagtatggccatgaatattgagcctggaatgttaatgttactgctaatttaagaaataaatggaagtaaagcatgtccttcaggaacaaattgtgttcaattcaatataggctcaccctcttgattgttggtggatgtccttatctagttttatgaaaagatcatagtaaattttcttttctcctagattaggtcacttgtgtattgaacctattttaatcttctaaaaactactgaaagatagcaagtttatgctgtttcctcttaaattttactttaatagacagttctcaaattttttgtaatcatagaataggtttcatgtggtttcccaccacacaagttcctttttctccatgtttacttcatctgaattaggtgatgcagatagttggcacttactgcagttcaagctgtggaaactgtgaaatgatcatccgtgctattgatccaaatatattcataatgatgtaataagcgatttacttttgttctattggacctaagctgatgagtgtacaatctgacacgatgtcagcacttattttattaaccacttgtcattttttttcccgaaaggcttattattattttttaattttatcctgctcacttccatagttaacaagggtgtatttgtgatgtatattgtgtcttcaaactattagtaatagataattataacattgtacacttcatcctgcagtta

SEQ ID NO: 80394 - DNA, 845 bp, Citrus sinensis
  Intron number 3 from transcript orange1.1g010017m (locus o range1.1g006530m.g) derived from phytozome v7.0 (chr-ID sc affold00304; pos 105983 to 106827 reverse strand)
tggtgaggggctcgaggtcctctagtgaagaattattacatatatacaatcactctgaaaggtttaggaaaacattactttccattctgttcctacatagtacagcggatacagctgcttagagctatatcatttttttttaatatcagaatttattgcattgatgggttttaattgtttgtaaaaaaaatctcaattccccctccccaaaaaaaaagaaaaaaaaaattgtggcgggaactcctatgttatgatcatgttcacgagaaaaactagaaattgtctatgaataacttcactagtctgaactttctaattattactgattcatttagagtacccctacatttatgaaaatgggcatccattactacacaattgagatttcaagtttcgtgttagagttttgaagttcggttttcgacttttatgttgggctttaagttgggttttaatcttttgtgttaaaagtttttgagttttttataagaggtttcagattttgtgtgacagtggtaacattacaggtgtgtcattttgtttatgtaatagcattgcaaagccagtgttttgaagtaataatactctcaacgtctaaaaggtagctgattcctatagggaattgaattcagaggtttctaagggcctatatgtatgtacatgcatgatgcacaaaatgattttgttggttttgatcaaccatttttgagtatcatggtagtattacagttggtacctgaagactactcctgcagattcattcttcattgaattactgaaggtactaattatatgttgtcgtgatgacagtgttgcacttgctgtggaaaatcctgaatttttca

SEQ ID NO: 80395 - DNA, 723 bp, Citrus sinensis
  Intron number 1 from transcript orange1.1g029618m (locus o range1.1g025320m.g) derived from phytozome v7.0 (chr-ID sc affold00026; pos 1009322 to 1010044)
ttagtaattaatcaatgacttgttattaactcattatatactatcatcatcattttttttttaagacacacacactgtctctgtatgcatatgcacacactcacacacatatagatgataagaagttttaaactcattcatgtatcaataatagttaattaatattggttttaatgtgtgataattctgaatgattatttccttgtaaattatttagatgggtgaggttcctgtgatggaagaagataaaacaaggagagaagcaagtgtcttaaggtacagggagaaacgacaatcaaggctcttctcaaagaggataaggtatcaagttcgcaagctcaatgcagataaaagaccaaggctcaaggtatgttgtttaatttttttactcctcctatcttttgaaagtccacaaatttaattttgttaattagaatccaattcttctgaacacacaactctctgtacagaaaattgctaaaagatggaaaaaagaaaagaaaagaaaatcatatttcagtcagttttcaacatgagcaaattcatgttggtcatatataatttaatttcaacaatatttgataattgagtttaattcaagccatctctcattattattaattttccaaaatttccaaatgtgatatatataatattaaattaaaagtattagttagtatttgctatttttggtttgcagggacgatttgtgaagagggtttg

SEQ ID NO: 80396 - DNA, 555 bp, Citrus sinensis
  Intron number 1 from transcript orange1.1g040792m (locus o range1.1g040792m.g) derived from phytozome v7.0 (chr-ID sc affold00007; pos 1243453 to 1244007)
ccagcagggcaacagcaacagcaacagccctttaggtatatctatttatctttgtttggcttttttgctttttggtacatcacgtagacccatctctaaaatctgtccctcaatcattttttattacttcttctaacctttattttggtttattttatctatttgggtcgatgacgggttttttgaatcatacctattcttttaactgtttaggctcgtgcaccactgtgtccctttctcagttacgaaaatacttggaaaagtccttttgtgttttgcgggttcttgtcattttcagttcatgggtattggtttggttaagtagttgttttttattggatctttatttttatttttatttttaatttttttattgtgtgtttctggaattggcttgatgggcgttgatttcattagcattttgttggatctttttggttgaatctactatgtttgatatacgcttcggcaagttgttcttagtgagcacgttttaagttaacagtttaataattgtgtctgtttactgtgatttaatcgaaatgttgttaggta

SEQ ID NO: 80397 - DNA, 1012 bp, Citrus sinensis
  Intron number 2 from transcript orange1.1g045574m (locus o range1.1g045574m.g) derived from phytozome v7.0 (chr-ID sc affold00007; pos 1527648 to 1528659 reverse strand)
ggctggttcttgtaagttccccattcattatttgtttattttattttttccgtaccactggccataaaattggtatggtttttgtatgttttattaatttcttcacaagaacttgaatatgttgtcactctccaaagatgcagcatatactctaagaaaatagtaaaagaaacttcacatggttatttggttacatgttttcttttggtgtctcatggaaaagtctagatatacatgtttatgtttgcattatcactgtcagtttagcagattggaggcagaagttgggtgaccattattagttggtccttcttctttgtgatggaagatattggaaagctttatatgagtactgcttttcccattgctgtaactctaattcggcttctagtccgtgttagaattgtgcaattttttttttaaatttttttgttgatactgcataattgtggccatttcccttttggcaacaagtcaagttttatcgaaatttaggatctagttagatcatcagatcaatggcactggaatatgatagatttatgcagatttctgttacacaagctatatagaactcatttcaaggattgtattttcttggatgtctgtttatctttgctttcttacttttctctcttctcttttatgtatcttttcaagtatattttaggcattgtttagctttctttcttgtttgtttcctctagcttctctgctccaatcaacccacacaagtagaaactttagaaaaggggaaagcaacatagaaaagaaaagaccaaagggaatgacttgaacagttgaacttaaggttgtctcgaacaattaatgtatgaaagaagataaaggagaactgtactcttatcaacgtgttataatcaaagatgttgtcccagaaccaattttacattgcgctcaacttgaattgcagtcttgcccatgcttaatgaataaaaaatttgaaatttgaattccaggtttataattggattcttccttggtggcattccct

SEQ ID NO: 80398 - DNA, 433 bp, Citrus sinensis
  Intron number 3 from transcript orange1.1g030307m (locus o range1.1g026638m.g) derived from phytozome v7.0 (chr-ID sc affold06007; pos 1413 to 1845)
ccaaaagttacctgagaattaaggtttttcccattggcaatttgtgttcaattaatcaatcttcagtttcaagattttttgtttcattctggcataattttctctttaaaccttatttgatgcacattgtcttggaaatagcatataaggcctgatacatatggatatgcatactatcctcaaacgttttctttttttattctgtatttcttttcgtctataagaaaatcatcaaaatgtgttagcaatctgatgacgtgttaatgcttgtgcaaattacataaacatccaaatttcttgtcgcatctattacttctaccattctccaccaaaagtgaacacatagttgtatttgattcttgagcctcaattatgctcaggctaatatgattttgcaggttgtgaacctcgggagcagttcagttaatctcaa

SEQ ID NO: 80399 - DNA, 356 bp, Citrus sinensis
  Intron number 4 from transcript orange1.1g030307m (locus o range1.1g026638m.g) derived from phytozome v7.0 (chr-ID sc affold06007; pos 1946 to 2301)
gagccaaacaaggtatctaaattctaattcatttcttcacgctgaagtaatttacactaatctttctaggcctccatgagcttgtatataccatctgatctattgcatgacacatgctctctaaatctccaagtttattacttaaccaagcacgagtacctttgaacagaaaatacatttgtgtttgaatcttaggagtttattactccttttaaactttcgaaagtgacaatggaatttgcaatataaagacgaatcaaaagaacaatcataccataatttatgtctttatgtctcagccctcaggactccttttaattctatgcaggtggtaccgagcctaacactacttgaaa

SEQ ID NO: 80400 - DNA, 725 bp, Citrus sinensis
  Intron number 1 from transcript orange1.1g036507m (locus o range1.1g036507m.g) derived from phytozome v7.0 (chr-ID sc affold00175; pos 183912 to 184636 reverse strand)
tgccggtgatctgttctacattccactgaattcaggttggtagtaatcttatccttccttttctatttatcttttgggatgcttgaggtagttcagtaattttgtatttagagattggtttgaattttgtatccaaatgtggaggattggcatattttgtgttgttattgatgggaattatgtatgtttgctatgcataatacattgttacacattgtcgatttgccacaactttggagaatcctataggcaacaataggaaattcaggcatcgaagatgaaacaaaagctcttggaataagttctgttaacttgagctcgctagcttttgtaagcattccattgtaatataaatgactgaactttcttgaggaaaaaatgaaaaattatcagttgtaatttatgctaagaaaatggagattaagcattaacagctggcacatctcggtctctgcataggctgcaatggggaaagaaaagaaatagaaaaagaacataattggtttcgtggtgttcttttactgatttcctcttcggattaggttgattttttttcttcaattcttgtttatattgttcttgttgtcggctgtactagttcgatttatcattttcccaaacttattttttaaggattttcctcttttctagcagtttcttttttatttatcaagttaacaatatatgctttattatagttcctggtgagccttatcctgtggaga

SEQ ID NO: 80401 - DNA, 569 bp, Citrus sinensis
  Intron number 2 from transcript orange1.1g021005m (locus o range1.1g014452m.g) derived from phytozome v7.0 (chr-ID sc affold00772; pos 1089 to 1657)
aaccgtatttgattatactcctttaggactttgtggtgcgctgcaattttcttgcagatggggtaataagggagcttttatgtttgaaatttggaattctggaagttatattggttaatttactgagaatgtttttccttgtgtcagaataataagtccactaaattgactcgttgtgactgttcttgctttgttgaacacctcaatagttgcccctttggtgctgctctgtttacagggttagtaataaaataaacatgccattgaattatatgtggtaggatgggaccagaagatgtggagctatcatccaacagatcacacctacatttctttttaatgagttctagatagtgtttatatgcattgtgtcctcggagcatgtctcctcttctttatttgaagttacaagggaaaagaaagaatccaataccttctcatatattacaatgtcaataggaaaagtcgtcattgaaattttataggatttataccttaagtaatttgatttgaatctatgctttcctttaacattttcaatttggtttgacccactgcagaattcagag

SEQ ID NO: 80402 - DNA, 349 bp, Citrus sinensis
  Intron number 2 from transcript orange1.1g038951m (locus o range1.1g038951m.g) derived from phytozome v7.0 (chr-ID sc affold00189; pos 257852 to 258200 reverse strand)
ggccaaaaatctatcaagaatagccccaatccccggtacattaattcttcattttcttgaaattttgatctctctttttttttttgttgggggggggattattaaatgaacattcttttggtagttccttagaaccaaaatttagaatgggcttttatggttggtaagtagatgtgttatgtattattttggacctgagcttaatcactaatgcttaaatgtcattttcttcatttaattatttgctgcttttgctaattgccatcgcttatcataattagtgactaatcaccaatccttttgttttttttgctgaaaacagaagctactacaagtgcacaaacccaag

SEQ ID NO: 80403 - DNA, 723 bp, Citrus sinensis
  Intron number 1 from transcript orange1.1g041515m (locus o range1.1g041515m.g) derived from phytozome v7.0 (chr-ID sc affold00070; pos 429045 to 429767 reverse strand)
acttaggttacatcggcgatatcagttattacaaggtaaagaccaacaacaaaaaaagagcaaaccttactgcatacttagctgaaagctttgactttttgatgaacttagtttgatttgagatgaaatttaacttttttctgtgttaaataggtttagttaatgaagaatttattctaattacaattgaatttagcttctaatgctgcaagattatgttttagagctctgttttcaataagtttcatttctttttctcctttttcacatttgagaaattaatgtagtatgagctgtaagttagtactagtgtaatctttagaaatttaaacgttctggatttgtagtgctttagaagctgtactagcaattgtaaaagtgctttttttcggggaaagtacttttacagtaagctttagaaatgaaaatgacaaattatgaaaagttggtgtggattggaggtgtgttttgaaacatagaagtaagtgtaaaagtgctttagactagggagtgatttggaaacttgcatttaaatgtgcttttggaaaagcgataagttagcatgacagatttatttcccctggtgatttttgtttgtgttagcatgtttttctttaatttctgctgttgctatgcttattgttctgaaattatgctgaaaacagattatatgtgttgattgcggcagttcctgtatccgtctgaagaggacttgtataagtt

SEQ ID NO: 80404 - DNA, 1029 bp, Citrus sinensis
  Intron number 1 from transcript orange1.1g028616m (locus o range1.1g020754m.g) derived from phytozome v7.0 (chr-ID sc affold00004; pos 1724440 to 1725468)
tttgcgtttgccctacgtttcaggcggacgaaccggtgagttttttctttctcttaatctaaaccaagaaagcctctgccctttcaagaaaattcccacgaaatttgtatgcatgtaaaacattttgttctatcatttttctttttgccttttgtctggttactgggaaactggggaaaccgagctaaaggaaagtgattttgtgactatgatgaatgctgtgggttgttttgctcctctggttatgaaagttctatctattagtaaacatttctgctttgcctcctcattttttgtgggatttgggtatccttcaagcattctgtaatttgcatgcagtgatgatttgctttaggttcgttttcctgtgaccttgattagttagttttggtgccctttgctcactttctctgtaaaagtttccttgtaattcaatatcttttgattctcatgcgcctgatagtttatctaggcaattttatcaagtgggttttgttggatctctaaagctgctttatttgtgtcttttatgcatcaaattttacttatttgtcagtttttttcttgcccaaattaccaaaccatggattttcctatcatgtttcccaagtctggtccttgctttgttattatcggagaaataaaaggagtcccatttttcacccttttgttcttgctgtatttatctgagactttttctttagtaattcttttcccttttttgcatattgaattctcctttttcactaggtgtgttcattttgttggcaaattgtcagtttccttatgctttcttgttatacaaagaataattcttcactttgtttcaatggaatgtaaaaactggtgatatttttgtaggcgataacatctcctacttctcatggtctgtttgtgataattggttatcattaacgttcattgttgaggcactgtctcatataagttctatgtggacatttatagaatgagtctaactttgaatatttttgctactttttgtgtattcagtaccttaaggtagattaa

SEQ ID NO: 80405 - DNA, 942 bp, Citrus sinensis
  Intron number 1 from transcript orange1.1g024894m (locus o range1.1g018660m.g) derived from phytozome v7.0 (chr-ID sc affold00394; pos 129358 to 130299 reverse strand)
aaactattaaagagcaaagcgtgagctattctccctctcggggttttttatttaaatatacctcatttgttcttaaatatcaaatctatacctcattacatacatatacctcttaaaaatataaaaagtcaaaaataaccttaaaaaatcatctatttacgtttatttcctctctcatgatttctacataataacacaactaaaatcgagtatactcgactttttatctgacttaattaaaaggaaaattttcatttcaatttaagtcgaatattctcaaccaattaccaaacttcaatgaaaagtcaagaatttttgctgcatgaatattgggtaaggttaaattaaaactaggtattttcgactctttactcgacttacttgaaaaaattaaaaaaatttcagataattttttattttaattaaagtcgaatattctcgactatttacccgactaacatgaaaaaattgagaatttatgctgaattactaattatgtatggtttggttgaagtcgagtattctcgaccatttatccgactttaaggagttgggtttagttttatgaggatttagttgtagttatttttatattgggttttttgaagggaatgggtacatcccacacaattctccctctcgcttcagtttttcgtttgttcgttccattgccggtccaaacggtaacccctgttacattcaacaatcgcaaacactataatttgttttcacgagctcctctatgtccatcaaattggtctttctcttcatcttactatcttcctcggtaattgcaccatcaataatcaaacttaattctttttgtttttaactaatttcaccgtttctgttaattttatttcatgggtttggtccatttggcatatttccgttccgtaacttccaattttttttcccctttaatcaatcaggttttaggaa

SEQ ID NO: 80406 - DNA, 914 bp, Citrus sinensis
  Intron number 1 from transcript orange1.1g028501m (locus o range1.1g022480m.g) derived from phytozome v7.0 (chr-ID sc affold00433; pos 1138 to 2051)
ttttacgaacaaggaatttgtctttcgagaaaaaagtaagtaaatatttttctccttcttcttcttcttcttcttcgtttctcattttattttgtgtcttgattttattcgtaatttgattgccttagaagtactttttggagaagcactttctggattcttttttaaaagtgtttctttttttttttaaactaatgagaatatcgtttatcatgagatcatcacttaacgaggattttctctattttttttatttaagcataaaaatgaaatttaaaatttatataaaaaaaaaagttgtaagaataaaagattaatgaaaatctgatagctggattactttcaggatgatgctgttctagaatatataagaatattccgtagaaaaataatttactgtgctttttttttggtggcatctttttataatttgaagaattgcatattaatactaatgaagtataagtgctgatttgttgtggtttatgtggattgtgatgtgattttgttttttggatgcttagtatttcttcaattgttaagcaggaatattttgtttgcctctgtcaacggtacgaatgctgtgagtccaacccccttggttagtcacatgttcctaccactccaatttttcattcttttttctctaatttcttgagaattaaaatatgtggtgatatataagtttgatatatggtatggcggcagcaattgtcacgattatgaaagtgatatattttgatttgtatcatataattctgttaccaacataatcgcttaaatattggtaattgacaacaaggaggataatcttgtgatgtcactgtttcccattcttctctagcttttatggtatggatggcatgatgtcatgacatggacatgattgttttaattgcagaaatcggaccaag

SEQ ID NO: 80407 - DNA, 548 bp, Citrus sinensis
  Intron number 2 from transcript orange1.1g024738m (locus o range1.1g024738m.g) derived from phytozome v7.0 (chr-ID sc affold00213; pos 140907 to 141454)
gctgtggtaaatctacccttttgaaggtacattaagtttcgttgtgcttttttcttgcttgagctttcgagggcatacttttaggcatatttggttcttgctcttgtaacatttgataattgttggattgagtttatgatcttgcttttgagctttggagtaaaacacttatggtaaaagcacttcttgtaaaagaacttttgtaaaaacacttataaagtgctttgctaaccataacttgaaataaatttcttcaagataaaaaaagtttgcttggacaagtacttgagaaatgccctaggaattatttttactgcaaaatgaaaacttatttttgatatttaaaattgttcttaatggtttaaaaatcactcccaaacatatgactaataactggtatagtgattgtgacatgtgttctatgtcatgtgtttttggtatgatcttttggtgttgtagcgtaaaattgagcaaatgaataatgatggatctgttggtttttttactttggagtgtgcaggtcttggcaggtcttttgaaaccaacaa

SEQ ID NO: 80408 - DNA, 501 bp, Citrus sinensis
  Intron number 2 from transcript orange1.1g008468m (locus o range1.1g008468m.g) derived from phytozome v7.0 (chr-ID sc affold00004; pos 1261813 to 1262313)
aggtatcaaatgtttgaggttgcggttgttttttcaaccttgtgaactggtgcatttgaatacattacgcaatgaattttatgagatggggtttcgtttctattttttaagtttaacttagtaagttatataatacaaattgaatttgtgaattttaacttagtaagttatataatacaaattgaatttgtgaatttgcttttctaaatcttatggtagaattgctgctaatgagtatgcttagttgtaactgtatttctagattattcacctatgaaacagtttactgtcttattaggtcagttatgatcctggatggaagatgtatgatgagttcttagccacttatttgcagatgggatgggtaatgtgcttttggagatatgagttgcttgagttttgaactccgtactgttcctgtgcttcctgctggggtgaaaacaaatttgcttagtgggtaacatactttgttcttgactgaattaggttttagctgttccc

SEQ ID NO: 80409 - DNA, 768 bp, Citrus sinensis
  Intron number 2 from transcript orange1.1g013648m (locus o range1.1g013648m.g) derived from phytozome v7.0 (chr-ID sc affold00051; pos 463255 to 464022 reverse strand)
gagctttgattgctgctgcgcggttttcgaggtaaagctttgaaactctcgtttggttgctgtgagagttgagggaaaaatatgacacagaacggagtcgttttgggtcttttgttaggaattgggtggcatgtttgttccggtttgagtagatcaatgtgaaacgactgagtttgtgttcgttttgattgatattgagatcttttcattctctgattatttctttgttttgatattcaatttgtgtttcaacttgttccttttgtttatacatcgctctgatttggttctatttgttttagtttttaaaatttaacttgctgcgactgatttattataagaaaattcttttttttttcccttcaaaaaaaggttatgaatgctgcgtttattacttggaaattatagagactgcaaatgaaaaaggaaaaaaaaatggtggcttgtttattaatggtgttcggggattaggtttttatttaaaatggccaattgtttcagtgattaaacatttgccatctcccatttcttttcttttttattattaaatttaactgagaaaatgtgttctgcaaatcagtttgattctcatatatgttctttgagattatatgttcttacatagctgtggagatagacaaattagataaatgttttctgcgttaatgttacactatcttgtttgctcgaatttttaatgagttttgtttttgcctaggatacgtaactatcattgcgtctgaattttcttcttgtttgcagtgtgtg

SEQ ID NO: 80410 - DNA, 705 bp, Citrus sinensis
  Intron number 1 from transcript orange1.1g002033m (locus o range1.1g002031m.g) derived from phytozome v7.0 (chr-ID sc affold00025; pos 202832 to 203536 reverse strand)
ccctctctttcatctctcttgtactcgtttcgttggtacgtgttctccattaattaatattaacgataataatactaataataaaataacatcttaaacagactattattattattattgcattattttataaatttaactcgttaataatacgtatttaaaatgatgaatgccttaacaggtagaggcattatttattcaattaattgttaattgcgtcttttcatttcttctcctcctcctttctcgatcatttcagttttcgagcgggtggattatatcctgctgggaagttctcgagctctgtttgtgtaaattttatttttttccttcaatttattcaattatctccagctgtattggcttctgggatataatcaatcaattgatttgctatctcctgagtttcgttgtgatataaaataaaaaatatagacaggtgtgtactgggtacaaacaagcatacttgaatgaatttattgaattgactttaagaagacaattgcgatcgtgggttttttttttaaccccctaaaaacaaaatgaacttattgtctctgtgatgtgaaactccagctctcaagtgaataatgtgtaaaacgaattatttaatttgctattgcagtgctagatactcatttttccatgtgtttgctttttctttcagcagaggttggtatacctagttattcttgtattcaatat

SEQ ID NO: 80411 - DNA, 783 bp, Citrus sinensis
  Intron number 1 from transcript orange1.1g037348m (locus o range1.1g037348m.g) derived from phytozome v7.0 (chr-ID sc affold00025; pos 821542 to 822324)
gagcttcggtgtcatcaagatcggtgcccccataggtaacccaaaacagaaacaatttccctttcttattgtgttatctgggaatctggctgaggaaggacagaatttagtgccttcagcgaaaaatttgcagtgtttacatattttgcttaaattatcgttgcaaagtacaatagaagtttctagtacaatagtcatttctcagttgaagtagcgttatacttgtatagactctaaacaaggtcataaggggcgttaactctagatgggcctgttttttttaaatttagcagtataacttgtttcaaaggcagttccttttagtcgttttgggttcaaactctccatactgctactgcttcttagttaacataattataacagatcagttgtaaaagtgtttttcaactatcagatcaagagttcttgaaggtagctgaagattttgttaaatgaacctttggtgaaagttggcaaatgcctttttatacccttatatttgcttgaatcaactagttatcgaaaagtttctgttcttagttgaaacggttgctgccgagtagactaatattactcacgctggaagatgttgtggtgcattcttgtgcctgtgtgacttagtccatatatctactatgaattcggaattcctaaaatgattttgataatgtaccttttaacttgagagctttggcattgcaaatctttaattgatgacctacatttttaactactccacttgatataggttagcaaaactctctgagggccaactgattgacg

SEQ ID NO: 80412 - DNA, 499 bp, Citrus sinensis
  Intron number 2 from transcript orange1.1g009003m (locus o range1.1g009003m.g) derived from phytozome v7.0 (chr-ID sc affold03717; pos 4391 to 4889 reverse strand)
aaagaaaattaagacagttgaggaatctgttgctggttagtggtttgtgtatcttagatttatttgttattgttttaagctaatatgtttttattctggcttggtgttaagagcattttgatggatttttattattgagcttgttgcagattttctgtctaattttttgtgtgtagtaaatcttcaactcagttatatatttattcctgaatgtattattgtaacatatttgtacactatgtgaatttctcaattcattggagagagagcatataatttttgaaaggttcaagtttgccagttgtagggtcaaccgctcttcttttattcctttatagttgaatgaattgtttgtcctctacttcttccacttcatcatttcagttatctcagtaagtgggtactgtatgttatttgaacttgtcaatgtgcatctgaaaatttatgtgagactaaaagatgtttcatacaaattgtgggactgtggttgtagttagca

SEQ ID NO: 80413 - DNA, 651 bp, Citrus sinensis
  Intron number 1 from transcript orange1.1g029466m (locus o range1.1g029466m.g) derived from phytozome v7.0 (chr-ID sc affold00004; pos 2933080 to 2933730 reverse strand)
aaaacttttaactccaaaaaacaaaacttaaaggtaatgcttaattattttgttattttattgctagtattatcttgttcttaggggaagaaaaaaattagtgtgaattgttgcactgttgtaattgttcttggtaagtttcagatcaaaatttgaagtttcaacggatttgttggcttctttaagtcggaatacttgaatattgaaatgggtgttgtgatttttgtagttgtgacttaaatttccaaattttataggtttattgttctcgtttatgtgatttgatggccgtttcagtgcttacatggttacacctgtaatgaaaccttacttcatttctaggaatagtggaggtttgttgtcttttttactacaatttaaaattgaattcgtaaggctaatttccgaaatcgtccatataccttgccaggcacgcagctttcctgcaaattctttatagttaagaatttgcatgtacattacctgttgttgtttatttcgcctctttgcaatgatgctaggtttggacttgcagttgtgtgtggcttaagctgattactattttactctcccggtcaaacttatgcagattggtgattgtttcagcgctttccattgagaattttgactgagaattataagtttcagaag

SEQ ID NO: 80414 - DNA, 622 bp, Citrus sinensis
  Intron number 1 from transcript orange1.1g041206m (locus o range1.1g041206m.g) derived from phytozome v7.0 (chr-ID sc affold00010; pos 639589 to 640210)
gctgtgaatatgggcattaggactgattttttttttaattttctatttatatcaaaataatttaaaaattaatataaaaataaacttatccgggtccgagtttcgaatttgtgggtttatcgaatccggatccggtcccagaaacgtccgggttgaaaatattaaatccgaataccaaatttaatttattccgatacggattgaacccggtctaaaatttccggaatcgtccggatccgggccgggtccggatttaattgccatccatggcgggaatccttatgggacgcgcggataagggagcgaatgaatcgaaaagcttttatatagatcaattaagcggtaaattagtatcttttcaattctcactcgtttcagttcactcaaattcagatatcgtatggctttgtattctccaagaaccggctgcaagcctaagctcaaacgggtgtgatttgttcattttggctcaaaggcagatgtaaaaggaatccgtgtcgctttttgcgtaataagcctgagccgccgatgattcaaccagaagaacagctccgagtccgaccaaagattccaccacccatccccagattagggtttgtaataactggatttctgattcttg

SEQ ID NO: 80415 - DNA, 1038 bp, Citrus sinensis
  Intron number 3 from transcript orange1.1g025044m (locus o range1.1g025044m.g) derived from phytozome v7.0 (chr-ID sc affold00007; pos 653054 to 654091)
aaagcctatcaggtttgtgatggtctttgataatgctttttattttgatttacattctctctttgattgatgagcttaagttttcaagcttgatcaaccaaaaatacatttaaggtcggaaaaattggttctggagtttatattggtttttgttttggcttgtgaaaggaaacatcatattaatttaaaactcctacctttttcctatgcttgaatgctgagaaagtaaaggttatatcattgtagaaacagaaaaatgacatttttcacaatactcatgttggcacataatagtttgtttggtttcaaacttaatttggattttgagtttacttaatgctatgattcctcatcataaagcaccagaatttcataacctgtaccttgagcattttattatatattctagctttcaatttcagtatatgatgtttgtcttaataatttaataagatagacagtctgtgaatcataaattgatttctgatccttcaaagatatcttcatggacatataggcatgatgtgccccatagctgctactggattatgtttgcttttaagacagagcatacccgtgtaagttttgacctcattgttcgggattgaacctgtgatccctttatgcatggtttgtgatctgtgttcttcagttgtgtgtatgtgctgaaaactgagtgcatgtttcttcatcttcttgatcttcaatttcttgatacaattaatcattctttattctttgggttcttatcatttaattataagcttactggatggttgtgaagccgagagtgttcagagatagtttaatactctgaagtgccatgatggcacaaccagtcttaattatatgccagcatgactgggagttttatcactggttttcaggacatatagctcaattctcccacaaaacttgtggttgttttggtcaagttgtcatttgcttgtccaataatggttttttgtcaattctgctcacctatagtactatttgtttgcaggcagcttctactaccgcagaagctgaattgtctcc

SEQ ID NO: 80416 - DNA, 657 bp, Citrus sinensis
  Intron number 1 from transcript orange1.1g009929m (locus o range1.1g009938m.g) derived from phytozome v7.0 (chr-ID sc affold00010; pos 748229 to 748885)
tcttcagttgtagtagctgaagaataacgacaaaggtttttttttttttttttttttaatccaaaggtactggataagataattcaatgagaagtagaagaagaagaagaagaagaaaacgagggaaagaaacaaaattttcgattaatttttataggctaactctaaacaactttttttttctccccaaaaaaaatcttcttttgtttaaatttttgctttgtaaaaaatttctccttttgcttatacaaacaattaaaagtttcgatcttttttaatttctctttgcttcacataactgccgatattgtaatgtttttcaaaatttttctttgatgtcttttttagctcaataaatcagttctgatctgggaaagtttgtattttttttcacaatgaactataaattaataagagcaaaggtcaaatattgataataataatttatacttctttgtactaccaaactacaagctgtgctacaagtttagttttaaaatgatagctaatagtacagttaattagacattgattgtgaaagttaaatggataagagagtgaaaaaaagaagaagaagaatttcgtctgatttattgttgtgtttttttttcctccttaacaggaatcgactccgtgaagctttaatcttcttcaacg

SEQ ID NO: 80417 - DNA, 739 bp, Citrus sinensis
  Intron number 2 from transcript orange1.1g009929m (locus o range1.1g009938m.g) derived from phytozome v7.0 (chr-ID sc affold00010; pos 749017 to 749755)
ttgccttctttgccaatctgcgagcttgacacctggtacaacattatccaccattttgttcagagtaagctaagcagctagccctaagatgaaattaattatttaataatatttattccttgttggtaaattagaaacactcgtttttactgacgattttgttttttggttttgtcatttattagcttcttaatagctagctgtgtgttattgtctacttgctaaattttttttttagggtaccagaagaagagagctttaaattcccaaaaaaaaaaaaaaagaaaacaaaatggtcggctcagatcggcgagtagtatgcaaattactgctgcttatttagcttaaccaggtcaaaagttttatgtatagccttagcctgttatatatatatatattttttttcttttaaacaacttttgttaaagcctatcgtctttaacaactttcgttaggtttaagtgcaatgctcaagagtgcagagactaaagaagattaaagcttctgtcttagctatgaccgtatgtgtatccataatagcaataacaagagtcaaactcagatctcagctagcaacatcagatgcttttgctattatgtctagttttttactttctctctcatttatttaatttttttttttatatttgaaatttttttttcttttcgagtaattactttggcgggttgttttgtttatgcagcagaagcgcaggcagagaggctgcaggatttcagg

SEQ ID NO: 80418 - DNA, 540 bp, Citrus sinensis
  Intron number 1 from transcript orange1.1g011959m (locus o range1.1g011856m.g) derived from phytozome v7.0 (chr-ID sc affold00035; pos 497271 to 497810)
tcgccaaggtcttagattttctttcacttagtatttttagatttgatgtagttttaatttcattgtaattgggttctgacttgctgattctaacattttattattgatgtgtgatgaattgttacaggagagaattaagtttgtgatgttgttattcgattgatttgaagatatgggttcacttgaagttcaaatcagtttcatgtttttactaaataatcaagctgggaaatttgaaaattttgggttgctaccatcaaaagttctctttgccttgagatttaaaatgttgctaatgcaagaaatctgtttatggtgctcatttgtgtaacaaaattgaaccgcgtggcttgattttgaaaattttctttgaacatatgggaagtggatggtcaggcttgattttgcaggcccatcagtggtgtgattcattttttttttttcactattagaataccttagttctttcatattcttaatgttcaagaagttgttttgtattctgatgatgaactcatttaacacttttggtaggaattg

SEQ ID NO: 80419 - DNA, 837 bp, Citrus sinensis
  Intron number 2 from transcript orange1.1g039884m (locus o range1.1g039884m.g) derived from phytozome v7.0 (chr-ID sc affold00004; pos 626391 to 627227 reverse strand)
tttaataattttttctctgttgtgaggtcaattcttctctctctttacttctagtagaaaacttgctgtcttattaaacaactattttcatgctcgttatatcaatcaacaattggttaccacctttctttaacttgatatctttcatgaagtatactgcaaagctatatgtgtgcttacttgactgtattctagtaaaacagatgatgcctttgcaatcaaattgaaatattttagataaacctattaaatattagaatgatgggcttcttgcccctcacctactccatcaaacaagggtaaattgttttatttatttttggacaaagtgaataacttttattggattgaatagtaatattcttaaaaatatgacattttggcttcacttggctatgcgttcttgagttacctaaagttggttgatttcacccacttttatgtcatcagagataaacctgctacatgtaaattcttacagaaatccatttccctacaatttgatgcctacaacttgcttagcaactcctgatttttcagtaagataattgtctctgatgattgctgagagccttcactggaattgttaaaatattccagcttgaagcttttgttggaataatcatttgttattcacttagtttagtctcttgagtttagcgttggtgttcttttaacattggtcttttctctctctcttttttctttcaatgcaattcgtgtaatttgttttcaaataactttattagtttcatttgttatatgtcctattgataatgatagtgactgccttgcatttcaggctctgcagtgaacctcatttatcaagtttgacta

SEQ ID NO: 80420 - DNA, 1034 bp, Citrus sinensis
  Intron number 1 from transcript orange1.1g021432m (locus o range1.1g021432m.g) derived from phytozome v7.0 (chr-ID sc affold00243; pos 131117 to 132150)
aatcaaacggcatttctcacatcaccaatcctctggtatttatttatttattcaaccacctttcttacgtcatgttctttgtatgccatcggacgtgccattggatcttacgttttcgccaaagcattcgagctgtttgataaaatgccaaagttgataatgcgtttgctgttaatgctttacattttacgcaacagtttggttgccggggacgatgcatgaatgagagactatgagaataaacattttgagaacttttttagcatatgaattcgaaaatgtcgttcactaaaagcaaaattttatgcgtagacattttgatttgcactaatctttctgccggttcactggaaaaaaaaaaatagtacttgagattttcctttaatagggcgtcaaagaaatcgcaatttggttccatcttcaattttggtagagttaatactaaggctccctttggttatttgatgtccagcacggttctaaaatgttgcttgcaacttagtttggaagttaaagatgatttttaccgcaccatcttacctaattttttgtcaaaattattattaaaaattcaaaactactatttccttttatttcatagttagagcttccattttgcagcggcaccgcaactctgcagcaccaaatgcagccttgagataaaataagctttctgaagtcagaaaattaccctttttgacatgcccttagcttagagcacctttacatttccattattatctgtatcctgacagcttcccaatcaattattggaacttcctcatgtatgtactgttcattgtatatgactttattagcaataactatgaaatgttttctgttgtaaggtaatatttttgaaactgcaattgaaatctttttgtgatagccttgtattggtcaaggcatacagttctgttctaatgaacaaatccatctcccttcatcctactgtatgattaaaactgttgatttgtttctctgactccgttttccttggagatggcacagattttgcagcatctggagaatag

SEQ ID NO: 80421 - DNA, 791 bp, Citrus sinensis
  Intron number 1 from transcript orange1.1g027364m (locus o range1.1g027364m.g) derived from phytozome v7.0 (chr-ID sc affold00007; pos 1631507 to 1632297 reverse strand)
ctcttattaactctgagattcataccttggagaaggttggttttccatttttgattttttttgcttttcttttctttctttctttctttctttcttgctctctcttcccccccccccccccccaaaaaaaatgtaaatggatactgtttttcatttctgcttttggagtatgaatttcctaacgagacgtgtgtgtgtgtgatgttttcacttgtcgccctgtttggcatgtttcattgaatagaaagaaaaaaggaaattctattaaaatgatttatgattaattgtagcagaatattaaatgaatcatttaacattgtttgttatcattttgtgtctggtacgcatcatgttttaggatttatgaattaatatgatggaaatccttacttgtagcttttggataccataccaccattgttcgtttaatgatttactgattaaaggaaaaggctgaggctgaggctgtggcaaaatgaagctctggtgctaccccagtctgatgacacttgtgatccggattttaaaagactggcggtgctgataaatgaaaattttgaatcgtgttgaagcagttggtttcatgattgagaataactttctcagtagtatggtagactgttgacttgttgacttttatattttgtgtgtaaacgtgtcatgctatcaaaacctaggctgattgattttgtaaatatacctttggttgcttctgtattgcctttaataaaatattctttgacttcaattctgcagttgtcaaaagaggaaggtccagctccagttccaac

SEQ ID NO: 80422 - DNA, 627 bp, Citrus sinensis; identical to SEQ ID NO: 79919
  Intron number 3 from transcript orange1.1g017102m (locus o range1.1g017102m.g) derived from phytozome v7.0 (chr-ID sc affold00314; pos 26184 to 26810 reverse strand)

SEQ ID NO: 80423 - DNA, 990 bp, Citrus sinensis
  Intron number 1 from transcript orange1.1g030150m (locus o range1.1g030150m.g) derived from phytozome v7.0 (chr-ID sc affold00060; pos 206932 to 207921)
ataagttgagtgaaatcattgtaagtcatcggaactattccatcaatctcttaaagacttgattacatctagtgcttgtttaaattttctggatgcttggttatatggtttatgcatgttgtgcaaccaggtgtttgtatgtttacaagaacagatatgtccacactcctacatacacgcattacgtagttcttgtgttacaaaggattgcaggaggtttcatttttgtaataaattattgggatgagaatcttttaatttggagatgttgcacaatctgcactgctgttcagtaacttgcatacaaattggccattgatgttcttttccccaatgtttctatagatgcttaaattctactttgaatgtaaaattatacttaaaatttgcggacttaagttgtttcagaagcaatgatgtcagtcaatccaaacagcatggtgcctgtggtagtttttgaggcatggtgattacacatctcaggcttatgaaatgatttgcaaggattcagtatcctaaatactgtcattttatgtttgttaggggtccaaaatagtcatttacaattagaaactatagtcttgtgggttttcggttgagatatatattgtccttccaactcaaactatttgatgatatgttatgatattgcattggattttcaatccccttattggtttagaaagtgaaacaacatggatttattggttaataggatgggatttgtaaagtagcttttatgaaatctgatgtaggactgcttagaaccagttagtggtacaaccttttcaagttaattggcacaaatggccccataccctgtaaataggtggttcggggaatatctcatttctgggagcagatcataggttttgcttctgatatctaatatacgtggtaatttaaattatcaacgagtaaccttttgattatttaaattttgtacataattttatgtcttttcttgagacaggagctcctgctacttgg

SEQ ID NO: 80424 - DNA, 521 bp, Citrus sinensis
  Intron number 2 from transcript orange1.1g033384m (locus o range1.1g033384m.g) derived from phytozome v7.0 (chr-ID sc affold00016; pos 1538692 to 1539212 reverse strand)
aagctatcgttgccaaatacccagatcgagttccggtatgtttgtttacactgtttatttcttctgtttataattaatgatgcaccaaccgtacgtacgtaattgaaaatggaaaccgggccctcaatcctgaatgcttgcccataggctgctccaataccgagcattcacttttcttgcaggaatatcttttctaaaagtatttttcgataacatactatgagttttggattgtttcccattttataattttttatgttttagatataattccacaatttcagtgccttttcaacacctaaagttttaaatagaatgaggtaggcttgcaatttactctatgcacctcgagggagatttttatgctttgaacaagaaaataatgccgccgtctataattggctaactgattctcttctcgacactttgatgattgtttgttgcatcttattgggattctttcttattgtttttgattttctacaggtgattattgaaaaatattcaagaacagacctgcc

SEQ ID NO: 80425 - DNA, 326 bp, Citrus sinensis
  Intron number 1 from transcript orange1.1g005560m (locus o range1.1g005549m.g) derived from phytozome v7.0 (chr-ID sc affold00007; pos 2471462 to 2471787 reverse strand)
agcccttccatctctttcactggtaagtagttttttcctttatctgctggttatttcatataatctggatcttgcaaaccttcatcttattaaagcttaagccctttctttgttctttttatttttattttttctctctttgtttttattttactgtaattttcaacacaaaactcaattaaatttgatccctagttgcatatataactcttagctctaatggatatgcataaagttaattatttgatagaacaaataaacccttttcaatgtattcttcttaatttaatttaatttaatttttggttttcaagggtttatagtgc

SEQ ID NO: 80426 - DNA, 632 bp, Citrus sinensis
  Intron number 2 from transcript orange1.1g046846m (locus o range1.1g046846m.g) derived from phytozome v7.0 (chr-ID sc affold12375; pos 745 to 1376 reverse strand)
gcacctgggctaaagacaagcttgcgccgtacaaggtattgctgcttgaccatctctcaatttgttttctttttctcttcccctttaactggatagctgtggataaactaaaattcgttgatggcatgttttcgtcatttgttttaaagtgcatccatattgatgtgaaggatgaaacacagactttttccgctctttaagatttcataacgttagtacacccctcatttatcattccctctaaagccttagaggagattcataccaggttgcagattttattagctgcttctgctgcctcagcgagccaaaaacagccagaaatacttgtctttttttcccttcctttcgctattccagcttatagtaccaagtaggcatccaaataagtttctgtttctctcctttgatctagctctcatgtcccatatccatatcctattttagccttttcatctttcttcgagtagtttcgtggttgagaatccaattcagttcgaatttgccatgcatgtaatgtttattttcattaattcgttgaatgttcaaatggattcaggcattcattttgatactgctatgcttatttcttttcagctgccaacccgtctgttcttgtgggactctctgcc

SEQ ID NO: 80427 - DNA, 759 bp, Citrus sinensis
  Intron number 1 from transcript orange1.1g016064m (locus o range1.1g016064m.g) derived from phytozome v7.0 (chr-ID sc affold00136; pos 348435 to 349193)
aaattgagctcaaaaaagcctccgattcgcttaaagtaagttctatcattaggattttaggaaacgatttatttgtgaatttgatgagaatgctatttagcttgaatttgacgtttagactagatgaaacattaaacacttgattcaggcttgaactttggctaagattttgtttatccgctcattgttggtatttcatagattggtggactcaaagaatactgttaactctcaacgatgaagaatggatgcctaatggttgatgtcagttattccttttgttttgtgcaatgcaatgcaagctcgatggagttcagtcattacttttattttattttttaattttgcgcaaggcaagcttgatggagtttggatgtaaggaagggagaattctttgtggggccagtttatgagtagttagcgccctatttcttttagttccttttctgataaaatgttaagaggtaatgaggcaacagatattgaaccttctgtattccccttcacaaagataggattaatctcccaaaaagtcagtgtgtgtatatggtatatttgcataaactcttttggtagagttaagttctggcctaatcattggagtagaaaaataagcaattgaaagcagtaaggctgctactttaaaatttgttgaagaagcaatttctgttttatgtttctctttcttccagtcaaaatgactatccctttgcgtgtttcccagtcttgggacacgacatctatttcgctgacagcagg

SEQ ID NO: 80428 - DNA, 970 bp, Citrus sinensis
  Intron number 3 from transcript orange1.1g029105m (locus o range1.1g029105m.g) derived from phytozome v7.0 (chr-ID sc affold00004; pos 2864 to 3833)
ggcagaggtatgtcgaccttaaactcattgaatttgattgttatctgtgcagttcttatatcaaatttaatatctatgttgtcttaaaataataaataaataaagaaagaaagaacaaggtttccttaaaaataaacctgaaccttcttattgaagtttttcattggcaatttgctttttgttttttatttctctaaggactttattttctatcatgattttgcaaaattgaactgatagtgcagtgtaaataattttcatttttaagatttcctacaaagacttatgaagttaatggaaaatgctaactgtcatgctattttaagaactaattgttatacttgtaattagtgtttttttttttaaaagcgctacattttttttttggattactcctcaatctccttgtcaattggaattgctttttatggtctattttcccgtatattcttggcatctaagaaaagatgttcaaaaccttgtgttagttcgcaatattagagttgcattacaatgtagatctttataaattccaactttcaaacttacttaattttagcctttttggatggtatgttgggccttaatttgcaactagttccttcagttttcatggtaagttgtaacaccccattgaaacaaagcttttggaggcatatgattgtctacctacttaaagtttatgtttttgtttaactgggaggaattgattgaattataagactgccaaagctgtcaatgaactttatgcttgccatactttagctattggactgtgaatatgaactacatccaaagtcctaggtactgttgtgttggatgatcattcagctatatgctttatcctttcctttttaatgtgaactgcatcaaacttttcctgggatctgtattgaatttcaagatgttgtttactttgttcagttccaactatctgctctgtttcttataatagttcttttgttcaggc

SEQ ID NO: 80429 - DNA, 844 bp, Citrus sinensis; identical to SEQ ID NO: 79716
  Intron number 2 from transcript orange1.1g033875m (locus o range1.1g032874m.g) derived from phytozome v7.0 (chr-ID sc affold00007; pos 114383 to 115226 reverse strand)

SEQ ID NO: 80430 - DNA, 739 bp, Citrus sinensis
  Intron number 5 from transcript orange1.1g039233m (locus o range1.1g039233m.g) derived from phytozome v7.0 (chr-ID sc affold00025; pos 43797 to 44535 reverse strand)
cagttgttactcttcatgtgtgttgcaaactgtgtaattatgcttcagtagccaacataatgtgtcccaaaagtggcagagggcatttgcatattggaatattggtgcacaaaaattggattatgtttaattatttgttgcctagttaatcttagattccagaagccctttccttattgataagataccacgtgggtctctgacttcctaataaaatcaattttttcatttaagtgcacaaaatcttagaatgatcttaattcataattatttatcataggtcaattgacaataatattctacagttcctcatgcctactttgcattaacattcttgatagcgaagatcatatgttttgctagtaatcaaaagatacttttcctccctgtcctttttatccgcaataaacctttgtttggattccatgttttaacttattcattgaggcttaattcaccttgacttcctgccgtcattcctgagaatgaccaatctctctctttctttctatttgtgtgacatggatgtacatttgtctgtaatattgaactggcaatgaattcacggccaaaagaatattgcaaaattttgaactgcttttttgagggtgtttcttttttagttccccaattaaaagtataccctaccattctttttcatttttccttgtatttaagaggtaacaaagtgctttttggggcagagtttggttagattggagggttgggagaaaacggt

SEQ ID NO: 80431 - DNA, 390 bp, Citrus sinensis
  Intron number 3 from transcript orange1.1g021931m (locus o range1.1g021931m.g) derived from phytozome v7.0 (chr-ID sc affold00016; pos 1214920 to 1215309 reverse strand)
tggaacgaagtaagtgcccttttctttctttggtcttctccgatttttgggttacttataagtcaccaaagaagattaccggttaaacataaaagaatatgtgtgcagcatagtcttgaaagtttgtgagagtttgcttaactttagagaaatggttatggtggaacccatgtgttatcaccatttctcagtaactttgattaatgaggttcttattgttgaatctttttaattcgttgagatgctattttgtttgtttaacttcatttggtcgaagaagtgttgtctcatcatttttttcagagcacatgagctgggagaatgctttttaattacctcctgaatttatttaattaagcttattgtttcatctatttacagggcgccatt

SEQ ID NO: 80432 - DNA, 348 bp, Citrus sinensis
  Intron number 1 from transcript orange1.1g019696m (locus o range1.1g019696m.g) derived from phytozome v7.0 (chr-ID sc affold00027; pos 1080296 to 1080643 reverse strand)
caggagtctacaagtgagtgccgtaacaatttggctatgtcatgttgttatggggtcatgtgattaattttacttggactgtagagcttgtccagactcacatgctagcatgtttttttcttgttaagagtggttgatgaaaatgtgattctagtttttgttttttattgtgtctttttcttcctgatcaaaattctcttgaagtactctagttgatgaactgtcgttttgtttcttcttgataccaaactttgaattgtattttctggaaattgaatcattaatacctctttttttttttgtgtctgtccagagagaaggttaacataccaccattcaaatcattca

SEQ ID NO: 80433 - DNA, 971 bp, Citrus sinensis
  Intron number 1 from transcript orange1.1g042246m (locus o range1.1g042246m.g) derived from phytozome v7.0 (chr-ID sc affold00047; pos 153626 to 154596 reverse strand)
tttttcaggctccgagaaggcgcaatcgaaaacaggtgacttatttacttacttttatttatttatttatttttgttaacaaaatttgaaatttctatttttctctctattgatgttgttgttaacgtcaagcatttacttcggcgatcatgttgaatttaatttttttttgttgggtttcttgttgggcacttgaagttgaacaatgttagttttttttttttttgtttctttttggtccaatcttgtaggattgtcaggggcactatgtttactgtttatagtgctatgtgttttgagacgattctgatgacaccaaataagtgtaaattttacggtagtgatttaggaagagcaaataaagtaaatgttatttgggtttgcttgggattgaggtcttgttaatccaagaatttgcatactatagaatcattacctgtcaagtatgagtgggtgggtagatgttaagtagaagtgatggtctaccaaataatttaggtggtttgctttcttagtgaaggagaagcctaacaattaaaaatataccagctatcggtttgcacttgatataaggggaaatgtcataaaaatgaataaaacaaaaattaatcaaaaagaaattgttctctttgagcatagcaccgtccatctgagaatgtacaatttctttgttttaatgagaaaaactagatttgttctgtggtttaacctgggccttcaaaaggccttttcattacagttgaaaatgagtgtggttctggctgacattgcttaaggatagctgcccaactttaacatttactgaaaaatttgcaggacagaaattagggattttgctctatcttcctttcccagaccctgtataatgtgtttaacccactgcaagtttgttagttgttcccttgttttgtaatgtgattatgtcaattttatagaatccattctcctgtaggtaattgatcttgagaaag

SEQ ID NO: 80434 - DNA, 925 bp, Citrus sinensis
  Intron number 2 from transcript orange1.1g023730m (locus o range1.1g023730m.g) derived from phytozome v7.0 (chr-ID sc affold01275; pos 14481 to 15405 reverse strand)
ttcggtgttgtcactctgctgtctgagaaaacgaggttggttactttccccttttcatgttttagtttatttagttgaggagacaaagaagctatttttgatctatttttagcaccagcttaatgattactctgggtaataactgaggtgggatcaggacaattgctgtatttatttccgcttgtaaatggcgtctgtttatattttgtttgggaaagcatgtaggaagaagtccccatttcataggtgggaagacatagaacaatcgtataagtttgtgaacttctcctcatttaggacttaagaaagcttaaaacttcattaatgtttatttttttttaatcaattataatagctatttcataggaatgggctaatctgcacatttttagttaaaatctgaaggggtagctagaatttcctgactttaatgatagattggtgacagaatttgtatttacctgagcttaggaagtcactcctttgtttgaattgactatgaagttttcttgaggctctgttaatctgactttggaaagagtctgcttgggctctaaaactcatctgatgcaggagtcctctggtaccttaaacttgttatctggcttacaattgccaaaatattaatgggatttctttgaatgtgagaatggaggtacaaagacttggggcatcataagttgtagaatgtgaaatagaaaatgttaacctggaaagaattccaaatgaagcctacttgagaattcatacgattctgctgataatttattaattcttccgaatatttcaaactatttgagtatgagagtgaaggctccatgtttcatttgtcacagctaattgtttttttccccttatttttcctctgaattcttttttttttcccctagatttcttccattgcctgaagaatccctttgcttca

SEQ ID NO: 80435 - DNA, 500 bp, Citrus sinensis
  Intron number 1 from transcript orange1.1g023730m (locus o range1.1g023730m.g) derived from phytozome v7.0 (chr-ID sc affold01275; pos 15739 to 16238 reverse strand)
ccaaatcatcactgttcaatcaagattcttgtattgtaagtacactggatcatcaccttctattattattattacctttcattatatttcctctttatatcctcatcatcacttgctttttaaaaagattttttttctttttctttttttttctcgcgttgcagacccttttgtacaggtttaatgggttctttctatgatcatattagttttaatttttctctctttcccttatccttggtctgttttgatgactttcaagatttgaccatgtgggtatgtttatttcttgagagagagagaaaaaaaaaaagaattgtaatttacagtctcttgttgcatagatatagcacagtcaatagttgtggaatctcgtgaattttcttctatttgaatctgccaagaaagtccaaagtttatttaaagaaattacttttcacaaaatctgctttctctttgaaacagaaacaaagggattgattcaggaaacaagcatagtt

SEQ ID NO: 80436 - DNA, 746 bp, Citrus sinensis
  Intron number 1 from transcript orange1.1g009042m (locus o range1.1g009039m.g) derived from phytozome v7.0 (chr-ID sc affold00004; pos 3770902 to 3771647)
ctcaattagggatttttgtgttgaaacaatcgaaggtaaagttccttcttttggactccgtgtatttcttgggtgatttggtgggatattaattcgattattgctggtttatttgatgctactatatgtgtttgcttcaattttaaccattaaccttagtagctatggctgatgatctttcgttttgacttttgagatttttctgttgtttctaatttacatggatattctgttctgtgtttccttatagcttgtattcaaggtattttgcatctgctatgttttgattctctgttatattggtgaatgattcaatgaagaattatattcaatctttataactttaataaaaataatcccatgttcttctatggttattgttattgttcaattttgtttacttaatttgattttgttcatatcacagggctcatacgttgatttagctatcttaagtttctatatctcttatttttatgaaaaggctaatcttaactgtaccaatttgctgctaaaatactgccagaagcaagtatggagataatgtttttgccaatgcacaagtttttctttgtatatccaaacattgtatatacttgtgcacctttatttgagaaatatttggattagggaagaggtatattggcaataagcatgctgtttatgtgcatctattgactcacatggccttcttgtttggataatgaacagcagcacttggcttgtgctttgacaagtttgataat

SEQ ID NO: 80437 - DNA, 1048 bp, Citrus sinensis
  Intron number 1 from transcript orange1.1g047775m (locus o range1.1g047775m.g) derived from phytozome v7.0 (chr-ID sc affold00051; pos 646056 to 647103)
ttattatttgggtcacctctgctgaagttactcaggtttgtctttaatcttatttttttcattcttttggtggaatttaaataatttgaattatttgcaactgaattgaatttataatacccaattgttgaatttagcattgccttatacatatatatatacacacacacaaacacatacaaagaaatggaaaacctgtatgtgggttgctataaggaatgaggctgtattcaacattgacttaggaaaaagctatatcatcccagaagattagcttttcaattacaagaagaaactagttttaatggccaatgaaatcaggttttaacttttggcgatgtatcttgactggatatgtttgggattgaggtgtccatgactgctgtgtatggaatcattgacttccaagtataagtgggcaggtgagtggtccgtaaatattagctactgagtgaaagtgggtgtttgctttcagaagtgcaacaattaaaagcataccctaagtcggatgcacactcttctttctgtgctaacatctttttgtggttgacatgcttctgccctgaacttacactggaaagtgcccgagtgagtagggttatgatgaaaaatgattaaatttaagtaaaattagatgtttcctgattgcaaagttgagtcatgtggcatacagttttggcaatccaatcttcctagccattgattactgccagccatgtcatatgctgctgcagaagcagtgtgtctgaaaggcttttactagactgcatcaaaagtgtcatgtgatttgggtttcttgttgtgattctatggaaggtctgttgtaagattgtgttccttctaccatccatttacccatatggatatacctagatatttatttgcagattattaaaaagtaaatctttttcttgttttctttattctcactcaaacagctgcctgttgcatgataatgcagtgcatacctgtattcttaaccttaggtaaactaactgatatatgttcaacaggatattttttcagactataagcagccatttgcagt

SEQ ID NO: 80438 - DNA, 642 bp, Citrus sinensis; identical to SEQ ID NO: 79856
  Intron number 2 from transcript orange1.1g017105m (locus o range1.1g009998m.g) derived from phytozome v7.0 (chr-ID sc affold00047; pos 246254 to 246895)

SEQ ID NO: 80439 - DNA, 670 bp, Citrus sinensis
  Intron number 1 from transcript orange1.1g040472m (locus o range1.1g040472m.g) derived from phytozome v7.0 (chr-ID sc affold00213; pos 128175 to 128844)
attggcagtgatcagggtcaatttggtggctctaggttagttatttgttctgaatgattcatttcatactttgatccttttattttattttattttattttttggttcgttgttgtttggtaagtaaaaatcgtgcatttattttgattcatttgcttttctctcttttttgcgctttgtaattttgtgatgtcagagactcagagttgggttggtttaccacaagaagatttcttttaaaatttgtccaaatgtcaaaacccgaaagacacggcatgaatttactgtcagttctgatctattctgtcagcccagcccgcattttcagaggcttttctgtcagaatttgttgtcttgggagttgggtttattaattatttcccaaatcagatgatcaatacacaaatatggtggtgtatactgtttgctcactcgtacttgttcaatttaccaatattttacctataaattaattcacagaagtttcccttttgaatatatatatatattgagttttgtagatggatggtggatataattctaaatcaatatacttcactaggcatttgaataattgtttaaggcaattgtgtattaagaagaactgcaagaattgtgtaagctatgcttctaaaagtggaggtacttgtttgtttgtaatgtaggtcat

SEQ ID NO: 80440 - DNA, 401 bp, Citrus sinensis
  Intron number 1 from transcript orange1.1g009117m (locus o range1.1g009117m.g) derived from phytozome v7.0 (chr-ID sc affold00433; pos 23617 to 24017)
cagtggtaagcttgatatgtaaaaatattatgtgcatggaattacttgttctctttctcaatcatgtcaaaagatttgtaattagttctcttattattgttttatatttcttttttagattctggtctgaaaatgcagtaacgtttccaaggtttactgctatttttatagtttatctttgtttcttatcaaaaaaggaaaggaaaaactagaagagggaaaaaaatgcagttaaagttaatttagctagatatctgcatgtaaattgagtggcataatattagaaaattcaaacaaaaggtctcttttaatctatccgtacacaaataactggtcgtttttttaaaacatattttaatttcccatcatttatggttgctatttacagcctgatctagcag

SEQ ID NO: 80441 - DNA, 710 bp, Citrus sinensis
  Intron number 2 from transcript orange1.1g009926m (locus o range1.1g009938m.g) derived from phytozome v7.0 (chr-ID sc affold00010; pos 749046 to 749755)
cacctggtacaacattatccaccattttgttcagagtaagctaagcagctagccctaagatgaaattaattatttaataatatttattccttgttggtaaattagaaacactcgtttttactgacgattttgttttttggttttgtcatttattagcttcttaatagctagctgtgtgttattgtctacttgctaaattttttttttagggtaccagaagaagagagctttaaattcccaaaaaaaaaaaaaaagaaaacaaaatggtcggctcagatcggcgagtagtatgcaaattactgctgcttatttagcttaaccaggtcaaaagttttatgtatagccttagcctgttatatatatatatattttttttcttttaaacaacttttgttaaagcctatcgtctttaacaactttcgttaggtttaagtgcaatgctcaagagtgcagagactaaagaagattaaagcttctgtcttagctatgaccgtatgtgtatccataatagcaataacaagagtcaaactcagatctcagctagcaacatcagatgcttttgctattatgtctagttttttactttctctctcatttatttaatttttttttttatatttgaaatttttttttcttttcgagtaattactttggcgggttgttttgtttatgcagcagaagcgcaggcagagaggctgcaggatttcagg

SEQ ID NO: 80442 - DNA, 816 bp, Citrus sinensis; identical to SEQ ID NO: 79785
  Intron number 2 from transcript orange1.1g026846m (locus o range1.1g026846m.g) derived from phytozome v7.0 (chr-ID sc affold05291; pos 2078 to 2893 reverse strand)

SEQ ID NO: 80443 - DNA, 308 bp, Citrus sinensis
  Intron number 1 from transcript orange1.1g028201m (locus o range1.1g028201m.g) derived from phytozome v7.0 (chr-ID sc affold00060; pos 410769 to 411076 reverse strand)
aacatcttttccaaaaagccaaaccctaaaggttcgttccgtacacgccctctctcttctaaaattctcatttttcgaacgattttctttatgttgtcgatcaattatgttagttatggcttgtgatttcattagtatcatgcaaatttaatcattttttacatgttttcgtagttttactttccaattgacctagcgttgacttttctatagcttgcgaatcgtgatcagggcggcccttattttgtttttaataatttgattcttttgttttgattgcagaggctcttcgagagagcaagagagaa

SEQ ID NO: 80444 - DNA, 404 bp, Citrus sinensis
  Intron number 1 from transcript orange1.1g012747m (locus o range1.1g012747m.g) derived from phytozome v7.0 (chr-ID sc affold00007; pos 1592321 to 1592724 reverse strand)
ccgctcttcttgctcatcttcagtcctcttctcaggttttaatttttctctcatctcattctctgtgaaattgtgagctcagattatcagctttggtgacttaattgtaagtttctcatagttgttttttgtgctaatgctgagtgggcactatcagtctgaccattgatactacgattctaagatgaatttttttttcccctgttgtaatcagtttctgtttttgtttctgattatgaatttgaatgaatgttaatgtgttcttctgtgatgggttagtttgttattccgaacaagattattgcgtttctttttcctcattttttctttcttgataatgaattgtttggtaatttggtttctcttcagattataaggtggtattcaaggaaatccaagactta

SEQ ID NO: 80445 - DNA, 1045 bp, Citrus sinensis
  Intron number 1 from transcript orange1.1g044861m (locus o range1.1g044861m.g) derived from phytozome v7.0 (chr-ID sc affold00060; pos 155701 to 156745)
ctttgctcgaaactctgagaattgcccagaaggacgtctagttacgtctctgacgcgtgtacggtcagaacgccaaataccacatgcaaaagaaaaactggtgcaactgcgacacgtgtacggtcagaaggccaaaaataccacacatgcaaaagaaaaacgggtgcagctcataactcatccctcaaccgttggtaacttcccatcatccgtaccacgaaatgttctagaagagaaaatgtacttttgttatgcatgccacgtcaccacacgccatgcactcatgcagcagcagattggagtcaacgtacgatttttcagaagttgaaagtagttgcatccgacagagcatatgctctgcctctttacatcgctgtttaaacaattagcacaccattggtgtgcgaagagggagaacaatcatagaagcctacctctgagcttgccagctaatacaaacatgtgatgaactcacatcacaacacaacaactagatatgtttttaatcctcaatttgatcaaacatctctccaccactcaaatacaaatctattttttcctttttgtaaaatcaaaacataatcatagcctagactcagcatttttcatcttcattaaattattaaacacattcctctctcttttctcctttcgtatataaaaggaaagggggttgagaaacaagttcagtttctgattatatttaattttgcagctgcctgctagctaagctagctgctcctttactctgccattcaaggtctactatttttgcatctcaaacttgaggaggtgggtgtgtgtgtgtgtagaagtcaattttggttttgcttaaaatgaaacatctttgtctaattatgtaataatatcttatattttgagttacataattataggatatatcatcaattttcttgttcagggatttctattaccaccacaagaagccataatcaagaaagcaaagagatgttgctaagaagctcctcgacaccagttctaggttctctcctttctccaatccaagagggtcccagcagcaacc

SEQ ID NO: 80446 - DNA, 676 bp, Citrus sinensis
  Intron number 1 from transcript orange1.1g013204m (locus o range1.1g010250m.g) derived from phytozome v7.0 (chr-ID sc affold00036; pos 814276 to 814951 reverse strand)
ccagcaagctccttcaatcatccctcaaatcccaggtttcactttcatcgcgaaaattgaattttatcagttaccaccatgtctttttttttttttaatgaatattatgctattttacatcttttgatcttcactaggagctacttgtttgcaaaactataaacaaatcctatcacccatttggcctatttttcagttttagactgcttttctgtctctgaggacttcatattcttgctttatatagatcaatatatgtactgggaacttttcaaattcagattttttttttctttttgggttactaatgttgttttgttactatattttgtttcttaatttactaatagggttgatcagttttctcttttttttttctcccttaatcttttgtcattctaaaaggttcacttttcccatgtcattctaaaagtgaagagaagcttcaccttttgtcataaatattataaatatcattcacgaagatgaatctgtgcatatataacatataaaacttattggagcagtacaaaatattcactattaattttttaatcgtaatagattttttttcctttttcctttggtttacagattggttcatttacaaagcatttttctgcttccaaaagtttgtcggagaacttgtatcaaatccctttgcttgccaggttct

SEQ ID NO: 80447 - DNA, 379 bp, Citrus sinensis
  Intron number 1 from transcript orange1.1g001270m (locus o range1.1g001270m.g) derived from phytozome v7.0 (chr-ID sc affold00349; pos 27150 to 27528)
atcggcaacagagccagtttctgtgtgaagaacccgtaagttaattctctttagatttagccatttagtttctgtttggttgctgagagagcagggaaaagaaagacaataattggatgtttctttctttctgctcttgtttctgggtatgaaaacgtctaacacatttttgttaaagtagttgcatttagcttggttgtcatcaggcaaatgaatttgactcagctgcatggtgtccatttagccctttttttttaaaaaaaaaaattattagtaatgtaaattcgagtgtgtaacgttttggcctttctcgagctttggttatgcagattgtcatttgaatttgcattgatttcaagcttatttcattgtttcaggg

SEQ ID NO: 80448 - DNA, 703 bp, Citrus sinensis
  Intron number 3 from transcript orange1.1g007862m (locus o range1.1g007862m.g) derived from phytozome v7.0 (chr-ID sc affold01931; pos 6784 to 7486)
tggcggagcactttgtaacaaaatatcaaggaaaggtagttcatgtggtatataaagttaatttcgtttaaatactactcactaccacccatttgtttttacttttttgtttaatttttgctttgacatcttttcactttcctctataacataaaaagctcagaaaagtttattataattttgagagtagtgctagagagagagaagtacgagataaaaacgagagaattttactctctctctctactcatttactctctatcattttcttcattatttctctcgtgtttctctcgttcttctcaaccctaatcattttcctaattttgattctgcattattcgttttggacgtaactctccctgctcctcatttatatcttttggccttttattatcaattggttttgttaaagggaccctcacaaaatggccgtggggcccacttttaattttaccgtgcaagggcagctgtaaggtgcagaatctgtaagttagcctccctcttgttagttgttaaagtccgcgtgggccccatttgattaccaaacatttacttaactaacatttaaggtttttcacaaccgttagatttttatttaaaggttactacgtaatcatctccaacattcaattacatttaattaatttgtatatatttatttatttgacgaaatgtacatcctccgaatgaatgacagggc

SEQ ID NO: 80449 - DNA, 773 bp, Citrus sinensis
  Intron number 2 from transcript orange1.1g032155m (locus o range1.1g032155m.g) derived from phytozome v7.0 (chr-ID sc affold10797; pos 944 to 1716 reverse strand)
aaaggtgccatgtatcatgaagctctattctgggcaaagaattgttcaacactctctcttttctgttttgccgttttgaatcgaaatgttcttacttatcactgcacagtctttcttcagcacggatatctgcacattctaagatatgaatttgacctgtgcactactgtttagcacttataacggttatagccccggattggaaagcttgttttatatacgtataaaagcatctttttaattgcgttgaatttgaaatctacaagaagaagttggaacttggaaataaacgaacctattatcgccgcctttgaggatctgtttgcttttttgactttggaagagtatttttggtgcggatagcatagcttttgtaataaaagcacaagatttgatataatatatgagatatatttggcttcatgaatcataatatggtttatcgatatagcaagcttctattaaaatagatgaaagaaagaaaattttagcttctgtatcgtttattatatacataggcttacacaattttattttatttttcttttttagttgtgtcctcatcagctcttctgtttattgaagaatatacagtatcttctgctcatatcaatcttgagcaagaaggaaaaaaaaaataaaattaagtgattgattccagcctttttatgtatattttatatatatcacaaaaaagatcaaggtaaagagtactaatttccgattctatatatgcaggagtgaaaagtgtagaagtgaaccgaaagcaaagc

SEQ ID NO: 80450 - DNA, 919 bp, Citrus sinensis
  Intron number 1 from transcript orange1.1g031207m (locus o range1.1g030198m.g) derived from phytozome v7.0 (chr-ID sc affold00117; pos 209413 to 210331 reverse strand)
ctcgtgaacttaaagccaatttgcatcctcttaaggttcttataatttcggctattttattgaatgcgttttatggttttcatctgattggctttttttttttttggttttagttattacaattttttggtgcttgaaatttgttattttttaaaaaaattatatttatgctctcaaaaaaaaaaagtttggcatggatcttctccgtaaatagtgaaatggaggtgatgtgagtttttgtgtgaactcgtatgtactgaaattttattaattaaaaaaaatagtttttgatgtaaatttgtataaacaagccttatgaaaccttttgaggaattgtagaattttaggttaaagtttgctcttgctcatagtttgtgataatgtatgcactgaaattttagtaattaaaaaacattagtttttgatgtaaattcgtgtaaacatgccttatgaaacgttttgaggaattgtagaattttaggttaaagttgctcctgctcatagtttgtgataatactcctttttatttttatttttattatttttaaccatgatattgctcttgttgatgctgtgaatgagaactgaaaagttgggatactattattttcattctaaaatgcatcagaggaaggttgttgattggaactcacactgaacattttccttgttgtggttattataaggctataattaccctaaatatttcacatacagtgaagggagaatcttattgacatggcacaagtaaaatgttgccacattttgatctactttttttatggttttcttttttcccgactaaaacgtgtagccctttcttttaaaaattttataattgctatgttataccacttaatttagtttgaaattcctataaacagaacaagtttgtcttttggtacactcgtcgaacacc

SEQ ID NO: 80451 - DNA, 804 bp, Citrus sinensis
  Intron number 4 from transcript orange1.1g028894m (locus o range1.1g028894m.g) derived from phytozome v7.0 (chr-ID sc affold00299; pos 169761 to 170564)
atcatccagttttgatccattgcaaacgcggaaaggtatgttgagtgattgcttaattttatcatttaatgcacatgtcgccgtcgctgctttttgaataagactggtgttttttcatgctgttggatcgattagccagtcattatcattttgttattggatacatttttagtatattaacccatcttcaggtcttgcaatgcatctagaaagctaatttaactctcagctattttgttaaaggggacaaggtgggagccattttgttcttatggattacatgaactacaatcgactccgttcaacattttcatcatttgttcttcactaattgtttgaatttctgtgcttcttattttgaaattagtccaatgaaaaaaatgagcttctccggcatttctgtcatcttatctttattccactagtggtcttttttaaagttgatgtgaatggatagtctagataatgcctttaaattgaaaagtaaaaggaagttagtcatttgttcggttcaatccattttctcggttcaatccatttgcatatttgctctccccttttatgtagaaagctacaaatattctttattgaatgcagactattaatatttatattttatttgtttgcattacaaacttcatctgaatgcatttctcgagagatttggtttttaggtctccattttaatgaactcgtagctttatgagtttagccaacgtttgtaatgtcagcatttttctaatgttctatcttcttgcttttacttcagcatcggacgggttgtcttgttggttgcttgagaaa

SEQ ID NO: 80452 - DNA, 751 bp, Citrus sinensis
  Intron number 1 from transcript orange1.1g002031m (locus o range1.1g002031m.g) derived from phytozome v7.0 (chr-ID sc affold00025; pos 202835 to 203585 reverse strand)
ttcagccgtcgtcctgctctgtaacagctttaattgttagtgctttgctccctctctttcatctctcttgtactcgtttcgttggtacgtgttctccattaattaatattaacgataataatactaataataaaataacatcttaaacagactattattattattattgcattattttataaatttaactcgttaataatacgtatttaaaatgatgaatgccttaacaggtagaggcattatttattcaattaattgttaattgcgtcttttcatttcttctcctcctcctttctcgatcatttcagttttcgagcgggtggattatatcctgctgggaagttctcgagctctgtttgtgtaaattttatttttttccttcaatttattcaattatctccagctgtattggcttctgggatataatcaatcaattgatttgctatctcctgagtttcgttgtgatataaaataaaaaatatagacaggtgtgtactgggtacaaacaagcatacttgaatgaatttattgaattgactttaagaagacaattgcgatcgtgggttttttttttaaccccctaaaaacaaaatgaacttattgtctctgtgatgtgaaactccagctctcaagtgaataatgtgtaaaacgaattatttaatttgctattgcagtgctagatactcatttttccatgtgtttgctttttctttcagcagaggttggtatacctagttattcttgtattcaa

SEQ ID NO: 80453 - DNA, 552 bp, Citrus sinensis
  Intron number 1 from transcript orange1.1g043656m (locus o range1.1g043656m.g) derived from phytozome v7.0 (chr-ID sc affold00079; pos 472684 to 473235 reverse strand)
agccggcgtggtgattgaggctcgccagccgagatccaaacgggacgccggagatgtcgtattgaatgagacgatagacgtcgacaacggtggcggcgtcacagagctcgacgcaagcgacaagtatgaagacgagggctagcatcgagtagacggagtccagcatgtcgcgctctcgagcttttcgatgagccatttgtgaattttgatctagggttaataaaaggtaacgagattgtttcttaaatcggtgaataaatattatggctcctttcgatttgatctggtgattataataattaaaatagaaaattaattgcgatcagagagacacttgacagagagtgttttgtttcctttttgttttgtttggttaataacagtgcgactcactcttactgagattccgatgcttgttgctctataattttctcacgttaatttggagacgtcacttgttcgttggattcacacttcattttatttatttaaattttacagtatacgggtgatctagtgggcgttacgttgtggacttgttgcgaaaaacgc

SEQ ID NO: 80454 - DNA, 311 bp, Citrus sinensis
  Intron number 2 from transcript orange1.1g011026m (locus o range1.1g007887m.g) derived from phytozome v7.0 (chr-ID sc affold00026; pos 644508 to 644818)
atcaggcatgtattaaaagtttcttgctctttccttttagtattaaatttggatttaaatctcatagctcttgtactgtcttaaaagattttacgtaccagcgttaaaccaacgtgcatcgatccttgttgtttttgttttgtttgattgatgagaaagtggggtagaagaaaggaaaattggaaatgggatctaataattactagttttctcctcctaaattatattgtttttaatttttgttcatgaggggatcgtgactgttgttttaattttttgcaatctatatttgcattcaggtccaccaagat

SEQ ID NO: 80455 - DNA, 981 bp, Citrus sinensis
  Intron number 2 from transcript orange1.1g011702m (locus o range1.1g011702m.g) derived from phytozome v7.0 (chr-ID sc affold00051; pos 611297 to 612277 reverse strand)
gcggccatttaccgtaaccccggcgcattttatcagtaagtagtttactttgattatgttttaattaattaattaattaaagcttataatgaaggttttggaactgctttgcttctaagctaccgccggccaaggcaaagagagcataagtgtatcgcagcgttagtttttcttgtaactgacgcatgcatgcatggtgatggtgtgagtatatacatatagtgcgcactacgcactcactcattgctctggatcagttttacaattgattacttgttttgtgcatcatagctactgcaaaaacgcggcgctgctactacacatctttattttcacacacacatatgtatgtatgcattcatgcatgcatgtatattacacaatatcatgatacatgatatattattaatttattaagaagacggtgagatgatgtaacaggttcaattaaaatttgtgaaaatttatcatccatcataaatggcacatcatatatcacaaatagtattaattcattatggatattaatgatatcacaattacgtacggactcttgttgtcgttacaatcatataatgttttaggatccttagactctaattctgatgcaatcagtgagtggttgattgttcacaaagaaaagccatttctaaggtactttatggatgtactttagcaaaagagtgtttttacacttgtaagtaatcttttttataaactcattcatgataaatggcttggcatcatgatacgagtaattaaaatatatatatatatatatttctttgtttttcactctttcaagcattgtatgccccgttcaaataatttcggatgaatttgcaaaaataatttgtaatcagtgttgctgttggtaattgagtgcctgtatatacgtatatatatatatgcaaattcttcttctacatatattatataatataataaagtcataatatatatttttaaaatgtaggagtt

SEQ ID NO: 80456 - DNA, 921 bp, Citrus sinensis
  Intron number 1 from transcript orange1.1g006383m (locus o range1.1g005965m.g) derived from phytozome v7.0 (chr-ID sc affold00026; pos 466505 to 467425)
atttacttgctttatacgactccgtttcagtttctgtatgtttatacttcatgcgtttcgtgcaattttactttcacgatgtctgttgagcgcgtgcctgccttgttttcgaattttattaccgtaattcgcgtatacaatccatttgaaaatcaaaattttctcacgaatttgttgtatgaatctgtcaaatttatcgcgatccgatgtgttagaattttgtaggtctagggtggaacgaatagagagtgtgaagattctgtttggattgaaatctcttgagcttaaacaagagatctcagattcgaacgataggtgggagaggatttaattaccagtagacagtagtctattcataaaacaaaaaagaaaaaggaaaagagaggacttaaacaacttggtgagagtaatcaagatcaaataagcgaaataattttcttgtggtttcagatcataaaaaccgttcctttttcaagtttctgaaaataaacatgaaatgaacatcttttttttttttttaggttgggggaggagggggaataaataaaatgattaatgtgaaaatattgattggttatcggattattttaatattcagtattgtttgtctaaagttgtgtttgaggattaggtgatatggcttttaatatgcagctgttgtggaattagttagtaaaaacatttgctaactaatgaaggcaagtgtttaacaaactatatagtcgctacgattttaaaattaagtaggagcataatagttacctggtgagttattcaaagattacatttgggatttaactactgttattgtctgtatcaacattcttggttgtaagtactacagttgtaggtttattggttgttgatgttgttgattggattttaatctgaatgctttgtcattttttagcttgaattgag

SEQ ID NO: 80457 - DNA, 799 bp, Citrus sinensis
  Intron number 2 from transcript orange1.1g039178m (locus o range1.1g039178m.g) derived from phytozome v7.0 (chr-ID sc affold00656; pos 77920 to 78718 reverse strand)
ggcgtgtgcttgaaagcaatccaaggctgacaaaggttagtatttacagcctcattaaagtgttcttattctaccgttttgattagatgtggatgtgtggtgaattgtgaattgtgatgttctggaaagtcgcgtggccgcattctgcttttaactcactttaactaaatttgtttttcatatttggatgaattattccagtataacgacaacctagttagaagccaatgaatttgtgatgattaatggtttgatgcgaatatcgctgtaacttattgcttagcatagggttttccttttgaactggttttttaactttctggttggtaaagttgatttttttttattattttattgtaagagcatagtctgaagctactttatccaaggatttggactgatgccctgcagtttttcttaggcagaattgtggtgtctcttgatgtcctttgacagtgtaattctattctattgtgcacataacctgacatgtaatacttgctctcggataagattgaagcgatgatttgaactgttatcaattaaactataccctcttttctgatgttggtgttttgcatagtacaatgtagtgttggtttcaatacatgttcattcttcacttgattgaagtttgaaagttgtcaggatttatagattttaaattttcaagcctttcagcggattttggttttgtagttccgtacttcctgagttatatgctctgtagtgtgatgagcttacaattcggattttgtgtgcagctttgcgtgcctggctgttctagactcaccgttga

SEQ ID NO: 80458 - DNA, 336 bp, Citrus sinensis
  Intron number 1 from transcript orange1.1g001701m (locus o range1.1g001701m.g) derived from phytozome v7.0 (chr-ID sc affold00422; pos 78261 to 78596)
atcaaaagaaatttcgaaatctgaacttcaaaatcgtatgttttttgaaatttctttattaaattgatttcttgaaatagatttatttggggcagcttttagttttggaagcaatttttgttttgattctgaactttacgaagtattaacagtagttgattttttcttgcaaatttccgaatttgcttgtataaattatagttactttaggtgtttctgtttgaaatttgtttaaattctaactgactgttaagtttcttagcatttcattaactttgaggttcattctggcttttgattaaataagcaggttaagattagatcgctttgaaatat

SEQ ID NO: 80459 - DNA, 229 bp, Citrus sinensis
  Intron number 2 from transcript orange1.1g001701m (locus o range1.1g001701m.g) derived from phytozome v7.0 (chr-ID sc affold00422; pos 78664 to 78892)
ccactgaagctcgattaactgatctgtgcaaggttttttatttttgaaactttttttttctgtaagtttgataaaaaaatccattttcttctcttattttcaatagcattttgcgctttttactttctgggatttccttgtcctagttttgatttcattattattcttttgtttttttaaatgttttaatttttaaatattttcaattaaaactgggtttgattgcaga

SEQ ID NO: 80460 - DNA, 953 bp, Citrus sinensis
  Intron number 6 from transcript orange1.1g001701m (locus o range1.1g001701m.g) derived from phytozome v7.0 (chr-ID sc affold00422; pos 79522 to 80474)
caggccaattttgtgcacctcagtattttaagcaagtgagctttcgtacctctacatctcctgttctcagtgctgtcttaaataattagtgccttgttctgttaatcatctgatgaaatagttaaatgtcttagaagtaacattcttggcactcatgatatgcgctgaatgaaagtttaaaatgatgatgttggtcatagcttgcattttcaattggcatggttacacaaatctccgtagttccttgggagtcaagatagttcttcacctgtttattttttatcttgccaactgaaagtgtactatatgatagtaaaggaagctgctgaaaattgatataaatgtaaatatttttaaaagattattttataggattatagctatttgtttattgaaggcaaaggaacctaggatgcactctgtcccctaatttttttcccctttctgtatgctttttacatcctgtgcaattgcttcttgtaacattcttctactcggctgctggttgcaatattattttactctacacagaatcagcctgttctctttgcttgccatccaggattttcggtgacctagtgttttaaatctactagcatttatgccttgaatggctacaaacttaaagttctaatcttttgaggctaaatagttacattcaagatgcttagttcactaatatatcaggaggctaaatatagttaaaaattgttacttaaccacggtaagaaagtccttttgttttgttactctttgttctcttcgtcctttttaatagaaaatttgtcattggcattgggttggttgcagctgccttactttaccacgttcagtttttaaatgttacattctgtgggctatatttatccagtgcagtatgaagttcacacattatatattattatttaatgttactaggtcctataaacgcatatatcgtgaattcttcttac

SEQ ID NO: 80461 - DNA, 627 bp, Citrus sinensis; identical to SEQ ID NO: 79915
  Intron number 2 from transcript orange1.1g018323m (locus o range1.1g011989m.g) derived from phytozome v7.0 (chr-ID sc affold00067; pos 497089 to 497715)

SEQ ID NO: 80462 - DNA, 490 bp, Citrus sinensis
  Intron number 2 from transcript orange1.1g023902m (locus o range1.1g023902m.g) derived from phytozome v7.0 (chr-ID sc affold00007; pos 609242 to 609731 reverse strand)
agtcactcctgctgatccctcaacagcatcacctggtaatagttttaatctttccctttgctgtttgttgacatatttcaccgtgccttcttagcgtctgtttgagctttgtattgaaattaccccattctgtgtctttacaaaactggtgataagtcttctctttgttattcttcctgtaagtcaaatcgtttacacctacgatttactgtttctcttgcccttgcattttcgagtaattctgttaggggtaaattttcatcacatcagatttttatgagtgaatgtattgtgatttactgattgtgggttgaccaaagtaatgtactctgtgtcttatataaatttttatcacttgcacagtttgcacgcagaaacaccatcccaaaaaagttgcgactttaatttgcttttggccaatcaatgtgattgtcatagagcaaagtagctattcccatacaacttaacactgccatatttggtttctcag

SEQ ID NO: 80463 - DNA, 689 bp, Citrus sinensis
  Intron number 1 from transcript orange1.1g033920m (locus o range1.1g033920m.g) derived from phytozome v7.0 (chr-ID sc affold00004; pos 3653816 to 3654504)
attcttcacctccaaagcatcaaatcaatacattggtatccccattctattttccgttatttttggatttctttttgttgcttttatcttttggttgaattgataattaagtgaaaactattgggtcttctgggttgtgttgtttagggtttttgtaaaaatgagaaactttttcaaggagcggctagtgttaagatgtataaggctgagtttggctttgtttggttaatgggaaaatttagaaacatgaaagaagggaaagggaaattctggctctttctggttgtttcaagaaaattttgggtttcataatttgagctgtttgagtttatctagaatgagattgaatcatatctttaatattgcttgttttgaattttgaaaaatatgttaaaatgtccctatattaagcaaagagacaattttcttattgactctcagggacatctcttgggtaaagactaggagcaattaagtagttgaaatacagctgattgagttgaggtattgtcgttagatgtccaaaatggaatgttgactgtccattaaagaaaaaaaaagcctttttttggttcttcgtttagtgataaccacaacatgagtttcatagtcttttagaaagctgaaattgggatttgagagagttattggtgcttttgcagtcaaggttgggataccagagtttctga

SEQ ID NO: 80464 - DNA, 766 bp, Citrus sinensis
  Intron number 2 from transcript orange1.1g033920m (locus o range1.1g033920m.g) derived from phytozome v7.0 (chr-ID sc affold00004; pos 3654592 to 3655357)
ttaagctcaagaaacttggcattccttgcaagcatgtaagcatttcgaattttgctggtgcttttatttcaatatatgtcctgttgtttgtttggggaaatgaaagatacatttattgttggcaagatttgataaatctcattatgttatgaatatcagatacacctgataaccaatatagtccacacaaacacaattattattattagtacctcattcaagtacatggtttctcatgtattggatttcagcagctactaatctgctacatctagattaactataagaagtagaatccttccataaattatatgcatggttttagctataatgatagtgggctaattatcattgtgtccagctctgagcataaacaacatccaaatacttgcaaatgttttaggttgtatatatggaagagcgggttacatgttgtatgcaatattctgaatttctgcttgctatctgtcatatcctgtatatggttatgaattatcaaggttggttgcattgtcaacttaaaattctgacattcatatgcatttaccattgtacaaagaaatagtggcacaaagtgtatctcaggaatttgaaaatattattaagttttgaagtatgcatgtcctttagtttttactcatggtgaatatgaaacttttattgtattttgcttccagaattccttttgttacaacttacaagtttttgacttgtgttttcttgtttgccagaggaagctgatactgaaacacacccacaaatatag

SEQ ID NO: 80465 - DNA, 685 bp, Citrus sinensis
  Intron number 1 from transcript orange1.1g041975m (locus o range1.1g041975m.g) derived from phytozome v7.0 (chr-ID sc affold00826; pos 80 to 764)
tcagtgtcagttatttccatctagctgttgataaagtaattataatacttataattagtactaattataaagtaattataaattataatatttatagtactacttaaattaataattttattttttgaattattaattatttctatttttaattttaatataaaatattattgtaagcattacatattgatataacataaacattgataaattagtaaatatgcttgagttatagaattgatcccacaaattaaccctttgagaattatgggataaattttcgtaagtttatgggattattctgtggactcaggataaatttattccaaagctatgtatgcacccttattttggtatttctagagtagagccgttgtgccataacaattgagcaaagcaacaaattttttgtttatgtttccgagatttcattgtatgttctaactcctaagcttttcattaaatgtcccatcttatatatttgcatcatattttaacagttgaagaaatttgggaaatgtaacctgaaacttagacttgacaaagaacatgggaaaatgaaactgaaaagcttaacgaactgtatagatacgacggctgtattctaggctttagcatttccttacattattttctttttctctttttaggggagtgaggcaattgagggcatctccttagatat

SEQ ID NO: 80466 - DNA, 726 bp, Citrus sinensis
  Intron number 1 from transcript orange1.1g017275m (locus o range1.1g013313m.g) derived from phytozome v7.0 (chr-ID sc affold00016; pos 913467 to 914192 reverse strand)
gtttctcttctctttgcttcacttcactgtgtaatgtaagtatctctaccttatcatttttatttttgttctgtttagacgcaaaatatgggagaaatatctataaataaatatatatttttttccagataaaagatgtgttttcttccacccttctggaagctaataaaataggcattcttttacttgtttgtgtattaaagtggtgtgttgatgggcttttatgtatcttaagtcaagtctctgtttggttgctaagaaattagaggaaaacaagaagagtaactttatttctgttaagtcaaaaaaaaaaaaattatggtaaactaatccaagtagctttgcaaaacttaagtttgtggaattgtttaatgaagcttcgaaatgcgatttactcactaatctttcttattggtgccatagtttgtgagaaatttctgctatttgatttttagaatgcaaaaattaacctataatatgatattagaaattggattttctatacttgtttttctctccatcaaatggatagtgcttaacagttttctttttctttcttttttttttgggttggcttattttcttttgaactgcttaattcctggctctgcgttcaatttactgttagattgcttgatttaaatattcactcacattgttgtttttgttatttttatctaagaatcttcaggccttctacagtattagtgttggattggtcattgt

SEQ ID NO: 80467 - DNA, 539 bp, Citrus sinensis
  Intron number 2 from transcript orange1.1g009254m (locus o range1.1g008421m.g) derived from phytozome v7.0 (chr-ID sc affold00004; pos 60414 to 60952 reverse strand)
cttctgtggagactgctgataaaaacactgagcaggtatgttgccatgaatgtatttatggtataaatgcttgcaagaataaattggtttcttcactataatagtgaatttgtgagataaattttgctagttttgaagttcaaggaagaaatatgagttgtaaagatttcaaatgatgttaaaatatgccatgcaacttttaataagttgtaacactaggctttgaatgacatgagtagagaaaagttgtcactgataggataacctgtttagagattgagtgaatctgttacttgctagcattccctcattataactgttgcctacctgaatggtaatcaaagggtatggaaggctatgacgcgagtcttgtgtatatctgtggaattctggaacattaatcaaaatatatgataactgggcaggatttgtgagatcttggcctgtattgccattgacagttaatgtttctccatttgttcaccttttcatatatctattcttggtaattgcagggagctctacggtttgattgccaa

SEQ ID NO: 80468 - DNA, 960 bp, Citrus sinensis
  Intron number 2 from transcript orange1.1g021821m (locus o range1.1g015055m.g) derived from phytozome v7.0 (chr-ID sc affold00361; pos 88566 to 89525 reverse strand)
gtctgcgacatctgaacagtaaaaagcagaatcaggtagcttcagcaactgaatctagattcccaatatttttcccagttaaggtaaatttagaatgttgcaaaaaggtgaatgtcatagtagcatagtgagtagcttgaattataaaaaaagttatctttaggttggaatgtgatactctatttggaaatcataatattgaaattcaggatgaggaattttcttagctgacctatgaacttctgtctgattggttgcagccacctctggttccaaggaagccattgcaacccaataacaagaagcttcctgatgaggaagactcttgttctgttgcttcctcgtatcctcttgcccccagcaactttagcttgatttgtcatttccctatgctttcttatttatttatttattgttgccacctcactctctctgttcaaaattgatgttatctcttgaccatccctagcactgccgcatcagtgcggactgtgaagtccaggatcattgttgcagcagctcctacatttagatgcactgaacgtgcagagaaacggaaggaggtactcatcaatctatttcatctgaattattttttgatttttcatatgtaatttggtctgaatctctgtacctattatgttaccacttttagttttattcaaaactagaggagaaacaccaagctctggaagctgagaagagccaaagtgaagccaggactaaggtatagctctcaatgtagacacccaaggataattacaaatatctctttgtcatgattgtcgatggaaattaatcatgttttagattagtcttattcagttcatatttgtctgttgtgtcagataattctctaacccatgttgttgttttgtcctcataaatcttaatattctaggaagagacagaagcagctatcaagcaattgagaaagagtttaacatttaaggcgagccc

SEQ ID NO: 80469 - DNA, 879 bp, Citrus sinensis
  Intron number 1 from transcript orange1.1g022589m (locus o range1.1g022589m.g) derived from phytozome v7.0 (chr-ID sc affold00147; pos 25304 to 26182 reverse strand)
cttggggtggttcagccaactggagtgaagtggaggtgtaatctgtaactttttttttccttttatgtttctgcatagtaccttctagttttagcttttttacttgtcaaaactttctttttcttttatttttctgctcactaccttttggtttttagcttgtttacttgtcaatgtattttttcatgtaagtggattgcagagactatgcaccccattgaaaggtacccatttgcttgtaccctgacacttttaaccattgcgggagagtaatcctggacttgactatcctcaaactataggtttgagcggttgtttcagagaaactatttattacatgtaaaatatctccccataatcatctctgaaatacgaagaatgccagttcttgcaggattaacacccttaaaaattatgtttaatcttctatagcttgctatgaatctggattcctttcgtaaattttggcttgcatattctggcattcaggaagcccaactgctcttgcgtgaaggggatacaaaaattattggtgctaaatagggaatagaagctgatttgaacttttttgctaaacaaagtagtcattgctaaaagatgatcacgagattaagtcaaaatttttgccgccatatcaactcactttaggttcttgtagaaatttttggaaggacaattcatgctgaatatcatatacgaaagtcaataaaaattttcatgggttcaaaacttagtgacaatgttcacatttgtttcaaacaggaattgcatataatcagaaaaatatctgcctttcttttgaatttttctgtttttatctaaacaggtgttccctataaactttatttaacaagctcatcgttataacatccagggagc

SEQ ID NO: 80470 - DNA, 386 bp, Citrus sinensis
  Intron number 2 from transcript orange1.1g047579m (locus o range1.1g047579m.g) derived from phytozome v7.0 (chr-ID sc affold00016; pos 1028981 to 1029366)
gaggtggaattctaaatcaaactggcaagatcttcgtaaggattctgattcatttttctgaagaaacttaatgtgttttaagattcaaaagtttacaggctatcagatacctacaattagaaatctgccgaggttttgcttaaatagttctattgcggctaagtttgagtccacagcgggcccggatctgcctacaaacaaaaatttagaagaaatcgtcgcccacaagtgtctttgttgcttacaagaagttgcacacattaattcttctctcctatctactatactacaaatataacagttagccattggccaattaaatgcattaaatctgtctaatatataaaatttatgtaattttgcatgtacagggtggccgaatcaac

SEQ ID NO: 80471 - DNA, 814 bp, Citrus sinensis
  Intron number 2 from transcript orange1.1g038283m (locus o range1.1g038283m.g) derived from phytozome v7.0 (chr-ID sc affold00036; pos 161838 to 162651 reverse strand)
gtttctctccttttccactggtgctattcacgtaagttctctgtcaatcccctccactatgttttgaggctctggtatgcatatttcatgtcttgcatctttcatcttctttcttatagttttgaggcatatcttgtaggattgacaccccccccccccaaaaaaaagatttgacagtgtaggttctaatttcaaggacatttagtaactgcttggtctatttctactctgttgaatttaatttgttgtctttttcaacatgaaagctcctcaactgcacttctgaagatttatttcctacatttcccaatttgacatccttgaaagtggagattgcaaaatctggatgacaattccgtcatttcaaccttattagcatgcctaaattagaagcttttgtccttcagatggttagtacgttatgaaattttgaaagaaattaattgtacttaattggttgcgtctgatgtttgttttccttttaagcagaatttcaatttcaagtggattgaaccgcattgtgcggcccaatgtttgttgttacatgttaagagaattgaaattttgagatttggtggtcagaaggatgaaatggaactagtcaagtacctgttgaagaatggtgaaggtttgaataggatgatgattgtattcatgaactcagctacgaagaaaaagctttgccagaaattattaaggtttgaaagaggctccacgacttgtgaagttcaattcctttgagatctttgtcaggaaattttattgttttttgaagctgattttaggacatatttgtattttgttttctccttga

SEQ ID NO: 80472 - DNA, 578 bp, Citrus sinensis; identical to SEQ ID NO: 80059
  Intron number 1 from transcript orange1.1g022480m (locus o range1.1g022480m.g) derived from phytozome v7.0 (chr-ID sc affold00433; pos 1138 to 1715)

SEQ ID NO: 80473 - DNA, 504 bp, Citrus sinensis
  Intron number 1 from transcript orange1.1g014816m (locus o range1.1g014823m.g) derived from phytozome v7.0 (chr-ID sc affold00025; pos 96611 to 97114 reverse strand)
ctatttctccatcagcttcaatctcagcacgattagtacgtatttctttttaatttcaatatcctgatcagcaatttttttaacttttttcggccttttttagctcggcatttgatattactttcgatcactagtttttaccacttttttggtgtcttatgtaattttctttgatttttctgtctgcaaagctttataatcatctgatctatgtatggatttgttttttgaaatcaattttatgggattatcaatttaatatgtacacgaatttgcaatactttttttttcttaaaaaaaatagagagataaccctttttgggcctttgcaaatttgatcatagtatgtgctaggtcatttatagagttatcttcttttcgattcttattaaaagttttaggtaaatttttcatctttttgtcgctgagaaattaattttttttttgttttagttttttctttttatagatttcttgattacaggtatagttggtgaagaaaca

SEQ ID NO: 80474 - DNA, 567 bp, Citrus sinensis
  Intron number 2 from transcript orange1.1g030232m (locus o range1.1g030232m.g) derived from phytozome v7.0 (chr-ID sc affold00312; pos 99656 to 100222 reverse strand)
ggtaaagggaaaattgctgcccagtgcaggtaactattgtttttactctttagatcaaattttgtgtttattcttgtctttcttggtacaagctttgtacatttatatctaatatttttaactattaggtgtcatgggagattagcacccatcaaccccccaccctatcatcagatgcttcatatcgtacgtgcctgcttgaaaatgttatcactgtttaattaattctttaatcaatgaaattaaaattctttatttgtagcatagaagatgctactgtttgtgataattggaagaagtgccaattaggctgcaaattgtgtgagtagaactgttaagaaaagaagttggcctccttactggcaagtaatcctctcttgattttattgggaagaaaagggaaggagagttgggggggaggactgaggaggtttcactagtgtgctagtgtggcaaatacattgaccttgatgatccttaattgtcatattattttagatttttttactattaaactgcttttttgctttgattaactatccaaatctgtcccttctttggatagtc

SEQ ID NO: 80475 - DNA, 548 bp, Citrus sinensis
  Intron number 1 from transcript orange1.1g034535m (locus o range1.1g034538m.g) derived from phytozome v7.0 (chr-ID sc affold00007; pos 338617 to 339164 reverse strand)
tttgttatttgtccctctcattatcgtcaagaaaggtagggtttcggcctcgcgatcaagcagttatcaattgcaggttattgctttttctttttatcggaatcttttatttgataagttcgtttcttttctgatcgatcatttcattttcattcttttggtaattggcgcagatcgaaaaattgtctaattgagttacaaaacttacttttttgattttatgctcgattttgtttttcctcggattagcatgtttactctgtttggttgctgagaatttttttgaaaaagtttgatctttctgtctttatttgacgaaagacaataatttcaacttaaattaggaagttaatttataaacccgaaattctaatcttgatttggtttacaactgtgaacgtgatcggctattgtgtttttctttttatttgggttaaacagagaactgtttgatttcataaatgagatagaagattacttttctcaatcttggtgtgtatatttgaaccttttgtgaatccgaaccttgatattgaaggacttgagct

SEQ ID NO: 80476 - DNA, 693 bp, Citrus sinensis
  Intron number 1 from transcript orange1.1g001463m (locus o range1.1g001468m.g) derived from phytozome v7.0 (chr-ID sc affold00388; pos 69131 to 69823)
atagaagttcagagctttgattaggagacgctgaggtgatcttttatttcgttgattttcaattgaatttggattttagtttttttttttttcaattaatggaatttgctttatggggttgaatgcatgtgttatacttattggtagtatcatctattgctttgtttggttgctgagaaactgtgggaaagttgaaaaagaaacagtagtattgttgttaaatatttacattttatcgaaattttggaaaaagagaatattttaatcaatttgtgctaataaaactcttgaacttgttgacttgatgaattaaaatataaatgaaaaaaaatcgttctaaatgcagataattgcatcaatattgtgttactgcaatgaatttatggtcgataacatgcaaatcttagaacacttgactacatgatgcaaacttatgatatgatttgtaattgtattgcagtcaaatgtgctagttttaatattactagctgagcttgatttttcagaaaatgttactcttgtccttttttcttcttaattgtttgcctccctctatcgatttatggaacatttctataattagcattaacatttactcagcacaacaaaaagctaaacaatcaattgtttgttatttctcatagtttatactgagttgtcaaggataaaagttgcgatcttgaatcatttcca

SEQ ID NO: 80477 - DNA, 930 bp, Citrus sinensis
  Intron number 1 from transcript orange1.1g013016m (locus o range1.1g013016m.g) derived from phytozome v7.0 (chr-ID sc affold00010; pos 507052 to 507981)
cagcctcataagcgcttctctttgacttctgctaggtacattttcttttagcccttttcagtttcttttgtttcgttttcttatttttgttaaaaatgatgatccgtttattaggaaaagcatgaaaaaaaatcaaaagttgcagccttttcaagttctgcataataccttttgaaagaaaaaaaatgaaacttttttgcatgttttgattctgggtatttttttttccaatttattttattttttggtttttgataaggggtgttttgttttcttgtattacagagcagtatggtattgttcttatcatgtctgctttattagctctgttaagtcatcttcagtggaaatattaattaataaacttttgtcttgtgtttcagaggagtagcatagcttcgttaattgggtcattgaaaatcgcatttttatatcatcccagttcttctcaaattcatacacagctcaaatttttctctttagccgcaaatttccgttatttgaaaatttccccatttgtggaataattgattgactttacccccagtttaacttcgaagatacattttattttatctcatccaaacatattttgacctttatcacgcaagacattagaaaattttcattttctcgaggactttacgcgtgtttttccccgagaaagttgtccgcttttcgattttctatccatctgctgaaggaaaaatagataaataatatttgggtattaacaaaatattatcatgataaaaaaaacaacgacattgttgtgtgttacagtaatattatagcattaacaatatcctattttctttcttaacggtgtcttgatggtgttaaatttcagtgcttggcaaaaaaaaaaaaaaaaaaaaaaaattaaaaaccgttaacaaattgtcatctcattttctatttacaggtttt

SEQ ID NO: 80478 - DNA, 556 bp, Citrus sinensis
  Intron number 2 from transcript orange1.1g025681m (locus o range1.1g025681m.g) derived from phytozome v7.0 (chr-ID sc affold00007; pos 837807 to 838362 reverse strand)
ttcttctccagccacgaaaggaagtaaaaggtactgcagtcttgtgttacatttttagttatggaaaagactagcataaatttaacttcatgaagtattcttactaggattttggaatgtccttagttgtccaattctttggtttgccacagttgccataggaataaaacatgtgacttgttgcttttttttgttaacagaacaataataataaaaaaaaagagaatagagatggttcttagaaaatctatcttgaatttgctactcttggatatttaaaaggcatcagtttgaaaagaatgagaaaaggaataagtagtatcgccagtacaacttcgattcactttttgaccatggcaacatcatcacacaactagtaccactttcattctggacaacacgaattccgaaactattaactttctaggcagaatgagttagagtttcaattgtttattgcaatgttcagtttgatttggtatgtaattaaagttaacttattttgcactatcattatgtctaattcaaaatacttgcagtgacagacacacattca

SEQ ID NO: 80479 - DNA, 820 bp, Citrus sinensis
  Intron number 2 from transcript orange1.1g020035m (locus o range1.1g020035m.g) derived from phytozome v7.0 (chr-ID sc affold00169; pos 93326 to 94145 reverse strand)
atctgacaagtggtgtgcgtatgttgttcatgcgttcggtgctttattcatagtgatttgttgtttcaatatttaatttttgtcctgagtattaccggcattttctcatctgattttctgtggcgtacttctgcaaattataatcaacaagtcagattctacatttaaaccctataagagtagaagattatatcttttatctgatcaattggcatcataccatttactcttaaccctttctattactaagataaggatttaagatctcacaagcaaaatcactttgtcatgtgcatcaagtcaaatcctatcatttcaagttggaagcattgaatgcgtttttctgtacctgccattttggagaatattcaattaggagttttcgttagattttgaccaagtgatttggtttggtaggattcatgagctgtacatgcagatattaattcaaatttaaatgcagtcgctgaaatgcagctaaaagctacaaatagtgcataaccaagtcattgttacgtcgagatcttgtttgtacgcatgcatcttaatacctctatacggcattcagtttcccatctgtaaaaagtttctttttgcactcgaaatttagttgtatcagttttatattttattggaaattcaaatttagattattaataatttggctggctttgagttcagtaggtcttcgattgtgatcatagtagatttgtatttgttgctttttagtctccttttcagaggagacattgaccttacttaactgctccttcatatgtttgcagagcggcaggtacagaaaattgacccattacttaaa

SEQ ID NO: 80480 - DNA, 392 bp, Citrus sinensis
  Intron number 1 from transcript orange1.1g020035m (locus o range1.1g020035m.g) derived from phytozome v7.0 (chr-ID sc affold00169; pos 94296 to 94687 reverse strand)
tagctaaagccattggtgctgagtgggactatcaggtgtgttcatgaattcattcgtttatttactttgttaatttttaagagtagtgctgtaactcaaatggttaaaattcaatttttttttcatcccgatgtatacaaaaaattgatcctttttgtccttgattttgggtttgtgctattcccgattgcatttctttggattaactgtagtttacgtgaaaatggtcttccagttggcattgataattcatttgatttcgggtggtgactgcagggaattttcttcatttagaattgttattttctcatttaaatgggtttttcttcgagtatttatgttttttctttgttggattctttaataaaatctttaaccatcgtagcaaacag

SEQ ID NO: 80481 - DNA, 828 bp, Citrus sinensis
  Intron number 1 from transcript orange1.1g036308m (locus o range1.1g036308m.g) derived from phytozome v7.0 (chr-ID sc affold00072; pos 63284 to 64111)
gccgacatcgcccctaaaaccgccgaaaattttaggtattatttattcttttatctattttccactttaatttaaaaaaaaaatctattctttgttgttgtttggaccttttcaattgctcgcagccgttttataatttttgctgggaacaatcagtttctttagggaagccactgcgttttttttttttttgttgaaaatactttctgcaaaagctctaaaaactcaatttctgaataatatctatgaagtgcttttcttttctcataagttcatgttgaaagagcgcctatccagaaagtggtttagtcaaagaaatgcgaaattggcactgaggcagataatttaattgtttgaaaccattttgaatggtgtcaaaagcagtcctgaaaacattatgagttctgtttagctttgttgtgagtttataaaccaacatttatgtgtttggaaaatcatttttatggtaaaatgtgcgcttttacaaggctaatatgtttttgaatttttgtacttttaggtgtggcatttagtttgtcagatttgtggttttgttgaagttcagctactcgtttatgtccatgtcatatgtaattggtggtggtatgtgtatttggaaatttgtatcgaagagacaatgactgtttctcaactgtacttttatgctgctctcccatattcttagcattattagtgccccctcctgttttctttgtccgattttcaagattctcaattttttgttttactgaaatttctaacttaattaattgtttttgttccaacatggcaggcagttctgcaccggcgagtacaggtatctccttc

SEQ ID NO: 80482 - DNA, 660 bp, Citrus sinensis
  Intron number 2 from transcript orange1.1g036308m (locus o range1.1g036308m.g) derived from phytozome v7.0 (chr-ID sc affold00072; pos 64073 to 64732)
gcaggcagttctgcaccggcgagtacaggtatctccttctcatctctaattacgttttggcaatcaataaatttgactcactaagagtcatctaaataactatgtttaagtgtcttatgaaatacgttttggcaatcaataaatttgacacactaagagtcatctaaataaagtgtcttatgaaatacttttatgaactgcatgcacacccttccactagaatgtatttgattatgccccaaaagttgttggcttggctctgtttgagtagatctttctttattagttggcaggctggttgggtttgtgggtcaatgcaaattaagtttcacaaattgtttttgttatgctgctgtcagtgttttattattgatgttgatatcattactatgcattcaatcttgttggtcatattttctgttttgttgctaccatcatccttgttgcatagtaataaaaacaattgtacccctcttatttgctagttggtattccattttcacataaaaaatagtattgtcctcttgggcaaatttttgtgttgtagttttgtattttgttattacatatttatatgatatgagttctattttcagtgggttcttcatttgtttttctacctcattacagaaagggaggattgcctgttggttacaaggg

SEQ ID NO: 80483 - DNA, 703 bp, Citrus sinensis
  Intron number 2 from transcript orange1.1g028309m (locus o range1.1g028309m.g) derived from phytozome v7.0 (chr-ID sc affold07030; pos 1607 to 2309 reverse strand)
gcacttatagttcatcgaaaaggccttttggaaaggtaaaatatatggctttttctgccccgaagcatattaatcttctattctcttgatgtagacgtaatctggtgttttgtctaccggtcgaaactgctagcaaaatttgtgatagatagctgttatgttcagaattattttctaattctatatatctttagtttaccattaagtcattctatctgacagcttctcgtcttgttgtcttacacaagccgttccatgaatacagggttccgtgtttctgtattttaccatgcatgcagggcagaatgtctgtatttagttgccatagaatatggcatgctgattggttaaattttccttttgtgcatttgtttttgagtgttgattgagtggtctgcctaatatatagctttatgaacacaattcttaatacatatttctccccatcttacaggtccatgtattagcagctcgctttctaaactatagcatatcatattcttaaactccattcctcagtcccattattctctatttcttctgataaataatggctagtattatacattgataatttttcatgctttgaacccctattgtgactgttcttgggtgttcaatctgcatcatgactattatctgacataatttcacatggctttatgtaggccttacactatattgggaaagggtctacttggta

SEQ ID NO: 80484 - DNA, 727 bp, Citrus sinensis
  Intron number 1 from transcript orange1.1g004164m (locus o range1.1g004133m.g) derived from phytozome v7.0 (chr-ID sc affold00685; pos 61601 to 62327 reverse strand)
caggtggtaattaatatatttgatttagtgttttgcaaacgttgttcaagtgcgtttttgtgaattatgagtgcttttgacattagcatgtaattgacattttaaagtgctttaccggaaaaatcacttgacaggtgcttttaccaaaagtgcttaaaagaagactcccagacatatacccttcatatgcaatttccaatagccacttttaacttctatgattaaagtggttttactcaaaaactctattttttttttatttgacaaatacttatttttgttggtttctgcggaattgcagtagttgatagtgtggtttttgttgatgggattagaaagtaacctgttagagcatcttttatgttgaggagtggattctaatttttataatttgtagaaaatcttagggtggtacttgtggttagttcactctagggttggggaaagatttggtgtatacaagaaagaagtaaagatgttatgtggatgaaaagaaattgaaaaagtttctgagtcaatgagaagtgtaattttttggatacggggaagcataatcagtgttattaaagcgtgtttactgcaaaatgttgttattgcttgctagttgatttttgtaacttgcgtatcttcattaatgatttttcatgtgattgatgcttcaaatttgttgacaatatggttgttagtatgcgtttctttctctaatttttaatacttctaccagttc

SEQ ID NO: 80485 - DNA, 505 bp, Citrus sinensis
  Intron number 1 from transcript orange1.1g010323m (locus o range1.1g010323m.g) derived from phytozome v7.0 (chr-ID sc affold00224; pos 230145 to 230649)
atcttggaatttcaggtctgtttctgcatatatttccttcacgttatttatataattaatgaatttgttgtgctcaaatctgtccactgattcaacgatcttggattacagtcttaccttagatgttaaatgcgaatgtttgacaaacacttcaattatttttcaaagattggtgtctattgaacactttagccgaagtccgtatttaaataatgcatgcaaatgttctcacttgagaataattaccacgtatctacatatgcatgttcattataccatagaaatcaacaaatcctagtctcacattggcgtgcttggcatgatatcagtgtatttgattaaatgaattagcgaaaaaaaggaagaaagaaaaaaaggagttcatgtagtataactttcgtgaaaaagtcaaaaaaccgattggaggaaggatcatgcattttattatttatttgagtttaaaatatttacttgtgaatttcaacatgaaggtggagtaacatca

SEQ ID NO: 80486 - DNA, 661 bp, Citrus sinensis
  Intron number 1 from transcript orange1.1g024495m (locus o range1.1g024495m.g) derived from phytozome v7.0 (chr-ID sc affold00004; pos 126972 to 127632)
ttctccacaagaactttccagtttttagcatccgggtatgtttagttaactttctttattatatattcatatttcctgcatgcttcttttaggctttttacctggtgggtctattgagttttcttttatcttgctttaaaaatttctgtattgtggttcatatattttagttttgtctgcgcaaaagtttagacctttgagctgttacgatatttctgcatgttaaggtttattacgaattgggggactggaagagcttctgttttctgttatagtaataaaacatgtcttgaaggatgtttttgtgaagtttgttcgtttatttatttttattattgagttttagggataagaatctggtgtgcaaaattcaagtatgatgatgcctttaataatttatttgttctttttgaattgtcaacttagcgtttctggcactgagagcaatgacgtaatggattaataatgatcaatgtagaatttattcatataacagagaaactctcttagcttctgatgaatttgctctttcggttgtaattattttagctttttagttgcagactttgatttactctctcctcttgaatgtatcgagtctgaaatccaaagttgatacaaagctctcggcttttttctctagagcattgtcctggagctg

SEQ ID NO: 80487 - DNA, 701 bp, Citrus sinensis
  Intron number 1 from transcript orange1.1g003534m (locus o range1.1g003534m.g) derived from phytozome v7.0 (chr-ID sc affold00344; pos 73182 to 73882 reverse strand)
agaacccccaaattttcaacactctgaagtaagttttctctctctaaattcttttaattttccctccggttccttcaattttctccaatttctctgcacctctctctctctatctctcagagtccgaaattcttttaaaatttttctagggttttgacttttgaccattcacccactgcatttgaacttgtaagtaccttacactgttttcaattttctgaatgctaaggttttgttttgtgctattataattgtttcgtttagtgttctattagatttgggattgtgttatattttttaataatgtttttcttttactgctctagtaattttcacttactgaagtgcttttgatttaggggtttgaattttgtgcttgcttgttgcgccgtttttatttttatgtttattattttcaacgtgagaagagagaagaaaatgtaatttcattccattgcttttacgatttttgcgtgcttgcatgtggctttctgaaattgcaatttgagcttttattctaatagataatgttcattttatctgttttcttttttcttcggaaccaccatcaatgtatgatcatttcatgtttgatattgttaattttgtgtgtccttggcttagaattttgatttattttattttgattttggtgattttgttcagggtcactggaattatcgggtttggtccaaattctt

SEQ ID NO: 80488 - DNA, 806 bp, Citrus sinensis
  Intron number 1 from transcript orange1.1g011444m (locus o range1.1g011444m.g) derived from phytozome v7.0 (chr-ID sc affold00010; pos 1864246 to 1865051 reverse strand)
acgttacgttcacctcttttcggaaagtggtaatcccctatcctattaacctaattaacaatattacagcgtcaaaatgtgtataagaaatattaaatagttagttgaatcgataaaatctcttatattgaaaataaaaagctttaagtttgaattccgctcacgatgatgaagagataaatctgcatttcttaagcacaatatgagttgttaggactttttacccaaagtggtgtgtcactattctattgaattgatacttatttagtgaaaaataagtatatttagtaaaaaattacttttaattaaaaatttatgattaatgtcgtccataaaattatctaataatgaaatgtctcatgtcattttcctaattataaaatttcctaaataaggagaaatgatttattttaactttttcttaaatttcacaacttattaaattgtttatttaccaatcttatcatctaaatatctaatggataaatgaattgaaaatatttgaaatataggtggacaattttgcttttaatttgaactgaatttcatgaatcacgtggtcctaaagtcagtcccaagtaaaagctggtaaagggacagtctacataggcctgtgaaatttcctatccaactgtgacggaccaccggtcgctatatatgaagtatctgtaaaaattgaaatgaaataaaagaattcatatgttgatattagccttcatgtttgcgccaaaattgaaatgcattcactaataattttcgcaagaaaattaaaaagagagatgattaatcaattatgcagattgagc

SEQ ID NO: 80489 - DNA, 718 bp, Citrus sinensis
  Intron number 1 from transcript orange1.1g013121m (locus o range1.1g013121m.g) derived from phytozome v7.0 (chr-ID sc affold00004; pos 1044042 to 1044759)
tccattacaccgagtgtatgttctctctatgttcaattaaatttagctttaattatggtttttttatatttttatttttcaaattgagcatgaaattggcttagggtcgtggtgattgactgtttgtggttcattatgattgttttgtacttaatttgtgtacttttagggattaggtttagttttagggttatgtcgtgttatgccttgtttattcttgaatagtaagtttaaagaagctgaagctagttcttaaaattatcaattgatttgcagtgaaacttcatggaattacttatgccatgcttgttcaaatgttattcaaactgaaagtgttggatataagattattcaaattgaaattgttggatataagatgttaataatgcaatgaaagttccgtttggtaaaggcatcgatgttcataagatataaattgattagtttaaggaatttgatctttttggagatttcgatgtttagaaaaaaggatgaacttttttttttggttgatgatatatatgtcttgttggtgattagggttaatttatttgacataaagggtatgattattgtatcattgttggttttgtgttatgtctggattatccgcgcacatgcaagttattataattaggaaaatctaatggttaaatcttcaaattttttatatattccttccttgttcacccttttctcacagtcaataggaggctcg

SEQ ID NO: 80490 - DNA, 848 bp, Citrus sinensis
  Intron number 1 from transcript orange1.1g012138m (locus o range1.1g012138m.g) derived from phytozome v7.0 (chr-ID sc affold00010; pos 777186 to 778033 reverse strand)
aatacagtgcccacaagtcagttcctttccctctctttctctctgtattattattattgttattccatatttccttatttttttcatttctgggtttccttagtttcaatccataacgttggttacacttacttgttcaagtattttaatctgaatattcatgattcaagaaaaaaatattaaaaaaatatcttttgacaattttagtcctacagatgtttgagctagcttctgggttttgcttccctctccagattttgtagtagtgttcctttttgtctaaatattctaattctgcaaaaaaaaaaaggcgttcagcagctcatcattggacaactgtagcatgtgcagcttaagatataacatgtcaattctcaaatgtttattactgggcctggaacctcagtttcaaccctcttccaacttaaagtcagctcaattttagcttatgctgtacagacacacaatgaatattccttgctagatcctctattctacacgtagtctgggaatgtggtaggtacggtaacctggtgtattttgagttatttagcttcttctgaaattgcattttggttggctctgatggtaactaagaggccaattcctctgagaagttcatttatcggttgaaaaaacttaatccaagattgttgcagaaatgatgggtcattctttgccctcgtttgctgcattgtgcccaccccccccccccccccccccccaatttgttgctaaagcttgcaattctgtattttgttgatctatattttgtttgtatcttaactaaagtcacttgtgtttcaaatgcagttaccacccagttccgattgtattctctcaagcaa

SEQ ID NO: 80491 - DNA, 753 bp, Citrus sinensis
  Intron number 1 from transcript orange1.1g046741m (locus o range1.1g046741m.g) derived from phytozome v7.0 (chr-ID sc affold03875; pos 4129 to 4881)
gttgccccagtgtaaagatttctgaggaggagaaagcctaaaggacattggacttgggagtgtgacctcaatgagccatacaaaagaagtcttaaaacaaaaggtacatattcgttaatttactaactattaattaagagatattgattgaaatgtacaatttcttttttgttttcagtttgtttaatttatattaatttttttaactagatttaaaaaatagttcaactcattatattatcatggagggtgtggtttgttttttgcactttatcatattctctttgcctttgtacattcttccaaataccacaacaaatcttagctaaatgttttacttttattaaaataataaaataacttttttacctctgcatggtcccttcattgttgtacattattttcttatgaatattgaaaattagtataataattagtacaaaatccacaagagaccagaaatagtttgtcttattgtgtaattttcttttgttttgttgtaaatttgtctttttttttacccagtagtaatattgtacaattaagcatttttgacttatgcgtcggagggtttacgccgggaaaacaatcggcgtgctctgacctgtttctgtgtacgcaggaacttttgaagaagaaaccttacgagaagagatcatggtcgtggtagaattgattgaggagagatcctggtcgtgatcgaaagggtaaccagaatttcgcattaacaattatattgcaagggattgaaaa

SEQ ID NO: 80492 - DNA, 547 bp, Citrus sinensis
  Intron number 1 from transcript orange1.1g013948m (locus o range1.1g013948m.g) derived from phytozome v7.0 (chr-ID sc affold00004; pos 598733 to 599279 reverse strand)
catcgtccgctctttcctccatttcctcgattctggtcccaccctcgccctctctctcacttcttatcatctgcacgcaagttcatgtttttatttcttgttctttaggtcaacgatcattcaattagttctttctgttatcatgcttagaatctaattaaatgtcggttttatttcgttcaatattttcttttatattattatctcatagtaaattgaatgaaggatttaacatttatgttgataggggaagcttttttgtttgagaaaaataggaaacggacgggaaagagatgtaacttctattttgtgataatgcatatgatggtggtgcctggggttattaacatagtgttaataaacacttaaagttcctgttggtctagagtacctgtctgttatgccatgtctctcccagccttactttgatgcttatatgtggttactgctgaagctttgttgctcagcttgttaaattctcttcttgatggtagctacatgtgttttgatagttgaacctgctccgggggttgatcttgaaggtctt

SEQ ID NO: 80493 - DNA, 584 bp, Citrus sinensis
  Intron number 1 from transcript orange1.1g021546m (locus o range1.1g021546m.g) derived from phytozome v7.0 (chr-ID sc affold00007; pos 2226829 to 2227412 reverse strand)
ctggttagtttcaaatattcaactttaattaatatatatataaagaatttttgatcaataaagaaatttaattatgcaaatttgctcatgcttcttttttatgtctaattttaccaaataacaacaaacagtttgggattttgactttgtttgataacaatatgtatgattatttaccaatttaatcgttgttggtctccgttcgttatttaaatttatacttttttgaagaagcttttgaaagaattaggagaaagacaaaacttcgtaactggaatttggagtagaataggagagtatgtatattatgaatgaattgatgtcaaactgtcaattaaaagtagctaaagtaggtactttagctacttactgtggtttttcattagatatcagataacacacaatagattcaaaaataaaacagattcatatatggatagtagttacaaacacaccctaaaatcaatcaaaattccttgcagcttctggcacgttaattgcttagtttatatctcttatctgattccatgaattatgtatgtaaatcaggtctctgcaaatcacggtgggagaaaactgccaag

SEQ ID NO: 80494 - DNA, 533 bp, Citrus sinensis
  Intron number 1 from transcript orange1.1g001429m (locus o range1.1g001429m.g) derived from phytozome v7.0 (chr-ID sc affold00115; pos 109191 to 109723)
tctcgaaggccgataaactcaacagcaacaactaggtacattaagaaaagcttcctaatatttcaatgtgatcgtcggttctcgcgattaatttatttgattttttttaaaaaattttggcttggattatcgtttgcttcactttagttttttagttacaaaattcactgtcgtttatttggagagtgattgtgttgtgtttgtttcttgattaaatgatattaagtgttttctttttcaattaatctgtttgtttatgcttttttttttctccttcctttgttgttctcgtaaaaaggacccgaacttgcaacagatgtaaagtatttaataaatatttatatagaaaaactttaaggtctttggttttgatgattatgtaggttttggtgttttgagtaactgagttactctgtttttaccgtattatgttgtttgtgaactaagtgctagtggttcttgttggcttgagtctataaattcctgaaaatggctgctcttttacatggaagatgttgactttacaggggtga

SEQ ID NO: 80495 - DNA, 562 bp, Citrus sinensis
  Intron number 1 from transcript orange1.1g047912m (locus o range1.1g047912m.g) derived from phytozome v7.0 (chr-ID sc affold00004; pos 3656437 to 3656998 reverse strand)
ataatcttccaaggtaattagactgtttctatggtttcttatgttgttgttatctcattgtttctctgtttaggctagcaatgttagttatatgcttgcagatttaatcttatcctacaagaaggttttgccgttttgatacttcttcataacttaatagagagttccatatatttttgctgctctgtagttaactttgtatctttacctaatgtgatcacattcttttgagataaactataaaaacaatatcagacagcatcggaccaaaatctgaaatttatgtgattttcttttataagaaagttcttttttgcggcttaatttcaaccaaagcaaatataaggaaataagcaaccaaattatagagggttcaatggaacagctatgacgtgcagtccaaatatttatgctaaattgcttcttctttttttgtgcgtgtgtgtattttaagctgtattctagtctctcttgctactacaattttcttatggttttccatcacacgtgtatgtcaaattttttatattttctaacttacaggcatcttgggttcacgtat

SEQ ID NO: 80496 - DNA, 682 bp, Citrus sinensis
  Intron number 1 from transcript orange1.1g014266m (locus o range1.1g014266m.g) derived from phytozome v7.0 (chr-ID sc affold00004; pos 3099278 to 3099959 reverse strand)
tgattttcctctagacgaggaagaggatttgggtatggttcttattggatgatttatgctagtaatataatagctgaattcaaattgactataaagtcacttgatcacatgatcatggaattttctattacttgatggttgcttttgtcatattgcaaatgcattaccccttatgattttactgaagtgtttactttgatattctgatttcactttctaaatcatctgtgtactgatagtagtaaatattgaaacacaaggacttagtgattctggttatacaaaacaatggtcgagttttagtttcttgtcccggtcttttatttataggttaagctttggagttttctttttttctatttgagacctccttctatgtgctgtccagtccttgaagacttgtgtgaggatgtagcgtttggagaacctgggtatgtacaagatcgggtagctgtctatttagttgttctagtttctctgatcccacttctcctagtagggacattccaaaaccgtagcatgaaccgaaaaacaaacacttcctcctgagaatgagctagcatagttggtggttctgatttattgaatgtatttcttatttttacccacattgcttcataactgtgcactttcaagactttacatggtatttatatgcctgcctcttttttcagattttgac

SEQ ID NO: 80497 - DNA, 966 bp, Citrus sinensis
  Intron number 2 from transcript orange1.1g025311m (locus o range1.1g025311m.g) derived from phytozome v7.0 (chr-ID sc affold00007; pos 1498255 to 1499220 reverse strand)
gacaacagtgaacacaagcgttttgtgaggtaaagcttaattcttttcttcttcttcttcttttctcctctatctttctctctgtttgtatgacatttggtattgggcatactgtgaaggtaaacatgatgtgggagttttgactcgcaattttaatagtctatatggcacaggttctgactgttaaatttgtgggtaggagtctaatatatggattgttgcttatattttatctaaagataccattcagtggacttagaattgcttgtgaaccttggtggaacagctgctagctcatgcaacagaaattatgtagtaatatatctctatattgtgcaattaagctactatatattgtcaattgaagaaacaagggtacattcccgctgtaggctttcttaggttgatgtacaaggtataccttgtagaaggaaaaataaaaagaattaactggaggggtgacaggagaatatggccataattgacaagcctgaggactgtcatttttgtaagtaggtaacaatagaaagaatgtaaataagtatttgtgataggaaaactggaaaaaattgggaaagtaggacaagtagagcaattataaaatgagagaaccagagagtaatttggaaagaggatattccttttgtattatctcctgatggtggtgtacttgactaacatcctgagacaaacaaacaatatgctaacatataatatcatgcaaaagaagaacagagccaatgaaaattgaataattgttcaaaattcgattgtaagaacagtaaatttcataaaattattttatataacagctttcgtacataaaatttggttcttcttcttttattgtttgcttttattttattttatctgattgcagttattacatactaggctctgtacatcatgccgctgagatccatacaacgattgattagtggttttctttccatttcagggaagttc

SEQ ID NO: 80498 - DNA, 352 bp, Citrus sinensis
  Intron number 1 from transcript orange1.1g025311m (locus o range1.1g025311m.g) derived from phytozome v7.0 (chr-ID sc affold00007; pos 1499484 to 1499835 reverse strand)
ctcaagaactccggcgtcgacgcccgctctctcaagtacctgccctcttctttcttatttatttatttagttatttcttttttcaagtttcaagatttaattatttaggacttggcataaatgaggattatcagttagaaccctaatttcgtttaatgtttgagcacttaaaaatttgatttttttttttcattcaattttcagtggtggttttcagttaataataaactgccccaataattggcttggactttggcgtattaagcgattgcctgtttgattcttttactaagattaatcatgcttgcttgtgtatatacatctagggacaagcttgagttgaaagcagcta

SEQ ID NO: 80499 - DNA, 712 bp, Citrus sinensis
  Intron number 1 from transcript orange1.1g004799m (locus o range1.1g004359m.g) derived from phytozome v7.0 (chr-ID sc affold00115; pos 173053 to 173764)
caattttgccggtcccctagaaccttcattttcaggttcatttattttgtttactctaatctcttcctttcatatataattcgtaaattaggttataaattacagtttttttgttttctttatacttttcaaaattttgatgcattttcatgattacaaagttatttaatgttgcttttatggaggatactttttttttctttattttgttgatgataaatgctaaaatgcccgttgctgaacaatcttgatgcgtttttatgattgcgaagttacttgatgttacttttatgcaggatattgtaattttaattttgtatcttgttgataataaatgttaaaatgttttttcccaaataatctttaggtttcaagtcggattacaaaaatactcttagagtgtttttggggaattgttgaatgtggttgtaaatctttagcggcttatgtgagaaaaacattgcaagatttctccacgtggtaatcttgaaccttcttgtagagagtttggattatatggctgcattggtgcaaaatgattacttattcttgtattacaatttctgaattttgatttctggaattatgacgtttatattttgttttttaattttgttttatgattcttctatttagtagagagctttctggctgatttgattatttgtgatattcagaaaatcaggagcagaaacaggttaggttcttggac

SEQ ID NO: 80500 - DNA, 213 bp, Citrus sinensis
  Intron number 1 from transcript orange1.1g005154m (locus o range1.1g004038m.g) derived from phytozome v7.0 (chr-ID sc affold00271; pos 140814 to 141026 reverse strand)
gaaaagcaaaggcgtcattgtattgaaatttttgatctttattcttctgcaacagtgttatttttggattcttactttaatgtttgcttgtaagaggatgagtttttattttgatggttgttttggtttctgggtttaggctaacagcagaagtggatttcatttatcttttttgcagagtcaaaacgtgtgatccccttgaaagattatcgg

SEQ ID NO: 80501 - DNA, 923 bp, Citrus sinensis
  Intron number 1 from transcript orange1.1g013107m (locus o range1.1g013107m.g) derived from phytozome v7.0 (chr-ID sc affold00197; pos 61741 to 62663 reverse strand)
ttattaactctgtaattttgcaggtacttttagttacaaggtttttttttaatttattgcttcgtgccgttatggttagtaatttgacgtgttaaatgcttcatagtcaagattgtgagtcttccattggggtttatatgtgttgctatcagttttaaaatttgtggaccattatgtataaccattgtaagtatactgtgttagaattagaaagattggacttttttttcctttttgtgttgaaagacaaactacctatgcttacatcaaatttcaaatttgtaatggtgagtttttagattacatttggactcgaggctgatgatgacctactgtaaagaaaccccgacattagaagaaaatgattttctgtgattggattgttgtttaggtgtataagtccttgagcagaatgtagtgtatgccgatttaagaccacatgtggttaggttttcagttacacttgtggattggtcattttactggatctccacttggaggtatgagacattcaacgctgtgaaagtggtgagaaacttatgcttggagttttggtacagcaagaagatgcatacaaacaggaatgatatgcatgtaattgcacttcaaaataactaggctctgaaatgcatggcatatttaaccagtgtatttagaagtttacttaccaaatgggaataagctgtttcatgcaatgaaatctaagtccatggagaggagccaagtcttctcaatccaattgacagatcggaatcagtaaatcttatgctggacaattgaatgtgcaaaagcaatttactatcttactttcattagtttatttatgaacctgccagtccatgattgcattgatttattagaatcactccactgggtcagattcttgtataatccttaacaggatcttgataactttatccagg

SEQ ID NO: 80502 - DNA, 709 bp, Citrus sinensis
  Intron number 1 from transcript orange1.1g031238m (locus o range1.1g031238m.g) derived from phytozome v7.0 (chr-ID sc affold00026; pos 147532 to 148240 reverse strand)
atcgtaagtgatttctataagacttgtcttttcattgattcaaagtacgaatgtaccactatataccatgaagtggagatacctttgccaagttaggtgattgtgctaatgattaatggagttgatgaataaaaattgcatattgtgtttcttcttgctgtgatttattatgatgatcagaactatcagtttgttgagagatgtggtggatgaactgaaccgttacttaatatactgttgacggatcagtgtaggtgtggggatggggttctctagctggttgttatgatattgatgcagtagatgggatagtcaaatgacttgcaacataatataaagaactacaataacttttgctcaaacaaaatataaaatattaaataactgtctccggtactctgtcaaattaagatcaatgaacatgatgagctgatcatctggtaaagtgattgacatgttcctttggtcacccgagtcctcaagaatttacatctttcctttgtgcctaagatgtatggtttgagttttcttttgtggatataagttccaactagcatataattaaatatacttgctgacttaaatgtcgttaatactgttgggacagagcagtttgtggataaattgtttgcactctggatctttgtgtagctaatatctaatatttgatgcaggtagaagggaaaacagttaaggcacagatttggga

SEQ ID NO: 80503 - DNA, 623 bp, Citrus sinensis
  Intron number 5 from transcript orange1.1g000773m (locus o range1.1g000760m.g) derived from phytozome v7.0 (chr-ID sc affold00175; pos 90043 to 90665)
ttgagagcagtctcatcactgactacaccctcaaggtaagttattggtttctaatggcaaatttagagaatgactaaagtttaagtccacacacacacacacacacacatatatatatatatatataactcagcaatcaataacttgggagaacaattaaaaacttaatgtctttatcgaaaaaaaaaaaaaacaattgtatctgataatgactgtattgtaattgtagacacacgctgacaataaataataattgatttatttgagaagtccaacgccattaattaagaaatcatcaaattccaacaatgttagaattttttcttctcagtctcaccgactcgtgtggtgggctgccgactgctgtccaaccaaagtattttggtgataatgggggccccttagaagcatacattcatttgtattttgatttcactttccaataactttttggcttggcggtgatcggcaaaattttcaacttctcagttcaactattaattattaaatatatcctcataaaattaatatagttatatatgattcatctgattacttaatcatgaatgtgcttatttattgttactatgtgacttctgaaaacagattttagggcttgatat

SEQ ID NO: 80504 - DNA, 867 bp, Citrus sinensis
  Intron number 1 from transcript orange1.1g018606m (locus o range1.1g016157m.g) derived from phytozome v7.0 (chr-ID sc affold00004; pos 1160858 to 1161724 reverse strand)
tgaactgaatcaggtaaaactcttaccatgtttattaatgtatgcgttgttgcttttgagaattcaaaaccctagatttggttaatggcaatcccttgatttaaaaaaaaaaaaaaaaatctctggcttagaagtgaattgttttgctacttgttagcgacaagctaaagtaagcaggaactttgtattggttttgttgtgcctggatagagtgaataatagaggaaatagcagacactattgatctgaaatgaaggtgtactcgtgttcttaattttgctttaatttcctaagccaaggcctaaatactatgatgtcatattttgttgtagcatacaatgtggagattaactgaaagttgattgaaacagtttgactgcttgattatgaagtatgggaagttagccacattttgatgtgtttatgctaaattatgaaaatgaaggaaaatggggaacttattttctttacttaggtaatgaaaccaatggatttgctcaggcagaaatagcatgtggtggtttttgtgtcttctaattgatttgctatcactaataattgccgattcatacatttgatttgtatcatataaagtgaaagccatattcaggaggtaacaatcatcttctatcgttgaaacagtttattatatgttctaaattgaatttctaggaagttctgttagtgagaaattctttatttattatcttttatcgtctgcagtgccacgcctgagttggttctatgcttcaagctgctgtttttgatgttctaagggcaactagatgctttcataaattttgggagccattctctgtacccattacctgtggtaattgtgtttttcatccaggaatttctggaact

SEQ ID NO: 80505 - DNA, 699 bp, Citrus sinensis
  Intron number 2 from transcript orange1.1g032126m (locus o range1.1g032126m.g) derived from phytozome v7.0 (chr-ID sc affold00025; pos 660084 to 660782 reverse strand)
ttagattgtaggtacttgtaccttttatttttatttgattttttatttctgcttttggtaatagtgagtcatattgcaaattgtttgttctagggttttgaatagttcttttgaaagcctcatagttttttggtggttagtggccgattctggagttagagctcgaggagagtgtagttgactgttattttgtaatgtgacttagagatttcaaaggaaataactaaatgggatgtattttgatgatatttgcaaataaaagaaaaagttccaaagttcccaattgttggcttgtgggtggttgaccttggacaatttagttgaccgagatgaattttaggggaaattagtttttgttttgaagttttggttggtaattgttctagctattttgtttgagttcttttattctcatgagttgcctttaactggaagaaaaacaaagaattaggtcatataagtggttctcttccataaagagatgtgtcgatttcattgttttttgactgtattgcctatcatggttatctcttgtatgccattgaagaatgcttgatagttttcttttgaaagtatccttctgttgctttgctatttgttgctagaaaatccaattgattttataacctattacttgtgaaggttgtatctgatcataatatagaaattgctgtctttgtttttgcagaattaggctgg

SEQ ID NO: 80506 - DNA, 384 bp, Citrus sinensis
  Intron number 3 from transcript orange1.1g039121m (locus o range1.1g039121m.g) derived from phytozome v7.0 (chr-ID sc affold00611; pos 72187 to 72570 reverse strand)
atcgttagcgaggtaatttctcacccttaacccgttttgattttctggttggttggcatagctttccaattttgtgtctgattaacttgtgctcattttagccttgaaacatgttttgttcgtctcttgattaatatcctgctgttcaatttcaatttggattttgtatgcatattagtgtgtgtgcttcttatggctttactgtatgcttttagtttgtctcttgcgttagaaaaatgtcttttactgcttacaactattataatatgatggtactctttccggcaatgctgattgcttttgctgttcattatttttatttttacttttttctcttcctcaacaataggacagaaacattctggaaacatttgatagagcaaa

SEQ ID NO: 80507 - DNA, 1049 bp, Citrus sinensis
  Intron number 1 from transcript orange1.1g022215m (locus o range1.1g022187m.g) derived from phytozome v7.0 (chr-ID sc affold07925; pos 537 to 1585 reverse strand)
cttaatatacagcgttaggtgagtttgatggtgttaagagtttgttttgggtgactgttttactttttgtggaatactttcagtatagagaaagttattgttggtttccattttctgtagttgactcacttattgtgctctggctttgtttgaggttaaatgcttttgttaggttcttacatataagttcaatttttgcatctgcagattctttctttactgcatttttaggatacagggcagaatacagccttagataggcaaaatgtgccaagaaaaaaaaacattgtcattcttctaggacatgtgagcctccaatgctcactggcagattttcggtcaaatagttcagtgacaggtttaagatgccttgtcttgaaagatttgttagatctggcacttccccagataggtcattgccagaaagtagtaccatgcaggtattttgttccgttggttgctaccgacatttgccattcatgtcatacctttgaagattagatgccataccagtccaattcctacatgaggaaattgatcccacaaaggtttattataagtagagaggagggactgtatgattctgggaaatgttcccttaaaacaaatttgataatagaagtaatagcaacagagatggggcctttttactccccttgttggagtgtcaccatgaactgtttgacatatctgtaacataggcatctggtatactatttcaagaaatctggaaattttcttttcaaatgattatgcaagtggacatacaaattcatatgttgaatgtcttcaatggatggatactgctcaccatagtcttacagctactaggggtttaaataaaaatttgttctttcagcatggtttaatctgttagctggttacagtggtgctactttaacctctgtttcttataggaaaggtagcaaaaagcaattacattgtaagttaggtgttgcttccactttttgctttgcttgcaaatttaattttctaccttccttctttttccaggcataatagtctgcaatatcttgtcacttcacaga

SEQ ID NO: 80508 - DNA, 948 bp, Citrus sinensis
  Intron number 1 from transcript orange1.1g041017m (locus o range1.1g041017m.g) derived from phytozome v7.0 (chr-ID sc affold00025; pos 877647 to 878594)
cgggtaccgccggcggccttatttcatcttagctggtaacgaagaaatttcagctttgaaatttacgtctatattgctagcactttaaataatgaaatgaaatctgtaattgcatataatgttaaatagttaaactatttaaataatgttaaatagttaaactatttaaataatgttaaatagttcaatctgatgtgtgcaatataatgaaatgaaatcttgtgtaggatgctctaataggggtgtctgtaatcgcacggtgtcttattcatctcgtgttaaatttaaataaacatggatacgacccatttattaatcgtgttgaaatatcaaaatatggttacaacctgtccatttattaattgtgttgagctatttaacatatttaatataaaaatataaaaattaatttaaaaataataaatatgtcaatattattcttaaagtaggtcatatataaattaacatgacattaatataacacgtataagtttataatataatatggatatgacataaataattaatttagcgtgagtatatatattagttatttttttcaataagattacaacatattaattgatattcgtgtcataaacatgtaattatgtagaggtggtccaacatggatatgacagttttttatcatataatgttgtgtcaaccaatttattattcgtatcattaattaccaacacgaataagacaaagttgtgttgtatctgtatcgtgtaattgtatcatgacccattttgctaggcttcttgttagattttctactcctaagccagttaagctttgataggctatgttgtccttcatttagctagcagccctgcaaactggatgtgcaatttcacggggtattcaaaagttgcttcattgatgcaatctcatcagatggttccttccatgatgatttcaggttgtctcggtgtgttctcc

SEQ ID NO: 80509 - DNA, 257 bp, Citrus sinensis
  Intron number 1 from transcript orange1.1g016532m (locus o range1.1g016526m.g) derived from phytozome v7.0 (chr-ID sc affold00151; pos 176933 to 177189 reverse strand)
ttcccatcttcatcttcgtcttcgtcttcgtcttcgtcttttctaccagtaagtaaatttttttttttttttttactcttagggtttcaattttaattgattgtataacagtagggtttcttaaatctattcaaggcttacgatctgcaatttcccaatttgataatcaaattattttgttgtgttttcttcattcttttctgattcttttttgttttctcctttcaaactagctctatacacattcaaatcaattg

SEQ ID NO: 80510 - DNA, 965 bp, Citrus sinensis
  Intron number 1 from transcript orange1.1g032595m (locus o range1.1g032595m.g) derived from phytozome v7.0 (chr-ID sc affold00319; pos 185061 to 186025)
ggaacgtatgttcttcacattaatttccttctttctctttggtgccgctctatgttgcaaattttacacctttaaaattccactataccagaaacatatagctggcacgaaaattaaataaatcttctgcactccatttaaggactaaaaatggggcaactattatgattctgttataaagattgacctgatatctactgggtgcttctaaactgatattttgctgagcatcctttcttaatctatgttctgcattggttatggtccacgtaggcttaacaatagatctctggccacactgtggatgaggacttacatcatagtactatacatttcaatttttactcgagaaattaaatctgacaaaatttcactttattctgttagggatattctctccagttttgaaatgctcctagatgctattacgtgtatcctttcagcctagaattcacattgaaattgaacattgtgcttattttttcactatgctctgaatttgagattatctaaacctctttcttgacttcatatcaacttagatttgttaattaagattttcttaagccgaaaataatgtatacagcgcaattctacatcaaggtatcgaagcacaccagttgaacaagccaaatatttgtctttaaagcacatggtcccaggaaaacatcagtgtatagtttatggcatatgttgaaaccattaataatattatccaaaatataaaacttgagaaaaatttgtgcttgaaactaaacaagtcaagtacgtttgacatttgagttgtgcttagtagaatgataaaaacttggtttgttcgcgttcctacttttacatcacaaatatgggaaatagaataggtttctggaccgttcattcttcatttcaaccttgatggattaaaatcaactgacaaaagacttttttgtattacagacttctgcatctgattctgttagctttta

SEQ ID NO: 80511 - DNA, 649 bp, Citrus sinensis
  Intron number 2 from transcript orange1.1g020536m (locus o range1.1g020536m.g) derived from phytozome v7.0 (chr-ID sc affold00117; pos 250924 to 251572)
aagtgagtcttccttataacctttcctcctctttgtttcaccaatagcaagttttaatttgctttgacaagaacatctggctgtgtagagataaaaacatgttggtctgtgattttgtaatggctgcttaatctgttcttctgaaaagaaatgtttttccctctacttcagtatcaatacaaactatgatattcagtgaaagctataagttacataaagtccaatttttgtcacaaggacaagtaattgaactctcatttgatcattaatcttttgatcacggtcccaaatatacacggttagtacaagccacatttgttttgataaaatcttgtctgtcatataatgatgagagtgcttttttggagttggcttctgcagtgatttttttttcttttatttctcttttataccacgccaatttgacatggtataaataaactaatctgccaatttgattacttaataacatgttgaaagcaatttacacacaaatccaaaccatgattactgtgtattttcgaatctagcttcctgctgcagtgattttttttcctcttttatttttctttttctgatctcgacattgttgaggaagctggtgatctggtttctaagttctatctccctttcaaacaggtattatcta

SEQ ID NO: 80512 - DNA, 869 bp, Citrus sinensis
  Intron number 1 from transcript orange1.1g022779m (locus o range1.1g019444m.g) derived from phytozome v7.0 (chr-ID sc affold00004; pos 2692965 to 2693833 reverse strand)
tcgaggcaagactttcgttgtttctcctctctctggtatgttagttatctcctatttcttctgcggccagttgggaagcgtataattgttatgttgcttcttctgattagccatctgttgcatgttactttgcaaggtgcttttgcagttcttgcttaattaattaacataagatatggacattcacggtctagattgactcggtaccggtttgatctcttccatgttaattttttaaaatgttgcgattgaggactgtttggtattagcgtatccatattgtagttgggtaactataacttttaaactacaacaaatatttgataaaatttcatttaaattatatttatatttgtggtaatagtactaccaaaaagccaagccattgtcaaggaagttggattatgaattatgggaaaaaaataccaagtaattcattcgtggatgtattccattccgaataagaaatttctggtgatacaattttttgtgcaagcaaataaatacgataacatgattgattgatgataagaatatagtaaataagtaaattttagacaaaaatgtatatgcgtcaagagatcatttaaatctaccaaccttttacctttgatggcatacttgtatacatggtaaattctttttggaaaaatttacaatgacattcatggatcaccctatatattatttatgggaacttgtaaaacacagattagaagcgtatatatgctgcatcattgagtacgatatatgctgtaaattacctctagctagtaattccattttgtatttgcctaattacttagttgcatgcgatactcttgtactctccttgcattgtttctcagttgtatcatttgcagctctgg

SEQ ID NO: 80513 - DNA, 817 bp, Citrus sinensis
  Intron number 3 from transcript orange1.1g019810m (locus o range1.1g019810m.g) derived from phytozome v7.0 (chr-ID sc affold00004; pos 2150576 to 2151392)
taaaaagtacaagtgaaaaggttggtattattgtctgtttggatagtttctatattttgaattgacttgtttcagaaatgttatgtgcttaaactttgagaagaactttcacttttgtcctacttttttgcataatcattaatactgatcttttaccctttattcgcactagctataattggtgctatgtcaaaggtaagtgcatatagatttgagttgatttgtttattgtatatttgtgtgggttttctttttggtaactgtgttccaagcatgaagtgtcattactagacatgtcaatacaaaaatttcacttcatcctcggcaaaatacatctttccttaacatcatatattttagtaaacttcaagacgttgaaccacccattatgattgaaacttccctagaagacgcattgatgaaaattcacatatcaaaagattttggtggtataaacatgcctgttgcactggtacagataatccatttggtctatagagcattgcccaatcctccagtaagatctttgacatcatataaatttattttttgtttttccaccagagtgcctcctttcgcttttcaaggttttctttgctctgcataagcataagtgaatcttcccttttcttttgagaatgccttggaaatctctccttacagaaataaagatgaatacatattatttttgttaatatgcggaaatcaagttgaatacgtattatttttcttaacttttgtagtctggttctcctttaattgtatgtaatgctgttgctatcttggcctatttttccaggatttgcgttccagaaac

SEQ ID NO: 80514 - DNA, 418 bp, Citrus sinensis
  Intron number 2 from transcript orange1.1g043081m (locus o range1.1g043081m.g) derived from phytozome v7.0 (chr-ID sc affold07728; pos 447 to 864)
catcattatccaacaattttccaaaatgtaagttaggtttgggtgatgaggagtttgtgtcagagtagttgttgatgtttttcttgtaaatattggtgcggaaaatgaataatccaactattatgccttattaccactatttcccgtaagtcaccaacaaatttgttttttattattttattattatattgggatattagattggtatctggtgcagtcatccactttgatgtatttgcaggtttgttggagacatggcagaaaaagaggagccaacatttgatccaaatctagaaggaagccaagatgaaaccttacaaagaagaatgacctgcagagaggagctagtgacgacactgaggttatgtacaattcctacggagttccagttggaaaaaagagaaacaatctgaggaac

SEQ ID NO: 80515 - DNA, 738 bp, Citrus sinensis
  Intron number 1 from transcript orange1.1g038976m (locus o range1.1g038976m.g) derived from phytozome v7.0 (chr-ID sc affold12404; pos 44 to 781)
ggatattacaagcttccccactctcacgacgctaagtatttttcaaaaaccctaaaatttattattttattgatttattaattaaatatttagattaagactaatgtttgtaatttaaaacgaagaagtgcgttatttgtttctattgcgaatcaaaatccttttttttttaaatgttgcagatttagaaataagttgtttttggacagtaggttgctgattattaattgcctgttggtacatagtcaatctgaccaaaaaaaaaaaaaaacaaattgagttgtttgtatgcttttaggatttattgaggttaatgtgatgctacagcttgttttgattttctcagaaagaaaaataatttgagaaacttattaggtttgtaagtttactcgccttcttaggtataattttgctgtgagatatgaaaaataaaaaaatgagttatgtatggaatgcgtataacgattatctagtcttttgttggcagtcttatttctgcttagtaaatttgaatccatatatatgcactgattatctaggatgtagtgttcagtgacaaaccatggatgcattgaacgattatattaagtgggtaaattatcttttttaagttgtcagtgcaattaattcttttgtcctgtgatctctatacttttttgcatcttgtgtatgagtttgtctttgtgaatcttatttattttcaattttcactgagcaatcatgcttcttgtttgtagg

SEQ ID NO: 80516 - DNA, 825 bp, Citrus sinensis
  Intron number 1 from transcript orange1.1g021739m (locus o range1.1g015722m.g) derived from phytozome v7.0 (chr-ID sc affold00007; pos 1721555 to 1722379 reverse strand)
catttcttcttcttttgttgtttaaggaagccaaggttcgttctttttctctctttgcatccgtattacggtatttttatttttatttaatttaattttttttgtatcaggatcagcttttgttattctttcaacttgttcattgcgtgatgtgtattagcatctgggtttaaactcgctttgtagttttagttttggtttcattgttatctgccttttgggtatgtaaatgtttgtgttctgttctccatcgactggaattttattagcgtgtatttgcaatttgcgtgcgggttaattatgacgcatctttgagctccagaatatagtttcaagctaatattaaaagtctagttttgttggttttatcttaaaaaccgttggttttagtaaagtcataatcatgtttcctctgtttaattgctatggtggatacttaatgtaatctgttaggcatgcctcacatccctttgggatcaaatgcatgtgaagttatatatgaggggtacttttcattttgtttaatgtttagtcatttgattcaagaatcttgtgtacgaactatatacatcaaatactacgggagattagtgttagcccggtatgttttggtggttctttgattctcccaacatgagatcaattgttacaattaactatttgggtaactcattcaaattgtttagcgatagcattatgacttatatatcggagatcaccaatgttatggagtatgaggctcttgcaaaggagaaattgccgaagatggtttatgactactatgcatcaggtgctgaggaccagtggactcttcaggaaaaccgt

SEQ ID NO: 80517 - DNA, 365 bp, Citrus sinensis
  Intron number 2 from transcript orange1.1g043057m (locus o range1.1g043057m.g) derived from phytozome v7.0 (chr-ID sc affold00716; pos 50699 to 51063 reverse strand)
attatcttctggtacagaggaaagggaggatagtatttctttcatacttactattattgtgatgcaatattcagtactggacttaaaggagaatacgtcccctcttttatttgtaactatagtttatatatagctgacatgagccaagttaagacgagtagagtggtgttttcaatcatgaaatgcaatacgatgtttccattgaataattgtctctacaaatgctaaatagtttaaatggatattttctctgttttgatttttctgtggaattttcttttcagtttctgaacagtcttaattgttgcgctatatgaagatgacatggaaaataaattaatgttgactaagtcctccttgagacg

SEQ ID NO: 80518 - DNA, 887 bp, Citrus sinensis
  Intron number 2 from transcript orange1.1g033795m (locus o range1.1g033795m.g) derived from phytozome v7.0 (chr-ID sc affold08632; pos 1567 to 2453)
ccttgaagcatcctaatataataagatttaaggaagtaagttaacaagtttccttaattcccaagtgacattatcttttactgcatgctctttttgctttgtgtgtgtatatatattctcttagctccatgttcaacaacaggtattgaagggtagtgcttttgtatcctcctcaaaatagaactctttcagagaatcgcagcgtctttcctagcctttctttttttaatattagcctatctataattaggatatcattcacatgttaacttccttccttcttcaattttcaagacccttttttttgttttttgttttttgttttttctttccggttacgtactccggtattactaatttttcacttcacagttttcttccccacatatactccgctaagtattcttgattcagatatgaatatgttaattaacatataagaaaactattttatctaagcttttgactttttctatatttgctatctaatcaattaatttacattctcataaattgcttataatataaaataatcactcaaagccaaatatatttgaaactctcaagtcaataattcgttatagttctattgttaagctaccaccctatatacatatgaatgaaaattcttaaagatgtggttaattactgacttgaaacaattattgtttcagttcgctgagtcgctgaccaagaaaacatactttaatatacatgcttgaacaatattctttcattcggttgaagttcaaatcaatttttctgctaacgaaagcggtagcttctccttcgtgtagtaatcagtttttaaggtctatgttattaataatcaatcttgtacattatattcaggtctttttaaccccaactgaactagccatagtcat

SEQ ID NO: 80519 - DNA, 566 bp, Citrus sinensis
  Intron number 2 from transcript orange1.1g036876m (locus o range1.1g036876m.g) derived from phytozome v7.0 (chr-ID sc affold10437; pos 1548 to 2113 reverse strand)
aagttcttacatataacacggtaagcagtttgttgtgaattattattttggaatattctagcatttacaaacttgatgtgaatatatttatattcgcttgatctgataagtcttagaattaatagaagagtataaactataaatgccatggcaactcgcataatcgtttgtaagcataatttatatgtcaatttgcatagtacacgtacagaatttttatgttaagtattacttgtgttattatgtttctttgtacatctgcaatcaagagtttaactgcctagcaacaactataaacatgaattattgaaatttgattggagtaatgatagagagcccacctccaatcccacataaactccacgtaagaataaataaaagttgaattaataactaagctacctctaattgtgaactagtgacaaacttgccccaaaaatttgtcttggtggggttgaagtgcgattcattggcggaatgtgcacatcatttttcatttgattttaactttatttttttatttatttttaggggacaaaaaaaattgagggcatctgtttggatat

SEQ ID NO: 80520 - DNA, 1024 bp, Citrus sinensis
  Intron number 2 from transcript orange1.1g000489m (locus o range1.1g000467m.g) derived from phytozome v7.0 (chr-ID sc affold00013; pos 909834 to 910857)
atatttatgtgagttaattgaatgcaaatgtgactgattaaacatgtgtatgtgtgtgcctgggcctgcgcatgtgtttagttgtgcttatttaattgacaagttttgcttgcatttggtttgtatatgattaatcatgaagtcggtctaaatcgatattcggcgaatggagtgagttaagatatgaattcttagaatctcaagtaatgattgtgtgagcaccaattttgattatgatgctgatttagtgatttgagttgtacctattagttaatgttgtaagaagtggtgctttactctttttcagaactcaaattgaaagtttatatccatgttaggcatgccaagctggactttttgcataaaagtaaaggctcgtaataattatggtgatctgcggattaggaaatggacagcggaaagctgaacgtattgtgaagaggttctttttaacagttttgcctctgataagtatgctattaattgcgtcattatggcttggtttgcttaaacccttttttccttttgtcatgctcagttgaataaaagctcgtgctgctgtctttagtctcccccccctccctctctcgatattgaattgcccttggtcattcaattaagcagggtgtaggtgtgttaacttagggccaactaagtggttaagatgtgaatgggttggtacagtctttaggctgaaacttacccacttcaaagataatatttcagatttagttgttgttctgtattgcaatttcattaataattttagcgtttaatttcatttttttcatgtccgttaactagtcaggaagtcaatggaacactatgcagattattattgccctttagaatgcttgatttacatgggatagttgtttgttaaaaaaaatctctcacttttaatctctgggacttcatgaattttctaagtgccatttctgaagattgatgtcagtacaaaatgtattcctttttggtgtctttgatagacgtacaccggaagcattttgatagccgtcaatcc

SEQ ID NO: 80521 - DNA, 908 bp, Citrus sinensis
  Intron number 1 from transcript orange1.1g020402m (locus o range1.1g020460m.g) derived from phytozome v7.0 (chr-ID sc affold00013; pos 1897240 to 1898147 reverse strand)
gaagcatttcacaagtcttttggtgacaagttcaagtttgtgacttttgcttttcttcatgttttctttttccccctccgtaaattttgttcctttatgatttttggctcatgtctgctgaacaaattttgagctttgacactgagagctttatgtttttagtaatttttttttaccttttctaagtaatgttggatgattggtggtctgttcttaatttatttatgttaggcaccattaactttttttatgcttgccatggatgcacaacggggattgccatttgacttatggctcactgatatggcagtggttcagatctcaatgctttgataccgtgtaactaattgatataattacagctcgacagtttcttcaaactagttgacagttggagacaagaatgaacatcctgttagattagttggaatctggtttgataagcttgttcaatgtaactgcatgattggcctgccgatattaagtgacttgctggtcttattaaggtttcaatgttttggttctttgtatttaaacaccattatccaaagttgcaaactatgagacctgtctgccttctctttatttggctaaaacttcatccggtgtgacgtggagcatagaagtattatatacatttacttttgaggtcattatgtttcttgcttgcttttatttcaatcgaccctttcataattccctttgttcctttttccttctttccctctaggtgattgaatgcctttacatgaactcctttcattatccttttctgctgctagtccaccaatagagctgaccttcttaataaaacttagaataagaaaaacgagtacgattgacattccttcaatttctttttcctttgaatagggttcctactgtaggaggaaaggcgctcgatctgc

SEQ ID NO: 80522 - DNA, 905 bp, Citrus sinensis
  Intron number 1 from transcript orange1.1g017432m (locus o range1.1g017432m.g) derived from phytozome v7.0 (chr-ID sc affold00171; pos 194902 to 195806 reverse strand)
cttggtcttggtgacgtatgcttgtctttcgctaaaagtgtttctgcattgattttttcaaattaaaaaggttgttaatactgttgtagtactagtatccctacacagagatgtgtaacatctaattttccactcctggttttgcatgaatggaccaccaaaagtattgaaggtggtgcctgctattttgtttggtcaaaaagcattagttgagtttgtaagtgcaggatttgtgttagactgtgagaaacttttcccttttgagaattgcagcatggagttcatcatgctgtttggtactggcgtactgcattctgggtgcatctatcttagctttattgctatgcctttgtcttgtattatgctttgtccatatgctctgtgtctttattattgtcctagagcttgttattactgagtcttctgtttgaaaaaatgatgattgtaagtttgagttgatatctagacaagtccttttatctatgcttgtggaatgaataaccaacatgatagactttctgctctataatttcacatcagtcattattatgcatttgcagccttttcatgatctcgactgttttaatagcattttccttttggcttgctttccatctttcaggctgaataagtttttctttttcagaaatttgtgcaataatttcattcttaaaccaaaacttaaaacaattaaaaaataaaaaagaaaaccagaatttatgataatccaggtattatgacctgtttttgctttttgtagagatattagtctgttggaataaatgaaataaggattggtttgtctgtcattagattcttcttctatttcatctgtgtgaggcaagctcttgtatagttaatgtctaaatcagtgtgcttattcctgttatcttttattgtaggca

SEQ ID NO: 80523 - DNA, 967 bp, Citrus sinensis
  Intron number 1 from transcript orange1.1g020899m (locus o range1.1g020899m.g) derived from phytozome v7.0 (chr-ID sc affold00006; pos 1178551 to 1179517)
actacaccgatcaaatcatcaaaggccttatactggttagtcaaactttaactcgatccattcatcttttttttttcttttaaattaaaacaatcaattaattgattaaattgctggaacagtactctttatatcaaataaaaactgaaaaaagaaaatagaagttgatcaagttttgatatctcaaacattaaaatttatgcatccacatcctggagaagtttgtggtttgtgattcatgcatgaattagtgtgtctataataatcgtggctatcgttttgtcgagcttatccttgaaagcttggacctgaactatgcgcgcatggacgggtaacttcgaacttgagagtatcatgatagtgcaagggtgtcggacgtcgtcgtttttgaaaaaaaaatgaaattggattctagccttttgtttgagccgcgataccgaatagcatataattctccactaattctgaataattaagaaatttgtttaagaagatataaaaccaaaagtagaaacaaaattttgttattcgaaatttaaaaatgagaataattatataatttataaatatttttctaagaacgcaattagtgagaaggtgctttttgtatcataaattaaatttaagaaaaaataatataagaagaatttgtatgttcccagttctgaaagttccaaacatctttagccaatcaaattactacatacccatgtcttctattgactattggcagatatatgtatacatatatattcaagatcttgagttttattaaatttcggaaattttagtctaatagaataatggtatatggtgtaataacttttctagattttaataaaattcaaatttgaatttataatcttgaattggataattaataatatgcatcagcttaatttatccgataaataaacgaagggtcgaaagcaaattaataaatgtgtatgcataatgcatgcaggtg

SEQ ID NO: 80524 - DNA, 730 bp, Citrus sinensis
  Intron number 4 from transcript orange1.1g006279m (locus o range1.1g005764m.g) derived from phytozome v7.0 (chr-ID sc affold01063; pos 21611 to 22340 reverse strand)
ggagaaccattctgattgtcaaagccaaatttcaggttgtattctatatgtctactttggtcttgctaggatcaaactctttttctttcttgattattattattattattattattttttactatcaaaagcaattattttatcatctctactattatcagattcctgtatctttcctccagtgttcattcctacagaatctcgatatgaaattctcgtgcctttttttccttttcttgtttataaaacattttttttgttatttggtgccttgctatataaattatctatctcttttttctttgctctgtttttctttttaatatctaattgtttaagtatcagtcgctcttaaatttgggtgaaattctagaattttggtgtgaccatgaattagtctaggacttgaagatgagctcaggtattgatttttgtgatggaaatgaagaaaagaagccatttagaaaaatccctgttcttgttttattagtttccgggtgaaagacataaatatcctcttcttaaaagtgtttaaaaagtttttgtttcatttaaatctctggacctaaatagagtccagttcctgcaaagtttttagtcaattccatgagaagtttaattatcttgaagacctaatcagtttttcacttgattacttgtgagtctcaaattgctttggtgtttctttggtccagagacaccttctaagggctatcacttaagacacagg

SEQ ID NO: 80525 - DNA, 725 bp, Citrus sinensis
  Intron number 1 from transcript orange1.1g006279m (locus o range1.1g005764m.g) derived from phytozome v7.0 (chr-ID sc affold01063; pos 22777 to 23501 reverse strand)
gcgtggtctttgcaaatcttgtagtatgtatgatcatttaatattatcattatttttttacactttgtttttcttatctttaaatgattgtgtcgttttcagtatttgatttgtctttagttgtatataactgtgtaagttcctaaatttgcttttagacatctggtggggatggataccgacttgtttaaagctatatatattttatttattcggggtttcaatttgtgtgattgttaatagcccggttggattttcttaattcgtaggtgtaatcagcttctgggttaacccaacttttgtttttctttctttgcattgctgaaactaataatggctgtggcatcttttaatttttggattagactttaccattgtgtgacaatgatagtgatatttttgattttttatgggtttgtttttatcttcagttttattgatttttcagtgatagtgttgctatgatgttttggatatgtgagagggatgtccattgggtatttctttttgagcaagttgaggctgtgcgtgtatgtctgttcaatatgtccacacttttttctctgtcctttctatttggtaacttagtgtgaatcttccttgtgtttggcaccaaacttggccaccgttagatcttgttttttaatggtctctaatgcctcttatttaaacattaatgcccttaaatagtcagagttggattccagtgcctggttccatattcg

SEQ ID NO: 80526 - DNA, 722 bp, Citrus sinensis
  Intron number 1 from transcript orange1.1g003652m (locus o range1.1g003661m.g) derived from phytozome v7.0 (chr-ID sc affold00013; pos 1378112 to 1378833)
ttctaccgtccgtacgtttttcttgttttctctaggtactctgtttttctcttcttcccattcttcttcttttcgtctagttttgaattcttcttcgaggtcgaggatcgtgttcaatgctctagtctatcctgttgaattacttgttcatattttacgctgattttatttgaccacctctagaaactcagccttaaaaaaagctcctcagattcactgtttcctttgctagaattttctcccatgcttttgttggtggactactaaaaagaaaaaggataaagaaaaaagaaaagctttgatccaaaatttatccctggtagccacacaaagtggtagttcaattattatgcctacgctttaaagattttggtaatattatgtttggcactatactggccaaccagcacataagtgaatattcttaacaaattaagacgcaatgttaatttttaagacagtaatataagttgaacaatatagactctttgcgtaattaatattttaaagacttggttgttgaaacttgaaactggaggtgggggtaggtttagaaatttttcgtcttctagatttttttatttgactattcggattatccataatccatttcttctctatataatgaaggttggttttggatagacagctatatctttacgttatttacgtttgcttggttccttgtgttgcagttgaagtttttgtttgtctgagaatca

SEQ ID NO: 80527 - DNA, 994 bp, Citrus sinensis
  Intron number 1 from transcript orange1.1g004013m (locus o range1.1g004013m.g) derived from phytozome v7.0 (chr-ID sc affold00104; pos 140051 to 141044 reverse strand)
gcatctgtgcccttttgtttggccagttaggcaagacacctactctccactgattggctagttagaacaatcatgcagtaaattagggaaccattacttatgcatggtatcatgctttgtgtttcagttattcttttattgtatgtggtcaatttatcaattggacttatccacgcaatgtgatcattttgacaatcattgctcgcaaatatattattatcttggttcacatcatctattgttattatttaaggacgaatattctcgaatcggaatgaaaagacccgtgatccatgctctacaatgcatggtatagtttctgactgtaagtgagtgtgtctgcaagtgcatggtattctcgtacttgtggaaaaacaaattattctatggaggaaaagagttaaacccaaattatgtgtcttttgttgctagacatttttcagaaaaacaaaatggtagcttcacattggtgttaaaaagaaaatgtctaactctaactccatttggcaagcactgtggcatactcatgtattttgcttgatttgttatgagtctaattaattgaattccctgattgttacatatttccagtttctggtgaagaaaactctgcaaaatattaagtatacaaatttgaataagtagagaaacatgtacctatatcaaatatcttaatttgtgtttggtaagaaatcaaaattttaggattccatatgttgttgattaaatttatttatttattttctttagtaaatgttatgaggttgtgatgttatttatttgacattgttttgagctgtacaatcagttcttaatttagatcttctatttcccttttttttcaggtatcaaatcattgaaactactatactggctttttgtcataatgtgtgaacaagcattgggcaattttatctgattaattgttgaagttttgctgacatttataatagttacgtgaggaaaaagtgttttcttatcccataaggagctt

SEQ ID NO: 80528 - DNA, 624 bp, Citrus sinensis
  Intron number 1 from transcript orange1.1g010241m (locus o range1.1g010257m.g) derived from phytozome v7.0 (chr-ID sc affold00018; pos 86164 to 86787 reverse strand)
gatttttggaggtattaatttgtaatgtcagtttttacattactattttgagcaaaactgctttttgcagaagtgctttttgatgaagcatctatctattgcttcttagaaaagggcttcaagtggttttcctttttttttcccctttttctctcttaagaagaacttttatataactgaactaaacactagaaaataagcacttttggtaatttgaaattgctttgtagtggtgctaaaagtagtgctagacacaatataaacctttagtgtaaattcactagatagttgcttcaaatgaaaaaagattagagatattataactgttacttaacttgcattggggaatgtgtgtaaaagatttgagtgtaaaatagttcagaaatgaaaaagaatacagaagcatcttggttgaaatgatagccatattttaatttcttgtatgttgaattgaaatgatttattaattactgaattattttgtttcatgtgtgaggaagtcttttgctgtgatagcttttgaaacagaacttgtttagttgcttgttagatttggctttaagtgctttgatgttcttgattcatgaatgcaattgttttcaagatggttttaacaggtctcgg

SEQ ID NO: 80529 - DNA, 631 bp, Citrus sinensis
  Intron number 1 from transcript orange1.1g001700m (locus o range1.1g001700m.g) derived from phytozome v7.0 (chr-ID sc affold00028; pos 961988 to 962618)
atctgaactggatctcagcctcaatcagcttgaaggtactttgattttatcagtctaattatatttataactatgaaattgtcaaaaaataatgtgctgaatatggctcaaagcaataccaatttttatccattcatacagaatatacgtttcattttgcttgcaatattagtggattcaattgcatgctggcaatgcaatcttttatgccatgtttggtttgaagagatgaaagaataggagaggaaagaggggagggaaaaaaaaataaggggagaagagatgaattccaggagaaaccaaacaatggctaattaaaatatccaaatatcacaaattaaaatccttttgcttttttgtgctttatcttgtatgaaaccatgatgtgaagtcctcaaaaattccttgagatttatgatgaagcaatcgcatattttggctgtgggatttattttctgttgtataaagtataaaccactattgatgttcatgatcttaaacattagtttagaaattctgtatatgatttcttaataccgcctctctgtctttctcattttattgttgatgtttataatatttaacacttttggcaggtccagtgggaagtataacctcggcaactttaaag

SEQ ID NO: 80530 - DNA, 915 bp, Citrus sinensis
  Intron number 1 from transcript orange1.1g024913m (locus o range1.1g024913m.g) derived from phytozome v7.0 (chr-ID sc affold00009; pos 417600 to 418514 reverse strand)
agaaactccaagagatccaagacgagcttgaaaaggttttttttttttaatagaatttatgcttatttttgttatattttatccattatttggtttacattctgtttgattgcagagaaatttgagcctttgttccacgtcgttgatttgggagctaaacattaaaattgattacttcataagaaagtattgtttctaatgaattttcggggaaactaaaccggagtgttgacccttaaatttgttcattggaaaaaaatttgattccaaaaaaaaaaaaaatactgcgatggaaaagatttctcttttaatcttttgacagagaacataatcactattcaaattgtctgaatatattgggctgtattttatttgttttcagttttaggggttttcattctttgtgaattgagttgttgatttttttaagaggcagcattactatatttatgtgtaatttgaattgtatgaaaatctgaattttttttttttaaatttatggggaagctcagtgaaactacctgatttgaaatatgtgggttgcaatggggatttttcctttttgttcttaagagtgttctgtgtgacacaatataatttggattgatcttggtattgttggatacgcgtcaattcattctttccggctgctgacatgtgtaagcatcatcgttgttatttaacatagattctattgcatgaaatttgaattttctttttgtatatgaattgctacatctgaatgaatattacgtgtctttttcccttgtaattacttttaatgctgaatgagtgcattagtgtatgaacaagtgcacctatgaacttaccattttaccattatttgtgacctccaaaatattttatgagcatcttctagattaacgaagaggcaagcgagaaagtcttggaggt

SEQ ID NO: 80531 - DNA, 668 bp, Citrus sinensis
  Intron number 1 from transcript orange1.1g006354m (locus o range1.1g004568m.g) derived from phytozome v7.0 (chr-ID sc affold00193; pos 112101 to 112768 reverse strand)
atagaacatttcaagctttggcttcggttcaaaaggtaaattcgaggttttttttttcttttggttaaagtttatatattttaattaattcttttcttagaatgatagtgttcttgtaatcacttaatactactgatatataaattatatatatataaaagggtgttgtttgagagaattgttcgttgtagaggccaattttttgtagattgttgataatattttctgggtgctggtttctagttgcatcatgggcttatggccatttgatcatcttggaattatgaaaaatactgatttttttgttcgatgtttgagggtgaaaatctgattatgttgtgtacgccaatcaagttattttttgtgaattttattgaaggatggtctttgatcatacaaaattttgatttttcttctattttttgaaaaatatgtgtaagcgaaggtacatataagcaagttaaagtccaaatttgcctggtattttgtttatgaagctgtgaaactttttgtttcttctttgtatgactcttaaagttggtctgtatgtctctcatttggtcttcttttagctatataatcatgttttcaccaatccaaaatggaattatgtcgctgatttgatttcttcagttttaggtcattatttggtttcttctgaagagaga

SEQ ID NO: 80532 - DNA, 320 bp, Citrus sinensis
  Intron number 1 from transcript orange1.1g012768m (locus o range1.1g012484m.g) derived from phytozome v7.0 (chr-ID sc affold00121; pos 108892 to 109211)
tcaactctcaggtgatcattaatttttttttgcaccatttaatttttatttatattgtggtaggagcttctagtaattatatagtgtttcgctgtttagttttcttgcaatgacagtagctcatgaaacataaaattgcaaaaaataatattaataaggatattaccaaacatattcgtttagtcggaagaaaactctattgaaattcaaaagtgaaaaataaaatgctgaacataatgtttatatttattatttttaaaatttgatctaatgtcgaaattgtaggatctggggtgagcaagggcaagcagctcttgaaa

SEQ ID NO: 80533 - DNA, 707 bp, Citrus sinensis
  Intron number 1 from transcript orange1.1g035770m (locus o range1.1g035770m.g) derived from phytozome v7.0 (chr-ID sc affold00480; pos 17650 to 18356)
acttcgaaacagttcatttggtccttgcattcattagctgctatgctagtgctcatcagttgagaaatgaatgggattaattgttttgaatttcccaaagttgaatctctttcttcttccactatatttcaagccttcaccccatcaacttgttatcgatggactgtttttaattttgacctgcacataaggtcgtttgatgttaatttccactagcatttgaaattcatttccgttttcagttatctgatcaattttgagaaacacatatgcaatgtggtttctgttttagttaaattttaaattattcatggagtagtacttaaaacgaaagtaagtttgagataattcttttatcactctaattctcaatttataatcacataattataggctcaatttgtctcctagccgttggagtcaatcgtgcagctgtaaatgagataattcactttccttacaaggtttcgttggctgatttgttgccagacttggttataacatttttcaaaatccaggagtgattgatgcaaaatttaatgtcatggattctgaaaatcctttaggatgtttctctttatataaaacacaagtgtaaaaattattcaccctgcactcgacacaaagatagttcaaaaatgagcatgaaattcttaggtatacaaattgcagtagcatttacatttacgttctcaccttgaccagca

SEQ ID NO: 80534 - DNA, 353 bp, Citrus sinensis
  Intron number 4 from transcript orange1.1g012799m (locus o range1.1g010816m.g) derived from phytozome v7.0 (chr-ID sc affold00043; pos 145901 to 146253 reverse strand)
cccagacaggaaagccatcaggcaatccactcagtgtacagcctttgtacttgaaaatctcatttcagttttaacttaacaaaattagttaatcttatatcattatattactggtttttggtgaatttaatcatatactagattgtctttttcgagagactctagagtgtcttccttctgtatttgattttattgattgacaatgtagctacatatcacaacattccaacgtttctttacctctttctcttttgtctcttcaactcgcctgtatgaagttgaattgtgttctaatatgaaatttttctgagacattaagacttgcaattttctacattttagggccacaagaa

SEQ ID NO: 80535 - DNA, 857 bp, Citrus sinensis
  Intron number 2 from transcript orange1.1g013321m (locus o range1.1g010579m.g) derived from phytozome v7.0 (chr-ID sc affold00028; pos 486404 to 487260)
taacatttacaagatttcaacttcgttgtctccgtgtatgtttctttttgttagaattctcagtatgccgtgtatgcttcatcgtattcttctgataattaagttggttttattcagtaaatgagaatttaattttccttcatttttctgttttggaataattgtggtacttaacttcatactagggacatcacaacgaccaatatgttcttttttttccctgacagactctgaaatgcctttaaaattattagattagagtttaaaatgcttttgttaagtagaagtctccacttttaaaagtacaagacaccttttagttatgtttctgcatacccaaatcttactttgtgattagcttcacccttccactttttttttctattttaggactgatttttttttcctatcaacaagacttgttttttactcaacttttactgcttttgtactttatctttcttatctaactaatttctgtacttcattaaactgaagtatcttgatttcgatgtgagaatacctttaagcttcttccagaagcttaaactttttagttccttgagtgatgcgtaaccaattcttcttttgttgtatagttgtaaatgatatgagctaacttgttttcttgaacagaacagttgctcttttttttttcaatttaaggaaaaaagaaaaagatgaaaacttcttacttcttcagccacattcacagttttaatttaccaatttgagttacttcttcttttgtctgctcaacaagttgtttgagtagacattgtcagtccttttatgaggtaaatttaaaatgtcaaacaacagatagcaggcccaagctagttgctgggtcacctgaa

SEQ ID NO: 80536 - DNA, 688 bp, Citrus sinensis
  Intron number 3 from transcript orange1.1g022898m (locus o range1.1g022880m.g) derived from phytozome v7.0 (chr-ID sc affold00018; pos 1710347 to 1711034 reverse strand)
caccaagtttttcaggttcagatcttcacccatctaataagtactgtggattggatactacctatatgttggtttttacaatttattagtaataaatttacaagataaaaatttttccaagtgcactaatgaaattatttagcttttatacaggtttatagaagtgagaaccaagtacagaaagataatgagtataactactgatgctaaggcactctatatacgttgatctaatttatacaatgatctgtaccctgtttcctcgactaagatattcgttaatcttaatcatccagcttgtagtatatgatcactgctattgagacaaatactttgttcttaagtatacagacaaggtaatctgtcgaaacataacaggagtaaggtatgtgagaattctgtcgtctcagctgaggaaagaggatatttcagctcgctataagttgcattacttttggaaaatggcggcatgttttagctttttagaaccatatatattcttttccctctttgataagtggtcctctgggtatttaaattatatttgggtttagggttcctgatgtatgtagtttgtgcctatgggtactgatagttagtttggtggtcattcagcgtttattcgtctgatttttgtttttctttggatgcagcactgccggctgtccatttggtgagagctgccatt

SEQ ID NO: 80537 - DNA, 661 bp, Citrus sinensis
  Intron number 3 from transcript orange1.1g015475m (locus o range1.1g007574m.g) derived from phytozome v7.0 (chr-ID sc affold00006; pos 663603 to 664263)
ctgaaggtttggaaattttttttattttttggccttataaacttatagttcattgtacagtttatattctttagttaaaatctttaagcataatttgtgaatgctacgtgattacatgtggatccaagaaattaatttgatgaagttgagtttgagttccactcatgtatgttgatgcgtagctcttaattgtgacatgtattggctttcttcaggaagatacttaccttagtagatagtttgtgctactagtagcttgaatagtatttcctaatctgacagtagttatcttttgtgtattacataggctatttgcttttgctaaactatgagttatgacattagtgttttttaattttttggaactgttcattttagttaagctttcttatgagcttacattttcatctgagtttggcttaaaaaaaaagcataaattttttttttttttctaaattaatgctttcacaaactgttctttagatgtgcactggcttttgagtcacggatttgaaggtgattgttgaccgacaactcatttgagggactagagcatactgttatgtaattatgtttagctttggagctaggtaatctattggtgaagattttccctttctctgcaggagagtatcattgccctgtgctaaataaagttttt

SEQ ID NO: 80538 - DNA, 766 bp, Citrus sinensis
  Intron number 2 from transcript orange1.1g014433m (locus o range1.1g014437m.g) derived from phytozome v7.0 (chr-ID sc affold00324; pos 137063 to 137828)
gagttgcatctacctcagttgcagaagtaggtaatatactggtttcttttttttttttcccctctctctcctctttatgttattaactgtagaattagattcaatgcctggttgaaaaacgattttgttctttgttgattgctattgtgagtctgcctttttctgggcatcttcaatggagtggctgtaacttacttcttgagttctttgtgtttgtgttttatttatttattttctgcttgttgatgaatcaatttcaacctatgttatctgtattaagttgaactttagcaaaatgacctgctttttcgggttttgtgtttttatcatttgttatgatggcttgtgtctttttggtgcattttcagattgttttcaggtttatgatgctttactgtttcattttaatacttctctgaatttgtctatttgaagaagttagttgtatcgaaatggtaattgttttgttgttttcgttgttgtggtttgttttgatttgaagataaaattttcgtgtttgacaagtaatttttaatcatatcttatgaaaaaaaaaatttcacttccatttgctgtcagtgttttcgtgtttttcttattttaagcttttgtaaggatttacatctttcctattgaagtagtgtacatctatcttatcttcaatgccttacattgatcttttcatctacggataaaaagttgctagggtttgtttggcttccaaactgtaggactttggcggcaacaaaacttaagaaattgagcg

SEQ ID NO: 80539 - DNA, 486 bp, Citrus sinensis
  Intron number 3 from transcript orange1.1g014433m (locus o range1.1g014437m.g) derived from phytozome v7.0 (chr-ID sc affold00324; pos 138176 to 138661)
gcaaggtaactgtgctgatgtttccgaaggaaattggattatatattgcgcttttgaatctttactttatccttaaaagtatctttctatgttgtatagtatgggtagggaaatgtttttggttctttggatcttcgttaacttttgtagttcttctctctttctttgttaggtattttttttcgttttctatcagtttggtttattgcttagagatttcacctttatcaagttttattctagctactctgcttaacattcttactgaagtttaggtttggataaaactattatatcccgacagttatttttgtgtctcactttttgtttcctgaaagttgtagtttgattatggtgcatgtgattgatgaatcagattttagaaacaattcttgattcatacatgatggtaagaaacctatgaaaaattagtcaaaatataaaaatgtcttccattgcaggtgcaaataattcagcaaataaacc

SEQ ID NO: 80540 - DNA, 336 bp, Citrus sinensis
  Intron number 2 from transcript orange1.1g038347m (locus o range1.1g038347m.g) derived from phytozome v7.0 (chr-ID sc affold06360; pos 2520 to 2855 reverse strand)
acttcaggttctcaatagactcggttctctttcaggtaaatgttttgcattgccctttttgtctattactgctttgtgggcaacgattaatttttgttatatctcgaactattgtgttcagtttcttattttcagggaaagaaatccaaaatgtaaaaacctgaatagactagagggtgctagaatacttctcagtgtgtagcaattgcttcagtttggtgtagatatatcatcttactttcctggttattcctttttctgatattttgtgtaaatgattagtgatatcttcttgtttgattataaaaaaaaaaaaggcttgtatagtggcttggg

SEQ ID NO: 80541 - DNA, 603 bp, Citrus sinensis
  Intron number 1 from transcript orange1.1g033421m (locus o range1.1g030248m.g) derived from phytozome v7.0 (chr-ID sc affold00396; pos 80055 to 80657 reverse strand)
gatccgccaggtccttactcagggcgtcagtcttggttcgccccttaaaccccctttcatcttctctcgtaaaactcttgatttgtgccttaaaatttgatttttaatattgtgttaatggttggttaaatgggtatttaaaaggaatacgtattgtatttgttaagtgtaatgcgtcaagttttgttctttgtgataattatgggatttgtgtatcgttttcgatgtgggattttctttttcgtgcccaaatcctgtactctgcacgttgaggtgggaatcattaggatttgaaagcatgccttttgtggatttttattatgttatttgattcgattcttggaggtactgtattgcaataaagctgctgaaaaaaaaaaaacttttttgtttctaattgttttgaactgtgaaaataatttggttaccgtgtcattatgggtcttggaatgccggttgctccagttccattagaaaattatacccacttctgcaattttgattctgaatgacttgtcagaaacctttaattgaccccaaagaaaagggaagaagagtagctaaaatatatttttatgagactaatttaattttgtttcaggt

SEQ ID NO: 80542 - DNA, 912 bp, Citrus sinensis
  Intron number 1 from transcript orange1.1g024557m (locus o range1.1g024468m.g) derived from phytozome v7.0 (chr-ID sc affold00019; pos 1582255 to 1583166 reverse strand)
gacggaagcccagaaggttaaaattcttcctttctcaaacttcatctcaagaagttgagaaagaaatttttattatattataaacgcaaacactaaatggattaatttatttatttttaatatatatgcatatatatatatatatatatatataatctttcatatttatttattatatattttggtacatgtaaatgttgttatataatagtttcgtgttgatacccatctttcatcttcgtcagtttcttgcttctctttgccacctatcatcttctttccttttctttttttttttgtaagcattttctcttttcttgttttatttttatttatttattttgctatgtgtttcagttagtgagattcttaattgcatgtgttttatttgatcttgatgtatgttttgctttctttgcgcaatgtggatgtgagttgaagttgttttatgatctgggtatgcttttgtttgctgtaaaatttatctatttcttaatgcatattaactgattctggctttttcacattgatctgtggttatttggatgttaatgatcatacccttgtagttggattgccttgtcgaagtcaattatgacttcatgcataccatgatctgtttgatgatatgaaaaacttgttttttaatttattttttcattaattctgactgctgacgattgcaattttgcttttaatcatgttcttgtaaggattagatgatttagttagtgttaatgatctatagagttggtggctatttgctttcatccatatttatagtattgatgcttaactacttttacttcaattttagttgatggaattgtatctttcatatttcttcaatctcaatctggttatttttttttttgtttgttattgtgatagagttgatagcttgttgaaagc

SEQ ID NO: 80543 - DNA, 640 bp, Citrus sinensis
  Intron number 5 from transcript orange1.1g007217m (locus o range1.1g007069m.g) derived from phytozome v7.0 (chr-ID sc affold00019; pos 1677834 to 1678473 reverse strand)
tctctgttgcactattttctggtggtttgttaaaagtacgctcctaactgttgttttcttcataatttatatggttatccgaatttttcctaatgattttaccccttagatacccaaattgtgaagaaacaatgatttatttagttggcctgtcaattattttctttattaaaggaatttgttgagatgcttagcgattgcacagagaaataatatttttgtaactggttgatagattacaagcgcaatccatatttttgactttgatttgaccaatatataacttctgaccttcctcttatccttctagaaccttcatcctgatccaaatgaaaccattaatggtttggtctatgctaatctttgtcttattttcctcatcttgtttttcttatactaagtttgatgaaatattatggaggactgtttctattgttctcaacatcaacccagtttgtctttcttcatctcttaaaataatattctatcatttgatattaatgacttatcactgttacagtactatctttacatctgaaagattcaatttgtttacttatcctcttgctataatttttttgtttttccttttgttatgataatagccaaagctggttgcagtgtcaaataaaatagcttt

SEQ ID NO: 80544 - DNA, 765 bp, Citrus sinensis
  Intron number 1 from transcript orange1.1g007217m (locus o range1.1g007069m.g) derived from phytozome v7.0 (chr-ID sc affold00019; pos 1679399 to 1680163 reverse strand)
tcggtatttgaaagtacccacttcatccgatctcagtaataacttctgcctgattcgtcatcttctttcattaatacattccacttggtcagcactccgtgttcactactcagtaccattgttatttgttttgttatattattattttttcatcaacttctttaaatagccagttggttatttgtcatttttctactagtcagacgaatgagaactgtgtccaacatactaagtaagaatttgtttcttggtgtacaaacggttgctcctgtgattgtttaattgtaatttgtcatcttatgagccaacgactctggtttcacgtatatttatctcacttatattcatattatttgcaagtgtctggagaataactgaactttttgttagatttaaaatatggttgagaagtggactccccaacttgtaggtgtgaatcgagggatcttaatatctcggcttcagcgcagcttaccaagctatgctcgatagatgcttggccaaagctatcattttatgaatatggatttagactcgcgacagcctctgttttattgcatcagtagattgtagattggaaaaagatatcgtgttgctttaaattttttctttccgggcataagcaatgataaaagttggtctatttcaccgttgttatcatgctttgaagttgcgatttgaattctaagttttgggtttcagaagacgttcttaccgatttataccatctttcctgtttttgattgattttagatacttgttagg

SEQ ID NO: 80545 - DNA, 667 bp, Citrus sinensis
  Intron number 1 from transcript orange1.1g017001m (locus o range1.1g015269m.g) derived from phytozome v7.0 (chr-ID sc affold00043; pos 112679 to 113345)
tgttgacacctctaaaaccatagccttaagtgaaggtatagcggcttgttctttgttagtgtttgtgggggggttgtttggttggtgagaaaatgaaggaaagtgaaaaagaaacggtgggctgatctgctttttattatcattatattataaatacatatatgatatattgatacgttatcaatatatttacatggtgagcgataatgttaagttccttagtccgtgcatcaatagctttagcattaatcacgaggcgttacaaaattacatcaggtattccgttgcatatcacattttttgtttctttttaattattagaaataaaagcaacctcaatccaaaccatgcatgggtactttcatacattcttttatgttcatgtgtgtgtatatatatataggtatgatgtttgtgttatatttatgtgtagatgcatacttaatgaggattgtttttttaaggaaatgttgaaccaactattactttaagagaagaattcaagtaattgattgatcggcggttctaaagattgaatattttctgagtggctgtattttgatatcaataatgactatcatgctctctgatgagtgatgactacatattaatgcaacttacgtgggatgctcttatgtcaatccccttgtaggagaaaaggaatact

SEQ ID NO: 80546 - DNA, 1011 bp, Citrus sinensis
  Intron number 1 from transcript orange1.1g030376m (locus o range1.1g026312m.g) derived from phytozome v7.0 (chr-ID sc affold00185; pos 273501 to 274511)
aagctttctcgctctctgctttcttccaggtaccttgtctacgaaaacctcgtttgttttgtaagaaagtaattttcatttcctgtttggtttcccagaaaatgctagaaagtgcaaaaagtcaaacttttgcgtgtgtggtttttatttttatttgttgtgttgcaactggggcctaacgcgaatatttggcttacattggaggataaaaattttaaatgtttttctattgttttaaattttgttacatttgaaagtgcttttgtgggaagcgtttttttaactgtgatatgaaagcactttaaagtgcttattttggtgcttggaggggggggggggggggagagaacttgaaaatgcttactggaagtacacccatcaagtgctactattaagttcttcaaaagccgtttccagagaatcttctataaaatgcttctctaaaaagcaagcagtcagggtgtctattgtttaatctcaaaatgagctttctgtatttcatccaaatatatacaaaaaaagtaaaatagagactggttaattttttatgaaatgaattcacatgtgctcgaatgtgtggtggattttttaccctctgtttggtttctgagaaaattgagcacaagtaggcaagagacttggggtgcatttgggagtgcttttgtagaatcaattattttagtggaagtaatttttctaaaagtagtaaatgtttcctagggtgaaagtattttttatttttttaatagaagcagtttaaaatagattttggaaaaataaaaagtagttgaagtgtttttcctgttatgatatgggtgtcaattgattttattatgagtctattaacatttatatatggaaatggcatcaacctctgtgttgtttttcttcagctctttgaaatcttacatgaatatttctaacatagttgaagggattcttttatttatttattcattttttcaaattgaaacaggagccaattgtctgagaaactgttagctggagaag

SEQ ID NO: 80547 - DNA, 570 bp, Citrus sinensis
  Intron number 1 from transcript orange1.1g015740m (locus o range1.1g015749m.g) derived from phytozome v7.0 (chr-ID sc affold00040; pos 537534 to 538103)
aattgctttggtaggttgctgaaatatatgttgtaattggtatatgttgattgagtgaattatcagtttcattatgctcttcagtatctgtgaagtgctacctcaagaaagaggctgttagtcaagctttttcctgaaatcaaaaactcagtaaaagagttgaaacggctgtggttataacccatgcctttacatcatcttaataggtttaaagtaaattgacatacttgttagcaggtgatgaagtccaagcaagtgagtataatttactaatttgcgatatagtagttttctaggaaactggaatccttaaagtcaatgcctggccttctacctatatcatgttattaccatctccttcttttttgcttagtaactgatcttttattttcttctaatgtgatttatggttatttctgattcagttgttagttgttgatgatcataagaagtatttttattttttatatgagtttatgtttattttttttaacctccgagctagaatgtacacttccggattgtatcttcaatatattcctgcattctgacgtaggagattaaaaggat

SEQ ID NO: 80548 - DNA, 935 bp, Citrus sinensis
  Intron number 2 from transcript orange1.1g015740m (locus o range1.1g015749m.g) derived from phytozome v7.0 (chr-ID sc affold00040; pos 538186 to 539120)
atccaggtaataaagacacatgctcaatttatttgtattttctccacataattttctttttatactttttagtttttgtaaaccatcttaaaagtttccttttccttagtataaggtggaaattttccttcaatgtcaaggagttgttgaatttatgcatatgcctctatgcacaaaaatctctgtaggtcctacattataaaaattggaattacataaacatagctgtaaaattctttacccatgtctgcatctcatggactcccataaagtcaaataaatgtggactgcttcttcacttctttgtgaatctatttttcattcaatacaaatacttttggcttcctatcaaaagaattaaaataaaaggaactcaaattaaatcattgtgtaaacttctctgtggaaacatttcctcaagcatcactatctatatgtatagcatctctaacacaccatattgcttggattgttggacgcattgcacgaattcttcagttataaaaatattgcacgaattctccagttattaaagtgttaggaggcactctcattaattttttacaatacatgtttgtgtatttgcacatgaccagaccatataaaaaattttaatcttaaattagtgtcctaattgtagacttagttctagggtgcttcttacgagtaagttggtggccagagttacctgtatcttcgcgctgttttgactccgtgaatcatttactttgatgctattaacttctgtttgaaaattgtctgaaaataatgtccaacatcctgggtaaaatttgacattggatgcttgtttgcttgtcctatatgcttgattagttattaaagtgcaaaactaagtcaaattatgtatagtacatgtcactaaagaagttttgttgtcagagagctcaagctacaaagctaacgagcatcgctgt

SEQ ID NO: 80549 - DNA, 609 bp, Citrus sinensis
  Intron number 1 from transcript orange1.1g017852m (locus o range1.1g009078m.g) derived from phytozome v7.0 (chr-ID sc affold00013; pos 408717 to 409325)
tacctttctctttcccttcaacaattcagctccaggtaagccttctgatctcactctgatcatcagagaagtcttccttatcactgacagtcatctggttgtctttgtttttctgcttttctgttgttttcgttgatgttatgataggattctggagaaatttgtgttctcttttttattagatcttttgatgataagtcaaagttgctgtttttagtttcgtttcaattcaatattaactcatgtctctcccttcacttctgtttgtatgcttgtacaagacttgtttaaattccgaactttcaagtatgtggccgttacttttttcctttcttttcttttcggtttgttgacttttatggtttgttagtgatgattagatcttaaatgatgtggtatgagctctaaattatgggtttggagttgagggttttaatggatttgatgaaacttataagagttatacaagtttgaattttgacttcagatggtgaattggatttgcattgtttttgtttatggagaagttaacaagggtaaatgaggaaagtgagtaacattggtgattgatgggcacttgtagaatttcgtgattgaggggtggagaga

SEQ ID NO: 80550 - DNA, 806 bp, Citrus sinensis
  Intron number 3 from transcript orange1.1g017110m (locus o range1.1g005467m.g) derived from phytozome v7.0 (chr-ID sc affold00116; pos 126448 to 127253 reverse strand)
agatctcttgcccagcaatcaattcttatcagaaggtaagtgctgtcttgtagtttctttgggggaagtgtgcttgtgttcttagtggttgccttttagtttaagtgctgtcttgtagtttctttgaggaaagggtgtgagtgtccttggtggttttcttttggttcaatgagcatttctttgcattacatggactagtttcactgcatgcattgctgtgatttcgctgaagcatgtatctggcgccgtatatccctttgtcattttgcaaaatatggtttctgctagaattgctcaattgggaactattacctttcttttctgaaaggttattatcaccttattatcgtttctttttatgaacttgcaatgtgttgaactgcagtcgggtttggggtttagtttttagatgactaatatgaaggactttgaaggaacagatccttgacatatatgcatcagggatatctgcacttttcaaagctactattgttatagttattagatttcttttcacaactagggtcaatttttatcttctgtcattggtgctggtaaattttgttccgacgtatatctgagtccattctcaggtggaagaacttcaaccttcaaatattgggaagagatatcttattaataggtccttttgagatgagaaactgtcgatccaagtgctagttacctatgtgatttttgctccatggccattttcattcaagtcttctattgaaaagttagttactgtttatgtgcaatttttgatcctgcatctgcttttcacaggagtgaaattgcagaggctg

SEQ ID NO: 80551 - DNA, 649 bp, Citrus sinensis
  Intron number 1 from transcript orange1.1g043717m (locus o range1.1g043717m.g) derived from phytozome v7.0 (chr-ID sc affold00718; pos 67251 to 67899 reverse strand)
ggaaggtgcgattggagagcttgaagtgggtggccaattcaatccatttccttcttcacctccaaaatacattggtgttaatgggatgcgccctcttgcggactctttattggcccaggtgacaaatctttgttttgcttttgtgttcttttcttgttgattccatcatgcttctttgaattaaaaggggaaaattgcctaattaaatcacaatggtgaaaaaaccgaagtattgttttgaagtttgctggaaggtagtgttgctgcttgggtattcagtttcccaaaatcattataccgttgaggtttgaccggagaaggatgataagagtatatgaaactaaaagctataattacatgctcacatgattttaattgcttaggctgcatggctatacttaatgaaatgtgccgacaatgatcataactgacgaaaagaataaccagcatgaacattctgcactgctgtatgatgactacaattcctgtgaagtaacaggctctatatatggataatggattattaatagtgagttggagttagttatagacagcatcttacatggcatacctttatttttaaattatttaaataagttcctttgtccttcatgcctttaatgcattttgattcttgttgcagacctct

SEQ ID NO: 80552 - DNA, 799 bp, Citrus sinensis
  Intron number 1 from transcript orange1.1g022071m (locus o range1.1g015407m.g) derived from phytozome v7.0 (chr-ID sc affold00121; pos 130024 to 130822)
ctcttcactaataggtatgtttaccaaatttttattcatattctgaaaggttgttgcttgtgggatttgatcaattgggttgtttatggttttggtttagtggtttcaatttttcatgttttttttcaaacttaattcttttaaagaccaagtgattttacacttgtattctaagatctgtattttagctgattgcaatatgtttcagtaatgaacatatatcagctggttttgtggtgtgcaagtgtttttgtttgatgggcagctgtgaagtttctttaatttgctgttttgatagtgtatttggtcttgcctgttgtgtgattgctttgcttattgattttaaagatgagatagatctgaatttgatgttcattgaagaaacaaacctaattggcttgatttctctaaaaaaattatcatatggatttggattctggtgacaatctggttctagtgcaaactactgcctacaaatcctagtacagttgtatttgttaggcttcatattcttgcttgaaataagaagttgaatgagttgcgtggcctgtctcattgtttcttttgggcactgtttttgttctttctaaaccaactgatattatatcaaaaaaataaataaacaaaccaactgatattagctatagtgcattcttgtgagaaacagttatatatatgtggaattgggttcagttgaactccaatctgataaaaaaattgcttagtaaatgtttctgcatttggtcgttgggactaccatatatagtggcttattaattatgaaaaaattggtgacaga

SEQ ID NO: 80553 - DNA, 776 bp, Citrus sinensis
  Intron number 2 from transcript orange1.1g014009m (locus o range1.1g007192m.g) derived from phytozome v7.0 (chr-ID sc affold00496; pos 62582 to 63357)
gcggaacaatcaaggtcagtaaccattcttttctacgtacaatatcctttttttcttttcttttgttaatggtaatagaaacaatctatggatattgacatatctaagtatgttttgctttgacatgcaatttgaattagctatatggaaattttgatgagccttgtttcaggaagatgccgttggaccttttttgctgtattttttacagtatttctttctttatggtcctttaagatgtctctctatgtcttatatatatgtgattggctgtcattttgtgttaggtcgtatttgtgcagccatagtgaatttcttcctggtatacgataagataaatggatttacttttgcagttgacatgacaatttttatttttcgttctacttttattttatttttttcgattgaaatcataagatttaacatctaatgactggttttcatgctgatttaagtctgttgagaacagtgcaaaaaacaaatacgttatctaatttagtatgtatgcttattattattgatatagcaagatgctcatttatgactgtaatctaatttcttgattttaagagttgcaatgttgaaactttgtgttaacacgacatttcttctacgttactgatttgtcagatgcagttgagtattagatacatgtaatctactatcagttctggaaattttattaagatttgattcttaatattttaaatgtacatgtaatctaatttcttctatgattcttttgcagcctggccattttcaaggccatacgt

SEQ ID NO: 80554 - DNA, 556 bp, Citrus sinensis
  Intron number 3 from transcript orange1.1g002127m (locus o range1.1g001831m.g) derived from phytozome v7.0 (chr-ID sc affold00069; pos 527211 to 527766 reverse strand)
gaaggatcaaaggtgctgcgctatgtcttgtaacctgtttgtggttgtcatttgttcgcttgttagttaccttctgatttatagctagttatttcttggagatatcagttgcattcttgcagtgtaaaaatgctgtttacttatctctcctgtctaactggatgagccaatttagtttaactatgatctattatatgattttcagaccatattcctggtttcctttaacattttgccaagaaatagagttcttattagtgtccgttacatttggttgtaatgacttggtatacagccacaaagggagggtacaagaagtgggcccttggaaaggagggattggagtatctttattcttctgagcattagagtttgattttgactttgtcaggataaggctcttactctgattatgggtacacgagagttttctcgtctggctcactgtttagagacatgcccagagttttaatcaataattttctacatatgtttggtttagcttatgactgataagctacaatttgatttctatccgtttatatgtttttgcagt

SEQ ID NO: 80555 - DNA, 1017 bp, Citrus sinensis
  Intron number 1 from transcript orange1.1g035279m (locus o range1.1g035279m.g) derived from phytozome v7.0 (chr-ID sc affold00009; pos 1310714 to 1311730)
tattaaacgctttgagagagtgcgtcgtcagcaaggtattttatttttcaattagcactattactattccttttttttttaaaaatatatcctttggaaaacttgaatctctttgtaaatctcccgtgaaacatgtaatgaagcgcttacaacttacttaaatcgtgtctaaggtattgagaggcaaaagcctatgcagttgattaataggtgttaaaaaatgcttcgattcagttttcatatggaaggctcgtgtttaagattgtcaaactgcttgtttaggagagaattgtttaaattttgatcagagctctgtttctgttccatccccaaaagaaagctagagagagagagggcgagggaaagcttcttaagcttaggaattttttggcccatttacctttttttttctcaaggactccttataaatagtttgcaagttctgtctgttcatttttgctttttctcctaaatgagaaatgtggactcattgatcattaagcttgcctcggcgaacttatcctcttctggttagttatcacgtggcggtaagattttaatggaaaagcttactgtcatgacggttgtttttctcgttttgatatatgacatgaggtaaatgaaatgctacagcttcaatgcgttgcacattctgtttggatgtgtccatattcaaactaggtgtcataaaatagaaacaagcattatttgatgatgatgatgatggaatctagctattagatgatcctggtgttgaggattcaaagctcagtgaggcggctgctttgcgttatttgtttttttaatctttagagcatctaaatcactgtatgattagaatgtttactggacttcaccatggagactacatttacaaacattcatgtaaagcatttaacatgcctttggtccgttttgattcttgttcttatgggatgtgtttcctcttttttttttttttttttggtcttttttcccacagaaagtgaagaaattttcattggctgagcagggcca

SEQ ID NO: 80556 - DNA, 990 bp, Citrus sinensis
  Intron number 1 from transcript orange1.1g022272m (locus o range1.1g019853m.g) derived from phytozome v7.0 (chr-ID sc affold00364; pos 100141 to 101130 reverse strand)
gaagcccctcacgacgtcgtttttcaacggcggaggtactttctttattaaccttttgggctattcttgttctctatcattttttgggcatattttttttccgtttatatttttcttaagtatagttctcacactgtttggctgctgagaatatgaaagagaaggaaataaaatttcctagaaatactcaattgtggcagttaatgtagtaccttagtgagttctgttcattacaatttgtttttatatttttgggtctcacaattaatgcaaaattttaaaaaaaaattgcattcaatttttattgcctttcatttttattttttttgagcgtccgtgaaatttggtagtaccagtaggtttggcaagtattagaatgattattaatttttgtatagtttgcgttttgtgaaatttgattgttgggtgtgcttgctattagtataattaagttcatatacagtgttcatatgtacagctctacttttagtggttactacctaaactgaaggtaactcaaataaagatgaaatcttttgttttatagtgagtattggattttcaagaagtgataatgaataggtggtatgatgattaggacagtggcaccaaggttaactggtttggagtagaagtataagtgttgaaggatttttttttttcccttgttgagtcaggagtaccatgtgaaagtagacgtggagaaggagatagagataagaatttacttggattctgccctattttgttgttccatttgggtcctcacatgttcatgtaaattgcagttgacctttatttatttatttaaagtatgatgaaacttatttggaattggttattttgttgattaatgttgtttttgaaattatgactgtatatggtatgccatagatgttttgataacttgttcatactcatttctgtattttggtgatgttaattttgcttatagtgggagctctaaaagttacaaggttaaggattgct

SEQ ID NO: 80557 - DNA, 833 bp, Citrus sinensis
  Intron number 1 from transcript orange1.1g021449m (locus o range1.1g021449m.g) derived from phytozome v7.0 (chr-ID sc affold00013; pos 1586636 to 1587468 reverse strand)
ctgagattctagctattgaggtcagtgtgactgttttattattattcttattatatgtgttggattggaaatgattaattggcattgcgccatttcgtttaggattttttatagtaatgagatcatggctctctggaattccagtaatttatataaaggttgatgtggattcgttttagttgtgcaattctggcgttctgtttcttttttgggaaatattattttgttgatagaatggatggtttctttttttttggcaattgtaagcttgtattatattatgatttagacggtggctatatactgccttgtcaacttgctcaatccttgtttataacattcattctgattagatcacattagctcttctcaacgtaattagttggaaggtggctgatttcgctctgattccttgttgcaatcatttcctcaagttcatcatacatcaagagcgtgctatctgtgtgaatgtgcattgtgagatgttaagactttgatctactaggaagtaggaactgtattctttatatagttaaatttcgctgttggtttcctcaatttttaagtcataaaaatcttctttctaaatagtttgcattgttgtatactgctatttatttcctttcttgattgaaatattttcctatgcatatctagtttaacagactgtcatcactattgaaattttgacattatagttgtggaagtagatcttgtttttcaaacttctttacctcaacgatttcatttattattttacctctttcaatctctaatcatcgaaagatattggttatattggatctctcattcttatgtaatattttaacaga

SEQ ID NO: 80558 - DNA, 966 bp, Citrus sinensis
  Intron number 3 from transcript orange1.1g013798m (locus o range1.1g013798m.g) derived from phytozome v7.0 (chr-ID sc affold00028; pos 276017 to 276982 reverse strand)
aagatagaactattgaatttcttagtcgttgtcaggtattaggtccaatttaattttcactgtatttctttgttctttttttttttgggttagtgcaatccccattttgttatggttgataatactctctctctttctcgtttttggatatcaactacgaaatagatagaagtagttccaaacctctttgtctatttagagattgaaaatctagtttgttaccatcacatttctacatcagaagttctgctcccattgtcttggaagcttaaaaacttgtttggagatttcaagcatgtacctctgcttccctagaaaactgtgtgtttattctctatgaactttagatgttgctgttgctttaaaagtactcagtctatgatatgtataaatgctcttagtttgagtttagcagctatatcaaaccaggtggaatgtatatatgcagtcctaaacatatatcaaggacatttgtacttacgtaaacactaacataaatgcagacccttatctgttgatacatacgtgcttagaatgtgtgtccttataaatatactaaataatagactggacatattggccttgttgccctttttttttaagtacttattgttttgtttgacattagtgagctagatcttacacattcaagtggactagttcagtgatgctctctgtggtatttatacccaaataaaatgattgtggacattgacatgccttgagacaattagtgttcagccctttgaggcatccaaaagcacaagcatctattgacatatttgatgttgccattattggtgtatatgctttatgtttacctattttgtgtatgaaatgacttatttgatattaccagcatttggaggatatgatgtttatcgttctctagtgtttgctgctaatattatgtcttctgcttataaatatccatcttctgtgtgtgcttcctctggcaggacccaa

SEQ ID NO: 80559 - DNA, 490 bp, Citrus sinensis
  Intron number 1 from transcript orange1.1g032708m (locus o range1.1g030171m.g) derived from phytozome v7.0 (chr-ID sc affold00270; pos 52208 to 52697 reverse strand)
cctaacaccgtcgatacaacatccgttactcaaaggtaatttttttttcccttcagttttcctttttcttttcttgaattttccttttggttcgtgagaaaatttagtgatctttctgtttggttgtcgagaaaaattgtgaatggaaaataacagtcttaagtcttgtgtttggttatcagatgagtagttaattagtcaacaaagcttaggaaggataaaagaagaaaattatggtttatgaattctttaattatttatgtgtttattttgactgagtgaaatagtggtagcagtggcactatcaaactttaattgtattaattttgcgaaaattccggaaactgaaaagattggaacttttgaattattttggtaagatttgttggagtacttgtaaacttttagatgagctttttgtgatatatttttcatgtgtaatttcaattatatggttttttatggttttttcaggcttcagaaggaattg

SEQ ID NO: 80560 - DNA, 808 bp, Citrus sinensis
  Intron number 1 from transcript orange1.1g046658m (locus o range1.1g046658m.g) derived from phytozome v7.0 (chr-ID sc affold00315; pos 26463 to 27270 reverse strand)
ggctgcattttcatccgcacatttgcacttctaattgttcatgttcttacaacgacgtcggatgcgaaagaaaaaaaatttatttacgggaaaacccaatcgtcatctccaataacatcttttgaaaataccccccaacgttgatttacttgagttcggccatcgtcgtttgaaggcaatcaacggcacttgccgcaaggccatccatctggacatcggagcacaagactatcgtgtcctcatttcgatactagttcggcgcataagtgtatgtgtttatattgtatgttttgaattctagggttttgtacatacttgttgtacgcgtattcctgcaacatttgcttgtatgcccattacaattgtgatgccctttcagtattgttttgttaccataaacacataggtcgtacaagttgttttaccagtcttcagtgggagaatggttgtctgtaaccccagtgaaataaccttcacatttatttataatgttatggacatcaacctggtaagtatacttgtaaatcacctcacgcattttatatgatgttcacaataacgcccaaaaatatattctgttattatgttacattcacccacatactgtttaattttttacgactgattgtacttgcttcagcatatcccttttcgtgtacaatctttacgggtgcgtgtacacaaatatctttggcagattaggttatgactcataggatgcaaaaatctaggagcaatgctgggaaacctaacagtcgtacgagaggcagcaagcgtggtcatgcagataggattagtgatttaccag

SEQ ID NO: 80561 - DNA, 960 bp, Citrus sinensis
  Intron number 1 from transcript orange1.1g033862m (locus o range1.1g031666m.g) derived from phytozome v7.0 (chr-ID sc affold00184; pos 8846 to 9805 reverse strand)
ttaggtgttgagttttacagctacacttctttttggtaaatcttttcattctcttttatattctttcatttcatgtctgaatgtttctgattttcttggatgatcattttgtttcagtttcatttttggctttctaattctgtaaaatgaagcgacagattcatgtggttgatcttgatgaattagttagtgaatcagtttatctaaagattatgtttgctaacatatggttgatgatcgattatatttttggaagctttacaggggaattgcttatgtttttatgctgctaattaattttttttttcttttttcctctttggaataagaagaatcagtcaacctttattgttgaattggttttgacatttcagttgtcctttatcagactgctagctgcaatatgattgttgcatctctaaataatgttttagagatttgagaaatttgcatcttcccatatgaatttatttaatcatcactcaccagagtactgccatgtactttacccatggcagcctacagaaatttgagccggtcagcgccggctctgaaagcccttaaaaagtctgatgcgccggcttagtcagcaaggagtgacattaaagtattgaaatttggtttatggtgcagcgattctctccatattgagttgactaccatcagaatcattttgtatatccataaatcccctgcattttaatgttcattagctgaattaagtttctcatgcagcatctgctcaatataccttgttgctctgaaatgtcagctcatttcaagaactccattatttactctcttaagttgcaaaaagcaactgggtacttttttttatctgcctgtaatgtgatgagagtcatattgatattagattggatttcttctgtttcaaactagactgaaatgttctgattttcattggattggtattaaactttcagctacttggtaacaata

SEQ ID NO: 80562 - DNA, 578 bp, Citrus sinensis
  Intron number 4 from transcript orange1.1g030814m (locus o range1.1g024173m.g) derived from phytozome v7.0 (chr-ID sc affold00006; pos 475519 to 476096 reverse strand)
ctaaagttgcagaattatccaaatttggacggccggtaagtggcattttgctgctttgttatcctctgttccgacttgattagttggcagtagaagtggctgtgaattaacttttaagtccttgtcttatcattacctccaaaaaaaaattgtgactagggacaaacagaattggtagaagagaattacagggttaaaagaatcaataatttgaattatgccatgatccgatttgggcctcacatggatcaccgaccttcattaaatttgaaaccagtggtaaagattctttagaagataatctgttaacagctagtgaagaggaggatattgactaaaaaggaaagaaccaaatgaacaaatatgcagaaaacactttaatgatacatataaagaaataaaatcaaggataattaaaatttttgaaacaaataatgggtagaaactaaaataccttaagtttcatgactatgacgtgctttttcaacgtattatggccattttcaagtacttagttttaacattagtcacattttgtcttaaaaatgaccttttttttttggtatttaaaggcaaaa

SEQ ID NO: 80563 - DNA, 1020 bp, Citrus sinensis
  Intron number 2 from transcript orange1.1g030814m (locus o range1.1g024173m.g) derived from phytozome v7.0 (chr-ID sc affold00006; pos 476947 to 477966 reverse strand)
tggaggcgataaagcagctgttagtaggatcgaaggtgaattatgtttgcatttagtacactgtaatggttgctctttgttcctgcttctcatgaatgaatcaagtatggagtttaggggctatgatctgttttttaattactcaaaaattaatttggagatatcactgaaagtctttttctgcgattctgttgttttgttcagttgttggatgtggtagagattatggcagagagtgctgtgagtgaataggtttctgagatactggtatgggggtttgcttgtcatctgtctctttccttcattaagcccgtttctttttagcacagtttccttcaaatagcctctcactgcagttctcctccatgcctagcgttctcctttatgcccagcgtcctagagggcacaactatctccctgataaagggctgtgagtgtgtgcgtgattgttttgttttgtttttcttttttttttaattcttttcatttttttggtgcctttcctcagattgtgttgttagttgtcttattggtatgataaagatatcaaaactatggagtaatttgacaagatacatctataacttgcagatcaatttggcttctctctctctctctttgtgtctctctctaccgcatcctttcattgatgccgtttttgatcaagatttcaatgaacattagttttctacagtttattccctaatattggtaattctcgagtgacctatggtgcatttgcttattgcccaaaagccaacactgaccataggtcccgggaaatcctagacaaagcatcgatgttttgcctatttgagccttttaagtatatgataagtttattttattcaattctatttccatatcaagtcgcgacttttaacagttgtagtagagacatagagcaaagttttcatttttgacaaagataagcttatccagcatttttctttcaatatttgattgcgcttcatttattctgtaggtgacttttcttgcacatcagaaatccaaagagct

SEQ ID NO: 80564 - DNA, 819 bp, Citrus sinensis
  Intron number 2 from transcript orange1.1g038471m (locus o range1.1g038471m.g) derived from phytozome v7.0 (chr-ID sc affold00018; pos 196744 to 197562)
ccattcgaaaggtgagaggcttctgatgttgctagatactcatgtttaaactattacactgcaatctatattcccatgtttccacattgttgatttcattttcagcaaaataagctgaacctaggaatggaaaggacttgtatctcaacgaattccacatagttggaaaagaaaagagaaaaattgtcttaccatttgagaatacatgacaaagatttttgaactcttgggactgctttatacttccccttcaagtacactgcatttcttatactgaagtaattaaaggttctcatagtgttagatggctatttattgtgggcaaaattattgataaaatatactctgttgttggcttctattcagttactagaaagtttatgccagagtgtttctgattccttcaagtgtttacattctctttaggcctgccaatctctggaggagtcataccttccaccagttaccttcattgtggtgcagaagaggcatcacacacgcttcttcccaacaaatccttcccaaacagacaagagcggcaacatccaacctggttttgattattgcttttgtattattgctttttaatatgatttccttttcttgagcctgttttaaatcccttgtgatgaccaggaactgttgtcgacagaatgatatgccaccctttagagttcgacttctacctctgcagccacgctgggattcaggtagttcagagccaattttatcttcacagtaatttatcttcggtttcaagaaaaagggtctaattatgatttacttgtgcacagggaacaagcaggccagtccattatc

SEQ ID NO: 80565 - DNA, 640 bp, Citrus sinensis
  Intron number 1 from transcript orange1.1g024329m (locus o range1.1g024329m.g) derived from phytozome v7.0 (chr-ID sc affold00149; pos 327852 to 328491 reverse strand)
agggtttcctagtgactgcgtagtcatcttgacaggtataaattgctctctactaagttaataagccagcattattgcatttttttggctaataccttccgttaaagctcgatcttatttttcagttaccaatatatggcattcaattacttttatgggtacatgttctgttcgttcctataatttgagtaaattatttttcagttaacctttgtattttttttaaaattatttcaaaatcccgttgtttctttgcagctgtaatcttcattttcctttttctttgatttttttgtttttgtaaggcagaggagtggacaaaactgcaacttgattaaaaaaatttcaaggttgaaatagtattgatgtcggatattttgagttcaaacaaatttgacatgcaacccgtttaaaaatagatgataattaaatatattttaacaaagacaaatatataatataattcttgtagataattttgaaaatacaggaattaactaagtagttgactcaaaattataatgattaagaaaacatttaccatcactcttacattcttatataatatccaccaatatgaacaaaatattcgtataatttgacagaagaagagaaaaatccatataggattccaacaaag

SEQ ID NO: 80566 - DNA, 355 bp, Citrus sinensis
  Intron number 1 from transcript orange1.1g008909m (locus o range1.1g005504m.g) derived from phytozome v7.0 (chr-ID sc affold00054; pos 480510 to 480864)
gtactcttctttgttatctcgccaactaataatacgtaagcttcttttttttcattaaaattaaaaagtcctttatagttaaagtgttaatcgaggttaaaaaataattgtaaatatttagtgaaattaaagttataccattcatattgaaataagaagaatgaaaaaaaaaaaaacttgcttttcttgcatttgaatattaggaactgctggaaagtgatgaattggccttgaatcaaaatttaagttttttttattaatttgattgaaaagtttataaaagaagctacatgtttaatttgtatgatttaatttcttaatattacgatttttaactgtgtattgatttcagaag

SEQ ID NO: 80567 - DNA, 857 bp, Citrus sinensis
  Intron number 1 from transcript orange1.1g000927m (locus o range1.1g000847m.g) derived from phytozome v7.0 (chr-ID sc affold00019; pos 763136 to 763992)
gagaaagtctccaagcttgagaaagaggtcgcttattttgttttgcagttgaatgcatgatatcaattcttgattttattgttataatagagcagttgcataaaatatattgtacctagactgcttattgaactaagacagtttgagtttagtttgagtatagaactgaactactatttgatttgttaaccgttaatcaaatgtttaccattcgataatcttattattaaagatttctaatgggtgtattagcccatcttgtgttgtgcaccggatttgaagagatgattaacttgttttattatcgattaaaatgaagtcgaaaagcgtttcatggtaaacaatttttgttttttgggttttgttgggttaaaagattctagttttacttgtggtttgaagaagtcttcatcatcataccacaatctatatatcttagttggaaggattctaaacatgtgacaaattacatctgtattcaacagatatgtttggtgcctgttggtccactactataaatttgcttaggggaatttcatagttgttttatggtagcatggtgtttcacataactatcagtaaaatttaaagcttgtttctttggccaaactcgccactgggatgcatagtctctctatttgtacttcctttggtttctgtgaaatctatagtttaataatcaattttcttatcacgtttttaatcttctttcttctgtgtcttcttcataacattttttttccctgttttacctgtgtttttagtatagtgtgacattaacttccgggttgaagccttataataaattttagcaattgttttgcaccacctgataaactattgtttctggcagttgt

SEQ ID NO: 80568 - DNA, 585 bp, Citrus sinensis
  Intron number 2 from transcript orange1.1g014307m (locus o range1.1g013897m.g) derived from phytozome v7.0 (chr-ID sc affold00006; pos 899376 to 899960 reverse strand)
ttattaagattcttaagcctgttaagaagaagaaggtaagtttcgatgtgggaaatatgtttgttatttctaagttttattttgctttttcattatatgcacgtgcttctagatatttagtttttgtggatggaatcacgtcaattgctgaagaatgtgagaattgaaagttatgttggtaggcacatgtattcctggaagagttttgaattagaatgtgtattttgagaacttctttattcattggaatgttatactactgaggagagcgttgattaaattgttgtgcttatgttaaaatggaaaagtttttattctattttattatacatgcatgtatgcatagcgaacagatactctttagttgaatctgtattgaaaactatgattggttatgcaagccttgtttttgccctccatttccatggggaacttcttatgtttctggtctgaagaaattcagattgtgttaactatgcttgtgaagcttgtgatttatggcttagcttgaaattggaaaacatgaccttgtttttcttgtcaaatgcagattaagagggagataaaaatacttcagaatctttg

SEQ ID NO: 80569 - DNA, 306 bp, Citrus sinensis
  Intron number 4 from transcript orange1.1g019770m (locus o range1.1g012172m.g) derived from phytozome v7.0 (chr-ID sc affold00091; pos 141294 to 141599)
ggtaagatataccagttttgatgggttgtgctcttcatgctttgttttctgattagtttgcctaaatcatctgcattaattctaatgttttgaagagccttggtctttggagtttgtttcaaaactttgacgggagtcttattcctgtggttttgtcattccttacaaatatgtgttactagtgctgtcattcttgattactttccaatagtttgaaagtggacctcttctggataactataaaatacgcacattcttatagaaaataattttacggatatgaaaggtatcctcctggccacggtg

SEQ ID NO: 80570 - DNA, 745 bp, Citrus sinensis
  Intron number 1 from transcript orange1.1g008126m (locus o range1.1g007058m.g) derived from phytozome v7.0 (chr-ID sc affold00096; pos 389677 to 390421)
ttcccatttgtctctccgcctgcccctcctccaccgtaagctctccctcccagtctatatatatatatatacatattgcgttattggatgtgggtttgttaagattttagttttttatttctgcaatatttgattttaaggtcccacagtgggcactttgttaatgttagatgtatcagtgattgtcattcttgattagattctttttttttcttttttgtgggatatattataatttagagcaaaaacttatgtgggtttgcttttttatttcttttaatttatagtttttcagtttttcatctacatatcattccattgtttttgtaagaacaagtgagctcgtgggtctcaagtccattatttttttcgttttgaaaataaggttttcaatgaggatctttaaagatacaaacgtcatattaggctgtgggtgccagttactttaatatagaagagatttggggttcaaacgccgctcaatggcttttgctgtgtctaatgttcggtcaaataaagaaaatctcttactaagtagacttgactttactttacattcatacgaacatgattgataagcaatattcactaaagctgatcatactaatgttttatctttattactcttttctattcgactgttccatttttcttagaattccagatttgtgaagcttgtgatttaattgctgtccttgtttttcttacagtcaatcttttggatcagaaatcagacgcaatataa

SEQ ID NO: 80571 - DNA, 573 bp, Citrus sinensis
  Intron number 1 from transcript orange1.1g003891m (locus o range1.1g002273m.g) derived from phytozome v7.0 (chr-ID sc affold00018; pos 311716 to 312288)
gtggtaaaggccaagagctttcaagtatctttcacgtatgtagccatgtgtttgtagtgttgccaagcaagaaactctttatatatatatatatatatatataatttcaatgcgagtttcaatattcgtagccctaatatatttcgctatttcttcttctttattttgtgttgtatttaatagattatcattgattttgtgatttgatattcgttattttagtgattagatcccagttttatctttcttttaactgggctttgctttttttttttccccctctttgggggtttcatatggtatcatcaatttgattgaagttctcagcttttgaaatggagcagctaatattgcttttgcatgattagggttttttgtgggggcgtaactttgctacggggttttgccagtttttgtttactagtgtcaaatagttgattttcattgagttttttgttttctttttgctctaaaaatttcaaggtttagtttactacagtgcatttgattgctttgaaatttgatttggatattttttcagttaaagaagcgagctttggataatttaaccag

SEQ ID NO: 80572 - DNA, 509 bp, Citrus sinensis
  Intron number 1 from transcript orange1.1g010621m (locus o range1.1g009653m.g) derived from phytozome v7.0 (chr-ID sc affold00019; pos 1514665 to 1515173)
ggcaacgagcaaaggttttgtcagcagtgtagcaggttagtttttcttattacctccctccggccttcgcttttgattgtagttatactgtcatagatatcaaagcagttttttacataagatcttagtattattttcacattatgtgtattattggctcaacgtaactagtttagcctcatttgatgattcttttttttcaacttatataaaactttgaaggtcttctgttttgtgttctttttagtaggtttacttgttaaaaattgtgttcaagttttcaagttaccaataggtctaggttttctttaatttgtagtattatcagtttgttgtaacatgaacctaaagtctgtgaattttcctttactttttttatattttccttgtatgtacgttctagccaaatcatcatcctttgttaagtacatttgtttatttcttgtagttgctatgaactggagtaaattttttttggttaatcaggtttcatctgctggctgaatttg

SEQ ID NO: 80573 - DNA, 698 bp, Citrus sinensis
  Intron number 2 from transcript orange1.1g014619m (locus o range1.1g013795m.g) derived from phytozome v7.0 (chr-ID sc affold00009; pos 1548800 to 1549497)
tcgaagagaaggagctggtaaatccctaactataatttttgcaggacaatcgaggaatatcatgcatactgttgcttttgacccccccaaaaaaaaaggaaaagaaaagaaagtagggcttacatttcttaattctacttgatttgattatgaagctatgatgccatgcttcctaaccctgtttaaatgaactatattcatgggttagtcttttttattacatgtggtgtgtcaagattgataaatgattgtgatgtcagttgttgaggtctcttgaggttgtataagaggccttaggtagaaacctggcacacattagagatgagggtgagttttaaggtggaaaatatgttctataatcttctgaatgggttgtatggaatgtgaattgatacacaatacactggtctcagtcttttcactttgcttgaggggagtccttgatgaaatttgtatggcagactggtattctaaacctacaaatctagtaatttaaccttttgtttcctaatgcttttaatccagcttcatctcttgaattctttctagattgcattgatacaattgctgaataattgtaatatctgatttatttgttacttaaatgaatttgtccctgttcttgaacttctattggctaatttctgggtgttgtgcaattcattatgttaaggaggcagatttggttttgggtggag

SEQ ID NO: 80574 - DNA, 755 bp, Citrus sinensis
  Intron number 3 from transcript orange1.1g014619m (locus o range1.1g013795m.g) derived from phytozome v7.0 (chr-ID sc affold00009; pos 1549624 to 1550378)
gacacgaggtattttctttggatattctttacaggattgaagatttggttgtagatggtttgtggcttaacattgaaatgaaatgctgttggcccggaaattctcaaggcttgcgttaaaaatgtgaactgataaaacttggtagcttttatttgtctttcctacagtctgcaaattggggtctttcagcttgtgtttaaatctggtgttgttgtattgttttccaagttgtgtttcagagttggtggtggcattgtattgttatgagctcatctgtatgcaaggttggtggctataccttgcttctgagtattcgattgaaaatacaccaaggggctataatgggttttattaattatggtgtttgattttagtctttctcttaccctgatactgtgagcctgctggcctggagtgtgtctgaactagaacatttgtagcacctttatctctttaattgcttttctttcactttgttacagagtcttaatccatttttgtttttgttcttaatctttgattcatatttttattgtaaaatatcaaaccatggtgttcagccattttcacttgttgatgttatgtagatgctttaaattgcattttctgcatgattatcaaaaggaatgatgtctattatgttgcgtattcctgccttttcttttttaaagtgaatattagcttctatctaattgcctttcattattgtgcatcaacaagatcgtggagctgtggaccaagagaaattttaggtg

SEQ ID NO: 80575 - DNA, 664 bp, Citrus sinensis
  Intron number 2 from transcript orange1.1g026724m (locus o range1.1g026534m.g) derived from phytozome v7.0 (chr-ID sc affold00006; pos 1648563 to 1649226)
tcgcggaattggatttataacttttgctagtgcaggttgaatgatctcatgtttaccttggtgccttctcttaattttaatttttttttcatttatgtggtaattttgttggttggtcatccctccccagttgttgataaaatcccagttttctcgttcgtaactaagtcgatatttttggtgaaaggactatgaagatatcacttccattttgaaatctagaaatgtgtatgtttaaattttgaaatttttggtgttataattatttgcagcaatcattatttcattagataagagagataagccatgttaactggtcaaaattattcactccggtagtattgtgtaaagtttgatataaaaaactactcgtacagaatttttgagtatccaacttgtgcaacaaattacatttcaatgatatttggaagattttcaaattatcttgtgttttaggaattaagcgaatcgtagttgaagagagtattatttgaataaattgttttttaagcttattctggacttcagctattgctagatgcaggtgtgatttggactatttgccttgttttccctaatgttttctgcttgaaccagaaaatatcatcaatgaatgcaaggatgtaacacctttttctgtgttacagattctgtggagaattta

SEQ ID NO: 80576 - DNA, 931 bp, Citrus sinensis
  Intron number 1 from transcript orange1.1g026967m (locus o range1.1g018930m.g) derived from phytozome v7.0 (chr-ID sc affold00363; pos 93755 to 94685)
gaaagcaggtcaaagtccttttttgaatttttttgatgattttgttgtgcttatttgttagttttgtttatcagtggatctgtgacgaaagtggggttcaaatttgatgattaaggttttgtttaagttgtgaaatggaagtggaactgctttttaacaataatagattaatgtttgtttttgttactttttggtgatggctaaacaaaagtgaagctgaaaaggtatgggaggtgattgattttgcttttagttttagatttatagcttattttggaagaaaaaagggatctaagcatattaaagtcaagatggtgccgcagagatataatcgaatgggtagtataaactttagttaggctttggcatgtcaatatagatgttgttgtaggtggtctatgaagtttgactaagtgattactagagataagatcatcattagtggccaacatagtatgagaactaagacatttgaaagtcttgaagtttgtttctgggatcatgtgcttcatcctaacccgaaagaaagaatttgttatgttcgtaatgaagaggtcttttttccattataagtgggacaacagctagattcatatgaccaaataattattagttcctattattataaattagaactaatattgtttaactggtggataatcatggatcacttttttttgcatgctctgcttacgagtatctgtgataatttgaattcacttttccttctgatttaacatattctgtcaagtatgaaattttacaactgaagtttggccataccatatcttctggcaattttatacttcatgttgtacgtcatctgggaaaactttaatgtgcataacataccctaattcacggtgatataatttcactgacttatatctctacaggatacaaacattctggagaatatccagtataaaaa

SEQ ID NO: 80577 - DNA, 596 bp, Citrus sinensis
  Intron number 1 from transcript orange1.1g015942m (locus o range1.1g015942m.g) derived from phytozome v7.0 (chr-ID sc affold00194; pos 74142 to 74737)
ttgctcagcttctcattgaaaagggttacattaaggttttttgttacattgtgtttaagcttcataccttttttttttttttccagaatgggttaagctcaatttttgtttatatttatccggggaattgttaaattttagtgccctgactgagaattattgcaattcatgtaaatagagctcgattttgctgtcaaagacttgaactttttggtcgataatttctatatttcattgaatttgcattttggttcatagcaatgtcttaattttatgtacacatctgaatggttgtcttcatttcagactttgctaattttttgggacgtagatattgcttgtagttgatttgttgtattagtacttccaaaatcttgatttcaatgtgttgcttgaatttgatttgggtaaatttgcactttcattcacttaaaatcgttttttgaagagatggattaaatggaaacacggttttggggaaaatattctagaattatgtataagatcattcattttctatggattttgagtattctgatcgttttcttgatattgacataggaaacaacaccgttggctggttcctcagctggggc

SEQ ID NO: 80578 - DNA, 491 bp, Citrus sinensis
  Intron number 2 from transcript orange1.1g009177m (locus o range1.1g007944m.g) derived from phytozome v7.0 (chr-ID sc affold00118; pos 248476 to 248966 reverse strand)
ttgccactgctaaggtacatacacaattacaatgatcatgattctcttttaatacggaacaaataattcaatttatgtgttttgatggtggttaataaataaaaaatataataattaaattttatttatatattactattaaaagatatataataagagatttttaaaaacttaatatagcgccgatgaaggaaggattttaattgataattaataaataaaaaagttataaatttaattttatttcattttatacactgatagaaaaatatacagtgagagatctttaaaattttatagtaaaattcagactaaaaaaaagatgttatttcaattataacacattttggatcctgtcagtacgtgttaattaatgaagaattaattaaattccaattttaattaattaagctttgctttgcttatgtttgtgtatatatataaatttatatataggcttgttacgaagcgaacttcccttgtcgcacgcc

SEQ ID NO: 80579 - DNA, 822 bp, Citrus sinensis
  Intron number 1 from transcript orange1.1g042445m (locus o range1.1g042445m.g) derived from phytozome v7.0 (chr-ID sc affold00860; pos 20087 to 20908)
ttggatcaggtttttcgggctccttcgtctcaccggtgatgtagccaagtctacccttgccatcgaccaccaactaaatggattgcgcccattctagatagttcttgccgttcaatttgtgaccggttaattgcatgggaaactctcacttccgttcaagtttccagatctcgacggtagaaactcccctacaccaattctagtagatgtagcagtgaaattggtatcacaagttactgtaaccccatgcatggtgttttgcgccattacaacaagacaatgaacaaatccgtatgggagtcaagccaggcttaattctgccatagctttgataccatgtaaacagaggagaagaacaaagtcttttcttatttttttaagtacctctaatagccagtacaatgggataatttataggactacgcattcctaatttaacttcctaatttttgaaaatatacaaattagtaataactgtacaaatcaaatagattagacaactaatcctaaaaatcagaaatgtcaactaatctactctttccatattttctgcacttatcaacatttacacaaggtgagcaaactgatatttggactcttaggttagaaaaaggaaaaaaatgggacgaaattaaaagggaaacgaaaatgttaatggctattgagtcttattttatttaatgactgacactgcaatacttagccttattatttaaaattttcaaacccataaattaatggctctaaagcttctgtaagaatattggtgtttgttaatccattgaatattagattgcagagacagcaaaaaaacttgggatc

SEQ ID NO: 80580 - DNA, 668 bp, Citrus sinensis
  Intron number 3 from transcript orange1.1g031689m (locus o range1.1g027224m.g) derived from phytozome v7.0 (chr-ID sc affold01647; pos 587 to 1254 reverse strand)
gaaagacctactgctcaattgaggagactctgtaggtgaaattctccctcattcttgttggttttgcttgagaatcaattactaattttcttatttgtatgtataaaggttagattgcatattgaagtgcttttttttactgctaaaagtacttcaagtaactagaacaatggtggtgtttatatcataatcttcggtttaaataggcaaaagtttatcttttcccccggatattttagacatcgaatgctgtctggagaagcactgataagtgaatttaggtactttgtagacagttctatggtttcaaatgatctagcctccaaagcaccccattaacagtaggaatttgtcgttttgttcgtctttagacgtcgtcattaatgtggattttatcttattagaaatttcacaggtcctattgactaactaacaatctatcaagaggttaaaaaaagaaaagaaacatattagtgaaacatggtaagagaagggaaatattgcatattaatcaaacaatcaaagtgatagatactattcaatgatttagaagtggaactgtctactgcagatgtgttttctataaatctaagaatttgagagatgaggcaataaattgcttatttcttgcaggtttttggctgaaattggggctttatatcttttgg

SEQ ID NO: 80581 - DNA, 626 bp, Citrus sinensis
  Intron number 1 from transcript orange1.1g031689m (locus o range1.1g027224m.g) derived from phytozome v7.0 (chr-ID sc affold01647; pos 1555 to 2180 reverse strand)
ttccaactattttccgatttgaagaagtgttggaggctagttttattttttaaaattagttagttagttagcgtataatttaaacatgcccatctctgttttgttgtataatttgtttccttgtgacttgctatttgataagtagttaagaattatataacctcacacaaattagaaggctagtagaagtcttttttcttatgcttgtggtgtatagcatttgtttgatgaaatgtctgtaagaagaattgtggtattttttgatacttattagggcaacccttatgcagtcactctaaagcatccgtatcaacaatttcttggctaaataatagtccatgtatgtttgttacagctaactcagtttatgtgaagttgactgaataaaaactttagcatattcaatcaaaatatttaccaataaaagcaattgataagaaagagaagcggtagagtttgtttcttagaaatgcattatctgttaattttggttatgctttattcattggtcagattatgataggcccattctactatgttgtttgcctttggtaactatctctacgtaattttctcttttgcctatttttgaaaattgttgttgggaagtctcaggtgaaaccaga

SEQ ID NO: 80582 - DNA, 950 bp, Citrus sinensis
  Intron number 2 from transcript orange1.1g029980m (locus o range1.1g030016m.g) derived from phytozome v7.0 (chr-ID sc affold00006; pos 1475331 to 1476280 reverse strand)
gtggtacaatatatagtggttagtgcctataaaggaagaaaaagttttttatgtgcttttcctaattttccatacaaatctcttaattgttttgtaggcattgctcttttgaaatttattttagtttttatctttgaattgcatttaatgttagaactgactgcattgtgactttagtaactaaatatcccacacatattggtcttttctttcttttccttctgcgcccgccccctggggaattgactaagtcaatagtgaatgtctttttttcattaacatggagctgtagctaataacagaatggctggatgggcatgataccatgccatgtattgtacgagcttgatgtaaactacaatagacttttttttttgctaagaaacaaggattaaataaaactataagaaatatgtacaaggattaggaggattacaaatccccaaaaaaggacgagaagtcccaatatgtaaactacaatagacattgtattcaaggttctcatttgaattgtgatgagaagcatagaaactactggcctagtagacttaggaatgtgcagtctggcacttctgcctctgtatggaaaaaccaattggttgaggaaggatattgcgatattgctttatttatttttgggttcattctggttatagggtattgctttcctaaaatgatgcatgagtaagactgatcttgcaaaaattcacaggatatggtccatgatattccatgcctgcatttacagttatgccaatgcagaatctctctctatgatatttaccatctctttcattgtcagaagaaattttgctttttgatgagcacacagttggattgttttataatgctttctcttccttgtttgaataatcaacttgtaagtgaatctgatgttggagcttcaatcaatagaagaaccgtgaaacatttgagcccttcattgagga

SEQ ID NO: 80583 - DNA, 832 bp, Citrus sinensis
  Intron number 2 from transcript orange1.1g038770m (locus o range1.1g038770m.g) derived from phytozome v7.0 (chr-ID sc affold00019; pos 1306326 to 1307157 reverse strand)
tttcagctggtaatcatccatctattaactgtgaattataaatgaacacttgcatttagaaagttttaagtccacgtttggttggaagaaatgagaagagtggaaaggtgaggaggggagcgaaaataagaagaaaagaagataaatttcaattctattgttggtttgtctcggaattcaccttcttctcttatttctttcccctcctttctttttcatttccttccaactaaacattgaaataaattaaggtttgctcccttactcctgattattcacctccatgttccatacagatatgcatgcaaatgaactgattatcaattctagttaagctgacagtctacgatccataagataaacaaagtgtctaaggccatgcatgcacataatattaaatacataagaggttttcttgataatttaaggatttacaaggtattttgatatttatgattttaaaattataattactacgaaatggaaacttcaatcttgaaataaataggttcggagtcatttctatacataacacacgtacattaaaaaagtccataataacttcaattctttctttgaacctccaagctgacgctgctgacccctttacacttctttcgaatattaagccttttttttttctccctttaaagagatgttttccctgctacaaaaataaataaatgatctcgcaaaatctgatagcgcatatataaaaaaacaagcttcctacgtgtatgtatataaaattatgaatgattatgtgattaaaatatttgaaatgtgaaatgggttaggtaatacaaacaggcttaacaacaagtacaagaac

SEQ ID NO: 80584 - DNA, 596 bp, Citrus sinensis
  Intron number 2 from transcript orange1.1g023722m (locus o range1.1g023186m.g) derived from phytozome v7.0 (chr-ID sc affold00185; pos 245294 to 245889)
agttcagagatcgaagccctcaacaccaaaacgtaaaattaataactcgttttttcttttctttttgtttcatttttttgatgacatattcaaaatgaagatagggttttgattgatatatcagatctcgtaaaagtttcatgaaatctttcaagtctttcataatgtcactgttggatattcgctgctggctctagttaattctattccaattaatcttctacaaattttgtattttaaaaacaaaaaaaaaaatttgtgggttcaaaagtactctcttatcagcagaacacaatttcaaagtcaaatccagcccttgaatattcctccaaatttagaaagtttttatgttttatcagccttattgtacaaacattctttcagtttcagcaaacaaaaacagcagtctgcattctgcaatatacataagaagcattcataacacacacacacacacacacagagatattctttttttcttttttcttttcaaatagattttattaattgatttagatgaaagaatgagatagtaattaaaaatggttaatttggtgggggcaggaggaggaggaggaagaaacaacttgaggtta

SEQ ID NO: 80585 - DNA, 671 bp, Citrus sinensis
  Intron number 1 from transcript orange1.1g009030m (locus o range1.1g004390m.g) derived from phytozome v7.0 (chr-ID sc affold00158; pos 142661 to 143331 reverse strand)
ttgtttccaaggtaaattacgatgacgccatgataattctatttgaatgaaaattaatattacctttcgatattactcttatactagcgtttgtatttgatgaattcagtgttggatctagcagctctaggattaggcactcgcagaatcaaacggttaaatatttaataagttcaaaattgcgctgggttgttgtgcttgacgagcttgtatgggtttaggttttatttgtttatttatttattcttttaaacagataaaagcttctatggaatgggattgagtctaaaatttcatacactgcaggtgctcaaaagaacaattctaggaagagtgcactagcttttacttctctatcaatctaacttttgactgtcaattttgattttataaatttgtctgtggttgcaagatcaggttttgtattcaaattgagtgttgtaataagagttaaaaatgtaactttgaatgaaatgttttagttgctttgtatttggaaaatgtagttgtgtataaggttctcttcagtgtgtgaattgtcttttttcctttctcctctttgggaattcattcgcagaatttatcatgcaataactgttgtcttccttttctttttaactttcttgatggatgcaggttgaaaaacttataaaggaactacctagtttgcc

SEQ ID NO: 80586 - DNA, 863 bp, Citrus sinensis
  Intron number 2 from transcript orange1.1g021140m (locus o range1.1g021140m.g) derived from phytozome v7.0 (chr-ID sc affold01488; pos 19906 to 20768 reverse strand)
ttatcttaatctgacgattggtccttacgattgtggtaagtggaattttgtgtaagttacaacaatataattttttgaaaagagccgacaagacgctctattttcttctgtttttttgggatgttgagcaaaacttttctttattctcaggggtcctgttttgctgaagtacattccaggtatcaatccctctgatataccatccctttattaggtgtttataataattcatgggttttgtcatattggtttcaatgcattggttttgatattggttacagcccattagcccctactcctctttcccagcagcctttaatggtttttttttaattttttttaagcattgtactttgattcatggtaaaatttgtttgtatgatgctaagttgaggacacgataatagtcaattagtcatgattttattgtatgcagcaaagataaatgtccataaaattttatgttgttgaaataataagatttcgttaattttgtagtaagaaatgagggctgttgatcccttccgtttattatatgcaatttttttttcactctttcattcatttattgtgaagtgtgtttaggtattagtcatgggcaaaagtaaagatctttactttggtatttttgtcttcttgtgcttcattggtataaatgaggaaaaaaaggcaaaaataaaataaaattataatatttgcatgaattccaccatctatggtatgttgaatagattaaaaagcaaggagtacagtggtggaatagcaggtggggggactactttttttttaaaaatataatacatattgatggactaattttccttcccttaattatctaaaatttttcttttggaagaatacaa

SEQ ID NO: 80587 - DNA, 676 bp, Citrus sinensis
  Intron number 1 from transcript orange1.1g021140m (locus o range1.1g021140m.g) derived from phytozome v7.0 (chr-ID sc affold01488; pos 20745 to 21420 reverse strand)
tagtctcgctagtattcctgatttggggtaatgatgtaattgaacgattatatttctattattcttatatttgaatccaatgatattgtggtggttttatgataatattctatcgttttgtgtcgcaaatcagccaatgagttgggtatgtgctgggtatatgctgaatgtggttgttgttgaatttgctggaccttggatgtgattcttgctgtgtatataagaaatagacaaacgtctttctgtggtaatagaattgtctaagttgcattacgataaatgtcaagtaactatgctttgtaaccttaaacctttatttgtaagagttggtgtacttgactgtgaaagaatgttaaatgttgacctattttcattggtgaagataaatgaagttaggaaaggtttgtaatcactataaccgtgacaatttcttgggtagacttgtaataattttattcatggcatgtaatttatttttatcagagggcatgtttgcttgtagtctgaaatgtagggtaatatttaaaataagttctgcaatatatattttgctattttttattttttgtttttattttaattggttttagtattacttggaggggaattctgatctgctgaagtttatgaagctggtgcagcaagcaggcctttatcttaatctgacgattggtcc

SEQ ID NO: 80588 - DNA, 928 bp, Citrus sinensis
  Intron number 1 from transcript orange1.1g018112m (locus o range1.1g015917m.g) derived from phytozome v7.0 (chr-ID sc affold00077; pos 487016 to 487943 reverse strand)
ggaaggtcacgcctgctaccaagcagattgatcatgtgagtgcctttcaatggtttcctttgcaaatgattctgtatatgaacaattctgaggttcgctttattttggaagatatgtggtttgcattatgaatttgttttggaaatgattggttgtttttctatgttctttggataagagaggtccaaagcattatttgctattgtaattttgaagaatatgtttcgtgggatgaattataggcaccaaatggttcaggattcgtgttcttgtttagttgttacaaattctatcatctgggcttttgaggacattagatcacaaacattgaattattgataccaaaatgtgatgttcatattttggttacagcaccatgcttttttaggaagtgaacgtagatgtagaccttcaccttgatctctcctctcttatttcaagcatgaccatcgttatctatgcatattcttattctataaatacaaagtcactaaatgacctgtgtgttaggcgtgccactgctcagctttgatctgaagtagttcaattgggaagggagaaacttttagtgtcttaagatttttagatttttgtagcttcagagagtcgtgattctaaaacagcttgcagaattgtcatctgtagcattatgatatatgagcatcacaattgagaaagttatgttatggaggacgattttttaagggtgagtgggagacttagtagtccttgctttctctttattgttgtgtcttcttttaaagtgggttaatttctgtttttttttcgtattctaagtttattttttcttttttttttcccaagagatattggttgtatcgccatcataattgctccttacttttgcttttcttctttctgtatgtgtgtaggatctaccgcggaccttcccaggtcacccgtggct

SEQ ID NO: 80589 - DNA, 413 bp, Citrus sinensis
  Intron number 2 from transcript orange1.1g029156m (locus o range1.1g026545m.g) derived from phytozome v7.0 (chr-ID sc affold00068; pos 363479 to 363891 reverse strand)
acgcaagttgacaatattgctgaactagagcgaaggtaaatttcaatcttactcaaaattagcatagattgatcaaattacaaaaacatgttggctattgctgactgttggtgatgtacatgtttgtatacacaaatgtctatgaatccttgtggaaatgtcactctgagtagacacatgcaaatgctaaattgaatcattttctgtggttctaattatcatcactgacccatcatttgaaaaatcaaacacaagaagtttgttttgaagaaaaatttattctttgttacccagtgaagttgaagagtgacattggtataactggaagtttgggtttaggcacttcaagttggatatgtacgttatattatattttggcaccatttttttctgagaattatgcaggttggagg

SEQ ID NO: 80590 - DNA, 482 bp, Citrus sinensis
  Intron number 1 from transcript orange1.1g029156m (locus o range1.1g026545m.g) derived from phytozome v7.0 (chr-ID sc affold00068; pos 363911 to 364392 reverse strand)
tcctcgacaaacccctcagcaaaggcaaacaagaggtcctcttcgaatcgctcttcttcttttttttctttcttttaatttttttgtttcatactctgtttggttgtcgcgaaaatgtgctggaaaatcaaaagcaactgaattccctctgaagatgaaaatttttgttcgtcagttgctttcacagcatttctttagctggcagagacaagttaaaaatcagatcttgacagcagtttaaaaatcagatcttgacagcagtttatgacattgtttttctataattatttacttcgataaaaatgagacattccagttatagtattaattttgaaatatattttgattaatgaataggaaaagttaaagagttgaatttgaaaaattgtttaagtttagatataaagtttggatctttgaaaatttatttgtggttctgatggttaggtaagtttgagtgcgtttgcatttctgttctcgga

SEQ ID NO: 80591 - DNA, 950 bp, Citrus sinensis
  Intron number 1 from transcript orange1.1g034005m (locus o range1.1g034005m.g) derived from phytozome v7.0 (chr-ID sc affold00019; pos 1610554 to 1611503 reverse strand)
gtcagaacactggcaacttcattacggtatgattcctattccaatagctttgtttgcatattctgtgatgcttgtaatgcatcagtgtgtgatttttttaacttgtttgtttgttctgaacattctaaaggaatggttttgtctctcttgggaaattaataaaattgttcttcaggaatagtttgttctatagagagaacagcaaccatcattctgtgtgaggcataaaaattgtagtccacaatattttgatgcttcggtcttgggtagttcaaaagacttttgttttcactacgtttgtgttttggggatttgaactgtaaaagaacttctattcttgtttcagatttcctattgaagttagatctttgttttaaatgttttgtgaagtgagattattgccggaaattgttaaccattttgtaaatcaaatgtcttgctatggttctaggaaatgtagtaagcccaactaactgcagtgtacaccaagactgaaaaatgcagttggtaaatgttgcatacttttatgaagtattacatgtggaataatttgcttcgtgtcacatacagagtcaagaaatgagtatctgagcccttattagttggtttcaaataatcaattcacttgcgcatgaaccacttgcgttcattcccctccaccattagcctgattttcttgttagacattgtgcaacttgaatttagttcaaattgtttttacatgatggttgtatctgtcatttagtttcaataagccttaaatgtcttgggcctcttaactatgtaaaatctaaaactaagtttcccaaaagtgtgcattattctgtgagtctatttagattgcgtaagcttgttttaactgtctgttgaacggctaaatttatcattgtgatgacaatctctctgcgtttttttttttttgttgcaggatcggccttcaaccaaggtcc

SEQ ID NO: 80592 - DNA, 427 bp, Citrus sinensis
  Intron number 2 from transcript orange1.1g000181m (locus o range1.1g000133m.g) derived from phytozome v7.0 (chr-ID sc affold00487; pos 76182 to 76608)
tggtactattctgcttagtttattattcgtcattatatctgatgtaacttaatgcaaggtatttagtggcaatatatagatcttgaaatgctgcatgcgacaaagtttgtttggaaataggtatagaatgttcttgcattattcatcaaaatgagtatgggatatattacatctcattgttcccattctcacaactgatattattgttctttgctgggtctttttttttttttggtgtgtaaactctgttaatcatagcactgtcctctctcccataacggtattaagctgagcaagcaagcaggcagcttaattttccacatacatctgaaagttatgtttgcttgagatttctctctctctctctctctctcgctctgtttgatttcgtacttattttctttcccatcatgattgcaggaaaaaa

SEQ ID NO: 80593 - DNA, 670 bp, Citrus sinensis
  Intron number 3 from transcript orange1.1g000181m (locus o range1.1g000133m.g) derived from phytozome v7.0 (chr-ID sc affold00487; pos 76668 to 77337)
ggtctgaggtcagtctgatgtaaaaatttgctctgactgtgaatttctttttgtccatgaatgtaaccattaaccactatgtttgttgcacagctgtatgctgatacatttcatttctttaatgggtgcatatcattcttctagctaaaatgaaaggaaatggacagtatttagcttcaggtagaattgataatttctttgaggtccttctctttgaattgtataagatagacggttactgcatttgagtctaacctgaagatctgagactctgcagttactttatgttcctacgctttatcaatgagaagctaatagtagcgaccttcagatttttctattccggttttagttagagcgatattgagtctcaaatcatgcaggctgtctttacatcttgctatctctttcaaaatgcttgtcatatcctccgattgttactattgtccatttaacttatcgcacgcttattatttgcgtagtcatctgtcttttcatgttgagcgatgagtgttctgctttcttaaggctttatccagtactcttgacagtgttccttttccaaaaatgtgctcaatagtgcaagattttagattgcagcggtcaactgatacaattctagataaagttagttacattcttaattacctgcagggaccgcactaccagc

SEQ ID NO: 80594 - DNA, 665 bp, Citrus sinensis
  Intron number 4 from transcript orange1.1g020912m (locus o range1.1g012942m.g) derived from phytozome v7.0 (chr-ID sc affold00673; pos 27820 to 28484 reverse strand)
gaaaactagtaggtgtgatatttacattgcaagatggttccctattttctctcttaccacttactgttctctttggtcacttccaatccaatgctgcagactgactgcaatatattcaccttcatattttgaaatttaattatttgatgtgaactgtttatccttgaattaatgaattatcaatttgtaaatctttagacaacatcgaaaatcgatcaatggaggtaatttagtctgtgtgtcaatgtttatggcagctactgctcgtgtttcatataaataatcctttttgatgtatgatactgctgaagacttccaaaatgcacatgcactgttatggtggtgtgataagcttttctttatttagaattagggatgaaacttctatgctgcatcaaaaaaacatttagcaatctgtttttagtcttctatacttctttttgtcgtattgattttgttgtgtaccacagatgtaaactttctggaaaagattgacaactttctgttgcttctgtgcctgcggcaaataagtaattgtgactgtgcattatatccatacccttggcaattattatatgatttcttgggattgcttgcctccgtattgagtaattctcctgattttattatttgatcgacagcatacactgacttagctgatacct

SEQ ID NO: 80595 - DNA, 757 bp, Citrus sinensis
  Intron number 1 from transcript orange1.1g004364m (locus o range1.1g004364m.g) derived from phytozome v7.0 (chr-ID sc affold00028; pos 980004 to 980760 reverse strand)
aaaggaaaaaggaacggttaacacttcctgtgttggtgagtagagttatttatgtgaaggattcacttctctctccatagagtaacaaatcctgattgagtttagtataaggttgaagtaagttttttttttttaaattaaattttgtaatttcattttattttattgattatgatgcccctgttcttcaagttttcttagcagttattgtttttgtctttgtgtttgattcaactcttccattttatttttatttttatctactaatctgtgtgcataattatgtatgccatgatgaattctgaattggtgaattagaaaagaagatgggccttaaaacttaatcctgtcgtgaattttgttcccgtaggtattttttggctgtaattatttatcctagttttatgttttattgtattttttccttatcggtttttgtgatttcaatttgattttgttttctgttttcttctaaatttgcttttggatcctggattttctcttttcagcattcttttgtttagcttttctttaacttatttagtgaaaagatggaagcttcatccttagatcctatgttttaactaatataaatatttggtattgttctgggaccttctcaaacttattttatacgctgtacatacattttgttaatagttttgagattcttggaagttccatttcgttgttttatctcaaatgcgtgtatttatttacagggaaagccagagtcctatttggtcgtacagacgga

SEQ ID NO: 80596 - DNA, 252 bp, Citrus sinensis
  Intron number 1 from transcript orange1.1g004347m (locus o range1.1g004355m.g) derived from phytozome v7.0 (chr-ID sc affold00006; pos 2695657 to 2695908)
gtcttcggtcgtcactcactaaaagttcttggtaggtatggttctcgctcatacaggtcacaattttacaattttataaacgtgttatttgcagttttgcactgttcggtgatcaaaaccctaggtttaatgtttatgttaatatagtttctttttgttttcttctttctttgttttgatgcgttctgtgtcgagaaaagctcattttagtgttgtattggttgatttctgtgaggcatttagggtttccaa

SEQ ID NO: 80597 - DNA, 636 bp, Citrus sinensis
  Intron number 2 from transcript orange1.1g004347m (locus o range1.1g004355m.g) derived from phytozome v7.0 (chr-ID sc affold00006; pos 2695946 to 2696581)
ctgcagagtccccgacttccgttctcgaagacgaggtcatattttgccttttttttttttttcttgcttttgtttggttctctggataatgtggtgatgttatttgttcgaggctctgtttgataaatggtaatgttgagaagaacttaagaaaaaaaaaaggagggacgagggtgtaaaattagttatcttttaggaattttaagcggtttgattatatattttattgtttttgtgaatacaaagcaaagctatcattgctttctagtatgttggctttgatttgccaaggagagttgttttgtacacacacgtctgctcaacctattctctacatggcacgtacaaatgttatttagaaaaataattttgtgtaagcatttgtgatttctgcatttgtttacttcattttgattatgtttgtaacctttttagcttttgaaatagtctgcaatggtgagggttttcatttttatttgatgtgaacggaagaaattagcttttccatagagctcacattttggttaaatttgaattggtggttatcttttttattttttgtggttctttaagtcctctgattgctttattttagatccttctccttctttttatttttaatcatatataggatat

SEQ ID NO: 80598 - DNA, 192 bp, Citrus sinensis
  Intron number 1 from transcript orange1.1g025701m (locus o range1.1g012458m.g) derived from phytozome v7.0 (chr-ID sc affold00013; pos 1999377 to 1999568 reverse strand)
cgcacaagatcccgagccttttatcaagagaacaggttttttttttttctttttttttgcccctgccatttgaatatttgtacttgaagaaatattattggtgggggtttgattttgctttgtttataatgttgtgtgagattaaccgcgtatgtgctgatcgatgatgagtgatgactttgaaggaactct

SEQ ID NO: 80599 - DNA, 913 bp, Citrus sinensis
  Intron number 1 from transcript orange1.1g030400m (locus o range1.1g030400m.g) derived from phytozome v7.0 (chr-ID sc affold00739; pos 25010 to 25922)
gggttttttccaggtaaaatgatttagcaaagtttgaaaattttttttaactagaacatgcttgtctgtgattaagaataaaaaaaaatcctcgcaaaactctcaatcacagtatttattttagaaatccagtctccattgatgttagcatatcatgagttttcagtttttcccatcttgttctttcgctgttttcagtacttttaggactgcagcagcttgtgagatgtgaaggaagttgtctctgtgtttatttgtacaaattatgaggagatatgagaagaaaacacccatcatttatttttgaaacccagattccattgatttatttgtttttgactttctttattgctttacctttccaccagagatggattgggttaggattaatttgttattttctcattcctaaaagtaactaggcagtaagtatgaaaatattctcttgacaaatttcacctactctgtctcaatagcttttggtagctaatgagaaatatgcttctgtcaaaatgtgataaaagatatactaattttataagaatcctggagattatttgctgttacatggttttgcaaattcaatttgtgaaccaaactagaagaacttcatgcttattattgttattctagaatattgaactttctgcaaaacaatgagtgaaaaacacttgtagaaactaatcattgggaagatatataagcaaattaagattggtggttcatgcaacagcaatgttctaggttgaaatgcaacaaatgctttcagccatctttgacggtaaatcttctctaaatcagtcaaataagttgcaatctgtctcagtaaaacacctggaccactgtgaacttagtggcatgagtattaaatcttagatgctgttcattcctgcatcatttcagctggtaaacc

SEQ ID NO: 80600 - DNA, 825 bp, Citrus sinensis
  Intron number 1 from transcript orange1.1g024698m (locus o range1.1g022058m.g) derived from phytozome v7.0 (chr-ID sc affold00206; pos 265109 to 265933)
aatcggccattgacaatttcaacaataaccgcagggtagtacactcttactgatcatgttcatttttattttcacgacattgttcttgtcaaaagctttgtcctttttgtttgtttttgtctagttcttttattatttgatgatgggttttgcttaatttttgtttatgttctctggattgtgtgattttttttttgggtcttttggggaaaaatggggtttcggggtgtctaggatacttcatttctctgttggtttgtgatcaacatgagaatccatgcgttattttattttatttttcttgtgccattgttgatttagacttcattgaatttttttttttaagttttgacttttattatgccattaattatgtacccttcattgatgaatttttgggttcaattgtcttaagagtttgattaatatggtttgactcatgtatataaagtttattttggagttaagttggagttcttgggattttctttaataatttgtacctgtggctatggcggttcatctgttagctgatcttgggtttgctcatggagtttgtcagtgttttgtctttgggttaattgatatatatttaatcttccttgctttacacatttgtaatcattgtggagtctttgtattagtcaaatttattggctgatattttaattttgtgtcggttgaatcggcagttcattgatattcaagtgtcatttccgctcttttatctatttgttttctacttaactatggttgttgaaattttgaatttttatatttctctttttagagaagaaacaattttaaccaggggaggaagaggtt

SEQ ID NO: 80601 - DNA, 608 bp, Citrus sinensis
  Intron number 2 from transcript orange1.1g003803m (locus o range1.1g003622m.g) derived from phytozome v7.0 (chr-ID sc affold00203; pos 205170 to 205777 reverse strand)
aaggttacttattacttgtagaaaatgtgaagcttatatctatccttatatctataatattctttaatcatccatttttagctgttagtaaactacccaccaacttaaatcttatagttgctgatttgcgagatgcattgtttattttgggttgctaattgatagtgttatatacaagttgaagttttcagtgttatgttctcaagacgcattgtggtgaatcactatttaattgattgagaagttctcgcgggactagtggtacgctgatattctcctttgttagcaagttttgggaagggcgatgatgtgattcggtagaaacttagtaatagctagctgtttgagattcaaccaaatgattgaaaggaacaaacactcacccatcaaactccataggattaaaattaatgataagactatttattttaatgttctgcattttgtcattgacccggtgaagagagatattttactttgaacaagaatgtttgatcttgctgagagcttgttgttgtcttttgaattttaatgtttgctttagataaattgaaaagctaagagatgctgctatttttttttatctgcagctcctcaactgggctttg

SEQ ID NO: 80602 - DNA, 330 bp, Citrus sinensis
  Intron number 1 from transcript orange1.1g038466m (locus o range1.1g038466m.g) derived from phytozome v7.0 (chr-ID sc affold00033; pos 35902 to 36231 reverse strand)
ccaactgctggacttgtcctcgaacgggcttacaggtaacatacgaacttaacttcattaccgcatattatttgagcaatcatatttaaatggattaagtttgagagaatactgacaaaaacaaaggtaaaccagccctattttatcatattaattgaaaaaataataataataattaacacggtagacacacctgtttacaccattgtttttatttatgctctatcaacgtttaatttcttcaacattttttttcattattttcgtagactaataacataaatgtataaaataggtacaatccctccagaaattgggaacctgaagaat

SEQ ID NO: 80603 - DNA, 565 bp, Citrus sinensis
  Intron number 1 from transcript orange1.1g015503m (locus o range1.1g015503m.g) derived from phytozome v7.0 (chr-ID sc affold00054; pos 266103 to 266667 reverse strand)
cggcgttggtatcttcaccaaggtttgttttattcttcttcttcatttggatcactttgatggaggaaaagtgtttgtttaatttattggtaaaatgagtacacttggaaaaattttgtttgattcggtgaagcggatatgttcatgatgattgctgtctatagggagcatatggatcaaatcaaatttcaaccctcaattgagccttaactatgtagtgagtagtattgataagaattgtgtgacggttgctgcagcttactgcattctgggcgtaattatgcattgtttgagcaggttattttgaactgcagatctatgaaaatgcccctgtaaagaactgtcgtcctcgctcattatgatatgcagttatgccaaagtagaaattcattgttttgcttgatagtaataatgctttataatacaccacttcgatatgttttgctgtttctcactttgtgtgttgctctgaatttctctagtttagttaggcctacaaccttaaatttcatcaagggtaacacttttttcttttatctttcaattgcccagacagctgcagagt

SEQ ID NO: 80604 - DNA, 919 bp, Citrus sinensis
  Intron number 3 from transcript orange1.1g026990m (locus o range1.1g026990m.g) derived from phytozome v7.0 (chr-ID sc affold00068; pos 494598 to 495516 reverse strand)
gctcgttccagttccaacatctgccaaggattcaggtttgaggctgtaattagatatattcaactgtgtatctctattaaagtctctcttttgtttagttaatttattttaactcttggacactttgttgagtttcttttctgttgttcattccctatgatggtcataccacttgatacaaaacaatgtagttcttttttagaaattaaaaaaaaaaaacttgcactgtacccttctggctgggaaggtgtcccttcttgtttatgtacattcagcgggctgattgatccctctataaaatacatgttatttagttctaaggatgaaaaaaaaatgaaggctcttcgccttttttccctcttttgatctctacttgggaaacctaatctcattttttcaagtttcatgtttcacatctcctttgttgggcttgtgggtacaacatttttacaaccttgttcagttttgttcatttctgaaagattgaaacaaatatgttttgcattgccttactttagatatggataatttaaatatttatctagctcggtcttcatttcaatgcagaatataagtgtgtatcttttgtgtttatgtttcatatggctgtttcctttatgtaccttgtgtcgggaatgatgacaaagcatgctttttttttttgcacacatagttgttatatggcagacgatattcggattttcagagtcatttctgctaggcaacttgtatagttgtctcccattactattgtactatatactattagtgattgatatactatttattgctaaaattgattcttccttcttatttgttttgagctgtcaagaactctagcttgtattgggattcacataaagaaagtcattttgaacacagcaaaatgatttcatatttttgccttatcttgcaggtg

SEQ ID NO: 80605 - DNA, 997 bp, Citrus sinensis
  Intron number 3 from transcript orange1.1g003334m (locus o range1.1g003348m.g) derived from phytozome v7.0 (chr-ID sc affold00006; pos 1091653 to 1092649 reverse strand)
aaaactggcaaccattgttgagtagggtttattttgtaagttacaaacagcttttgcaattttgaattgatttatcttgtgcatcaaattaaggggaaatccctatgttgaacttgtagaagtaacattgtcatgatcaccagttgcttgataaatacaattattatcccatggtatgtggttgcttttttagcttagtctcttgtaatcggacaagagctattgggacagattacactgacatgaggattggtgtgagatttagttaatctcttgtttgcaaaaagttactttgcgtgagaggacactgacacactgccatgagtggcaactgtaggcgagccctccttggagcagggcagctcactcattctctttctggtatccatcctcattaatgcaagagcatcaatcttcccgggggtttaaggggtgtagggaagtgagttaataaatatctgaatctaagatcctcccatcgaatattttgtcaggcgtagtgtggatatttaggctttattaccatagcattgaagaggtgaggtgtgctctagcaatgacctttttagtccttgttctcaggtcttctctcttttttcgtatgctgtagatgtatgaaagattcagttttttcctgttcttcgtctattgttgttccatgtttatcctttccctcaaattagttgctcttttcacattttttcatgccatcaattagtattttgatacttcatattatgtaagtttctctctgttcagtttgaatttctaattttgcttcttattcttaagttagggaggaataacttgtgacactcctaatgatattagttgtgagcagttttatgatttttggagtcttctcttcataaatgcctaatgttttgggttatttaaaagaagaaataaagtacataaacaaagaaaaatgcttgttgcatgaaataattatttttcatgtcgtcatgatatccaggttctgcaagttgaatcattg

SEQ ID NO: 80606 - DNA, 747 bp, Citrus sinensis
  Intron number 2 from transcript orange1.1g003334m (locus o range1.1g003348m.g) derived from phytozome v7.0 (chr-ID sc affold00006; pos 1093647 to 1094393 reverse strand)
acttggagcacattcatctggaaaaggaagacttggtataataaatgcttaaatgttggcaatacttaattctacctcaataacaaatttgattggtccaattatgtgaattcagggtcccattagctgttaatctactgaactactacagctcttgtttatctgggcttaggacttgctgtgcaagggtgtgatattgaatgcaacacatgcagagattattgctgacaataaatagctgaaagatttacttgtctgtctgatttataaatttggtttattatatgctaatgaagaactcaaatgttaaaaaatatgtgaatgcatttgctcatcaattttctaggtgcttgtatttgaatgtagatgcaaactttggaaattgatggagttcttttagatggcataattcaattgaggtagataagcgtaaaatcatggtttttgtgaaattatgtgtgtatgcattggaaaggatctcgcagccgaatttaggtgaaggatttgacatgccaaactctgctggcagtagtatagtactaaggaaaattggatcataaatttacgtccttccatattttcttttttatcacacattttctttttaagatattggaatatatataatgaattttgaatgaaatttttgtttaagaaatctgctgctgaaagtttcattctctacattaatgtttgatttcctttttcccagttcttttaagtttacagattgtgataccagttctt

SEQ ID NO: 80607 - DNA, 630 bp, Citrus sinensis
  Intron number 1 from transcript orange1.1g011668m (locus o range1.1g010771m.g) derived from phytozome v7.0 (chr-ID sc affold00006; pos 2678465 to 2679094)
cccagaaccgcgccaacgtccttcagcttaagctggttcgttttcctttacgattttgttacatggactttttacactggtcgagggttgtttggatctattagttttatcattttgatttttttttcctaaagctttgtattatgtttggatgttttatcctgtaataattatggttttagaggttttgattcttggattcaacttttgcaattggtatcttttgtgtgtttttttagttgttttctcttctttttttaatttatttttttactccctagtgtccgatgttattagtaattctttaagcagttatttagatttgattggattgcacttatgtaatataaaagatgttagatattttttctctttgttagcattctcaaagtgattggcaatgtaagaaagccctttgaagctgtttgtcttagtgtttgattttactttggaaagaattatgaacttgtgatttgatgtatctttgtgagtacaaccactaacatgagcttctattgtgttctgtgatttgtatctcatttcatcattagcagatgtggttgaatatgtttttctaattttgttaattatgcagattgggcaaagccatcctaccggtttaacagccaa

SEQ ID NO: 80608 - DNA, 192 bp, Citrus sinensis
  Intron number 3 from transcript orange1.1g028060m (locus o range1.1g028060m.g) derived from phytozome v7.0 (chr-ID sc affold00088; pos 475083 to 475274)
acaggcatgtattatttcttctttctgttttaatttgtttaagagtttaaagagggattattttgattttcttttggaccagacttggctattattggaggtgggattattgacatggggtttctgaaagatttggttttgtgtttgatttgtgaaggtttcttgatttgagttgtattttggaacctggga

SEQ ID NO: 80609 - DNA, 702 bp, Citrus sinensis
  Intron number 1 from transcript orange1.1g002395m (locus o range1.1g001067m.g) derived from phytozome v7.0 (chr-ID sc affold00019; pos 89479 to 90180)
agtgagaatctcaagtttcctttgacttcttgaaagtaagtagtaatagactattagagtatcttattattactatttttctgttgaaagtttggagatctcaaattgccactagatcagtttggatttggaagattctgtgcttctggaaaagtgtgtttgtttggttgccgagaaagtggaagaaagccaaagaaaatttgagtttctggatgttgtaaaaagtgacgctttatgggtctaaatttcgattattttgagtttcgttatgttctttagcaaccggatgaaaagcatatttctgaaaaaagtttgtttaatgtttggagattaggttttatttttttatttctgttctttttcgatgatttcggatggagaatttgaagtttctggtgtttaatatcttaaatttggttcatgtttatttgcttgagacttgtattgatttaatgtacttcaagctttagcatctgtttgtggaacttgataatgctgtgattgagttaattcatgaattcactagggtcttatatctgtaatcatggtccccgccattatgttaatttgataggttatggagtggggactttttttttgttaaagtttgatataaattttttggtggaaaagttgagcttttttatctcaattattttgtccattggcataacacaaaatcattcctcaggatcagagaaa

SEQ ID NO: 80610 - DNA, 343 bp, Citrus sinensis
  Intron number 3 from transcript orange1.1g012683m (locus o range1.1g012683m.g) derived from phytozome v7.0 (chr-ID sc affold00124; pos 351467 to 351809 reverse strand)
aaggtttgttcttaatgttcttgctgtgcattcttagatttgttgttttaatctttgtgcatgaattggtgattgcactagaaatcatacccgtgtggtttctcctacgtggttcccttttgtttttggtagttgtttcgagacctatgttgttttttgaatgttatcatgggctaatacactcacaattgcagctgatacatttttatctagttttagttttgcgtccccttataagtatgaaaacttagacatggtggttgtagtgttacaactatgactatgaagttattttgtctgatcttctagaatttcaaatatgcaggtgaaactcctcttcttc

SEQ ID NO: 80611 - DNA, 582 bp, Citrus sinensis
  Intron number 1 from transcript orange1.1g003128m (locus o range1.1g001725m.g) derived from phytozome v7.0 (chr-ID sc affold00087; pos 183753 to 184334 reverse strand)
tttagatccaatacgtaccgttttatctgatccaggtaacgtaacgaattgtgacttttatttttcatttttttggtttagtgttccttttgtttgacgcagatcaggttttgattgttttgattattttttcgagattttgtttgttttgatttaatgttgtgatgatgaatgtgcgtgtaacagacttgcatgcaattcgcgctcgttttgaaattccttctgttatttttgttttgagacgacgatgctttaatgtttatttgcttgatcgattgatagatcgagctgtttattagtgactgataggatcaatctcatgtgttctgtttttgcgtgtcgttttaataataattgaatgcgtttttggactttcgatgatttcaatgctacggatctgatatgaatttgttcttcgtgtgcgttttctcttattaattttcattcttatttaaatttgttatttgttatattctctttcagttatttctttaactgatgctgatttgatacacagaatattgttaatgaaaaaaaaacgtatggattagagattaattcgtttagatctttactgttcag

SEQ ID NO: 80612 - DNA, 620 bp, Citrus sinensis
  Intron number 1 from transcript orange1.1g045875m (locus o range1.1g045875m.g) derived from phytozome v7.0 (chr-ID sc affold00632; pos 7602 to 8221 reverse strand)
cactcgagttattcatcctcctcgatatcttgacagtaagcatttgtcggatccttaacttttgcttctattttttttttcattttatagcacatacaaaacctttaacacatttgattatgtatcaatttgctaattaagctatcgtttgtacacagaagtaaatatatatatttatgacatgtgctgcttttacaaaaataaaataaaaaacagccaaatgggttgcctatttggctcctttatttaaggatattatgtcacatcggttgagaatatttatttggctaattatttaaatttagggtaaccctccactcttgaactagtttattaaaataagttaagtacatggggattcaataatcttatattgagtttcttttttctaattgtttgtgtgctcgatgtgtcttgccatgtaattttggccattttattcagattaatgttgttcttctaattcaagaaagaaacatccattgtttatgtggtaaaatcttaagttttaaataaaaacacacataatatcagtgacttattattccaccgaagttatatctccgatgtacataaaactttggtctaatatgtattttaatctgcagcacttctgccaa

SEQ ID NO: 80613 - DNA, 778 bp, Citrus sinensis
  Intron number 1 from transcript orange1.1g019005m (locus o range1.1g019036m.g) derived from phytozome v7.0 (chr-ID sc affold00054; pos 386439 to 387216 reverse strand)
ttttttggtttcaatttcttctcgattaacaccaagtaagtgccttttttcaatttagatttcgttaattatgatcaagcttttcgatcattacatcaatttcattgaattgtttgtatttcagtcgttgcatgttgtgatatgatgttagttccgatgtttcgtgaatttgggttcaatttgatgttctgtcgatcaaattctgttaggttgcctagaaaatgcgagaaagttgagactttttttgggaataaaataatttagcttgatgtgagtgtgcgactcagtctaagtggaaactaaaacagaaaggaacaatgaaaattaagatgttatgttatgtggttaggctattaactacacgatcttagcttgaattgttgtaaggtttgttgcttatgattgcatatgatttgattttgctgtttctcatttgattggaggagaatggagttgaagaattgaagaaaagttatggagtctactgtcaaaagattcggtaaaaatttacgaagggtttaatgttgcatgatatctttactgagtgctatgaagtccacttaaaaattttttgtgggttgtatgaaagctagggtatgattcatattttattttcttttatctactaggtggtttgagcttctgggttattaagagggaggttttatgaattctgattaattgttgttcctttctgtcacttttagtttctgttcagtagagtcaggttcacacgattcttgtttacgttacttctatgtctgactttgtagttagc

SEQ ID NO: 80614 - DNA, 952 bp, Citrus sinensis
  Intron number 1 from transcript orange1.1g009376m (locus o range1.1g009376m.g) derived from phytozome v7.0 (chr-ID sc affold00077; pos 303941 to 304892)
cttaacgaaaattgagattccttaaacaagtcttggtaagtaaaagaactaatgactttgatgttgatagagatgttattatttttaactaatacgaacgaggtcctgcttctgtgctcatcatgcatgacttaattttattgaaaacgtgttcatgatgaatcagtgaaagttgtttgatttgagattcccttttgttttttgtttctgttggttccttgaataattcttgcatgtgatgcgaagtttagaaatattgaattttggttccaaatgggtagtggctaatggctttcttgtggaaggaatgtcaatgttcctttgctttgctttgcttctggttgatgtttgattcccatttctggagatcagttaaaattacagatgttttgctttccagctgttgaatctttgtatttgcgagctggggtttttctccctttggagattatgactggttatgcaaataatttacattctagtattgtgatagttcattaataaattagcccgttcctttttccatgtagcaacaggccctttgttttttgtaagaatactggcgctgatgatctgatcaccgaaatgagccctatttttattgttatttttccaaaaaaaacttttatatgttggatagctatgaaaactactccaccattgttcattacgattgtgaatgctatgtcatttgttgaatctttgtaggcaagagttatcattaatattgactggaatttggcttatggttgatgttgtttctattctaaatggacaagaagtcctccgttgtgtccactgatttataattttatgatttttatatgaaatttcctctgtattttgaaaattattcctttattgtgtgcttgttactaggatttcactttcactgatctagtggctcttcattccagattgttggttatcgttgtgctgtggaaatcctcca

SEQ ID NO: 80615 - DNA, 318 bp, Citrus sinensis
  Intron number 2 from transcript orange1.1g000225m (locus o range1.1g000222m.g) derived from phytozome v7.0 (chr-ID sc affold00013; pos 1276553 to 1276870 reverse strand)
aataggtatctcttttcttgcatgatttgcttttttgagtagcattgtagcaaacacagcattgtcatccatcaaacctttaaccttaatagttccatgcatttttatgaatgttgttcaatataagcgtagacaagaagatagtgtgggagggatcagcatttgtttgttgggacaagatgaagtgtcagaattagtcattgcttatttaattgatgttaatcttacttagctaatcagctattcggtttttacttaagttgatgctcatttaatttttgtttgttgtttttttatcctttgttgctaggagtgacg

SEQ ID NO: 80616 - DNA, 777 bp, Citrus sinensis
  Intron number 1 from transcript orange1.1g000225m (locus o range1.1g000222m.g) derived from phytozome v7.0 (chr-ID sc affold00013; pos 1277542 to 1278318 reverse strand)
attttaccgccggaagagtgccagaaaatttacaggtgccggttgcagttgtttctcctccctcaatttctatatgtaatagttgtagtaatgctttcgtataaaagtataactgattcgagaaattcagttgacgggaatctgtttgaagaagatttactttaattgttttgtttttctctcctatagagatctggtagccttttttttaaaaaaaaaaattatgcactatatttaagtggaggaatttgttggtggttgcatgtatttatttacctgtcttttatttattgaagaattttgcagtaaagatttggtgctgtgccagttactgcttgaagtagttgaatttgtggcttctaagcctggtaattttacttcaatttcttttctgttaattttcttttatttatttgtattttccgtgctttaaggctgttattagttgcaaataattcatcttcaatgttctaatttgattgaataagtgactgtcatatcaaataccatacttttcgagttccaaaactcggaaaacatgttgtagtggtcatttcaactccaaattttattaatatttgttctctggttcaaaattgatgtaggcgtgaattggtcactgtagtttcattctgtgatttatgaatcatctactcttaaaaatgagatgtatatatgttttccaagttctattggttggtttgctatttgcatgagttttttaggggctgattattgccaggactttgaatattgacatctggagaacctgggaga

SEQ ID NO: 80617 - DNA, 481 bp, Citrus sinensis
  Intron number 3 from transcript orange1.1g048272m (locus o range1.1g048272m.g) derived from phytozome v7.0 (chr-ID sc affold00142; pos 355231 to 355711)
cactttccaagaaagctttgggcatcgaaaggtttgtgcgtgaattattttagcattccaacacatgacagtcttttcccatatcagaaaaatcagttgtctataaattaaaggttatttaagagaataaaattataaaggggagtgctaaaaggtcccctccaagttatatttttaaataatttgacacttctagatttcattctccttactcctaatccggattcatgacaaaaatgaagatccattgctagcccaaagtcctttttatttttagaactttctaattcaaaaagtttttacttgtcacttgcggagggaaccagaactttggttcttatggtaaaatactaaaattaataggtaacaaacaactgaaccaactccaagtacttgtcttcttctaagtttcaaatgtcaatactaaattcgttttatttaacataatcataatcataatcatatgtttttcagagcaacg

SEQ ID NO: 80618 - DNA, 963 bp, Citrus sinensis
  Intron number 1 from transcript orange1.1g000516m (locus o range1.1g000516m.g) derived from phytozome v7.0 (chr-ID sc affold00158; pos 251841 to 252803)
atttcctcaggctcagcttttcgctttccctaacggtactttctctctctctctcgctgtttctgcttcattatttttttttaattttaattttgtaactcaagtccaatttaatggtaattacatcatttttttatttttattaaatcaagttttgttttgatattcgagttttgtgttgcgaatttgaaattcgcaaatgaaatggcagatgccgtgatttttcagtgatttttttttcaatacacactatatcactttgctttgctttcattttcagtttgaatttgtgatccgcattgcattgtgtgaatagacttaaaatatatatctatttggataatgcaatgcagtgtactgtatgaactgttacttttgaactatttttgttatcctagtaatgcactgttgaatgatttatgtatatttagtgaaggtgcaaatgttcacaagcttactagggctggaatccaactgctactatttccaattgaagatatgtcagacattaagtttagtttttccttttggccttccaaggattaagttctagaaaaatacattgaagtgaaacacaattccttgtagcattggcagagaaagtaaacatgtttcattcgtagttatttgtattacatgaacttaagatgatagtgacaatgcttcaattctagtacgatttgaacataataatctctaatttgtaatccttctttgggagttaaaaagtcgtagaccattgttttatttcatgtgtttgctatgtgtataccagtcaagttcatcataacggaaagtgtccaaatgagaattttaatcatgttttgatgtcagattttagcttgctagatgataattattcatctgttttcttgtttggtctttaatttcccagtcatgattttcttctcagtttttatttgctttgtggcaggacagatttgtttgcatcttggctttagg

SEQ ID NO: 80619 - DNA, 860 bp, Citrus sinensis
  Intron number 1 from transcript orange1.1g040824m (locus o range1.1g040824m.g) derived from phytozome v7.0 (chr-ID sc affold00097; pos 53738 to 54597)
ttaaggctaagattcaggtaatcttttatttgattcaagatgtcttttttgttgttaacaatggtttcttggtgtgaatatttatctgggtatgtttgttttgatggaaagacgaggtttgtttgggaaagttattgaccttttgatgctaggttatgtgacaatctgttagggttaggggttgtgatagaaatagtgtttgtgatttgttttggtgattgagcatctcttattattgataacataaaaatcttgtcccatcttgaggttaaattagtactagcatttttttttaggtttaattttgatgaatttcatttattgcgccctaaaaattatgttggggatgtttcaagatttgatatttcagggatatcttcatttagctattttatgagataggtgttgattaatattttgcaattttcatgatattctccattcttgattagcatgattgttgtagaaaacaaattagttttcagttttgtggtactgacaataattggtttacaaaattgaattctagacaatttgttttaactaccatacaatagtaatcatagaagcaactccgtagtggtgatcgcatctttcggtgtagtccagggtagaagtatatatttagtctgttacggttagatttcatattcagtttatgatgtgccttatgttaggggagattataaattgggatttgactagaaagaagaatgaaaaaaaactctggaaataagtccaaattctgatttcattatgcacgggctttgattttttgagttaatctattcatgtttaatcaacacttgaatatgtcttttacaggacaaggaaggcattcctccggatcagcagagatt

SEQ ID NO: 80620 - DNA, 895 bp, Citrus sinensis
  Intron number 1 from transcript orange1.1g023252m (locus o range1.1g015865m.g) derived from phytozome v7.0 (chr-ID sc affold00176; pos 194625 to 195519 reverse strand)
cttctttcactagtgttactggctttagtctcctagttaagtctttcttcacttctctcttttttctttttgcatttttataaaattttggtctaaaatcaattggatagaaagatcagcttttcctttaagctaagtcattaatttagatcatgttagagcttagtcttaagcttaataaagcttttgaaccttagctcatacatttttttggttaaggataacattgatattctgattcttattattcaaggccgactatcttatacttctaataacttacttataaacttgttttgtgaattttttgaattttttgtttaactatttcatgtgtgatgttcatatcttcttaaaattgagaccaaaaatctttgccaataaaaagaatttggtaaaagacatgcattgatgtcaatgacaagctaacaccaaaacctgagaaaaggaaacatttgaactaattggcactacttgttaattgtttatcaagttaccagaattttgtaaattcctgagcagtttggaatggcaagtgcattggagacactatgtggacaagcttatggagctgagcaatttcagaaacttggaatctacaaacactgctccatcatctcactcattatagtctgttttccaatatctcttctatggatttttaccgacaagctactaatccttgttggccaagacccttcgatctcccgtgtcgctaaaaaatacgcaatatttttaatccctaacctcttttcctatgctgttcttcaatcattcatcagattttttcaggttcaaagtttgatccttccaatgctttatagctcagttttaactttgtgctttcatattcctctttgttgggcactagtgtttaaaataaaactgggaagta

SEQ ID NO: 80621 - DNA, 881 bp, Citrus sinensis
  Intron number 4 from transcript orange1.1g031857m (locus o range1.1g031857m.g) derived from phytozome v7.0 (chr-ID sc affold00031; pos 433435 to 434315)
aagaaaaccaagaagcttcctcctgtctggaaatagtaagccaaatattctgttgctgcgacactgcatttttcaaaattttttaaattgatattttagaattgtgtgattttgcttgctctcaacagtattatatattgtttctaattggttttgcttgtgagtatctatctgaatgtttcttgtttgtttagtttgttggaattgatgctttgattagaagatgcaattaagctgttattaataatctaattatgtatttggtttctgaagcttgttacctgttgttatgttgttatttctttttctgtgcattggaacatgttgatacgtgtgcagagcaatgatgctaaaatctatgacacacttaccttacatgagcattggtatcctattgtctccgagcttggtgcaaaaggatttctcataacctaactgcattttgagcttctttatgtatattgttttggcctatgttttctttcaaaatgtgtcatgtgtagggaagaagtgatgtagtggttgagttattactgtatggaattttcatgtatggctgagtgcacatgcatatgcctgtacgcaaatgctcatgttatccctcttattgaagggtggttccttgtccacatggttgtaacaaacatggcatacatgttttgataatttcatgtctgtatgtaacaatgtttctttttcaaaaattgacctttggctttcaattaagctatgaagcctgcagggttcctcgtgatcggttcactttgtgataagtaaatatgctgacctaactattctgattttaacttttatcatcaactcactggatctacctttgtcttgcagtgagtctactaccgccagcacacttgtggcttagg

SEQ ID NO: 80622 - DNA, 944 bp, Citrus sinensis
  Intron number 4 from transcript orange1.1g006467m (locus o range1.1g006450m.g) derived from phytozome v7.0 (chr-ID sc affold00092; pos 98170 to 99113 reverse strand)
aaactgagaagttcaaacggacagcacttcaagaggttgctttcttcacaatttttttgtttcatttatttatttagtgattcttgcaacattatttatgttttttagaagccatcaattttttgacattgcactttgcctatttatattttttcaatcctaatgataatgtgtttagaaattagttctttagatatgcagaatatggttattttcgtttgtatagacttgtttttgaatctttaatgtgtaaaatttgattcgtcactttaattttgcaaagccatttttaaagaactcttgataaaaatctcatttttagcaaaaatgtttcgtatttcattttggaaaaggcttttttattttaattttggacaatttttatctaaacttatattgatctgattgtaaattataggcctgggtacccagtatcctacacagcattcaacaaacgcatatatagtcatctgagaacctttggttatacgtctttatcttaccaacagttagcagattcttcagttcattggctcctcatttgttttactgaattattttttgcacattgataatccaaaattgatctgggaagttcttactgaaattgcacttatgctttccgcttttggattgatctgctgtaatacttaacagaatcatgataatcaatggaaagtgaaatgaagttgtagcttccatcctgaaacttgcagtttggtacttctaaaaagactttcaaacttgccatcttttaatgagattgtatatcgctgtctggttttaagattgtagattgccatctagttttccttcaacttctaggaagatacttacagtagggcctcaggcccaggcttgaagcctaaatcgttttaatcttcaatgctccaagcaaaccaacttttctttcaaaagactatttatgtccatttcttttgcag

SEQ ID NO: 80623 - DNA, 810 bp, Citrus sinensis
  Intron number 1 from transcript orange1.1g021796m (locus o range1.1g021803m.g) derived from phytozome v7.0 (chr-ID sc affold00043; pos 98521 to 99330)
atttgcggagccagcttttcaggaaatttctccacgttagtagctttcctttttgttgttgtctttgttttttgttttttcatttttgggtcctaaatggagaaataattgagtcccaaagttttcattaattgaaatgattgaatcttcaatcgtttcttagctgcatttctcatctgggtttgtttcttaaggtgggtttaaagctttgttccactttttctttgattcttttcttgatttctcatctgggtattgaatcttttgccgaattttgttcttttttgactattttttgctcttaatatgaatactggctctaactttcatctcggttaattttttttttttttttttttgtttattgacttggctgcatctacacttcactgatgcttgtgagagtataaataagtcaaagctttattgcttcgtctgatgtttgatactatttttgtttcatatcaattggtgttcattgaatagagattttgtatgagatgaattttgattcaaatatttgtagtgaaaaggcaatatatgccgtagtacttactatccacacttcttgtcaaattcaattgcttgtcttctgatcaagtcgattgtataatatatcttacggttatgcaataaatcatggaggccgtatggattgtgactatacttgtatagaggaccatacgcaagtttgacaaatttctggaccatgaaaaattgtcaccattcatagtatctccgtcatttgataatgtccttttccaacttttctcaggcaaaaccagctaaaaagaaagaaagtggtatcat

SEQ ID NO: 80624 - DNA, 551 bp, Citrus sinensis
  Intron number 2 from transcript orange1.1g021796m (locus o range1.1g021803m.g) derived from phytozome v7.0 (chr-ID sc affold00043; pos 99612 to 100162)
taccctccaatttaccaggtattttctttctgtgtatcgaaacacaaaacgagaagaacagtagaagttttccttgtgtttaggcatcttttacttccttttttctttgtcaaaatagataaataaataaagcttcttaaattgggacttgagggattttagcattaaattgacataggaagcaatgccatatgaaatgaaacaattcaaatatgttaattattcaagaaattgatttcagttaattgtcagaagttagtgaatcagactgtagagattcttgagtgcattagtcattttatggaaatgtttgttcatcttataatatgattcatcatttagccttgtagatatagatgcatttcctgaaaagatgatactccttttactgttattgtgtgttatagtgaacgaattggttccatttcccaatcttgcccaatttccaaagttaacgaattaagaacattcatcataattgtaacacaatactatttaaattgatcttcttgtattgataaattctctcattttctatgaacagtgtccaa

SEQ ID NO: 80625 - DNA, 387 bp, Citrus sinensis
  Intron number 2 from transcript orange1.1g004294m (locus o range1.1g004294m.g) derived from phytozome v7.0 (chr-ID sc affold00778; pos 10834 to 11220)
gagaaagcatagttggattctccgtgatcttcgttgtgcgttatttagattttgaaaccggattattattttttttattattattttttttggctttgtctgtcaaagggccgtatcaaatttgtcaactctttttatctatctattaatattctctttcccgtgcattggcacgttaaaaatcaaataggttttcttttcaacggacaaagaaaccttagtcagctcagtttttgcatttttttttctgcacatggtataatcatctctcatcagcatttggttttgcacaaaacacaatacacagctgcgaatttaaaccaaacttatctgccctaatttctttatcaagctcccccaaaaccaaggacacactgagtagctaga

SEQ ID NO: 80626 - DNA, 677 bp, Citrus sinensis
  Intron number 3 from transcript orange1.1g004294m (locus o range1.1g004294m.g) derived from phytozome v7.0 (chr-ID sc affold00778; pos 11299 to 11975)
gacttggatcatcctcaggactcaccctcagtcaggtcaggacttgatcgagttttgagttttcctcgtgtttctgctcttttgaatccatgtttttttgcaaagaccttttaattatgtgattgtcgacatattctgctgccggtattttagatttgtgaatcctgaatcatcttatcattgtcttcaactttattttttaaaaaagaggactttaaaaagttggattacggcagtgatctggctttagtgggactaattttctatttcaagcaaaatcgttctcgatatttgcaaaacgcgtaaagtcttttgctctgcacagtcatacacagagagaaaaaagaaaagtcatctcttataaaatctgacttcacagcttctatttcactttccgatgtagtagtagtatatatcttcttaaactgtggttctttctctttcacaaaaacgaaatagttttttcccccctcttttttctcttgaatttagtcctggcaaagcttcttctcatcataaactcatacatttttttaattttgttttggatgtgttaagagacatcggttttccatttattttttgagtggaattaaatttccaaattctgttgttagattgaaaaaccataagcttcggaatcttaaagatctgtagaaatgttccagccaacaaac

SEQ ID NO: 80627 - DNA, 419 bp, Citrus sinensis
  Intron number 2 from transcript orange1.1g024941m (locus o range1.1g024941m.g) derived from phytozome v7.0 (chr-ID sc affold00018; pos 537632 to 538050)
gagatagaccaactcaggttctggtgcaaatattggtaagattgatctttggtatttggtttgttttttttcttcttcttaatctgttagaaatagtcaataattaattctatgaaaagaagttgagaccatcaatgccagaatgccttgaatagtatgggagttaggttccgcaattatttttcgaccggaaactttgattggtaatttcagattgtatttatttttttgatcatcttcttacatgtcgggttaacgaattcaaaagaagaatttattactatattctgaatttatgatgtagctggaagtagagatgaattgattagacaccatccaatcgagtaacttgcccagatcacctttcaggcttcggcaaatgacttatttctctacaattttgcaggatccttgtggca

SEQ ID NO: 80628 - DNA, 947 bp, Citrus sinensis
  Intron number 3 from transcript orange1.1g038149m (locus o range1.1g038149m.g) derived from phytozome v7.0 (chr-ID sc affold00305; pos 124603 to 125549 reverse strand)
caaggtaccattacgttttacttattgtccctttctccttggagatggaattttgtaagttgatgttacatctacatacatcattaattcacataaaaattttaacacattatagtagaccaaaccaaattactaagcagatattgtttgttttggaatcctattataacatttcacattattagtgagtgagcgtccaaggtagtttataagtcttgagttgtcctagcttagtatacgtgttttagattataaatcccaaaaacaattatgtaatgggctatgcgcccgaaacaaataatatctacttcttgggtctaggtcgttacactcataaaagtagttcataagtttcgtttattatagtatatgtccccttgaaaagttttttaatgtcatcataccattaaattagttattataattaatgaacagaacttttttccgtttatcaataaacctctctactcttagttatttctagttaattaagaaatgaaaaacttaagctattgaactactaatgcagagaaatgaataaaagcacagcacaatctttttcattgcctttcatattaacaatacaaagttgatgcttcctactcaagaaagataatactgttcacagccgtaatctaaaattttaaatataagggctactacccctttcaatttagtggcttatatcagagtgtccttcgcaaggacagtcacatgactacttattcatcttgatcttatcttcatatcttccagattgttcttgctcacttgctgagtcacctgaaatgtcactacatattttccaggcatttggtcgaacaactgattcatttcggacatatgattgatgattatatactctttcaggcattaggtcgaacatttgattcatttcagcaaacacttttgttctatctaacttttgtccatttcctttcaggaat

SEQ ID NO: 80629 - DNA, 661 bp, Citrus sinensis
  Intron number 1 from transcript orange1.1g029666m (locus o range1.1g028585m.g) derived from phytozome v7.0 (chr-ID sc affold00018; pos 1180754 to 1181414 reverse strand)
ttcaggtttgtcttctttaaattctccttttgcatttggttatttttatttttttggttatctttttcgatctgtatgctgctatttttgattttgtatttttttaaattattacatgattttttgggtcttttcattttgagacgcatgtgatttcatgagttcagtatgggagtattttttttcttttttcctttgtagtcttgattgggatttagtgattctggagcggtacgtacaggctttattaaaaaatattgtttggctgcagatttgcaatttgtttgcttaagagttgggtacgaaaaataatttgttttttacaattcccaaaatatagaggaattgatatgttttgatatgtggtaaaaacttgttttgattaattatgggattcttgcataggattatgtgtttatggataaactggaggaaacagagaaggttctagtggtgttgatatgtttgtgtagtgtgttttaaatttgaacaccgcttgtcaattatcttttcttagtgatgtgttcttccaaacattcttgagtactttatatttgccaacttgtaaatcttatttctgaaatttctatcttttctgtgttattattggtaattggccttattaaagatttctttttaaaattgtatgcactataggtca

SEQ ID NO: 80630 - DNA, 357 bp, Citrus sinensis
  Intron number 1 from transcript orange1.1g034187m (locus o range1.1g034187m.g) derived from phytozome v7.0 (chr-ID sc affold00006; pos 354140 to 354496)
cctgtaagacctttattccatctatatagtcttatttgatatgatttactgattctgtttatttgatttgttcttggtgtcttgagagtctcaggtttttaataaatatagttatcgtgttattattattatttttacttcgatttttggaatgtgataaaagatcttatggaatatttaagctgcgtctctaagtacgtgaaaatgcaaaaggaaagcaatgatccaaagtttataattatcaatgagtcttctttcttatgcatcctctgagatattgtcaattttaaacttttttgggggcttttctcttgataatttcaatctcatgtttgattttcttgaaaattatatcag

SEQ ID NO: 80631 - DNA, 1043 bp, Citrus sinensis
  Intron number 1 from transcript orange1.1g022620m (locus o range1.1g021077m.g) derived from phytozome v7.0 (chr-ID sc affold00018; pos 1321492 to 1322534 reverse strand)
cagtgcaagcctctctccgaaccacaggttccttccaattaacgctcgcaatttcaattaatctgatcagccaatatttgattgattatcagaaacttgaaaaatctttgttgagtatcaggagttagaaaatgaaattatccatttcttgtacaaaaatggaagtattaagtataaaaaaatacgaataaaggtccttgcaattaggtattattggatttagggtttatagcggatggatacttcagatctcaatcattgatctgttttaggtatttgtattggcaaaagagaagctttatgaagttgtattggcaaaagaacaagatttgtatgagttgctattttttgtcgtgatataacaatgatggcttgaggataattcgcaaagaaggaaacagtgaatcacatcttgtaattgcagtgtttttgcttaattctggaagctcgaaaactaaagtgtttgtgaaatagcaacatttaattggcaactaatatttaccaacaatgtatccactatccttgcaatgctataaagggacctatcttgtgttatgttgtcaaagtgtgttgtcagtctcgcaatttataatgcaactgaggtggattagtaatcatatttgatttgatttactgttctgtaggttaaagcattatgcgagaaggctaaggagatattgatggaagaaagcaatgtacaggttgaacccttttattacttttgaacataacatctttttttttttttttcacatctttggtttctaagaagcttacctgtggtggtattattcataatcttgggaaagataggcatcttctttggaactagatactctactgttggttgccttcagttggaaatttattatcttggttctgaaatcccggtctcagtgtaattgttgtcctccttttcttttctcgtatttcaccactctgtagatgttatactcttatgttgaaatgctgaagcattgatattttctcccttcttttgtatctcagcctgtgaaaagtccagtgacaatttgtggcgatat

SEQ ID NO: 80632 - DNA, 950 bp, Citrus sinensis
  Intron number 1 from transcript orange1.1g011246m (locus o range1.1g003096m.g) derived from phytozome v7.0 (chr-ID sc affold00270; pos 157099 to 158048 reverse strand)
gtccagattgcaggtatgcagtgattgagaagtccacctgcaattgagaagtctttcagtgtcgggagtctgctttctttgttggtcttaatgtgattccaaatgttaatttgttgcacatattgtaagatttacattattcgtggacatgtaaatccattgattactacaacttggtagattacaatgttgcaatgtccctgatcatactaaatatggtcttacatcaataaatatatgagctgatatggaattgccttctcaacggcttgctgagttatgctctgtgatatattgagcagattttaggcaagaagcttcagtggactaggtgtggtgagatggtgtggcatggctcatatatattatttaatttattttttcgtagaaattattaacatgaaaacattcttggaatctgtaagcgtatcacaactagtgggaagtttgctatgatacccagcctaaagaatgagaaaaagggaaaaaaaagtctaaaacaaaaagtggaagaggctgcttcaattacatcagtggtgattggtattgatcaaaattatggaatgttggctatgtgcatgaagaatatatgtgtgttggatatttttttgatattgctgtttctatttgtaaatttgatactgaccgtggcttacttttggttcattacttgatgcttattctcatattgtatatgattatttcacttttctttattttttttctcatgcatatttaaccatggaaatctgagaatggtgttttcgttgtaaatggtgagaggaaaagaaaatgagatttttttgtcccttttgttgggggagtgtacttgcatttctagaattccagaattatgatttttgggatttgttttgttaatgacatatgtatgttttgtatttatgctcattcatgtgctaaacttgcagggcaagttggtcaattttcga

SEQ ID NO: 80633 - DNA, 669 bp, Citrus sinensis
  Intron number 1 from transcript orange1.1g030162m (locus o range1.1g030095m.g) derived from phytozome v7.0 (chr-ID sc affold00184; pos 249977 to 250645)
aagaacaaatcccctgcagcttaactcttaagcaggtaaagggcttcaatctgatcttcatagtttgcttcttcttttggtttttattttttgtttaattcaatttgttttgtaatttacttgttatgtgacaagctaacctgatccagctgttaaggtactatgttggtttacgctattttgggttgatggggttttggtttgatgataatattgatctgggttttggtttgttttgactcttgttgttgaaagtttgtttctttttgtgtcgatatgggttttggtttatttgctttcttgagtttgttttggagtttttgtgttgatttttgtgttatatgataatttaggtgttaaatttgttacctttgaggggttttctgctcttaagtaatttgggtcttttgggtctaatttttagggattgtgttattgttgtttgatcattttcctttgtatggggaaattttgtttactttgattgtttggtgctttcacttggagatttggcaaggacctttgatctgaactggatatttgattggttggtgtttattagctttgatccttgctactaaattgtgtgtatgcatgttgtggaagtgtccgcatgcttatgcatacctcttgaatgcttcctgattttgatgtttttctgaaggaaaa

SEQ ID NO: 80634 - DNA, 645 bp, Citrus sinensis
  Intron number 2 from transcript orange1.1g030162m (locus o range1.1g030095m.g) derived from phytozome v7.0 (chr-ID sc affold00184; pos 250751 to 251395)
agaggttccgtcatacagcctccatctgccagattgtagattggttttcgcttcattaacacctttaattcatctttttcttttttaatattactacctttcacatcaattccagacaaactctgccttgcaatgatgggcagaaaaaatttggttattttcattcattatgtatggtttatatgggtacctcgcatatatacatggaagaaaaatgaaaatgtttttagtttcttcacatgcttcctcacatccaagtaatttattcagaaaataatagaaatactttaattctgctggctgccccatgaacggtgataaactattattcttagtcattgttgtttctcattaatatagtttgtcatgtgtctcatgacctatttttagccgttgtttgaaaatggtctgtactctgtatagttttcttccaattcttgaaaccttattaccttggacatatacaacttggcagtgttcctgcttattaacttaatttcatctgttcatatgaaatttactctggattaaatttgattcctccagtaaagtaacacttgagttgcagttcaaattttcatttttctcatcttgcagacatcagtgaactgaacctacccaaaacttgcagcataacatttccca

SEQ ID NO: 80635 - DNA, 1005 bp, Citrus sinensis
  Intron number 3 from transcript orange1.1g013173m (locus o range1.1g007285m.g) derived from phytozome v7.0 (chr-ID sc affold00018; pos 1347147 to 1348151)
tggttgcttacggaggagcaccaatcaaccaacaggtttccatcgttctcattcttgattgtatttttggttttcttcttttgaaaattatgaaatccttaacattttggtccctgtctactttgttaggtgttctttatttgttttatctggtttattatgtactaaaattacaactgcttgacataaatttgtgactaattatttacttttcttcaactcaaaatatcttctttttgaattcataaactgcagaaattgctttcaggatgtctgtgttgcaactattaccactgctgaaatttgggattgatgcaaattgaactgatagcttttctcttatgtttgccgatggagttctgacatttatttgaactttcttgttatttctcttttcttttctttcttttctttttttttttgggtgatatgttggagatataacaatgtggtttgcatttcttctttgttgtcaaagattttggagccatgcttagagtcttttttgatttattgatcattgctttgatttggactggaatggatgttggtggccatttcggctgtgaatgtttctatcttctgttggtcgctgtaaccttgtctgaagtgtaaaagatgggtgaatttttgtgttaataaaatagagggacagctttcgattgacaagattcttctctatccgagagaggatgtaggaatgatgtgttgcttttttcttttggacagtttatggtgtttgttatattggttcactagtaagaaatgcaagctcatttgctgaatggtatcacatgacctttttaattaatgtttttttttaacttataaatttattatttgatagtattagctgtttttcattgtactgcctttgtcttgatgctatattagtcttcaaattgaagattttttaatatttgttctacccacctttgttttgtatactgattttttgttgtgttgtcagttgcgagagcttgagagaggggttgatattcttgt

SEQ ID NO: 80636 - DNA, 877 bp, Citrus sinensis
  Intron number 2 from transcript orange1.1g004266m (locus o range1.1g004266m.g) derived from phytozome v7.0 (chr-ID sc affold00054; pos 423522 to 424398)
atcgcactctcctgattctgtaagctttcatttaaatttgatttgaatttttgttttttaatttaatttgctaagatggaatgtacttacctctgttaattaaattttattattttttgttattttttgtgtcagcggttggtatgttagtgtgatgtgactgtttgatgaaattagattttagttgatcaaaaatggataaaaaatatttatgatttgattttccgttggtttggtgagaaaacgtgtgacaaattttttttttaaaaattttttacaagatttagtaacttaaaccagttggttttgtttctgttatattcgaatttctttatttattttctctaaattatcttatttgttcttgctactcttttatgtttttattacccagatcagaataggaaacttaaaaaaaatatatatatattcttgggcgataatcattgactgtatattatttcccgcatatattgagagattttatttctttccctttttggatttgcagtgacacttattttctaaaaatatttctgaaattctaatcttgattgactccttgttttgctttttgactaagcaatccgtacgcgttgcttgtctgcaaattcttggtgagttttatgtttatgtgtttcgtagttgatttatttcaattgggtagctttcattttgttaaatagattgttgggtgttttttgttatgttcctttattatcttttgagtgggggaattgatgctaaggaatcattatcataatcggatttgtttttggaattctgcatattcttcatgtgcttggtgttgtagatcagtagttgactatttgtgggatttgttcttttcagattgttctttcaaaactatttaatc

SEQ ID NO: 80637 - DNA, 917 bp, Citrus sinensis
  Intron number 2 from transcript orange1.1g018573m (locus o range1.1g018573m.g) derived from phytozome v7.0 (chr-ID sc affold00009; pos 288107 to 289023 reverse strand)
gtggttgatccctcaaattcttctgcatctagaaggtcttttttttaacttgtctactttttaagtcttagttttatatatttggcgttgtttagcaattgctttagaaaattagatcagagattagcagataaacgattgatgatttgatctgagaaattggttagagtatttgttacgttgttactgtgtgaaataaatcaatggtattgataatgtaccagctccgaggtatacaattttttttcttttaagaaatcacgcttagttttgtggaatttaattaattattgaaaagaattcaaaatatatgagaatatagaagtcagtgacattttcagattaaaagaaaaagaatttgtgcttgaactatacattttataattgcttaaaatttgtaacacacttgaaatattctcttggattgcatggacgtttaggttccattcaactcaaaaatctatcaattaattatgtgccgctttcgaaggaaaagcaatactctgtttaaaaggaaatacacaatagacctgtgttgcagaagatgaattacaagtcatggaattaaatttggaaagtagaatttggtttcatgcaatacataagaaatttttgttagaataatttaccccttttggattgttatgcagttgtttgtattttgtaatacttaagaagaaacgatggaaatatggataggtgtaaggatcggtaacagtaatgccatgaactcctatagctacatattcaaataaaatgcttttatgaatcaaatcacaaacaatcctttcactttttctctcttgtactatgttatttcttgaggaaaaatgcatttgactcaatagtacattctgggtgtcttctttgtttgtttttcagggggagatcaacatcaactgtaagcaaaagtgtca

SEQ ID NO: 80638 - DNA, 895 bp, Citrus sinensis
  Intron number 1 from transcript orange1.1g001821m (locus o range1.1g001728m.g) derived from phytozome v7.0 (chr-ID sc affold00013; pos 1509260 to 1510154)
ggtttctgccaagttctgcggaaggtgtgtcaagtgtttttaattctattcaattcattaactttgggctgttatttgcttatctatttgtttgattctctgtgagcgcttgcgcttcagattactcttgcaattatttgtgaagatttagttctttttcatgctaaacagagctcttggcttctaatgctgacagaaactggattgtgtaaactccagttttatgatttattttttgtttttggttctgtgttaattaattatttttcttcctcttctgtgctgaaaatgtaagctttctgatatatcaagttgtttgtcgtccatactttagaagtagatgcaagaagtgtatgggtttatttatgtatacatttgtatagattgtttataaagttattttgcagataaaaagtttatgtctgggttgatctatcaattttaatggatgtttcccagttgctgaattgagcagatggtgaattgtcttaacagaagttttctctacatgtacatgcaatcaacctccttgatactggcatatgatgcttatactgatttatatatgtctatttctaattttaatgaaagagttccccacttaagtaagttacaatgatttgaacaattatctaaatgtagttgtggccaacttgatgtgtttttaatttctgtgcttgatgtttggggatcacaaactgtaaacaccgaagaactttgtttcagttccagcagtcatatagtcgtatacatacacggttattgtcactctgaactaacttctttattcttctctatatattcattgtaacgctgtgctaaggagatatatagataagtaacattatcaacagtcttgtgtagctgaatagtgacctttttcacttcaaaaggt

SEQ ID NO: 80639 - DNA, 773 bp, Citrus sinensis
  Intron number 1 from transcript orange1.1g017736m (locus o range1.1g017736m.g) derived from phytozome v7.0 (chr-ID sc affold00124; pos 333817 to 334589)
agaagctaccactatttctttgtgtcttcatacatgtaagctactttattttatttcatgtttctgttgtattgttgatggttttgatctgggaatttgttggttcttttacactggagattgtttgctcttctctcagcactcttgagctgtgttacttctgtgtgtgtgtgtgtgtttatgtttgttcacagtttagaaattttaataatatgtgtcgatgtttgctgaatctgttgtccttttaaactttggttttcttcgaattcaatttcgggttgttctttttttcgaaattttgtgaactgggttctattaacattggatgttagtttcagaatttctaggtggtctagttcatagtttcaatctttttgttgttgagtcatgtttgaaggttgcaatttggatggatattggtgagattatatgtatttgtactcatcgaccctgtagaatcatgatggcttgtgcttccagcatgtgttattgaagaaagaccaaatgtgggtgttcttttaggcttgatatggtagaacgagtgcaatattttcgcaaatatagaaatacgttattgattattcactgaaagctattttttaaaattattttataaggattgaccttctagaaccatatgttgttatattatagaaaatagatagcacaccttgtaggttttcatctcccctctgaatgaattgtttctcatgcactaaattttggaattgaaaccagtctgcaggaagtgcatttacgagaagctttcggat

SEQ ID NO: 80640 - DNA, 737 bp, Citrus sinensis
  Intron number 1 from transcript orange1.1g028067m (locus o range1.1g028067m.g) derived from phytozome v7.0 (chr-ID sc affold00009; pos 1453070 to 1453806 reverse strand)
cgcttgttaaacacatcaaagctcccgttcatcttgtaagcatatatgctctccttcttttatttttcaaaggaatcaaaatactcatgtaaggttttaattgctgagatagtttgagatctaagaagttctgttggatttttgtagttggctaacttgagttttgattgcttaataaatctttatgtctttgtttgtattttcaatcatttgacgcagtaaataacagtcgaggtcgagagatgaattgaggcattggttttataacattccctatctttattggctgacaatttttgttaaatttgtgctaattttggtggacattttagtgtttattatgtgtttgacgcttgttttccggctggagtaactgcgatgggtctgtttatagctgtgttgaagctttcacaggttttgagtggaagggcaaagtacatgcttgacaaaagttttcttgtcatggcattggattttgattttgatttatttttttatttttttggtgattgacgtggtctcactaaaatttataatttctttgaaactattaaaatttagattggattgaagaaagaattaatgaaaataatacacgctttggaatggaattaatgtttggaaattgtggatgagtgtttgattttacagattttttttccccctcttgagtgaatgattgtgggtattttggacaatcaggtttggtctttggtgaggagatttgatcaaccgca

SEQ ID NO: 80641 - DNA, 546 bp, Citrus sinensis
  Intron number 1 from transcript orange1.1g005793m (locus o range1.1g005793m.g) derived from phytozome v7.0 (chr-ID sc affold00116; pos 29693 to 30238 reverse strand)
atcaggtattgttatttgtcttctttttttcttttttcgattttagttccttttaattcttttaaagattcctttagtttaattatgaaaagactaaaagtttatatttttcccccagtgtctttacttttcatgcattttcttggcaaccaaactggtttattactactttaatttcaggaggcaatggtgaattttttttctttaaatttttaatgggattagtgagttttcttttctagtattttactattgattatatcttgttgtattatataattagatggattattggtgattgtatctctaatgggattttgtagattcggtttgaattgaatttgcatttaggtatttgtttgttgcaaataggattgatttattgtaacagtttttttttttaaaaaagaaaaaatttaactaatctattcttggaaagacatttaagtttgtaattatgtaattaatgcaattgatagctaaaattaaggtaatcattttgcttcgctggggaatttctggtttgcagtggtgctgagttgttca

SEQ ID NO: 80642 - DNA, 666 bp, Citrus sinensis
  Intron number 3 from transcript orange1.1g026316m (locus o range1.1g026316m.g) derived from phytozome v7.0 (chr-ID sc affold00006; pos 67121 to 67786 reverse strand)
cgatacaagcttcttggaggtctcgctgttcgaaggtagatattaatcatatcgcaaattttgagtaacaaggctttaaggagttatggattgatggtagattactactgagatagaattgtgttggtgtcttttcttttgaatcttcttacatctctttatctctcttttgctttttcggttatgtggattgctacacatgcaagcttaaactttctacatgttttctctttatccaatatggtacactgtttttgtactctggtatgaatttttacttgttgaagtcgtctttacagcgagttggttaacacagataccttcctcgtgtcggaggatgactataaaatttcatctattccctgaaaaaccaaggaatgatggtgttattccttgcgaaaacggattggatggtaaatttaatggttgcctttcttttgttccaatgttagaatgagaagccataatgatataaaactgtgttaggagatgttaatccttgctgtatggctgtttgcatgagttgtttgctatcaatgtatgctttaaagttcttggaattagtgaggttttggagaaaattgtttgttgagcatatttaatcttttacttatttttcaattttttcctggtatgacaacttgtgatttcatcatcatatagggc

SEQ ID NO: 80643 - DNA, 183 bp, Citrus sinensis
  Intron number 1 from transcript orange1.1g026765m (locus o range1.1g021319m.g) derived from phytozome v7.0 (chr-ID sc affold00013; pos 1974069 to 1974251)
tccacagcagagagtacactggtcacaagaaaaaggtttctcttcaaattatttgctttgattttctctctcaaataaattgaagttttttttttttcgtttaaaaacaatctttttaatcttgtttaattgtgggagttactgaaaggtacactcggtggcttggaattgcacgggcacgaa

SEQ ID NO: 80644 - DNA, 643 bp, Citrus sinensis
  Intron number 5 from transcript orange1.1g012500m (locus o range1.1g008957m.g) derived from phytozome v7.0 (chr-ID sc affold00006; pos 239093 to 239735)
gtggagttgtaagtgtgcatatttgattcaccgcttccacattctttttatctggttcttttctgttgtttaagttgtatccttttcattatcggtttatttgttgtatctagtcaatcatactttaatctttgattgctattgtgcttttgaattgattttggctcgattaattttagaagggtttggttttgtcttatagttttgttttttgtttcattttcttttattattgttaataaccattccagatctggaaaagccctcctgattggtggtcgtccataacaaagataaagtcgtttaacttctgaatacttgtttagttatatgtctgccttatttatttttttgcttttctgtccatatggctctgtaataaaagaatttttctgcaaattgtctttggcttgtactggagtaattttgacttccgtatcccttctttgaacttgatagtgttaaacttgtcgtctgttttcgtggtccaatgtttttattggttcgttaagtggcagtcctgtatatctctctctctctctctctctctcgcatgcgcgatcgtaaagtttgatgatagttatcttcttcttattctaactatttaggttggaagccatttaaactggcgctacgctttctg

SEQ ID NO: 80645 - DNA, 516 bp, Citrus sinensis
  Intron number 1 from transcript orange1.1g036971m (locus o range1.1g036971m.g) derived from phytozome v7.0 (chr-ID sc affold09969; pos 451 to 966)
cctggctggtatgttcgctcttcttttacttttctattttttttttgttttgttttgttaaataatacattaaactccctcttggaatttaattttatcattttaattctcctttatcttaaatttttgtaatatctcattttattttttatgttagaatatgagacagtaaaagaaagaaaaaaaaacacggttaaagaataaatatgacttttatatatacatatctattatttgagtcctctacataaattaaaattggctaatttatttattgattaaaatattacatgctaatggcatactttttttttcacaattggaatatcatggatgaaatggggtactaaaaaatctatcataaattaaagtgatagaaataaattacaagagggattaagtacggtcactctcccttctagtttgatccgttttcattccatgaagcttctaaatgtgtgttcttatttggaaattttaggttccaattgaaagaccaaattcttgaaggagaac

SEQ ID NO: 80646 - DNA, 389 bp, Citrus sinensis
  Intron number 2 from transcript orange1.1g021570m (locus o range1.1g021570m.g) derived from phytozome v7.0 (chr-ID sc affold00730; pos 4677 to 5065 reverse strand)
ttgtagtgttaaggacaggtgagaaagataaaattgcaactctagatactcaaaactttcatgaccatcttttggtttgtgtgcattcatcaccagaatggaagttttatggtgaaaattcttgatgttgaactgtctctttattgtccctaaagacccttcgatattaagtttttgccaaaagtccatgtactaaatggttaaaatctgacttgtcagtcctaaaccattggttatagcaaattaattttgttatgcccttatgaatttggcatattctagcttccttgcttcttcttggaatcactagcaatggaacttaatcaataataatttacatcctctcaatattttttattttgatttctgatttcaggattggtttcagt

SEQ ID NO: 80647 - DNA, 699 bp, Citrus sinensis
  Intron number 3 from transcript orange1.1g030322m (locus o range1.1g029121m.g) derived from phytozome v7.0 (chr-ID sc affold00156; pos 259872 to 260570)
ttacagggttaatctttgcttttctttttgtctttttctttctttttgagtgttttcttttcttttttttttttttggggggggcgggggggggggctgtaagtctgaagggggctttcggggataatcccattcttggctgaaaagctaatcttactatcattgactaattttattccctgtatattcatgggacttagattaatacattgcaattgctacagattcattatatgatgcattaaaaaatttcttcaattattatgaactctgttgttcatgtgagtgactatttatggtaattgacgatggactagcagaataatgttgtctttgagtcttagtacccaataatctttcatatcttgaaattgggtagtgatggtctgtttactgtgaccatttgtttctgttctaacttccaaaggatgaggcttttggtgcttggtcgtaagtttcccatgctattttgaagtacaaaatataatgttctgcacttgcctgttgattaaatagcaagtttggatgctcatatgccaaacttaccagatttccagaatctctaggcttgaattgaataattattggcaattcctccctttgatcaccccttttgctatgataacccagagactctaactttgtgtggtaatttgctttgtagaattcctgttcctcctatcaacccaagtcgtagta

SEQ ID NO: 80648 - DNA, 654 bp, Citrus sinensis
  Intron number 1 from transcript orange1.1g017016m (locus o range1.1g010478m.g) derived from phytozome v7.0 (chr-ID sc affold00013; pos 1149903 to 1150556)
gcatttgcggtttagcacttgactgctcgtatgtaactatatataattggtatcatcatatgttaattatccaagtgtaaattaagaatataacaacgtgttaattagcagtaattgcactcgaagatcatatctgtcagtaagcttttaaggagttagtatttgctatgctacccttctaatatttcatatttgacaacattagtcttcactctttcaacagtcggagatttagaacaatatgttatgttacggtcttcaatctatatgttgatttgaaagctttgatccatggccatactgtgtaatatttcaagtgtgtgcgtgtgactcatcggtaggctatcaccatcaacagtgtcggcttttagaagttgacgacaacgtgaccattgctatcgaatcattactttacacccgctaattttgttttttgtcaaattggtccattgactgcttttgactcttatttctttagactctgagggccaaagttatcattccatgtccgtttatttatcttttcaaaataaattacagcgaccattttttttaattaagtacagaccaaaaccatttaaagctaagccaatttcaaaagccagtcctgtccactcagcaactactttcccaaagccatcactgtcgcagtcc

SEQ ID NO: 80649 - DNA, 475 bp, Citrus sinensis
  Intron number 2 from transcript orange1.1g037191m (locus o range1.1g037191m.g) derived from phytozome v7.0 (chr-ID sc affold00086; pos 159490 to 159964 reverse strand)
tgattgccgctgctattaacgagcaactctacaaggtcgattccaattcgaactcttatttctttagtcgtttactttcagtcttgcatattcatactaaccctttctaacatagacttggaattgatggtgttttgattgtttaagatgaaacaccagacaaatgattacttttctttttatttctagttaatggtggtttgcttatctatcatcttggaactatatctagagcatctctagcgcacatctgtatcttattgagctaatacaagttttcttctcatctgcttgttaggattttgtttgtcttaatctctgttcttacatgactatactttattgttgaagttagttaagtgtcgtgtcgtaatacatttgaattggatgcctgacttatgcatcaatgatctgagaattgtgcttatttcattctccaggagaagtattgggaagatcaccctggtgaagctgt

SEQ ID NO: 80650 - DNA, 425 bp, Citrus sinensis
  Intron number 4 from transcript orange1.1g022953m (locus o range1.1g022953m.g) derived from phytozome v7.0 (chr-ID sc affold00040; pos 211892 to 212316 reverse strand)
gtcggtttagagaggttgttcaagcacctaaaagggtatgtttcatttttcatattgctcttttgaattataggttatataaaagttggttacttgtcacatgtcagcagaagcattgtaactagttcaaaatatgaatggtgatttatattcctgtgattttaatgatggtcaaatggttttattttggttttgagcttcctgagctttgccgagtgttgctttatcctttctttttaggatctgaaatttcatgcttcacaccattgcatcttattagaggaagagtgttatggttttctcttgaagcagcaatcaacttactggctgcctactgtgattaatttaaataggattatttgtttgaatagtttgcttcattttgttcaggtggtacgtgatccacgtttcgagtcattgtgtgg

SEQ ID NO: 80651 - DNA, 820 bp, Citrus sinensis
  Intron number 1 from transcript orange1.1g022953m (locus o range1.1g022953m.g) derived from phytozome v7.0 (chr-ID sc affold00040; pos 212775 to 213594 reverse strand)
cctccgtgttcgttcaccatcatcagccgcactaggtaatttcaaatttacatacgttttatagcaatttcaaatgctgcatgaatgggacagttttattataatttcaaatttgtataatggctgtttataactcaatcgggcatggccaaaaggacttgttgagtatgcttggttcgtaattgatatttgtttttcaattttttgcattattgatctggccattagaataggcaatttggaaactgatctggggaatacaaacacgaacgcgtaataatgcccccttttgttttaaaaactgcaatgtgttgagagtcaaagctacattcataataccaatcattgtactgtgcagaaaatattcatactgccaatactaaggtcgaacctgaattgcaacctgaatccaagtttataaccaaaatttaaatccgaaccaaactgaatttaatttgattgagttcggtttgggcttgagcttcgaacccaattgggttgagttctccaaccctaatgggttgcaacccaaattgaaacccgagcaaccggaaccgaagctgaatttgcccacccctagctttaaaggacacaaatataaatataatctttaaaaataattttaaaccattagatttaacaaaaatgaatggtgaggattagatgacatgactatattaatttcattaatattttttctctctcctccttccataaggaatttcccatctctctcttctctattttgagaggagactagcacagctcttagattgagctgatcataattggttttagttcagagttgttggaactgaaa

SEQ ID NO: 80652 - DNA, 743 bp, Citrus sinensis
  Intron number 2 from transcript orange1.1g023005m (locus o range1.1g014667m.g) derived from phytozome v7.0 (chr-ID sc affold00193; pos 166015 to 166757 reverse strand)
ccctctttaccgatcttgtcttctctttactcacggtaatttctcagcttttccttgctttttctcgttcaattttcttatctgggtgtcgttgattgagtaccgagttttgatttttgtcatcagatttgtcttgtttccccttctatgtttttccttgcttcagaaatatgttgtttgtttgttggttaatacgttcagtttagcccttatatggaggttggcttgttcgtgtgtttgttttcctaaagtttttgtattgatagatgtgtacatataattttgtgatgagaattactttttgcttctgggtttgattcatttgcttgatatttgtttgatattttacttcactagctcataattctgagataagaaaagctattttttgaaaaagtgtattttttttccgaagcagagtgattttctgttttatttatttatttaagtggatcagacttataattaataaaagagtaaaattttcttgtttggtgctgttttatttgctggattcaaatattaatttgtttgtttgtgtacgtacaccatctgtggtgtttaatcagggcaacagtactttgttttttgcattttatgcagctgtattaaatctggtgtgtctatacttttatctctcggtttgtactaagtatttttatctgtgggtttgtactaagtattgtttttgtgtgatattttttgaaggttgcaattacaactaagggatcgtcgtcgccact

SEQ ID NO: 80653 - DNA, 776 bp, Citrus sinensis
  Intron number 2 from transcript orange1.1g040744m (locus o range1.1g040744m.g) derived from phytozome v7.0 (chr-ID sc affold00019; pos 114332 to 115107)
tagattctgcacctgttgcatctcctgaccctcaggtaaatggtgcttgcaatggtttaaaatttgctattaacatgaataatgggatatgcgatattgttgggatagttagatatttgataatttaatggaaacagaaagctttgaccatgcacaatatttataagaagattataggccatgagcagaatttgttggaatttttacatttttacatctgccacatcttgtgctctgttttgtatctatttggaccttttagactttaattaaccagcccttatttggttgagttagtatgctggactacacttattcaattttgatttatagggtttcaggtttagtttatagtgtatgttttctgttatcattttaactaggagttctgatgtttctttaacttactgaaattcacgggaataaacttccttcattctctcattgataagactatgtatttgactaaagtgcctatttttgtgcacctgaaagaagtcagtgctttgataaaatttggaaattttgagaagttatgcagagcaagtatgttgtttgatgacaggcatttgcatctcttcttttgatctacattgcttttattgtaagaatatctgtattctggagttggtaggatgtggtcagtgtggtgcccggttgcactttagcatcttttgaaatttttttttttttttggagtatgctcaacagtgctaattgaattcatttaatttgttttaggtgtgggcttcgggtttctctgcagcttttctgaa

SEQ ID NO: 80654 - DNA, 768 bp, Citrus sinensis
  Intron number 3 from transcript orange1.1g034254m (locus o range1.1g034254m.g) derived from phytozome v7.0 (chr-ID sc affold00013; pos 624936 to 625703)
ttctgccactggggtgtcttcgtagtattaaggaggtgaatttctttgttctgttttctttttcctctccctaattgaattgttggttcagttttgaattatgttttgaatcatattgaatttgattgactcatgcaagttttccagtgggttatattttttatgattttgatatttaacaaggttgattggtttagaaagattgaggtatgattatagaatataggaagcaaccaaattacatgtttattatatgttaaccttaatcaggtgtttaaataaaatcatttcgtgatatgagctctcgtgagcttttaatgatcttttgccatgtgtatttaagtaatagtgtataggtagaatttaatttcttcattttctttatttattaactaccatatgtatttttgctcaggaggaaatcagatcatgagaaaatcttaatccttaaataaatcagagggaagtaggattgttgttaatgcatgcaaaattagaattttggtgatgtaattgacttgttattttgttgtatcattctggtttatgtgcaaacaactgcattgcaaagatttaagtctttactcacaatatggacataagttcggcgattctggaataattcatggactggaatgatcttgttacttacatcttatagcacaatctgttttccaaacgcattcaagtctgttgtcttcttcaccctcttgcacaaaatgtttttgatgtgtatttcatcaggctgtttaggggaagtggaaaagc

SEQ ID NO: 80655 - DNA, 754 bp, Citrus sinensis
  Intron number 1 from transcript orange1.1g002084m (locus o range1.1g001789m.g) derived from phytozome v7.0 (chr-ID sc affold00041; pos 556294 to 557047)
tcgagttcttcgcagctcagattcttaagcgaaaggtcaatttctagggtttcgattctagtcctacgcttcttgctgcgcacttttttttttttttccttctattaacatttttttctcttcagtttttctgttaacaaaatggaggctttacgtgtgggaaaatacaatattcgtaaagttattttctagcaactgctctgaaagtcaaaacgtgtcgttttatgtgtgttttgcgctgcagggtttcgaaaaagcatgtcttttttctcctactcgtgcatgcattttcattggttttccctcgaaaatactgatttttaaatacaataactgtagcatttttatatttggaagtagaaaatttaatttctctttttcctttttctgttttacaaacagtttttcaagcgtctatacttattgcagtagttaaggtcttggtgtgctagcttggattgtttcttcctgtagttatttggaggatgaagtgtgcttgcattattttgattaaagagttgacaacaataagagtaattccaagtttactgttgcattgacttgatttctttggtgtttcaaatattaaacccatatgacaacagataaaaattgtttgaattattggagtctcgttaattgatacattcgatgcaattgtttcaaattacctccgaactctctcacaaaaaatattttcttccattttttgagtgaatgatacttacacactatgtcacaatgcagattcaga

SEQ ID NO: 80656 - DNA, 596 bp, Citrus sinensis; identical to SEQ ID NO: 80584
  Intron number 2 from transcript orange1.1g023186m (locus o range1.1g023186m.g) derived from phytozome v7.0 (chr-ID sc affold00185; pos 245294 to 245889)

SEQ ID NO: 80657 - DNA, 848 bp, Citrus sinensis
  Intron number 1 from transcript orange1.1g015428m (locus o range1.1g015428m.g) derived from phytozome v7.0 (chr-ID sc affold00006; pos 2668803 to 2669650)
ttctactgaagcgtatcatctcgttcttcttggtatgtttttcaaaaaccttcaacttcagttctttttttgtgtgttctggcctgtttcttctttgaatcttggtcatggcttgtgagtgattttgttgcgattctctgttgttttttcttttcttttttttggggggggggggtgtgttctgcgattttctttcttgaatcttgtgtgaatgtgttatattgctgagaaactacaattgaaacgtaaagaaaaagaattagtgaggttcaattttgtgatttctgtgcatttcaatattttaagcgaaattaaattccagatatcgagaatttaatttgctttccttaatttgtctgtttcgtttgtttgtttctcgccacttatcttggattcttgcatgctaagaaatcttcaaaaattaagttgcttttcaggcaattaaaaataacagtaacaaagataactgtgaaaatcccgggtttgctaatcttctcttctcaactcaaaagaaaattactctgtttggtaatcaagatagaatttctcggcatttttagtcatccatgcttcatagttattcactttttgatgggtcggggttagtcaatgtgattcttagttcttggttttatcaattttgttggctagtcaagtgggatgatttcttgaaccgttctccgtatttgcttgttgggtgtttgtagccattaactcttcttgtttttatttttttatttatttaaattaggtgctagatgatggtaggcttgggtgatggattggatcttacattcctgaatccctactgaatttctcacctaaaatattttgtaattgtaggtata

SEQ ID NO: 80658 - DNA, 503 bp, Citrus sinensis
  Intron number 2 from transcript orange1.1g018969m (locus o range1.1g018969m.g) derived from phytozome v7.0 (chr-ID sc affold00019; pos 1665647 to 1666149 reverse strand)
atataatgtgagtttctctgcttattcttcatcaccattttaattgtttaggaatttggtatctttaaaattttgattttctagtttcaatgttccgaggaaaattttatgccaattcatgggatgaagaatgatgtggactgcggggtgtttttttgccgtgggtgaattagcacatgaagattgcatattacccagatacaaatgtagcaattagggatttggagctgctttctagttattttgaagaaatctgaggataaaatcttttaaaggaactggagtgcaacggcaacgattattttaacagttgtattgttgcggtacttcaatgaaatttataatgttatgagatgatgaccttgattgccatgcccttgtccccttgtagatgccattttttggaatttttgctttatcttcattctcctgtttgatatttgttgtggaattgtaagtaaaattataaagctttgatctgatattgttaatacttttcagtt

SEQ ID NO: 80659 - DNA, 802 bp, Citrus sinensis
  Intron number 2 from transcript orange1.1g003176m (locus o range1.1g003176m.g) derived from phytozome v7.0 (chr-ID sc affold00013; pos 295105 to 295906 reverse strand)
tttaaaataaaagttcaataataattttgacagtaataaatatattataggatttcattaaaaaaatgtgaaataaaatcactttagcttccaaaatgcagctgcaactgcaagcctgcaagtatttaccaaaagcattagagttgtagctttaaagccccaacacccgcttaactttaagttatttcttttcttacactaaatttagtgatttattataatttaatttgatgtggtgtgacttcaagttttgtacaactgtttatcagtggcatctttgcctgtggtatggttggttgtcaagctttatattgagaaacataattactactataagctttgatttttatggtagagcggttactaagattttacttctcagttcccagaaaaagtactcacgaccaacaataataaatgtgtcatcatttgcataatttagtagttccatctgtcctgagttttatgtttgaagtaattcaatattatttaatttgggtgttgatgtcctgctgaaattcgatcctttcatttatgaatgtcaacatcatttagaacttcctcgttggaatattcttcaatagtgatcataaaatgaaactgtgtttgtcttcacatgtctttacattgtaattattgtactcagcatgtcaattttgttgttagtattatggaatagcttagtccaagaatcagttttttatgatagaagtaaaatataactggataattgtagaacatctttttctatgtaacatgcatctcttctggttgttgatgtgaatttcagaagttgtttgca

SEQ ID NO: 80660 - DNA, 748 bp, Citrus sinensis
  Intron number 1 from transcript orange1.1g003176m (locus o range1.1g003176m.g) derived from phytozome v7.0 (chr-ID sc affold00013; pos 296007 to 296754 reverse strand)
gttttcttcgttctgcaaaccccaactcctcgcaggtaaaagcttctcttctctcgtgctactattacccactaggtttttaagttttaactcgttcttttttaaagaaaattctcgctttttttttttctcttgcaattactaattgcatgtaaaaaaaaaatcaaaatttttaccacttatgtaaactccccctctggtgactcgatactgtttaatgtactattaattcttgaaataatttaaccatgtaatgaagttaattagtatactctcatgttcaatttgtagattggtgggtttttgctaaaatgtttcaaaagttaatggattttgtgattcaatgaatgtttgtttggttgactttgatagtgaactttttttggctgacctgctgtggggatctgctgacccttatggtgtttaccttcatttttatctggaaattgggtatagtgattgtatgcattctatttcgtcgctggatttggtaatctatgagttgtggttgattgaaattgttttttttttgtttgtatccttgtttgtatactgagttgtggcctttagttatgcccttggctagtgtgcatgtgcctgtctttttgataaacaggttcgttatgttttaacatgctaacattgatgatcttagagatggggaataatacagtaaaatcttgctaattgtggtccgggatttgattcttcagtgctgaaaacctgcaggaaaagccgtgtgtttcct

SEQ ID NO: 80661 - DNA, 373 bp, Citrus sinensis
  Intron number 1 from transcript orange1.1g036393m (locus o range1.1g036393m.g) derived from phytozome v7.0 (chr-ID sc affold00028; pos 720206 to 720578 reverse strand)
tgataccagagatcaaggtatacattttttgtttttccttttcttttttcttagctaagatttattcatactttttttcgcaaatttgagcctatgggccaaaaatgcaagctctatttaattgcatatacagatgaatttactggaagatacttttataatctggatatctgttattatcagaatgagctataatttcccctgcaattacatcttttattagaacttggctcaatctcgaaagtcttctaaaagttgttcttaatccatcttgctctgatccaaataatgactaacttatgcaggcgaatgatttaagaagatattatggcctacagtttgtaacatcttccttggaaaagaaagcagaggc

SEQ ID NO: 80662 - DNA, 805 bp, Citrus sinensis
  Intron number 1 from transcript orange1.1g028173m (locus o range1.1g028051m.g) derived from phytozome v7.0 (chr-ID sc affold00009; pos 816819 to 817623 reverse strand)
cgctgtttctgatcaccgagttgtttgataaacaggtaacaatcgaaactccgttttgttactgtatttttgtatcgaattcgaactccttcgttgaactagaatgatcacttgctttttggcttttttaggttttttttttccttgaaactctggaattccaagtatttttaattgtagcttcacttgtttttttttttatttagatgttatttgtttagctgtttgttttctatgaaattagtctttaattgagtttttttttaatggttagagtttatccactgtaaatttattttttcctggtctagattccaatttttcatatattttagcttttggtttatttaagaattatagttaatttctttctgttcttcatttaaaccatttgattaaggataagtgatttttttttaaaaaaaataattataattaattagtggagttggtgagaaaagtgtgctttgatagatgctcacaagtgtatgatagagagatcgaattgcgatagtagatagctgaatgagaaaatactttttgatcgtattatcgtttggtctctgactctcttttagctttaggatttgatctgttacttggcttcgtgtttctccttggaatgcttgacaagttttccatcttatcctcgttgttttttattagtctgttacttgcacttttagccttttaggtttgtgtttcacaattcacctattatgcaggggagtatttggctgcataaggcaattagtttattgtttgcactaacctgtgtggcatttgcttgcaatgaagacagaat

SEQ ID NO: 80663 - DNA, 381 bp, Citrus sinensis
  Intron number 3 from transcript orange1.1g004822m (locus o range1.1g002174m.g) derived from phytozome v7.0 (chr-ID sc affold00118; pos 268728 to 269108)
gctatctacatcttcgagaattgtacaatttcagcctttttctaatttttgataacatggctgtttgatgtattgtctgtcacttgcacacatgacacaactttcgtgtaataattcttgttgctgctctcttaatattacagcaaaagtgggtcacacattcagttaggatattggacatagaaacagcaagaggctcattttttgcacagaatcttcaccaacatattcagagattaattcattaacttttggatgcctaatgaataatctactaaacttacctactgatagctctttacattttttttttcatagagctcaattaatgttgtgttctttgcaggcaacttttgaacttgaatctgtcgggaaacttat

SEQ ID NO: 80664 - DNA, 706 bp, Citrus sinensis
  Intron number 2 from transcript orange1.1g012852m (locus o range1.1g012852m.g) derived from phytozome v7.0 (chr-ID sc affold00442; pos 18917 to 19622 reverse strand)
ctgcaatatcagtgaaaccatcatcaaagaaactggtatctgtttgctaactcatatgattcctttgttttattataccatgctagggagtagttatgaactttgttaacatgttggcaatgacaatttggaaaatctagttatcaagaataaaagataagcagattaattcacttgggttgtagagaatttgggtgaatgagggatgatgattctgaaaaatagtgcagtggccgataaatagctgaaagttgaaatcgagtcggcaggggatagaaagattggcttctgtcaaataggcttgaccaaacagcttggtcctactagtgcatcgaaatatatgtgaattttatacacgatttggggatgatgaatacttcattaaatattttcaatacttcacaaatatgccttcccatttcagacgatgcttgcatgtgcatactctacttaactgcatttttgtccacagcatgatcatttatctgtgcacattgagagaccgggattgcgtttatcatattcaatcccagttttaaatgacgtgaaaaaagttctgatttttcaatttttccccaagctcgggttttgtcatgacagagttagtagttgacatttttgtgactgttgtataactactaatatttcttttcttccttggacgacgtccatcagtactgacttttgatctcattgttgacagccg

SEQ ID NO: 80665 - DNA, 342 bp, Citrus sinensis
  Intron number 1 from transcript orange1.1g012852m (locus o range1.1g012852m.g) derived from phytozome v7.0 (chr-ID sc affold00442; pos 19612 to 19953 reverse strand)
gggtatgggttcttccacttttttttttttttaaaaaaaaaattgtcatgctccaattttcaaggattttatttaatagctacaaaaggataaacttgaatatcatttgaccttggtggtataatgattttggtattactgcgattttggtttattctggagttttggtgtactttttgggaggcacttttgctaacgcacgcgtaccgtgtgtcacaaaatttccatttttgtgcatgtctaggagaaaatgttgacttgtttgattttttttttttctttttggttttctgtttgtgtcttgcaggtggaatagctggaatttttttgcctgcaatatca

SEQ ID NO: 80666 - DNA, 477 bp, Citrus sinensis
  Intron number 1 from transcript orange1.1g013770m (locus o range1.1g006781m.g) derived from phytozome v7.0 (chr-ID sc affold00009; pos 1900071 to 1900547)
tctccgagaaggatccgtcgtgtcgttacggtcgggtacgtgtcatttctaataacttattattatttttcaaaaaaaatattatttcttctgaattttagaattataattcatattgcatttagattaatttattttgttcggtctaattgagtaacaatcagggctaggttacattacgtttttgtataattttatgattatcgaagaaaacgcccatctttgatggaattgctagtaattttaattgaatttttatatgacctcatgaaatgaatcctatctactgattatttgaagagcaggtggtttaatgattaggctgacagatgtgactgttggttagagatatttttgttttttgtgtaatttgtggggttacaataattgtctggtaaattttgaggtttgttgagtggatatgtatgcttttgttagacctagtgatatggtctttgtttgttttatttctccagt

SEQ ID NO: 80667 - DNA, 671 bp, Citrus sinensis
  Intron number 3 from transcript orange1.1g021742m (locus o range1.1g018324m.g) derived from phytozome v7.0 (chr-ID sc affold00013; pos 1743422 to 1744092)
ttgcagttgcggtgttattcttttggcactcacaggtttacttctatcactttctgtaattggatctgcatgttgaaatattcttctaataatgcttttagatgtgtttttgcttacaaaatagaggtacaattttccaacactatggactccttgtgtgtgctagttgatttgcaattgtgtttagagaaaggaggagagggagggagaatgttccttttgtgatgctaggagcgattgttcatgatctgtaagttcagtagtccaaatatggaaccagattgtagtgttctgagtaaaatgtttacatgtggaaagtatattatgaacttgaaaaaagactataaaagtcaatgatctgttgttccattatcagcttgaacgtcgctgcaataggattttatattgatttttgacatattcaaaccattgctgttactcggcaaatatgtgcaacatgcctaaggcatagcatattcttccatttttttttggttgatcaattgtactatgtgcttagtttcacataagaaacttacatttctaggcttttattccttttatctttgcttggtatggaacatgctgctattttagtgactggattttggtcaaattcaaatttcattatttcaggcatatttcaacagtattttgtgtatcaagtccag

SEQ ID NO: 80668 - DNA, 742 bp, Citrus sinensis
  Intron number 1 from transcript orange1.1g020065m (locus o range1.1g013150m.g) derived from phytozome v7.0 (chr-ID sc affold00104; pos 245354 to 246095 reverse strand)
cacaaaatcaaggcttcgctctctacttcttgtaggtattgatttcttatctctctctatttgccctattcaacaaaatcgatcttttttttcttcttttttttttcagttactcctcaatttacgtgtgtcgagattaacgacacgatgattacattttttttctttttttttggttttcctgaaaaaaaaggcactgaaaatataagaaaatgtgttttaataggtcagttccagaagctataatacaattgataagttgtcttgttaagcttcaaaatatgttgtatcttattgaaactattaaaagtgaatggaacagacttttttttaaaaataatttttgtctattattctctttttcaattgttctggtgattgtattggctggttgttgtaattgttagaagcttgtttgaaatttctgcacaaaatttattttagcatattctaaagaagttgcaaatgcggaaattattagtttgagtgctcttttttgaaattgttttgaatcaatgtggtcccaaagtgaatatgacaaagaaagtcgcccatctagattctagacaagaaagttctcatatatttcatttggtgcattgatgtaatggagatgaaatgtagagtttgggattaccttctgagatatttatgtttggtttgttatggtgtggaatctcatatttatctgggttgtattgtagcagttgaagggagaagctgttatttgttttgtccttta

SEQ ID NO: 80669 - DNA, 668 bp, Citrus sinensis
  Intron number 1 from transcript orange1.1g027573m (locus o range1.1g021204m.g) derived from phytozome v7.0 (chr-ID sc affold00099; pos 135326 to 135993)
ctgagcaactccacaaagccttccaaggtcttcttttttttttttcgttcatattttgtgttggattcgatgttacattaggttgacgtcattacttttatcatctatgtttcatccgatctgtttgttattacaacgtttcatccgatctgtttgttattacaacgttcggtgtcatttgtctttggtgtttttgttcttgaaccgatgttgttgatgaacttttgagtgaatcttagacgatgtgaacgatgatcgactgccatttcacgtgttgtaaaatgatcttgatcaagttcttgtttttgacccttttggagtcatcaagaaagagctaataaaaatttacagggtgatcatttggggattatgtagtgtttgatcggttagtatgaagatctattacctatatatctcatagatggtgtaggtccctccctttgttattttgattgtactaaccaattaaagatcaaaattttcagtgtcatcacatgaacttattgcctcgatataaggatttgagtctctgtttgtatcttggttgtaatggctttttctattggaagactgagaactactatttagcacaaaaaatgctggttgcctgcgaagtgttgtttgtgtgtcaagcaattgattgctttctttaatggtatgtttgcagg

SEQ ID NO: 80670 - DNA, 588 bp, Citrus sinensis
  Intron number 1 from transcript orange1.1g017745m (locus o range1.1g006709m.g) derived from phytozome v7.0 (chr-ID sc affold00006; pos 715974 to 716561 reverse strand)
tccaaattgataagcttttgtctgagaggggtatgtgaaagacaaagcttatacttttgcctgctcttatgtttctttcatttgcagctattcataagaagatttctatttgaattgtatgatactggattttgtgtaattgtcattattgaaagtacaaggtttttctttccttctttccttcttaaaattttctattatcttgctgccgcctttcactcccaagtcacttaaggacccttaagcatcattaaagagggtagttcgtgcctattctttcattgttagcatgccagtactgatgatgtgcatacttgttgcatctatgagtactattgcttcgctgctctaatacaagttgtggagatgatattcagctgaaatttaattttccaaaattttctttctggtttcttgtaattttattttcttagtttttgtttacttagcattgctgaagatatgaattaatgctttttggttaaacttttagaaagttatctagtagttattgtttttcgtaaatcattttgaccacacatgattaacaagtttagaagaacttattcagggatgttattgcaggac

SEQ ID NO: 80671 - DNA, 713 bp, Citrus sinensis
  Intron number 2 from transcript orange1.1g032450m (locus o range1.1g032479m.g) derived from phytozome v7.0 (chr-ID sc affold00487; pos 23699 to 24411 reverse strand)
atcgtaaaagtgagtgggcattcactatttgattagaaattgtttgcttaaatgtaaaattcctagagattttgtgcaggaagatttgagtacactttatggctgcttcgctagttgtgtatattacgttgagcaatggaaatgaataggaattagtaatttgatcatgtttctgggacaataaatcttagaggatgaaattcaattgcttggatttaggctgggtgcgtgatcgtaatttcctgtttcgaatatctggcgagagtttggaatttagttgacaatattttacttgatcttatgtggtctttatcactgtctgttgatatagctttgtcaaatgaggctatgtttatgggtcttaaatgttttgctaagccagcaagccctgtgtgtttgtggtctgtttggccttcatctccaattggactctgcatgagcgtcaccaccagtgaggtgtattcggtggcgtttgtttgtaactaattgcggtcactttttaaattcgaattaaaatgatttctgctagcaacattattatttagtggagttttgtaggattcatgttgcttcgctttgttgtggctttacatgaggtgtttaaagcggcagttggcatgcttctttttgctccaaagcttttccacccttaataattgctattttgaaatggaacagagattgggctggggttgacaggatttggcattttt

SEQ ID NO: 80672 - DNA, 615 bp, Citrus sinensis
  Intron number 1 from transcript orange1.1g004240m (locus o range1.1g004240m.g) derived from phytozome v7.0 (chr-ID sc affold00068; pos 195902 to 196516)
aaaatcccggcattgtacgtttctttgagttctttaaatgatattttgcattgaattgtgtattttttgtccttgaataagatttccaatgatcagaatggacagtaagatgaaaatgagaacaatgcattattttatgactagtgtctgaaaaaaaaacaaaattacattgggtgaatgtggttgtgtgcttattcttctgagatattttttaacttttatagttatgatgttatatgtatggtccgtttgaggctcaaggcaatataatagtggtttctttacgtgcaacttgatgaaattatttgatcctgtatgatagaacatgttgcatatgattttattgtgttgtgctgaatgcttttttcttgccatctctggttcatgtatgttatagagcaattgggttttactcacataacatgatttttgcttggcaattttgttttgtaccgtacggaagtatagctttccttgattttatttattgagttatgtggattacacttaaaataagcagtttagagaatttccacaattgcttgtatttattatgctcttttttttttaaatggtccagaaacccattaggaggggtgtcatagggcccacact

SEQ ID NO: 80673 - DNA, 594 bp, Citrus sinensis
  Intron number 2 from transcript orange1.1g020180m (locus o range1.1g020180m.g) derived from phytozome v7.0 (chr-ID sc affold00006; pos 1362047 to 1362640 reverse strand)
tggtaatatttcaatttccagtgcatgtattgtgacatacgctaaaatttaaaattttcttttcaagtacaaagctattcaatgcatttgtgaggttactatggtgaggtttaacaagatttatacaataatgatgtctctagctatgacacatagcatgaatgtgtgaaagattactgagatattgtttttgatttctttatgtttgttatggttttagtttgataattttgtccctcatgctctgtgcagaagactaaaatgtgagaaaagacgacatcttaattatcctatatatgatcacactaaaacagctgctcaagtctcttttcaattcaggctctcttttttgcttctattttcatttttatttttctttgatgggttggtcttagtgaggctgtgtttctgatttacatacattatatatctttgacgttctgcggattgcagcgtttacttcaatcccaattgtgtttggttgaattcgtcatgttgtcttcacttcaataaaatcagtgtacaaatttgacttgccagtatattttctaaacatgaaatcttctttgctattgagatttgagcagaagggcc

SEQ ID NO: 80674 - DNA, 379 bp, Citrus sinensis
  Intron number 2 from transcript orange1.1g024157m (locus o range1.1g016657m.g) derived from phytozome v7.0 (chr-ID sc affold00068; pos 489599 to 489977 reverse strand)
ggtgacgccaaatactggttcgttcttgcttctttgattttagagtagtttgttttggttttattatggtgaagttggttgtgacaatatattcttcataaggctcactaggacatttgttaccgggctttttaaatcccatcaatgtaaaacaccaaaataatattactatttgggacaaaccttatcacatgtgctatttaatatctttgctttgtttctggctacttagcataacatcttccttgtaggtcatgcattatatagtcacacagacattactggttcacgcttttcataagggcccattatgacatttgctcatatgcctttattaagtgctaaatgctgactgattttatttgctaaaatcagatcc

SEQ ID NO: 80675 - DNA, 467 bp, Citrus sinensis
  Intron number 1 from transcript orange1.1g010809m (locus o range1.1g005003m.g) derived from phytozome v7.0 (chr-ID sc affold00041; pos 471868 to 472334 reverse strand)
ttcaaattctgttccaaacaattctttctttcaaggtacccgcttctgctatatttacccttttgttttagtcatcaaattagttcttttgattgacactattatttatttgattctcttgattcatcacaagtaagaatttcattgatttgacatatgattataaattttatgcattagtaagtggttctgctacaatcgtgaacggtgacccagatgggtaatttaaaaactgcttcatgtgaagtttcaagtctctcatgcttcttataatcgctgtcattcctttccattccttgttttagcagaagaagttgaattaaatgaatcagctgtagttttattctattgttgatttcttgggggatgtgttttgatttctgaatgtgatgtttgtcttaatttttttttttttttggattttccgtattttagttcctgctaatgggcttgctttgtttctacag

SEQ ID NO: 80676 - DNA, 727 bp, Citrus sinensis
  Intron number 1 from transcript orange1.1g019985m (locus o range1.1g019985m.g) derived from phytozome v7.0 (chr-ID sc affold00018; pos 821396 to 822122)
cgacgagaagaccttagatcgcttgatttctactggtgagtggcgatagactgatgaatttgcatattaccttgaattcgagggttattttgggaaatatctaagttattgtgaagcaattttcatttgatttataatgtgtttgatcttcaagattgatgcatgcaaaatcagtgaaaattgcttctgtaattgtctatcttattatcttgtttccttggaacaggtgaaaatgcttttcagacaagcacttaattagtattagacactcattgattcaaaagcacttgaaatgttttctgatgaagaacttgtagatattttcaaaaaagattaacacataacaacaattaagtgaagatacttttgttttacaaaaaatgtttgttgttctagtttccaaatggttttaccaaataaaaaaaaaggggagtttcatttaaaatcctcctttattactaaaaattaaagtgcacctaaatttattgatatattttgaagaaaaaggaaatagaaatgtatatatttgtaatatctgtctttaacctccagtgtttcttgattctgtttttataaattttattcaaatattaagatttttttttttgtcactgtaatgtgatacaagagaaaaacattaggcaactttagggtatttgagattgatacttgtaactttgttaaatatgcaggagagagtgaaacattcttgcagaaagcaattcag

SEQ ID NO: 80677 - DNA, 947 bp, Citrus sinensis
  Intron number 1 from transcript orange1.1g028705m (locus o range1.1g028705m.g) derived from phytozome v7.0 (chr-ID sc affold00006; pos 1317527 to 1318473)
ccgttcgtacgccgcttgcccgagttcaagttctggtaggtttggttagtttttgtgtttttttaccccctctgtttttgtttttgatcatatcaagtaatggaatgataaaattcggcagttttacttgatcatcaagcgaagttatgcattgggattgattgatttgtgactctagataacatttaactaatggggccattttgtctgtgatcttaaagttaactttacaaactgggctataaagtttctcttcctaaggaatgaattatatctgaaatgcaaatcaaacaggccccaacgttgttatcctcaatttttttattcgtggttattatgttctcacaattgtttgctatctgatagggaaaataagttaacatttatttgttacgtaagagaaaaggtttacagctgaccaattcatgaggccagtaactgaagagactgtggcatctgttgtaaaattatctaaacttcaagaaatgtagaatcttgatgcgcttttcatatttcgtgtggtcctgattccctagtatatatgtcagtctgtttcacagtcaatgtatgcatgaactcttaatgattgattggaaatatgtgtttttatatggtctcttccttttctatatacaattttgtctgtctgttttttaacagcctgaccagaacaatacgtatgatgagaaatagtttggtgagttgaggtggctgagtagacagcatatggcctgatgaagaagcagaacaatttagtgtctctttccttctgtttgcatggtgcaaggcaattggaatcaatcgattcaattgtgtctctttgtcgtataatgtcattgaccaattgttttatgccaatgttattggttggtcaaacacattattgaagttgttttggttttctcatggaaggtactgtgtcacaaggtccttctgcattggttttg

SEQ ID NO: 80678 - DNA, 921 bp, Citrus sinensis
  Intron number 1 from transcript orange1.1g007184m (locus o range1.1g007116m.g) derived from phytozome v7.0 (chr-ID sc affold00013; pos 1931452 to 1932372 reverse strand)
attcagctgagggaatctgggttcggattgaaacggtgagttttgtaatttttgtgtttgttttgggtggcttcttgggggggggggggtggcgcgtgaaattggaatgaagtttgtgcttttatcgttttgcgcggtgagttgaatgcggatccgtacggtttatgatccgcattgtggagttgcaatgcggatttgaggtcaaatgaattattgtcgtctgaaatgcaacaatagtttccgtttttttattcatttttccaatattttcaggtttttagagcctgtaagattggtttttaatgctcactatatttaatgagcttcagttttttcgggtgagctttcttattattttattattttcctgctggctttgtttttgaagcagaaatgaagtttttgtttgaatttctgtgaatctgtgtcttgtgtgtgttttggttgaacaatgaagtgaagcccatgaaagtggtgaatttgatgaataatcaatatatgagagaaaatgaagtgtgtgtgtgtgtgttttttaatcttttaaatgggttagttgatttagatctattgatattcctggatttgtgaaaaaatatattaaatatatgcataatctgaaaagtgtatttgcttggtttattggggagttatgtgaagaagtaaaaaaatcctgaactttcacgggaaaatgcaattttgatttattaaaagctggtgaagttgtgcatgatacatgatatttcacaagaaagttgcttgcttcttttactgctttctagtttggctaatatatcagatgcagccaaaatgggctttcttgttcattcaagagtttggtgatttaaatttagaatctctgtgttgcatttgttgttttgcttttgaatgctcaagcttctgtttttgacagaaagcagggac

SEQ ID NO: 80679 - DNA, 704 bp, Citrus sinensis
  Intron number 1 from transcript orange1.1g007674m (locus o range1.1g002617m.g) derived from phytozome v7.0 (chr-ID sc affold00033; pos 922529 to 923232)
cctcttggagcttgtcagtgctgagcttgaccccagtaagtacagcacaataatatatatatatattttcagttcacataaagttcccacagttacaataattcagggttaaaagttttttagcaaaacgcttttgaaaaaccgttttcttgttaagtgaaattaagaaagtgggtttcaaattttgcacttgtaaaattccaaaaacacgtttggtaatgataagaaagaattcgctgcttgctttaattatctttgcattaaaagttataagtatcatattaaaagtattttttttaaagaaactttgaccgagcaaagagaagtcataaattaagagtttattataagaggtttttaattttgtgttaaaaattttaatccagtaaataatatctaaaaatcttacaaacttgtataatagctaatccgatttaccttattttttgccacatgtcatcgagatttgttaaaagatgattttgtattatgccaatcctccaatcaaagatttaccaaaagtaaaaacatgtataatatccatgctttttaagaaataagagattaatttacatattttacgcgccatgtttttgaaaaattacaaaatgttttcaaaaaatgaaaacagtttttgataatatttttttttctatattaatatttcagagacgggattggataaatccaccatccaagattat

SEQ ID NO: 80680 - DNA, 925 bp, Citrus sinensis
  Intron number 1 from transcript orange1.1g025834m (locus o range1.1g025847m.g) derived from phytozome v7.0 (chr-ID sc affold00443; pos 115547 to 116471)
tgagaagtacttccttgcttctaacatgttgtatttggcatttatcttattgttagagttggcaatttatctcaaaattcattgaataggacttgaaaattggtaaacactagcataattggataatgtatgcagtacctgccttattcatttcagcaccacaagtcaatccccagttaactctagatctttcatatcaacttataaccttatagtttattattattattattaaagcagaccatgaccagtaattaagtttgctctccacccatgtggccgcgatttgaaccccagatttcttgtatcacccaagagattttaccaactgaaccggctggtattcatccatgaccttaaaaaattctttcttctacagagcctgcctcttttaagttacatgctctgacataaaaatacttttagagtaaaattctaattaaagaaaagctttaattattttgctttcttagtggacagctgtccactccttgtaatgattcttcatctttaatacaattttcagtttcctaactaaaaaaaaaagagcaaaactctagttacagtattacggatttactatgaaagtagtaatgctacaaaacatgatattgctatgggtttttggtgcatctgcactgacctacccttattcacactatcagctattgcagctgagggcctattctggattggctctccagtttcaaccaatattagtggagatgagtatagccgctgagtgcagcgtgtctagtctaggtgactgatttgcccaatcaccactcttagggatttaaggattattaggttttcagattccttgatagtcagatagctgctctaccatagaagtcgcagtatgctgtatgcataatttctgctatcaaagattgacaatgatgtagtcacttgtaattaggct

SEQ ID NO: 80681 - DNA, 636 bp, Citrus sinensis
  Intron number 1 from transcript orange1.1g023943m (locus o range1.1g022918m.g) derived from phytozome v7.0 (chr-ID sc affold00295; pos 141187 to 141822 reverse strand)
actctgtcgaaggtaacctaaatttcagtttttccgttttcattcaaacagaattttaaggtttagcaaacgggttctgtgtctatttcaatttagtctgttcaatcatcatatcttgattttgttcctttgcagaacttgtttcctctcatgttcttttctttgagtttccaagattgtgatcttgttcattaagttttggtgcttgcaatgaaatagtcgtctgtcaattagctaattttgctcttttgtgttgtcttgcttgagtttatgtgaactatatatctaaaaaaagggataaaagcaaatttggttgttattgtcagcctgcaggttgaactaaaactcaagtttcttttttctttatcccgttttctcttgttgacatccatttctgactttcttttctctagatttatctaagatagaaactaaaataaatacagtgaaaagttttgaattggaaatgtttagtttcaacttaactagttggatattatggtgcttgtctttctctctctctctctcttttaaatatatatgaatttgactttgagttgtatctgataggttctcttaaatattggtatgaacgcaataaagtggatatttcagtgtccaattctgctgtttggg

SEQ ID NO: 80682 - DNA, 870 bp, Citrus sinensis
  Intron number 2 from transcript orange1.1g013079m (locus o range1.1g013079m.g) derived from phytozome v7.0 (chr-ID sc affold00009; pos 1999017 to 1999886)
caagtttatcagtggtggggccgatattattgcaggtatgtatgatggtacatcatcaatatcattcatgatcaatccaacatcactctattggattacgcttgtctagttgtgtgtactatctgtctagattcttaatataaattgctataattaatctgattcttatacacgtgtcgtgatctaaagggtgcgtgaatggtgtcttaggactttgattgcattggctaataatatatatacaagcattaatatgacatctataatacatttcggacatcgaacaggacaacaatttttttttttttttccgccttgttttgtttgtgatttttcctctcgtgaattatatttatggctgtcttattcacttttcagttttctgcgtgcatgccaacagctgttctgcccttattgggggatgtcaaattttaattagccaattcttttggttcttgacaacgatttttcggataagagatatgttcgtacttgtaggatctaaagatgtcgtgtgcggtttttgatcttgtgtttgttttcacttggtatgttaatctctgtgcgcgctttggtcgaatttcgcattcaaattgaaattgaacttgcccaaaaagtaagggcgtttcatttcctgttactgcttatttaataatttggtctcttcacgtgtcccgcatgaaatatgacttgttttattattagtatttaattctctgtttggatttcccacttatttcgttgggaatggaatattcccatctgtcttattgtgctcactttcacaacataagctgaagcaatgatgtaaaatttatgaaattccatgggtcaggtgctgtttgtgggccagcgaaccttgtgaactct

SEQ ID NO: 80683 - DNA, 675 bp, Citrus sinensis
  Intron number 1 from transcript orange1.1g002590m (locus o range1.1g002590m.g) derived from phytozome v7.0 (chr-ID sc affold00018; pos 366794 to 367468)
aagttacataatcatcatagtctcgtatcttcaaggtactcgcatccttcttatttactcttaatttgttttaaattctgcttgttctactgttttgactgagtaattttagcgcagctaggatttttgaaagtttgctgtagaactaattatttatcttctgtttttggtttgaatttttttctttctctaattcagccaattaacttgtttaattgacttattatgccatcatttagtttagcctttttgtttgcgaaccaaacggcggaactggtagatgatttcttgtcggttgatttttgtctagtttctcgtcatcaagcaggagtcagctaaatgtagtctattaaattggatgttgttgtaaattatttggaattttatcaaattatgtttgacttttgagtactcaaatggaatcaagaaagctgatgtttaatatgatatctcgtgacataatgtagtatcatgctctatctcgtttagaaataaaaatgaactagcaaaacttaataaaggaattaaatgagaaaggtcatatagtaccagcttgaaagccccaggaaatagtcattccatgaataggatgctttgtttcaataatttgatgtatttaattctagtatgttgataatgcttattttttatttatttttccaggtcatcaaatcc

SEQ ID NO: 80684 - DNA, 685 bp, Citrus sinensis
  Intron number 1 from transcript orange1.1g003797m (locus o range1.1g001917m.g) derived from phytozome v7.0 (chr-ID sc affold00121; pos 83090 to 83774 reverse strand)
ggtactgtttttcacttccgacttttctggagttgttttgatcagcttagttagaatgaagtaattcaaaaactttgttaaattgaataaagttgttagatttaactataagttaagtccgcgctttagcttcttcaggtcgcaatcaactggaaacttgagatttaaatctcatttattaattaatacgctacttcttatggtcagtaacaaaattttatattcaaaatttaggctttcttgttttttttgtttctggatctaggtggatttattgatgaataaattactttcatgtgataggatgatgcatatcaaaaactaggatgatgtttcggtactttttcttttttcaaaaaatggaaatttatactttctgtgctcaaataggatgctttggaaatggcattttgatcgtaaaaatcactttcgtctctttaagattaaacactcgaacaatgaagataagcactttttagctatttaaaagtgcttttactgatgccaaagcaacttgtatacactgatagttatctctgagaggcttgtcttatattaacatatgcccttgggtttttttttttcggttgctatctgagcctagacggttggattgacttaattctgttcgtttctctgtgtggattcagctgctgaacatccattcaaggagatcttgaccgct

SEQ ID NO: 80685 - DNA, 919 bp, Citrus sinensis
  Intron number 5 from transcript orange1.1g003678m (locus o range1.1g002676m.g) derived from phytozome v7.0 (chr-ID sc affold00043; pos 442659 to 443577)
aaaagctatctgcagaaggtcagaaaatcttgattgtcaggtccaattgttattttgtattcatcatttatgtttcctgtgattaggttagtcgtctgcgactaggggtgtttagaatccaatccgatccgttcaattcgtctgatccgcaaaattcctatctatagattggtgaattggattggattggattgaaaatttgaaaatccacagtcagtgcactggctataaatttacttctataaatctacaaaaattcacgaatccataaaaaaataaagaatatttatttaattaaaaaattaaacttgtaaatgcggcattactacttactaataataaaataagttaaaatatacttacgttaacaccatattatatcttatccaaaataataaaaaataaaaaataagtaaataagtaaatatagcttcctaaacagttaatttttatgtattgatctaaacgaatgagttttttttcttttcagtgtgttttattttgaaattttgaatgtattattctagctttgtttaaacaattaatttatttaacttttattcaattttgaatttgatcagtagtaaaattatttttatattatttcttttatttaattagttcgtggatttgatagaattaaaaaaatttaacctacacactaatttgcaaaatggtagattggatatgaattgagttaaatccgcattcgatccgcagacatgtggattggatttggatggaatttcaccaatctatcgattggattggattgaaaatctagaaggtgcaaaattatggatcagatatggattgacaccaaatccgctccgcgaacacccctatttgtgacttagatcttcaacatagtattttcttaggaacttcacattgattgtcatatatttggggttctcag

SEQ ID NO: 80686 - DNA, 346 bp, Citrus sinensis
  Intron number 1 from transcript orange1.1g029195m (locus o range1.1g029195m.g) derived from phytozome v7.0 (chr-ID sc affold00248; pos 5920 to 6265)
gctgaagatctctgttccttcaccaaggtaaaatgtttatatatcttctctctttctttctttctttttttccatttaattatatttttggttcccatgtgagtgtttgtgatctgggttttgaataaataatattttgtgtcctttgttttcgggtttccttttgtcaaacagaagcaagtccccattacccagatttccttttatttaggacgtgtgtatagttaacttttgtttatattaaaagtgattaatgaatgttttgcatttcttattgtgtgttgacatctggttaaatttttaaatttcaggatactttcaatttaaagtctcctaagaagtctcc

SEQ ID NO: 80687 - DNA, 488 bp, Citrus sinensis
  Intron number 1 from transcript orange1.1g007666m (locus o range1.1g007666m.g) derived from phytozome v7.0 (chr-ID sc affold00031; pos 839310 to 839797 reverse strand)
gccgtcgacgccaactctttcttagatcgaatcaggttcgttaatttgtgttattatcttcgtttccattttcaatttctctcttttttttatggttcagttattcttttaatccattttaaataaattttcaacaaccaatcatagcttcaattctaatcctagggtttcaatttttgaattcattgtgttggtagtctcattctgttagattcaatattttttttattcaattcatctattaattttctttttggttaaatttctaattttgaatcttgttgaattatttcaatttagaaaaattaagccaattgtacaattgattacaattcctctgcaaccaaacaaagcattgaggggtttttttttataaaaaaaaaaaaaactgttaattattggttgattttgtcaggtgatttgttattggcatagactaattgtgttcatttggtgcaggttttttggtttcgatcttggagagttac

SEQ ID NO: 80688 - DNA, 869 bp, Citrus sinensis
  Intron number 3 from transcript orange1.1g002053m (locus o range1.1g001365m.g) derived from phytozome v7.0 (chr-ID sc affold00099; pos 58644 to 59512 reverse strand)
cacacatagttcttgtccactaccgagaagtaaaggttagctcttgttcgaccttctcttcattaattacaacaaacatggagttttttggataaagctcaagaacaatagatcattttccagcttgccatagtatttccgtataaattacattacgatgacgagaaacatcatattgtctttctcagcttctttcattgttcatgtgttggcaagtttaggtgttttatagttgttgtctctgtcatcctttcgtcacttaaaaggtagatttaatgctggtagctaagtgttttacttctttgccataagctctcctacagatctttaacagcattggcttcagcaaatatactggtaattcagaaatcacgtttcatattattctgtattgttttctttttctgctagccactgtcccttttgtttaagatctagaccttccttttgtttaagatctagaccttccagtaatgctcagttattgggtagtagtaggcagctattttagccgtggttatccttgctcttggaattgatctgcatttgatccatcaatatgatgacttcacttctttctgaatatgaaaggaacatcaattgtttaataccgatgcgttttttagggtattgtcaataagctgtattacaaaaccatgcccttatgaccttgcagattgtcatttatagaacttcttttttgatatcattattgctgcaattttattccacttaagagtcttctttcttttttttttttggggtttgggggggggggggggggggttcttattttacgtcttcgtttcctgatcatgtaaaaacatatttcagggaaatcggacaaactttaatcgtgctaaagtggc

SEQ ID NO: 80689 - DNA, 580 bp, Citrus sinensis
  Intron number 2 from transcript orange1.1g007647m (locus o range1.1g006639m.g) derived from phytozome v7.0 (chr-ID sc affold00121; pos 418958 to 419537)
aaggtaaagatatgttaaagttacatgtatctgttctacacacaaaataaaaatcatatttacacaacgttttagagcagcgacagaaacgacaataaaactatatggtattaacgtattttttattattttattaacagtaattccacatgatttgatcgtgtttctttttattagtttttaaatttaagttaactgcatatagttttaaccattgattaattaagtggttaaatcgattctatttgtatgatcttatgtagaaagagtatgataaacttagccaaaacatagaacatgcagccaaaagatcttctttatttgatctaacaggaggaatgactgttttctccaatacagaacgcatgaatcatccaacaatagtgaaggtaaccgattgatttgtttatacatttaattgaaaattagtgaggaatgttttcttaaaacatatttttttaaaagtaaacgtacctttttttcagggcgggtaaaagtagtttacttttttctttgagaataatcattaatcattcaatttaattgtaggttatatcggagaacaaaggaggtctctcag

SEQ ID NO: 80690 - DNA, 717 bp, Citrus sinensis
  Intron number 1 from transcript orange1.1g009100m (locus o range1.1g005916m.g) derived from phytozome v7.0 (chr-ID sc affold00078; pos 553202 to 553918 reverse strand)
gtttaattagcagtgaagccaaaccaagcaaccaggtatgaacagaagaaaccgaattctacatattaattttatttaattactaacaattactttttaaaatttttttatcgatatatgcaatgcattatcctttgtggccatatgtatgttcttttattatttttatttgattgttatattgaattcttttagaagtaaatttaggtgcagttgctgttttaatgaattgggttctttttagtttcttaattaatttgcctgtataattagttttggttttcttgggataaagtatcaacaccttctctggctctgtgctgttgttcctttggagttgctgaacttgggaattagggccttggtattatgatttggacttttcgggtgtttggatttcttttttttggaataatggatttgtgtttgattggggtttattgggtgtttggatttgaatctttttttgtataatgggtttgtaatctctttctcttgaatgccttactgtctgtttttatatgatagttctcaaatgatctttcattaaaagatttttatttagtgtcctatacttaatggaaccttgaagtagcaacgatggtttcagttttaatttggtttttgaagtcttgcagtaaataggttagatatttcaatttcgattcagctttaaaaatttggataagttgttgtagagcgtggagctttgttaat

SEQ ID NO: 80691 - DNA, 615 bp, Citrus sinensis
  Intron number 1 from transcript orange1.1g012428m (locus o range1.1g011173m.g) derived from phytozome v7.0 (chr-ID sc affold00006; pos 219160 to 219774)
ggtttaatttcatctattttttcgtgctatttgaggtaattttcatcatcttctatcaattttttggaaatttttgttagttttcgtatttttgtcgttaattcttcggtttttgcctcaacatggaacgtttttgtttttgtgattgtatcgatatgtgctctgtgaaaatctagatattatagtttgtgtttcgtaaatatctcatcggtttagtaataattttttttggatttttgtcggatttagggtttggttttttttttggataaatttgtagttttatgcggaatttttgttaaaaaatgaaggagatttattctgtttgactgctttagtaaccagatatccgaaattaagcttaagtcgatgagaattcatttgaattttgattattaatctaaattcagaccaaaattctatttatctggtaccagatacttagaaacttcaatgcttgcttccctggttttttgcaacttcattctgatgttgtactgactataaatatgattattgtttttctttttagccgaaattaattaattaatggaatttttttgtgttttggactctgcaggcattgattatctgtatctagggcgtgaacaataa

SEQ ID NO: 80692 - DNA, 671 bp, Citrus sinensis
  Intron number 3 from transcript orange1.1g023079m (locus o range1.1g023079m.g) derived from phytozome v7.0 (chr-ID sc affold00091; pos 211152 to 211822 reverse strand)
atacattaagcttcttgaataggtactcttactttatagtctcttattccttctctccttcatttattgcttgtagcgtgattaagttctcttgcaatgttatatgggagagaattggctgcagatatcttctggtttggactttgaataagcaacaattctttgaagtgctcaacggattgtttgcccattttttcatcagcctcatgtatggatcttatgtgtagtgaggtccatgtggaacaagcacttttgttttgcctctttagtaaatgcttgaaatacacttgtgattacctatttggagggtctcatgtagttcatatgcaattgtgctgatgtgttgaaattggagaaggcgtggtgattaataagtggctaagtttataactttttgagtatgcaagaggcatttcgtttatctgtctgctgatttatatgtttcttatcaaattggagacaataaacaaatttaaccatctacaaaagatgtaatccttatactttaccatgtaatagaattggattcaactgttacagaggatctcagaatgctgttcttttttgtggcgtgttcatataattcaatgatggtttgcttgcttataatctaactcgttaaagtctttattccaggtttgactactctgtaaacgcaaatcgtgctgaaa

SEQ ID NO: 80693 - DNA, 358 bp, Citrus sinensis
  Intron number 4 from transcript orange1.1g005514m (locus o range1.1g005514m.g) derived from phytozome v7.0 (chr-ID sc affold00018; pos 734583 to 734940)
aggtatgtgtatatttttaagtacccatttacacaaaaagtattacttgtaacttgcgtagatatgttttgttggggttttgattttggtctttttatgacaaattttgatttcttggaaaagttaagtttgtgtctttgtcaagtcagtttgatgagatcataactaagaacaaggaattgaattgaagtgttactttcatcaaagtcatctcctaaaatctttaatataatgtattcttcaattacttgtgcaaatttttaagtgttaatttgtggaaatgaattttcaaattttgttgtttttgttttgtttttgcgaaggtggagcaaaggtaccggcagtaccatcaccagat

SEQ ID NO: 80694 - DNA, 403 bp, Citrus sinensis
  Intron number 2 from transcript orange1.1g001013m (locus o range1.1g001013m.g) derived from phytozome v7.0 (chr-ID sc affold00424; pos 93851 to 94253 reverse strand)
ccagtttatccttggtaagtaaatcaggtgttaaaaatttcaacataaacttaacggatggaagagcagttatgaccaacttttaagactgagtaaatattagaatgcattggtaaggcttttggacacaaaggaggaatctttttactaatattatgaatttatattgcctttcctgtttcccatagaagaaaattttcaagttattttgtgctctggacctttgatttctataatgctcttggcttacagatgtctgaatagtacttttattaatagttttggtgtatgcacatgcccttgaagatgaatgatcctgcctttctcaatttaatacatttgtttatttattttatttattttatttattttttccctgcttcagagaattcacaggtagcaa

SEQ ID NO: 80695 - DNA, 880 bp, Citrus sinensis
  Intron number 1 from transcript orange1.1g029764m (locus o range1.1g026457m.g) derived from phytozome v7.0 (chr-ID sc affold00069; pos 443736 to 444615)
tcgccggattgctgtcctcacgtcactggatctgggtactttcttttctctctgtcttatctttgtgagtttcttttctttctgtgcatgcattatgagatttgccttgctcttcgatatgaatgaagcccttgatatttcttataacaattttttagattttttatttaatccaagtttttttttttttaaatacatatagatcattttggtaacatattagaaagccttgcacagttagattggcctatagctaaaacaatattgcctgcttttgtaaatacttcttgatttatttttgcaatggaaatttggatcgattcatatttttcctggatttttaacgtttgtatttaatattacgtaaatatttgaacctgaattttctagatgtaactgtaatcttgactcagagatgctgcctagcttttaataagaaatgagacttgccttcttcaccttggcgacaaattaattgaataacagttatgaaacagagccaacctatacaataaattcaaatgacataaaaagaaataaattaaatattataaaacaggattcatcttccaaatttacatatacacaatggtcttgtttctttccagtataatataatagttttgattctttgccatagattcttgtcatatattcatcacataatggccttgatctgcgttttcatgtgcatcacataatggtattatcttttctgtatgtgcgtcacctgctaccatatgatatgtgcatgtcagaatgacatcttcatatgatcttatcacttcctctcacttagaatttgtgcacttctgaagagagctttctttttttattttattttatttattttcctttgaggggtcagtcaaaatatctt

SEQ ID NO: 80696 - DNA, 917 bp, Citrus sinensis
  Intron number 1 from transcript orange1.1g004252m (locus o range1.1g004252m.g) derived from phytozome v7.0 (chr-ID sc affold00068; pos 78755 to 79671)
ttctacatctccaaatcattactatctgatctcaggtattcttttatcgtgcgatttcttcatcctttttcttgctgattgttttctggttttaagcttaaggtgtccgctttctgccttttttacctttctttcttccttggtctgaaaaaaccctagcagctgggactcttgttttttgtttttttcttttcttttttaacgctatctgatgttgattatatttgttttttctgcaaatggctgtttctatttatgtgatttaagcctcatggaattttgcaatttggcaattgtgattttagtcactgctttccgtttccaactttgcgagttatagattaaaaaaaaatgaaaattttgtctggtcatccgttcagtggtttcccaatctcaggtccattcgtgtgcttattttgtgatggattcttaatcctttcacatttatatcaaagcttttgcttgtgatttcaacttcagctcctgtatctaatttacccctcagttgatttttagttatggcataaaatcaagttttattttggaagagttgcgatccccatatactattttgttgatatcaaagctaggaatttggccattacaaattcaaacatctatttttgaagggcttgggtcaaggtcaaatggcttacctatttcttggatgctggaagaagaagatcattatcttcttcaaacatgcataatctagctttttacatgttgagaagcaaaaatgtattctttttggagtatcacatactgcatcattcttgattttaaaattttacatcagtttctcgttgccatgattttgtagcattttcttatcaatgcatatatagctattcaagcacaagaaggtgactcttttagtagtattttctttctgtgctttttttttttttaattag

SEQ ID NO: 80697 - DNA, 498 bp, Citrus sinensis
  Intron number 1 from transcript orange1.1g002567m (locus o range1.1g001366m.g) derived from phytozome v7.0 (chr-ID sc affold00009; pos 1336126 to 1336623 reverse strand)
agctctcagtattttgggattgaactcaaagtttggtacgttgcgcttctataattgtttatgcatttaattttctttaattcactttctgtttggttcttgggaaaatcaagaagaatataaaacaaatgaaatgtttagtattactgttatttatctatttatttatttgtttgagtgagtagcttatgtccctgcacattaaattttcctttttttcgtatttttttctcgcattttcttggcttcaaactgagtattagtaggtgcgttaacaaaattcaagttcacagtttatgttgtaataaactgtggttgggttttggaatcatgtaattttgattatatgcggcattagtgtatgtcttgttaacaatgattagaggctaagatttattgttgaattacattttattatatttgttggtatcccttttaatcatttggattgtggtttctgactgaaataagtctggttttacagtacgtgtataactt

SEQ ID NO: 80698 - DNA, 769 bp, Citrus sinensis
  Intron number 1 from transcript orange1.1g045536m (locus o range1.1g045536m.g) derived from phytozome v7.0 (chr-ID sc affold00270; pos 177962 to 178730 reverse strand)
tagctgagcactttgacatcgttgctcgctgtcaggtacaccctctatcttctattaaattcaaatattaatccagtttcactaattattttactaattaatgtattaaatattaagtctaagaagtacttttcaatggtacatgaagatgatgcacggtttagtgctctggtggaatttgatattacttgacaatggatgtctaaaaagcactaccaaacactaaattaatctttgttcacttattgaatgtttatattgtttcaaaacattgcatggttcctacttttgtatcactagaatcaaatagaatttcaccatttggatagcttagtttgtattgcaactgatgtatcaccaacagaatttcacaatttggattagaaataataagggttaataaataactatcacttgagccaatcaaatagtggcacatcacttgctacatcagttgggatacaaagtaagcatagcattattgatttattgaatttttctgcttctgttttgcatatagtggcccaagcatcattgaattgtttgatctgattactacttttaagtccacttattaattttcagcagccattggggagcaatttgctgaactttgtttaatttattatgattattattctctttagatgttaatttaggttgtaatcagttatttatcaagaataaaaagaaaaagcttgtaatcagttagttattctgattattgacaattgtaagtttaactattgctgataacagggtggagcta

SEQ ID NO: 80699 - DNA, 431 bp, Citrus sinensis
  Intron number 2 from transcript orange1.1g005777m (locus o range1.1g005777m.g) derived from phytozome v7.0 (chr-ID sc affold00077; pos 462706 to 463136)
aagttgattttgaatcttaccttcgggtgagtctttattcattctaatgaggaattaactaacattttgcgtcttcttttggattatatggtgtttggattctagtttctcggtgctaaaatttaatgaatgaggatgctggttgattcaactcgtaaaacatcaccaagttggggagcagtttggtttacatttatgtaataacttagatttttctctcttttttgtttgatgagttatagctttgcaagattggaaaatcaagatgtttctagtgagatacattttggttagagaatctttttgaattttatatgagtgtcacaatgttacacgggttctggttttaatgaaatgaaaggatgtaagctatatgtgggatttgctcattggcaggcatatttgaatttgcaagcccgagcagcagcaaa

SEQ ID NO: 80700 - DNA, 976 bp, Citrus sinensis
  Intron number 1 from transcript orange1.1g025875m (locus o range1.1g025832m.g) derived from phytozome v7.0 (chr-ID sc affold00184; pos 257205 to 258180 reverse strand)
cgtctcatctttcacaaggcaagttttggtgtttttgcttctcatttctctactgcagatttgctttttttgatatttttgttttctgggtctatttgattctcatttatttgcaatgggtttgttttgttacttcaatgagtgtatgattgcttcttttctttgatgggcttgacatttttttctaaaatttttggtttcttggtgttttttttttccacggttatttacttttccatgttacttctcattgctttaggtaagttctatagttgataattttgcttaatttgattcactcattaaatgattcattgcactgcgtatgtttcccatttttttctgttgaattttactgtttatttgggcctaattagcaactgttcatgtccactcgcaaaattttgacttgcgctcttgcttctaataaatgcaaatcctaacctctgcatatacgaaaatgaaattttgctaatagatctaacgaaagatagtgccgcagttcatgtttgactcttgggtcaaactacatatgggattaagagtcaacaatgtaattttgtgttttttttttggggggggatcctaaaataatgaaatgattaccaaatttcttctgtatcagaaattagatttcatggtcaatatatttgtctgaataaaactgcctagttttattgaaaatttagatgcagcctcgcaatgtaataagtcaatgtccaatgtactaaatgccatgtatcattgaaatataatgacagatatccataatttggcaagttcatatttttttcattgagatgtcttagactgttaagagataagactcccgattactattagttggatgcatccatactcctaaatcctaaagccaaatgataggaaaatgatgtgagattgatatgttctctaatatatcactgcttggccacatgtaggaagtggtgaattgttgatagaaatagctccatca

SEQ ID NO: 80701 - DNA, 1054 bp, Citrus sinensis
  Intron number 1 from transcript orange1.1g011224m (locus o range1.1g008467m.g) derived from phytozome v7.0 (chr-ID sc affold00006; pos 1169769 to 1170822 reverse strand)
gaattacctagtcttccgctacttgcaggaatcaggtaatatctattctgaaaatttattgcaagttatgattttgattttttttttttaagcaagacggattttctttatctagggtttgtattatacatctaagactacaacttaatttggctgttttagatggtttctcttattcaattactgttgaattaggttagggttggattgggagaaaaaggtataatcttggagctgatttttgtattttggactgttatggaataacgtgcacgagtgtttagatccattcatgattttttttaagggtcattaatatgttgccgtgataatttttcattttcgtttgtttgtttcaggcaatgttcccctagggtttgctattacgggatgcatttagttgcttgattgtggggttgtatttgttgttgattggtttaagctgaagttttcgttagcagcagatatggcgtgaccatcaattcctttgttttttgctgtgtaaatatgtgcgtgacggtgaatctcgcttagtatgaagtgaagattagtcactgaatttcattagagtagtgaggccagcttggctttcgtatttattatgcaaactttagcttatattttacaatggtaaaaactttagcttatatttcagcctgttcattggtttcagatggccaatatatagagaagattaacaaattattgtatcgtctactgtttgcaaattttagagagaagcctgaattgctagttcaattaacagtgaagatgtaaattactctgcgcttgcatgatgataatgtgatgtgcactgaagtaatatacttaattgctaaaaatatagtcttgactaatttccatgattcaataatgatcaattactaatgtttaaatgcaaagtggatttatatgattcaataatgattagttgttagtagagctgtaaaattatggcttctccatgattttagaaaattatatttaagtattttctcacttgtagcaaatctcactcctgcagggttactacactcggcttttgttttaggat

SEQ ID NO: 80702 - DNA, 698 bp, Citrus sinensis
  Intron number 1 from transcript orange1.1g033610m (locus o range1.1g032196m.g) derived from phytozome v7.0 (chr-ID sc affold00186; pos 234378 to 235075)
ggaagaagcaaaagggcaaatcgagcaacaaattggtatgcattatgcttcttcctctcggcttttttctttctgttttttttttctttttgaagttttgaagttgtaataagctattttagggatgccgttaaattcatacgatcactagacccaactatcaactaggttggttcaatgaagagatttttctttttccttcaatttaagttaggtttgtcttataattgcagaacggaaggatatggaggagcagtcagttaagggaagatttataatgacattaatcgattctgtgccctagttagtttcatctgctttgtaatgaactatgtcacattagtttgtagactcaatctttagaacaataaggtgctgtacatttgaacaagtgatgatgaagtcacctattcttttgatacctactttgactaatggctttaaatgcatttatttggaaaatctttttatggaagttccttagaaaaagccgtaaaagcaaataacattcacatatttagtgaaatgaagtccttgtctgccaaattgtctggccaaaactatgttgtttgttttcttttgctacccatgtgcccgcattggtgagaatgaatgttcttgtcgaaccagattgatgtaacacttgcatttccattgctgagttgcatgcagatctatttataagttaggtcacttgg

SEQ ID NO: 80703 - DNA, 495 bp, Citrus sinensis
  Intron number 2 from transcript orange1.1g006562m (locus o range1.1g001578m.g) derived from phytozome v7.0 (chr-ID sc affold00006; pos 1049346 to 1049840)
tgatcctacgctgcttcaagcttatattctcaaaggtctccatttatctcatgtgtcgttggactcatagttcttgataatggaatattaatttgaccgctaaatatatagttaaattttgatatgggtggtttgacttatgctggaagccatttttgaacctgttgcaccagattttcttttagttgtgcttcatttactggatgaacagaaagtaggagttatttgacgcctcttcttaccttagaagatttattattaagcctatatatgtgaagcatgcatttagtagaggctgtatcaagagaatgtgtcaattttatgatgttgtgtgttctttcattgtacaactgattctataattgttgttttatcattttccaactaaagtgtaaagtaagacaatctcaagttgctttgccctattttgtaatttagtttattggtttttgtcgcctaggctgtgcattttctgctttaggaaggaaagaggaa

SEQ ID NO: 80704 - DNA, 797 bp, Citrus sinensis
  Intron number 4 from transcript orange1.1g032238m (locus o range1.1g032238m.g) derived from phytozome v7.0 (chr-ID sc affold00099; pos 423001 to 423797 reverse strand)
cttatactgaggtatgacttctgacttttattctgccccatttttttggttgtgttgcgtaatagtcatttgagtgcctggaaacctttattcacagcatcattcagttgccttaaaatgccatctaggagggtagggcaatagcttgggcttttggcctgatttgctctccatgagtgtgatcactcagaccctttcattgttgctgtaatgatagtccagactgcaggtcccatagtgactagtagatgctcataataacatgtactgtttcctttttcaccaagtaggctgtcatgcattggatgagtcttcatactttgaagacaaacaaggtctttgttttatgcttctgttattttatctctgacaaagatagatgttcatttctatggttaaaacaaaatgagtcctcataatctcttatacccaaattctcaagagatgatatgtctaataccttgccaagttgacaatgccaataaagaatttgggcatgaccaaatttctatctccgtaatagaagagaagttttgcaaccactctggccaagtttctttctcatcaccagatataattttcagatacttcaatttgagagaatggtgttgttgaagtactggttctaatcatcgttaacattattgtctgttgcaacgtcttcgaggtcatatcattattcttcttggccaatttttcttctttcccgtgcattgataataaaatttaaagggcgttttggtttttttgcttcatttcctatttgcagactctagctctttacaggcaagaattgg

SEQ ID NO: 80705 - DNA, 868 bp, Citrus sinensis
  Intron number 1 from transcript orange1.1g029237m (locus o range1.1g029237m.g) derived from phytozome v7.0 (chr-ID sc affold00028; pos 1110511 to 1111378 reverse strand)
accaattttgttgctgccaccacaactcattccctgtaagtttttctttttttaaaaaaaaaaattcagttaagttgtttataaaatagagtaatgaaatttggattgttgctttagagtatttcacttccgtatttgaatttgtatgtagaaatgagatgaagacattcaaataagctttctcattgacatgttttggtcaattgcttcgaaaatggtttactttataacctccctgctagtgcttagtgttagtgctagctttttgttgtgtgactggaaaaaagtaatgatgaacacataatattacatcattctccccgatattaacccatataaccatcttttaatttatcaagtctgaaaaagaaattattattattgtattcatgtttgtgaaactctgttgttaaattagttgatggatttagaatttctggtttctgttctttctttatgctgttgtcgaaagtcgagcctttggtacgccatttcttgatttgaattggatggatggtttagagtttcaggttttagttccatgtgaatttgactcccttggatgatgacatacctaattttctgtattattattttacattttattcctctatgctatcgtggaaacatgacattggttgattgccagactatgtgtttttggttaatttacgtacaagtcaaggcaggacctgtctttcttgactttatgttttcctttacgtgacagtatgacattgcagttcatatgccattgtataagagtctcgagtgtgagaccgatatgagttttaatggttcctgaaattccccaagaatagtcttggtatacaagttacacaaatattcacagctcagagaaatccca

SEQ ID NO: 80706 - DNA, 1023 bp, Citrus sinensis
  Intron number 2 from transcript orange1.1g000647m (locus o range1.1g000647m.g) derived from phytozome v7.0 (chr-ID sc affold00099; pos 158391 to 159413 reverse strand)
gccggggtattctatcttcgagaaggtattaactgttttattgtatgtgctttttctggataatttgttaaatatgttatttacatgtctgcatcgtgtgggactcatttctattgggtgtatggtttttggcgcttgcgtgtgtgctgtcttgatgtagtagtattgacaatttttttgatgactgctaagctcagtgccatggcaatctaacagctaggtgtaggagtgtaaaattttctaaattcctttctggctcagcttgagattgccttttgaagtttgaatcttgcttgatggaagatttagaccattagtttttgactgagctgagatccatcatgttagtagttggctcttctaaactcatttgcaccccctatgaatgatgctcaaaagaaaaccattaatactagatctaactttccattttccattcttaatgagccttcttatatttcttcatcaaattttaaattaaagggacaaaggactgtaactttttctttcttccgggactggaatactttatgtcacatgaacaatttagtctgcctcgcattagttttatatcttgttaaggtgctatttgaaaaaaaaaaaaaaaactttttaaggtagataactttttctcccttgatatattctacttatatttaactgataattcaagtcacagtattgaaaattttcccccattaggatttatttcttctaagttttagctgtcacattaataagtttgtaattgtgtgtgattattttacttttccatgtgcttaatttagttataattttgttacttctaattttttttaaatttataaattttctctctgtaacattttggagtgctaattccttctatgtctaatgtattcctgtggcagaaattttcttaatttcaatcactctacttctttgtaaacaatttatttcatgatgactcctttcactagtgaacatgttttattttatggttctacaggaaaactatactgcttgccagtggtatcttagttg

SEQ ID NO: 80707 - DNA, 927 bp, Citrus sinensis
  Intron number 1 from transcript orange1.1g000647m (locus o range1.1g000647m.g) derived from phytozome v7.0 (chr-ID sc affold00099; pos 159494 to 160420 reverse strand)
tgcgtcgccgtttcgactactttggtcggttcacggtacggataagaacaaactcgccagtatctttttttttttttttaaaaaaaaaacgaattagtagtgttaatgattatcttcttgtgagctgccgagagttgttagtgtcgttgttattgttgttgtgttggttgaataagaagcttattgaagataagtaagttgagtgcttaattttagtttgaattagatggatggaacattgaaaacgataaatcaggtgaatactcctgctgcgtttggtgctacagaactttgaattcgaattttacgtaatttttgctgaattagaatttaacgagttttttaataatttggaatttgttttggattttgattattcttttttttattatttaatatacgctaactcggaattatacattcttcttcttcttcttctttttcttacgtcattactatcttcgactgagttgtatgtatattttattatcgcctggtcaactcggttacttgatcttgcaggcgtgtcatccatgattgtggaggatagttattttgataacgtctaaaagttttgaggcatatctgcctgcacaaatctcttctatactctatagtttaaatcttcagtttcatagaattatgtactctcgccggcttctacattttatggatcatggttaacacttaacattttggtagccttaggtgcttggtacattttgatcttgaactgtaaggaactgttaacttatttgatcaatgcaactatgttttttattcctctatacattgttttgtttaccatgctttttgtgatgctattttcacggttgtgctttagcattgtattgtagttgtcatcttagaaccacttctctatactttccagattgtgttgcatctgaaatcgagaggaaactgtac

SEQ ID NO: 80708 - DNA, 691 bp, Citrus sinensis
  Intron number 2 from transcript orange1.1g010100m (locus o range1.1g009390m.g) derived from phytozome v7.0 (chr-ID sc affold00040; pos 625159 to 625849 reverse strand)
tggaggatactggtataaactttttggctggtgtaatcttttgtagttataaacattatgtgctgctaactcaatttgatgtagagttacaaatgagttatatttctatcaaattatttaatctaaagtttgtttcctcgtttgagtgttttaagaattttgtatgaatccaagtattcattggcttgcgtctatagtgaacaagcctgattgactcaagcttggtaggttaactaagtaaacaagataagctgggccttttttgagtgatgtttcaacttttctttaacaaaatttttcattttgcaaatctggctgtcactgttatcaataacagctcacatcttgattaaccccctcgtcagttgtctcatgttcaccatggcaatttatatttgggcatactgattgccacctctagtgcagcatcagactgtctctgatgcccagaccacctttactactttcacctcaattgctttcacagcttgtgtcaccccttgtttgacaaggtgttttataattaagcgtcttataggatggttcttttggtatcttgcacgtaatagacacatttcagcaaaaactggaaattgaagaccattctcttggcatcttcataaatactaaaatctaaattgtgttttactgatataatcatgttttatactatcctctagactgtgctgga

SEQ ID NO: 80709 - DNA, 537 bp, Citrus sinensis
  Intron number 1 from transcript orange1.1g035069m (locus o range1.1g035073m.g) derived from phytozome v7.0 (chr-ID sc affold00403; pos 155638 to 156174)
gcattttaccatcaaacatgtaagtatggatggtcattaaggcgctttgtatatcttctattgttcccttgtgtgtactacttctccaaaaacagccatgttcccccctcgttcaacatttatgttattcacttttcgaatgtaatggatgtacttgttctagttacaaaacttaaattttcactattgtttttccccttcactctttatttgcttgcatgtctaggtctctgctggcaaccatccctcaccccactagagttcctttaacatatggtggaatttgttctttctaattgcttgttagattatgccattgatgtttcttcataatttctcagttcattgtccagaatctagagtattgtacgtgaatttgattttcaaataagccttctcttgattttgatgtagtttcatcattaagctcatttgtgtcacaagattatttagttctactgactatttgccttttctgtgcaaatttggcttcgatgttaagtgcatagctccgtcttgttttgaaatttcagaacc

SEQ ID NO: 80710 - DNA, 995 bp, Citrus sinensis
  Intron number 1 from transcript orange1.1g027783m (locus o range1.1g027783m.g) derived from phytozome v7.0 (chr-ID sc affold00256; pos 119512 to 120506)
ccactgctaaaagccgccttcaattatctgtgactgtgaccttccccgccctattttttctttctttctttctttcttcttgctatatattcttgattttctgtttcttttgcatgtttcttggcaatgggtatgtgtggtttgtgttattttgatatgaattcctcactttgtgaaatgggtatctgtgaatttccgattttgggtgtattgtttgcttatgtctaagggtaaatcttgcaaagtgaggtctcttaggatgattctttacagtttgtactgatttcaggagtgctattcacgtggaatctttaataaatgggttcttgccaactactgtttgtgcttttcttcattgtttttccaatgcttttttctttttcagtcaatcttctgttagtaacttcaagaatctgaatgaaattctctcttttgcttgtcatttctgtaatagatatgagacaatatcttggatttgtgtaggagcgaacgtgtattttaaattgcatttagatgtatgattccacagcagtattgtggtattcgagagccatcaccagacactatggtataaggaatgctatattgttattatgaagtaatgcctcaattgcatatttgaaatgcgaatcctggatgaatgacttaagaaattcaagtgaaaataacaaaacgctgcacatatgttgcatatccttaactcttaagcctatgcaccaatagcaagttggtctggattatgtgactctggatctataatttcttttaatcatattgagcctttgctgcagggtaaaggagaagagttttttttttctaaagaaatatgatcttattatttacttttccattccatcttcattatcactgctgtcaggctgatgccgtttgtgatgacatttttactttatctattctaagctgaagctagctatttgagtatcagcatgttcctttgcacgattaagcccataatatgtgtttaacgggccagg

SEQ ID NO: 80711 - DNA, 348 bp, Citrus sinensis
  Intron number 1 from transcript orange1.1g002949m (locus o range1.1g002958m.g) derived from phytozome v7.0 (chr-ID sc affold00149; pos 145852 to 146199)
aatctttcatctctggcttgtgttcagccttcaaagtaagttcttgtccttctttattcttcttcttattcactgctaatactatgatattttaccttctgttttctttttcgtttttctcctgtttaaatgctgcatgctgtttttgttcttgcatgctcagctgatttgctgactgtaaatcattttcttgctaaagattctactttttgattactaaatttgatttgctttgcttcgctatttttgatcaagcatgctttgtactgctaggccaccttacaagttgcagttttcgattttatttaatcagattttgcttctgggtacttccaaataatctgctaa

SEQ ID NO: 80712 - DNA, 572 bp, Citrus sinensis
  Intron number 2 from transcript orange1.1g018650m (locus o range1.1g018191m.g) derived from phytozome v7.0 (chr-ID sc affold00408; pos 90187 to 90758)
gcaataagtaagtgtttctctctctctctgtcttttgtgtttgtgtttgtagttttttttttttttaaaggaagtactgattaaatctttgtagtataagaagtatattacctttattttagaacttgctgcttttatgtaatgccaccattatctgctagataaattctctgtctatcctataggccggcaattgtgtgaatttgattttgaatgtcatgtttcatgtcatcttcgaatttaggtccatagattattgaaaatttagtaggccatttttctctcgtcatgatcattgtctgatgaatctatagcttcaacaatattaacagggagttacaaaattcagccctgtgttcagttgctcattggatcatttctctttcattgaaaagttagcatctgcagatcttcatgtttttgttctattacattttttattacttactagagtatgctaattttgatttactatgtgcatttggtctatcactgatctttggcagaatcattcttgttgtatgatttttgatatagtgattgttggagaggttgcaaattttgtggcatat

SEQ ID NO: 80713 - DNA, 1008 bp, Citrus sinensis
  Intron number 1 from transcript orange1.1g018812m (locus o range1.1g016624m.g) derived from phytozome v7.0 (chr-ID sc affold00018; pos 960911 to 961918 reverse strand)
gaggtaaattaaaaatttaatctttcaattctaacaatcaaatagcttattttttaattgaattttgaaatacagttatgatttctttttttttccttgtatttgattattgagatcgaattcttatctgggcctaatttatatccatcaaatgtttcagcttgaatttatttttgcttaattgttatttggcttgttctgtcttaatttatatggcttgttctgtgaaagtctacagctgaatttgataatttttttctctcttttccccttgttttgggctgtgattgagatggaaaaaaatgtgaccactttttgtttcgacaattttatgatttgatagatgaaatgagcatgttataatgcactctgggtaatttcaatgcatttagcataaatttagatgtaaaacaaatctctattgagcaacaaatagctatgaaagtaaagagaaagaaccgtgtgtggtctgatgtgggaatcagaattacaactaaactcttatgtactacccagataattaaattcagtcgatggtgttttatgtattgctgaatttcattgagcatttgctgatacctgaatcatggcaactccaggaattgtttttcccattagattaaatttgtttttaggggaagcttttagttttattttttgttgaaaccattacatttgtttgtttatggtcaatgagctctgtggagtcattaagaaataattgccgccaatctaactgaggaatcatgtgactaattgagctacctggtgttacaagtttctgtccctgggttcaagttaatgcaatggaagttaacttatcaatttagaaactaaagtagttatctcttgagtcttgagatttgattgtcctttcttattgattgggattgtctgtattgaaagattatatatttgttttactgtgatcattgattttcttgaaagaatgttcaattcccatgcagtgtcttagttgagttatttccgattttgcaggttttaggg

SEQ ID NO: 80714 - DNA, 661 bp, Citrus sinensis
  Intron number 1 from transcript orange1.1g012869m (locus o range1.1g010382m.g) derived from phytozome v7.0 (chr-ID sc affold00006; pos 1114635 to 1115295 reverse strand)
ctttggtctggtgttgttattactgctctcgattggtaagtcttttgtttgttttgttttgttttaaactttttaaagcttggtttttaacattttagtttgaaagataaacccaccccacaaaaaaaaagcaaaaaaaaaaaaggactggctctcttgaggctgtcgatatgttagtttcaataatttatgtgcatgttagttcagttgattagaatttattttacatatgctcattgtactaaggattaaagtcactatctctgtatgatggactttaattaaatacagcaaggctgattgctcggttccctgaaatggcgtaagctcagtattctataataaaaatataaaatgtattatgaatttgtttgttagcctttgtactggcggaaaagaacgaactttggcgttaacttaattttttggtattcaaaatatcaatcatttttctttttctttctttctcttttttaaaaagaggattcaaaatgttaaattcagttttccatgattcttttttattttttcagtgactgagcagagcatgtttccttttttttgtttcaacaagattttcgttcatttttttactagtattgacttgattctctctttcattgttctttatacagttttatctttctatttcttgagaact

SEQ ID NO: 80715 - DNA, 644 bp, Citrus sinensis
  Intron number 1 from transcript orange1.1g021174m (locus o range1.1g021082m.g) derived from phytozome v7.0 (chr-ID sc affold00019; pos 1267995 to 1268638)
ggaactgaagaggtgcaattggattacaaagaatagcggtaagctccatttgttatcaaccaagagtttattcgaacgcataatagttaatactgcgtgcttcagatttttccatggcgattcatttttctatgtgataataatacaagagaaaagtttcttagcagctaaactttgacattgttgtagtggttaggttgtacaatctattctgtgcttgtgcatttgaaaagaaaggatttagtgaagtcatactaattaataaagaagaaacctacaagcttcaaatactattagtggttaagagttcaatataagatgaattaaaatgataaaactaaatactgtgtgtcatcatcgtggccattataatgggggttgttacaactgtttgggctcctcaacgctgatataaataactcttttaaggcattcatgttccaactgtacagcatatatgtattaagtcgtatgttttgaattcagaaatggcaactggtgatccaaaatgatgttcaacatctctacctactctacttttttcgattactcactctttgaggacattaatatgtactaaccaagatgtatttgctccatggaaagtgtggatattaacacgaattttgatgcagataaagttt

SEQ ID NO: 80716 - DNA, 890 bp, Citrus sinensis
  Intron number 1 from transcript orange1.1g014724m (locus o range1.1g009680m.g) derived from phytozome v7.0 (chr-ID sc affold00324; pos 121392 to 122281)
ttcagcacttcggcttgcagcaaattacttgagaggtatttaaagttttctaataatctttaattgcttttcgcgagaaattttctttacatttatgtaggttgttctctgtttacgcagatttatgtgatattatttattttgattttttcttgcatgttgatttggtgtattgaggattttgaatttagatttttttatccagggcgtgtttgtttgtttgtttttatttgattacgtgtcaaagtgaagccttgtggattgggtttggcttaccaatttcaccccttgcatattgcgtgtggttcaatgagactacttttttaaaccgtgtagaaacttaaccatgttgtttacttctgtttatgtttaccatgtggatttctgagatacagcaggggaaaaaaataaataaataaatatatatatagcttctagacagttctgctcagacttaggtttgcttttctgatatcatgctttatgtacttgctaatttaatatgtttgaagctgatgcttcaagagtttgtgacagcattgatgttgtttgttttgtgatgggttgatgaactctatcacttctatttaatttaagttagtgaattgtaacttttttagtttggttgtggatttttttgtgcttgtctttgggtagattaagcgtctcttgattttctctattgctattgatacttcttttcagttgcaacttgcagaacataaggagaaacacattataattagcaatttctttttctttttatggtgcaatgtcatgtgcatattgcttgctgtataccgagtttgatattcggacttaattcttatatatatatatatatattggaatgtgtaggaaatttttgagatactccagtgaaaaccaag

SEQ ID NO: 80717 - DNA, 511 bp, Citrus sinensis
  Intron number 1 from transcript orange1.1g024043m (locus o range1.1g022992m.g) derived from phytozome v7.0 (chr-ID sc affold00414; pos 90636 to 91146 reverse strand)
taaagccgccaattccttcaagctcgccaaatcatgtactttaatttttttatttttttgctttcttattattattgtttgatttcctgttatcctgtttgtttccggagaaagtgttggaaagtgaaaagaaaatggagaacttttttatcttgctgatgattgtatgctgacgcgattaatatgacgcatttttgtatttttcaagttgtggaaaactaggaatttttttttccttttaaagaaaactatatattttgctggcgatcgaattgaagactagggtttgattggattgatcagtttatactgtatcattgctgtcttgagatgttttgatcgtatgtataaagtgatgacattgtttggtagaaggaatgttatgtgttcgtgctcgaaacaaaaatgatttttttttttttacttgcatttataagtttcaaattctgctaaagccatattctgaaaaattgatttcattgtcatgcaggggataaagctggagcaactt

SEQ ID NO: 80718 - DNA, 478 bp, Citrus sinensis
  Intron number 3 from transcript orange1.1g006232m (locus o range1.1g004767m.g) derived from phytozome v7.0 (chr-ID sc affold00581; pos 90574 to 91051 reverse strand)
ataaatattctgtaggttactttttttgtgattctcctttccctatgcttatgattattaattatgcttacatgaccattgattgggtgtccctgtacttgtataattgggattatttcaatcagagattttgtcttgtaaaagtaatagaacctgtcctcgtttttggaagattaagttcattttttgttttataggaagtttctggcgacaatgattatccttaatattaagaaaagattggtggtgactatagaagtcttagttgcttctgaacctgttggtgtaacatgcattaagatttatgcaagacaaaaaaaaaagtgtttttatggtcaaacctcaaagcagagaaatgatgtgggaaatattttagacatatgtgagcaagatgctaaagatgctatcttatgaagcttattttttatttttcatgttaataggtgcacggtcccggtgcggatatagacacactttg

SEQ ID NO: 80719 - DNA, 651 bp, Citrus sinensis
  Intron number 1 from transcript orange1.1g027510m (locus o range1.1g027440m.g) derived from phytozome v7.0 (chr-ID sc affold00068; pos 257067 to 257717)
ctcgttccggtacgtcaacccaccttttttattgttatttttgtgattttttttttttaaaaattgactctgtttgattcccgtgaaagcgcgggaagaaaataatattagacaatgcttgcaacgaaagtttgaaactttaagcaatacattatcaattttttttttaactgagaaaattaagttcaaaaggtcaattttttgttttgttttttagtcataaagtttttcttttccgggtgttattagaacttgaaattctattatattaggtattaatgtaatcagttatgaactgtgattagggagtggatagctgtgcttttttcttttcaagaggatgttttggtttcacgtttctggttttgatttatgcttttctcatgatttagctaattccccaatttaaaattgctgctattagtgcttgttacttgtaaggttccgttatatatatatataggcaatgtggtgattccgcaacagggagtgtggggtgggagacttttgaattatttaaagacaataggatttttttggatgtgcactgaattttcctttgttttgtcacgttctaaccatgtggtatttgtttctcccacatctggtaaagcaggaaaagctaaagcgaaggagatagagaactttttt

SEQ ID NO: 80720 - DNA, 412 bp, Citrus sinensis
  Intron number 2 from transcript orange1.1g027510m (locus o range1.1g027440m.g) derived from phytozome v7.0 (chr-ID sc affold00068; pos 257734 to 258145)
gaggaataatcgagtaagcatatactgtctaaatttttcatgttgccgacagtttcattcagttattattatatcttgcttgtatgatgtgtgatttcattccacctagttttatttctttttaactctctatattctctatcttatccaccaacagggcctcttcctcacccccccccccccccaattactataatataagttaattatatgtttattaaaaagaaaaacagctatctttttcattggttgatatatgtggttgtcaattttgatgtggatggtagtttactgaaatcttattgatgcacaaatggatttggattgagttacatataatgaagcacgtatttttcttgtatagtttgttgatgttttattttttatttttatgtctgcttgagcagcccag

SEQ ID NO: 80721 - DNA, 828 bp, Citrus sinensis
  Intron number 3 from transcript orange1.1g024952m (locus o range1.1g024952m.g) derived from phytozome v7.0 (chr-ID sc affold00018; pos 684987 to 685814)
aagaaaacgtgagttcttttttttaaactaaatatttttcaaatttctgttattagtatttctgaattctggtgtctataatgttgctgcttttgggattagattttttctatattacttcttaaatgtaggggtatattcagaaacagtaattgagtatgtatcattagcaggttcaatcaagtttttcttgttataaacgttggtagtgttgtctctgttaatgaggtggcttagtgtattagtttattgatagatgaatcaaatgggagagcgtcatataagattttataagtcatgatcatctgatcttttaactaatgcactctgaattatcagatgataatgtttttattaatgattagtatcttctaaagacctacatgtgtaatacttcatatattaggctttatctcattagctgggttttacggaggttttccatagagtacatatatgctttgttttggtgtgtttatcctatatctatccttgggatttttatttaaaatggtggaggagtctcctatgtagccatttccatagagttctgatggtgtcgtgtttactattctaagttttatggaaatttaagagaattttcattttatttgcaaatgttccaattctccatttgttggtatgcgtgattgttatcatatgagattgtagatttaaatggctgtgttcaattattgttttttgcatgattgcatctgcatatgttgtgttatcctgggcagttgtggatgctatagtgactgatttatggagttatctattttgtttatcttttcattttttttgcaccttggcgacagtttggct

SEQ ID NO: 80722 - DNA, 784 bp, Citrus sinensis
  Intron number 1 from transcript orange1.1g004723m (locus o range1.1g004723m.g) derived from phytozome v7.0 (chr-ID sc affold00009; pos 634014 to 634797)
attggatcacttactgtttgttgggtttgtctttgagcttacttctttgagatctagcggggttacgactattttctcaagcatttttttccctttattttttcttcttttgtttagcttagaatgcaagtgaaactaaagttattttctttttctttaaattattttttgtagcctttatatctgtcactttatcataggattctttgtttgttcaagggtttcagttttatgagatcacacttattttgcagttttgtgatctcaaagtttggattaacttatgcggcgcctgctttttcaaacaataatggtatttggtaaagttaaggtctctgaaccagtgctatactagagtactacaattcgttaggctttgaattttataatttctcttgtagctgccgtgagccacatagtatttattaggctcctgcatgtcaagatctgatttttacctccatatgaagatttgttgttaacggagttcctgtatgttgtaggctgtgggaagttttggttggtataaaatatttggtagtgtattgttcctcgttctgcattttctctgttgacgtatttgatagcataaaatcaaaatttcaggacaaatcttcggctgttacgtttgtttttgcattactagttagtgaactgaagtttttggcactgttccttttatttttttgatcacttctgcttttctatatgatatttatgtctgctgaattccattttaatatctattcattttcttgtttacttcagaactgtggatctagct

SEQ ID NO: 80723 - DNA, 630 bp, Citrus sinensis
  Intron number 5 from transcript orange1.1g030456m (locus o range1.1g027737m.g) derived from phytozome v7.0 (chr-ID sc affold00134; pos 207859 to 208488 reverse strand)
cttctgatcttaagagaaaagctatcaattatcaggtcaatttcaaatttgcttttctttcttcttttagttatcatctctcttttggtctatttcgctttgcattggtaaacaaagattatcagactcttgttatagcttcagttgcacatggtagtgacatgactaaatccatggaatttaatgctaagtttcgttgcaaatatgtcaactttgctggtttgtcctatttattagttcaatcatgcatcaataatgtgcctctcaatttttagagaagaaaaggtagaagtttttcaaaatatatgtaccctctatagagcgtctgcaaatgtaaatcatattagtgcccatacagataactttctattgcatgtttcagacaccacctataaccgtagagttcgcaatgcacaacgtaacagagataaagaatcctaattttcctgttctgggcatgcaataaactatccattttccactgcattaatgttttggttgtggaacgtaccgcatccattctcctatgcaattttatcaaaagtgtgtgtcagatttggagaccaatgcatttccttttgtgcccaatttgcaggctgcaaatattgtttcctcgagcatacagcctct

SEQ ID NO: 80724 - DNA, 1056 bp, Citrus sinensis
  Intron number 1 from transcript orange1.1g023754m (locus o range1.1g018341m.g) derived from phytozome v7.0 (chr-ID sc affold00171; pos 128897 to 129952)
aaaaaaattgtcttcgtttaagcttcggcggtaaggtaatcaaaattctgtaattctcttatgaccaaaaatatgttatttttattatggattatgaacttaattaatgaaaatgttaaatgtatttttttatcaaaatgatgttttgcttgttagttagcttagttcaactatataggaaaggaaattgcaaaattgtaaacttcttttatttttttagcatctatttgattacttgttcttaaaatttatctgcatcccagcttaattttattttttaacgaacttgatactatagtatagcattagcttattgctgcaccggaataatctataataacttaatgatgttatcaaattggaaaacaaatttctcttgatatagctgaatgaattttggcttgcattttatgggttttgaaaatggtagactgtcattgtttcattctagcgatgtctaaagtggaatttttggttgggaaaagagtggaatttatgctacggagaatgattcatggagaattttttgcatacgaagtggcatatgatagtctcatttgaacgctgcagcaacaagcactattttgaatggtatttgaaaaaaattgaagtctcaaaataagtctttggaagtttttctgacaggacaagcatcgagagcccctcctcttgtccaatttctctttgtttcttcggaaggtttggtcgcacctttaatgggaaaacggtttggatttcacatattaatgaaacaggggcccacaaaaatatagctcctaaaaagcaacattaattcttctattaagtttttgtgtatatatgttcattatcggtagaactcggatcattcctagatgctttctgtggagtagatgtcttggctttgtacaaataactcctgcatgctataataccaaattttcatttttagtctaaatagaatttggttttagttaaaacactagcattttcttttgaaatgtaatttcaattgtaacatttcatgttgtactgtttatagagtgacaactgaaaagactgaggaagttttcctga

SEQ ID NO: 80725 - DNA, 556 bp, Citrus sinensis
  Intron number 2 from transcript orange1.1g023754m (locus o range1.1g018341m.g) derived from phytozome v7.0 (chr-ID sc affold00171; pos 130180 to 130735)
gcagtagtcaaacctgaggtatgttgtgtaattgtttcatgaatatctttggtctctttcttcgattatgttctttttaattagttagtagaaacaatggataccagattattctttggaaatgtagcaaggagcaatggcttttttatggtgtagtaagtatatgtttaggtattttgttgttaatctaggtttttacttcaataaccaattttgctgtgtattttgttgtttaggtattttgttgttaatctaggtttttactttaataaccaattttatggtgtagtaagtatatgtttaggtattttgttgttaatctaggtttttacttcaataaccaattttgcggattcattatagttttgtcctatgttaaatgctttgatcactggatagagcctagaaactgaacttctagtgtttgagagttggaatgtgcaatacaatgatctagctatgatcatctacttatttatttgtttatttattttgcctttagcggcctgtcagtcttgattcttacttggtgttgattttggtttgatgagtccag

SEQ ID NO: 80726 - DNA, 923 bp, Citrus sinensis
  Intron number 2 from transcript orange1.1g017273m (locus o range1.1g014720m.g) derived from phytozome v7.0 (chr-ID sc affold00013; pos 950500 to 951422 reverse strand)
tagacggagaaaattattccagttcaacatctgaggtaaacaacaaaatcctttgctctcatcgtgggttactcttcctctcacacccagtacaccaactatttacaacttatgcatttgttctttagtcttctattagttcatctgcctgcaggcatttgctgtgtcatttgatttattgctgtgtttcaactgctttgccatgctactaccctgaaaaatttccctgtactttatggaatgtatgttggaacttaaacttaaatgcgtagtcttttgcccaattgcaaagctgaataattgcatgggaaagcacacatttatcaattttcaaactttggacgtaaaagttatgagaggcattttatgttgttccacttcaaaatcaaaccatctttttaattatcaaccgttttatgtagtgatgttttagtatttagcatttgtattctggtagtcaattgatttttgagaaagcgatgtagatagggcgcttaaccattcagaatcagaccatatttctaaattacaacctttggttcctgcaatggttgcacctgaatgcttaaacgtacacattgcaactttgcaagaaaagtgaaaaggggatattaaacacagcttgtattttgatttagaccagctctgtctgttgcttacatagattgttacctgtaggtaaagaatatagtaatggatgaggcagaaaattgtgcagctagtttttgtgtaatacttattttgcacatttttctacttctgggtgtaagtgttattataacatctacaattttgcatgcattttcaagaacttgttgttttacctgtgctgtttgtctcatctttgatagtgttttccattgattcatataactttcacatgttcaggttcttgttggaactggatccagaactataaaaat

SEQ ID NO: 80727 - DNA, 302 bp, Citrus sinensis
  Intron number 4 from transcript orange1.1g009150m (locus o range1.1g009150m.g) derived from phytozome v7.0 (chr-ID sc affold00234; pos 188246 to 188547 reverse strand)
ccgaagatagctgtagtaaatcctaccttcaggtacttctatttatatacgacttgcaagcatacatgggcttaacatgttacatcgagcattccatacttcccgtgaatatttcataatgggctctacatttaatgagagggtttctgcgtcttcctcttttgaatttgatatattatgtatagtgatgatgttcttttcgatttatcatatttccttttacccttatgtgtatgtagcctattgaatagttctcttcagaagatatattgcttataagtagccgttacttgttttccagg

SEQ ID NO: 80728 - DNA, 715 bp, Citrus sinensis
  Intron number 1 from transcript orange1.1g031438m (locus o range1.1g031429m.g) derived from phytozome v7.0 (chr-ID sc affold03210; pos 6804 to 7518)
tccaagaacaaagaagcctcagtagagcgtaccaggtgcctactgattacactaattttttctcgtctttgtttgtactatcgcttcttcatcgttctgttttttcccgcgctctatatctgataggcagctgggatatcgggtaacaatgaaatgaaaagcttattaatcaactgaaactatttcaactgtttcgcttagttgaggtccctgaagtgagacctaagttgtttaaagttagtagtttctgggaaaccgaagagagtccaactctctttcgttgcatttataactaaaagtcatcttggttttggttagaatcaaagatgcaatcatttagtcatggatataaagttatggtatatataattttgtgtaacctacgtttgaagttattattcttctttactggcaaattatgtattgaataacttgaatcaacccataagaaatagaaaatccgggaattttggaattttgaagcgggtttggatattgtgttaatagattgagtgcacaagcggggagtggtcaaactctgtttatagtcgccttgtttggtaagtgtttgacaaaatgtctctgtgaatatagaactaccaaaatttaataagaattttgtattttgtgtttcgggtaactattgtaatgtttttgtttttggttttgtttggattttgatagtttttcagactagaggtgatacacgctgaca

SEQ ID NO: 80729 - DNA, 761 bp, Citrus sinensis
  Intron number 2 from transcript orange1.1g003590m (locus o range1.1g000985m.g) derived from phytozome v7.0 (chr-ID sc affold00219; pos 124552 to 125312 reverse strand)
cttgaagcaaagcttcaggcagcccagcagaaaaggtaaaatctttatatcatatggtctctcggaatacgaatatagtcgtctcactcttcctgattacatgcttgaagttaaagagggccattggtagttgaaatactgatcatggttttgataagtctggttttaggatgaagccagtctacagttttctagatgttttcctgtttgataatgtggaacccccacatggcatcattccttgtcaaagccttatctgatttgtgttttattgatcatcccactttactaatgcgccatgatatggtttgtgggtttatgatgcctaattcttttccttcaatactctttggtggtccacattcccttgaatgtctcctttttaattcttacaaaggcttttaatatggatcagatcactcacacagaaaagcaaggactaagctaaaagacaagaaaaacacaatatcctttagctttagcaagttactaataaattttgacttttgaagtttcctcccagttattgatacaatttttttgccaaaaaattgtaactacttgttaggatggcaattaaaaaattccaccacaataattgttgctgcaacagcttttcttctttggaaaacctttttcctttttcttcttttttcataaatttttttaaatattaaaatatatattggattgagtttacaggacaactaactattgagtctgcaggctgagcattttggctaaggctcaaaagcgcctag

SEQ ID NO: 80730 - DNA, 606 bp, Citrus sinensis
  Intron number 2 from transcript orange1.1g002698m (locus o range1.1g002112m.g) derived from phytozome v7.0 (chr-ID sc affold00041; pos 149090 to 149695 reverse strand)
gggaggatatcagagaaacggtaacgtttcgttatgtactattaactttgattacgcttaagttttaattgaaccttgaagtgattgccaagtttagattttcatggttgttacacatgttgtttgataaaattatgattttatgtggtacccatttattttattattattatttttaactaatgaacttcacttcgtttgagctaatgctgaaagtttgcactctaaaaaattgagatttcttatggttttagctaaatcaaatgcatggccttttcattttagcttcccctggcttcctttttctttttttttttttaatatagtaggctgaaagcctttcactttcattgcatttgctaaattctgttgggagcgaatttgagagtgattattttagattgcaacatcaatggcattgggttcattttagaatattggtactgtacaaagccatcatggtgtctgaaatttgatgcatagtttccttcattcttttctgatgaactgattaaatggggaattcagcagtgagatgtgtattagtattaatgaactgggtggtttattgtcttttacaattgtatatgatctataggttcaaga

SEQ ID NO: 80731 - DNA, 798 bp, Citrus sinensis
  Intron number 1 from transcript orange1.1g011051m (locus o range1.1g002978m.g) derived from phytozome v7.0 (chr-ID sc affold00033; pos 229371 to 230168)
tgagcttcggggtcattttgtaggtaattccagttcgtaattctatatctttgtgtttgagtttaaattgcagttttcccttactgtctatgcaaactgattgtggctttaacaaatttaatgatgtttctgcaaaatgattaactaaattcacttttaagaatttacgtgaatggaatgaaagagagttatagaaggtatcatgaatcaactttacactattcatactactcttttttacatttagtgttactgttaatggttgaatattctaattagttctttctgattctagattctttttcccctcttttacatgtctaagcttgggaaagcactttctcctctttgagatgtcaatgggaaaaaggatgaagaaagaaccatctttctaatgtgtattgagcttcttcagcaatataatgctctgattgttatttgaccagttttaggttgattttgaattttatatcttatcttcttcatataaaataccatgcaagaatggtcagttaaatctttctaaccactggagttatgctgtgggttttgtgtggattaggattcttaaagatttacatcttggatcctggaaatgaaatatgcagaattactttgtaatttagccactaaattatatggacaactttaatttcaacatttctcagctttcacaatgttttgatgcttgacactgcagcaagttaattgggctattcaaatttcagttgatataatttcaatgactaacttgctttttggcttcttaaagggcattacttgagtgcatcagcacac

SEQ ID NO: 80732 - DNA, 733 bp, Citrus sinensis
  Intron number 1 from transcript orange1.1g034875m (locus o range1.1g034875m.g) derived from phytozome v7.0 (chr-ID sc affold01866; pos 142 to 874)
tgaggtgttgctttcttgtgaacttaaacttgtttaagtattactgctaggtttttttcttgtgaggttagatgtttgaattgtaatgttgttttaacgtgacattgaaagtcatgatgtcttgcttttgaattgtgttttggtccattgtgtgcttgttttgtgtttggaatctcattaattaaagagcaaatagcatgcaactcctagactcctggcctaaaatcaagcagctttaaggtctttttctctgtcttcacatgtggccatggttggactaaagcgaatatacttcagatttctctcaaaactagcctatagtgactcccatatttactcctaatttccaaagcttacttttgttttttctgctgtattttatttcttagatttattaattggttttttcagcattctattgtttgtcagttgaggaaattgatggattgtaatgaggaattaaataagaaacatgcaaagagtgtggagcagcttgatttcagactaaaacttctggagcttgattgtatttacccttttaattaagtaggccccaaaatgagagagggatggggggttggggtggggttgttggaggaaaaattgctattgttgagtaaaaacctaacctattatgaacttttgtggtaacccacatggatatatcctaacagtcctctgtatttattctcctgcagattgatctgaggaaagaatcaacaatacagttcat

SEQ ID NO: 80733 - DNA, 851 bp, Citrus sinensis
  Intron number 1 from transcript orange1.1g006541m (locus o range1.1g006541m.g) derived from phytozome v7.0 (chr-ID sc affold00376; pos 118327 to 119177)
ggtatgcgagtttttatgctttgaattagtttttcgtttgttgaacttaattttgcaattagaataatctatggtggatgttgagtagagtatgtttattaatacgatatgtttctgatgcgtatagagaagactcgtggagttcagttttgaagaaattaaaagaatctttatggtggatgttgaatcgtaggcagcataattaatttgtaaatatctttacgtctgagcagatttgttgaatgtaacaatgatattgatgccagggttttttattttatacaatctgttgtatgatatctttttgctaatattgatagtatgagtgattttatgacaaacataatgtgtaacctgatctgttgtgacatcacaagagaagaagcaacattgttttggctatggctcagccaagtacatgaaatttacacaaatattgatgtttaaacagtgttcaatatccattaccttagatgtatagtacgtgatttatataattgtattccttttctattttctttattttatgggtttgtataatcttgtgcagaaactattctagttttgttcttcttgagctgttacgaaagtgaatatgagaaccttttattgttgaatgtcttgtttattttttgtgatacttgaaatttgtttgaaatgtgagaaatggaaaaggaggaaactgagtggaaagaaaagggtagtggtctaccaataccttattctttccctatagggctttttgtagcattgttaaatctatttttcgatgttagcgtaatttcaaattataagatactgaattctaaattgaagggagaaagtgggactaattgagaccaagagggaga

SEQ ID NO: 80734 - DNA, 468 bp, Citrus sinensis
  Intron number 3 from transcript orange1.1g013246m (locus o range1.1g013231m.g) derived from phytozome v7.0 (chr-ID sc affold00294; pos 25956 to 26423)
ttgcaggcaaattgctttctacactggcccaacaggtaattacgcctgaatttttttagccctttaatttttttttttggttaaaaaaattttagagttcatattattaaacataaatgaaaatgacactcacaaaataagtcttcttcgtgaagacgacaaaacctagaaatttgttttctttactagttggcaataaagatgccgaaacgatgcccgtgagtctgaacataatttacgaagataatataaaatttaaaaagaaaaatctagatatcatctgacagtggcaacgtttctttcaccctcttcaacgagtttggttcatatcgctatccgatagttgcctgattgacaagcaattttgtcttatatgcttatactgttaatcaataattaaaatgaaattaaccattactattttgatactttatttggtcttacagtggggggattattgaacgcgac

SEQ ID NO: 80735 - DNA, 784 bp, Citrus sinensis
  Intron number 3 from transcript orange1.1g025613m (locus o range1.1g025613m.g) derived from phytozome v7.0 (chr-ID sc affold00006; pos 1434962 to 1435745 reverse strand)
actggaaattggcaagttttccttacctttggttctgagtttgtcttgagtgcttttgctgatattgatattagtttgatagatatgttcattaaacataaacaatcatctgtgtggattctttatgtctagaggttcacccgtagcttgcaaaacttgaaaacagccaaatattgacaaagtttgtattatcatatttcatttctcaattccttcattgatctgttggagaacgctggataattggaagtaaagggttttcacattgggcacactgggcttttaattagagcattactttccagttcactgaaaccaacaacaaagcggagaactctttcttctaaaacaagcatgaataattaattccttcttctggttaaggatattgtcgcttatcattgactggtttagcttgataatataaccattccctttgctttgaattaaacatgcacgtatttcaaaagcaattatttttccaagacggtaatgacaacccctctgctacaaccaattaccaaatgaggaagtttaggatggtgaggacaggccctcttctacatacaattaccagatgaaaattgctttattgtactggggtgttgtatcaattttaggtgttttcttcttgataaattcttgctttttttttttaatgtaaatctccatttcctgatgtttggtttaagacttgtaccttctatatgtttgatgtggtgttaagtcaaccttatgttttctgatacgactttggtgctgcaggttggtcttgtatccgatt

SEQ ID NO: 80736 - DNA, 969 bp, Citrus sinensis
  Intron number 2 from transcript orange1.1g006424m (locus o range1.1g005956m.g) derived from phytozome v7.0 (chr-ID sc affold00078; pos 431574 to 432542 reverse strand)
attggcgatttggtttcaatttcgaggttttaaaagtactttactttctccaccattaaagctttataatttacgcctgccaagccaaagtgctgccaacctttggaagtgcttttgttgggttcaatacaaagcacttttgaggagttttggctctttttttatattgtgctcaaaggtgggaaaattgacctttgaggtgttgctcaagccttgatcttaggtgggtcggtgattgttttggacttcttttgtttgttgctttgcattgaaaccaagatattagtcctaagaaccttgttgattgatgctttggtttgtgttgcttgtatttgattattgtatattttccgggttttaggcaaattttatattgggattaatgagcaaaggtggtttagaacatgctaaacgaaaaattggcaacttgccattggtgttttgaggggttagaagctggttcctcgtacttacccatgttagtaaattgtatattctgttgaattacttattactagctgttaagtcttattaatttacatagtctagagaggaaaactcggtccgtgatttgaggtttctgtgggttatttaaggggtctgtgagctttttgtttagatgcataggaggagtgcttgagagaagtggtctttaatgtggaattttggtctcgattacaagacatgctgagctctgatgagggagtagatgatgtgttcttcgactccactgattgtttgtcattcgaagaatcagttgtagcagaagaagaattggggcccgggaaattagattatgatatttggatgagtgagccacgaagtgtgaaggagagacgtaagaattttttatgtaaaatgggtcttgttgagttttcttcaaagaatgagattacttttgatgattcatcacagatgatggggttggataggattactgaatgtagtggagctgtttcaggttcttcg

SEQ ID NO: 80737 - DNA, 759 bp, Citrus sinensis
  Intron number 1 from transcript orange1.1g006424m (locus o range1.1g005956m.g) derived from phytozome v7.0 (chr-ID sc affold00078; pos 432643 to 433401 reverse strand)
gaaacacagaagtaaagaaagcaaaaaggtctgttttttaaaattaattcagcattattattattgttattttaaatttctgtagtattagcaaacaagagtcccagaaaacacggaagactgtttttaaaaagcaaaaagatacagagttctgctgctgccgctggccttggctgctgctaataatactacagaagctatatcatagctttacctttaactttggtttggtttcatttacattaatgggcaccaaaagatacatcaaactgcaagacacaacacccaagaaaattgttgttcatttgttaaaaatgaaacccaattgtcatttgtctctcgctctctctctcacaggccggattgttagttaatttttgggatggttcgttttcttctttactattatcattattatgttgatgttgtaaattcttttagctccatttaatgcccctttttagaaactctcaaaagaaacactcctaattattacatctctacatattacataaccattaagcaactgttttctgtacagtcgttttaatgatttttatttattactctcactactcaatttgaatttttcctcatgtgggtcacttagatttccaattttttcaactggggatctgttaaaaatttaatttaattttttgtaatattaaatttgcttaattgtgtgtagtactaattgtgggcttgctttttgttcttgcagggagattatatttatagtagccagagaaagcacaa

SEQ ID NO: 80738 - DNA, 580 bp, Citrus sinensis
  Intron number 3 from transcript orange1.1g003563m (locus o range1.1g003548m.g) derived from phytozome v7.0 (chr-ID sc affold00185; pos 50748 to 51327 reverse strand)
ctaccaaaacaggggcacaggttttgctctcatctttgccttctttgatgtaacagttatttttttcattttctttgtgattctagtagtgacttaaatttgtttgtgatgctgtactgtaatagaaattctagtctaacaggttttcttgcaaggaaacatggttattttctaaggatattgtgcttagaaagttgttttcaaattggcctaagctggccagtttaatatgttattgcttctccatggtattagcaaaatgatagtgcataccatgaatactacattgagctatgtgagcttggtttgagtttttgcttgtcaaaagcttgttcaactcattttcaagatttgtcctcaaatctagtgtttgtgtataattaactcagctggcttaggcctaggtcaggcctgttaggcgaccaaagtactcttgaagttactagttatatagttattgttaaacatgtagtatttagttcaggttgttcatcggagtttactgggtattagctgccttttcttctttttgtcaagaggaacttaattggtcatttatcctattgcagttattcttaaa

SEQ ID NO: 80739 - DNA, 876 bp, Citrus sinensis
  Intron number 1 from transcript orange1.1g039720m (locus o range1.1g039720m.g) derived from phytozome v7.0 (chr-ID sc affold00560; pos 48649 to 49524)
caacaagtgacgtaaaacatgaaacctacaacattttcacgtcaaatatgcaacctattatgtaaagtatgtaattttgacgtcaaacatgaaacggacaagaatattcgagaatattctttattttgactttatttaagacatgcaacatctaacgttaaacatgcaatcgtaacattcaacatgcaatcgtgacattcaacatgtaacaactgacattatacatgaaatctgtaacattttacgttaaatatgcaacatatcatataaagtatgcaacttagatgccaaacatgaaacaagcggaaatgtttttttattgaattattccaatgataattttttttcattttcaatttctttattttttatttctattaattatattataaaatactattttttcatttttattttgtatttttttaatatttcttttttaaaaaaggtgcaaccggttaacaagtctttggtatagccgggctctttttttgagagccggtatggtgccggctacaatgccgttataaaatattaatgacgttgtccgttactctctcataaatgatgtttcaacagcttgattggtcaaaatatacgtttggtgggctaccgaccccacataaacatttgtgaatgtagaaaatttttcatttgtgctttaaagccccactcttaacacgaagttgaaacaatcattcagacattctgaacagctttatctcatccccagcctcaaactcatagaatatgctaaattccatttccattagcagccttgccatttcgttatggtgcatcagcttgtttttgcttaattctcatagctgtttcgccgattcaaacgagacggatcgcctcgcaagtcacagcttc

SEQ ID NO: 80740 - DNA, 721 bp, Citrus sinensis
  Intron number 2 from transcript orange1.1g038596m (locus o range1.1g038596m.g) derived from phytozome v7.0 (chr-ID sc affold02489; pos 11667 to 12387)
cgccaacaggtttttggcatcaacctcctgcatgtttctgtttttgatgtgtcattaaacatgcatacagggctttgttttctttaaggctgcatggaaatttggcttatttttcattcaccgtgttgtatttccttgtctatttttgttgtgtaaccattaatgctaaaagttgaagtcttaagttgataagaagtgacaaacaagagcatttgaaaggtaacataattggaacattaatctaagcatccaccttgatcttgtaataatttaattaattgaatggaagataaaaaaacacaagacttattggtccaataagctccatggttgtctaattatttatcccagaagcttttgttaatgagatggagcccagtagcagtatttgaacccagcacatgtatgaacccagcatatgtaaaataagtttgtacttgtaaattcattatactttttcttgtcatttgttagttttttaattttggaatatgtcacgaacacgtcaaaaggttgaatcacagtttgtattctattctttgaagcaatgtactcataatatgaatgtgtatgtatttaaagtctgagtattagaatttcaatttttgttgcagtgaaactcttattaatttggtaatttaaatataaatttggtatgataatttgttatgataactttttcacagcttcgtgattggctggatttgtctcttaaccactc

SEQ ID NO: 80741 - DNA, 373 bp, Citrus sinensis
  Intron number 1 from transcript orange1.1g047980m (locus o range1.1g047980m.g) derived from phytozome v7.0 (chr-ID sc affold00043; pos 131505 to 131877)
aagtaaaggtatttcatacgtttacatttgctacattgagtttatttattttttactgttttagttatttccgccgtttgtaaattaagtttataggattcaatagctgctattataatgatgagttcctactgaataattgtgattatttatttgttttaatgtctttgattaaattttgttttcatatgaaggttgttaaattaggtgttttgatattcacaccgatttttttttttaaagaatttgctataattttggggttttgggatataatttgctgagaatcttaatttttccttcttctgtcaattttattcttgtttataattttgcagaagcagaagcgaagaaatcaaaaagagtaagttta

SEQ ID NO: 80742 - DNA, 866 bp, Citrus sinensis
  Intron number 1 from transcript orange1.1g006316m (locus o range1.1g006290m.g) derived from phytozome v7.0 (chr-ID sc affold00006; pos 1442600 to 1443465)
tcaattacaacgccgcccacgaaggtttgttctttttcctttactgaatttgagattttttccccccctagaataatgcaatgtctgatttttgtttttgcaactataagtgaccgtgcattttcaactttacttatatgcattatatataatatgcatttctaatggttaatgtgtgtgtgtgtgtgtgtgtgtgtacacatatatatatgaacagaatctcaatgttcaaatgctttgatttaattgtaaacgatttgttttataattggtcgagcaatgtggggccattaaaccaaacgttagccaccccaccctctctgttgatgagtgctgttaactgcatattcagttggcctgaaagtcaaattcattttacctttaaactatgtaggtaacaactaaacctagtaattaagcaattacagcaaattgtgtgcaatttgaactatacaaatggaaatgggaagagagaacttataatctacttggtgtgaaagtaatttgattattgattttgatagggcaggcactctctttgctattgatagatcttacctaaaaatttgacctgtctgtttcttgagtgattcaagcctaatccaagctgttttagtgttaatatctcagtacatagtgctaatatgtgtaatactgccgtacgttattacaaacatggccagaaatagatggaaataacttttgacggtcactgatgatgtgactctctttgctgcttttcagcttgcaggaaacaactgattggtgttgcaacaacttgctcttttatgtgctactaatcttctcatattttctgttaataaattttttatttttcttgttgaaaacagcaacacgggcgttgg

SEQ ID NO: 80743 - DNA, 779 bp, Citrus sinensis
  Intron number 1 from transcript orange1.1g023369m (locus o range1.1g023369m.g) derived from phytozome v7.0 (chr-ID sc affold00013; pos 1569095 to 1569873 reverse strand)
tagcctcgggatatcaagcaacattgaagctagtaaagtgttcaattatatatttgtttggctgctgagaaagtcaaaaagaaatttaaattcattcttgtcatcatatatatgttcttctgggttgccttcttatttgggagaaaaaccaattacgctttttctttacttgggattaaaatcctagcttaagctctaatacggattacctcgacgcttagatctgtttatgtaaatgattgtaatcccgtttgtgaattatagcatgtgctttttataatttgtaattcttatcttgtctttggaatctccccactcccagatccaaactaatctcatctcattttctgtaattgacatattcttcctgtttaaccattcaacggtcaatagaacatgttccctatttcctcggactcccctcaaactactccaattttattttttttttcatttttaaaatttcccttaattcaagagacagacggcagccccatgtgctcaagggctgttccatacttctgttctattcatttattttatgaacaataataaaaaatcagtttatagaatctctatttttggggataacaacccggtcctcgatctggttcccttttcaaatttacccacgtgagcttttagtttcattataaggcaacaaacatgctgctcgaatgtataatttgtgttggagggaagattgagacaaaatgatgcgagtgatttatcgaaattttgcaggggtacccgagatcccgcggcggccagcagctaca

SEQ ID NO: 80744 - DNA, 807 bp, Citrus sinensis
  Intron number 2 from transcript orange1.1g033446m (locus o range1.1g033427m.g) derived from phytozome v7.0 (chr-ID sc affold00037; pos 511355 to 512161 reverse strand)
ttttgtgattggggaggaagcagtaggggcatcaggtatgatctgaaactgttgtgctaatatacttttggagctgctgaacatttgctgagatacttaattattattgaacaaaagtgaaatgaagattagcaactgatgcagtagtttctgcttggtcagcatgtaccttatacaacacatgcattgaacttgttatatgcctttagtaacattgccctgcaccattttatctctaggtattgtttccatttcccttttgcttctagaagaaagttaccactctcatcattcttgtagaatgagtaactgggtagtatattcctgttgaattttattcttaatgtgatggcttcagtgttagtgtaaattggtcgagaataaaagatcaagttaattagcaaatgaagcgtgtgttgcatagctggatcatatgtttccaatattttgaattcacacatattcttcgttgtgatttatatgaaaaaatgactagagaagaaggtttaaaaactctgagatgaatgtgatctctatatccagggtgttctattactttagtaggtcttgattatacattttatgcgatctgctaaacagcctgcaacatacaaatgattagtaatacaagctgattatcaacattcaatttcccattcatgtgtcatcaaaacttattggacttgtattgcgtggtagcaatgaatgtgcttgtagtgcatgagcttggcatagtcgatagtcatgtatggctactgaaatcttttaaatcttatggtttcacttctttaatggggcagggcattt

SEQ ID NO: 80745 - DNA, 499 bp, Citrus sinensis
  Intron number 1 from transcript orange1.1g010105m (locus o range1.1g002907m.g) derived from phytozome v7.0 (chr-ID sc affold00006; pos 97116 to 97614)
tacgaaggccctgcccttcaaagggcaatttataggtaaccacttagcattccaatcactctgtccaatttcttctaggtctaaactttcctgcttgagtttttttttttggtatctatttatttgctggccttctttatattgagcacaggcagcttagggtccctttttctttttctaatggttttgttttttttgggtttcctttgttagatgataagactgccgcaaccatgaattcattttgtgttatggtatcctttatttcttttgataccaattaactcacttttggttttggatttaactctccatgtcaactccgggagttcatactctttaaattatttggttcgttatcagatgtatttttctggtgaaggttataacaactggggttagaatatatggatattttcttcttaagtatccatttatacacagctttagggtctttacttttcattttattgatatactgatgttaatttcaggtata

SEQ ID NO: 80746 - DNA, 772 bp, Citrus sinensis
  Intron number 2 from transcript orange1.1g034467m (locus o range1.1g031418m.g) derived from phytozome v7.0 (chr-ID sc affold00088; pos 293902 to 294673 reverse strand)
gaagggtttctttcttctggcaagaacacttcaaagtaactgcctttgattttcttttactcattcttgttgtagttttatatttgtgactgtggatacatgtttgatggtttcttaagttttgttaatttgtcagtatttacactattacctgggaaactatagaaattttgtatgtagtgatgtgtacattgagaagcttggcttttaaatttttctaactgaatcatcttgactaaagctgaaactgaagcttaatcccttttgtgtgtatgtagatgatgtggtttagcttctaaaatatgattccattctaattttaattttaatttagatctaatttaaaagttttttgttgtcgcacaagtgacgggaggttaaatcttggtacctcttcagattgtggaagggaaggattatggaatagcgaaaccccttgacttacaataactcttggaatcatcagtcatggggatgtccagacagctataagcttcattgtgataaaaagtaggtagttaaatgcaccggggaatggaagagaaggtctctgttgatgaaatttacatcaaattattaggatgggtgttagtaagtgcacaaatcatgagtgtttattcattcatttattttctacagacatctattgaatactattgatttcctctatcaaattttctagactgtctttagtgggatttcttttatcttgacaaatctttaattgttatttgtagcttcaagaggcctaggaaattacagcctgaagata

SEQ ID NO: 80747 - DNA, 501 bp, Citrus sinensis
  Intron number 1 from transcript orange1.1g014633m (locus o range1.1g014635m.g) derived from phytozome v7.0 (chr-ID sc affold00006; pos 2312662 to 2313162 reverse strand)
aagtctccatacactcagtccttggtgagttctatttcgtccaagtttttatggagttctatgattctgttttttggttttttttttaaagaggaagaaaagaccaaattttctttctcgtttgtgaaaatttatttaagctttgcgtttattttcctggtttcagtatatgatttgatctatgtttagatatggaggaggtaggaggaaaagttactttctttttctttttttcttctttcttttagtgcagttggaaaaatctaaatcttttgtttaggaaactttgtgctattatttttctgccactttggtgtgtaattaatttatttggagtgttttacatttcaggtgaccggctatcaattacggtttgagctccgcgcttcaggcaattttgtaggaagtgctcgtcctctagatgaaaagtaattttttttcttatttttggaatttatgttctcaggatcaactcaaaagtctagtgtccgtctgcaatac

SEQ ID NO: 80748 - DNA, 734 bp, Citrus sinensis
  Intron number 1 from transcript orange1.1g001539m (locus o range1.1g001537m.g) derived from phytozome v7.0 (chr-ID sc affold00019; pos 801022 to 801755)
tggaaagagtcgagcgcactcgtgtcctcgctcaggtctctctccttttcttaacattttttccttcttcctctctattttttttttttttttttgtgttggaggaatgatggatgactcgatatttatgatgcagtgaacggtcttagattttaaaatatttttgagttaatagttacttatattttcatttttccgattataggtgtcgtctgttagtttttttcattttaaatttttgtctgttattgcttttgtgattttgctcgtttgttgaagaacccgatcgggatcgggatattcttagaaaaatgaaaatgaaacgtaaaagagtgttttatatatttttattttttgttttaaataaaaagtgacggtgtccactttgcttatctgttaattttgtcatcagatgaattgattcgatgatttcatattatatttattatattttctcttttttcttccatcgttattatgtaattttctcgttctgtccgtttgattgccgagataatatgaaggatgaaatagttattgtatctcatcattattagttttccttgccaaactaaatatgtacaaccttttttttgtttttcattatttttttattcttggaaaagtctgttgtctgtaacataatatcatttccattttgacattctctttgtaagcaaagagattaccaattgagaatgaaactatttttggtattatagagtgcttgtacc

SEQ ID NO: 80749 - DNA, 658 bp, Citrus sinensis
  Intron number 4 from transcript orange1.1g011760m (locus o range1.1g011760m.g) derived from phytozome v7.0 (chr-ID sc affold00040; pos 164733 to 165390 reverse strand)
caggtatgaaagttaatctaagactttgtgtttcagattgtactcttacatttgtgcttgatggcatgaagtagaacttgtttctactgccgtgcaggaaaattaaattttactccatattgtcacttgcagtgacaattttcagtcaacaaagtggatttgtaatgcatttaaaggtttttggtagcattttgggtacagctggaaggtttacatgacaatttatgtgttaatttatattaataattttcttcttagaggttaagtaaaacaggttgattgcatttttcatgcatctaccaaatttatgactaggcatagaatggaagataaatgtaaaactactgaaatatctgtgaaatgctcttagttcaagcggctgagtagcttctttgccttgaatggccggatttgggctcttctattgttgtgttgtacattttttgagaaataaaaaatgaagttagtttactgaagtttaatatcttctgaagttggttttaattaccttgaggacactgagggtgtttgatctttgcagtttattcccattttgaatggttttctttgttctgttcatttctttttaatttttttccttactagtcatgtagttaaaccaacacatttggatacagcttgcttttttcgcttgcag

SEQ ID NO: 80750 - DNA, 984 bp, Citrus sinensis
  Intron number 1 from transcript orange1.1g006326m (locus o range1.1g006301m.g) derived from phytozome v7.0 (chr-ID sc affold00089; pos 499564 to 500547 reverse strand)
ctggttctatccactatcctcgcagcacccctcaggtaaccaaactccgacaactcctttttttttttttgccattaatattgtattaaaaccttaccaagtgaagtggcattaattctaagtttacttaattatctttcttcttgttgagtgttaatggttcacaaaattcaggaattcagaataatgagagcatttcatgcaaaagccttgcctgctcgtttaagaatagcaacaccttagtggtcagataaaattgttacagatctagtctcattgcttttagaaacggtcaggtagacctttccatatatatataagttttagttacctcatgtaataatgtaaggtatataattctttcacagccgtttgatgaaaatccaacagttgtggaaataacatgattttattactttacatttctacaatcattgaatttttatcaaacagttgtaaaaaaattacgtaacttacataataataaggtaacaaggtccgtatatatattaaattttagaattcgtatgagcattactgaacacagaagaaagtctatatatctttaatatatatatatataaaataaggagacttccgcaaatgtttggtcaaactacgagtgttattattattttccctccagacaaatactctttatagatacaaaagataagactttttgggtcggagaaagtcgataggtctttatcctactcctattacatcacgggcaacagaataaaatgggtacccttttgataagactttcctttttcacctgctccttaatttttcaactttagcagctcacggtcacatgcagctcattttaattttttcgacgttagttcgacagaatatttgttggcctggctttgcttttggttactgactgatagaaaataatacaaagcatacaaaaaaaaaatttgtctgcaaatggtcacgagcaagattgaaacatcaatttgatgaatgcag

SEQ ID NO: 80751 - DNA, 850 bp, Citrus sinensis
  Intron number 1 from transcript orange1.1g010559m (locus o range1.1g010326m.g) derived from phytozome v7.0 (chr-ID sc affold00006; pos 2337134 to 2337983)
ttctattggttcggcagatactttacttgtttcgagtgagtcagagtctcgtacgctcaatttctcccttacctatcattttaaggattagcaaagctgaattttttttgtttttttttttttttttgttatttgagtattcaatggaagggtgttgataattgttttgatagaattatggggtgttatgtgatttgcttttctattaattctaggccaccaatagtcatattatatttggaatatctgggaattgggcatttctttcaggtgatattttactctctggttggtcagtcattcaggattgccttcaattctttgattcatttgatggaagaaaacttatttttggtattttaattccaagctgatcatatggctttgataattcttttacatgttgatgcaaaatgattaatgattgaaggatgtcttgcaatctcacgtctccatgtgttcgtcttttaacctccatatcaccttcaaatattatttatttactattttctcttcatctgcatggatataccactgtagccttggttcttttctattttaggatttaggatttaaatttcagataaaaaacacttcatgttctgttttctgctctgcaatgattctgaatatggtctcccccaaattcgtctcactgattgatgtattctccttttatctgttaatgtgtgtgaacttcaaaaaatccatgatattatatgtagattttcttaaagttgtcggtgatgcagcaaatacacactggcatttctttttccctttctttggtgcctaattgagtgactttgtggcagggagaggtttgccatcctgctagcaaataatttct

SEQ ID NO: 80752 - DNA, 630 bp, Citrus sinensis
  Intron number 3 from transcript orange1.1g010559m (locus o range1.1g010326m.g) derived from phytozome v7.0 (chr-ID sc affold00006; pos 2338329 to 2338958)
agttgaagtagaccagaaaggcaaaaaggtgataggtaaggttgcctacctgcaagcactcatcatgagtatgttttgtgattgctactgggaagtttgcacttagtaattacaattgattgctcagtgtgtaaagtacttcatggtgacatatcaaaaggatacagaatgaaattgaaaagtaatagaatgctgatagtactgatgattgattgcattttttattaagtcttcaacttttgtcaattagatctcttcatcctcattggtcaaattttgctccacaagttatgggcaagaacacaagttatttctgtccttattttataattttatggtgagtctggattatgaacttatgcctttgactaacaagtaacatctggctgcgttttgaatgaaatcctcattaatgactgttagccgtaaaaatgaatggccttcgtataaactttgtttgttaattgagcatgcattatgcataagatcaacttaagagaccaactttgtatataactgggcactgatttcaatttgattcagacatttctaattttatattttctttctacttagtctcatcaatgtttatgttttagaaaatgaatatgactcagaggacgatttaca

SEQ ID NO: 80753 - DNA, 875 bp, Citrus sinensis
  Intron number 1 from transcript orange1.1g035183m (locus o range1.1g035183m.g) derived from phytozome v7.0 (chr-ID sc affold12519; pos 943 to 1817)
ctgttttcatctacaaaggcatcgtcaaagaattcgtaatttctctttcccgattttcttttcttagatctaagctttcgaatcgatatcccctcccagtacaacacctttgttgattaactggaaaaaattgtaagtaattgtcgtttagggctagaataacaattgataattgttcaggattaaagtggtgatttgaagatattactgtagttatatacttttgctaaattagacgagaacttgaaactatgagagtgagtaatactgcttttaatattttgtttttaacaatttacttgtgtgtttcgtttctgaattacaactgatgaaatggatgagtttcaattaacaattaatattgactgacggcttgccgtcagtgttgccttgccatctggcacggggatttttgttttgcacccaatacttgccctgtttggggtagcactagttaggaattctggtatgagtaatattattttgtcccaaacttatcctagttcgtgcggcattatatcatatggatcagtgaatgatgtggttaaactatttggtttgagcaaatcactgaggctgagaaattgggataagtttgataagagcggtattaatcttttgtcattcctacaatcaaccttgccgaaaggaagtgtgcaaccaatataaatgcatggggttttaatgttacgttgcaatattaaggtttaaatattagcagaggcttgatttttcttaaaagtttagtactgagtatctccgattaattgggcacaaaatttatttataaaattatttgatctcaagttattttctttgatgctttgttcaattattgattctcacgacatatttgctgaactctgtgacagcac

SEQ ID NO: 80754 - DNA, 425 bp, Citrus sinensis
  Intron number 1 from transcript orange1.1g008548m (locus o range1.1g008548m.g) derived from phytozome v7.0 (chr-ID sc affold00054; pos 651976 to 652400)
gcggttacttctgctcgtgtatgcccatcgcaacgcgtgatggcatcagattgatatttcagctatatttaaaataatcttttaagaaaaaattaattaacttttctgtaaaattatgccttagacattatgttgtatttaatttctttgatgattactttttgtggtttcttgtggcacaaggtagagccaaatcaagagtttcacgggatggtatgtgaaggagcaaatgttcttccttcaaagtttctagagcatgcttttcgcaatagttatggtagacttcttacttattctgcatatctattatgtttaaaaaacatttctatagtgtgccattttggaatggttcacggagaacattcattgattttgaattttggtgtcaagctgtgcaggaaaaattatcaatataaggcgtttgg

SEQ ID NO: 80755 - DNA, 411 bp, Citrus sinensis
  Intron number 1 from transcript orange1.1g024627m (locus o range1.1g024627m.g) derived from phytozome v7.0 (chr-ID sc affold00091; pos 304555 to 304965 reverse strand)
cacaacgcaattgttttcatttgattcaggtagaggtaggtaccacttctctgtcttttgtcttcattttgataattatttttctgaaagttctatctgggtttgttccgtttaaggtactatcaccacactctgttttatttgttctggtttttatctgggttgggttcaatctgctgtgttgagtagtccagatggtgatgacgacgacgacgacaagtctttcttgttttgtttctatgtttagtccgtaacggtttatctgatttgagtgacagaacatggtgttgggttatggttatgattatgatgccttttatcttcttttgtctgttatgtgatcagaaatgtaactgaattatcagctttattgggtattattaggctgtgactgaagagagttggaattgg

SEQ ID NO: 80756 - DNA, 292 bp, Citrus sinensis
  Intron number 1 from transcript orange1.1g009614m (locus o range1.1g004410m.g) derived from phytozome v7.0 (chr-ID sc affold00009; pos 1845039 to 1845330 reverse strand)
gcggggagcttgactagaattttttgttgacccaggtcagcaaatcacttgcttgttttgttttttgattcgatttgcttagtaattttagttagatgcggttgaaatttttggttttgtcattcttgtgagctgtttaatatgttacaagatctgcctacgttagatcgattttatttattgggttgtttttcttctttaagcgaccgtgatatctgtgttatttaattggaaagtttgtaaattgatagataaagttcccttttttatacatattttgattcagaagtta

SEQ ID NO: 80757 - DNA, 486 bp, Citrus sinensis
  Intron number 1 from transcript orange1.1g031491m (locus o range1.1g031209m.g) derived from phytozome v7.0 (chr-ID sc affold00077; pos 9541 to 10026)
ctgtttctttgcaagacagtgagttactggttcctctactgtagtcctttgaattttgtaaataaaaatggacattgttattattttttgctttcaggttcttttcttttttatggggtttatcgtcagttatggtgtatgcaatgtgtagctcaccaaattcttttgttgtttacgccgaatcagtatctgatgggttttaattctcattcaattgcttattcataaactgtgtccaaaatgaattttttatcttaaaaaaaaaagatttttccttttttggataattaccaaatgaatttgtatatgaagaaaatttctttttggaaagagagcttatcaaattgtaggctcatcgatataatcacaatcataagcaatgattagattttgtcctcagtatatcagtttgtttctcatttctgatttctagctgccattttgattttaggtttagctggaaaacctctggccaacgatcattcc

SEQ ID NO: 80758 - DNA, 643 bp, Citrus sinensis
  Intron number 2 from transcript orange1.1g000456m (locus o range1.1g000456m.g) derived from phytozome v7.0 (chr-ID sc affold00028; pos 514222 to 514864)
aagagataatattggtacgtggttagtttaatctagttatgactgttggcatttatgtggatacttcttttataattgtttgatgggaccttgttgttggaaatgtagattgagtgaactgactattaagttcattggatcaatcacctctgaagaattagggtcaattttgccctcatggaatgacaatctttaaaatacccccaaactattgtaaacctcaaattaccctccatttttgttaagaagacaaaaaaaattttcatcaatgtgcccccatttttgtttaaaagaaattttcttttatcttttaaacaaaaatgggtgtaagttgaggttaacaataatttgggagtattttgaagattgtcatttcacgaggggtaaccagatatttaccttttgaattatgtagatgctttatttatccatttctttattctaattacaccttaaagatgaagtgcgaattagtctaaaatatttcagattggcttactccagtatcttatttaagaataaagattctttccatgtgccttgtggtgttattaggcttatctgtaaatcagcacttgtttaggattttctagacttgtgggtatgtgtttcatgaccactgtatcttggtttgcagccaaca

SEQ ID NO: 80759 - DNA, 460 bp, Citrus sinensis
  Intron number 1 from transcript orange1.1g033425m (locus o range1.1g033425m.g) derived from phytozome v7.0 (chr-ID sc affold00068; pos 332125 to 332584 reverse strand)
gagcccagtttgtcaatcattgccgcgcttcttgggtatttcttttcttcttcttttttttttttggctttttccattcgttcctactttattagtattattccaattgatgcttgattctgtaatgagtcttatgggttaattgcatttaggctttgcaatttttaaaaatttatacaaatctataggagggttatgtgaattgttgaattccaagggagttatttcataaagtttggattttgtatttgattttgaatatcaggtagggcattatcccttcatgtcaatgaagcggttgatattgtccctatcttatgagataagcttcattaaattagcagtatttttcttctgatttgctaattagttgggacggagtagtgatttaatttagtttattggttgttaatttatgtggacaggtgaagcattttgatagattgtactgcaagaacaa

SEQ ID NO: 80760 - DNA, 603 bp, Citrus sinensis
  Intron number 2 from transcript orange1.1g036935m (locus o range1.1g036935m.g) derived from phytozome v7.0 (chr-ID sc affold00598; pos 32682 to 33284 reverse strand)
tagtttttcacttagttacactatccaaatttaaggtaatagaatgaacctagttcatatgttttttcacctttcaactttcattttctctcaaagcatgattccagccactattattctaggactgtaagtcagaatagagtgagtagaaggtgaaattcagcgcttttcgaggctatgagattccttgctaaccaagtcttgcaaaatgcagcagctaaaatctttcctgaacacaaaaaggctaaaggaggtattgaaatgatagattttagcatgtatgttatgaagttttagaagaaagaaaacaaaagcattagtgacgatgcccataactgctgacacatggctggggttccagcccaaccattgcaactcataaaaggagagccaaaatgtttcaataacttatccagtgtgtgttcgtagataaagcttggtagatcttactggtgaaaggaggtcttttcttccctgcaagattatcaggcataattccatgatatttcaatgcatgaagaatcttttctattcataatacatctcaaatgcttattgttactgacatctcataggtgtacattgtaagatcaagaggttcag

SEQ ID NO: 80761 - DNA, 815 bp, Citrus sinensis
  Intron number 1 from transcript orange1.1g006418m (locus o range1.1g006418m.g) derived from phytozome v7.0 (chr-ID sc affold00009; pos 1061741 to 1062555)
taactctctaggtaatactctttttctcattactgaaggtagcataaccttttgatgtaaacgaaatgttcatttgcttgaagtatttactctaattatacgttgagaaagcacatcttgtgatcatcatctttattattaattcttgtgtcaaaacctgaagggtgacatggaaaattttaaccaaaatcagcaaatatgtagacatcagatgttggcagtatttcttaaatatgatgatctgttgaaatctggcattcactctcctgtgtcagtgctgtttctctgttttaaagatcgttttgagcctgaattggaataaatttaaagttgctggatatggaactgtacttggaatcagtcaaccagactggcatattatctacccttctaataaagaagagagacacaacatttatgaaaaacttcatttttccttagtagtcaaatactgtagtatgtagtcaaatatttaaaacgtttcctctagaagaagatgagttagtatacaatgttattttgattgagcacagtgagtccaaacggggtttaaattttcattgccctccattttcaatacttatgaggtttttgagtttgccagattaatctgaaaaatgacattatttaatgggaaatgtttattgcttcgtttgtcaagctgttagttatattcttctttgaggatataattgggtgatttgtaagatttcacattctttaatgcaaaatatttgcaatatatacatatatatacgatcggggtgtttatattgatgttatacctgattttcatcatattcattacagaaaaa

SEQ ID NO: 80762 - DNA, 845 bp, Citrus sinensis
  Intron number 3 from transcript orange1.1g030192m (locus o range1.1g029675m.g) derived from phytozome v7.0 (chr-ID sc affold00028; pos 59539 to 60383)
tcggaggtcaggacaaggtaagcatgcatctggaatttgaattcatatttttcccaaatagaattatttagttgagaatgacaatttggatcttgaataattgccaagataggtgaaaggtgttgtttctatactctgtgcgacaacatacgaagaccctggggaatgaatcatctctgatatgatgaatcgaacttaactattgaaattttaaattctaatctctgtttctctttgtaaaatgaacaataagaaggctgtgaacctctttgcaaggcttctatattggttttggtatttattttctaggtttactacccatttgggaattgcatgttggtccataattatatgacaaataattttatgagtaaatttagtgataaagaagcagaagattaggtagaagattagacaacattattgttgaatgctccatgtctatttagtttttgtctttcattttctttttcatgtaataaatatgcatttgaccagagtcaccagatgttcatttttacttttagagacttttccttgagaagaaattcaaaacttattaaaatttgcaatcatctctgtgaaatagctcatagcttcctagaatataataccgaagaagaagtaattatcctaatattggtttgattccagggagagcattgcatttccaaatgttcctacatgggtaaataattgtggacttattgtagatgcttaatgttttttggggatagccaaaatgagtcatttttttagtaatacgtgcctcatcattttgtgacaaatgtagctttctttcgaatgtagatccgtccattgtggaggcactattttcagaacac

SEQ ID NO: 80763 - DNA, 702 bp, Citrus sinensis
  Intron number 1 from transcript orange1.1g019381m (locus o range1.1g019381m.g) derived from phytozome v7.0 (chr-ID sc affold00013; pos 1253450 to 1254151)
gccctttccctgttgaacagcttcaggtaagtggtagcaaatatttcgatattctatattaatcttcacggttgttcttcaatttttgcctaatggggaataatttaggattaatacccagatgagtttttcctacatttgtcaaaaatgtgttctttatctgttttcttgaaatgggtttattagtttttcctttcttggtgatggcaaaagtttttttttttcttttttcccttcttaagtcacttgaaaatattttccttgattatgtaattgatatgggttgtttttattttgctaaaaagatggcttctttatctgcatttttgattggtttactctagtttccttgaatgtgatgaaagctgttatttctttttattgaattctagggttaattttcttgtaattgttgcctatattgtgaaattgaagcgtttatttaattctttataagattttcactcttgtgtggtgtccttcaagacacgactttccctaatcttggcctagtcttttgcttgggttgctcaaattagttatcatggatgaatttgtttttaatctttgaactaagctgttatttatcagtattctgactcggccaatttggatggtttgttttcacatgcatttttatgcttaataacatttttggttcttctaatgctcgacacaaggcatcaggcattgctgctctcg

SEQ ID NO: 80764 - DNA, 704 bp, Citrus sinensis
  Intron number 1 from transcript orange1.1g003733m (locus o range1.1g003143m.g) derived from phytozome v7.0 (chr-ID sc affold00140; pos 182813 to 183516)
tcgcttaaaccctatttgtgtctcttcttggaaaagtgagtttttgtctttgttttttcaattgatatttatttttatgcgatcaatttattcattgagatattttcgtgaatgtttccagcttgattaatttgagttgttttgttatctttgactttgatatattaaacttaattctgagtttgatgtgtgatttgatgttttctgtttcatgcttgaattagatgatttcattactgattttttttttaatcaagtttgtgtaactgatgcaaaaaaaaagggaaaaactctgcagaaaccataactgccatgagctgtttgagtcaaaagtgtaatttgctttaagttgattaggtgggctgctactgattttgtaaccagaggaaaattttaagaacttcattttaacttgatagctgatgttaacgctgctgtttctaacagatttcttataagctttagatccttcagctatccccagagtgcagtatttgacttacagaagtctgatatctgagtaaaacaaaggtttgtatggtaatatgattgatttactttttccccaaacttgattaccggtttgaaagttgagaattctgttcatttcttgtgaaattagttctttttttgttattaaatcttcttctcagacttgaatttatgtttaaactatatgttttggcagttgaggagtttttggg

SEQ ID NO: 80765 - DNA, 542 bp, Citrus sinensis
  Intron number 2 from transcript orange1.1g029428m (locus o range1.1g023843m.g) derived from phytozome v7.0 (chr-ID sc affold00076; pos 411409 to 411950)
aaacccagaatcggaaacccataactcgatattgggtaactataatcctgcttgcttagtcacttttgatgctttcacaggtgaaagagaaacaaaatccttttgcagttataatattagctttcaagtgcaaaagttcagctattgagtggtcttcttgtgccccatatactgcttgattattattttggagttcgaactttgaacacactttcttgttttgggaaagtaggataagtattttctgttatattctcgtattctctgtttctacgctggtgagctttgttatggatttggcatgattctttagcattttggagggaattttttctgtttctatgggctgaaactaatgtgccttttctctgcaatatttgggactgttgaaagagaattgctttcaataggttgatcgaagtacaatgcttcaatttgtttgttttgtgttagctctttagcatactagcattgtctgattttgagtgggatgtttcttccatacaggaaagcgaaaagagaggcttgaggcagagtctgat

SEQ ID NO: 80766 - DNA, 967 bp, Citrus sinensis
  Intron number 3 from transcript orange1.1g029428m (locus o range1.1g023843m.g) derived from phytozome v7.0 (chr-ID sc affold00076; pos 411988 to 412954)
atttcaggtacttctttcaagtctatattttcattcgctatttggtggcatttgtggttgtcagggacttgatatttttcatcacttgtctcctactgtagggagcataataatcaaattgtacatatgaaaaggaaagacctaacactatcaagttagcatttttcatcatttgggtagcaggaaaaattagattttaggctattaaaaaaatgttatatttgaagctttacttgagctttaatgtgataatgttgcaaattgtagtcttttcattcttttgttcattataaattttcagctaccagatggtgcttcagaattctgcaaatcaacctgttagattatgaagtaaattatttggatttagattttctttttccacaatatagcaaacttcctggtttaaaagttctaaaggggttccataaacaaagtcttcctccttttaggaacccacagtgataagtgttgaacaaattataaagaatattatttgttcataatctatcttaggtgtgatggtgctagttgagtcagaaaaatttgaacattttgaattgaaataatttttttttttcaaaaaggaaaagaaaaggaactttagatacaaggcctccatcttggtttatgtggttttgctaggataaaacaggattttacctatcctataaactaaaacaaaaaaaaaaacctaccttaatatattatgtagttgtctgcagagctatagagataaaccatggagttaagagatcagcaacaattgtcagatctaataaatttcatattacttcgtggtgtgtttagtatggtcattttcttgtgttattggcacaacagcagagcttcatctcgcagcctcgtagttcataacactttgttatggttgtccattttctattttttttaccttttatctgaatgcagcaaagcctaacaaattattgatttgacagtttgacag

SEQ ID NO: 80767 - DNA, 957 bp, Citrus sinensis
  Intron number 5 from transcript orange1.1g024898m (locus o range1.1g017540m.g) derived from phytozome v7.0 (chr-ID sc affold00099; pos 51547 to 52503)
ctgcaggttggtgatctatacttatatctgcaaatcctcagttactgatatttcttgcattgtagttgtgttacattacttgtgactacttgtttctgtctgatttggattaggcacttttgtcaagttattcctctttaacttttagccattgtcctgctcttgtgcttccatttactggctatagggacacattaggtgatgagatgtagctagttttcttttcctccctttggtgatttgatagttcaaaacttttaatcaattagaatacttgtaatccttatcatttggaaatgacagattatcatttttctttttcctttggttattcgagagcacaaaactttcaatttattattagaacactactattctgtcattggacaagaaagattattatatcacttattttagatgtttattaaacttgaatggtctgggtactgtatgtgctttaatgctgccacagttaattttctactgggtgccttgtatttaatctttgagtatgcaattaagtctcgcgaggagtctgttcaattaggctgctgttttagaacttaaattatcttattatatcttacggagttattttcgtagaacttgtgatgttggaggtaaagaatctttctcaggattctttgttgtacgatatatatacatcttctacaattgtttagtgatggttcaattttccattggtaacatgtattgagttccgtgcatttaagtgcagccatcacaagcttcctttgattttatttttgatcatgcctacaaattggcctcaatcaattacaaatataggccacatggaattacttaaaagagagaacttttgcaattggagattgggatgtttgatggcgtgttatgtggttaatccattcctgcatggtaactgatcattgatctttttcaccatcttgcagtttgcaagaagcgcagaagagg

SEQ ID NO: 80768 - DNA, 944 bp, Citrus sinensis
  Intron number 2 from transcript orange1.1g039261m (locus o range1.1g039261m.g) derived from phytozome v7.0 (chr-ID sc affold00087; pos 98654 to 99597 reverse strand)
tccttaatttggtaatcaccttttacttttttccccccctcttttcatgagacaattatatgttaatttcttcactatagacttttcgtatgcacggaatgatttagaaatcagtttagacaaatcaagttaagtgtattttgatgcttttcattctctagcccttttttatttgatcttttgatcatttgataatcttctgaatggaatgactgtattcatttgtgctaaattgagaataaatttattatgctctgtttagctttcaatggaggtgataactttgtccctgcctgccattttaattagtcgtggctgaaagatgtggaattctttacatggttgcttagctttttagtggaggttcgactgtaaagaagttttgtcagacaggttacatgttatcaattatgaattgcctatactattgttgatttggttttgttgcggtggtggtactgctgagttttaagccgtagttgggttttgataactaagaaactctttattaacttgatcatttcaatatgtatttctactaataataaagagttcctattagttttgaaaaattctatttgataagctaggaattaagtgaacattaataccaggatgaattgcactgcttttcttatccatgttgaaattgactgcataagatattttctatattttatggaggaataataggatcatccactaagctgcttcatttcttttgatttaaactgttaaatttaaagccaacattttcaaattttgtttcatttttgctccattgtaatagttattagtcaagttgggaagagtttctgattccattggaaaaagtagtcgattcaagtagacgaggtagccagcagagtcatctactttttgtttaaatatattttttctgttttgcaggaaaacccagatctgtggaagtggctgactggcca

SEQ ID NO: 80769 - DNA, 829 bp, Citrus sinensis
  Intron number 1 from transcript orange1.1g004973m (locus o range1.1g004963m.g) derived from phytozome v7.0 (chr-ID sc affold00013; pos 1839312 to 1840140)
aatatttatctttgataaattttgcaaattttgaggtaccactctcactctaataattctctttaaaaagattttatgatctctgtgttttctttttttggttttgtaatctgggttgtttttgtatttttaaaatgtcaattggcttatcattagatcttgattgatgggcaccataacttgaacaactggttttctatatatgtaaaggttcaatggatttgtatgattagtttccttcaactaaactttatcaatatttggaatgttgtcaatttttcttcatctatttagccatgtcgattttctgttgctacctctccacccctcttacaggataaaattttgggttttgttgagacatttttttttttttgcctttttcattttggaaaaaggtaaagagataatattattgcattattgaattatgacatgtttttagatatcttacatgggtgttccttcatctattccgggcttatctatatgcaactttgcgttgattctctttgtgtatatatcaaatcatttgataacctctagtcaaaattgcagctttatactccttctgggtttctgagtagcaaaactgggatttttattttattttattttatttgttgtttctgggttatttttagtcttattacggaaacccacatgagtgcacacctgtatttgaacaagttttttgtttgaatataatcttccatcttatctgcagctaaatttcatctccgtcattggtcattttctgattccattgtgtactgtgtgaacgaatctttcaggcattaaaccctttgcggaagactttgattctacg

SEQ ID NO: 80770 - DNA, 787 bp, Citrus sinensis
  Intron number 1 from transcript orange1.1g022890m (locus o range1.1g022890m.g) derived from phytozome v7.0 (chr-ID sc affold00031; pos 404775 to 405561 reverse strand)
tccgtatcgagaccaaaaccaaggtatcttttctatttacttttgttttcattttttttttaattttgtgcatgtttacgattgcttaagccctaagtttcgatcttgacttttattttagttaatgatatgtcgttcttttatttttgctatggattttgtgagtaaattcttgtttgttagtttaattgaaagatgtgtttgatgataagcgttcattaaggttagcccaaagttgatagaaactttaaagatgaaagaaaggtttgtggtggtgttgataccatgatgtgcatgatgagtaatggtatgtttggttgtgtgagcatgtacacttgcgttccatttcttgattcgtttatcaattctttctagttgggtaaaatccattcggaaagtgatgattatgactttgttggctgtgagagggtagagctgtttgaaaatggagatttggatatcacctagttggagtgtgcttaagatttaaattatatgcataaatttgatgtagttgtagaccgtggaaggctagcttatttgatgttttgcactttttacttgaattgccttatatcacaaatcggtctggaagaacacgtccaatgctcctatctattttgtcagatacgaggtatcaaagctaaagaagcaattccgatattaaggaatatttctacccttcccctaggaagacagccccaaccatgtttttctgtcagcatgtcagtgagttgagatgttgtggctttgtgagtattaatacttgtcttccgcttgcaggaca

SEQ ID NO: 80771 - DNA, 652 bp, Citrus sinensis
  Intron number 4 from transcript orange1.1g008338m (locus o range1.1g008338m.g) derived from phytozome v7.0 (chr-ID sc affold00013; pos 1334054 to 1334705 reverse strand)
gaaagtctaggtaactgaatttgatcaactatctttcaatcatatatttgagtttttgttttaattcactatctaataagtcttatattatgtgcttcaactttggcatctgttgcacaatggttgaagttccaccttttggaatctggaactcattggtaggattaattttcattttttgtagttacatagattaataattattttggtatgttttatacaatggaagctaatacttctgttgatttattgaatctttccagtccccatatgttaggttataaagttgatgttcattgtcttgcacaatcttctactttatagcccctattgtgtaatatgtagctgcagaaaaagcgtatcaagcattatactgatatacagtattttaacaatggctgctttgagttatgagatttaggctccagctgggactgctgcgcagaggcagcacgcatcagtaccaaacaaggccttagtttatgatagattatagcaccgtttttatgtctgagatccaggggcacaaaattttctcaaacataatcatgcttttaattgtgtattttcctctttatgatgtggcttattgatatatgattgtcattttttgacagaacttcgaaggaagatcaacaattgtcatttcgca

SEQ ID NO: 80772 - DNA, 872 bp, Citrus sinensis
  Intron number 1 from transcript orange1.1g005116m (locus o range1.1g005092m.g) derived from phytozome v7.0 (chr-ID sc affold00096; pos 81638 to 82509)
agtcttccgctaccggcactatccctcctcttcaggttccgatcttcgaagttttatcattgttttgaaagttgtttattttctgtttggttcttgagaaaatgcaggagaatggaaggaaaaaaaaagttgaatctttgtgattgcgttagttggtagatcataattttctgcttccgatcttcgcggttcttatttatttattattttaaaaaatgttttagactgtttggttgccgacaaaatgcgggaaaatgaaaggaaaaaaattattgaacatttgtttactcctgtaagttaacaaattaagtggtactgatgatgtgtattgaggtacattagactatgttattttacaaaataaattttgtgatttaatggaaatgtgtggattgcatagatctgttgctatgattatcgatcgtttttcccctcatgttggttgcttcaaaagtgcaggaataaaaaaaaaaaatatgaatcatttattatgttgattatttgttatatgaccttggtgcataactgttctttatatatattgtagatatcttcactttattagagaagaattgagtttctcttgatggtgcatttggtagatctgatgttacaacataggttttacatcccatttggatgctgaaactaaagaaaataaaagattttatttatttatttatatgtacttggtttagagtaatctgatctactggaatagtacggttcttcaatgaaggttgaatttgagttttgaagtatatagttagatacgtacacaggcactcacatttatatattcattacaaggttaatttaggattattctaagttgtttgacaatactgcttgatagcaggactacaatttct

SEQ ID NO: 80773 - DNA, 934 bp, Citrus sinensis
  Intron number 1 from transcript orange1.1g021666m (locus o range1.1g021656m.g) derived from phytozome v7.0 (chr-ID sc affold00091; pos 320619 to 321552 reverse strand)
gcagcacatcactatactctggatctgaggaataggttattgtatctattcttaagtatcctttgtgatgatggctttcattttctttaatggtcttaaccgcaatgtatggactgctttagctattttgatactgatggtaggatatccaaagttcccatgtaactttgttggtttgggtgagggttggaagagatttactggtatagatttttatcctgcatttgtctgcacatttgtcgttgctttctactgtttacatttccttattcactttcactggactgctttggcacgtatgaatactgttttctctttccagaaatggagaagtcttgaatatggtgcttccaggatgttttgtgcatttttgaactgacgatttgaaactgatatattttctttattgacttcaaaaactttcagatattagtaccagttacgatttcatttcttttttcggtataaaacagttattgaagtacatttaagaggtttatttcttaaaattcaactactgcacataattcttgtttgcaatttacagaaacaattttcttttttccttaaaaaaaaaatatgttatctaccagatcctatgatttttggttggatttttttgtttttttacatcattctgtcaattgaatatgatttacaagtttattttaaaccttcttttcttgtagaagtaggaatcatgacattatgaatctataatcagagaaaccattttgttgaatatttttatataacttctcaattttttttaaaagttatcaaatagcctttgatgatgaccaaaggtttatattaatatgctatctaattgatttgtttgccagtatgccaggatagtagctacgtggaattctgggtgcaagttttagtttttgacttctgagactttttgaagggagaaagagaggagagg

SEQ ID NO: 80774 - DNA, 851 bp, Citrus sinensis
  Intron number 1 from transcript orange1.1g009071m (locus o range1.1g009071m.g) derived from phytozome v7.0 (chr-ID sc affold00009; pos 727463 to 728313)
caaagaagcctggttgtgagaacgacttcgttttggtatcttcttgtctacccagttcttagtctttttgattctcacctgccccccttgttggcttagttatgtaagctgatcatgatggtaacaataatcaatttgcttatcttatatgtgtttagtttgaatttcttgtattttgcagctaactgttgctatttatatcttgattgagattatgattatggaagtactttagctggttttccattgatttttgtttatcttcggaggacttgattcctggggaaaaataaaataggcataaaaaggtgaagtgggtattgggttgcttgtgtgattgattttttgatcgcttgtgttttctggacttatgcgacttgtattgggtgcatgtggtttcaatcaccatgatgcttaccagtaaagttgcagatggtgttatgttttatatctctcaattcaactgctattgttcacttgggttatctggtcttgagaaagttcaaaactagttggagtaataaaataagatgagagccacctactttctttttatcattattcagttacctacctcttttctttcttcatgtttatcattttggtttgcggctgcttttgggtagcttttattggaatgacaactacaaattctctgttaaacatgcttttgggcacacaatgtgatccgcgttaaagatagtagtaagctatatgtgttttacagaaatgttggcatcgattagcttactgtatggattgcctcctttagctttatgatgtttttatctgtgcaatttaaccattaatggtcattgcattttgttaggtaaaagttcagacgtggattg

SEQ ID NO: 80775 - DNA, 912 bp, Citrus sinensis
  Intron number 1 from transcript orange1.1g008978m (locus o range1.1g004709m.g) derived from phytozome v7.0 (chr-ID sc affold00019; pos 401431 to 402342)
cgaggtcgttgattggcttaattcaattgtttcaggttgataacttcctcctctttataatttttctgggattaattctgttgtcgttaaaaagagagagagagaagtctgggaatacgtttgttcctgtctgcctttcttcttcggggtttaggttttcggagaacaaaagttttattttattagatccgggtggtcacatctggggtgtcttttgatttttgttgctttcaaattatatatattttttcccatctcataacttgcttcatatctctaaatattttttttatcgtatgactgtttcaaattatattaatttcagtcttataaactgctgtttctctccaatcgcaattttttcccctgagattttgacgaatctgggaaattttgctacttttttttctggttcattgtttgtgaattgttcgaaatagatattgaaaaaccatttatttgggtgttatatttggaaaggcgaatctgttttatattcttttaattttcagtacgaagttttgtgtgcttttgaaattcacattcgttcctacctcttggttatcctccggtttttgccgatcttcttgtgatttccctcctgtgaggtgtttctgaattttttttgggttttctataaaattgatatttcaagtgaaatatttagatttagattcacgttgttatcagatatttttatttcctcaaaattaagtgtctttattttgttctttttttcatttatttttatatgcataattctttttggtgtttttatgtttaggtatatttgttgggtggtgtgttttatgtgtagtggttcttagttgttaccccatttcctctccctggtaactgactatgatctggactgcaggattaccagtacaatttaaagagctggttgagatc

SEQ ID NO: 80776 - DNA, 687 bp, Citrus sinensis
  Intron number 2 from transcript orange1.1g027630m (locus o range1.1g026534m.g) derived from phytozome v7.0 (chr-ID sc affold00006; pos 1648540 to 1649226)
caggatcaaggttcaaaagctcatcgcggaattggatttataacttttgctagtgcaggttgaatgatctcatgtttaccttggtgccttctcttaattttaatttttttttcatttatgtggtaattttgttggttggtcatccctccccagttgttgataaaatcccagttttctcgttcgtaactaagtcgatatttttggtgaaaggactatgaagatatcacttccattttgaaatctagaaatgtgtatgtttaaattttgaaatttttggtgttataattatttgcagcaatcattatttcattagataagagagataagccatgttaactggtcaaaattattcactccggtagtattgtgtaaagtttgatataaaaaactactcgtacagaatttttgagtatccaacttgtgcaacaaattacatttcaatgatatttggaagattttcaaattatcttgtgttttaggaattaagcgaatcgtagttgaagagagtattatttgaataaattgttttttaagcttattctggacttcagctattgctagatgcaggtgtgatttggactatttgccttgttttccctaatgttttctgcttgaaccagaaaatatcatcaatgaatgcaaggatgtaacacctttttctgtgttacagattctgtggagaattta

SEQ ID NO: 80777 - DNA, 980 bp, Citrus sinensis
  Intron number 3 from transcript orange1.1g015955m (locus o range1.1g015955m.g) derived from phytozome v7.0 (chr-ID sc affold00171; pos 201616 to 202595)
gagctggagcacgcaactggctgttacagtttgaggtaatcttttattaatttgtttagaataataattaaaagcaaaaaaataaaaaattgttaaaaatggaaagcggacaaaaaatgattttgtccaatggttggtggccaattcagcaattctcggtaccggctattttggccaaagaggagaagatgcgacgactgtggtcgttttattggtgtaatggtgaatgattggatgtgtttgttaaaatcaatacgacatcgttacaacttttattttgcagtgcctagtgtctcgtgcatgttgtctttttgcaacttgtagttcactttattctgagtggtgctgccgattcggtggcatgtattataagcgaaacacaaaataaagtcttctttacaattgtagcggaggcctaagggtggctaaaaattttggaatcagtcaaaagtaccgaatatatagtgctcatatgatttagaatcttaaaatttattaaaatttgtaataaattcaggattttagattaaaacatttcgatctctttttctctctatatatatatattaaattatttaagcggttgttcaattatgatatcatggatatatttcatttgtagctagataccttttaaatctttaatatatgtagtttgtaagtatttgagtaaacccatgttactttgctggtcctattttggacttgcaaaagaagtatacggaggattacgcaaaggacagcttcatgtcccagaaaaacaaaaagtcatgtaaatgtacatagaagagtaactgctctataccaaactttgaacctacggaagaataaatagcaatgataacatattaaatctcctttaaagaaaaaaaaaagatgacatattaaatgaactaataatgtcagttagattggtgggtcgttgacattaggattctcattttgaccattttattattattagggtggtgggtggtgta

SEQ ID NO: 80778 - DNA, 677 bp, Citrus sinensis
  Intron number 1 from transcript orange1.1g005768m (locus o range1.1g000815m.g) derived from phytozome v7.0 (chr-ID sc affold00018; pos 810108 to 810784)
catcggcagaagctgtaagttgatctttatctctctccttctctccctaattttgataatgccatttaattgttagctacataggactgctagaaagtttgaagtattggctttttggatttgactgatggcttatcatatgcctgctgatggaaaattcttcggaaatgtttttaatacatttgatgatggctaggtggtgagaaaggaataagattcaatacttgatgttcttttgaatgaatcagaagtgataattatctctatgcaccttttgctaaactggctcgtaattgtattggtttactgcttttcagctaagaaatagctaaaacaaagtggattgttttctattcttaaaatcagtagagttgcaaataatgtgagcgagcattgcaaaatataagagcagccttgaactagtgatcagtgaagcataatgttttcttgattctgttttccatagtaaagattactttcttttttaagcttggaaacaaaataagtagatgtaactgtaaatatcgctgatacttgtggctatgattggtctaataatattgatcagtccttacaaatgtgtctggataaggttcttattggttcactgactgcttgaaagtggttttgatgatttttagtttatggtattattgtttttaaaatgtttcaggcta

SEQ ID NO: 80779 - DNA, 715 bp, Citrus sinensis
  Intron number 2 from transcript orange1.1g005768m (locus o range1.1g000815m.g) derived from phytozome v7.0 (chr-ID sc affold00018; pos 810888 to 811602)
aaagtttgaagagtcaaacatttgtgtggcaggaggtatgaaggtgatggtattatgatagttgcatagttactctatgtttacaacctttcctattttaagctaatgacgttcaattttagattaaaaatgcatgttttatcctctgtaaataaattgaggttggggtttctggactgattcataattatcaccctttcatcatcagcagaaagcaatatatatgttgttgcttgattattttggctatggcctatgctattgtggaacaaagtaggactgctaaattttgaaatgaaatgaacttgtatggttggcaatactgaaaccgttattcaactatacatatggcctttcatttagtctgcccaccataatatccttcatttttcctttaattactgatctaattcctgggtttaatgaaatttttagtgctatgtatgtttggccttcttctttctctaaatgctgcttatttcttttcctgacatgagtggcacatttctttctgtgcttagtgaacatgagcacggcagtttcatccatgccacatgaataattgagggtgtgtaggggttgttagttcaagttgtaccatcaaggatgatatggcaagttagtatagaaatgttcaatcactcttgtattctttttgacatttttctgtgtctttgcagaacccgtgaaagtggatattgaatttaagaaccct

SEQ ID NO: 80780 - DNA, 990 bp, Citrus sinensis
  Intron number 2 from transcript orange1.1g027895m (locus o range1.1g023717m.g) derived from phytozome v7.0 (chr-ID sc affold00408; pos 37882 to 38871 reverse strand)
ttgtgagtaactgtgacaactgatcactacattttcactacgctcaactttagcttatctgtctacatgtgtatgttttgttagcttcttgttttagatgtcttacatcctgtctcataataagtttgctgtgtatgctaaatctttttaaagttgtagcactgatgttaacaccctgcagtgagaatacgcagtggtcgctgcaggaatggcaaggcagattattgttgtgctgttttgtgcaagaagctgtctctagttattttagagttgtctattgtctatgtaagacatgcaatgcctttatgatcaacagaaataattggaaacatacggtagaaaatatgagtaacctggagatggcttctattcaaatacttcaaaataatccaatagaatgagaactagtttatatagttgtttattttgctggggacagagtaactgaatttaagttttaatagttcaacttctgaactgataaaatgaaaaatcaagctggcatatcattgccttttaagttttaacacttccatggcggagcaatataaatcttttctgcgaagccagcgaatatcatgcaaaatccaaagtggaggaactgtttagttatatctgagtattttaaacccgacagctgaattctagcagtttgcatattttgctttattttaggatataatttgactaaacattattgcatttgcctcctgttccggttcttttgtttgtttttcaaaattggaaccacagttcgcatgttatctcatatctgtgttgcagttttggtcagcattacatggagcttgcaaaagtagtttatgtctgcaagaacatgtacattgcaatttatgagtcatcagggatgagtcgtttctctgttcctataggagcaaattttgacaaaaagtatcttcttctgtgcagaagcattttcacaagtaagtttacaactgactaatgcactttttcaggtggctaccagaggga

SEQ ID NO: 80781 - DNA, 568 bp, Citrus sinensis
  Intron number 3 from transcript orange1.1g023355m (locus o range1.1g023355m.g) derived from phytozome v7.0 (chr-ID sc affold00018; pos 1637045 to 1637612 reverse strand)
ctgtaagtatattacatttctttcatttttaatgttcttatatattgttttctgtacaacctgctagcattaaactgtagttggcatgattttcctttcggtttctctcttaagtaacaagtataacgtaatgaacttgagaaaattttgaaggatgagacaatgattgtttaaaaattacaatttgtgtttgaaagcacctgtattccactgtaagctctttcattatgaatgaattttaatactagaattatcagctcttaaaaattgacaaaacttggttcttcatttgaagataattttcacgaacgttgatcccaacgaaagcaataattgccatatatgctaaaactctcgttaacctgacagaattgatcaaaatttggagcgagtgtgatttgattctgatacttcttttttgccagtccctctttattttgcatatccaaaggttttccatgtcacatgttctttttcttatttttcttttctgtgaaaattttggactggcctccattttgatgttttgtcagtttgctacttgtttagacagctgtttcttttgttc

SEQ ID NO: 80782 - DNA, 448 bp, Citrus sinensis
  Intron number 1 from transcript orange1.1g043842m (locus o range1.1g043842m.g) derived from phytozome v7.0 (chr-ID sc affold00350; pos 131867 to 132314)
atctgagagtacaaccgtgagaatgttgtaaggagtacacaaccagatgtgagtagtttgaaaatgaattcgcatggaatgatttcttgccagtgcagaaatggcttggttcaaaaatgctcagcttcattgacactcttcggttggcctctccgtccttccattcttaactacaatactactcttgtctgtctagttatggaatctctcttttaatcctccaagtttgaattatattatattgcctctgtgtttccgcagaaactgagtcagttggtgatccttcaaaacaagaaaaaccaaaaacagatacagcgcgcgataagataatgagacagatggctcccgttgctgcatgccacttgcttgtgtgcgtattgggaccatcatcaacaacattgacgtaaacccagctcaaggtgggaagctagttcgagctgcagggacg

SEQ ID NO: 80783 - DNA, 995 bp, Citrus sinensis
  Intron number 4 from transcript orange1.1g021852m (locus o range1.1g015306m.g) derived from phytozome v7.0 (chr-ID sc affold00069; pos 292199 to 293193 reverse strand)
gctagtaagatgcacctaaatttttatatctcactgtgctttcagttaaatttataatatattgaattttggacggttactatcatatatctaatcattattccattgcagatatatgaacacatttcttcttatttttccatattttttttttcaaaaaaaaaaaatccttgatgattaatcagtgtcatggtcaaagaattgctatctttttttcttgtgctaagtttctagactatatactttaaactaccatatcagttaaatattttcacacagtatatatatatatatataattgtgaattgtttgctatgctgagcttgtactggtagttttccattcacaagccaaattctgtgtttatccatgtcatatgttgacgtgttactgacaaaacatcatgtgtgagcatgcgtttttaagtctgttgggtcttcttgttactgacggatgcaggcattctttgaaagtcaacctactctgaacttcattttacatatatttagcttgttaaattatctgggcattagctatgtggtatactttctcttgatgacttaatctgagtactagacgtgtgaagtctgcattgaggatatacattgatccaaaattaattcagattgatagagattaattgtcttgtttaaatgaaatggcaatgtatggtcaatttgatggctttatgaaaagacttagttaacttgcaacttggttgaggccctcataggaccttcgggctgagctgggtcatgtgtttgtttgagttgcagtcttatttttccattcaatatggaatttccatgaagttgaatttttagttatattgctgcttgcaccctgtttggctagctacccttaatgtaatcttttcctcgccttctgccaagtgctttttggtagtgccccaatcgagtttactttttgttcttactagaccatgttttggcaatttaaatcaattaacatatgccttgactgattgtaggttg

SEQ ID NO: 80784 - DNA, 896 bp, Citrus sinensis
  Intron number 4 from transcript orange1.1g019358m (locus o range1.1g017892m.g) derived from phytozome v7.0 (chr-ID sc affold00104; pos 387195 to 388090 reverse strand)
ggaactggtaaactattgctttctttctattccttgcctccttttttttctctgcactagattgtatttgtctaggtgtttttttttttggtgcataaacggcattgttgtatttattatagttcatttgtccagtatttatagttctgaatgctgaacaggataaatcttacggaatttaaggctattatgttaaggtagaagttagtttttgaaggggaccgtaaggattaccagcacagcaccatgctgcaaaatatgctcatttaatatagttaaaaggtgtaattttcctttagggaagagaagttttatatcacattcaaactcattaaatatatgttaatgttgacaactattacatcaaactgttaaaatttttagacataaagttatatgggtccaaaggtagggcagacaagtgagtactcattactgttgctaaaatgcttgcaatggaggtgtcaaggtgtttaccaggctggaaagcaagctctgtggagacactaattagatgcttttgtaggaagtgtgttctggaatattaatggataattttactgtcattcaatagaattacctaacactctcacacttcatgggcattttcagactgatgcaacaagcattggtgcataatatgtctgaatttgtaaagaattgctctagcatgatgtatttaatagtctagtggttagatcctcaggttcaatgattgatgacactcaccaacattttcattgggattggttgtattttttatttgttgcatttgggagtgttctgaaaagaagaattcttttctgttgggttttgttgtggttgcctttggagttattgaacctatttttgtgtttgcaggtgcagctttgaaaaaaagggagaacgagaaaggc

SEQ ID NO: 80785 - DNA, 753 bp, Citrus sinensis
  Intron number 1 from transcript orange1.1g008933m (locus o range1.1g008933m.g) derived from phytozome v7.0 (chr-ID sc affold00341; pos 13948 to 14700 reverse strand)
aagagctgttcaagagctggctcaccaacggagaggcaagctcttgtgtgatgtgttttccttgaattatgattaaatttggataataatctatgggttaatgaaagaaaccaactgtatttacacgtgatgtgcttttaggctcaagagatcatattgattgatgctctgtttatctatatccagcgtaatattatttttcttgaagggagaagaaaacaccatgcattgctaaccctttttttccctctttgattgagtagtgaccagtaacatttccataatattgtagcttaattgagatatgatagcatgttttgtatgccatttcatccaagtaatagttgagcttttgcaatcgctaacttgtgcttgttgattattttgtcttctcttttgcgtcaagagttaggattgagaacagttgagtgagatgctttgtcatcttattgccaaaaatctcattctcattattttgcgttgttggaatagaaaactgaaatatgatggattattcggagatgatatttggtatgtttttgccaagtgtagtatggtgtccataaatggtaccatctgtatgattatgcaacttatttgaatgaattgatgaggaagttcaagaaccccaaaaaagcagccaaatataacttgttattcaacaatactcacatatctatgtggtgcagattgagatcgattccttgtattctcttttgtcatttaattgatgcacttcccttttgcagaatc

SEQ ID NO: 80786 - DNA, 423 bp, Citrus sinensis
  Intron number 1 from transcript orange1.1g030434m (locus o range1.1g027696m.g) derived from phytozome v7.0 (chr-ID sc affold00118; pos 309161 to 309583)
ggaagaagtaagcaccccttctctctttcctatttcttgtatcctcttcatggatattcaatgaacactaattgacggattccgtatgttatatgtttgttttattaatctgaaatttcttcttattaatacttttgattgattgctatagctataaaccttaaaaaatttatttgcattttttagattggtttttttgctttttcgtatttaattctgggatatcatgactagaggcaggtgttggttcttaaataaaactcatttgggtatcaatatccgtatgtcatgttattgttgcgtatcaaaacggggatttaggttgtttttgagttttatgggagattcactagtttcaatgtttaaaggggattttttgttattacaggacctgcaaggtgttatcgccagatcaaaaataag

SEQ ID NO: 80787 - DNA, 195 bp, Citrus sinensis
  Intron number 1 from transcript orange1.1g024686m (locus o range1.1g023709m.g) derived from phytozome v7.0 (chr-ID sc affold00009; pos 2098576 to 2098770)
ctccctcctggtgccccagctcaggtgcataattgttgcatcttaaactcttcaaggatttcaatccatttttttcttcttctttttcttttttgtggtacaatttgtttttgaatggttgattaatgaataattaattaagtggttgtgatttatgcagttcaggaaattatttcctccaacaaagtgggctgc

SEQ ID NO: 80788 - DNA, 766 bp, Citrus sinensis
  Intron number 1 from transcript orange1.1g042048m (locus o range1.1g042048m.g) derived from phytozome v7.0 (chr-ID sc affold00515; pos 7139 to 7904)
gactttcctcatttggggggagggtacatggacaatattatatccaactacttattcaagaaagggatggggacaatttaatacccaaattttattcggggaggggaaggggatttggtgagatcccctcctcgtttccccatttctatttttaatttttaattttattttatttcttctaaaatttttagcgaatacatttaaaatttaaattataagagcatggatgtaaataacaaatatcataatatttataaaaaataatatatatataatagctaatataaaaacctgaagattgatgaagataatattgttgaagatttatttataccatgtaactattatggatgtgttcaacttaacgctctaattttgctttatttcatagattatcttgtaattttgacgacattgaattagtttgatggaagtgattttaatttagtttattttgatgtttttgtgttggtaagatagtacattttcttactttaacatgattaaatcaaattcggaagataaattatcaattacttagagatcgggtacccttgggataccctttattattcacggatccccataccctccgttcaagcaatttcaaatgggatgggaagggtatgggaatataaacagagcatggggaatgggtatggtgacctccccttccctcccttcccctcccattgccattcctaatggtggtcattgttaatcaaccaaaataggttaatagtgtcattggaggttggtgattggg

SEQ ID NO: 80789 - DNA, 326 bp, Citrus sinensis
  Intron number 2 from transcript orange1.1g010632m (locus o range1.1g010632m.g) derived from phytozome v7.0 (chr-ID sc affold00009; pos 2102305 to 2102630)
catctactgcaacccccggcgccttatacgtccaggtgagttaaacaaaatgctttgatgttttgtttacaaactaaccaccaaaaaacaaactcaaacagagaataacaatccttggtgtctcattcagcaaataacaagttttacatcggtgacacgacaaaaggggattgaccataaagaagaattagacggatgaaatagttataatcatttttgaagaaaaaagaaaaataattaaacaatgtctatctactacagtcttgtgcaaaagagcaacattatatgtgatgtggtacttgacgcaacaggtaggggatccaaac

SEQ ID NO: 80790 - DNA, 679 bp, Citrus sinensis
  Intron number 2 from transcript orange1.1g031749m (locus o range1.1g031773m.g) derived from phytozome v7.0 (chr-ID sc affold00091; pos 171237 to 171915 reverse strand)
ataaggtaccgtcttgctcccttacttatgtctgattccttataccagaaacatacctctagtatagggttgccatttctatactttatggttataaaatctgttatgagatgtataagctattattcttttgaactttcttcatgtacttataatctaaattcgtgtatgaggtgttagtgttaatgctgctgatcatttgagtaaatagtgctaatttagaatgaccttggtgcctttctatttggttggtaaacttttgtcggttgatggctatctaaggttgcatctggtgcattttcatgttgctatgcttctgaagtctggtcgttcactgatgtgcaaggcttcttaaatttataccagtttctgatagttctattatttgaaccctcattctgaaaaagtattcgcgccacactaggtatgtcacataagtggggttcgttaaagagaggttcacagttgtgaatttatcgtctttaagatttaatatgatctgtatgcaaattggctttatatcaatgtattttaatatatgtgttttcttatttcattatgaaaaggatcttagttgacggactagtaaaatgattcattagttctggcttttatattcatccattttctgtctttccttgcaggtcttagcctttagggacatagatccccaagctcc

SEQ ID NO: 80791 - DNA, 693 bp, Citrus sinensis
  Intron number 1 from transcript orange1.1g019004m (locus o range1.1g018089m.g) derived from phytozome v7.0 (chr-ID sc affold00248; pos 111228 to 111920 reverse strand)
ttgggcctaatactggtgtccctcttcattacaaggtgagttgtttatgtgaatgtgtctgtttctgttttaaaagttgaccttttgattatttgttgtgggacaaaggttggttctttgttataaccttatgattttggcacgcattttgaagggtgtttgtgtttttgaagttgtgttggttatgtaaatgatgggttccagttgttgttgataaagtgacgctaatgatcttgaatcttgatgaaggggacaaattgtgggatattagtgtattttagacgtatgggaggagataatattagaagggcattgttggttgttgaatgtctcgtgtatgtagtttgatggttggttgacctttttgattgtgagttgttttccaaatttttaggcaatatgtggattactgactttgtttgaagcatgtttgatctcttcatcgaagatttatcatctattcgagagtgcaaagactccctaagcggtgataaattttgatataagattgtttcaagtatcaatttgatagaatatgctgccggctagttgtttgcactgtaggtttaccatttactttggtgtggggggcagtgattgcccggcatcttttatctaatgctgcttttttagtctaattaggtttatgttgtttcagggagttcgctttcatcgtgtcatcaaagggtttat

SEQ ID NO: 80792 - DNA, 949 bp, Citrus sinensis
  Intron number 1 from transcript orange1.1g006253m (locus o range1.1g002876m.g) derived from phytozome v7.0 (chr-ID sc affold00009; pos 1774203 to 1775151 reverse strand)
ttgtattcctgagtcaactcatcaactcagcctgagtaagtatctcttgatctggatgttttatttgttcaccacgttgattatctacacgtatatatatttttcagatcacaattcattttttttcttaaatctttatttgtatttattactgctgtttggttactgggattaactttcggaaattagttacttgtttaggtagttatgttttcgagatcatagtgagtttgaccagagttttgattatatagtttcgtttagttttaataaattagtttcaagtcgaatcgaaataaagcgaatgaataactgcaatcaaaggaaattagaatgtgtgatatgtgattcttttgtactaagactgtagaatctattcacagccaagtttggtagagttattgtgtggctcaattaaattaacttttcattactatctgaagagaggagacaatatgaactcatttttgctgtttgtttgctgaggagaagtgggaaaattaaagaaagtcgaatctattgtattgcattaattgtaagccagctatctttaaaagcagttttcttttacaaaaaagggatttccagttttcttctacctttttttttacacctatgaatttggagttttagctctctgtttataaaattattcgttttatacttctgttctaaatccaaacttaaattaattgcttgatgttctgacctctactgtaatgccatttgctatggcccatgtaaaatgccatggctttcttgattttagttttgtaggctataattacttttagttattttagctgtattttaccagctttattatgtctggtgctacttggcaagagttgtaaaactgggttcactgtttgtttcattttgtaaccaaagttttaatgcatgatattttacatatatttgatttacaatctgtcaacttcagattcaa

SEQ ID NO: 80793 - DNA, 715 bp, Citrus sinensis
  Intron number 1 from transcript orange1.1g004363m (locus o range1.1g004315m.g) derived from phytozome v7.0 (chr-ID sc affold00295; pos 123894 to 124608 reverse strand)
gtctgcggagcaagtgaggaatctatgcacattcagctatcaaatttatattttaataaatatattaatcaagtggatttttcctttccttttcttttctttggttggtatcaaatatgaaaattcagaatgaagaatatcattcaattcaatagatgctggtgctaatcctttaattttaaaaaaaagggttgagtttggcatgctcattgactttctacagttatggcaattctttttttctctttgatgcatggatttatgcagtatgtctttaatgtatataccagacatgtcaaggactataggaacctatcgtgatcagtgctattactaaaaagttcagttcattccttattccagtgccttcatttcctttctagagttacttaagttcttttttctctttgatgtagaatattttagtgctttttaccatccatgagaaagtgcaaattgaaaagttggcatgagatggatgctttttattctcagttaggaaacttcaagattgtacttcaatgttgaaaagaattatcttggaactttgtttcattttagtaattacctgatgaattatactctttcatgtaaggtgaaggagtatgtcttaacttgcaattatacctacctataattgcatattaatccatttgctgtctattggcattcctcaacagccaaatttgtacacgctagttgtcatcctaaaaca

SEQ ID NO: 80794 - DNA, 917 bp, Citrus sinensis
  Intron number 1 from transcript orange1.1g010008m (locus o range1.1g009680m.g) derived from phytozome v7.0 (chr-ID sc affold00324; pos 121392 to 122308)
ttcagcacttcggcttgcagcaaattacttgagaggtatttaaagttttctaataatctttaattgcttttcgcgagaaattttctttacatttatgtaggttgttctctgtttacgcagatttatgtgatattatttattttgattttttcttgcatgttgatttggtgtattgaggattttgaatttagatttttttatccagggcgtgtttgtttgtttgtttttatttgattacgtgtcaaagtgaagccttgtggattgggtttggcttaccaatttcaccccttgcatattgcgtgtggttcaatgagactacttttttaaaccgtgtagaaacttaaccatgttgtttacttctgtttatgtttaccatgtggatttctgagatacagcaggggaaaaaaataaataaataaatatatatatagcttctagacagttctgctcagacttaggtttgcttttctgatatcatgctttatgtacttgctaatttaatatgtttgaagctgatgcttcaagagtttgtgacagcattgatgttgtttgttttgtgatgggttgatgaactctatcacttctatttaatttaagttagtgaattgtaacttttttagtttggttgtggatttttttgtgcttgtctttgggtagattaagcgtctcttgattttctctattgctattgatacttcttttcagttgcaacttgcagaacataaggagaaacacattataattagcaatttctttttctttttatggtgcaatgtcatgtgcatattgcttgctgtataccgagtttgatattcggacttaattcttatatatatatatatatattggaatgtgtaggaaatttttgagatactccagtgaaaaccaagatgcaggcttgtagtggagctgcagtt

SEQ ID NO: 80795 - DNA, 1001 bp, Citrus sinensis
  Intron number 1 from transcript orange1.1g038963m (locus o range1.1g038963m.g) derived from phytozome v7.0 (chr-ID sc affold01063; pos 38554 to 39554 reverse strand)
gcggacagtatttttgacaagttgccaaaagcttggtatgaatgcttcttctaattttgccttcattttaaagccctttctgagtatattggatgttataatttcatcttgatttgtagtgtaatagaatatttttcagagactgtgataaacaatgtcttgcttttgagatttcaagcagcggccatttctcagtccatttacttcatggttattttaaattgctctaacaaatgtagagttcttgcacattttcctttctttcttacatgatttggaaattttgtggtaatcgataatatgtacaaggaacgtagcctttactatgattacagaattgaaatatctctcccaatggggagaaggggaggggaaaaaaaggcttttctatctttcacagagagggcaactgactaataataagttagagtggttgatgatatgaatttaattttttcatgaaatgttttctttgaggttcgcaagagttgcctcgcgataaaacagcttattacttgaatacaagtttacaataaacacttgataaccatatcatgattgttattggatttattttttttatctatttaccactagcaaaagacatagacattgagcctggacgaacacctaattagaatatagattatatactccttgctttcagtacatcaaggtcaagttaactgatgcatttgttggctgctaaaaagttagcagagcaaaaaatgacataatgttgtgctacatttgttattatgtctgcagttttaacctttctattgaataagtcaaggaaaagtgttatattgttaaaatttagagtttgaattctacatccagtctttcttgtcctatggtgattctgagacttatatgtattcgttattattaatttatgaattctgatgagtacttgattgcacaacttgattttttttttttttgtttcatatgtcttttcaggttcatatacttatttattggtgtgggagttgttc

SEQ ID NO: 80796 - DNA, 522 bp, Citrus sinensis
  Intron number 1 from transcript orange1.1g016856m (locus o range1.1g014334m.g) derived from phytozome v7.0 (chr-ID sc affold00134; pos 197565 to 198086)
ctgctctgcaattgccagtctgttctcttatcctttcctttcttttcttctctttttagcgttttcgttttgcccatcacctgtttgatataatgtaccttctttggttggtttagtagtgttttttgtttctcgcgtattttgcaattgctagccccattttcttacatcttcatagagctcgctgtcaaattttgttgctatataaccaaaatgttacccacatttgttttttcccttttaacccatgcttgttgttgaatggattaagtgagtgggtatttgctacatattacttacccactaaacgctttagctgctctgcttttgcaactaagcaaaagcataacagttatcaattatcattaccctaaaatttcaatttgaaccttatttcacaaaaattgtttcttgcaatgaggttttataaattgaatccaaatttgcaaattattgaagtttgatttctaactagaagccagtgacccgtgtaattttaataggtggccgagaactttgagc

SEQ ID NO: 80797 - DNA, 827 bp, Citrus sinensis
  Intron number 1 from transcript orange1.1g016243m (locus o range1.1g016243m.g) derived from phytozome v7.0 (chr-ID sc affold00087; pos 337999 to 338825 reverse strand)
ctcaccggtaatatatcattttctttctctatttatttatttatttgctgattaactgtgattagtaattttgattttgtttattaattgttatgtggcgaattagcgataatagtttatcattatggtatggtgtatttaatgatttgaaagtaagagggctgtttggtggcacaaatgaatcagattctcttttaaaatgactggtgtttgaggcattgtttaaattaataacgcagtctgaaaatgggaatagcaaaaggtgagcaaaaagagtggtatgggagtaattaagaaagatgctgattgacaaaaacgaacaccaataatgcgcgctgctgattaaagacggaaatatgaacatctttattgtttttcggcctatgcttgaatctatctcatgtcacgtgtggagttcattaacacaaacttttcttttagtggtcaataacaggaattattattaatatttcgtttgattagctgttttactgtggatatggcagagtgcaattcattgttcaatgctaaattttagggcctgaaagtttgccgtctcaccttgccttgaggaatcttcctaatgccactcaattatttacgatgtaatgctggaatgattgtatctatctgtttttttgttagtaacagcaggttttaattgagttttcatatgcatctgctatgatgattctggcaattacaaaaaataaaagattagttgtaatatcaggtttgtttatgaagatgacctcatctgagctcaatttctttctgaaaaccaatttgcagaagaagatcccgatcccttaaagcggcctaccaaa

SEQ ID NO: 80798 - DNA, 542 bp, Citrus sinensis
  Intron number 2 from transcript orange1.1g016209m (locus o range1.1g016209m.g) derived from phytozome v7.0 (chr-ID sc affold00096; pos 90883 to 91424)
attgcttcattgaggtccagttttcttcaatcaattcttgttgtgttttttattggttttagtgctaagcgtttcatttcttgttggatatcaacctaatcggatgttgattttgatgtgaatttattatatcttgatacttgatctttactataatgttggtgaatatctcatcggacatcgagtttgatcagtgtttggttatttgattttgatgtgaatttgttgaaccttggatatttaatctgggatttgttgaattttgtagttcgtttgcttcttgttattttccatataatttactagctctttgctagttggatctgggtcattgattacttagtttcatccactgttatacaatctccaaacaatctagtttattctgataatctttcagtagggttctctgatttattcacattttgatctgggtttagcaattatctaatgcgtatttttgttgattgggttgttcttacgtcagtctgattgattttgagttgaatttctctgtaatttggaaattgattagggttgtg

SEQ ID NO: 80799 - DNA, 505 bp, Citrus sinensis
  Intron number 2 from transcript orange1.1g033997m (locus o range1.1g033997m.g) derived from phytozome v7.0 (chr-ID sc affold00009; pos 1904732 to 1905236 reverse strand)
tcatttctaaatcttttcaggtgaaaatcttcatgctgattgttctttgaatatgctttagctttaagtggaccaatgaattgttctatctattaaaatgaactaatttgttcaccacccgaactttctcagatcgatctcagaactgactgttgagtgttgactacccaaaagaaaaatggtcaaaaagttgatcatgctcgtattgagaaaagattgatctttacttgtatgtagttgtgggaaatgcataggaaaataataacctgcaaatgttctttcagttgtttctggccattattactttattagtagtataactcaaccgaagttttctttcaattgagcctaagcaagtggaagtttggtgtggttttcatttttttcccccttcaattatgctcgtgtgcatatgaatttatcttgttttggttgtgcttgtgaccagagattgttcaatacatgttccaaaagttccttgattgattttgttattagggaagaa

SEQ ID NO: 80800 - DNA, 599 bp, Citrus sinensis
  Intron number 1 from transcript orange1.1g002730m (locus o range1.1g001641m.g) derived from phytozome v7.0 (chr-ID sc affold00006; pos 1403255 to 1403853 reverse strand)
gaaaccctcaggtgactaaacgcaccttcggacttcagttaattaaacgaatccactttgttaatttccgccttcgttctctgcttagttgttgtgaatgtttactctgaatatatatgcattgtgtggtcatgaggttgaagaataaaagaggttctctgcatggtcattttcttttgtttcttttaatattttattatttttagtacttaattttgcggtatcgtgcttgcttttacgcaagtggaggaagttatccgctgagctgctttttatggaaagttggatattgaatgttgagattttaaaaatgcgtcaacaatttatatttggttgaagcatccaattgttctggttaatacaattatggaggcaaagctggctcgtttgaagccttgctctttttcggtttcaagaatgtctagctcatttcagtatgttgcatggacgggtgattaaacggattttgatgtagtgtatatttatgtaattagatttctgtggattttcttgctacttgtaatgcacagcttactacattaatgaccgtggagcgtggtgcaggtacaaattggaacacattcgttcacattcgatca

SEQ ID NO: 80801 - DNA, 616 bp, Citrus sinensis
  Intron number 5 from transcript orange1.1g010260m (locus o range1.1g010260m.g) derived from phytozome v7.0 (chr-ID sc affold00219; pos 103541 to 104156 reverse strand)
gtgctggctggcccttccactatcactgggcttcggtatgtaaatcttctttttcttcataacacataacactcacggccaggccaattgtgtatacttagttgttttaactcagcagcgacttggacatttttctgtttacttttgatgtttgtagattttaactcatttagtcggaacatttttctttttatcaaatatgtctagttcctatctttataaaatttaaggaccccttcctactttcttcaaccattgctcctttcaagcgcctttctctgtcgctgcattccttgctgctcccgtcaaaaattttatcttcagtcaaaactaccttgactaatgtgccacagaagaaacactgcagtagcttttgaggtcttctttgaaaagcaacctttttcactatcacaatggcataacttgcatttatgcctaccaaaagaattatttgtcaatattgctctgtatacacactgcagcagctattttaatcttgctatttttctttttctttttagtttttaatagctgaacatgtccatatgaaaccatatggaaaaggcctggtaattgttgccttcttatttctgaatgcagtgagaatcttcttccc

SEQ ID NO: 80802 - DNA, 908 bp, Citrus sinensis
  Intron number 2 from transcript orange1.1g017640m (locus o range1.1g012718m.g) derived from phytozome v7.0 (chr-ID sc affold00028; pos 1088323 to 1089230 reverse strand)
aggtctctctttcaacttcagctcatttttcttcttctttattgcaaattcaataaatttacatgttgattctgggattttggattttgatactgggatttcatgtgactagtcttgtttgcagaattgctttatgaggacaaaatctattagagattgcttgcgtaactacataaacacagagttgtatggttgctaaatgaattaactcaatctaggttactttctagatagtggctcaaggtaagattgatgttactgataaagttgaaaagaggatgtcttaatttctctttattcctcaatgtggtgtgttgtgtcaaactgtatagggcattaaccgtccttttttccaactacccaattgctataaaattttggcagagttttctcaaggcagtgaagttggtgtgtgattttattagcacatacttgtctgtgttgttgagcaattctgtccgtttggtgggcccaaaaagctttggtttaagtaaatgaattgtgttgcaatcttttgctgattcggcgagaaaggaacaatggatgagtttatttattttgttttggaggttttttgtggactaccagtttggttttgtatctatctctctctcattttcttttaaataatatttctggattcttatcagaaaaaataaaaagtaaacaaaccatgaatatcttgattttttgcagaacgaagatgatcacctctttgtttttttagcttctggttttaaagcatataaggacaccggtttctggcctaaatacatttcagtaatagtatttatatggaggagattaattttggctattacattgttctgcatatccagctgaagatgctgtctgacgttatatttgctgcaggtgatactcacagttgccgaacatcatagtgccat

SEQ ID NO: 80803 - DNA, 745 bp, Citrus sinensis
  Intron number 2 from transcript orange1.1g036951m (locus o range1.1g036951m.g) derived from phytozome v7.0 (chr-ID sc affold00088; pos 81047 to 81791 reverse strand)
gttcacaaagggaacactcgaaaggtttgtttgttgttgaatgctattttttaccattataaatgttgcgcaactggtggtacctaggtggtggtcgattgccatattaaaaattattcatcctgttcttttacaaaagaaaaagaaaataatttctggaatgccggctaaatgatgccacattggttgcatgttgttcttgcattatggagggcgcatattctaggcattggtgagaattcaaattttgacatgttgttggaatattgatctactacatcccttatagatcaagtcagtttgattttgccacgaatggttgagagattgagacccatgatcaattaactgtagcacagaggctgataaggctttggtctgtgaaagtgggagggtaattgttttagatgttgggtttagtacagtactaatagcctctggttatgagaatcacgacaaatgtatagaaaatattgccatgtcaacatatactagttaaatcatttaaatattgtcttgtttttgggttttgtattgcaagagaatcggtgttaagcagaagctcagaagattgaaaggatcgtggaactttctgtgtctttaacctgaatttattgttaactaatataagcaaactatgtactgtgactcttgagtatgtggagaaaatgttttttgctacaatggactaaatattttattgaatataggtttgttcgctttgttagcactcctgaggtcctgg

SEQ ID NO: 80804 - DNA, 540 bp, Citrus sinensis
  Intron number 1 from transcript orange1.1g036951m (locus o range1.1g036951m.g) derived from phytozome v7.0 (chr-ID sc affold00088; pos 81925 to 82464 reverse strand)
tcagctgtgtttcagctcactcccactcggacaaggtatttttttttccctttacattgtccaattttgacttattttttcataatgttactgattaaaatgtctacaaatttggttgatgaaatgggaaattttattttaattatttttttttgtgggaaatttatttagcgatctgtgttgtggttaatattttttatttgtttatttattttctgacattgatgtctctgtggttgaaggattggttttctttgctgggtttatgttatagaggtctttttaagtttgcatttctttgcaaaacatgtgtattttgttttttagataacggtctatgaattttgaaggagtggtattgccttttatttacatcatagaatggattttctggtttatcttgactcttcagagtaatctgtaatatatggtttgtcaagaatctatgtgcaaattcacttgtaatattcctcagcaatgcagctatgggaactgaattttgacttttttttttcaggtgtgatttgctgatatctgcat

SEQ ID NO: 80805 - DNA, 443 bp, Citrus sinensis
  Intron number 1 from transcript orange1.1g029310m (locus o range1.1g022196m.g) derived from phytozome v7.0 (chr-ID sc affold00018; pos 1671172 to 1671614)
agagactctccgccaaagaatctcttcttctcgccgtgagtttttgtttttctattgccaattctctatttttgtttagttgaaatcaatctctgaagtaattattttttaattttatttaatttcttttcactttggaaactacatttctgatgctgcatttaagagaatgcagcatattgtgagatttattaaacgataataaagaaattattttagcaattatcaaatagttagcgagaatgacttctaggaaaactgctttccgtaaaagcagtttctggaaaatcacttatcaagtgctgcttgagaatgcatttgaactattttactagaatgacgcaaaaatgctaaatgcttttgatgatgccgaaggcaagcacattgatattgggttttgcaaatctttgagctaactctttgcttcttgttttagtttaagg

SEQ ID NO: 80806 - DNA, 979 bp, Citrus sinensis
  Intron number 1 from transcript orange1.1g020499m (locus o range1.1g014004m.g) derived from phytozome v7.0 (chr-ID sc affold00589; pos 48620 to 49598 reverse strand)
aagacgaccaattctgtaagaccattctctctttatttttggttttgcttttattgattctacttgagtgtgtgcgcatgttaataaggactcttgagagatatgattattgatgattgattgattatttatttgtttgatttgtttcgtttatactatgaatatagcggaaagcaaagagcttgtctaaaagccaacaaaaaaaaaaagaaaaaaaaaaagaagtgtttccttcagtttggtttctggcaagtgcttttcttcttgtttggtttctgggaaatgctttctgcttctgtctggtttctgggaagtgcctttttccttctatttggttgctggaatgtgtggtatatcatcctctgttttgttgctgagaagtgctttctgcttccatttatgggaagtgctttttaattctgtttgattgctgagatatgcttatctttctgttttattgctagtaaccaattggacttttttttttttttcaattatctgaatttactctattttgttagagggaaaaagccttagggcctggccgtgtagatttcaagtggaaaattcgaataatgaatattgtaattttcctttttttccttaaaattttttgttcactggtaatggcacctagtgtttgggaaaaagaaaaaaaaatctaaataggttttctttttgttttttactttttttattttacagtgtctttttttgaaacactgtttggttggaaggaaaatattaggaaaattaagaaatcaaatgagcacatgtactgtctaactcttgttgaaaaaaatgggttataagtcattcacagcggtatgggatggttatggagattacagaaagaggattgtcaagctgaagccattttttcaaagtgaaaaatgaaaaataaagtaaaattattcaatttaattgatggatcttctccctttcagatttctgttctatcagatccaccgagtaggtc

SEQ ID NO: 80807 - DNA, 504 bp, Citrus sinensis
  Intron number 1 from transcript orange1.1g007332m (locus o range1.1g006998m.g) derived from phytozome v7.0 (chr-ID sc affold00132; pos 334486 to 334989)
gaacagctgaggttccagaaagaggtaaagttcaaaacttttgtctttgtgaatttgaattttaaatttgttaaaacgaattatttagatgtgtagatattgatgttctttggattatcaagtgatatgttctgtttcatcaaaaaacaagtgtttactgttgatattgtcgatgttataggtttgagttcttggttggcagaaaaaaaaggtgaaaagattttttttttctttttaaagaaaaaaatgattaatattactgcaagatctggggtacatacgtataatcaatgatttatcaaagtggctcttgcctatggttggaatattggataccaatttgttgcttttggttaagatctaggtaaagtagtttacagcatgtttcctattccttcacagaattctttttaatgatcttcagattcatcaggagcactaagtgcaggaatctttgtgcctcgttcaggaactcctggaaatagaacaccagcaccaggtccg

SEQ ID NO: 80808 - DNA, 261 bp, Citrus sinensis
  Intron number 2 from transcript orange1.1g011103m (locus o range1.1g010494m.g) derived from phytozome v7.0 (chr-ID sc affold00019; pos 1082750 to 1083010 reverse strand)
gagaaactgttctcaaagaggtgtttttagttacacattctaattcactgcattttaatttctttcccctttttgcgtttcttctatcatggtgcttgattatgtatttgaatagggtttgattattagaatgatggattttggaagctaccaattaagtttttaattttattaggggaatttgtgattaattttaattccttgtcttttgttttgtttgatttagattgaattggaggaccctttggagaatattggagt

SEQ ID NO: 80809 - DNA, 480 bp, Citrus sinensis
  Intron number 1 from transcript orange1.1g013560m (locus o range1.1g013560m.g) derived from phytozome v7.0 (chr-ID sc affold00500; pos 73828 to 74307)
ctctagctggtaccatatcagttaaggtattgtgtattcggtgcttattgttctagctgtttgacagtttgaggggtttaatggagtatgttatgtggatattgcttgaaatttgagtttttgaagtgggttcagattgattttttttttaattgagctgtcaactgtgttgacatgctctgctatgctgttgaaaaattttgattttggatacaactgtcatggaattagtgtctaatatgcaaagcataagcttaagatggagacgatgaatgtcacattagccttttgtgtatttgattttcatgcaaatgcttgagcattatgaaatgagttgctagcttgtgtgatttgaaagaaattgctttcaggatgaagcacatactgtgtgcttgcctttagtgaattcttgtgaattgaaaatcatctctccgggttgcctaatgatcttctatttgttggtgaatcagcattgttctg

SEQ ID NO: 80810 - DNA, 1002 bp, Citrus sinensis
  Intron number 1 from transcript orange1.1g027937m (locus o range1.1g027937m.g) derived from phytozome v7.0 (chr-ID sc affold00087; pos 310675 to 311676 reverse strand)
ctaagaagttgctcaagaaggtgattttccagtttccaattatttattaaactatatttaattcacaaacggatgcatgtaaaaatgtcatttgtgacttgtgaggggtgcttgcgatgttagaattttaagttcctgtatctaaaatactcgacctgtagaaatgtttacctcaattcagccattatttaatttttctgtttgttttcagttttcaatacttgaactttcgaaaaggaaatacaagtgagcttcggaatagtttatttgtgtcttaaaatttgaactgcgatatggaaatggcaaattaaaagtgagtgtttccactttcctgtttgcattcaaagctacgagcttcagatatctgttcaagaattttggtctgtgaggctgaggaaatagaataatttgaaggatccccttttggctgcatttcttagtttctgagtttttcacatttttctctaatttgggacctcaagttgtcacgtggttacctgatagattacacattactggctgagttttagtatgcttggtactagataatgtgacaaaataacctcaatttatttatcaaattaaaggcaatgattaaatgattagagactttaaggacaagttggtaaattttaacaaattgtttgtgccagtaatctgcatcatgtcctattccaatttatgtgattttcactggatgaaattccataatgttttcggttgacatctttatactggaataaaatcaaacaatcctcttgcttctctaactagcacttaagtgttctttaatccgacattctggaaaaccaaagggaagatatgggtcctggtcttgatttgcaatttcattgttaaataaagcaaaatcttggatgtgcatcaggtcacttcaataattgaaagaattgatgtaagattgtctttttccttctgttacctatgagagttatgtttgtgacagtaggtcgttggctggagacttttggaagaagaaggtgg

SEQ ID NO: 80811 - DNA, 672 bp, Citrus sinensis
  Intron number 1 from transcript orange1.1g042555m (locus o range1.1g042555m.g) derived from phytozome v7.0 (chr-ID sc affold00249; pos 226866 to 227537)
gagttccctcttgtttcctcacagatttcattgacgtaagtccactcccatcttggagaaattttagaatacttaagatttactatgtcaactatacaataaagatttactttgtagtattattttttatatattttaaaattcttatccatactgctcatacttttcattaatgatgtttctcaaatcagcatgcattaattaaaatctttattttcaagcaataaattgataaaattttagtatttaatataaaggtatagagaaacgaattgagattgaaacgcacaaataaaaaggtataaaatatagattaaattatgaatgataataaaaaattttatggtaacattatagaataaaagtaatcaaaaggacctatcagttattttaccagaagctgagacatcttagcccactggtggcatgcatggtaagtagggacggacctatgctgtatcccagtctaggggaaaaaattgtattcgaagaagataacagttgtaatggaaagttactagctcaattgtttgaaaattttacttttttaccctctcattttatttatttatttaaattttggtcctctcatgtttgtaatttattaattctcaccatgttgaaccaaaattttgatttcgtcagtgattgtaaactttgcacatgcaggtc

SEQ ID NO: 80812 - DNA, 826 bp, Citrus sinensis
  Intron number 2 from transcript orange1.1g026953m (locus o range1.1g026399m.g) derived from phytozome v7.0 (chr-ID sc affold00009; pos 1569721 to 1570546)
gctctcgggagccattgcaattcctgctgcaggttacgtgtgttgtgcatgtttcttcattgcaattttactctgaaaagtttgagactttgtgtatttctgcacaggctttttatatgtttttgatttagtataatgaaatatctagaatttggttttgttttgagggaaaggagatgatggcataattgtaaaaggtctgagcagagaatgggtgtttgtggtttgtggaaaaagaaaaggaagaggagccttgtcccttgcttgagtattagcattgtggcttctgggacctcttccacagtaaattaccttggtcttaaccatggtaatgggtgaaataattggctttggatgcactttagatttctcacttatcctctaaatttctcccgacattctatctcactcaccaaaatatgatttttttatcaattagctcattcttctgcagtgatcaaacagttttctgatccatttttatgtctgttttgcaagttgttactgactgcacttcatattatgaaaatctgcaagtcaaagtttcttatcaatctgataaaaccttcactctctttactaaaggtggatctaaaagaagaaattaatattgttgataaaagcttggataaccatttcttcacaattttatctcttcaagagaacaataataggaaatattttatgtaactttatgacatcatagctttgaatattaattgcacgaagttgcgccttcctttttcctccaaaatctctgatcttaatttttcctttgtgcttttctttattattgcagcttacacgctccaggagcaggaagtac

SEQ ID NO: 80813 - DNA, 989 bp, Citrus sinensis
  Intron number 1 from transcript orange1.1g015601m (locus o range1.1g015601m.g) derived from phytozome v7.0 (chr-ID sc affold00018; pos 1159963 to 1160951 reverse strand)
agacccaacattgtttcggaggtaagctcagtcagatctaacacactacaactctgtgttgttagggtttcataattcgaataatcgtgattttttttattgcaaagtaaaaacgttactttctttcgtacttgccgagaaagtgtgagaaaatgtaacgaaatgaaagttcttggatcgtatctgttgttctttctaaaatttgtgcttctttatgttagtttctagcttgtgagcttcgttgtgttaatgctgttactcttctgatgtaaaattgtggattcgagttgctgttggtgttcgaaaagtgtgagtgattgtcaattttagaggattcttactgtagctaaagagctggtcgaaaaattaaaatgtgtttatgaatgaatgaatgaagtagagagatcaaggactcattggttttggtcagtttctttgagcttatagttgctcttttttttttaaatgctaaagttggatattaatttgtttaatgtttctaaaacatgtttgtaattgctgtgtttttacttaattttgaaagtaatgcagctgaagtgttagataaatgatccatgtatacttgacacctagtaattttatgtctcatagcaactatggatttgtcactgcaaccgaattccaaacatatccttaatcatatggagcttttagcatgaaggatgtgattgcttcttacgcctttatctgatactgtctttctataatgatctgagagtgtgcttttctcattcccatattagatgaaatgctaattaatgtgctaattattgtgcctctagaaatccatttctattgattggtctagacggggggttgttctgtcagtgtttttggttgaaaagaatatccgttacgaatagtttttcaactttatgtaattgatgtctcacttgaatcttaacttggtgtttattggtttatactttataggcggggttgtccaccagagcgaatcagtggtggga

SEQ ID NO: 80814 - DNA, 524 bp, Citrus sinensis
  Intron number 1 from transcript orange1.1g016100m (locus o range1.1g014803m.g) derived from phytozome v7.0 (chr-ID sc affold00150; pos 85472 to 85995 reverse strand)
agtttctgagatcttttttgaagagcgatttgacggtactctcttagtattcatgctttggctgcttgtactttttatttatttttacttgtttttccattaattttgccacgtcagtaaccgtaacaaattttagttagttaactaactgtttacagttatatgtttagtaattgttgtttggccgccgagaaaatgcgagaaaattttaatgagtcaacatctgtagtagaaaattgagtttttcggtacccttctgcttgaactaaatgatgcaaagtaccaattttttttttttttgaatcaaatgctttgtttggcagaggaaagtgaaagcaaaactaaaaaaaaaaaaatcagtcttttaagtgaaatttttctcaatgaaatagttcaaattcaatgagcttgtgatgatatttttattttctatatgtaggttcttaagctatttatttcttaaaaaaaaaattgattcgattgacaatttcttcttggttgtttattacttggtattgtaaaag

SEQ ID NO: 80815 - DNA, 483 bp, Citrus sinensis
  Intron number 2 from transcript orange1.1g019615m (locus o range1.1g012773m.g) derived from phytozome v7.0 (chr-ID sc affold00099; pos 122503 to 122985)
tttccctccagggcatatttattctagcaaacaaggtttgcaaatctttagctgggaatcttgagaatttttaagactcttttctttcatggactgatttttgagtcttcttatatcatggtcataactgttaaatttatattgagttttttgtgaggagaaatactgttggtctcatattacctaagtaatattacggtagttactgtgtcttatgggaattgcgcaagattgaaaactcacagtaatttttaacttgtaaaattgttacatggtaaattgaatgtgagatgcacagaaatatctaacgaaaaggagaacatgaaaggtttcattttttggtattgtttaatgttctttttataatccttaatgctgtcttaattaattctctacattagttttcttgtagtttttatgatgatacaagcaaccccttctgtacatgcttttgtttgaaatgcttgcaggaggactaagaag

SEQ ID NO: 80816 - DNA, 275 bp, Citrus sinensis
  Intron number 1 from transcript orange1.1g030731m (locus o range1.1g030731m.g) derived from phytozome v7.0 (chr-ID sc affold00089; pos 232661 to 232935)
ttgagcaacaagtaagtaattgtttcatgtatgtaccaaaaaagcaatatcttttgattctttttcttttctttcaacttctcttggaatatttttggtaaaagttaactatcagacttatattaactcaaccatttgaatggccatatgctgttattggtttttgtttgccaatctatatcagtttccctttttcctttttaaaatgaaagattgtagatagacttatgatttcttcagttggcagatattgaattagcgagcaagcagaaagc

SEQ ID NO: 80817 - DNA, 888 bp, Citrus sinensis
  Intron number 2 from transcript orange1.1g030731m (locus o range1.1g030731m.g) derived from phytozome v7.0 (chr-ID sc affold00089; pos 233025 to 233912)
atactgaagaagctaaggcttatcaggatgtgagtttgattttgacacttatttttgcaattctagtgagataatgttttcttttactatttgcctctttatctctagtgcattttggtccctcgaaaaagtccttaaaaagttattgttcttttctgctggagttgtctgatctgcaatttgtatcatggggtgggagttgcatgggattattctttatgaccccgtttatcatgttattagacctgtttaccatgttaatggcgatcgtacgaaatcaaacttatttcagaggattgaaatgtaaaaggacctatagttttattaaatattgatagtctagtctgcctctgaattacctatctgtttatagtaaagtaaaatttggggcgtgtaattcacatttaaagttcgacatgaaagcctcaattttttttttgagtaactgtttaatattatgcaacattgcaacttagttttattcttttatgttctttaaagttatcttttcattcacttataaatagatttgatatgagaggaaaagcttacgtcacctgataaatttattataaattaactaggacataaactatgagctgcatgcagaagattatctcttttaagacctctaaaattggattcccccaggacatttgccgtactggcacacccttaattagtctagaattacatataaatttattttcacccgaatataacaagaacatcactctcttcgtccgtttgtcattaacacaaatatgatgagaacctcatgttgttcccatgctttatctattgcttatattgagttggtgcattcatttttgtgttatatttatcaagacaacatgtaatgtttaattttcatcttgaaggaaatta

SEQ ID NO: 80818 - DNA, 518 bp, Citrus sinensis
  Intron number 3 from transcript orange1.1g004767m (locus o range1.1g004767m.g) derived from phytozome v7.0 (chr-ID sc affold00581; pos 90574 to 91091 reverse strand)
ccaagatatttacctttggttcttatcggcttggggtatgataaatattctgtaggttactttttttgtgattctcctttccctatgcttatgattattaattatgcttacatgaccattgattgggtgtccctgtacttgtataattgggattatttcaatcagagattttgtcttgtaaaagtaatagaacctgtcctcgtttttggaagattaagttcattttttgttttataggaagtttctggcgacaatgattatccttaatattaagaaaagattggtggtgactatagaagtcttagttgcttctgaacctgttggtgtaacatgcattaagatttatgcaagacaaaaaaaaaagtgtttttatggtcaaacctcaaagcagagaaatgatgtgggaaatattttagacatatgtgagcaagatgctaaagatgctatcttatgaagcttattttttatttttcatgttaataggtgcacggtcccggtgcggatatagacacactttg

SEQ ID NO: 80819 - DNA, 983 bp, Citrus sinensis
  Intron number 1 from transcript orange1.1g024109m (locus o range1.1g024109m.g) derived from phytozome v7.0 (chr-ID sc affold00450; pos 34647 to 35629 reverse strand)
aaagagaaaacttgtgctggtaattgataacagaagaaaaaaattaaaatttaaagctttttggatcttttcgtaataaattttattttttggatgggttttacatattgattttgcgaagaaattattattttttctttattacttgtagtttctaaagttgggattttgtgatgaatgcgaaattttagggtttgttatttattgctgttcagtttgatgatgtgtttgtttgttggatgatagattgtggtgagtcaagaagagaaagtttgggatttgttgacgaattgggcgttttgatttattgtttttatatttatatttgttgaattgtactttttttttgcttttaattagggtttctaagttaggttgattgggaatttccaatgtgatgatgcttgggtaaatatgatcccactttcacacttttttcatttggttggttggtcagtgataatcttgtatttttttcttttgcttgcttaaattgtttctttgagaaggatagtcccgtgctttttatttatttttgatcctttctgatgttttgagtatgtttggttcctcaaaatgtgacgcaaaagaaaagggaagataatgatgttttctagaacatgtgatttataattaaaattttttttttaaagatatggtcgcacaattttatcactagacttgttcaggaggttctacaattcaagaatagatccttattatggtaattatggggtagagactcgtttattaggttgaagacatgtctaccaatgttgccttacttaaataagtttatatatatttggccttagttgatattacagagcttttgtctaggtaatattttcttcttgatataatgtctgtgatttcttttcaagacggctgtgtaggttattatctttagactgcctcagtcattaaaattcttttgattatttgcaggactgtcactcaaatcccaggaactaacagctatt

SEQ ID NO: 80820 - DNA, 901 bp, Citrus sinensis
  Intron number 1 from transcript orange1.1g032983m (locus o range1.1g033017m.g) derived from phytozome v7.0 (chr-ID sc affold00364; pos 136787 to 137687 reverse strand)
aacagttcactcgatagcgctctgcaaaagtccatgtaagtgattgtctgattttttttcttttcttttcttttcttttgattcctacatttgttaaacaaattttttatttgatttattgtttcttttgaactatttgattcttgcagtaattttgcttatttttattgaatcactgagaaatataaatggaaaagaatttagagtctttcctattcttaaataatttatttcaatttctcattgtgaaatttgatttgcttattggcattaacaagtagagaagaagcaaatgcacttgaaattctatctctttagcgctgatttcttgaaattagaattgaaaatgaggggaaaaaatttaaaacacttaatttaattggttgctcctgataaatgaaaataacagctcaatttgggattttttttttaagatatttggtagcaacaatatattaggcttttggttattatcttgcatttaccatttcatgtcatgattgatccactacctgattgtggatataagagactggtacatacattccatgatttcgcaagtgtctctctctggataatctatttatgcctttatgtaaattagtggagctatgcaggccttgtctgcctttaaagttctgagcggtctgaattgctgtgacttcttttttatttttagaaattttcctcctctgggtttttgatcaaaacagaattaaaattttcacccttgttttccttgcttttgtgtggttctttgcttttgtagttgctggaagtccatttgtaaatcttcttcctctttcttttcccttcactgcctttttattgcttcttcttggtttttgagaggaagataaacatttttctcccgaatacccagaaatcctgcgactgtact

SEQ ID NO: 80821 - DNA, 371 bp, Citrus sinensis
  Intron number 1 from transcript orange1.1g007947m (locus o range1.1g007947m.g) derived from phytozome v7.0 (chr-ID sc affold00068; pos 497743 to 498113)
gcctcactaagcctgctcaaatcgaccctctcaaggtcccctcttttctctctctcttcctcttgttcttttacgtgatagttttttttttttaaaaaagcttttacgtgatagttaatgttagtggctttgtgattagatctgtttttaatttatgcctcaaaattgttgttcataggttttttcctttttaacaaatatttctatgatttgattggtcgagtttatatctatatatttataaaaagataataatgatctagcgggtgctacatggtactgtctggttgctcacttgagattgatttgaaatactgattatgttctgttgacaacgttttggaagatctcttttgccgcaaaagaggttg

SEQ ID NO: 80822 - DNA, 516 bp, Citrus sinensis
  Intron number 1 from transcript orange1.1g010127m (locus o range1.1g010127m.g) derived from phytozome v7.0 (chr-ID sc affold00033; pos 433077 to 433592)
tcatttcacagcttacaaaatctgtggagtttagggtttgtgattttaactcttctgctttaatgggtttgtttttaaattgccttaaataaaaaaattgatgactttttttttaaatttttttcaaaaaaattctgccacaaattccctgtacataacattcaactgtatgtttatataattatttttcttttagcaactccatgtatttaattcgcctgaatgtttatctgtttaacttgtaatcaagtaatgtttattcgtttgaatttcactgtgcataaacttagttagatttgatatgatttgctggcgaagattatttttcaatcaataaagtatttttgtatcaatatttgacccggttaattggatgaattgtatgacaattcgttaacaaatagtttgcatttcattttgattattcttagtgatctttcacattgaagctgctatgatccggtttaatttgttttaccattgctaatgcttttccaggatcaggtgctatcaagc

SEQ ID NO: 80823 - DNA, 632 bp, Citrus sinensis
  Intron number 1 from transcript orange1.1g023873m (locus o range1.1g023873m.g) derived from phytozome v7.0 (chr-ID sc affold00364; pos 81341 to 81972)
aaactggacgtaagaattcattcctttaccttttgtataaattgcataattcaaatgcatgaaaaaattatcaaatccttttatttcagtaaattaatcatttcactttcatgtttcaaaacacgtcaaaaccttcttctacttaaaaagattttgttaacttccaatttctttttgtgatttttactgttttcccctataatcagacttatgatcagttgtttgttattattaattgccatcctttctagaggtatttgccaataataaattaataaaaacttctcaattgcgaacatatgcatttcacaacagtgtaaatgactttcacaacgtcgtgaagtaatttacaatttatatcgatgtaaactctaaatgtgcatgaaaattctttaaatatctgcaggagagaaactctaaattaataataagataactataagtcatatactctagtgataaaataataaataatttgaaaaagttgaatgttgacattttttttaaaatcaaaattgatgggttttgcaacatgaatgttaaatgattaatttagcagaattttttttttcattttcctaatataagcttatttttttatctgtcagatttttgctctattgaagaaatag

SEQ ID NO: 80824 - DNA, 946 bp, Citrus sinensis
  Intron number 1 from transcript orange1.1g018476m (locus o range1.1g008174m.g) derived from phytozome v7.0 (chr-ID sc affold00040; pos 168974 to 169919)
gtgccactgaatcggtcgcggtgcaaaagctagaggtatattaaaaaaaaaaactgtaatttttagctaaatttcagaatttttattcgctttttatgtattttgattgcaattgtggagttaattgattttcagttgattgatgatgtaatctacgcgaaactagggttaatgtttgtatttcgtgtatttttggactttaatttgcttagctttcgtagatgtatgatgaccaatgctttaattttagggttttcactttacatattgataaaagtcgtaatatttaaacctttgtaggagaattattttaggttctctgaaattggtgaattttgtttttggttcttgagtttaagtttattagaaatgaaattaatgtggaatttgttactctgattggtacttcttttatgtttgtttacatatatcattggctgtacttgttcttgtgccatttttgaatgaacattagtgttttttgtgttgatcagagtactcttcgttcatttaatacccgcatggaaccatgtgagttaaataaaatctaagaaacaaaattcattgtttataactaggcttggtgaagaatttaaatagatttttttttaataaattaaagtgcaaatgtggaagaattgtgttgagctgacgtatgccaaatttggttatatttggacggcatatttgtcagatggatgaatcctagtccaatacgagtaatgccaagattacagcaagaaaatttcctgcacattgtaaattctctggagtagctaagtgcttggtattatgctgcccattggggttagcttttgaggatggatacttgtacggctgtgtgcctgatagtaatcttgtagaattgtttgctgaaatttagttttctttactgctgatttatctgttattcttccttgaaatcaggagcacagtggtgatctga

SEQ ID NO: 80825 - DNA, 723 bp, Citrus sinensis
  Intron number 1 from transcript orange1.1g027762m (locus o range1.1g027762m.g) derived from phytozome v7.0 (chr-ID sc affold00043; pos 662406 to 663128)
gtctcttcttcttctccggcaacaaatttaaccgggtaattacaatttttaaatatttattatcataattatttctatagtttaatttcaattccctttttgcttagaatttttcccatgcttgtaatccatgaacaatttttattttaaaagtaatccacaaatctttctattccatcactaattttgcttcccgtatctttattaatcttacttctttttttccccattctttgcatcttgaatcgtgattttgcagttgattcggtccaagtattttctatttattcaattttttgtccatttaattagcatcgatgaacagtgattaagttgtaaattttgatcctttcatgctctaatcttaagctccgaattgatgaagcaaacccatgcttcaatttgcgtagatatatgcttaatgctccagtttgtgtagatatatgtttaatgaaggaataatgaggttatgttcttttattattattattttttgttttcttgatagattaaagtattttaggtaagttgtttgatgaaatgcctaagtgagtttttattgatgtcaaaatgaaggggtaagagtagttggtcagatctagtgataaaagtaatctgattaagtaggaaatatacatctgagtattgaagagaattattgtttgtggacttggttgaagatttcattttggttgattgaggcattggtttttgtaggcattg

SEQ ID NO: 80826 - DNA, 738 bp, Citrus sinensis
  Intron number 3 from transcript orange1.1g017818m (locus o range1.1g016177m.g) derived from phytozome v7.0 (chr-ID sc affold00248; pos 164677 to 165414 reverse strand)
gtcaaagcacatttggcctctcggtgcagaaggtactttctttgaacttgactttgacatttgtggttaatgttacatatggagtgtagagggaataattggaaagaaatggataccaatgttcttatcgtaataaattcatttgtatttttaatttttctttttttaatttggggtaaaagattaaagatttgttcatataaaacatcttttagcaagaataaaaatatcacgtaataaagattaaatatgatttagtcttgccaaaagatagaactttgtttagttaaacatttttattttacaaaatgaaatgcaattggtgttgagattctgtaggcaactatttgcacttggcagaagaaaagtggttgcatgtcggtgactagtctacactattgcttttctcaagtatgcaaagaattagtttgttattatttagcatgtggttcttagtatgattttccttgttgggttgtttctcaaatttttagagatgcagtataacactcatttttgttatgatcttatcaaattttccagtattttgattaccgtagcatgtttagatttttctgcaatcacggctacttcgacttcctcaaaacaaactggatcacgttgtacttcggctttatttcattagcggtatttacctttagagtatcatcctaaatttgtatggttcagttatttggttgaaataatagtgccgacttatggatgaaaaatcagaaa

SEQ ID NO: 80827 - DNA, 816 bp, Citrus sinensis
  Intron number 1 from transcript orange1.1g027425m (locus o range1.1g021995m.g) derived from phytozome v7.0 (chr-ID sc affold00028; pos 288704 to 289519)
acaaagagggaccagactgtggttagtatatcaatttacctctatgcattatggatgtaaatacaaaattatcaataagcccaatcacagctggtcacatgccagcttatagtgtagtacggtgtaaattgattatgcactcaaaatgctggtttttgaattgaattactgattgaatatgtgaggaccaggtggcaaggctggttgttgatatcagcagatgttagaagcagttatctttgcattctgctcatggaactttaaagaattttatcaactagcatgactacgattatagttgctctttttcttccagttacaaatataaattatacattggttttgttgccgacatctgtttttgtgttcgtgatcgtttggaaatatttgtactttagttttgaaagtagaatagctaaaatgtttactgaagtgactctgaccatacatttggcacttcaatcccactcttcttgacaactggttattctattccatagcagctatggattaaaattcacagtacttcaactgtgtatgggcactcagcatacttgcaatgttggttacaaggtcttatagccctgtcttatctgaatggtagctctaaaaataatgtgattttaagtgcttgtttaagaactgcaatgccttggctaagtggaatttcctggatgattgacactttttcgtttggtcaagttatttacgtagcctggtagttgattctttgaggtaataagcacaagatagcttttttgatgtttcatgtgtgagatttaactgcagaactagagaaacatattcctgatctcc

SEQ ID NO: 80828 - DNA, 703 bp, Citrus sinensis
  Intron number 1 from transcript orange1.1g031876m (locus o range1.1g031876m.g) derived from phytozome v7.0 (chr-ID sc affold00088; pos 296733 to 297435)
aattgtcagaaaagcaagatctttttcattgcgtaatgtgttcatttcaacttatttaactcattaaatttgctttgtgtacttctattaatcatgtttctaaaagctatacgattttaattattttttgaaacgaaagcccagtaatttgagcttctttccaacgtgaataccttatgttccttttttgtcaaattcttgtgctaatggtttttctgcagtagctccaatcacaattctgtttccattgttagtgagttctgtaggggattaaattggttgaagcgtacctccttatgagaaatactgcttgttgcagatgttgacaatatatgtgttgtatttacctacaattcatttttttctttttagtggaatttataactagtcttcgatgggacaaggaattaaagaagggaactggaggagtttgaattttgtagtccgtactgagctcaatttctttttaacatagattagatatggagcaaggccaggactaggaagaaaaggaatcgcttcttttttgtttcgtttgatctcaagtgttaatgaatttttccgaacttagttgctatggatagttggactaaaatatttgttattctacttataagattttctataatctttacttggaatcaagaatcattgttcgacatttcctctcaggtctcctgacgtgtcccgaatccgagctaag

SEQ ID NO: 80829 - DNA, 875 bp, Citrus sinensis
  Intron number 2 from transcript orange1.1g006516m (locus o range1.1g006516m.g) derived from phytozome v7.0 (chr-ID sc affold00090; pos 289408 to 290282 reverse strand)
aagttcctgcagcttcaagccaacctttacttaacgtgagtcataattattacattgttgctaataatagtgaggaaatttttcagcaattgacaattgtgtaattagcaggagttgggaatttgagaaacactcttccatataattgttgaatatataaatacatgttatacaaacattacatggttgcaccttcagggaatcgtctgatgaaagataatcatcatttcttgaatgataattttctgcaaatttatacttaattgagttagtggccatgataaatcttttaattgcttgaaaagcattttttctattgccaattgtagtttattttgatgggttaatttgctttcgctcaaggatcaaccatgttgtagttgcttaaacaggaggatatctatgtcttatatactgtgcagtataagctgcctgtatctctctctctctctctctcactctttctctttgtttgatgtgatatgtatctatgtctcgtgcatgaatagcacttctgtgtccctaagttggcattatcagatggtcctatctaattttgtggtcacttaagtggccatagaaaattttcaagcagtgtctatagtatctggtgaaacttgctgtccatgggttgacactcaattttcttgtagatagatgaggatgcagcggttggggtatatgtttttttataagttgagaagatatgtgttatctctgtatatttgtttatgatctatttgtgagtaatcatttgagttgatattggcggagggccctttaacttcagaggtctaatttatatggtatcttgaatatgatggtgaaacttgctattgatgtgagtgtattggctttatcttaattgcaggtgg

SEQ ID NO: 80830 - DNA, 602 bp, Citrus sinensis
  Intron number 4 from transcript orange1.1g012675m (locus o range1.1g004304m.g) derived from phytozome v7.0 (chr-ID sc affold00186; pos 54474 to 55075 reverse strand)
caggtaagaatactcaaataaccttaaatgtgcagtggtgatatacatattctcacttctcccttaatttgggctgtcttctctttctatccttttcaaatatatctgaatacttcgtggatgtttattggatataacatatttaggtatattggtagttactggctgcttaagtcaagagatagactcggtcatcctggaaaagagaacttgcccacgaattatttcataaaaacttttttttttgcatttagtcaagtttgatgcctgaaaccatatgtgtgtattatgggacaaagttcgtttttaatttcttcttggtattcgtcactttgtaatttcagattatattttccttccattcttggtgatttgtaggtgttataatttcatttccgtcattgtaatgagtggactgctgctgaacaccatatttttttccttagttcttctctaatgaataagattaattaatccttatttttaattgaaaatgatgacctacaagttcacagctaaagtcactggattcttttattttaattttgatagctaatatatttttcatggctcttcttctaggttaggttaaagcgacacag

SEQ ID NO: 80831 - DNA, 768 bp, Citrus sinensis
  Intron number 2 from transcript orange1.1g017845m (locus o range1.1g014748m.g) derived from phytozome v7.0 (chr-ID sc affold00013; pos 173385 to 174152)
aggctttctctctttgcgatcccaaggtccttgaggtgagtaaaacattccttcttctagttgtataaggtaacaattagatctgcgctactgaatattattcactttgagctctgtcatggcacagtagtgggttactttagcaatttgatagaggtatctgaaaattgctttagttattgtgtcaagctccttgcttgagtctcttattaattaagcgcatttagtaatgattattgcatgtggtaattcctgagatagttgatttgcaagttcaaagagatttttttttttgaagagagcaaacctgacttgttttattttcttttcctttctgaacttagtatttactttcaaataatcaaggtatcagcagcccattcctggtacaagaatttaaattaagaaaaaaaaaggaccattagattaatgtaccttgaattttaagaacacgtctgacatgttactcctactgttgattttaatatagatgtatgttaaatgtgtatatatattgtaattgcttaaggagaggttgctgatattaccctaataattatacaagttttggtggattgcttctctttcatccaaatgtaacgtgtctttgcgactttatagatctgaatagtattcgaaattattagggaaaacaattataagttgattgcaattttgttgtaattagatgctttccccttcttaaactttaacttacaagcagtttctgtcttttggcattgtgttcttcatgacagtttgttgaca

SEQ ID NO: 80832 - DNA, 475 bp, Citrus sinensis
  Intron number 3 from transcript orange1.1g020303m (locus o range1.1g020303m.g) derived from phytozome v7.0 (chr-ID sc affold00139; pos 227675 to 228149 reverse strand)
agaagtgacttgggcagacaaggtattattttttctccttttcatttttcattttttctattttacttttggtttgtaaaaaaaaattatggcatttaaggtatgatattattgtttggagtttcctctattggttcttatcctaaagttggaatcgatttttatccagttattttcttgcaaatgttctggaaatgtgcagcaacacttcatttattgtaaaaattctctttatttattaaataatatccactttgatagattttaccaaaatagattagaacaaatgttaacgggctttcttccagatcatatcttatattggcatatttctcatgaaattaaaaacacccacagctaccaatatttgccctttttctttttctttcttttttcttttcggtgatttgttttgttgggtaatttgtgtgtgactacagataagacccagcaaagaagacaatcatcttcggaa

SEQ ID NO: 80833 - DNA, 317 bp, Citrus sinensis
  Intron number 1 from transcript orange1.1g008007m (locus o range1.1g008007m.g) derived from phytozome v7.0 (chr-ID sc affold00040; pos 618897 to 619213)
ccgctcttagaggccctgaactagacgaagtcaaggtaacacactgcaaattccgaattatataggatcccctctaatcatgatttgagtttttttaaagattttaagctgcatgtccattagagatattgcatgtttgagatttaacaaatcacccttctgaatgttgctcaagaaaagctccgttcggaagggaatccttttttattttggattcgaagtgtgatgttatcattaattactttaacatgagtgtctgaaattttcttgtgtctgctcttctatataggacactgaggatattcttctgcccaaag

SEQ ID NO: 80834 - DNA, 884 bp, Citrus sinensis
  Intron number 1 from transcript orange1.1g013993m (locus o range1.1g009634m.g) derived from phytozome v7.0 (chr-ID sc affold00121; pos 375277 to 376160 reverse strand)
tttactctgtctgtgctcttttgaaagatactcaggtatttaagctaactttgttattgttatttattattttaaatttaagtaaataatttctaatttttgtctgagatcgtgttaataaatatctttgtagattttactgttaatttttcgatggacagtttcagttgctttcgactgttaggacctctgtttggctgctaagaaaacgcgagaaattgaaaattaatttctaaatatggacttgctaaatttgaaaaatgtaaaagtcaaacctaaaatgttccaaagtttcagttacatgtattataccagtggtttatgattaattaatatttatttcagttgtcaatgttcttattcttctctgtttttgtgttttcaaaaaatctatcatgtgcttaaattgattatgatgatccataatagcttgttttgattctaattattattattattttttaccagcagcactttgtgtatgttgcgtgtcagctcaaactaatggtttatgtcgattacaaaaaccttaatggttatattcttctctttgtagtttatttggttgcagaggagatgattgaaaagaaattgattaattttgaatataatgatgtctactgtttttttaatttaattatgactgacaagcgtgtcttgatggtagtaggttctactgatttagaatgatatttctgtggtggcttatgtcatgataagagtcaaattttggacaaacttattgtttattacaacttgctcttgatgatcaaatagaatttgtattattggtttatcacaatttttctcaagtttggtgcctcctagtcctatgtatgattgctaaactagaaattcggatactggattttacagttgtcgac

SEQ ID NO: 80835 - DNA, 579 bp, Citrus sinensis
  Intron number 1 from transcript orange1.1g007365m (locus o range1.1g007368m.g) derived from phytozome v7.0 (chr-ID sc affold00018; pos 1328575 to 1329153)
agagatttgatttttgatctgattttcaaacgagggtaaaattttttcttctttagtaaatcaaacaaatacttctgtctctcatattttaaccgaaacttacgcttcttgtccgatctcgagaatagagaaattagggtttcgtttgtgtctttacagatttacgcctcgtgatttttcgaatttaggattcgagcctgttgaagcacttgcatttgcgatttgtttttgtttccgctttgttaaagaattctttcgggttcgttatcgcattgtataaatgctgttgatcttaatcatgttaaatttttttatgattttgttttcttagtgtcggtgcatgcttttgttttggattttaatctacttgcttcttcttttttgttaatcatattgtgcaatattttttaatttttgttacaatttgtttatttttttaagccttgtaccttttttttattgtagtattcatttcacgattcttataccatctaattttttttttaatttgttatgttgattgtagttgcattctggttttcagggtttttgatctgatagttagatagttagaaagca

SEQ ID NO: 80836 - DNA, 719 bp, Citrus sinensis
  Intron number 2 from transcript orange1.1g021138m (locus o range1.1g021140m.g) derived from phytozome v7.0 (chr-ID sc affold01488; pos 19906 to 20624 reverse strand)
tctcaggggtcctgttttgctgaagtacattccaggtatcaatccctctgatataccatccctttattaggtgtttataataattcatgggttttgtcatattggtttcaatgcattggttttgatattggttacagcccattagcccctactcctctttcccagcagcctttaatggtttttttttaattttttttaagcattgtactttgattcatggtaaaatttgtttgtatgatgctaagttgaggacacgataatagtcaattagtcatgattttattgtatgcagcaaagataaatgtccataaaattttatgttgttgaaataataagatttcgttaattttgtagtaagaaatgagggctgttgatcccttccgtttattatatgcaatttttttttcactctttcattcatttattgtgaagtgtgtttaggtattagtcatgggcaaaagtaaagatctttactttggtatttttgtcttcttgtgcttcattggtataaatgaggaaaaaaaggcaaaaataaaataaaattataatatttgcatgaattccaccatctatggtatgttgaatagattaaaaagcaaggagtacagtggtggaatagcaggtggggggactactttttttttaaaaatataatacatattgatggactaattttccttcccttaattatctaaaatttttcttttggaagaatacaa

SEQ ID NO: 80837 - DNA, 473 bp, Citrus sinensis
  Intron number 1 from transcript orange1.1g022850m (locus o range1.1g022850m.g) derived from phytozome v7.0 (chr-ID sc affold00256; pos 98813 to 99285)
ctggacgcgaggtcagcgctcttgtttcttgcctttttctttttcaataaaaaattgtttgttctttttaattacttttgttactaattttggtataatttcttgaaatgctgtagagcataagctgctttgtgtatgttttgattaacagccctgtactctgcatgcagtataaattttgattagataataacagatgtgtctgtgtatgttttgtctaactaaattctataagctaagaacttataaaaataagaaaatgaatgaagaaagaaggaagaccattcaaactgtcactaactgttgttttgatggaaattccttgttttctagttgctgagtttgttatgaaaaatatgatcacagtggtctcattttttaggcttcttttccacttatgcctgacaaattgttgaatgttgtgttttcactatgtagacattttccaaagttgttaggagttgggcttcgaa

SEQ ID NO: 80838 - DNA, 961 bp, Citrus sinensis
  Intron number 3 from transcript orange1.1g032625m (locus o range1.1g032635m.g) derived from phytozome v7.0 (chr-ID sc affold00414; pos 66129 to 67089 reverse strand)
ctgtagtcaaagttacgaacaccttagtaagataaacttgtattttgcttattacttggtgacatcttccagttgcatgttatggaaggattttgtgtgaatcaatttcattatgtatgacagcattttgccagctctcagtgcttactttttgccttgcacattactttctttttataggtcatagatattagttaatttttcgtatacttttcatgattgttgcatatcttctctttccgaatgctgtcaatagaggctacaaggtgagccgtgagattgaatggataaattgcaagtgttgttttcaccctttttttcccgtgtttgtttatatttaatatgctattgattgatacttctctgcatggggactgatgatttgattaccttcataagattatcttactttcttatatttagatcagcagcatcccagttctttaaaagttactgattgattctgatttaattagcatttatgatagtaatttttaaatcatgtgccttcattcttttctgtatctgacccttacagacaaagttcaaggttttttgcattgttcatgtatccctggattttgttcaggataataaatgttcttcggttggttttagagggccatccaagttttgagattatattttttgttgatgttaaaatatagggtcagatgactttgttgatgccctggaatcaagtatctcgccggtgccctgcatgttcctagggtgtacttgcaatgaatgtcaataaactttatgttgtttatacatgctattcaacactgagctagtaagtcttctttttctgtacaaaatagttttagttctctcgaaaaatcaagttgtggataactaactactcaatgctttaatccaaccacctctatcatttactgtaacatgcctcttgtcttttgcagtggattcttgggctgtcctcatctgtcatcaaatt

SEQ ID NO: 80839 - DNA, 655 bp, Citrus sinensis
  Intron number 1 from transcript orange1.1g021077m (locus o range1.1g021077m.g) derived from phytozome v7.0 (chr-ID sc affold00018; pos 1321880 to 1322534 reverse strand)
cagtgcaagcctctctccgaaccacaggttccttccaattaacgctcgcaatttcaattaatctgatcagccaatatttgattgattatcagaaacttgaaaaatctttgttgagtatcaggagttagaaaatgaaattatccatttcttgtacaaaaatggaagtattaagtataaaaaaatacgaataaaggtccttgcaattaggtattattggatttagggtttatagcggatggatacttcagatctcaatcattgatctgttttaggtatttgtattggcaaaagagaagctttatgaagttgtattggcaaaagaacaagatttgtatgagttgctattttttgtcgtgatataacaatgatggcttgaggataattcgcaaagaaggaaacagtgaatcacatcttgtaattgcagtgtttttgcttaattctggaagctcgaaaactaaagtgtttgtgaaatagcaacatttaattggcaactaatatttaccaacaatgtatccactatccttgcaatgctataaagggacctatcttgtgttatgttgtcaaagtgtgttgtcagtctcgcaatttataatgcaactgaggtggattagtaatcatatttgatttgatttactgttctgtaggttaaagcatt

SEQ ID NO: 80840 - DNA, 616 bp, Citrus sinensis
  Intron number 1 from transcript orange1.1g010410m (locus o range1.1g008564m.g) derived from phytozome v7.0 (chr-ID sc affold00125; pos 215162 to 215777)
cgggttttgccattgctgaaggccctctttgggtaactcttctttttttcactcaatcgcatttttcttttttcttttttggttgtctcttgtgtgcttgtttcttgatttggaccttccatcttagcttttctcaaataggtaccacattttcctctagattttactgattgaggctatttttcggctcttaccttgttagccgttgtcctaactgcgcttgggttttagattctcttgtggcttatgatgtattgttggccgcaatttccaaagaaaattagtaaaaagaaaaaacggtcaaaagaattacatgttagtttttgaacatgctacttttggaatataaaatgaggattctatgcgttacaaaatgtacatttacattttgaaaattgttgcatattatataaaaaatggtttcaatatcagtaaccccaactttccatagcatgttcttttgaaatgtgactggttaatactaaaaagatggtgatataatgagctgtttgatattaccgttattatgatcctattttttctattcatattaatactaaaaaaaaatggtttcttgacagggaaggcgcagggctgtggctccatctcttcacaa

SEQ ID NO: 80841 - DNA, 467 bp, Citrus sinensis
  Intron number 1 from transcript orange1.1g045442m (locus o range1.1g045442m.g) derived from phytozome v7.0 (chr-ID sc affold00069; pos 276488 to 276954 reverse strand)
tttacttctttggtgagtgctcttacttactcttttgtaaagggcaaaagattgaaatttggagtttcttcattcgggtggtagtttttatccccttattttagatctatctgttgttttcaacttttacaaataacattgcatttttctacatattggtatgttaatccttgttttgattggaaagttttgaatgtgctctcatctatagtgtgaaactattatattcaacttctctagtctattcttcaatacttttactctctctgccgaaaatatgcccttgttattggacgtcggcaattatatattaataaaggtgcactttaggaacttgatagaaaaataagtagttgtattgtatttgtaggatatgttttcttaagcgtaaaattgattctagtatgttttctagtctgattagtctctttcttattcttaattgcttaccagagaccctactgaag

SEQ ID NO: 80842 - DNA, 784 bp, Citrus sinensis
  Intron number 1 from transcript orange1.1g035395m (locus o range1.1g035395m.g) derived from phytozome v7.0 (chr-ID sc affold00013; pos 1354430 to 1355213)
aaggtcagtacccttctctgctagcaaactttttttactcaacattcatctgtctttgaagctctgcggtaacttattcctgttatcatgctcctgacaggcatggaagaaacacccagatttttgttatttgggttttaatgtatatgaatttgctaaaaagaaacatgatactaatcctgatttaataattggctataatgatatgactagaataaaaagaaggtggaatatatatctctgttgtggccaacaagtaggttcaggtgacactgatcgtctctaaaccattagagtggttggtagatgctcttatataaaacacatcatcgtcctgtgttttatgtcatagatgcttttattataatatactagttatctacggttttgatcgtgagccatcattagttgaagaaaaatcgtgctgttatcaaattcatgagagatatttggcttgatccatttaggtacaatgattctacacaaaagctactcaagggagatattttgctcttactgatgctttttattgtctataaaactgtactccaaactccaaagaatagttgatagggaaacattgataattaattgaaatcagaattttaaatttgatatcgagaactgtggatgatcaaaggatgaaaataattaattctgttggataatagttgttattagaaattgctacctaggtgtttatcccatgcacaacacgttaatctcattttttatgttgtaatctgtaggtaagggagcagaccggaacaggaacagagctatc

SEQ ID NO: 80843 - DNA, 727 bp, Citrus sinensis
  Intron number 1 from transcript orange1.1g032295m (locus o range1.1g032324m.g) derived from phytozome v7.0 (chr-ID sc affold00037; pos 476904 to 477630 reverse strand)
agcgacacaaagctgatctgtccatctccgccaaggtttcttcgccttcttgtcctgtctttttttttttcatttttccatttggagtatgtttttcacctttgacggaaaaagtaaggttaacgtgcaccaaaagttgcctgtaaaattctcagctgattatctggctacatgtgatgcttggttatctttgtggttctggaacatttttttttttattctgattagtccttgggagtcatgctttttccactctggggctgttgatatcttattgtgccttcttctgatacttttggtccttatatttgattttagtagatgaatgtatgcaataaaggctagtttactttatagttctataacaattcatcatcgacactgaatctttttcttgcaagttaaaaaaaactgttaatctcagagctcataacagtatttaaaaaaaaaaatgaaactgcttcaaacgattttaaatatttgatgtaaactttggcttttgaacttatggttggttaaaatagaacccagatttgacccttgtttgtggtttgctgagcacaaagaaacggttcttctatgtcttggtcttagattctttgctgcagtaacttgttgcttggggtttctctttgtacaacgtgaaaaatatgttgctcttgataattgtttaatttacttcttgggcataggagaggaaagagaagcttggtgaacgaatcattgc

SEQ ID NO: 80844 - DNA, 484 bp, Citrus sinensis
  Intron number 2 from transcript orange1.1g026284m (locus o range1.1g018442m.g) derived from phytozome v7.0 (chr-ID sc affold00193; pos 21351 to 21834)
agaaagccggcatcttaaagtttgttataagccaggtttgattcatgcatcttcccatcaatatattgttcaattttccattttattgtactctgaaaattttaatatgaacttacatgttgactatttcttttaatcctttgtgtctttttacataaacttcttagacatttgggtcaatggctaaatattagtgctgaccgaaggatatagattaaatctctacttaattgtttctaacagtctgatagaaaagcttgagttaaagtttttggtaattggtttaattttgtggcttctcaattaaaggtcttctattgactgaagttaaagcatagatatgtggcacaaattgaaccttatgatcattaacctgcaagagatattagcctgagatggttactttttcttacctaccattccatttgtctagacacttcatgctctgatgcttttgatatttgtgtcattttcaattttcaga

SEQ ID NO: 80845 - DNA, 913 bp, Citrus sinensis
  Intron number 1 from transcript orange1.1g034711m (locus o range1.1g034711m.g) derived from phytozome v7.0 (chr-ID sc affold10459; pos 1147 to 2059)
tgagcacaccacagccaccattggattcagtgtagtatgaagcttctatcccaaccttcccggtcaccgtcgcatgaattccggtcatcattggtctatgacggcattttggtaattttacagttcgaaccttcatcatttttcaataattcttagtactcaatttgattgatatatttcaattcattatcattataatgagggaattatgatgggtgatgatcaacttcgactatgtctttggctttaactttttatattaattttctgttttagtaatctcgtatatggttctgtaactaggatttgagtaaagattgaagattggttttggaatgatgcgttattggcttattgcagtgcagaaaaattttcgtttttggttagattttcgttttgtgacattaatgcttggatcttggcaatattaacttagaacttaagctttgttttgattgtattgagatatttaattaatgtgttaagtttaatctatacattatttaattattgtactgatacatttatagcatgataaatggggttttatttcaactattaaaccatttatggtttttttctaatacgggtaagatatactagattgttctttaactttttgagttgtgtatatttggaaggatatgctcataacatgctataaattgatcatctaatattattatggattgggtttgtaatgtgtaacatagtatccataacattgaacatcagcttgcttatatctagttttgttgcatatgtttacttgcattttaggcagtatcagattgtgtttggttttgtggcatttgatggcagttcggtctgttcttggtgttgatttaagatctttattgttgtgctgatgttaattccaggtgctggaatcaactaattatattgctggttt

SEQ ID NO: 80846 - DNA, 859 bp, Citrus sinensis
  Intron number 3 from transcript orange1.1g026105m (locus o range1.1g026105m.g) derived from phytozome v7.0 (chr-ID sc affold00013; pos 866724 to 867582 reverse strand)
tgttatattgacacagttacagattaaggacttaggtaattgctttccgtgttgattctatcctatgtttctcccactctgtaattacgacttataattgaatgtgacatgttcactaccttctttcatttcttactattggttggtagtgtatcgcatctttttctgttgattgatttcttgagtatctatgacgctgacttcgttgacccatgagaatctctgaggaaacgatttcttattcagatcttcagccaggttaatgatcaaaatgaatattttggttgcacaatttgaagaaataattgaggatgagttcatacttgcttaagttggattacttttcgtgttgtttggagtagaatacttctagaaactagaaattgattttgggtttccttttgtttatgaattggttgatatagtttgacttcatattatcgccatcaagtgacataaatatatatatatattttttttgcccccacttttttcaattaccttatagcttcttaactcacccagcctaaatgaattaataccccttccaaggttgatgttgagagaaatgaaacccacttcactcagatgtttgtgctcggtgttgatgcacttaagatgagttcttatcatgtttattatatctctcttcagcaacccacttctaaaatcttgttgttgctctgcatgatttgttatcattttaatatatcgacttctagtctgttccttcaaaatgctggtttacacaagaaacgtggtttcaactgacatctggacactagcacacacagagtgagaatatagagtggtgtagtacttatattttatcttttctctattatagagaaaactttgg

SEQ ID NO: 80847 - DNA, 1001 bp, Citrus sinensis
  Intron number 1 from transcript orange1.1g030632m (locus o range1.1g030632m.g) derived from phytozome v7.0 (chr-ID sc affold00019; pos 1565989 to 1566989)
caagggtggcgagcaaggctgggccgctcagcccagtatgtttcccttgctttctttttcttttcttctttttcaattttcttccgttttttagatttggttttgttactaaattttgattttgacccactgtattgtcggggcttagggtttaggtttggctttgttagaagtaaatattagtttgacttctctataatttttcttcataggcagtgataattgattgttaacccttgaaatgaaattatgaaaaatgaatattttttggtctgaagatagatctctcatcagattgagttttggagctcagttaccttgattgctaaaattatcactgattcccttcattgctgtttgtgtctatgattttatttattgtaggacttgaatatgtttcaaccacttgtcttgtagaggtggaaagaacttggaagagtctcttagctattccattttaatttgttctctcctagacaagtctatataaaatcttttacgatggtgtttttgaataatattctgggaagcagcactgttaattgctgattttcaatttaattgttgttgtacgtttaagattttcaatttcttttctgtaccttcctttctcttgtctaggtttagggtttctaagaagcataaagacattttctatttcttgtcatttttcagtggtaggtatgggttgatttcttcgaaggttgaggacagaatattcaatgcttgtgtatttagctttgtgtgtgtattagatctcatagtcacggtgatatcagtgaaaaataaaatttgtggttaattccatgagaacatatttgttttcttcaggttacttatatcaaacacaaactttgttgatatcttataaagtacaggagatctaggactttccggcgctaaatgctagtgttgtatgtatcaggtgttaaatgatcaggcagatcagtatttttctgatgagactcaattctgtttttctcattttccagtttgggcgg

SEQ ID NO: 80848 - DNA, 468 bp, Citrus sinensis
  Intron number 1 from transcript orange1.1g031209m (locus o range1.1g031209m.g) derived from phytozome v7.0 (chr-ID sc affold00077; pos 9541 to 10008)
ctgtttctttgcaagacagtgagttactggttcctctactgtagtcctttgaattttgtaaataaaaatggacattgttattattttttgctttcaggttcttttcttttttatggggtttatcgtcagttatggtgtatgcaatgtgtagctcaccaaattcttttgttgtttacgccgaatcagtatctgatgggttttaattctcattcaattgcttattcataaactgtgtccaaaatgaattttttatcttaaaaaaaaaagatttttccttttttggataattaccaaatgaatttgtatatgaagaaaatttctttttggaaagagagcttatcaaattgtaggctcatcgatataatcacaatcataagcaatgattagattttgtcctcagtatatcagtttgtttctcatttctgatttctagctgccattttgattttaggtttagctggaaaacct

SEQ ID NO: 80849 - DNA, 628 bp, Citrus sinensis
  Intron number 1 from transcript orange1.1g007863m (locus o range1.1g007863m.g) derived from phytozome v7.0 (chr-ID sc affold00663; pos 29176 to 29803)
tcaccagatcgagcacttcgctgaagcctctcaaggtacaaagtatttttcttgtttttatttttatttttttgtcttctatgcaacatgttctccatttcgtgaaactacgtactattgcatagcttcatcattcttcgatccgattctgtgctttatttttcttctctatggaatcagaaaccgttaacccgcggaattacgtttagatcttgtcaatttcgcgtcttttaatcctttctttgagttcagttccctgcttaattaatttgtttttcttcccccttttttaggcattcatgaagtgcataattattttgattttttttttttgtctttttgaatctctgcagtgaatgaatcattaataaatctttttaccgtgacattgaaagaaaatgaatcttgagatgcttgatagttgtgtcggtcttagttaactgggattatttatttatttattattattttttttggtgttcctaaattgatgcaaattttgtggttttaaaattttttaccaataaagaaatctcttgtttacatttctttattcattttatgtaaaggtaaaaggtatgtgatgtcttgattatgtttctgcagctgcgagatcttgtgagccaag

SEQ ID NO: 80850 - DNA, 1012 bp, Citrus sinensis
  Intron number 3 from transcript orange1.1g026662m (locus o range1.1g020225m.g) derived from phytozome v7.0 (chr-ID sc affold00234; pos 161602 to 162613 reverse strand)
gcatctgtcctgaggtttggtcttcatgttttgctcttaattttaagtttgattgaaatagtaaatcttggaaaatgaaaaatgaatgcagcttcaatatccaggtcacaagttgccttttctttcaaattagaagagaaaaaatgtgtaaacaaaagagttgcctctctggaggacttgttataaatggcagtgcacatgggtaaacaatgcgtatgttaatgtttcattcttgttggtccttggacaacaagctttttcagttgatagtaataaaccttcctaaaaatttcatccaactagtggtgtgaaaaaattttgtgttgctatcaggttcgcagatgcttatgtccaagtaaaccatagatgcatatattgctgattgttatagctgagccgttgtggatgctgggttcctactcatgatgggaactgttaagatttatcatcggttctttttcccctgaattccgcatttttaatttggtctgtgagatgttgctccaaattatatgtttctttaatttcaacgtaggctcatagcttgttgattttcttgttttcaagaatttacattagccttactgttacagttgtccttatctctagtttgctcctattaaaatcttatcatgcattgttgttcacttaaatggttgcaactcattgttggctcttttatcgaatattattagataaccttaacaagtttcagtattcaactactgaatcgtgcttcctccttttctttatcttttaccccaatttaccaattctgagaagaaatcttcatctttataagcctcacctcttgtataattttgcgaattgattgaattgtatatatggatatccaagttatttaaggtgttaattcattcaatgagcatggtagtcctgcatggtttatatgaagttctattgggttgagttgcaatatgatctgtgtatatgaaacaatggaatgtggtaccatctcttactcaaagtactaatgttttcaaatttagat

SEQ ID NO: 80851 - DNA, 814 bp, Citrus sinensis
  Intron number 1 from transcript orange1.1g026662m (locus o range1.1g020225m.g) derived from phytozome v7.0 (chr-ID sc affold00234; pos 163341 to 164154 reverse strand)
ccactgacaagaaaacaaggtctacaaacaactgggttcgtctctttttgctgaaactgcattaatgtccctttcatgtgtgtgtgtgtgtgtgtgtacatatatatattctgttctcttccttcaaatggcttccacccggttaaaatttaattgcttaatgttaaaattttgggtatctgggtatctttgatattgaagtgctgtggtttattaccttgctgctgttgaataaaatcactaattgtcaagtacagcaagtgctgaacttacttaaggtttgctaattgttgcttttggaatatgttaagtagctgtgccttaagctttttcagacaaggagaagtgttgttacagtgttaattgtaatgcttactgtctaacaaatttaacttaatccagttattttgtcatagaaaaggttgtgaccactggctttgaattattcgcccgttccatttacatgtggaaacttttattagtgatttgatattgagcacgatggccattttttttttttttggtttacaatgcattaggtgaacaacttgggacctttttcacttgaattttggcctaaaacatttggcagaaattccaaccatccttcttctttaatccaatggtgtagattgacatcactgatgtcactaaattagaatctgtaatttagcttctaacgtaattggtaccattactagtgaattagtcactttgcaatagctttgtgttattgtacatcttggtttcgatttgaaataaaaattggacctgtttaggtttgttttcgttgaaaaagaagattgaagacgca

SEQ ID NO: 80852 - DNA, 696 bp, Citrus sinensis
  Intron number 2 from transcript orange1.1g003065m (locus o range1.1g002063m.g) derived from phytozome v7.0 (chr-ID sc affold00363; pos 59482 to 60177 reverse strand)
aagtcatcaaattttactaccttatcagaattcaggtaagtttatcgcctttttaccctctcttatgagtcttcattcaattcactttttttattggtatttaaaaaataaaaaatagtaaggtaatgtataattaactattctaatagtaaaaagaaacctaaaagttagatttggttttcagtataggggacatgctaacccagaaaactaatgaaaattattagtttttacaaaagtttttaaactgtatttaaaagcaagattcaattgttaccattatttttatttctttctaattgttaacttttcttgatgctaaatttatatagccaaaatgcaaaacaatgcaatgagtagagtaacttcaaagcatagtacatataattaatagtctctttcttagatataattttataatgatcaacaggaatcacaccaaaatccacagctaaaaacaaaattgacgtttgaacgtcaatttttttatagataaactttattttatgtgatttatttatttatttttattgtatttcaaaggtataatctaatttgggtggtcaatagattatgattttattttgaatcttcttcttttcagctgtttctgccatggtcattaatcgagtttattgatcttgtggcgacatcctttgtttaaatgaccaaaatttgccacttggttttttgaca

SEQ ID NO: 80853 - DNA, 194 bp, Citrus sinensis
  Intron number 1 from transcript orange1.1g003065m (locus o range1.1g002063m.g) derived from phytozome v7.0 (chr-ID sc affold00363; pos 60166 to 60359 reverse strand)
taagtcaagttactgcacgagatttccatttctgggtatatattttctttctttgatccattaaagagaaaaaaaacagaggatttcttaaaaattttattcatactttatttcttttcttgttggcttaatagcttgtaatttgtgttgtagtttcagaattctctagagaagaaacttgaaagtcatcaaat

SEQ ID NO: 80854 - DNA, 800 bp, Citrus sinensis
  Intron number 2 from transcript orange1.1g013870m (locus o range1.1g013860m.g) derived from phytozome v7.0 (chr-ID sc affold00068; pos 531449 to 532248 reverse strand)
ttcactcaggtcttagctctcttcattctttgaaggtatgcacattttgaagttcatagtgcttcttttcctgtttgtctttttttctctatatgaaacttaaatttgaccttttttaatgttactgaaatttgtttatctgctctttttatttgtacttttgtctaagaattggtatgtgttaactcagtggctattatttcaatttgtcatatttgaagaattagctagaattgattgtgcatgttatgattaaattgagatgttgtggcttttaattcggagctgctgtggaatggaatcaatagtagtcatgtgcaagttgttaatttgttatgcctttaaaattaagctaaagcatgacagtttcaaactggtccttagtctcagtgagattgatgtctgattctgaaattcatcgataaagtattcaaattttgcgggatagtttagttccatttggccttgcctagtttctaatcaattggagagatgatccattcacattgcaaaagaaactttcgtgtgggttgccttgtgttgtagaataagaggtaatgggttcccttgtgttgtggaataagagataaggttattgagctagcatgtcatctgttgtatcataggccaactttattctgtggcgctataaaacctgacattaatgctgctacaaattttgataactatcaatttttgatggtttactgaataattgtaacctcatgaagtttctgtaaagtttctgagttaatatttctgcagcttagtagcggaaaatataaacttcaattaaagtc

SEQ ID NO: 80855 - DNA, 787 bp, Citrus sinensis
  Intron number 3 from transcript orange1.1g014199m (locus o range1.1g007415m.g) derived from phytozome v7.0 (chr-ID sc affold00086; pos 511839 to 512625 reverse strand)
acagtatcagagttggtggcagagatcaaaccacggtacttgatgtttggagactactacttatcaatctatgtgcatgaatgaatatcgtgatagcccactagtttaccattctgttcctgatttttgatgccttttctgtatcatgaaacagactgaaaaggttcaaatctcggaaaatattttgcctctctcatttttgtaatggagcacctctaccccatgttaaattgttgaggttctcaggcttttataaaatgaaaatgtgtaaattctcaattggtgttcaaaatgagatgcttcttgggatggaaacatccctgttgctctaacacatttcatccctctcttaccttacccttgaaagatgtcatggtttcttgacacttgctatataattttagtatctggtttgttatcctaatgtcaggaattatgtatatccagtccatttgtgtattaatattgaaagacagtgttttgtagctagcagaagattgtaggaaatcactcaacaattttgattttaaagtggatcagtttttttatcatctatgtctatatgtgatcaagatctacgctgtgtacagttgggctgatggaaagcagcttctgttaattgagatgcggtcctattgcatatttcaatactcttttattgctttctggcatctccactgccgaatataactttagttttactatcctacataaatgatggtttatctttctaattaataatgtcctctgcgaagctatcacattgcaggttctaagggtgtattct

SEQ ID NO: 80856 - DNA, 969 bp, Citrus sinensis
  Intron number 2 from transcript orange1.1g014199m (locus o range1.1g007415m.g) derived from phytozome v7.0 (chr-ID sc affold00086; pos 512926 to 513894 reverse strand)
ctggttgaaaggcagcggcaacttcaccctccacggtaatgctcttcgacttcctttttccccttgtttaatgagaatgtgatggattatgagtagctagctgagcccttaatcttatatccttcaaatgcatttctctgttgaaaaatactttgcgcagtatgccttatgatcaaaagtacttagttaatctcataagctctttttaaaaattttaatattgtttggttgcatttgagtagagtttatgcagattaaataagttattttacctttatcagtaaaaactcaaatttagagcttcaaatactatttatttatttcacaattttatttcattcttttcataatataattttaaaaactttgtctattaaaataattttataatttttataaaactctcatcaacaaccaaacaactataatatttttggtaaaaattttataaaagttcttcttgaataatctctatttgaaaaactataccaaatagagtcttcctacaataacaccctgacctagaagcactttgtggaaaagcgtttaccaaatgtttcttgaaaatgcatttatagtgcttctctaaagtagatcaatcaaatagttatccgaaagacactcttgctggtccttttttatttaataatttaaaaaaatataattgtttcggtttcaaacaaatacaaagaacaaaaataattgcattttcattctatcgtgcctttgtctatttgaatgcttgttaaacagtgccaaaagacctgccaggctcagtttatagcacttctgttttgagaacaaatatagaggcgtgtacaattcctctatagatgttaacggctttggtagacccaaactgctagttgcactaatagtgagtttggtaattatcattttctcatcatagctgatcaactgcactcatgtctaggtttatctgtggcatacttatctggaaggcaatca

SEQ ID NO: 80857 - DNA, 346 bp, Citrus sinensis
  Intron number 1 from transcript orange1.1g026059m (locus o range1.1g020742m.g) derived from phytozome v7.0 (chr-ID sc affold00419; pos 105534 to 105879)
aatattctaagcttgttgtggtgatgatttgttttcttttggtcctaatggaattttttaaaatccttttgctcaaagtgaccatatatttctgtttctgacatgatatattgccagctagtctttgctttacaagtgtttggactataatttttaggtttatgttggaatgtacctgtaatatcggaaatatttgtcctttataatcttcttttatgttaataacccgtatggttttcttcttcttcttcttcttcttcttctttttctgcgtatttctttattttccgataaatatctgtaaccattttggtcaaacaattgtgctacagtcggtttgtattaa

SEQ ID NO: 80858 - DNA, 872 bp, Citrus sinensis
  Intron number 3 from transcript orange1.1g030128m (locus o range1.1g030128m.g) derived from phytozome v7.0 (chr-ID sc affold00041; pos 429349 to 430220)
gcaactcagtggacagacacctgttttctccaagggtattttatttctttttattaattattataaagaataggattttgttagaaagaaagtcaaagctttaggagctctggattctagatctctctttatattgtggtcaagaatgtgataagggtgtgtccaatgcaaataacctctttcttcagttggatttttttaatttgtgagattctgataagtcaggtttgctcattttctgcatactgcagttgttcattgtcttttgttttattgttttgtggatttttggagaagaaaaccgaataaattagtggtttctttagtagtattattttctttatgtcaagtccactgggattgtttttggattattatgttttttgttctccattgctgggatctctagtaatggatgtaaatatatttggatcaagtctgtttgattgattgggtttttttggtctctgttttgaatttatttgagaagagaaagcttttaggttaatgaatattacagtgtttgtgattgtcattagttgagatgatttgatttgtatttcatctcaacaatcaacatttaagttgtttttatgctaataacttcctagtttctcatatatgatgaattgagctaattggacaatttgcaatcccttttttttcaagcacaccaatgttgatgatgaaacccaaagtcccaaactatttcttcttcctgttcttttaaaatgtccccctttaagtattgtactggggataggagttttttggtcttggattttgtgtggtagttgcgatacttattttttcattttttgtttttgtgattaacagccaggtacactgttcggtcttttgggatcagacgt

SEQ ID NO: 80859 - DNA, 521 bp, Citrus sinensis
  Intron number 2 from transcript orange1.1g015296m (locus o range1.1g009971m.g) derived from phytozome v7.0 (chr-ID sc affold00647; pos 32887 to 33407)
ctagcaacatgggtggttacaagaacgaaggatttgttgaagttcttgctgcacagcagagtccagagaatcccaattggtttcaggtgatactgaacagcatttttagtgtttcagaagttatttagattctgttaatgcttgtgtgttattaatttgatttggacaaattaaatgagttttgtgttattaaagattggtaatctcttgttcttggccatgcgattcttatcaaagttaggtttaatgatttgcagggtacagctgatgctgtgaggcagtatttgtggctctttgaggagcacaatgttctggaatttctcgttcttgctggtgatcatttgtaccgaatggactacgagagatttattcaggcacacagagaaactgatgcggatatcacagtagctgcgctgccaatggatgaaaaacgggctactgcttttggtctgatgaagatcgatgaagagggacgcataattgaattttctgagaaaccaaaaggagagcaacttaaagct

SEQ ID NO: 80860 - DNA, 662 bp, Citrus sinensis
  Intron number 2 from transcript orange1.1g026300m (locus o range1.1g026364m.g) derived from phytozome v7.0 (chr-ID sc affold00170; pos 27862 to 28523 reverse strand)
tgtcgtggagaagaaaggcgttcctgatattataggtatatgattatgtttctttttacttttttttttttcaatgtttgattcgttgttcttagcattcaacataactttaggtgttggaaatatttccgttgctaaactgattagctgggtttggtttagttctgctgatttgagaattttggctaaactcaaccgattcgttatctgagttaaaagtggtgtactgtacaatttttttacttatgttcattgattgaacaataaattataggtatgtatgatgatgttgcacgaatatgttggtagcatgaaaagaaatgagtatttagcagtttatgagttcaggatgatgaggacaagtttttgacttgtaatgtacttgactcttgcctgtgtatgcatcaatatggtggttagttctcaatttgattttaccctctgaatatgcttgtatgttgattcaaaacatcatgtgtctgttccggttgtgaaatgacattttcttgaatgttctcggacactttgatgtagaaatatgattgcttgtgcaacaattagagagtattgattctgtccttttttttttttttacttttaatccttcataatgtgaaactgctttgcccatagagctaacttgaatgtatattcagtaaaca

SEQ ID NO: 80861 - DNA, 353 bp, Citrus sinensis
  Intron number 1 from transcript orange1.1g034688m (locus o range1.1g034688m.g) derived from phytozome v7.0 (chr-ID sc affold01989; pos 10970 to 11322)
aggttttgctcatttagatttcaatcttcttaatgctttcattggccactgacgtacatttttccctaaaatgtttcacttttaccattcatcctcttgcctaaactcaaaatttcaagtaaataggcttctaacctcaattttttcaaagtaaatagcagaagcttttatcagcatttcggaaaaaatatcagcagtcataatttttcttaggagttggcattatttcaattcacaaactttatttcattttgaattagtatgtgtttttctgattttgttgatggtgaaagaaattagaagaatttttattccttttttttaaacttttcctttcttccaggtggatatat

SEQ ID NO: 80862 - DNA, 657 bp, Citrus sinensis
  Intron number 1 from transcript orange1.1g004961m (locus o range1.1g004568m.g) derived from phytozome v7.0 (chr-ID sc affold00193; pos 112101 to 112757 reverse strand)
caagctttggcttcggttcaaaaggtaaattcgaggttttttttttcttttggttaaagtttatatattttaattaattcttttcttagaatgatagtgttcttgtaatcacttaatactactgatatataaattatatatatataaaagggtgttgtttgagagaattgttcgttgtagaggccaattttttgtagattgttgataatattttctgggtgctggtttctagttgcatcatgggcttatggccatttgatcatcttggaattatgaaaaatactgatttttttgttcgatgtttgagggtgaaaatctgattatgttgtgtacgccaatcaagttattttttgtgaattttattgaaggatggtctttgatcatacaaaattttgatttttcttctattttttgaaaaatatgtgtaagcgaaggtacatataagcaagttaaagtccaaatttgcctggtattttgtttatgaagctgtgaaactttttgtttcttctttgtatgactcttaaagttggtctgtatgtctctcatttggtcttcttttagctatataatcatgttttcaccaatccaaaatggaattatgtcgctgatttgatttcttcagttttaggtcattatttggtttcttctgaagagaga

SEQ ID NO: 80863 - DNA, 890 bp, Citrus sinensis
  Intron number 1 from transcript orange1.1g031801m (locus o range1.1g028067m.g) derived from phytozome v7.0 (chr-ID sc affold00009; pos 1452029 to 1452918 reverse strand)
agaattgttgggggagatcataggctcaaggtacttttgtcttgattgtataagtggcttgcatgttatgcacttttgattgtatagcctcaacaggttggcatcattcaaggttcatcaaatatccttgactatgaatcattatgtatggtcttggttagttattttttcccccacctttttttggcctgcccactgaagtttaatatggctagattatgaagacatgttacgtagtgtcatgccgtcatcggctcatagcctaccttatcatgtagtttggcttcttgtcttccagtaacttttggcatggtgaagaattgaaaactcagaatttcttctcttgttgggataagatttaataagatttaataagatttaatgagtcgatcttagattattatcatggtggtacggttgagtgggtttatgatatgaagaatcaaattcgactggagttttgggtcaaagatactgtagaccattcaagtggctgtttagctatattatttctcaccgctctgctcatgtagttgtccctccgtttcttagttcgtacatggtcgtccttctgtctacatagcacattttaagcaagcccatttattggtgctgccgttgatggatcaatagtctgagggtaccactttattgattagattacatattttgcctgagcagtatttattgtcaaattcttcatatgtaattattatgaattgtttctattttacatgtaaataattgaattttattttaatgtattggcactgtttttcaatgccagtgttctattatatgtagatcatctggaacttttccaactttatttcaacatcttcctcaaaattgcagaactactcgtctattgttacggtccatccagaggt

SEQ ID NO: 80864 - DNA, 499 bp, Citrus sinensis
  Intron number 3 from transcript orange1.1g020677m (locus o range1.1g020502m.g) derived from phytozome v7.0 (chr-ID sc affold00119; pos 383877 to 384375)
cagagcgtgtcaagcttaagttggaaatcaaagttgaggtgtatttgtttttaattttttttattttttctctctgttttctttttgtgcttattgaactcataatacttactaaatattggaattttgagttaaggtgaagttttttgccaaattatctgataagaaatgatgttttggaaagcacctcaagtgcctttttaattccgaaatttttgtttctattaaagtgtgtatcaattgcttctttggaaggacaatttatatgcttgttttgtttcagaaagctctctcttatctctagtctagctgaacataataaaataagaaaaaaaaattgtttttgattttgattatggtaaatcagttcaaggttgttaaatgtgctcctaagtgcaacatgattgtatcaaggtcagcactagaatataacatgaagaggaaatatttactaatattgaagtatttatgacattttttgtttctcaggtggtggatt

SEQ ID NO: 80865 - DNA, 973 bp, Citrus sinensis
  Intron number 5 from transcript orange1.1g014405m (locus o range1.1g014405m.g) derived from phytozome v7.0 (chr-ID sc affold00203; pos 82649 to 83621)
tttaacatatcacctttttttgtgtcttagccctggtgagcagattccttctagtttgttaaaataatgttgattttactttctccttgtttgtcatctggataaggttgttggttagttttctacgatttggttatgcatgtatttagcaagaagaatagttgcattttatagctttgtgttttttggcctgggacttatgcaaatgttagactgtcttctgtaagatggatagggtttggctagtgagcctagtctgtggtgaattgcataagttaaaatacgttgagaagtagagaaaaagtgaagaatcaaaataagcttagttaaactatgtttcatatggttctttctctaatgcttttttttttcctatacttggaacttatgtgtgcgcagatcacgatttaatttcaaatgcctgctttctgaggtgctggatacaaattactgaacattattctgttatatgctggatatatatcatttcaaatgccttttattggtttcccttgtggttgatttttgcatcacagctatggaataaaattttgttgtaccacttcttagggatgatgttgatctggtagtggatgagttgctctcaagttagcttatgaatcttgtttcaagaggtgctagggcagttgtgggtcaatcgttaaaagaagttacctacatggctagggacttctgttcgttagcaaaaaattatattccgtactatttcttgatttctctttttaaagtactcttgctcttagtgcattcatactgatgccttattatttgacgtgtactttaactcaagttctaatatactttttgaaacttcatgctagtaaaaaactttattgttctcctggtttggaacaggccatgcacatttattagacatgatttgaagtccttgcctactatgtcgctgtgtttatcattttttgttttctttttgcagctttactagttgaaa

SEQ ID NO: 80866 - DNA, 495 bp, Citrus sinensis
  Intron number 1 from transcript orange1.1g020298m (locus o range1.1g020298m.g) derived from phytozome v7.0 (chr-ID sc affold00324; pos 65830 to 66324)
aagtctggttcaatccgcatctcatccttaaggtatttgttttctttctttttcttttctttttattttaattatcagcatggaattacatgattggggttgcatttttttttttgccagattcttccattattggttctcttgattttatcatattaaaaacaaataataatctagtttatcgttttaattaaattaaaatgttttgatatggcacatagattctaatgcctgcaaattgcttttagatttgcaatttggttcatgtgctgagtttttttttttaataatatcatggttggtagttgtttgtttagaaattatatgtgattaaatcttaacgatacactgttataaatgcgcgtggcaaaagagttcagtttaacaccgattccaaaatcatattttttattatttgctcatgttggattaatgtttgatgttttcatttgatgaacagtacaaggacctcaaacgattcttcttgtcgccatt

SEQ ID NO: 80867 - DNA, 686 bp, Citrus sinensis
  Intron number 1 from transcript orange1.1g047018m (locus o range1.1g047018m.g) derived from phytozome v7.0 (chr-ID sc affold00013; pos 1420096 to 1420781)
ttgcatttgtggtaacctttccatttctgttttgttttgttatgtttcttgagctctctatttccttttcccttcttcttcttcttattattattattactatttttttttgttggcaaaaggttttttcatcaccccatccaacacaacgcatacacaatatgtatttttgattttttaaattttaataagtgataaatatatgtgtgatgatatcaatttttaataatagggtgacgatgtgacggtgtcaataccatctaagacttttttctcatactgatatttttttcattaattatttaaataagaaaaaactactcaaaacctaattttgaaataaattcatttgataaaaggagaagagatcaggagaagctcacctgtgaaaatttatcattttcccttccaccaggaccaccacatgcatttgaacagtcgagcttgttgatttggtagagtagaaattgagtagtccgtcggctgcttttaagtgcaataattgtggctaccactgaacatgtgacgagtgagaatccaagcgtggtatttgtgaagtcattgttgcaatcttcacccgaatagcatgacggattaatattgatcataatgttcattccttggtgttatttatttaataaatgtttctattgttgatctatttttgtgcatagaattcggctcca

SEQ ID NO: 80868 - DNA, 939 bp, Citrus sinensis
  Intron number 1 from transcript orange1.1g005263m (locus o range1.1g004252m.g) derived from phytozome v7.0 (chr-ID sc affold00068; pos 78755 to 79693)
ttctacatctccaaatcattactatctgatctcaggtattcttttatcgtgcgatttcttcatcctttttcttgctgattgttttctggttttaagcttaaggtgtccgctttctgccttttttacctttctttcttccttggtctgaaaaaaccctagcagctgggactcttgttttttgtttttttcttttcttttttaacgctatctgatgttgattatatttgttttttctgcaaatggctgtttctatttatgtgatttaagcctcatggaattttgcaatttggcaattgtgattttagtcactgctttccgtttccaactttgcgagttatagattaaaaaaaaatgaaaattttgtctggtcatccgttcagtggtttcccaatctcaggtccattcgtgtgcttattttgtgatggattcttaatcctttcacatttatatcaaagcttttgcttgtgatttcaacttcagctcctgtatctaatttacccctcagttgatttttagttatggcataaaatcaagttttattttggaagagttgcgatccccatatactattttgttgatatcaaagctaggaatttggccattacaaattcaaacatctatttttgaagggcttgggtcaaggtcaaatggcttacctatttcttggatgctggaagaagaagatcattatcttcttcaaacatgcataatctagctttttacatgttgagaagcaaaaatgtattctttttggagtatcacatactgcatcattcttgattttaaaattttacatcagtttctcgttgccatgattttgtagcattttcttatcaatgcatatatagctattcaagcacaagaaggtgactcttttagtagtattttctttctgtgctttttttttttttaattaggtatctgaacggtcagcagaga

SEQ ID NO: 80869 - DNA, 371 bp, Citrus sinensis
  Intron number 1 from transcript orange1.1g030943m (locus o range1.1g027027m.g) derived from phytozome v7.0 (chr-ID sc affold00366; pos 107612 to 107982 reverse strand)
gacttcccatcggcagtgacggcttcaaaacactggtgagtctctctttgcagcttttatcatcttcaaatcacctaaaaatctcaactttcaacagttgctgaatctgtttgtagttaaagattccgatttaaaatattaacttatcagtgctttcattacttctggtgaagattttgaacaaattcttataatgggtattcacaaaaaccaagtgggtaatttttatttttggaaaaatgattccattaactaatcaaatattctatgagctaaataggtcttaatttctctttattattgttattattactactacttctattactattttcttattgtgtaggagctttgtgaattgcttaagagat

SEQ ID NO: 80870 - DNA, 992 bp, Citrus sinensis
  Intron number 1 from transcript orange1.1g000744m (locus o range1.1g000744m.g) derived from phytozome v7.0 (chr-ID sc affold00730; pos 15588 to 16579)
agaggacctagcaggttagtttcaaatttgttgtgacccttcttgttttgtagtcatctattcaacttctcaactggttttaggctctaaatatatgcatatcttcatttgggtttgcagaatgaatgcgacttccatgccctcacaggatcttgatgaatctcttgtgtgggatcctcaagtaagcttgctttatgtagatacacacacacacacacacacagttacccattgcataaatatcaatgccttaacggatttataattttatataaacaatcttttattcttggcgacaatgccagggggacatgcttgaggagaatgaatatgaatccgattatgagcctgttgatgattatattaattctggaaaccctaactcggcgtctcctagtggggcaaaaatgattaaggatgaggaaagtgagctgaaagaacatgtcaatccaattttctctcctatagattctcccaaaacccgtagtccgaaaatttcatctccaaaaccagatttgcagaatttatctccaaaaactgatgtgcacggtcgaaaagaacccaaatctttattgcgacttctgtccagccgcatatctcatagccctgtaccgacctcttcgccatcgtctccacaattgagtaaagattacagcattagctcagcagactcagatggtgaattggtagtttgttaaaaacttacgaacactcaagttattttatttgctttgttaaaatgttggacttctactaattgtcacttttcaattaggagaagcagaaaagctcaacgagaaactcttctcgagcaaggagtatgagttacgaagatgtgaacattgttttgctggagaacaggtaggcagtacgcagtacttttattcaagtttgttacttatgtagtttaatagacaatcctgccattacatagagtttacaaaatttctttcgaagaattattaatctttttgaattctgcagtccctgca

SEQ ID NO: 80871 - DNA, 921 bp, Citrus sinensis
  Intron number 3 from transcript orange1.1g001734m (locus o range1.1g001464m.g) derived from phytozome v7.0 (chr-ID sc affold00009; pos 654484 to 655404 reverse strand)
gattgcccaggtttgaattgtcagatttggagcaggtaccttaaagttttgtgtgttgaaattgcagcatataccatttcaatgttttctgaagcatgtctcttagttggattgctgaattgtagaaccattgtgaaccaatttgaattgaggtatgcatggttagtcggttagcccttagctgagatgagagaggttctgggttgacttattgggaacatttattctgctggcaatgatcctttttcagtgtggattcattatatatcattattgaaaaagatccttggatgggatgcggctttgcaggaaactttcatcaaagacttgttgtgtcagactcttgaaaatggggatacatatttcaacaatcatacaaatagtagtaggagaatgcactgctgtttgctaaatatgtattatattttgagagtggtatgcagatttgatatgaaacttctttggaaagcttgaaaattatttcttactgcagtttcactacaaacaatcttataatatgatgtgtttgccacattatcaattcaaaaacatactttgacactttgattttgtacgtgttttgttagaaagtaaagcattgaatgccttatgtcttttaggaaaaaaaaaacttgtgttcatgtatacaaagtacacgttgtagcaaaaacctgtcattcaaaaccaaattagctgaacctgattgaatataggttggaagggtgattttttgatgagaatcaaccctcatgtttggtattggtttatagtgagttgtccacattgatctgtactcggatatttggtactaactggttgaagttttaagtcttgcagtcctatattatctcttctttggttgtaactctttattccttctagctcatctctttgattatttgagatactgtgcaggggaac

SEQ ID NO: 80872 - DNA, 853 bp, Citrus sinensis
  Intron number 1 from transcript orange1.1g016912m (locus o range1.1g016912m.g) derived from phytozome v7.0 (chr-ID sc affold00018; pos 78292 to 79144)
tcagcagccgaagttgttcaagactccaccgacaggtcagtttttttttgttttcaaaaagccttttgaaagtactttttgttgctttttgggagcaaaaactctcgaatttagcttttaaagtgcttttcaaatccttttgatgaattgatttctgggttgcgtagaatatgtatgtctgtttatatttggagataatggagaatggttgttaagaactggcttagttgctttttttttttctttggcgcaatttttattcctactttttgggaaacattatttttctttgatttttaaaaattccctaatgatggatttcatatctgtttgttagctttcatgcaaaagtaatgggtttaggaaataaaccttttacgtgtttgggttaatctttatatttttgtaatggttatagctagtgaagcatgagtaacttttctatctaaatccatattcgattttgtgctttatttctcaaactatatttactgaggttatagttatagtactttgcttgttgtgtcattgtataatgcaagctagaattttttttttcctttttttgggaaaaaaatgaaaatacattcaagctttgagctgaaaagtaaaagaagttgcatttggatttgtcttattcaaagttaatgcaaaattgtagtttgtttagctttcttattttgggaagccattaaagtttgttcaactttcttcttttgaagagtgattagtaacttcacggggggtaatttaatggttctgggaatattaatctggttgataattttctgatatgttgttcattttgaattttataagaagtgtatgttcttgaactacaattatatttagg

SEQ ID NO: 80873 - DNA, 831 bp, Citrus sinensis
  Intron number 1 from transcript orange1.1g013824m (locus o range1.1g013820m.g) derived from phytozome v7.0 (chr-ID sc affold00595; pos 63586 to 64416)
aggttttttttttttttttttaattctgaaaaattttcaggacgcttttaatagtgtgtttagtaaattatgcttcatgcaaagcactttgcaaaaactttctggaaagcacttttcaagtgcttcttggaaaagcactctttttttttttttttggttcccctacattataagcactattagtacatatcaaacgcttgtccgaacggcacttctagttagttaaaaaaacatatacatgggccaaacccgttaaaattaattagttagtgccttcacctgtttgagcaagcttttgtccgcgccaaaagcacttttagatgcactatcgtagtgttcggcttaaacatagaggacttatttaaaggatttaaaacagttggagtgcttatcggggaagcgcttgacatgtgattgttcagaaagtactattagaggtatgaaagcacttgaagtcttattttctctgctgagacaatgtgtcataattaatttaattccattttccagaaattgttttgattctaaaggtgtaagagaaattaagataaggttgttaatttggctttttggcaattaactactgtctcacaatcacaaagatagaaaaataaaaataagattagaggtaacgtactaagtatgaatgatcctcgtactgttaacaaagttagttgagagtctttgttttgctctagctatttattatatttgctttgattttgatctgcacttgagcaattaatggttttttgatttatatgcatgattcttcgtcatttttttcatatttttctttatcttatttaaaggtggtggaagtgaagtcaa

SEQ ID NO: 80874 - DNA, 709 bp, Citrus sinensis
  Intron number 1 from transcript orange1.1g021900m (locus o range1.1g013745m.g) derived from phytozome v7.0 (chr-ID sc affold00090; pos 398058 to 398766 reverse strand)
agctcggccacggcgggtttggtcccgtttacagggtacgcttataccacaatttcttcttttaaaaaaatttaattttattaactttttggttagtttaatgttaaattaatgattataattatgttatttatttactcatttatttatgatttcttatataatataattatgttatttatttacttatttatttatgatttcttatatatattatattttaatgacagtttgataaaaatctaaaactatgtaagacaaataagattgtgttaaagcccaaattacagtaattaagcaaatccaacaggcttgtagtgtttgaatattatacaaatttctttgccttttaggccctgtttggtattgcggttggacaactgtggttttatgctagattattaaagtgtttggtaaacattacaccagcaattgtagatttaaaatgtttggtaaacgttactccagcaattatagattggtatgttaatttgatctcacacttgtttggttaaaaactgatgtttctaatatttttatcaaaattattatttaaaagttatatttactatataccatcaatttttattttataattgcagttcttctttttttccacaatctcaataccgaactgagcttagtttgttaaattagtaaaaactagtaatcaaatttatttatgtatttatttttgttacaggggttg

SEQ ID NO: 80875 - DNA, 779 bp, Citrus sinensis
  Intron number 1 from transcript orange1.1g031162m (locus o range1.1g031193m.g) derived from phytozome v7.0 (chr-ID sc affold00013; pos 1770541 to 1771319)
aaattgaagggtttcgagttggtgtcaatttagaggttcattccgttcccatgccttttactgttttcatttgttctattgtatttcctatctcatgctttaacaatttttaacttttaattactgtggatgatggttaattttgcaaacaatcatgagcttgtctcttacaattgctaaattattgatttattgcacaattttaccattgattaatgtatgtataaggtctgtgttgtatttgggtggaaccaataatgaagagtatggcatctcaaaatctggagtttctatgggagtttatcttcagttaagatacttgaaaatgcagttcgtgaagttaatatattgctttattagttattgatgaaggttgtaggttggacaaaagctgccattatgtcttaagctgttctgaaaataaaaaggggacttatacctgcttcattcaaagtttattatataacttaatgcgattgaacagaatgttggatggcccaaaatgttccacttgatagaaatgaaaataatacgtgtaataatcaagtatgccttttctccttatgtctgggcattgctgcattggatggatttgaatagttgacgagcactcatctttgttcattgcacatttttgaaattttgaagggcatctgctatgtagttggctagttgctgcgtacaacttaatgttatatttttttccttacaatctacaagtcaatatttggtgttcttttgttttatgaatttttctcatgttatggcccagttctata

SEQ ID NO: 80876 - DNA, 358 bp, Citrus sinensis
  Intron number 3 from transcript orange1.1g042640m (locus o range1.1g042640m.g) derived from phytozome v7.0 (chr-ID sc affold00031; pos 276793 to 277150 reverse strand)
aaacccacggcaagttatttggccaaatacaatcaacttcaagaatttcatttcaaccattttttgaggtagtgttgattattttttaagtagtaccttttgtgtgatgacactagcagatttcgcatgaagattaaagaaataaaaaaaataaaaagcagttattattattattattattttggtactagtacagagctgtgaagtattgattgttttaatcttacaaagaaaagttgctaagttctctatatgtatatgcagtatattcacatttgacaggttttatagttttgaaagttttttggtaatttgatttctttatttagtttggctttgtttccttatctctaaggtt

SEQ ID NO: 80877 - DNA, 300 bp, Citrus sinensis
  Intron number 1 from transcript orange1.1g044180m (locus o range1.1g044180m.g) derived from phytozome v7.0 (chr-ID sc affold00134; pos 22355 to 22654)
aaccattcaatcccggtcattgttgtcgcactcgcccttttctgttattgttgacagaggaaccatcaaaagttttcaaaaagaagagatattagtagaggatatggtgcctaacgaagaaacagtgaatccaagtcctaaaatttcttttcatgctttgattggaacaatcagttcccaaacctttagactcaatactaaaattaacaatcaacctttatattgattgacactgggagtacgcataattatctccacccacggttggctcacttccttaatttagctattgagaagata

SEQ ID NO: 80878 - DNA, 689 bp, Citrus sinensis
  Intron number 3 from transcript orange1.1g021283m (locus o range1.1g021283m.g) derived from phytozome v7.0 (chr-ID sc affold00013; pos 1086451 to 1087139 reverse strand)
ttatacccgaggtactctttagctacttttactcggctttcacatatcctggttgatacgggattctttcttttgagtctctgatttgaagttaatttttgagtttctatagtttgttctagttacatgatatgtgacaactcttgaaaagaagtgaaatgtgacctaatgcatgtgctgctagaaagttcaatttcattatctgcttggctgttctgtctttgtgttatgaagttaataaaaaccataaaatcaataacttattcaacaagatattggtacttaaaaaagggggtgggcttggggtgtgacaaggttaaattgattcaataaagtgaatatgtcactcaagtaaatattgtattccttaaaattgtattggatagatcaaatgacaatatcattatgcattctgtttagatttctgatatggcaatagtcaatgagctttctgttgcatgctacagaaaaattatatttgagtaggttgatgcagggaaaacaagacttactccttttgttttagcagttgcttactatattttagctttaattgaatttgatacattatgcttgtaaaggaattgaagaaggcattagattttatgttttatgacagagtcatcacagaaacaattttgatctgtcttttagatactggagactgatagtgcaacccccagagtccc

SEQ ID NO: 80879 - DNA, 731 bp, Citrus sinensis
  Intron number 2 from transcript orange1.1g034733m (locus o range1.1g034258m.g) derived from phytozome v7.0 (chr-ID sc affold03337; pos 7241 to 7971)
gaggtaagagccaaattttagctctctcttaaactgcattaggaccaggaaagtgaagaaaagaggagaagagagaaaaatgatgaggctcatcctctttctatctagttggttaaataggatagaaggggaagagttgtcatcactttttcttccgttaagtatccactaagaaggggagccttcaaagatggctgttggtgaagttctacccgtaaactcttcccatttaagtactggtgatgaacctttgataaatcatccccaatttttctgctgaatttctgcccagttactgatatatctttgaccaagaagcatttccttttttctttttagatgatgaaatagaaaattaaatttatttgtgaaggcgtgtttccctttttcattgtttatttttcaatttgagctgttctgttcaatatatgcttccagattcatctcttgttgttttagttattcagtaaaaatgttgtaccagcatctgacattgcatcttaggccaaattacattaatggctgaaaaccatttacattcttagaaaaggaatattcaagcaaagtagactactatcctcgtatatgctattatacatcacatgatatcgggacatgacatacgaaatggaaattgaaatagtttctttcaacgtgtatgttttgtgtgtttctacattgattaagttctttttcccctgaattttggttccagggagctgctgttgcat

SEQ ID NO: 80880 - DNA, 870 bp, Citrus sinensis
  Intron number 2 from transcript orange1.1g012993m (locus o range1.1g012993m.g) derived from phytozome v7.0 (chr-ID sc affold00009; pos 1387753 to 1388622)
catccgattccgcgagcttgccgccgacgttttaggtgactcctgtaactaactcaccggttcttttggtaatttcatttattaattttcttttcttctcaacagaaaacgaaacgttttacctgaattttattattctgaataactgtttccagtttggactttatattttaaatgttagttgaacttaatttcaaaatacacgtggcagtaaatagaagctcgcgcttggattaaccgttccaacttaacgatagcgttttgaaaatagaagttgtttctgagaatagaaacattctaaggtgggtcgggtgcagcatggggtccatctctcgccaaaccaatgccttgaactttattcgggtgataaagatttttaaaactcattcttcttattaaagatttattagcagtgcggatagattttggaattatgtttaattataggtaaatttgaaaaattctagtggagtttatgttgctgatgtgaacgctaactctaaagcatgcgcacacaattcataatgatttttttttttttgacttataccacctgttgttcgtttcgatgtgacgatgtgccggcatgacctatgttaccttaagagtcattttaattttgttcattagaatatgaggtatgtattatgtcatcaattcatcatcctaagaaacttgatttgtgccaacacaaaatgcttttgcttttattgtaaaaaaaaatattctgaaattatttccgtggcctaacgatggaattgtcaaatagcatcaaatgtaatttgcaaaaacaaccgcaaaaggaaaaaaaaaaatttgttgcaataatcatttaagcgacagtgccttgtgttctcttgcagggtccgg

SEQ ID NO: 80881 - DNA, 894 bp, Citrus sinensis
  Intron number 2 from transcript orange1.1g030972m (locus o range1.1g030972m.g) derived from phytozome v7.0 (chr-ID sc affold00396; pos 104213 to 105106)
tgatcaatcctaaggacaatcacctctctttccaggtaaattaattaagtaattaattaacttgaattaatttaatttgtttctcatgatttgtatgtatgtagtgtaacgatatatgattaggtgcgtgtgagaatcaaacatctcttaacaaacaagtgtatagtgacaaaattaaaacggtgtattttcttacttgaaatactaatagtaataatcgtttgctgtgactgaaaacgacaatggcggggtcgttttcattggatacgaagtatccagcaagtgttattattgtcacaagattcacgagagccgacgcaagttgtttcggtttcattaggaacaataattgatcaatcttaagtcatgagccggggtcttagggcctttacctttttcaaaaagttgtaataattattattaagcatgatgaaatagaaaaaaaaaaggaaaaagaaaaaaatccttttatgcaagaataaaattaatcacgtctctttgaagaaaaaaaatgcccagtgttataagactattcaatatactaagttttatttttaatgacattattatctataaatatcattcttgcaagtctacacgagccacctgaattgtgggctatctgtaacgtgctaataaatctgcgagtgttcatccaaaaatgatttaattgtttcatacaaaataatctttttttagtggcaactcaagagcttttgtatgttgtcatatgacgtaacataacatgattttgtatcatgtgtatcgaagttttgtaaagtttaaattgcaggcatctgagaattatgttgcgttgtattttgtagtgtgtggatgtttgcatgtgagaatacttattttattatttgtgacgctagtgcgagagcgtgggaa

SEQ ID NO: 80882 - DNA, 942 bp, Citrus sinensis
  Intron number 1 from transcript orange1.1g012369m (locus o range1.1g011817m.g) derived from phytozome v7.0 (chr-ID sc affold00013; pos 1913695 to 1914636)
ggtgaaacaactctcggatcgggatatccttaccagtgagtgaattactgtggaaattctgtttggttgcttagaaaatggatgaaagtgaaaattgtgaaattttcactgtttgaggtgctattgggtgaaatagtgtactcagctaagggataaatttcaattcatccctcagatagaatgagaatttttaattcatctcctgtgaaagtcttaatttatctatttttgttcagaagacgagggcaaataagggcacgttgatggatttcttttttgtctttctagtcgtaattggggataaattgatgttttgacactttttgagggattaattgaagattgtcattctaagtaggggttaaattgaagtttatggaagtagtaatattgatttgattggatcatattaggtagaattttttgggttaatgacgaattttcattaggaaaaaagaatatgatcttttattagttaaggttctgaattggttttagattttttattcatcaatagtgcaaaggtaggtattttggtgcttgatgatagggaaaaaaattaaattttggattttaatcaatgagtattcaatttctaatgcttgattattgatatgtatacactggacagacaggactttaatatggggtagattatcattataattattgatggttgcttaaattgaatcttatggaagttagttgactgttgaagactggacatttgatgactgagcttttgtggtctgttgtgaaaagtgagtaataggatatttttgtgcataaagtagtcatattcataccttctttttttttttggcgggggcggggagggggggtggggaataactgataagagttgttaatttagttgtgctaacctaatgtccttgtcaaaatgatttttattgcagaactttggcgactggcttatcattc

SEQ ID NO: 80883 - DNA, 791 bp, Citrus sinensis
  Intron number 1 from transcript orange1.1g030303m (locus o range1.1g030303m.g) derived from phytozome v7.0 (chr-ID sc affold06483; pos 120 to 910 reverse strand)
gtgagattgtttgatacctttttttggtaagatgatttgctttgttttaatttttacatttttttggggtggtggggtgctgctctttaagatttgaattgatactgatgtttaatttgtaattaatcattaattaggtaaaattttggtgaagtagtggaagaatgaaaatattcaagacaaaataagtaaataaataaacaatgtgggacctcatttagattaattaattatctaattgtgttaagtgttgctgttgttgtttgtttcctcctaatttgctttaattagttacttgaattggtgcatgggaagtgtgcttaatgtgtttaatctgaatttaaataggctgaattattggctaagttggcttaatatttattttgatgcatctttaattcattctatttggtactagttagattcttggttaagaatagagtgagtgttgaataggttgatctttttgaaagacttcatagatgttttggacctaatttagcttaattattagtgaggtcagataacaatgtgttagtctctattgattttataaattttctattaaatattgattaatcggagctaaaggttcaagtgtaggtgaaatctattaactgaaatattgactttgacgaaacaaagaaatcaatttcccaaaatgaagttcccatgattactttagtggcaatttgttaggataacaagttttcattaatgtctattactgcttagattagaaaatgttggtgatgtggcttcttaactttgtgtccagatctggtacaaca

SEQ ID NO: 80884 - DNA, 668 bp, Citrus sinensis
  Intron number 2 from transcript orange1.1g025445m (locus o range1.1g020492m.g) derived from phytozome v7.0 (chr-ID sc affold01866; pos 7967 to 8634)
gatttcgttgtttcacttttgacaaggcatgttctttcttaatgatatttctggatgatacgtctattgcaccataatttacttatgagttaaaattaaatcaacattcgttaaagcaacaaaaagcaaatatcaacccagaggaggagtttctttagtttgtttagacttccaaaaattgattaagtagagtacttgctagaacttcagtttcatttcaatgcgcttgatatgcagtaatattaacaatatccacactatgtatttttgttataaggacacgtctcctggcaaggggttgctattacatagctgtatattacccattatgtgagaacactataatcattgacatggggagtgaattataatgatttcttttaggagcgtttcccagatccaaaatctttggcagcggatctccaccttaatggtttcaaagcaatctggatgcttgatccaggaattaaacatgaagatggttattttgtgtatgatagcggctctaaaattgacgtgtggattcagaaagcagatgggacgccttttattggtacttttctttatttgatgaagctgatttttttaaattaattttttgaggtgttaaagttatccatgtccttatttcaggggaggtgtggcctgggccttgtgttttccctgat

SEQ ID NO: 80885 - DNA, 481 bp, Citrus sinensis
  Intron number 1 from transcript orange1.1g013090m (locus o range1.1g013090m.g) derived from phytozome v7.0 (chr-ID sc affold00019; pos 1363438 to 1363918)
ggtaggtgctaacttggttgttatcattgtttttgtttctcgtgctttctgggttttctttattttcagttttattctttttggttaatatatcttggtttttgtgtttctgttaagttggtggtctttgaggcctttaattgaaagctttgctcagacaaatttttttgtgcttgtgttctattggtgcttccttggtatgtgggttctgttacagagtttttgagctcttcattgtgggtggggtgggtgggtcagttttctgaatccgaagatgtttgtaagaagtccttttcatggttatttgcttaaatttctcttcttttactcttgcctttttaagttcaagtatctcttttttgattggccgtgacgattcagttgtaaactttactctccttttgttctgttattggtctgtattatccctgtttctgtatctgaaataattccattttcttttctctcctcagagctgagc

SEQ ID NO: 80886 - DNA, 498 bp, Citrus sinensis
  Intron number 1 from transcript orange1.1g014976m (locus o range1.1g014976m.g) derived from phytozome v7.0 (chr-ID sc affold00019; pos 1668233 to 1668730)
cactatctttgagaatctgaagctatttcgaactggtgcaattcttgtgctttttcttttttgggccatgtaggattctttgcttattcatgttcttggttcctttaatttacttggtctgtgtttgtcaaattgttatgcaattaatattgttgagtgtagtaagaccatgaaatgctcttaggtcatgatacctaatcactagactttttgaagatgtcgcaccgaatgagttaatctttatttgggtttgagttactatacccaaattttgactttcaattcaggggagtgttattttctctttttaatcaaacactgagatatccctttgcattctcaaattatgtttaactagttaaaagagtaaagttttgattgataccttcattaatcaagctgattgctttccgttgagcagtgtcatctttcaattatgaattgattgaaggtttctttctcatatacaatatataattttcaggtttcacttcagaa

SEQ ID NO: 80887 - DNA, 533 bp, Citrus sinensis
  Intron number 2 from transcript orange1.1g014976m (locus o range1.1g014976m.g) derived from phytozome v7.0 (chr-ID sc affold00019; pos 1669316 to 1669848)
gtgcaaacgcctgcagacaaataaggatcaagctggtaaaacgctgtctctagatgaagctttgaaattttattaatagtttggtttcacatgctttctgtgagtttctgaaaaaggacagaaggaaaaactccagtatgcctttcaaataactttttgttatcgacgctacttgccctcaaaattttggttgaagagtaagaatgaatgctatcatataacctgcatcaacttccttcctcagtcctcttccattatgaagaagccatatttgaaatagttttctttttttccccccaaatgtattttctttatgtttggtgcatctcatgaatctgtgccaaagactaagacttgcaatgactacatcaatgtatctgtcgacatgataagttgtttaacacaagtgtataaagccaaacttttgtgtatgctaaactggttctttagatatacagcaaaacattttattatcttctcgtagtagtgcttatctggataaactgcttacaatgtgtgacaatttgattcag

SEQ ID NO: 80888 - DNA, 500 bp, Citrus sinensis
  Intron number 1 from transcript orange1.1g025971m (locus o range1.1g025971m.g) derived from phytozome v7.0 (chr-ID sc affold00134; pos 217659 to 218158 reverse strand)
cttggaccgaccttgacttttgcaagtctcacaaggtatgtgtgtgtgtctatatatatgttacagtttataaggtttagatttgactttaatattattatcagagactaggttgttggacagatcaacaattttttaaattaatctgtgtcaaaagacaaagggtacggatcactttttattggaagattttaaagaaattatataaaatatagggataaaatgtctaattgttaaaattttaaggatcaaatcattaaaaaaaattattttatagattgaaatacgaattaatatatacggcacgtatatgaaatagattattctattttcgagacagtaagtttttttgtagtagctagcctagtatcacccccggtcagcctggatctctttatttagagagagcccatgccatgttgatatgagttatgctgatttttagagatttaacttctatatcttttttttttttcaaaaaaaaatattctatgttagat

SEQ ID NO: 80889 - DNA, 619 bp, Citrus sinensis
  Intron number 1 from transcript orange1.1g046437m (locus o range1.1g046437m.g) derived from phytozome v7.0 (chr-ID sc affold03327; pos 7403 to 8021 reverse strand)
tcacttgtacaaatttaatcctgatacactttcaggttaaaaatacccaccaccccatttctcttttttgtttcttttgtttttttgcaattgccttgctggtatttttctttaaattaagtaatgcacttacgcatattaagttctttctttttcttgagttcatttggttattaattagagtgtaacttcttgagtttcttgaaatggtttagtttcttgagttagaagtgtttcctttgcgttcgttatacatatagtctcataatttgatttgttttcgtactttggtaatgctcttagtgcttttcttgagttcatttgtaattggagtgggcatttcttgagtttcttgacataaaatggtttgctcttcagtttcttgacttaatagttacttctttgcgttgttgaatgctgatttaattttctacatatggtctcgtagtttggtgcttgtatgtatccaaaacaaagactataaatatttatgttgatattattccgtattccatataatggaatcaggaagtgtagatctttttttttttttgggtgattgatacaatgatgattctgtattaataatgcacagaaaagtataagccgtttggtgaga

SEQ ID NO: 80890 - DNA, 593 bp, Citrus sinensis
  Intron number 2 from transcript orange1.1g003057m (locus o range1.1g003057m.g) derived from phytozome v7.0 (chr-ID sc affold00040; pos 419623 to 420215 reverse strand)
atcctacttctagaagcattttgggatataagacagtaagaaagtggctggactaataatactcttcccaattgttgattttgtttatctgttttgttgcttaattaagactcaaatttatgtccttgttctgtggtcatttgcactcaaatgaagcattgttatttaaggacagcagttgactccatattggattccaaactgcagtcttggtgcaggattgatctttgcctccgactgtaaaggggcagaaatagtgtattttagttatatctatgacaactgccttgtgggtattagcagacgcagaaattgcatatgtgcactcagtttaggcaatatataagtcaatttatagtctttattatggtgggaaatctttattttactacgtctcatttaacaatgctttcttggtgtcattgatgttgcctatgtttgaattaattacctgtagtgtggtgagtgcatatgtacaaaatatgcagttttatcatcaactgaaaatctgcatacttcttacttattccatttagcattcacatgcatttcctacttcactggtcacttaataaaattatatgatttgtagg

SEQ ID NO: 80891 - DNA, 894 bp, Citrus sinensis
  Intron number 2 from transcript orange1.1g036630m (locus o range1.1g036630m.g) derived from phytozome v7.0 (chr-ID sc affold00104; pos 332693 to 333586 reverse strand)
aaaaatttgatttggttatactctttacccagagttacttttgttttatgtttttacttctgagtggatttttcatttgatagttaagttctcataatgaggcaaccaagtgatgaccgattaattcatgcatttagacaggttttctgcatagcttataactgattattgttctttctgacatgttgagattttacgaatcatgagtgagggaaaatagcttatgggttagaaagatttcaatttatgtactgctgctaggaggctaaacagctatggttttcaaatccgttatagggaagcattctactttagattcttcattgactggttttaaggaactaattattgaaagttaatggttggtttagtttgagtgcaaccaaaaacatactggcagtacaattttcccgatgttagaactcattttagtcaaaaaatttgaatttaataacatcataattgaggtcttatgatagaacattgtatatgagcatttactaggtcctgtggatttctaatgtttgttattgcatctctcatgcattgaataatttattactccaagtcatctttctggtttatgtttgtctttcacaatcaactccaaagcttaggcaaactttatgagcatttaccagttcttatggattctaatttttattattgcatctctcatgcattgagtaatttattactcttaagtcgtcttcctggtttatgtttgtctttcacaatcaaccccaaagctttaagcaatttttggacaacaattcaaccacactatatatatatatatatatatatatttttaatggatcgtgtctttttttgtagcatggtctacattaatattctttaatattttacactgctttgtttgttacagcttga

SEQ ID NO: 80892 - DNA, 788 bp, Citrus sinensis
  Intron number 3 from transcript orange1.1g031842m (locus o range1.1g031804m.g) derived from phytozome v7.0 (chr-ID sc affold00009; pos 284280 to 285067)
gaggtgagtcatcctgcttctggtgcttttagtaaaggaatgcggtgaattgcttactacattttactttccatgagctctcaagttatattccagggggacttcatactgtgctgtccgtattctttgaaatgatcaatgactttatgttttctgtaactttgtttactctcttgcgttatatttaaatttagatgattatagagaatgagccaaaaagttgtcttctcttgaaattctattcacttccttgcatagttgaaattaaaagttaattggtagggttgattgcatggttacatgaattgacttgcagaatgaacctgtcacatggaattgaaagtccaccttgtagtctgaagtaagagaaccttaagtaagctgttttaccccatgactccactatatagtttctatctgtagaaccctatgctgcacttgtctttaggttattgttgacaaaaggtggattagcctaggtgtagtaagactgaaagaaagttaatcctgctagccctttccaatatttgggtggtagaaatttaagaataggaggaatgatatgttgctgttattagtgcttaggtggtgtttctccttcaaggttagtaagaaagcttcaaatgctgatccattaggccaagtccatgacaatatttaatattgattgtctgctagatataaaacaagtgtttatcctgacatatcatagccatatttcacatggcaaatttttgattttgaattcttcaggtacgttcaagttgacccttcagtttacggaggat

SEQ ID NO: 80893 - DNA, 516 bp, Citrus sinensis
  Intron number 2 from transcript orange1.1g018675m (locus o range1.1g018675m.g) derived from phytozome v7.0 (chr-ID sc affold00018; pos 59374 to 59889 reverse strand)
tgtcgccactttagaggtattactgtttctatgcttgccatgtgcttccccccccccccccccccccccttcttgaactatctaagttatttttggaattgaggttaattttaatctctacctgctgggatatggaatcactagctattaagtataaagtgggtgggtggtggtaaacattagctgccaagtacaaggggtatttactgatcactcaagctatggtactttcaaattaagcaagagaacaatagttacagacttaacctttgtttgcttacctttttttttggatggcactacccatgcctccgtccaaggttcactggcttggcaatgggcattaacttttgcgtgcaatagaaaattatgaatgtatcaatacttcaataatcaattacaactgccaaagtccttcaattttctttttatattttaattaatttattacatacatgatgtttaatattcttctgagattcttctttttgaattttccatttggtgtttagggtc

SEQ ID NO: 80894 - DNA, 659 bp, Citrus sinensis
  Intron number 1 from transcript orange1.1g018675m (locus o range1.1g018675m.g) derived from phytozome v7.0 (chr-ID sc affold00018; pos 60006 to 60664 reverse strand)
agcagagcgcctcctctcgcttttggaattgcaaggtttcttattttactctttagctcaataaattctctcaaaactctgtgttagtgttacaaattaaatttagaaattaattacttccattttgactatataaatgcttgtcataactttagctgaattatattatttacgcaatgattatagtagaaattatacaataaactattggatttttatttatttgactatcttcttcatccttttggattttctaaaaacgctgtcttacatgtttgtttttgtctctcataaagcttgttttactatcagttatcaagagcctaatggaattgttgaaacttgactcaagctacttatttattttttagactctgtttaggcttagtttagaatctgatttatctatgtgaactaaataaatgcttaatctgaattaagctgaatactggtgttagtgtcagtgctgagtgaaaatattttgtttgtttttatgtgattattggacaacatcttttgtttctgaatctaatagtgtctttatgttattaatattgtgttgatcaaaaagggattgcgatatgttagatcttggaattagtcttcgtatgttaagttcgtgttgaaataatgggattccgcaggcagttttggaggaa

SEQ ID NO: 80895 - DNA, 816 bp, Citrus sinensis
  Intron number 1 from transcript orange1.1g030901m (locus o range1.1g030901m.g) derived from phytozome v7.0 (chr-ID sc affold00171; pos 103454 to 104269 reverse strand)
ggaattcgttttgagaaactcaacgatcagtcagggtaacactgtctgattatacttttttctagttcaagatggtatgcttgacaaatgacaatcattatgtcactctactgtggtctacatgagatgtttatttgggaaatatacagctattaattgacctcccggggtgtcatcaagaccctaactaacatcttagtggattgttgttcagtatgcacatcttttcgctcctaggcacctatgctatttattaccagtgtttaagaacaggtcgagttcaggaattaatttaagttgcacatctgccttgttcagttacatacattaattgattaaatatctaatattgtcaagtcatttatggaacatttaagatgttgacgagattgatagtgccacccttttcttttcctttcttttctttgtatatgaacgatgacaacttgaatgtgaagctttgaataatggataaactcccaaatgttactagtggcttatacacacattttccagacataccacctgttgggtatctggaaattcctttttgatggctatatttaagctttcagcagatagcatgtcagcaataaagtcattaagcatttattatgtttttacaatgtgattccttcctggtgtaatgctattattcactgtagaattacattttatttagaagtattttttacatatccactggcgtcatatagagtcctatcaaaataaagctttgaaaacctatgaagtttgattcgcatgccatacaaatgcacaattagtttgattgcctagagtttattatgagcaggt

SEQ ID NO: 80896 - DNA, 537 bp, Citrus sinensis
  Intron number 1 from transcript orange1.1g045235m (locus o range1.1g045235m.g) derived from phytozome v7.0 (chr-ID sc affold01849; pos 13958 to 14494)
gcaggaaatttgcataatttggtaacagtcagtttccatacgcggtacacacgtgcttctttcttcagctataaaagaaaaattttggaggccaaggcaaccagtgaaacagttcaagccttgccaaaacaattaatctagaaactcaaattagggtacgtttgagactgtagtttttaagatataactgctatgaagtaaaaatcataactttggagtaaaattgaaaaaaaaaaaaaggctactaacctaccaaaacccaattacaaggtgttatcaaacaccttagcagttgggctttagcagctcaattgctacacatcactcccaaacacacctttaaaatgacctcaagattttctcaagttttgtcaataacccgaaaggcaccagaattaatttttccggcaagggcaacaccgcatgaattaaagcaactttccggatatagatgaccaaaaaagcttcaggtttcatattccagtaaataatcttttacaagaataacccttcatcatcacctccaatactcagaga

SEQ ID NO: 80897 - DNA, 974 bp, Citrus sinensis
  Intron number 1 from transcript orange1.1g010591m (locus o range1.1g009653m.g) derived from phytozome v7.0 (chr-ID sc affold00019; pos 1513038 to 1514011)
gctttcactgttcttgtttgcttgtctttgctctggtaagaaaacaaataatgaaggaacgctcctccacttttattattattctgaggcttttcgttttttgctgcaagtggtttctggggaagtgaaggaagcgagttaaaaaaaaaaaattaggatactgcaactgctgataaattactcctgtatagttttttatttatcgtacgtggatggtattattgttttaatcttccaaagattcctgcttttttcattttctttaataaagttttttttcggcacagttatgagtttcaagcttctttgctctgtttcttgggcttctgaaagtgaaagtcgttgttgaaattttttattttgtaaagtcggttgcttttattttcaccattgaatgtgtttatggttatgtgttttgaatattttaatttggtcctgtttggttagtgggaaaacttaatttaatgagtggaaagaagtttgaatctgttaatattccagtttctattcaatttagatgaaagaaaagggaaaaacaaatctcagcttgactcagacaaagtttgtgacaaaacattttttgagttgattctttgctttctcccaatattgaaagtaaatccattcgtttgtcattttttctcatcattttctcagcaaccaaacagagcccttttccttcttgttttttcacatattggttacaaacattgtttttgatgttaggtagtaagctattgtatttcaattgcaacaggactcgatctattgtatcagctacctcgtattcatatttatcaatattacttgttatttcttatatgttgctgctatcgctatttaatgtatactaggcatgaacttgtgagacttcattattgtttcacagttactttttttgaattgaaatgatgattgctgttttgcgaattttgataggcattttcatattgcatactttgggcaacttcgat

SEQ ID NO: 80898 - DNA, 913 bp, Citrus sinensis
  Intron number 1 from transcript orange1.1g006391m (locus o range1.1g004240m.g) derived from phytozome v7.0 (chr-ID sc affold00068; pos 195875 to 196787)
tcgagatgtataagcgtgatcctcatgaaaatcccggcattgtacgtttctttgagttctttaaatgatattttgcattgaattgtgtattttttgtccttgaataagatttccaatgatcagaatggacagtaagatgaaaatgagaacaatgcattattttatgactagtgtctgaaaaaaaaacaaaattacattgggtgaatgtggttgtgtgcttattcttctgagatattttttaacttttatagttatgatgttatatgtatggtccgtttgaggctcaaggcaatataatagtggtttctttacgtgcaacttgatgaaattatttgatcctgtatgatagaacatgttgcatatgattttattgtgttgtgctgaatgcttttttcttgccatctctggttcatgtatgttatagagcaattgggttttactcacataacatgatttttgcttggcaattttgttttgtaccgtacggaagtatagctttccttgattttatttattgagttatgtggattacacttaaaataagcagtttagagaatttccacaattgcttgtatttattatgctcttttttttttaaatggtccagaaacccattaggaggggtgtcatagggcccacacttatggtggaggagcttgggcgtcggaggtttaatcatggggtaagatcttgtaaattctatatgtttattttattaggaagtaagtttttaagtttgctttttctcattgcacatcatgttctacatttttcatatttttgagcatttctttctctttaagttgatctgcttcatgggaaccctttggatcatatttttctgtggttttctgaatagctcaagaagatgaaagaagctaattatttatgctatttgtcatctttttgtagg

SEQ ID NO: 80899 - DNA, 651 bp, Citrus sinensis
  Intron number 1 from transcript orange1.1g002955m (locus o range1.1g002958m.g) derived from phytozome v7.0 (chr-ID sc affold00149; pos 145852 to 146502)
aatctttcatctctggcttgtgttcagccttcaaagtaagttcttgtccttctttattcttcttcttattcactgctaatactatgatattttaccttctgttttctttttcgtttttctcctgtttaaatgctgcatgctgtttttgttcttgcatgctcagctgatttgctgactgtaaatcattttcttgctaaagattctactttttgattactaaatttgatttgctttgcttcgctatttttgatcaagcatgctttgtactgctaggccaccttacaagttgcagttttcgattttatttaatcagattttgcttctgggtacttccaaataatctgctaaagtctgcatcactcgcagttttctagtgactccattctgggttatggagaggaggtcataaggagtgagctattcttatacttttttgtttactggggaacagctgatttttgtgtggatttttcttttactaacttgggcttccaaaatcatgtactgcaagtagaatctcttaggcttggcttagtacacatagttttctgttatatgatatacttaacagttgggattcagttctaattgtgttttatcatggggcattttgtagattattttgatctgataaaaaagggaaccaacttt

SEQ ID NO: 80900 - DNA, 484 bp, Citrus sinensis
  Intron number 2 from transcript orange1.1g033762m (locus o range1.1g033454m.g) derived from phytozome v7.0 (chr-ID sc affold00077; pos 362444 to 362927)
attgctgaacccaaaaggtaccttcgtttcttcttctctaataacgaacacgttagctggagaagttacttcttgtatttgttgtgcttgtgcgtgtttataaaaagccctgtgcttctttgaataagttttggatttgctttttgaaacagggaattctgatgaaaaaaaggcttatttatttactatcagttcatgaaaagcagcatctactgattgtagaggctatttcttattatttgtcattaagattcttctgttggcgcgggatattctgttattgttgttactgtccatattgtattagcattgtgctcagagatatgttggattagtataggacagatgctgaacagactcctttgatcagttttcatagacaagttgagaaatgcctgaatttatgagagatattggtttgcttttcagtctgatttgttgttttgttcttgctagcttagccgtggtaaaggacttgcaaagg

SEQ ID NO: 80901 - DNA, 897 bp, Citrus sinensis
  Intron number 2 from transcript orange1.1g024795m (locus o range1.1g024795m.g) derived from phytozome v7.0 (chr-ID sc affold00009; pos 1565710 to 1566606)
attttctgaggttagttggttcagttcaaggttgtttgttctgagatatttcatttcctgtaggttattttcccacttaagagtttactggagaatatttggtttgattcattaatttttactagatcttatgtagttgaaaactaaagctctttaaatattgttgtatcctaagttttttaagtgatttggttgtttatggttgtatttgtccatcaaggagtggaaataagtagagggaaataaggttgtttgttaatgaattatggaccgtgttattgattttttcttcttttgttcctggagtatcatgatcatgctcaacttcatttatttatctaaagattcttctatcaatgctgcaatcttgctcggcagtttgccactttcccacctcacctatgccaaatattggctatttcactatatttcttctcaaagctttcgtgttcattgaattattatcagctcaactagtcagaactgtgctgcggctagtctctagatattgggcaactgaaaagtatgggttgaattggtgctttggtattacattctgctagatatagaaccatgattcttctttcaagacatcactctctctcctttggtgcctataattagacaagcagagggaaatttgtgtaaaaatcaggggaaagtatcataaaactttgtcaaaattctggaaatcgatcctcccttggcaatacagagttcttgaattccttttggcactagcacaaatgttcaaagtgaaatagacgacagtgattggaatatctagtgctttatgctatattttgactttgttgttgtatcaagttagattccctattaaataactcattatttttttcaggtcataggcctgctctttttccttccattgaaaat

SEQ ID NO: 80902 - DNA, 673 bp, Citrus sinensis
  Intron number 3 from transcript orange1.1g019815m (locus o range1.1g005689m.g) derived from phytozome v7.0 (chr-ID sc affold00037; pos 541977 to 542649 reverse strand)
ctcaagatactggattggctgcaaagagtaagaaataaggaatttgaaatgtgttgcatttagtagtacttccctgaatgctatcataaatttggagcttctttaatttatgctgcatttggttaattgttggtttgcattgggtgcatcctcgtatgaaaagtttctgattaataaaatatgctttttttttctctttcataaaaaatcatgaaaacattggtccagttgttttgccggtttcattaatatattgtatttaaacaatagatattttcgttgttgcctgtgatcattttttttatgccagcttttgataataggctgggacactcttctaaaatcgttcattaacccggcttgatcagttaaaattgatactttgtagtaaaataatatatttcactaagctttcccaggtaatattatcagtatctagtttaattaatcccaatttttgtttttttgccttttccacgttgaatggttttgttgtactccatcagcatctctatctctatcagaattaactttttaattttattattggaggctcttactattgattggactgcacagaggttagaagatgtgttttactgaatagtttttgcacgtgtgtgtgttattgtccacagttaaaaagcaacaaaaatttttgcgggcaaagtat

SEQ ID NO: 80903 - DNA, 450 bp, Citrus sinensis
  Intron number 2 from transcript orange1.1g019815m (locus o range1.1g005689m.g) derived from phytozome v7.0 (chr-ID sc affold00037; pos 542695 to 543144 reverse strand)
agcatccggtgtttgattttgaggtttgcatttatgttgtttattgctgatggttctagcttttgtgttggtttaagttacaaaatgagaattttttattgcgggcaattcaaaacttctgtatgtttgatgaatgcatgtttgggagcatccttgaattctaaagaacattaaatttttttgtactatttttttggtattgatcagctcttaaatgaagctgtaggaaaatcacaagtaatccttgattagaatccaatagtaatataaatgccgcttttcttcccctacttttgaccacataaagttgacacatttttaagatgacaaactttcacgtgtatttttgtctaaagaaattttatgggctaagatttttctttttttggtcctacagtatggatatagattgttaacatctctttgtttgaaccatatgctgcactcagg

SEQ ID NO: 80904 - DNA, 458 bp, Citrus sinensis
  Intron number 1 from transcript orange1.1g031524m (locus o range1.1g023687m.g) derived from phytozome v7.0 (chr-ID sc affold00121; pos 405343 to 405800 reverse strand)
atactgtaagcttcatttcacgatcttttttattttctttcctgaatttttttttctttttgggtgtttttacttgatgggtcattacgattttgtcataattgtctgtatcctatgaagagacatgttgggtagactcgtagcagtaagaatttgattaaaagaaatcatttttgtgtttgactatttcagatataatatatgtttgtaaattgtaactgatgttcgtaataacatttgaaaaaagtgttgatgaacactattttatttgatagttaatgtttaccacccagcaccaacttacatatcttattttacccaaacatacccataatcagcttaaggcataaaaaatcataatcgttattgtgttgttttattagtttcattggaaaaaatagacgttggttgacgtgggcttatgatttctgttcttgtaattatggattagacttttg

SEQ ID NO: 80905 - DNA, 684 bp, Citrus sinensis
  Intron number 1 from transcript orange1.1g013309m (locus o range1.1g013309m.g) derived from phytozome v7.0 (chr-ID sc affold00396; pos 118545 to 119228 reverse strand)
acactgaggtaacttatctacaacttgaactgtgtatgctgtttctgttggtttgtttgattggctctgtatttgaacttgaaaagtaattgtgtaagtgtaatgcatgttaagttttgagacgtctcgataaatggaatggcacccaattagttaagaagaaacaataaaattgctttagaaatttcacgattgtgaggtcaagttttatacagtgttaacatatccggaatttctccaatcattttttcaatgagaagttttatacagctaggaaatttctgactcaagcgagaatttctttctaagaatcttgagtttgtaattaatggactgtggattagttgattgtgatcttcgttgtagcaatggatggttcaattgaccgtattaatcgaaatccagtttaaagcactcaattagccaaattattatcctttactgagccggttttcggtttctcaagaaatgaggaaaaggaatgaagatttagaacccaaaagtctttttggtgagatgttgtaagataccaaaattctttcactaaacctgttgggaatttactagagcatcaataacaaagagaatgttgtttgttttatacgttcactctccttacaaccagttgggaagaaaagcatacctgtaataaagagcatttcttgctttctcaggcatttgcaa

SEQ ID NO: 80906 - DNA, 447 bp, Citrus sinensis
  Intron number 1 from transcript orange1.1g028542m (locus o range1.1g028468m.g) derived from phytozome v7.0 (chr-ID sc affold07159; pos 241 to 687)
ctctttccctcgccgtcgtgacgacttcttctcaggtagtcgtcttctatttcccgcccccagccctgtttcttttaaaacgctaatcttattttgctgttgaactaaaaatgcttggcggcgttttagtgtgacagagagaagaaataaactaaaaacagctatttttactcgctatcagaaaccgataattccttttaaacgctaatcttatttttctgctgagcggttgtttggtgtgacagaggaagaataaactcaaaagagctatcttacttgttactggaagcagatagttcattttttctaaaataaattttgaaaaatataattctaagaaataatcgttcgttaataccatttgttggaaacaggcggatgagtctgattagattcttcctcttggtctctgtgatagtaattgacatttattttgtggtgcaatag

SEQ ID NO: 80907 - DNA, 758 bp, Citrus sinensis
  Intron number 1 from transcript orange1.1g012300m (locus o range1.1g011114m.g) derived from phytozome v7.0 (chr-ID sc affold00006; pos 679362 to 680119 reverse strand)
tttcgcgtgctgtcaggtaagttttttttcactttgctctgtcttttgtcttatttatttattccttttgaacgttttaagtatgggtgttttgattttttattttttttctgctttgagggtttaagctgtgtaagtggatctgctatgcgagattgagcaattggtactattgttaattgaagttggtattgagacggatatgattgtttgatgattgattatcgatagctggtttttctcatgttgaagtgataaaaataataataataaataataaaatgccccgcttttctttatttatagataaacgtgtaaaactaacttcattgtccaatatttaggaagtttttgtggtaacagacactggatttattgtttttatattgatcttttttttttccccactggctttaatgtttatgagtaagcatgaagctgggattgaatttaattctcttcccattttgaatttttggcaattttttaactaaatcatgaagttaataacccggtatatttcattttatccaccaatgatcctgtatggcaatcatgaaagagcgcaatttgagaaatttaggggattttttacaatcaaatcagttatatgaaattctttatcatgatattgctcaaagtttctgaaaatgatagctttttgaccaaatagagattagcatggttgtgacttatgtttggtcgggtttattatctccgtaggttgcattttcttaattgcagcattatcttgggga

SEQ ID NO: 80908 - DNA, 755 bp, Citrus sinensis
  Intron number 3 from transcript orange1.1g014302m (locus o range1.1g013338m.g) derived from phytozome v7.0 (chr-ID sc affold00091; pos 368356 to 369110)
gtcactccattaaaccccttcttcatcctgatcatgtatcttcttctcccttttaaattccgtagcagtcttattattggcataatgaatggtaattgtgttttttgagactcctttattgaatcgtcgagtgcattgatgtattgtggatggattctaattgaaggcattataggacttgtaatcgtacttggggttttcatatgtgtgttttactcttttaattcatcaacgaaaaaactgaacttttgaattagtgaactctatgtcagtggcttagaatttaacccacccagttgaaaaatgacaaacttgctaatgaggtttatctgttgtagtccactttgccattggcaggtattggattcttttaaatcattgcaatttgggtttatggtgaacattttaacatttttaatttttaaagttacaagtacaactgtgtcaaaaagttgattgtcctgctatctgttgatcccaaattttgttttcttgcccttattcccacattttgtgtcatgtaatgcatttcaattaaatgatctattttttgtttctcaatagtttcttattggcttataactgtgatcgagataattattacttctgatactattggagcattattcaaagtcatccttcatgtggacatggtgtttgctcaaataagagagctgagtcgtttttttggttgttttctcacaccataaggtcctataggtacacttgttaccagaggttgatcttcagggagt

SEQ ID NO: 80909 - DNA, 486 bp, Citrus sinensis
  Intron number 1 from transcript orange1.1g029496m (locus o range1.1g029496m.g) derived from phytozome v7.0 (chr-ID sc affold00489; pos 71789 to 72274)
aagacatcaaggtatttttctaatttatttttttctttttaatggaaccgtgtcgttttcctcgtttattttacttggatttgtaagtttgattagttctattagtttaatatgaaaatagtgagtgagagcataaaccttgtagtgatttgataatgattggctgagcacgtgataatgcattaatgtttcatatgcaatcttagaatttatacagatgattacaacaaatttttttggtagtttgaggtaccagctagttgaagggataggagagagaaatttgtgaagtaaaatcagtttctttaagctaccttagagagaaggatcttttttgcttttgatttatttattcttacgttttttatgatttctatgttccgtcttcactcttgaagatgattgcatttgaagttctttgtgaaatttgaacttttctttttttctgcaggagcttttttcagaggttggtgaacttaaacggtg

SEQ ID NO: 80910 - DNA, 1007 bp, Citrus sinensis
  Intron number 1 from transcript orange1.1g012130m (locus o range1.1g008146m.g) derived from phytozome v7.0 (chr-ID sc affold00013; pos 1481027 to 1482033 reverse strand)
acggcgactcagactcaatcgagtcacccgttctggtaacctttcaatctctttcgtgcccattagctgctgtattttgaattctttaccgtggaatctgggtaatgggttttttattttattttttttattaacatatgtttttaaaaaataaaaataagtatttatggggcttaattggtgcttgaagctggatgactgtattaattcagcaccttttgttttattctattttattgtgttgtgttgttgagagaaggcttgtagaatgattggaatgcgtgagtctaagatctttcatgttgatgagattttcgtttcaaattcaataggtgtgaagttatttacattcagtgacggtcatgtgtgtttgatgattttagctattgatggcttaatttatgatgtacaggtagttgggtcaagaaatgtagctcaatttaattacgtgtaattctttttgtctttgtgacacactgcgtgtttatctaaaactctcagaattctgtgttttagaagcatgtcgatgtcaaggtgcgcatgtgaattaattgaacttttggctttagcaagtttattggtgattctctctctcagaggtggctgggttttgtctaggctagtgatgaatggtttcataatagtttttatcctaattaggattattttttggccttccttttgtgtgactagtatttgtgtttagcagctttaattatgttgcttgtaaggcacagtccactcttttttttggaaacatattctttataattattgctggtttattagactagtatcaattcaattttgcttgtatcattttcaaactctcgaaattatcgagttacgaagatgcagagtaattgactaattgcttagatggaaactgatgcaaaatgatgttgccatggaaataagttttaagtttaaacttttttttttgggtgggtaactaatcaaacttgcatcccattttccataaatttgtccaaaatttaggggaagcc

SEQ ID NO: 80911 - DNA, 485 bp, Citrus sinensis
  Intron number 1 from transcript orange1.1g023107m (locus o range1.1g023107m.g) derived from phytozome v7.0 (chr-ID sc affold00009; pos 737165 to 737649)
ctttgcgcttgtttactgcactgctggtatctcaggtcagttctagctttgtaagttcacttttttctacatttttgagagagggggaaaaaaatcaaatctttaatgagtattaatgcaaacattatgcagttttaatattgttttaatcattttttattttatcttttcctgatgtttctatgcttctgcacaagtaaaacgtagaatagcctttgcccattggtttgtctactaatcgttagatctggctagtgatttctttgtatgcttcttttatggactaagttttgtgactttcctagttaaattttatacttatcaacgtctctacgtgaaaaagttttaatttttactttttaaatttttttttttggttctttattgtgttcgtttcttatggtggtgatgatgatcagatctgtttgttctttgctgtttaaacaacaggaggacacatcaacccagcagtgaccttcggtctg

SEQ ID NO: 80912 - DNA, 624 bp, Citrus sinensis
  Intron number 1 from transcript orange1.1g016706m (locus o range1.1g016706m.g) derived from phytozome v7.0 (chr-ID sc affold00419; pos 40540 to 41163)
gctccactgacctgtccacccagctctctgttccagtaagtttactcctctcttattttttccaatttttttttcttttttgcccttttttgttttgaatcccagccgttgaattcacttaccatgacctcacatcttgtagcatattgctgccacctggcataccgcattgattgaatgtatttttgtaatctaatgtgtgatgcatgcggggtcattttagttgaaaaattttaattaagggtaattttggtaattcttttgtcttcgtgtcggtcgatttatgaatatgcactgtcacgtgggtggccatgttgctaactttaaaaagtgaaggctatgtgatacgtcatatacacggatcaacagatgttatttggtttcatatcaattgtttgtcttcattctgttagcaagtcagcaatcattaatttaacattataagttttgttgaaattatttaaaagaagttaaaaaaaaaaatcaatccggttcggtttggtttgggttcgggttcgggttaatttgattatgattgtgacagtctagtttaagcttctgggtttataattttattagaaatttaaaattgtgctggaactgataatgttttgtgtatgcagt

SEQ ID NO: 80913 - DNA, 338 bp, Citrus sinensis
  Intron number 3 from transcript orange1.1g042717m (locus o range1.1g042717m.g) derived from phytozome v7.0 (chr-ID sc affold00054; pos 478434 to 478771 reverse strand)
tggtatgcatggcccgaataaaatagcttatctaatttattttaaatgagccctcatttctatataattctcttgcttgatggaattgccattagttcaactaggaaacttgtaaatcatttctcatttaccttgatatgaattaattcaaactatgtttcatattgttggttgtttgcttcttctattgtcatcatattgggtaacttgaatttgcttcctctattgtcatcatattgggtaacttgaaaatgttggggatagctaattttgtgtctggttagtcatgaaaacgtctgatctcctgctcaggtgtcctacattattgaagagtatcg

SEQ ID NO: 80914 - DNA, 682 bp, Citrus sinensis
  Intron number 2 from transcript orange1.1g024276m (locus o range1.1g022688m.g) derived from phytozome v7.0 (chr-ID sc affold00156; pos 160401 to 161082 reverse strand)
aagttgaggatctcttttacaaggtttgtgtttaaagcttctgtggatttctatattggttcttgtttaatgtaaggtttgatggttttgagtgactagtcaataaactcctttatctatatatatatatagagagagtagttttctggtcagggattttaaagtgtgggaaagtccaggaaagctttaaaaccacacggctttaaaggcctacagttttaagcctttaaaaccatgcagttttaaaggtttcccgcactttcccgcactttaaaattcctgactggaacatttctctctctctctctctctctatatatatatatatatatattgaactttggaagtaatcaatgtaacttaacatggctgcagtcattagtctcattgtccgtgcagtctaatgagcaattgttgaaaattacatggctgtcctttagggctttgaacttggaaagcctgttagttcaccgttttctttgctgttaggttgattgttatttaactttgttatttttctaaaccattttgcaatgctcatttcttcggtgcaaactttggactctaattttggtgggtatatttaacatggttgtaagtagatgtataactgcatcatagatattgaatatacttttctggtttttttttctaacaatatattcttttcattgtttttagt

SEQ ID NO: 80915 - DNA, 650 bp, Citrus sinensis
  Intron number 3 from transcript orange1.1g047304m (locus o range1.1g047304m.g) derived from phytozome v7.0 (chr-ID sc affold10205; pos 723 to 1372 reverse strand)
cctccccaacatttcattcatttggtgcagaggaggtattctcaaaatgtttggctggtatattttacgtagtaatgtcaagctgtgatatgattgaacttctttgatatatttgagatatgtgcaacattgtcttctggatatctgggtctgagttcttgtgatgggatagcttgtcaacatttatttctggaacattttgctttgaaaatgctgacattaccaacttttctgaaattaatgtcatagtctatttcttctctctccccaattttgcatgagctgagttttgaatgcatgcaaatgcaactccacgaatttagaaaatttggtatttattagagtctaaatactattgttgggtattttcctatcaacttaaagctagcagttttgtatttgacctttgttgtcagtcgggctagtgtttagatccgattgtgtttgtgtaggtttggttccaaatgatatcaaattctctatgcatgaaaccagcattttttcagtttaaactcagttgtttgggccttttctattagtttaagcctttgggacctatggttccttagcattactattttttttctctaagttctttcctgaaagtcctgtgcaccatgcttattgcgtcatctatttatttttttagg

SEQ ID NO: 80916 - DNA, 805 bp, Citrus sinensis; identical to SEQ ID NO: 80662
  Intron number 1 from transcript orange1.1g028051m (locus o range1.1g028051m.g) derived from phytozome v7.0 (chr-ID sc affold00009; pos 816819 to 817623 reverse strand)

SEQ ID NO: 80917 - DNA, 890 bp, Citrus sinensis
  Intron number 1 from transcript orange1.1g018673m (locus o range1.1g018292m.g) derived from phytozome v7.0 (chr-ID sc affold00277; pos 158398 to 159287 reverse strand)
ggtaaacgcagctccatttatcgtggagtcaccaggtcggtttttaacattcacttgctctttatatatgtcattttttggaattatacatgtatgtttagaggtaagtgattgctttgatgggctggtgtattttttgctttgttttttgaaagaggtgtttaattgatgggggttgttgtgaaattggaacagatatgctttgttcgattatatggttggcaagttcatgaattcgaagacttgggttctttggtggagttcatgaacgctttgtatgatagaagtgaactgattagttagatgggttgtcttatatggaaaggctaattttgttgactattcatgatttcgtctgatgttatgtttgatataaacctgattgactcagaagcctgtttgtgtaatgttgcctggttttataagtgttcattacggtggttgcagaattaaaggaaccttcacaaggatgtcgaatgattacttatgagattagcaaaagcagcgtgattttaagcttttaaataggaaaaaaatgtagaaacaaaggataaaaggagaaagacttgagagaactactcagtgccaactgtattaggtcagctatgttgtctgccaaatcttgtttgtggatgataaggatgtttgtgtctgattaatttggatccccttttcatctctgttagtcttcagctgttagttttctttgattagaaacatctggccatgtcatggcaattcagctgtgtgttattgtcgtactttcattacactaagtacatatgttagaaattgcttatcttcttcaactgctgttgatgttaaaatttgtaatcctttgagacattgaataatgctctggtttccatattcataaacatcagacatag

SEQ ID NO: 80918 - DNA, 788 bp, Citrus sinensis
  Intron number 3 from transcript orange1.1g022453m (locus o range1.1g014893m.g) derived from phytozome v7.0 (chr-ID sc affold00040; pos 661585 to 662372)
gtttacggccaggttagtaaatttttctttagatgaatgacttgtttaacatctgtacagtagtaacattgtgttaatttgcattcatgagaaacatgaaggaaagatcatttctgtctaatttgtataatttcaatgctcggagatcagcggtgagatgatgtttaaaaaactcccggtcactcattttctggtggagcaataaataaagaaatgttgataatgaaaccacaaggtttgagtctgtgtgtttggaaacagggaagtgcagaaaatgtggctaaacccaccgacaaactgaaagtgaaacacaaaacactaggaaacttaattgtttgttatctaaataatcattaaatatagagatgtgttttgtaaatatatttatgcttctaagagttgggaggcgtgaatttgtttgtgccttaaacctggattgggtttcagtatcaactaaccaacagtaaacaagaaattgtttgtcaaatcaaataaattcatatgtataaaagaatgattaattaaaatgcaacaaattcacatatcagttagtgattatttaaccattcttcaagattaggatggtgcttcaattttggtaatggtacgatataatattgtgtttgagaaaatcttttgccatttctgaggaaaagttctgttttgatcactgattaggacatttgtggactacatcatatggagtaaattctagtaggtaattgagtgaggcaaactgtacaaataatatgcttatgattttattgtttaatccaattctaggtact

SEQ ID NO: 80919 - DNA, 869 bp, Citrus sinensis
  Intron number 1 from transcript orange1.1g002808m (locus o range1.1g002808m.g) derived from phytozome v7.0 (chr-ID sc affold00018; pos 1432142 to 1433010)
gcataggcagggcatagcatcgcatcgcttccaaggcaagcaataatttaacatctaattttaccaaatgagcaaaaaaaattctctcactgactcacttactactaatgagtgacgatgatgatgttcttcttgtttttctgtttccatagatctacgcttctctaaactccaatctccataaagatttttcattatatatatgtgtgtgtgtatataaattcactcactcatgcatgctgcctccattttatccacaatgctttgattctcctcctcctttctactcttctctctctttctctccaggtgagcaacctccacaaatatatttattctttattattttctctttaaaattgcgcaaaaagtcaaaatagagaacaagaaaaaaaaaaaaaataggtcctcaagtgtattcaagtattcaactcggttgattgactggactatttccgctgaattttttttttctttttagtttgttgaattttctcggtaaccaaacagagactgtagaatttgtagaagtaaggaagtcaactataattaagctgagtgcttgaagttgtttgtttgtttgtttttaattttctcggctaccaaacagagaagaagaaaatatcttaaaagagagaaagtcaactcgaaattaagcggagtgtttttattgctcttttcctgtcttatttccgcgtgaatttaggataattgattttttctttctaaaaaataaactgtcctagaaaatgtctagataaaatttttaaaagattaatttctttttggaatttgctgactgactcgaaagccaatttaaagtttctgaccgttattttttgtttttagcgtgttgaagaagaattgat

SEQ ID NO: 80920 - DNA, 741 bp, Citrus sinensis
  Intron number 2 from transcript orange1.1g009778m (locus o range1.1g008970m.g) derived from phytozome v7.0 (chr-ID sc affold02237; pos 7352 to 8092 reverse strand)
gagggtttttatacaaggtgaggttagttgtatgttcatttcactgttttattgcatctgggtatcatgaatttcattcagattttgatttaatgctcactataatggccatagagatagcagcagttgtggctgttgttttttatattcatatcgggctgtaacgtaaaaagtcttgcattgtattcttctggttttttttttttaataacgttgattcattgtaatgaaaaattcaattaatgttgcttgtttggaatttgagataattcttgcgacaaagacaagtggtagtaaacagaaacgtttgaatttttattgatgcttgattgattgttttctttgatttgtggattatcagtttttggctttttctgagctgttaatgtgccaaattgcagtgtaattgtccggctcactagtcgcactctagctgtttgattactggtaaactaaaatttcaacgggctgttttgagttccttagttttgccttgaatgtatgtgtcaagggccggttggtgaattttcattcaatgagcatatttctgtgctggttacttcactttgcaaattctttttcataagaaatggttatggtacaagctaaggcgttcaaatgattaatgttttgagactttggctatttgcgtaagtgtaagattatcgacttatttgagcttgaaaaatggcgatggcgtccacagtaaaggtggttctgggctcgatagcgtttgcaatc

SEQ ID NO: 80921 - DNA, 808 bp, Citrus sinensis
  Intron number 1 from transcript orange1.1g032433m (locus o range1.1g032433m.g) derived from phytozome v7.0 (chr-ID sc affold00451; pos 19177 to 19984)
cctcgccgtagctccggaggtttgtttcccctgtcggatttatcattagtttgtattgttttatttctaggcgtttagattcatttcttgcctttttgatttgggcaactttttggttagatgagaaatagctgaaggaaaaaaaaaaaaattgggtttgtttcgaaaatgaatatagtcgacgaagtcaaagtttttgtagctgatttgtttctagatgattgaaagtttaggtttttttttgtacagtgtaaaaggctctatatttctagggtttagtatggaagtttcggatcttagcttgtaggcttttgaaatatcttttctttaggaaaaaaaaaattgcactgatttatatattatatctgtaacactgtagcgtttgttgtatgcatttaggcatttcgctcttttcaaacctggctgttaattacttctttctatttgcttttgcaaattaattgggcatttggtgctgtgttcttgttagacaccagaagattgttatgactgctttggtatgatgaaagatttgttatgtgtaatatgattttgtattcttatatgcctaaaagagaagcacggagtacataaatgactgcggcctatgtttgaagctggattttgtcttcacttttattagctgaattgggcttctctgttttgtgctattttttttcttgagtcgttatttatctttataaactgtctaatacagccactttattgttgttgaagcaatgactctactaatgtgaacacttcttttgcaggaagatctgcccctcgtcctgctgcacgcagccca

SEQ ID NO: 80922 - DNA, 966 bp, Citrus sinensis
  Intron number 2 from transcript orange1.1g017630m (locus o range1.1g017630m.g) derived from phytozome v7.0 (chr-ID sc affold00006; pos 904281 to 905246)
ccttgaatttttgtttttggcctggtaatataatctttttatttgtttctatttttcactttgtttgttgcttattcttttagcattgccttcgtttttttcgtgcataatttgtccccgttcccccttttttttttgtttcaaaagaaaaaattgatttccattctcctagaagctcaagccactcttttgaggctttaatcgtatggtgttgcatatttcgtccaaaagcttaggatacaatttcaagttgttggataaaattttgggtccaatcttatagaaaatggcttgccgttttcaggaaatcctgtaggattatcatcgaatagagaattgcttttacaagttcctaactgggttcattagataaaagttcctaactgggttcgctacataaacatttcctgtatccttaattttctgaaaatgaagaattgtttttagatattttggattccaacatgtgagatgtttgtatctaattttcctctgctttagattcaagtcttactatttccctacacggcttggaagactttgccgttgcttagctccaagattactggaagaatgtggttggtggatgtaggcattttagttatgcaataatattgtaggaagatggatccccttatcgctttgtatgcgcacatcaatacttgatattgatgtgccccagtaggggtagctgaatgtaatttggtatatctggtgcagtgataggaagcaaattactaagtaaactattcatatttggtttgtttttactgctcacaacattcttcacaaatatttcaattcgcttacagcaataaactctcctccaaatttgagtagaaacccttgatatattttatatatttcttgccattgttcatgcaaattcttcttgtttgctccactaacattttttttccttttttcttctgatcttgtcaatgcttaaagataaggatctaaatt

SEQ ID NO: 80923 - DNA, 671 bp, Citrus sinensis
  Intron number 1 from transcript orange1.1g000256m (locus o range1.1g000240m.g) derived from phytozome v7.0 (chr-ID sc affold00116; pos 59422 to 60092 reverse strand)
tgctactcttcgtgtgcgtgcctttgacagtgaaggtatctcaatatgtgtatagttgggaatgttgggacctcagcaatttctatcggtttcgattatagtctattattgtaatctatttcacttttattagtttgttaagaatttgaggaactccaatttactaaacaagttgaaattcttacgctattgtttcttttttgttactaaatttccaaaatttggttctaaccagttatcatttttctgttcttcatagttgttatcattttcagtttaattttgctgttagattcttcctttatgtttttcaataaatctagaaactgaatctgttatttctttgtttaaatttctgatacctttaaacaacttttgtcaaatattgaatacttttgagttgctatgtaagtttcaaattaaatatgacatggccaatgtgctatatttgatcttttgaatgatggacatgacttatgtttgtaactggatgtttctttgcctatctaatctttgcatggttgcttgtcgcttgtgcagttgggcttgtcttgggttgttgtatatgattttattctacctttcatatttttagttactattgaaagttttattcagctatttccatttttattctggttgtatttatttctcaacctttattgcagata

SEQ ID NO: 80924 - DNA, 736 bp, Citrus sinensis
  Intron number 1 from transcript orange1.1g016767m (locus o range1.1g016767m.g) derived from phytozome v7.0 (chr-ID sc affold00099; pos 117152 to 117887 reverse strand)
ggcgtgcagcctttgatctccaaacgttgcattaggtactgctggatcacttccatttgcacgtgaacttcagttttctcgctttagtcgatcctttcgttgctacaatttggttgcttttttgtatagtttcattgaattgtgaattgaaagtttaattttaattgtatttagcgtaatgtataatttgctgaccttggaggaaaaaaaaagaaaaaaaaagaaaggtttagatattatccgttttgagcttatcaatatgcgaacttgcgaaaagcatggaattttatcgatattttttaagtttacgagtaatgaatgctattcatataagggtgagtcgctgtactcactcttatgtggccatgcaatagaagcttctattagccatattatggtcagcattgccgtaggcaagaggagctatgttcatggcttgtagtctgtgcaaagtttccctttcccgcagggcaaaaagcacttcccaatgtacctattattactgttttacttgtgggagagcatggagtaagcaattggtctaagccttttgctcactttccctcattgagatttgtaggacttctttcgcttgtgaaaaatctcaattctgttctgcatgcatgtcttgtttctaaacatgctaacttaccagtattgccaaaatggaaggcattaactgattatggctcttcctacagaggagaagttattgtgactacatctgttttaacat

SEQ ID NO: 80925 - DNA, 457 bp, Citrus sinensis
  Intron number 2 from transcript orange1.1g040455m (locus o range1.1g040455m.g) derived from phytozome v7.0 (chr-ID sc affold00028; pos 873647 to 874103 reverse strand)
cttttgccctggtggtatgtgactcacgtattgaatcactgtgtggtaatcttcattttgaagggtaggcctctttcctcccaatgcccttttatattgcattatgttgtttgttttgatagtcccgagttttatgtttcttgctgctacaatttttttttcttttgattttctgatgttagtgtgaatgttacatgctagaatggttgataaaatctcaagctcacgtatttgtcaaacttcaagtagtcaatgagagcaagccagaagaatgcaaataatactttctatttgatcttgtgaatttctaaatgttttctcatacctaataatatacaatttctcattctatgaaagtcttcattatctgtctttggaatcatttttgcttcataaataatactttctatttgatcttgtaggtttaggaaaagatactattttctttttgaaaata

SEQ ID NO: 80926 - DNA, 702 bp, Citrus sinensis
  Intron number 1 from transcript orange1.1g016935m (locus o range1.1g016935m.g) derived from phytozome v7.0 (chr-ID sc affold00212; pos 254063 to 254764)
gccgctggggttcttgacggcaactgggttttagtgtgagttctcttcattgcgctcattttatttgattgtgttttgttcaattgtcatgttctgatgatcaaattttcaagttaattgataacggtatgtttgtaattatcggactatggcttaccagctactgaacaattatttatacttgatagccagtgactccatttcgtagcagattaaatataacactgtgcaattccaatgaagtgattggtattaaggatttagtgaaatgaatttgagaaacttaatttacaatgcttaggtggatcagaaggagatgttgagagtacttataatcacaatgagagatgcccaagcatttggagttgacaaatacttgataggtgatatgaagtgataaagttgtcttttcgtatctgtagattgaagaactcatagtgaaatccaaattgaagttttacgtctcttaaattgtgattgtggtccaaccgatgttagactgttataaatagttgcacaatgaaaaaggttctgagtaggagaaagtccagggtggaccagattagggacattgtatcaatggagcaatttatcgatcttatattacggattcttaacaatttcattcagtccttactttgcctttatgtattttctgactggccaggtacactgcattttctgagctgttgccgctgttgg

SEQ ID NO: 80927 - DNA, 666 bp, Citrus sinensis
  Intron number 2 from transcript orange1.1g028225m (locus o range1.1g028225m.g) derived from phytozome v7.0 (chr-ID sc affold00405; pos 83447 to 84112)
gaaacgacgaggtaattggattttttttattgcttagtttaagaaattaatcacgggccatctgatattttcaattttatgggaaatctgtgtgctttaagttgattattgtgcattattgattacagttgcgaaattgtttcgaaaattttgttttttttttgggttgattgtgtgagtaattagtgtaattgttgataattctcaggaataagatagttgaaagaaccgttttcaattcctcttacttgtgaaagcaaatgaaaatttttaataaaccttccttctgttgttatttcttttgcctgatacttcttaaagattgaaaattattaggaaaaacgacctactgactgaaagctaactgtccgtcttttcatctgcattaggggctcacattccagttgattagtggtggaatagaagcttcgattttattttggtagcatgctgtggtagctttgagtttattgctttttcatacgaagaaccaaaaattaatgagtaaacatatcgataattttgtggtagctttgatttcttcctctatgcttgtttttgtggcataagtttgctggattctatgatattcttgacatcattctcagggaatgcttttcattgtatgtaggtcagcctgacattgaatataacagctgacttgca

SEQ ID NO: 80928 - DNA, 482 bp, Citrus sinensis
  Intron number 3 from transcript orange1.1g026205m (locus o range1.1g026205m.g) derived from phytozome v7.0 (chr-ID sc affold00018; pos 1731550 to 1732031 reverse strand)
ataaattctgcagctaatacaaccttacacgaaaggttataaacttataatcatttatgaccttgatttaatcatagttatatcaaatagaaagtgatatcaactaactagtctagctcttcaacaaactagtggtagatctataaaaattttagaaaatcttttttaaatttcagttaaaatttttatttgtcctcaataaaaattgtgatttctttccatcggttttgaataatatatataaacaaataagctcaaaagtatattttcattgtcaaaatctctttaaagaatacattaaaatttaaatttttttaaaaatacttgagaaaaacctaatttttttacagtaaattaaatttgttcctactgatcttgaaatctgggcaacgacacaatatatatttttaaaaaatattgcacgtaattatttagatacataatataagtggcatcatgtagtttaatttgaaactgcagat

SEQ ID NO: 80929 - DNA, 601 bp, Citrus sinensis
  Intron number 4 from transcript orange1.1g018737m (locus o range1.1g013805m.g) derived from phytozome v7.0 (chr-ID sc affold00396; pos 92284 to 92884 reverse strand)
agtcaaggtaagttgtggttatgcttatgtaccatcatggcattgctagagagtgggaactccgtaaagatggaattggaagcctatgcaggaatgtggattctctcacttgtgattgattacttttgttaaatagttggtccctggagtgctatgttaatatatgttgcctttttcttaagcatgatctaaaatataaaaacattacttttgaattttcatcacggttttcttaagtttgaaaaaataacgttattaatgataatcacggattcttctgtaaaacattgaaagttagtcttgaaccgtaaagatacttaggttgtaattgatgcttttgcttttgcttccatggagctagccaaggagttgctgtatgaatgtttttgatgtgatccaaatggtgctcattatatgcaccttctgattttgagttagatcatgatgtttatggctatgtaacatcgtagagtgtgaggctaatgagttgtcaagtgcatttttaagtttccatttctgtttctctacacacacagtattcgtttaactccttagctttacctcagtgattttgcagatatatttgaggccgactacttca

SEQ ID NO: 80930 - DNA, 508 bp, Citrus sinensis
  Intron number 2 from transcript orange1.1g010284m (locus o range1.1g010092m.g) derived from phytozome v7.0 (chr-ID sc affold00104; pos 276218 to 276725 reverse strand)
aaggtgagcctcttctttctgagtattaacttgattccatttttgtccttattgtatcaagcagagcttatattagtagagattttacgcaaaaaattttagttgtttggttttcaatgagatcttttattaaaaaattataaaattacctcagtaggtaatttttttaaagttacattttgaaaataataaaataagattgttaaataaataaaggatattttaaatattttaacatttaaaagaaatttttcaacttctacacccagaagcccaaaatttgagtttttactagaagaggcaaaatagtttattcaatcttcaaaagtgctaaaaaaacaaccaaataataacaaaaattttgataagagcttatgagattaaatagtagttatgaccattagataagttataccaaacaggttagactcagtagtcttctaatgctaaattttatttctattttattttaggtatttgtgcaagtaaaggaacaattgcagaaaga

SEQ ID NO: 80931 - DNA, 789 bp, Citrus sinensis
  Intron number 1 from transcript orange1.1g010284m (locus o range1.1g010092m.g) derived from phytozome v7.0 (chr-ID sc affold00104; pos 277442 to 278230 reverse strand)
ggtatgataatctttgctgcatttttcttttttaatgcttaagttgaaatttgtttttgtgcgtggaagctgaggattatttagagttaatgtgtaatctttggctttggcttgtaattaatttgtggtggcctggcgcatatgttatgtatgtatgttcatttgatgcatatgggatatacaaaggtgatgatgggtagcctatgtggttggttttcatcaaaattgcattttaatggtgaccaaccatcaccaattgttggatcatattagctagacgattaatggaagatgagcttgtaatagtgtccgtttgagtttcgtgatggttattgcgccacgttgattagtggccatgtgatatgattgacatagccggattttacaagtaattcgggaggaggttagcctgagtctgcctccaagctcgaatctaagctttgattaggatacctctagggagttatgcatatggataattaaggaataactttggaattgcgtgtctccaacgattgaagactcatttgctgatgtgcatctcatttacaagtgctaccattattaagtaactctgcttcctaattttcttagcatttggaaggaaatttgagtaatttatactataattaaaggcttttgatttttgaattctatgattgtttgtgtgtgccagattgccagtgttgtaacaagcgaagaacttgaactgtttgctactgaaagcattaagcctctatctctgtgactgcagtattcgtggcatcagcacttttgcatagcactttt

SEQ ID NO: 80932 - DNA, 1043 bp, Citrus sinensis
  Intron number 2 from transcript orange1.1g025379m (locus o range1.1g021223m.g) derived from phytozome v7.0 (chr-ID sc affold00040; pos 839458 to 840500)
gggcattcaactacaagtatttccttcttttcttggtatgttaactatctgacttgttggcttaagtctcaaaataggtccttatttgcttgaagataagtggtaaaggtactaatacatgatggaaatcaatgatttcataatggattggctctccactctgtttatttgcccataattattgaatgtgtgatacaattgctgatgagggctaatttgagataaattgtatgatcatcctcatttttatatgagcatttcatctgcctgaaatattctcaaactatctgttctttgccttttcaattgttgttaagaggccaaaataagaaaacactttcctacattgtgaaatgtggaatttttaaagtacgtctttggatggtatcacagctcaacaccattagagtggactatagttccttggatcaagcaacaaatcaagtcaatcaaagattacggaatggctggctgattgtatttgtcagttgtaatcaattaccataatttaggctattattttgtactttctgtaaatagctttctcacactgtgtataagtggtagcaatgctaataaaatcattaagccttattcacagcaagtttattttttacaaggactacatgtcctgaagcttatttatttatctaaagaaaataatttaagaattgtactcgcaagttctttcaattggtattcttactataaacttgtagggctactgattatgaaggcaactgattgattgactgttcatgcgctccttctaaggttcttataaacaccaaaaagctgtttagttttccactttgatcttctggtggtagtttcacttcttatattgagacatatgttaatgtgtattgcattagttgaatgcagtccttatgccttagcatccatctttgctttcaaaaactaactgccaagtgtgtggcatgactgagtgtatttatcaaatacgaaaatgctgagtggtatctttggtgctgaacttctctgcagttttatacgtttcttgagacaactcttgtcactgt

SEQ ID NO: 80933 - DNA, 524 bp, Citrus sinensis
  Intron number 1 from transcript orange1.1g010900m (locus o range1.1g010173m.g) derived from phytozome v7.0 (chr-ID sc affold00184; pos 113113 to 113636 reverse strand)
gaatcgtgagtagctaatcatttacttcaaattctgtatagatgattttttttcccttttttttggggcgatgtgaatgcgtatgaagtaaaacttacaacactcgtctcgtcacacatgttctgtgaaatcttgtacttataacattgaatgtaaaacttgtaatgagagtgtgaattgtgatagataagtggtgtttatatgtctgtgttggtatgagataaaggtctggccactagttggtgtagattttgagctatgctcttgggttgtgatagaaatgtatgaattcagactcctaatagactcaggattgtaatatctaaaaattctgacaaattgtagtaataattttgattgatagtcatacttgagatgaaatgtgagattgaaaggttatcaactgaagaattgattgctagaaagctaatactctgttctaagaaatggtaaatttcatttgaatttgaactgatttcggtattgttctgtttttgggtgtaatttgtgttaattagctgggg

SEQ ID NO: 80934 - DNA, 939 bp, Citrus sinensis
  Intron number 1 from transcript orange1.1g046464m (locus o range1.1g046464m.g) derived from phytozome v7.0 (chr-ID sc affold00462; pos 19653 to 20591)
tcacagttaatacatccaaagaagggaatttcgtgcaatttatgcctaaatagaagcttgtgagatcttttagagaatgaagctacaaatccttcaattcactgaacacaatttcatcattcgttgctgttacattactgttgtttgggaggaattacgagtacagacatgaggtaatgaaatgccgacacatggcattagtggggttaaattagtgaaacctgatagctagattgagaaggctgggaagcttaagccaagataggagataagcttcccgtagctttggtaaaaacatatgcaattgaggggcaaagtcagaatcgatgtccttggtggataagatcacgcgtcaacagtacatgcttcatataccaaatcgaaaatatcttacttctgctgaaggcaaggaaccaatgggggaaaagaaagcaaaaaagggaataagagagctgccacctcagttatccttgcagtggtcaaaaaaccagcaggaccactggttggaggaaaggccacgcgtagaaaccaaggagcaagagggtggctattggtttttttgtctcccttgtttgagtacatcaccatctcgggaccacaattacagtctctaaaataccctcagccgagggagggaaaccaaatcaattagcgttgggtatccgaaattacggaaagaccctcaggcaactcctaaaatgctcgagtcacactctccaacggtaaccaactttcattcacccaaaaatattgctctcatcttcttcctcagagcacacgcagagagtattttcaccaatttttttatcagtttgaaggtccattctttaccttgagacaatctcttattgtgcaaaatcttacttgagtgtgaaagtgcggtcgccggccactactggctccacctctaacgtttgtgtgtgctctagtttacaggat

SEQ ID NO: 80935 - DNA, 922 bp, Citrus sinensis
  Intron number 1 from transcript orange1.1g021995m (locus o range1.1g021995m.g) derived from phytozome v7.0 (chr-ID sc affold00028; pos 287411 to 288332)
ttcttcgttcatcgtcgagattttctcgacactatgtaagctgtttatggtcttcgaactttataccgtttgttcgttttcattcttgattgtcactaaaatttataaatcagtttcatcatctgcaggctcagatcatcaatttttcgccgcgatggttatcaaatttttatttggataagatgatttatatgtactgataaagtgagatttgtgattatctgttgactgatctatcaatttagagaagaaattaaaaaaaattaaaaaagaaaaaaaaagttttacatgcatcaaagtggttgatgatgataatgatgatcattatgtgtcaagcaatgggtagatttggcatttggggcaaacaaacgcatgatgaaagtgtaattccacgtgacattgcacgtgacacattcattaagtcatggtgctgggcccgctgggccaaaatatcacgtgaattttgataaaagttatttctattcgttttgtttagttagagaataataatatgcatggatcttatattatctatcaattatctgctaaattatcttgatcttcagttttcacatctacagcatataattaatttactctagaaacccaagtgaattatttaaaattaaggcagggtactgaatgattataccggtttgatggatgtgatgatgaagttggactatgatttatcagagataagaaattgttgtaatatatttgaatacggggaacatttttaagaacttaaaatacatgagacaaagctggaaaatgtttaaataataaatttgttctctttgaatttgtttctgtcttactatctccccgcccaatttgtttactatggtttatgttatctaatttcttagtatgactataagcaggcttcttctggaagtaagaagattgttggggtgtt

SEQ ID NO: 80936 - DNA, 274 bp, Citrus sinensis
  Intron number 1 from transcript orange1.1g039055m (locus o range1.1g039055m.g) derived from phytozome v7.0 (chr-ID sc affold00211; pos 210215 to 210488 reverse strand)
gggtctattgtcatgggaaatgatttacgagagtcttgacaatgcactgttcgagaaagacgagaaatttaagaagacttggttgaaaaatccagatcataatattgaaaaatacaatctttacggctttacggctttacgtctgggcttcaggtgctttttttttgtttattaataagttttatagtattaaatatttgatagttgttttatttgatttttcactttggttgttgtaggcttggatttacgaaacaatcggagggttgcaatc

SEQ ID NO: 80937 - DNA, 418 bp, Citrus sinensis
  Intron number 3 from transcript orange1.1g045801m (locus o range1.1g045801m.g) derived from phytozome v7.0 (chr-ID sc affold00009; pos 1722627 to 1723044)
aaaagattggtgaagtttctgaaacagagcttcaattcacttgcctggaacaggtagcccccaccttctcttttctgctaattgtaaaagtgctttctcttcacagaagagaaataccaaaaaacaaaaataaaaattagttgcttacaatgtcggtaacaattttttatttttgcctggcaacttagagagtaaaatcatatcaagacttcatcaaccaagcgggcctttgtcaacaatcatcaataatattaactcccaagcaccataagcgttacatctttccaggaaaattccctacttaactttttatttattaattcactatttgtttgtttgctcttttgccttcattgaacctttgaatttaaaagcacaacaaaggaaaatgtgttgaactgttgatatgattatgcag

SEQ ID NO: 80938 - DNA, 385 bp, Citrus sinensis
  Intron number 2 from transcript orange1.1g033437m (locus o range1.1g033437m.g) derived from phytozome v7.0 (chr-ID sc affold04750; pos 748 to 1132 reverse strand)
gacaaactggtatgatctgtgagccttttcttcttaaatattttgttacctaaaccattttcattcaaattgacaagagttgcttatcgatctatagaagattccaaactttctgcggctagtactttattggacccaaaagcttttttgctttttctaagctgctaatcaagactaggtttctctcccttatatcgctagatatcccattaatcgtttgatttaattgtctagagagattaggtacttgcatctttgcttttcacttcataagtgatttcatgtgctatcctgtattctggttcaagatttttgaaggttgcttaccatcatattttgctttgtttcaggttgagggcatttctaattcttctcccggtgtgac

SEQ ID NO: 80939 - DNA, 698 bp, Citrus sinensis
  Intron number 2 from transcript orange1.1g039649m (locus o range1.1g039649m.g) derived from phytozome v7.0 (chr-ID sc affold00033; pos 72290 to 72987)
actatcaaaactatcaaagcagtaatctttgtaattattttttcccttcatttgaatttaatgcttcaatcaatttctcttccaatacggaaacttaaaatcaggtgaaattgtctaagagtgagtgttttttaagcaactttttttacctgatcattacttgagtttgaattatgagaaaataatgggctaaacaattaatatctagtctaccaaatgggtgagaatgactgactgtgaaaagtttaagtcttttttttttggttctttcttttcttttaaaaagtagtaaaacattgataaattaatactcgataaattattatctctattaaataatgatttttatttatccacttgatgggtattgaaatttttacattccaatagtcaatatgttaattaatttaagacatgttgaatccaatattatctaaatcatatgatattttaattatctccacttaattgcttggttgctatgattttcatatttaaggaaaaaaacttcataaattaatagttcattaattaccgccttggtcccaaaaattttaattaattgagattttatcgtatttagtatcacattgtcaataatataatcgtttcagacacttcatctttgctggtgatttggcaatgcatcaaatccagtttcaggaaatttttgcggctggtactgattcatctgccat

SEQ ID NO: 80940 - DNA, 338 bp, Citrus sinensis
  Intron number 2 from transcript orange1.1g013567m (locus o range1.1g013567m.g) derived from phytozome v7.0 (chr-ID sc affold00142; pos 250030 to 250367)
gttacaagattgggcagtgctggtggagcccttgtgtatgtcttcttgtctcctggaatctcagtataatatgtatatgttatttgacttatttttttcatttcatgtttgttattgctgtttttaagactgcatttttttcttttttgtctcccttcgatgtgcttaatcattaatttttttttttggttattggttattattgccctatgccacttccttcttatgacttatgtactagaggtgtaggattaattttgtttcttttttcttgttttttttttccttttttaaccattgcagtgaaacctttcccagtggttgcttgacgctggatt

SEQ ID NO: 80941 - DNA, 950 bp, Citrus sinensis
  Intron number 4 from transcript orange1.1g005452m (locus o range1.1g005455m.g) derived from phytozome v7.0 (chr-ID sc affold00028; pos 143347 to 144296 reverse strand)
tgaaggtatcctactttcccttaaaacctttttcaattactgctctgtttatggctaataaacctttttcaatttctgctctgtttatggttaattactgaagttaggagtgattgtctctaagaaaagtataagcataagtttgcagtcttagctctgttgtgggtgatgtggcaagaaagaaatcgccacatttttgtagggtaaaaagaggaaggtattaatagttaggacttaggatccctaccattactcaattttaaatgagaaaatctctttgagaagaaattgtagtaaagaaaatatcctactttttcctgataatctcacttacattacgtaagtacatgataacaatttgatctggtggtttactctctctcttttttttttccttctttataaaactgatctggtggtttacttgaaatagaactctcaagtcaatattgtgatgagaactgactcacctttataaagatgttgtactagttgggaaaagagaaataaagagtgaaatgaaaattttctaggaagttgttttggactagattagaatcttttttttttaacccttaaaatttcttgtatcaataatgtcatattataaagtggaattacttccaatgctggttagtcaattggtttgacaaagaactgtacagaactttcctgatcaaagtattatcaatgtctttaatttctgaaaaatgaaacaaatgctttctgatatgcattattccatctcttttatatcttctcatcagtgatgtctgtcttgttgttcctttgacaggtaaggtactgatcacttgattttgttgactactgttttgttatccttcaattgtttcacttttggctcgttcaatttggagaatggttctgcactacgattgcttatacttatagtatccctctacaggctggaaatattttaattgattcta

SEQ ID NO: 80942 - DNA, 756 bp, Citrus sinensis
  Intron number 1 from transcript orange1.1g017419m (locus o range1.1g017419m.g) derived from phytozome v7.0 (chr-ID sc affold00006; pos 1324606 to 1325361 reverse strand)
agccgttaatcccgttaaagatcaaggatcttgtggtaattttctttttccctttttaacttgcgttccatttatttgtttatttttcttttgttccatattacccatattttcttctttttatggatattataagaaggatggatatatatatatatatatctaaattgattttataaagttttgttcataataataagctgaatttccaaaaataaaagaaaggggaatttatgacttatcaagtatctatttcagtctattaaaaaaaaaaaaggtatctatttcagttaaagattattattgatgcttttgagcatatcgacgaggaagcggcggtgggtggcaggcggcggactggtagttaatactggaattggcagatttagacttttcagttgaagccacgtgggttattttctcaattttttgcttgcagttgttggtcgttaaaaatttattcctgaatcaaagaatacataattgttattattttttttaaatgacgtcatgtgggctaagtcgaggctactagacaaaacagaatctgacgtatgaaaacagaattgggcatcgatccaggcccaatctgcagtcaaactgggctaagctaggacatcaatttggcctggatcgacccagttgtgcgccttgaatctcgtttggaagtagtaggttaaaagatgtatttttgtgattcgcattgatgtgtggtgagcaggaagttgctgggcattctcaacagtagctgcagta

SEQ ID NO: 80943 - DNA, 780 bp, Citrus sinensis
  Intron number 1 from transcript orange1.1g035673m (locus o range1.1g035673m.g) derived from phytozome v7.0 (chr-ID sc affold00212; pos 36458 to 37237 reverse strand)
gagcctctactggcaaggtaggtcgtcattcccacaaattctcctttattgtgtcactgcattatttcttcttccttttgagcattattgcaggctttgttgcattgcagctttggtttctgtggtttatatgatgcacctagggaacaagaatccaccacagaatctaaaatcgttgatgattcagtaactagttgcaatgggaaagtattgtattttcgggagattttgtatatgtataaaataaatgtatgttgggaaatcattgaagcacaattataaacacaccaatatatggtttttcacaccacattggcagtttaattgtaaaatgattgcttattgctttgagacaattcgtggctatgatttggatgaatccggcatgtgatgcttaatttggttataaagtacatgattatctgggtagaaacctatctttaaattgaaggccacgttgttgaatctcctgatcagattcatgtttagctttagcttataaatcctcttcactggaatgaaaattgtggatgccctgttccttcaatgtcaacactctaatgtttagctttagtttataaatccacttcacttaagtgacaatagcagatgccctgttacttcaatgtaaacacataatagcaggcttacaagtcgaagtgctttttgtggttttgcttttcaatcatattactccttgcagccttgtcatgtggattgctataagtaactaattatctttttcctttaaaattttacagccaagtgaatccaatacat

SEQ ID NO: 80944 - DNA, 675 bp, Citrus sinensis
  Intron number 1 from transcript orange1.1g011951m (locus o range1.1g004364m.g) derived from phytozome v7.0 (chr-ID sc affold00028; pos 980004 to 980678 reverse strand)
taacaaatcctgattgagtttagtataaggttgaagtaagttttttttttttaaattaaattttgtaatttcattttattttattgattatgatgcccctgttcttcaagttttcttagcagttattgtttttgtctttgtgtttgattcaactcttccattttatttttatttttatctactaatctgtgtgcataattatgtatgccatgatgaattctgaattggtgaattagaaaagaagatgggccttaaaacttaatcctgtcgtgaattttgttcccgtaggtattttttggctgtaattatttatcctagttttatgttttattgtattttttccttatcggtttttgtgatttcaatttgattttgttttctgttttcttctaaatttgcttttggatcctggattttctcttttcagcattcttttgtttagcttttctttaacttatttagtgaaaagatggaagcttcatccttagatcctatgttttaactaatataaatatttggtattgttctgggaccttctcaaacttattttatacgctgtacatacattttgttaatagttttgagattcttggaagttccatttcgttgttttatctcaaatgcgtgtatttatttacagggaaagccagagtcctatttggtcgtacagacgga

SEQ ID NO: 80945 - DNA, 561 bp, Citrus sinensis
  Intron number 5 from transcript orange1.1g037120m (locus o range1.1g037120m.g) derived from phytozome v7.0 (chr-ID sc affold00033; pos 512433 to 512993 reverse strand)
gaccaggcatctctgcactggactttgactgcaaggtgaagtgtcaaatttgttgtctgtagaactataatttctgaaattgacaacttcctgctaaaaatgcctgtggctgtcgtgtttcgtggttgtttgtaatgtgtttatgtctttttcattggtatcttttttatttggttttatattgatatggttcttccatcacctacaattggtccatcaaaggttctttcgagatattattacattttcaataatcttgaaacaatgtttaaagatatcctgtaattctttattttagaaggaaaacagtgtttgaacttatatggtcaattccttggaactttcagccttccttttttattgaatgtggactttgtttggagaaacattgtggaatgttacttaatttctttgaacttttagccttatctttttcttttaactggttgtgctgacaaatacattttggttttggtcttcgctttgaagcttggcttttactttagttgttgcaatatttcttcaggggatttacttggtttctgctacgagatctgggtg

SEQ ID NO: 80946 - DNA, 478 bp, Citrus sinensis
  Intron number 2 from transcript orange1.1g034294m (locus o range1.1g034294m.g) derived from phytozome v7.0 (chr-ID sc affold00482; pos 73383 to 73860)
gaaggaagagcatgtgagtccgttttcttttaattttcattgttattgatgttttattaaaattttgttctttggtgtaattatctatgtgtgcgcatttggaagtgcttccgtagaaagctgtttttgagtaaaactaccgaagcgcgtgaaagtttttcttaagaaggagctccgtcaactccttttctaaaatgtacctgaagtgcttctatcctcaagcagtttttttcaaagcacctgtcaaattcttttgatttcaaaactcactttcatcaattttaaccaaggtcttcaaaatttatggcgaagcagaaacttatagctatttaaaagtttaacaattccaaaagtacactgaaaagcactgtcagctgatggtttatagaggggttatgtgcttgggaaacaaagtattgactggatatatttgtattttgcagttcgtaattgtctctctatctggttggggtctact

SEQ ID NO: 80947 - DNA, 437 bp, Citrus sinensis
  Intron number 2 from transcript orange1.1g013657m (locus o range1.1g010656m.g) derived from phytozome v7.0 (chr-ID sc affold00018; pos 404378 to 404814 reverse strand)
gaggaagtatgataaaataattaatttattctttatttcttagttgtcttttctattattttctcttcattgatatcatcaccaattcaccacgttatattaaaattctcatcacctgtgaaagttaaacacatttaaagatgtaggtttcaactagataacaatgtttcctttacaaattttagctataatttaatattgtgcacattatagtcggtcactattgtctggtacgaaagttatatttttaaagatgcaaatgtccgtattaaaaaaataactttaattttatctttatcatatttgtatataaattaaacaacataaaatatgcgcgataaagaaatttaattaagtttttgattgggattgattaacaacgaagtttatttgtttttgcagtgctggcagcttggtttaggttaaaatacccacat

SEQ ID NO: 80948 - DNA, 779 bp, Citrus sinensis
  Intron number 1 from transcript orange1.1g032881m (locus o range1.1g032881m.g) derived from phytozome v7.0 (chr-ID sc affold00018; pos 383006 to 383784)
ccacaagcacagctgcgcgacgctgcagcaaccacgtaatatttgaattaattttctcgttctgctttaatttctctgcaacctactgactgccttctgcttctagtttccttcattggatgtatgtgaggaagcactttccaacctctagggattatatagccttcaaattctacatcttgtacagcttctttaaaattgaatgagagtatgcttgatgttcttaaagtctcttgaatcacctgggaaaaaaatgtatatttattcccatcttgactttatacttgcctttggctttttgtttgctttgcaagcggatatggtggctatttatccacttggtgtttctttctttcatattctgtctcagatgcattagaaaagaaattaggatgataaatgcaattgttaatttcaaagcaattaaaaatggagatagtagcagcaaattgcagagggctaaaaattaaataggccggaaggaagaagagagggatttaaagaatttcatatagaattttttttatatgatatttgattaattgtcagaaaaaaattgatgagaacgctgcagcaaccatatagaattttaaaatttatagttttattaaaaaattatttaaaatttggttgaagcccaggcccgttcagattggatgggctttgagagagcttggactttttgccaagcccttaaatttcctagcctattccaatggtttgggggttctgtttctgtttcagggagtgtgtgtaaagtgtaatcagtaacagtatta

SEQ ID NO: 80949 - DNA, 945 bp, Citrus sinensis
  Intron number 3 from transcript orange1.1g019169m (locus o range1.1g015276m.g) derived from phytozome v7.0 (chr-ID sc affold00031; pos 896891 to 897835 reverse strand)
accagaagttgaaagaaaggttcggatgagcatgattttcaagtctttgtggcatcaaagtttgtatgtgcttagtgttgacatggtgtgaaattagtaaaaagacaacaaaatttcagtaaacatatatatactttttaaaatttttagaattgtggtaggtttgctctatttaacctcaatatcttggaaatatatcaatgaggattgagtcaaaagtaattgatggcatggtatgtccttggtgcttagtttctttcattgatgcttcttgaagatttcgactgaaatttagtgactgagcataggctttgtattttcattttttttttttgagatggccttcgccacacctccacccccctcccccggagaactacatataagaattttcatctgtactgaggagtccaataaaaattaatgtgaataggattaaatccatcgttcaggaaacatatgctgggtttattatcctatcttgatttgactactcagtactcagctgattcctgagtggatcagttcatgcaacctttttatgaaatgaaacaatgcggtgaaatggaaaaagaaaagatcaaatctgtttggatacgctttctctgcttatattgtggctactggtgaaactggcatctccttttgtcgctgtatgtgagtgaaattttaactttttgagaatgattatagattgtcatgcacttaaattcttgctgattttatattgaaatgacaaggtgggaaaagttcttttaagtttattcttcatttaggaaatgttagaaatttgcattgccttctgtttctaacgtttttactgtatctatctgcgcgagtgttgatctgtttgtcttaggtgcatgataaatcacttggattgtataccagttaaaatgtgttattatgtttgtgactgtagttttgagaagtccccgcgacacg

SEQ ID NO: 80950 - DNA, 724 bp, Citrus sinensis
  Intron number 2 from transcript orange1.1g037176m (locus o range1.1g037176m.g) derived from phytozome v7.0 (chr-ID sc affold00375; pos 131666 to 132389 reverse strand)
agtatgtgatctggttccattggtgttccagcttgaatgtttttagtttgatcattccattcctttcttttggctttgaaattgtagcaacgaatatgcatattcacactgaaatctgacagaaattttgcggtcatataagtaccggcagctaaaattacgaagtttaccattaacgctagtgccatcaacggatgacagtaaatcggatctccaaaccagggatacaagttaacattgcttgtaaaagctaaagaagaaaagatttattaaaaaaataataataataaataaagggaaaagaaatgacaagatcaatgatttatagtgcatgcacttcttgagacttgttgtatctcaaggaagcttccatggcatctagaatttggctttggcttcttgtaggcacatttcagtagttgctgctggaaacaaatgtatccattgtcttagtactgctacatttctggtgcgagaaacaaatcaatctgttgccatggccaggttttattgtttgatatttcattgggacagcaaactaaaccattgcttggcctatttcttagaataaaaatgatactatgtgtatcacatatttccattcttctatcacgtctttgaaactgctattagttttcttatcaaggtgcctcaaagaaataattattatataattcatcttgacgcaggaacgatttactgagcttagaaagtgcaagcgaac

SEQ ID NO: 80951 - DNA, 1041 bp, Citrus sinensis
  Intron number 2 from transcript orange1.1g011715m (locus o range1.1g007118m.g) derived from phytozome v7.0 (chr-ID sc affold00006; pos 2270092 to 2271132 reverse strand)
ctgagggtgacttcaagacacaagcgttcaaagaggtagctgctgctcactcttctcttactctgcaattgttgggtgtatgcttgttccagttctgcatccggaaagactttcgacatgggttatctgtctaaatacaaatttcactccctggccttcgtaatataatgtgttctacaaattaaaaaaataaaaatcatgacaccgcactattgttttggcttctcacattctaatttcgttcgctcacaaaatgtcagtgatcgagaacaaagttccgagcttcaagaaagagaagaatgtagactgcttctagatcacagaaatggttgaatttgttttatttgcttaaactgtatttgatttcttgaaaaaaaaaattctttttttttcctcttccgcatttgtctttgctttatcaagaattttcttagtcataaatgacttttgattagaaagttttttatgtttaccagtttaatatagtttggtctgttatttgagtttttgtgttcttgtttaactgaaatctcttttacttatttgagttaatttgggaaaacaagtttgtctattataaaagagaggttcagttacgtctgtaatccctttggatcaattaaattccttaaaatatgggctttttggcttaaatattgtgggttcttagcaagctgctgatttctctttagaaagaaaaaaagcgctatttttctgataatttttaaattagcaagtcatagttgatattgtattttgcaagtcctaaagaaccattttgagatgggttttgggcaaaaaatgatagcaaggtggaccagtcatagtggcagaaggtaatgtgaacgccactggttcttcttctctggtatgaagtgactgatgattgttcttagagcattggcttgtataaaaaacattaatgaagtgaccaagaattggaatgttaatctttaaaatatgtcatgtccaaattatatgtgttgaacatctgtatctgttattttgccattgccagctttccatataagaaaagagttg

SEQ ID NO: 80952 - DNA, 735 bp, Citrus sinensis
  Intron number 1 from transcript orange1.1g047597m (locus o range1.1g047597m.g) derived from phytozome v7.0 (chr-ID sc affold00132; pos 106138 to 106872 reverse strand)
aggtaatggcaataacagtgtgaaggaaaaaaacaaccccatgattcttttttagtttttgaagatttattaagttgaatttttatcatatattactgcttgtttctgccattggatatgatccaagtggtgatgctaatccttttacgctctttttggtggtgatagtattgctgcttgaatcttccattggatattaagttgaattttgatcatattactgcttctatctgccaccggattcaatgctgaaaactcttggaagaaataatcttgaattttgattttatttggtttttacagtacttcatgaccttgaccaaatagattagcgcttaaaagctgattgatggtgtctttgtttcaatatggggtcatttatttatttttataaatatattttattattattattattattattattattattttacaccaatttttacttgtttgaatggaaggtagtgttcaagcttgacttttaactaaagttgtccttttgctttgttgggtcttcacattttaccgtcaaagatcttgttcaattggtaatgagtttctgttcttaagtatttgacagcttttacatagttcgcatttagatgattctgagtgatatattggctcatttgagattatgtcattttctaaagtacatacactgcctcatttgagattatgtcattttctaaagtctatttacttttcattttaatgcgttaggtgcgtgaa

SEQ ID NO: 80953 - DNA, 593 bp, Citrus sinensis
  Intron number 1 from transcript orange1.1g033751m (locus o range1.1g033734m.g) derived from phytozome v7.0 (chr-ID sc affold08987; pos 1270 to 1862 reverse strand)
acttcgaagcttttcgtcgaaggtattctctctctgtgagtgtttctattatgtcatctttcttctttattttgcaaacaaaatattatgtcatgcatcatgttaaaggaactgattctgtggaatataaattttgattagggaagtttaaaacccgattttatatgctcaaattaatcaatcgaatccaaatggggggatctgatttttttggttgtggtggtggaacggacggagccatatatttggatactgacctagagatttctttgaataattttatagtgttgctcaattgcattgcccacactaatttggttgcatggaattgatgtttttcttgattatctggatccatctgtttgccctgttcggtccaaaatatcaaatatttataaaattcaaccatgccatcatctgattcccttgaacttgtaactcttaatattttgagattgaaaacatattcatatttgatttccttcattcagttccgtactacctttggctgcagaatttgcaatcttaccatctaattatgataaaattaactggcatcctttgcaggcgtatctttctcaaccactaaagag

SEQ ID NO: 80954 - DNA, 869 bp, Citrus sinensis
  Intron number 1 from transcript orange1.1g001848m (locus o range1.1g001075m.g) derived from phytozome v7.0 (chr-ID sc affold00096; pos 109633 to 110501 reverse strand)
tcgcgtaagttttttttttttttttttaatttgttgtgatttgattgaggttttagggaaaatttgtgttatttttctatgaattttatattttaagttaaattttcttaattttgtgttaattttttttttcacgggatgtagaaagctgtgaaatttttaatttttaataccaaaacttagaagagtctggatcatttgatttgaaaatgctgtgtgagcattggcttagtgtaatggatgttcagtgagccaatgttgaactatcgtttgagttcatttctggttgcggactcacattttctcactgacgttcaaacgggcactatgattcatttacttcttgttagtggtaagccacagactgtggttttaatttctatccttggttgcttagagatgaaaaggaaatttcgttaggaaatataatcactgagttagatgcattacattctttttatcactactgttaggaacaaaagagtagatcatgtacccttttagattcttaatcaatgataagcaagtgccattttaccttgtaattttcttttctttttaaatgccccctgtaagagaaatctgaagccataaataaattgtctacgccctggctcagggcaagatttgattagaggtttgcaatgatttagatggaaattgtggattcaaaacagaatgcgtacctttattttttaaccccgtcaactgttgggacctgagtatcttaaggattgcatggaatcagtgttaaatattgtggttgttgtgattgttctgccttgttctttgtttgtttcacttgtcctcaattggaacttgttattcaaactcttatttcagtgacaagctcttcggtgttggttaac

SEQ ID NO: 80955 - DNA, 640 bp, Citrus sinensis
  Intron number 1 from transcript orange1.1g006571m (locus o range1.1g004537m.g) derived from phytozome v7.0 (chr-ID sc affold00018; pos 1014861 to 1015500 reverse strand)
tttcttcaaccaccattccttcctggttgcaaaaggtatcaacaatcttgttattaatgttttaattagtttttgcttgcactgtttctacaaaacaattctcggtgcaacactcgctcaagctcactcgtttcaataaagcatttctcctccttgcactccaatcatgtttgagtattttgtaatgaatttgatcattgtaattcaatctggttatatatatttttcttttctttggggggggttcttttctttttttaaaaaaaaaattcatttctattatgatttgcttcgaattacaagcctccattatggcttccacctcatcgaaaaccaaaaaaaaaaaaaactactacatagttagtctcttcatttttccaatctaatcaaattcttttgcttctagttgagttcagtttgtcaaattaaaactgcttgagtgtgcatgtccacgtggagtgaggtatattaattaattatctttactatatatgaacaattatgccatttaatgttatgttcagttacattttcggttaagctgccattttcagaatctcattgttcttacataattaatacaaaatgtccataagaagaataaaatctcatttgtgttctcatgacatcagtgcttaac

SEQ ID NO: 80956 - DNA, 429 bp, Citrus sinensis
  Intron number 1 from transcript orange1.1g007350m (locus o range1.1g007350m.g) derived from phytozome v7.0 (chr-ID sc affold00068; pos 418587 to 419015)
gccatcagccagtgcgtaccaagtgagacaagaaaacaacataacgcggtttcaactttcaacgttcatgcacactcaaaacacagctgtttttctttcttagtattaatctatgcaagaatctttaaatttctatatttttttgtcatcagaaaacattaaaaaaacaatatatttagatccaacccatatgcaatgcaactgagcagctcattatcttcattgcatcaactactagttttgtttcatttttttatcatacaactcagaacccagttccgtaaatgtcataaaaaaacagttttgttttgttctgttcttcatcttttagaaaaactggaaaacggattgatcctgaagattctgtatcgttgtttatgtactgtctttacaggaattttttttttgtcgaaatttggaaaggtggtg

SEQ ID NO: 80957 - DNA, 634 bp, Citrus sinensis
  Intron number 2 from transcript orange1.1g007350m (locus o range1.1g007350m.g) derived from phytozome v7.0 (chr-ID sc affold00068; pos 419108 to 419741)
ggatccaaaaaatcgaaattgcccgctttggcaaggtttgttctatgacttttttttatcgatttttttgctttctggtaatggacttcttgcgtttgattcttgttaataagttttagaaatgttgtcttatttttttggttgcttgaaagggcttgtaacttatgatagctcaacgaaaatgaaatttgattttagcaattaggaatcaaacttgatgttaatgatgtgaaatgggttaatttcttggctatatctagtaaacataacatttgggtgatagattctaatacctaatctacatcaaaattaacttttgcaactttgagatgacatattaagcagatggtgatctgtttttgatggatgaatctcaattacatgaagcacctggtagtactcttcagatgaaatatgagtatttgacaatggcattttttggtaattcatcacttaagacaaaaatgaaaagcattcataatcctctctggtttggttgcattgttcaatagttattgaaattgatgtgcaaatatgccaaccagcttagtttaatgaaattgaggtttttctttcaagcttttactaacacttaaattcatgtttatgcagtgtgattgtggaagctttgaag

SEQ ID NO: 80958 - DNA, 837 bp, Citrus sinensis
  Intron number 3 from transcript orange1.1g041590m (locus o range1.1g041590m.g) derived from phytozome v7.0 (chr-ID sc affold00134; pos 270657 to 271493)
attctgccgattctatttccaggatcattgcacaggcattagagcatatttctatgttatttgctagtggctaagacattgtataaggaaagattaatgatttgctttatttccatgttaatgagttcaatcggttttgtcttcaattcttatttacttcctatccctgatcccttacgtggagacactttctcagagaaagttataattaagagaatctgatcctacaaattgaggtgcgacttatgggcctaaaaataaatgaggtttaggaattggtctttgaggtttcctttagatgagggttaactttcgcttatgattatcataagcaagtaaattagatatgactaaaaataggtgagaatcagttcttgcataaacccttggaaagccaccatcattaaagagcatcccaatgtatctcttccatagacttggaagtgggaagtggagagaaaattccattgtggggagatggggggatagaaaatggctctgtttatgagcaatttcctcagctttagattaaatgtgacttggaaaggtcatgtagcctgaaaaggtttgttttttttatttttgatcttaagctcgagagaagattcaacattcaaagaagatatcgcagcatgaacctgtccccttcatggtattttatgtgtagacagacaataagactttgggttcgctaacttagatccttttctttgattgtaataaagatttttgttgttccctacaaaacaagatataaaagaagtagctactctgatcaattcattttcatacctttcgataggttggagtaggggatatatctggtgggaataaaat

SEQ ID NO: 80959 - DNA, 477 bp, Citrus sinensis
  Intron number 2 from transcript orange1.1g035822m (locus o range1.1g035822m.g) derived from phytozome v7.0 (chr-ID sc affold00116; pos 184432 to 184908 reverse strand)
ttaaagcaacttcaagttaatacaaagcttttcaggtccgcatctctcacttcaccattagtatgtttatatgtgagcttgctgtatcttttattattattattattattattggaaatcagaaaatcaacttactgaagaaatataattaatgtttgtttacttatgtagactttgaggattttagctaaatattgatggaaacagagcggttgctgtattagtgtatttaattttaatttgttcaaacacatagtgtgagcatttcttaggtaaatcatatgagcaggaacttccaaaaggcatcaaccagttttattttctcttatttatttatttatttattttttgctgtgctgaaagcgtgaaattagagctttggtatttgagttaatggaataggcaatgtcaattctgaccttgctgaagaagatatgctatgcttattgttttgttggcttgaaattttaggaaatt

SEQ ID NO: 80960 - DNA, 750 bp, Citrus sinensis
  Intron number 2 from transcript orange1.1g035578m (locus o range1.1g035578m.g) derived from phytozome v7.0 (chr-ID sc affold00041; pos 476155 to 476904 reverse strand)
tgttgcgcctattcttccacgactgcttcatcgtatatcattttaatcttttggtcacaattcttgggtttctgtagctttctctccaatggcttctgttctcttgcactaagttgctttgctgcttctttttccgtattcttgtaaggattttcttctctttgatcctttctaatgatcttccttttctaattttttgcctttagtagttctttatgagtattaatttcatcccacttgatcttttctgggtttgttcgtttccatgactgctccatcgcgtattcttatctttttcgattcttggattgatgtcaatttatttccaatgggttctgttctattgctcatatttttgcttttctccctcttttttttttcttcttgttggcttttgttctgggttcttgaaagggttctgttccctttggtctgctgtaatgtgcttctttttcctttttcaatttctataaatgagcattaagttttcgattcgaaatattttcctaatttcaggtgggtttgttcttttcttattgctgaaatggttgattaccataatattctttatagtttttatttggttgggtttcatcttttctcaatttcatgatgttaggcctgaacagacgtattcattggtaaattttgccttccattttgatttttttagtcctgaacttttgttagctcatgattttgctgttaattgtttgtgtcgttctggtgtttctttgaaccagggctgtg

SEQ ID NO: 80961 - DNA, 1035 bp, Citrus sinensis
  Intron number 1 from transcript orange1.1g005878m (locus o range1.1g005878m.g) derived from phytozome v7.0 (chr-ID sc affold00141; pos 297714 to 298748)
ttcaacaggtaattaattttttttaattaattaatttcttcgattttcttttctttcattttttttaaagttgtataaattagttagaatttttttttttttttgtaattgactgtgtgaactgtagtagatatagtttttgtagctttcttaaccagtggaagtgatttttggggaagaatattatcagtgcttctcctaccaagcgcttttggaagaagcacccttacgttaagtaaaattgcattaagatttttgtttttcaggtagaattgctatttatagttgattttgcttagaatttaagaattagagtactggaacattgtctttaattatctgccattgatggtatcgtgctgctgttcaagtttttgataagccaatattcagctctaatagaggggggggggaggggggaagacagtagtcagagctttgttaactatgctgttgaaactgctgtgagttttgaacagtgtaatgtgtatggtaatttttggattaaagtgcttgttaagtgtatagtgtctgtatcaacatatgctttgggaaaaaaattgctgaagttgtaaatttatttattttttaactttttcatcactcaatttcatgcaagtaatggaatagattatgaaataagcactatgaaaacattttgacaaagcattttttggtacagattataaaataagctactcttaattttcgcaaaaagtaatccctaatgagccctttggttagtaatataaaaaacaacttatcatttttgaattccataatcactgcacattatacttctttgtaaatatgaatttaaatttgcagattcagcttgctttacatttctttgcaataccatttccgttaataggcaacatgcttctttgatttattctcgtctgtctctcagtatgtgtgtgttttattttagtttatatattttttccagaaatcgtatgcaccttttgacttaaatttgaatattttgcttataaagcctggctgttcaagtgaatttgctggaattcggat

SEQ ID NO: 80962 - DNA, 496 bp, Citrus sinensis
  Intron number 3 from transcript orange1.1g021563m (locus o range1.1g020502m.g) derived from phytozome v7.0 (chr-ID sc affold00119; pos 383880 to 384375)
agcgtgtcaagcttaagttggaaatcaaagttgaggtgtatttgtttttaattttttttattttttctctctgttttctttttgtgcttattgaactcataatacttactaaatattggaattttgagttaaggtgaagttttttgccaaattatctgataagaaatgatgttttggaaagcacctcaagtgcctttttaattccgaaatttttgtttctattaaagtgtgtatcaattgcttctttggaaggacaatttatatgcttgttttgtttcagaaagctctctcttatctctagtctagctgaacataataaaataagaaaaaaaaattgtttttgattttgattatggtaaatcagttcaaggttgttaaatgtgctcctaagtgcaacatgattgtatcaaggtcagcactagaatataacatgaagaggaaatatttactaatattgaagtatttatgacattttttgtttctcaggtggtggatt

SEQ ID NO: 80963 - DNA, 731 bp, Citrus sinensis
  Intron number 1 from transcript orange1.1g048190m (locus o range1.1g048190m.g) derived from phytozome v7.0 (chr-ID sc affold00054; pos 36279 to 37009)
cattggtttgcttttgccttgcctcaagttgacaggtcaaatttccatctctctctctctcgttgtataaacttttctgtcttctatcctagcaactatcgtcattcgttaatttcatattaaatgtatatataccaatatatagttcaggtcattaggtaacttatgcctttgagatgttgaaggtacgagttcgagccttcacataagtttattttattctatatttaaaaaatattgatcatgggtaaatttcttttcgaatattagtgagagttgatttttgagttaagtgctcaagagacttgtataaaatttttgtaaattttaaatttctatatatatatatgtgtgtgtgtgtagattgtaacaatttaaaaaaaaaatgtaaagatttatattcggccactaagtgacaacacacttattccgcaacccaaaatgtcatattagaaattcacacatcaacacataacgtgtaacagaaataaaatcaggtcagttataatcgctcccacttttgtaaccaagaaaacttcggggcatgcaacaaacaaccgctttactcaagtactcggataaaaaaattttgaattgtatttcttgtatgcgtatatgcttgtatatatgaaaattatccatcgttgacccgacctgagctgatttatatttaactaatggctaaattgaatccaatgcagctgcacaaacacgacctataggtgtttgct

SEQ ID NO: 80964 - DNA, 519 bp, Citrus sinensis
  Intron number 1 from transcript orange1.1g014683m (locus o range1.1g014480m.g) derived from phytozome v7.0 (chr-ID sc affold00621; pos 7119 to 7637)
aataagaagggcacgcctcaaggcaccattaaagtgtgagtttttatttttatttttttttcagttcatttgggttttggtttttgagtgagtttgtgaagtggatatgcataagttttgcgatttggtgaagttaatgaagtgggtcaggtttatattttccaaattccttaggggttctgtggcagattttgttctcgatcaaattgctaaaatggatgttctttaattcctagatgtgatcttgattgattcaatttgagttcatagactgaatattaatttgttcaatgtgagtgcttgctttcattttagttatgagcttaagtgagctcttcaattttccatgttattgttgaagcaaatgtgtgtgcaagcttgtttcttttttcagttgccgttcttttgggatacattgatctgtgaattggttttctcatttcactatcttattttgttcataatcttattttacggactgcaggccagagtcgttgggtattgttgttggggctgtct

SEQ ID NO: 80965 - DNA, 899 bp, Citrus sinensis
  Intron number 2 from transcript orange1.1g029628m (locus o range1.1g025276m.g) derived from phytozome v7.0 (chr-ID sc affold00009; pos 823298 to 824196 reverse strand)
agaaggctgttggccttggtggttggcactggctggtatattattaatctttcatttatttatttttttcctgataagagaacactaattttattgataaactcattagaagattatgttatttatgtacgtatagagagatcacttttaatgtttcggttggccaatttattgcattgagtgtgatgttaaagttgctttccacataggtttctttatgtttggcttgttttgttttctttcctattttgaatctgggctttagcaagccggcacagtatattattgtctttgaatttgatgagatctggattttaggtctagacctttttatttatttatttattttcttttggccgccagagtcgtaaacagaaccaagcttttaccctctttctcatgtctaatattcccagcatgaatgacaacgtaagttaaagtttttcgtttcctatttgtaactataagatattgatgattgtatcctgtactgcaattttcttttgttctaacaaactagtagaaataattttttgaaaatattatgtgttttgatgtgtttcatgaattgacgcccacgtttttcctttgagggttgcaattccctttttctttgccattttttcgggtttaaacttgtcaaaattaattgccggactatgttctttgtaattgatctgggatattggatttctttattgggtatcaaaaaagaactcttctctggtcagttcctttgtttttcatcctctgtttggtttggtgtagttgtataaccttttaggtgaggggcaaataccacatgcctatattcagtcaagttattggctgttttttataaaatcatattgcttggttcacaaggttcttaaaaacggggtggaagttaagctgcaaag

SEQ ID NO: 80966 - DNA, 621 bp, Citrus sinensis
  Intron number 1 from transcript orange1.1g029628m (locus o range1.1g025276m.g) derived from phytozome v7.0 (chr-ID sc affold00009; pos 824480 to 825100 reverse strand)
cttttctcgtaaaggtatttttcggatattttatgattattattataattagtttttgtctttctttaactaatgcttgtcaacttatattattattttgtcgtctcaaattcaactgccactccaccgaggttctaattaacttcatttttttaatttctaaagcttcttcttcgagttttcgcttcttttgtatcaagtatttgcattaaatttctgattagtgagttagcaaagtcgctgacttttctttgaatttaaatttcttagcgctggtattattaacagtaattcattttacgttgtgtaattttaagcttcagtgtgatttgatgtcactggtaactcaaacgagggctttatgatactgagcttactcgtatcgtatcattcatttattatgatcaatctgactccgtgactcattttatttgaatttcttctatttcttttagcatttcatccaaatattcgtgttagataaactctctctctctttctctctctttgtctctctctctctctctatgacatcactgtggtatgttgaatctctaacgacatttttttttaatatattttttagttttggcttcaggttcttcagttgaagcttgggct

SEQ ID NO: 80967 - DNA, 766 bp, Citrus sinensis
  Intron number 1 from transcript orange1.1g022688m (locus o range1.1g022688m.g) derived from phytozome v7.0 (chr-ID sc affold00156; pos 161571 to 162336 reverse strand)
ggttcagcgacgcttctcctgctcataaatcttcggtacactgttattatgttcgctgatattgattaagtttcgtaattaagatggtaattagtgtcagattatccagtatttgcaatttcttcaaattgtttatgcatgaggagcaattgaattgttagtgcgatgtgggggatggctttatgaattgagcccaaggcatggagttgcggacctcagtgacgcatagagaagaattagggtttgcttgtttacatattttgcacgtgtaatgacagtactgttatgggtgctcattttacacttatacagcgtacactttagctgtgcattcaaagtagaagcacatcagtccccaaacatatactcaatcagggtggtttttctagactgatatttgctcaattgtcgtcttttagacaacttttgccagaatttgtgtgaactatagcttagacaattaaactgtaaatagattattaacaaagaatcttccatggattcttaatgtatctaagttcgaaaattttgaattggagaaatacaagtaaagttattagcttggggatgaatttattacagggttttgttgtctgatcagagagagagagagagagctgaggaatatattatgccctttttttgtttttcctttggttcttttgagaagagaggtgagagaggtaaatgcataaataaatgtttatgttacctgatttcatgacaaatgctttctttatgatagatttcaagcgcttggacaaat

SEQ ID NO: 80968 - DNA, 875 bp, Citrus sinensis
  Intron number 1 from transcript orange1.1g026366m (locus o range1.1g026366m.g) derived from phytozome v7.0 (chr-ID sc affold10058; pos 1277 to 2151 reverse strand)
agaaggaagaattcgatcagtacgtgagaattcaggtgataatctgattccatatgacaaaaggataactttgatgcttctgttttgtcaacccttgaacctctgtagctaaagtagttaatatattatgtcatgaccgatcattgacctctgcaatcagtccaacttgagatgctaaagtgtcggcttatcaaactgtagtcacttagcttgttgattttagagagacaaccttcaatgtcttcgatgcaaaaatcttattggttttagagactcaacatttctcgtcacattctcattacaccttttcattgagttacatcactttcttgacatttcttgttcttttttcttttttttatcatttctcgttcttttttcttttttttttatcatttctcggccctttttcatggcgttctcaacaattctcttgttgttcactgtgttcccatcacctttctttctccaattctcatcacgttctcatcagtttcttaacggctctcatcattttgtcatcactttttaggtttataatcttttttataatttaaatatcctgtcagaatcatttttttttcctactgttaaagtaccataaaattataatgaagtgtgttgttgttatcttttactggcaaaggcagaatgtgtccgctgttttcttcatctaaatgacagtagccaataatgaaaaaagcatggccatgagaaatttaacattttgcaaatataatggaatgggatataatacattgcatttaattaagtctacagggctccgactgagtgataggctgatagcttctgcagccggttcttacttggtttgtttgatacaggaaggaaacttgataaagggtgtaagggaa

SEQ ID NO: 80969 - DNA, 371 bp, Citrus sinensis
  Intron number 1 from transcript orange1.1g030653m (locus o range1.1g030653m.g) derived from phytozome v7.0 (chr-ID sc affold00390; pos 24349 to 24719)
tgggttgctgttcttgttctttttttttttccttgttgattttacatgtatgaccaatctttcgtcttcacccaatctatcactgaacactctaatcacaagttagtatggtttgattttaaattgatttatgttggggtttgatttgatctttgaattgatttaggttagggtttgatttgaattgttgaattggattagatttaaattattgaattaggttagatctgaattgttagtctgaactgttaagttcaacaaatcttcatggctgattcttgcaagaagaagatgattgttgtttttttcccaatatttagattttgttgtgattagggtagcaaatttgtcaaattgatttctgcaggata

SEQ ID NO: 80970 - DNA, 389 bp, Citrus sinensis
  Intron number 1 from transcript orange1.1g025198m (locus o range1.1g025198m.g) derived from phytozome v7.0 (chr-ID sc affold00068; pos 66714 to 67102)
aaggcagtaagttatatctttttcacttttttagtagatatcaaattccatttaattcgccactcaatatcagttcctcaagggaaattatatttatcagatatagtatcaaattccagccgagattttcctttttagttctttctacaggaaataacttataggattttgtttaacaaccaaaaattgtgatgatcaaatgtgaaaatatataggtgaaaaacaaactgttatgtgttatattattgtactgtatcatacttgtcaatattaccaattcgtttctgtttgaagttgcttagtttatacagtcaaagaagagggattttcaatctgctataaacggtgtcatgtcattatcgacagattcatctaagcttgaacctcca

SEQ ID NO: 80971 - DNA, 442 bp, Citrus sinensis
  Intron number 3 from transcript orange1.1g028497m (locus o range1.1g028497m.g) derived from phytozome v7.0 (chr-ID sc affold00603; pos 84727 to 85168)
gagtcttgttggctcttcacgacaggtaatggaccactgtttgtatcatgattatcatttttcactaatcatcatcaatgaagtaggaatgctgtactgcatgaataatacttcttcgtttcgtggaatggacctttcatttatgtactattccctatgatgaagactttggatatatttttgaataaaagtattagtcaagttgttgctcagttggagattgttgatactcaaagttaagtggaaattttctgcaaatgttttattttttctgaattgtgcatgatttaaacagcattctctggtgaacatcttgtaaacatcatttagtattcatgttggagtcaaattataaatttgatgattgttcttgaaattttttgagagttgattttcatatgacacaggcagggatttgcagcggatatctggtaacattact

SEQ ID NO: 80972 - DNA, 823 bp, Citrus sinensis
  Intron number 1 from transcript orange1.1g016380m (locus o range1.1g016380m.g) derived from phytozome v7.0 (chr-ID sc affold00018; pos 1656853 to 1657675 reverse strand)
agttagtatctcttctttcttttttctttctttttttggtggattttgtgcattggttttggtttttgtttttattatatattttcttggaattttaataccggtttaggacaaaattggaatattaaaattaatgttttgtgcgctttgtttgtctggatgcgatgcttgattgcttgttctatagtggacacaaatagtctgatgtcgtgcagaattcattttcatttggagttacttgcgcatttggtttgtgaacggaaattgagtttcttattattattattttttaagtttataactaattgtgaatttggagtgtgttagtggaatttattgtgaatttaaagcgctcctaatgttgatttggaaattgagaatttggttccacgtcaagcccgggattctttttaagaaaacatggtataagctgttgtctggttcctggatcctgtttcgtttcgtcatctctattagagaatgaaacaaattctctcatgggtgaaggataaaaagtatttgaattactgtagttttcacgaggacataattggagaagcgaagaaacggttttctatattgaaggcgcaattttgtgtgataatagtagagatgtatgtttgacttatccacagtgatgcagtcactgatctgtcctcattggatgcttctagagcaaggagaattttctttttaatttgatatgtttgattttgttttttttctttttgttaaagactctaggtattttattgggcatcaccaagtagtgccttgttattctacagggtttgctcgagaaggtggaaccatttcagaagat

SEQ ID NO: 80973 - DNA, 818 bp, Citrus sinensis
  Intron number 1 from transcript orange1.1g014042m (locus o range1.1g014038m.g) derived from phytozome v7.0 (chr-ID sc affold00680; pos 50083 to 50900)
taactgattcaactgtcaggtttgttttcttagcaggtacttgtcttcttgaaacttaaaagaaaaaaatattttcatcaatgcgttgccgttttttgttgtttattttcccatttttgcttcgagcaattcagtttgttttcgttctttgatctgacggctttagttcgtttattttctgctttgtttcttcttcgaaactctgtttggttgccgagaaaacgtaggaaaacgaaagaaaatgaagaaaaaaactgccattaacttgatgaaaaagttcccgttttaatcaagcgtaagcttgttttgtttttattatattttgttttggtaacagtctaacagatccatacgatttaatcttaataaaaaaaaaggaaaaaagcaaactttgtttctattagataattttattttagtaacttttaaatttatgcaaattagatcgaccgtttacttgtctttattcatataataaatgagttaatttactagaaaaaaaaggcttaattgttgtaactaatgagagttattttgtgtaatgtgttatcagtttcaaagtaagacgacaattctattggaattctaagttgttgtttgggtcatatatatgaatttgatgtgtgttcgtgtgtgtgtgaatctcgactttgacttttcgtgggatggaaaaatgttccatttttgacttagttttattgatttttacaatgcaaatttaatttaaagttctaaatttgaccttctagtaggtatcaaccttaggttaaaatctcaataagcataatttgaccggttgtgtttttgcagttgtgtaa

SEQ ID NO: 80974 - DNA, 638 bp, Citrus sinensis
  Intron number 2 from transcript orange1.1g014042m (locus o range1.1g014038m.g) derived from phytozome v7.0 (chr-ID sc affold00680; pos 51226 to 51863)
gtgtcagcatctggaatacccgagtattcttacaagtatgtttttcattaatgttttttaacttacatgttatgagtatgcaagattttgaattttaagtatcatggaaacgcttcatgcactgaatttttctactcggattgaatattccactctgaaaagaattggttttgaattgtcaatatcttacattctgcaaccctgagttttaaatcataatttggtaaaaggttattaaagcttgaatgagttttaatccagtctttccagtgtaatatagtatcctagatgagaaattaataatactcggtaaatgtttggcttttgttcaatatgagaaaatgtatgtcttagcagttaggatggcttagattcatctttgttgaaacagtagtagcaataaagatgagcaggacatgcaagccccttatatagttgctgaatttactattatctgcttctcgaacttatattttgtttagagaaatatatttacactagccctgtcgatctttttttacatattttattctattgatggttcttgtgaacttggaagttttacttgaccttcttacccgtttgatctatttattcttttcttctttatgggcatgcagggatttgcagaaagctac

SEQ ID NO: 80975 - DNA, 805 bp, Citrus sinensis
  Intron number 3 from transcript orange1.1g026619m (locus o range1.1g026575m.g) derived from phytozome v7.0 (chr-ID sc affold00031; pos 902506 to 903310)
tggaatcttcggctgcactgaagatacagaaagttgtaagttcacaacagatcctagcacagaagattttgtgtgtgtgtctgttgcgtgtttatttagctgcgaaattgggattcgtctattgtgtttgttttgtttgcttatggttaacagcttagattaggcgagtttgtgtcattttagattccagaactggtgtctaatctgtttcttgctgagttgttgcgtgctgtgtgtaaatgtttctgtatagtattgttgtgtatttggaaatgggaaactgtggggttagatttgtgacagaatatttgcaattattaatatgtgggagcaacaaaggatttattataaaatgatgacggtggcttccccctattggcaaactaataaaaggattagaagaataagaaagaatatctctgtatttatcctaatgggagtgagaaccaacagtaaagagtttttaagttaagcatatgaacatctattgtttcaaaaatcttgctgataacgaaggtgcttgctattttgaattctggttaacatgcctccatgatggaagctaggttttgactttgaaagactatttgcttgcacatgtaagtgcttctggttctgagtgattaaagaactaatgagagttcttctttgttgctgaactagcaattcttctttactatttctctattctttagtaataaatgtgtgaatttgatatatattgaataattgatataaagttacaattctcttacttgatatctctgcaggctggactggattcttctgcccgtgtgttctattt

SEQ ID NO: 80976 - DNA, 491 bp, Citrus sinensis
  Intron number 3 from transcript orange1.1g018596m (locus o range1.1g018596m.g) derived from phytozome v7.0 (chr-ID sc affold00031; pos 693301 to 693791)
aaaacggaactccacaggtaagtaactaaggtcacgcaataaaacttcatatttatgaattggatgaatgattcttaggtccctaaaagattttaatactttgttgttaaaacagtaacaatgaaaatattgttaaaggataaatgtgacattttaactaaaacactgactaattttaattcaaacagatctcagataatcaattcacaaaattgtcacatttaccaatgaatagtataagtgtttttcttgttgtttacacatgaggccttaaaaatatatcaggaacctaaatagtagaaacaaattctaagagagatgaaattgtcattttagccatttaactgaagaattgagagattcaattagtttaatgctattccaagaagaagatttttctgacacgatcatatttgcagtaaatttattgataatattttttgtgaattgaatcaggaagaaggttgggttgtgtgtagagtgttcaagaa

SEQ ID NO: 80977 - DNA, 659 bp, Citrus sinensis
  Intron number 2 from transcript orange1.1g015534m (locus o range1.1g015306m.g) derived from phytozome v7.0 (chr-ID sc affold00069; pos 293798 to 294456 reverse strand)
aagtatgtacgctgaacctggacacaaaactctttggcttttgctattgaaacattatatctctaacacatttgttcagatccaatttggatgttgtattattttcttatccgacgtaatggaatgttggtgtatgttgtgctgtctgtagtgtgtagaagtttcttctgccaataactttcttttaaatacatttttttgttaatgttttaaagttttaatccttaaatgatatgtttattgttagactggctattcaatatttttgattatctgcttattgtgcttaaatgattgtgttgcacttagaatataaaagcagttgcaagataataagcttcttgttagaattcaatacattaatttgctttagggtctctgtggcatgagtttcgaaaatatcttgctttctttagctatctgaaaaccttgcctgtgtcagtgaattttgctcaatcacttgttctttaggggaattgttctcccatttttccttcggactttgtgcttagaatttctacacatggtagactggcaactttgttatttgctgtctctagtttattcttctttatttcctcatggaaggccaattgagttcatcccaatttgaaaaataattagtagatcattgctgacagtttattaaattgcaggaa

SEQ ID NO: 80978 - DNA, 924 bp, Citrus sinensis
  Intron number 1 from transcript orange1.1g026484m (locus o range1.1g026484m.g) derived from phytozome v7.0 (chr-ID sc affold00013; pos 1093160 to 1094083)
ctgcccttgttggaggtaaattttattttattttgttttgtttatttatgggatcttttctgtttgttaaatgactaatatggtgaacaaaagttaaatgaatttggattttgtttataaaagcaccaagtgttgatactacagtctttggttagcatagaccttactttatgatgctacacctaagttgagttgagttgagccaaatacactttagcttactgaactgtaacactatgcttgaaaagagcttaggcaaaggggagtgagtatttgatcctttggttgtgttacttttcctcgtctgctttcactaaatggcttaacgccagcagcaaagagaaaccgtcctatgtttattttattattttgttgttttatcatgaaatggtatatgtatgttagtccaagttttttttttctgtttaagtcaaagagaaaaatgtgtttctttgccttcagtggcctttttcttttcaatcacttatacatacttgttgaaggattaaattttgtgagtctggaatgctgatacatcttttctccaactgtatttctaataatcatctcaacctgacttgataaagagaaatgaacatcccccgtatttttttttctcttttctcccaatttccggttgattctacttctcttctgataaacaaagtgttaggcctgtaaatttttttccgtcttttatgcgttttgtctaaatgcaaggctttttggtagtggtaaactattgatcttgaacatattggtaagatatgtttaactttagtttttttgtgaattctttggtatggttgaatctattttaccgttttgtagtatacttgtctggaccttgattataagtgcaacttctttgctagctggcattccatctaattattattaatattgttggcagtgggtggtctt

SEQ ID NO: 80979 - DNA, 734 bp, Citrus sinensis
  Intron number 3 from transcript orange1.1g032529m (locus o range1.1g032513m.g) derived from phytozome v7.0 (chr-ID sc affold05552; pos 1378 to 2111)
ttaaaaggcttgtggttgaaactactgcaaatcaggtaattttatgagattctccaatttggtaagaatttcacagcatttttttttagaaggcattcaaggaatgaccgtctgaagtttctaatgttgttcaatttaacagttccagttatttctattcaattttcaagtcaaagtaatagtaatgattttgtgcttagcccttgttttaaatatatatagaagattcactatcatatcaaaagtggttttttattctttcttttagtagtacattacaatttattgttattaaaactaaatcgttgcaacaatagcatagcctgggggtctattgagcatagataaaaaaaatctgtgctgaataaaggcaagatctaccttacacttacaaatagtttcaaggttggaatttcaagtccattaggacttgaactcattacccccatgacaggggatgaggactgacggcctgggtggcatgccaggaactgttatttattatttttttttggggttaaaatcaccctaatcccctgaacataatatacacgtctaaatttttcatgagttggaggttgtcagttgcttgactggtgaatttgcttttgtacttaatctatgaacttgtgtaatcagtgaaaaaaaaaacttctctaattgtctaagcaatgcataaattatgaactgctgctgcaggatccgctggtgactaaagccccaactctggttcc

SEQ ID NO: 80980 - DNA, 699 bp, Citrus sinensis
  Intron number 2 from transcript orange1.1g025774m (locus o range1.1g013325m.g) derived from phytozome v7.0 (chr-ID sc affold00139; pos 25663 to 26361 reverse strand)
cccaaactattagtacaaactttatcttctggcaggttggtatgacgtttaaagtttttattgactttagatactgttgtttccttatatgaataggttgacttgatagatgctgcaaattcttctagtgctgcatatggaagacctgaaaaacttcggatataatgctacgaacacaacatactacatatgcattttgaagcctttctttttcaattcaatagtttacccatttacgttttcttacagcgtatcacatagtgtggtctgtagtagtttttttgttgtcttcttaatctgattttcagtttcagctgtcactgataagctttttctgggaaaagttaacctgatccacaattggtttaattagtaagcagatttccctcttatcacctataagttaaagtaccgacaaactactgcggatggtaaatattgaactaattaaaaatttctttcagatatacttcaaatcatctagaaatgcactagtcattatttgaaaaatctctaacatgttcgcagtgtcacttaaggccatttttttgaatccttttggagcaaatggcttcctaatagacatggttgttggttaagtttttgtgtcctggttttaattgctgtttggcatggatgtggaaattctgtatcaatatctgctttgcatggctgatttttggttttggctttaggtgt

SEQ ID NO: 80981 - DNA, 612 bp, Citrus sinensis
  Intron number 2 from transcript orange1.1g015788m (locus o range1.1g015804m.g) derived from phytozome v7.0 (chr-ID sc affold00019; pos 1637758 to 1638369 reverse strand)
cagcgctcttctttgcatacaatatttcaggtttgttgtttagctttatttttttgaaagatttattttgttaaaattaaaaaaaaaaaaactatgaaactatttagaaaatctttgtttctttggtcaatcaaaatcttcaattgagtactttaagacaggtatgattttatgtttaaaaaatttggaatggcttttgctcctgtgattgtttacaagttttactactttgaatctttccaatataacttatttaaatttctactgaaattagtaaacaagatggttctttgttagaatgttgccaccaaaagattcagttatagtgggtcatacatgctctgttttctgactgatcattggccagaaatttagggttcgctttccttgacttttgtttccgtctgaaccatgtcagcatgattcaatcgcatgacctcttgtaccacccaacgagtgcttactattaaatcaactaatatctaccaattataattgattactcgtccattgagctaaaacttgagtcctcaaggttcttcaaattgaatgagcttcatttacgtttaattatgattttattttctaacttggatttgaataggcagttat

SEQ ID NO: 80982 - DNA, 388 bp, Citrus sinensis
  Intron number 1 from transcript orange1.1g047411m (locus o range1.1g047411m.g) derived from phytozome v7.0 (chr-ID sc affold00396; pos 30771 to 31158)
cagtatttattttatggtagaatagaagaaaactgatatatatgctaatagtaaaattcatttccttttagtttacattttagagttcattaacaaaaatgaaaatcaatctcagatttctttccttgtagaacctctgtgagaataacctagagcggccttttaaacccatttgatttcacttttccttcagtgcttcaatagcaaattgtctggcttaatttccgtttttgcattttgcatgtcttctatgtgctatggtaagaactaactagtatttgtgtaagctggatgctcatattaattaagtctagcacaatactgttatgaaaaatacggtcaataaaatctttcaaacttatattttgtaacctatgctgcaggatct

SEQ ID NO: 80983 - DNA, 714 bp, Citrus sinensis
  Intron number 2 from transcript orange1.1g047411m (locus o range1.1g047411m.g) derived from phytozome v7.0 (chr-ID sc affold00396; pos 31266 to 31979)
cagacgattcagtaaaagctaaaaatttgtttctgctatgatattttgccggggttaattatccaattttgtctcttttagttcttatagtgtagtcacttatccaataagtgcctttttttaaaaaaaattacccaaaaatatccatgttgtacaattgtttctgttaaactatttaattatcatatattaaatgatatgatttgataactttctcggactttaagcaatccaagaggtatccttgatagaattagatttatcatccatcaactgtgaaagtaacaatattaattggtgttttagataattttttaaaatacaagactacttgaataattgactcaaatcgtagggactataagagttgttttaaatgggtggttatactccatctcattttctataaaactacctcaccctacttaatttgtgattttttattttctgttgattcaacaaaaaaaaaaaactttaattttgaagaatcatatttttatttattcctttggacattgggtacttaatttgttatttttcactttctattaatacaaccaaaagaaaaagttaaactttttttttctcaaattttgaagattcatattttttgtttatcagagtctcctttaaacaactagatactgactgtgataaacgaaaaaactgacttaataatttgtaatttgaaattgtataggctttcataaaagc

SEQ ID NO: 80984 - DNA, 398 bp, Citrus sinensis
  Intron number 2 from transcript orange1.1g017008m (locus o range1.1g016125m.g) derived from phytozome v7.0 (chr-ID sc affold00132; pos 56957 to 57354 reverse strand)
tgcagcacatcaaggcaattattacttctgaagaggtaattattattattgtatttatttcttttggcaaatttgggattcatcaatctttattactgcataagagtgcttcttttagtattaaataattcctcaattctttttttcaagtacaaattctaagcagatatgtttttgacctttgtattgctttcagggaattctaattcataactatttttgttaacattattacttaatcaaaattattatttaatcttttctaacatgtttagtgtttgcttttaatataaagttctggtgtggaaaagaacatgcaagtgtgagcatgggccactttgggcagactgtgatgattgattttgttatataataggtgttgcttcgagatcctttgg

SEQ ID NO: 80985 - DNA, 436 bp, Citrus sinensis
  Intron number 3 from transcript orange1.1g014045m (locus o range1.1g004390m.g) derived from phytozome v7.0 (chr-ID sc affold00158; pos 141571 to 142006 reverse strand)
agactgtaaatttttgttggatatatcttctgcaggtactatgcaccattttcttccttaactactgaaaaatgcttcatatatttggtttgctagtgaagttatttgattattgtgttctgctttcggcctgctgtgaaaaaattggccattacattttgtatctgcgataattttgtacctaaatcaacgcttttctatcatctattctcttgcgccccagttattattacaaagctggtcaggcagtcttataacgtagattgtttgtaattaaaattattaattatgttcatgttatctctgattgacattttattgttctactacttgttccttttgtttcttcagaaaattccggtttgcatgtatttgacttcttggccaattccatcctgaaggaggttctctcagcaattcagaagggaaaaccagg

SEQ ID NO: 80986 - DNA, 681 bp, Citrus sinensis
  Intron number 1 from transcript orange1.1g044486m (locus o range1.1g044486m.g) derived from phytozome v7.0 (chr-ID sc affold00107; pos 235753 to 236433)
ctacgtaattttaactcatggatatagctcatattgaaaagctaactcatcaagttttgaaagttgtccaaatattatatacttaaccaatattcatcctcagcgaatatgagatattatgggatattattcctattactctgtcgcatgcagaacagtcttttttcactgtctttgttatttggtaagggagtttgactctccgactacatgaccggtctttttgcatactaattgtcatgtggtaaggtaagtgagtatggtttatttataaaacatactacttttggctcccggtttggcgcctttttttttgtttttaataaaatcatacgtatcctaaatatcaaaatggataatcgttatgcagagggaaaacttcaaaatgagagacaacacagatccaaaatataattaatttacctcctttgatttcttgtcaagtcaaaattatatatatagagaactaagcacaggcttcacctttctttatacgacacattttgtataccttacactatgtaaagtgcgagagttgcaattttcttcttacacacagaaaaacactacaaattaaagaaacattatgagttttaccaaaacaatgttcttactagctcttcttgttgtatgcatgtccatgatcaatgtgcaatgcatgttttattgatcatagaggca

SEQ ID NO: 80987 - DNA, 578 bp, Citrus sinensis
  Intron number 4 from transcript orange1.1g012142m (locus o range1.1g012142m.g) derived from phytozome v7.0 (chr-ID sc affold00121; pos 328760 to 329337 reverse strand)
tttgttcgacgccaagaaggtgagtgagccagcacgatttgtttctcaatttgcctaaatactttttatggttagtgcttgagaatctacagacttaggctccgtttgatattgctatccacaaaatttgaagtgtttgataaatacttgcaattgttgtccagaagttgagatcattttaccttgcagttgtttgataaaaaacttacattatttttagtaattatgtcaaaatcattatttaaaaattatattaccaaacaactatcaacttttgtttcatacccaaagcttcaatattgctgcagccgtgactcaaaagccataatacaacaatgccaaaaagagccttagaactgcaaattctaagtcagtgtcctaatgatttgtatttagaaaatttttgtgttgtaagaaatgataaaattggtggttgaaaacatgtgactgttcattacttctaaagtatttacagttcgtctatttttttttttcaattctattttctaaactcatatattttttttgttcttttctttgcagcgaagtaattgagctgatacagaaaggatctttta

SEQ ID NO: 80988 - DNA, 661 bp, Citrus sinensis
  Intron number 4 from transcript orange1.1g001668m (locus o range1.1g001668m.g) derived from phytozome v7.0 (chr-ID sc affold00116; pos 341828 to 342488)
aggcctgtaaagttgactactaaagtgtttggtaagcatgtattacttcacattccattctcaaaattagttgttaccttcttaacattttgatcaatgttttcttattgcctctgccagtccgtttcctatgaatagtacagtgtagattttaagtttttgattccacaaattaaatgattcttttttatttcgtaattataacaagaagatgcatactttaggaaggcttgattcctaataatgaacggacaggacacattctctcaagtttatgcacctttcattctctttattactgttaccaacgaaaatactattcttgcaggctatgccccagcaaaaaatgattttctatttgaaaaggcgagctcttgattcttaataattaattaatttttcttttatagtgagaatttttctaggttgtaagaagcaaagctctcattgttaatagattgagtagtttctcatttttctgatattatatatctgtttcattgtccagcgtcttcaaaactacatctttggtaagcagggctattggtgtaattcttattaaatctttgttgtttgtttatgaatgtctgctgattaaggcttctctagtaaactctcttaaaatagtgtggattaatggatcttatttgcagatatttta

SEQ ID NO: 80989 - DNA, 655 bp, Citrus sinensis
  Intron number 2 from transcript orange1.1g013071m (locus o range1.1g013071m.g) derived from phytozome v7.0 (chr-ID sc affold00212; pos 132198 to 132852)
gttcatctcgcagccgcgagctgccctgacaccaggtttaacttcccctttgtgtttaatcatttccttgcatgtggcatgatggcaagaagtttgaatctttttgttgaaccaactcattttaattttttttaactaactcgtttaaatgtgaatcttacacgtgaattggctggtgttgtctgtcttgatcaattggttgagatgttagttctgacgaggtaaagatttaacacattaggaatatactcacgtcctagtgaaagatggtatagttgttagatgttgtggatattgttgcatagatcatacatgtatgtattaatctacttgtatatggttgacgattatcatgatagaaccaaatttatcataaagtatattggatttccgctatttatgttcttgttgctgattgccaagtaattgtgtctatcagaggaggttttgaagttcatgtttctctgtttattctcgttcagaattgctgaggaaagtttcatatgttccttggtctttttcttgtcatttgtaatatctttccttagtctttttcttgtcatttgtaatatcagtggtgtggattgtttcatctcatgatcatgctgtcctgttagatttaacttttaatttggttacagtgcaagttatactg

SEQ ID NO: 80990 - DNA, 805 bp, Citrus sinensis
  Intron number 1 from transcript orange1.1g024411m (locus o range1.1g024411m.g) derived from phytozome v7.0 (chr-ID sc affold00350; pos 13090 to 13894)
tgcctctttcttactatactggaatcctcggtaaactttttgtttgcgcaatttatgtgagcaaattgtgtcttctttttcatatgtaaatgtttttgatatcttgatgtgaaggtagaaaattgcatgttttgagtttttgcatatttgatggaaacacagaactgtacctgaatctttcagaacccccttttctttgaagtttgaacacttttcttgaatgtatcaactttatttatgggatatgttgccaaattggcaaatctattcgttataaaactttcctttgacagtttaatctaagcagatgttaattctgtaaatagagtgtgccttagtttagattgatagatttgtctccttctgtacagtaaaaactttgagcattttcgccatattctattcaatacactccaactagttagttcttgaggcgtttcctggtttcgtggagtgagccaagatgtatacgtttgcaaattggcaatgtcttttgcttgatgtgttgtgagttgtgagtgtcaataggaaagtctcaaagtgcgcagtgctcacttgagcacccatattacttggtgacctgttgcctcagcaaacaagacctctgttttatgaactccaaaaagttattctgttaaaaagatcgagacagaggccatactatatttattattgctataaaagtgtcaaacaatattcttcatttaatattctaaacgattgagccatttagttatgatactctgctgtactggggctaataatctaagtcggttcaaagtggtaaatttataaattgataggt

SEQ ID NO: 80991 - DNA, 556 bp, Citrus sinensis
  Intron number 3 from transcript orange1.1g018902m (locus o range1.1g018902m.g) derived from phytozome v7.0 (chr-ID sc affold00068; pos 442500 to 443055 reverse strand)
cagccggacttggtgctatttacaggcatgttctcatctccgtttttgttcattaacctgattttgttgggtgcctgcattttcgttttcttttctgatggcttcattctctttgcaccaatgccattgggtgatgtaagcatatgtttgggattgagtgctgcagaatgaattcactggccatcaaatttaattggctgactgcttggtaaatattagctatcatgagattgagcgtgcaccgaacactttaattgttgtgctttcaaagtcaagcacacggttacagacatatccaagaagtgaggacaaacatttatggaaaacatttccatttcagataacactcttttgattgctggtggagatttcttacacatttgaacttgtctgtttaaaaggacaggccatgtctgattaattgtcttttgcgcccatataatgggcacaatatagttttttgtttttttttccttttcaataaaactatatttctcattatttgatttgtttttttcctttcccccttctttgactcatttaggtgattttggta

SEQ ID NO: 80992 - DNA, 930 bp, Citrus sinensis
  Intron number 1 from transcript orange1.1g031098m (locus o range1.1g028207m.g) derived from phytozome v7.0 (chr-ID sc affold00176; pos 265869 to 266798)
aggtatcctgctttcccttggtgaagtttttagctcttctgtttgtttacttttattctgtgtttactatgaagccaaatctagaactcaaatattttcatctagttacattgaggatccttgctcatagtgatcagtctaccttgagaaagttcagtcaacactggattctttttttgcaatgagctagagttatctttgaaaacttcaaattcttgttttaatagagtctacctctggtttatctagtggcttccggaacctttctctcatattttacttgattttattgccaagaaaaatactcattcttatagcagactttagaccgtaattactaaaaccattccaaacatggataacacatgtgaatcttgattaaatgaatttcaagaggaaagctaaatagcatctttagctgcggatgtgtgacgtctgaatttagcctcaaaacgaagaaaataagctaaacaacatcttatatacctacttataacaatttcttttgctttcgtaatgtgttgcattggattggaacttggctcatttgcattcaccagcacccccacccctccttcctcctccagttgttctggactctatatgttttaacacttttggtattagacagtaataataagaggattctggttcaatgtttcttttcttttcttttcaacccttacattatttatatttgctccgcttttggtattacactgcaataatacaaggattctagtttcttttcttttcaacccttacattatttataattgctcttgcaagattcttaatctttaactgaaattctgggtacttttgttcatttcaaagcattgtttgtttttttgtaacttggagaatactttaaagatgaagccctcgattgcaggtagatctagtgaggagacattgtttccctgttta

SEQ ID NO: 80993 - DNA, 280 bp, Citrus sinensis
  Intron number 3 from transcript orange1.1g021149m (locus o range1.1g014004m.g) derived from phytozome v7.0 (chr-ID sc affold00589; pos 47862 to 48141 reverse strand)
gagctccccatcaaaacttgtatgtgagattgtgaatgaccatcattagtatctaatagctcataacctatagtcaaaatctacttaatttatctatgattgctttttaagtaaatggcaaataagattctgttcactcatacagagttccgttttcctgtgagtcatgagctgtttgttgctgaggtctatgaatttgaattttcataatttttttcttttcttttcttcctaatgcttatattacatagttttgtgtcagaacaatcaaaggcctcca

SEQ ID NO: 80994 - DNA, 588 bp, Citrus sinensis
  Intron number 1 from transcript orange1.1g008369m (locus o range1.1g008369m.g) derived from phytozome v7.0 (chr-ID sc affold00119; pos 165594 to 166181)
ttaattgttgtgcaggtttaagaccactttgacttttttagggtttgcagtttgtgtcgttaccttaagggtttgcaggagatggctaattttctatgttattgatcttggtattatttaagccaagatgatgattattgtgatatggtttgaaaaagacttgtttccttggttgtctgtatacgtcaaccatcagacacatatttatggattgttgagttcttgctgcttacagaaacagtgccaaaagaatatgtgactacatgcatgtcagatatacaggataatgtggtcatttctttctgggttctttttgttagtgggtccattgacagtatgtgggtatcatattgtgtgctagatcttcatcattcttgtaatatttcgtaatgtatgttattgcttttatatatttggcctcatgaactgattccatagatactcgttgtagtttaattgattgggcaaagtgcaatattttggtgtaaatttactgacatactccttcattagagctttacataattgattgtttaaattctttgtacttaaatttgaaaactaacttttagaagttctgcagttaaa

SEQ ID NO: 80995 - DNA, 895 bp, Citrus sinensis
  Intron number 1 from transcript orange1.1g032409m (locus o range1.1g032409m.g) derived from phytozome v7.0 (chr-ID sc affold00781; pos 64242 to 65136 reverse strand)
aaaggtattttctctttcttgcccgtttacttgcatttgctataatctccagagctttagcattagtatctgcatttttggtatcatattgttagttcttagtcctgtctcatagttctgccactgcttttcaacattacaagatgataaaggggatatgcatagatatttcattaaattttatggttgagattgtttcaattgaaagttcaaggtagtaagtccaggggagagtaaaaatatatgtttgattatttcacttatttttgtaagaatatacgtttgatcattccacatatttatcttttataatgctaattggtgatgatttgtcttctctcatatttgtatttataactatttattggtaacttgatctaccaatattaagtttaacaagtctaataacgttgtcttgacattaatttatgattggttattctgtggtcaacaatttaaggcccctccaggtttttgttttatacactctggcttgtaaaattcggtcagaaccaccttggttactatgtttcattcatctcattcatgttacaaagtcatatgatcaactgtatgacatatgatgtttgacaacctatgcgttcaagttgtcattaacgaaaggaagtttatggtctccgacaaagtctgactcattcagccggttgacactgctcaatggaatgttaataatctaatcgggtatcatagatttcttgaacaaaagacaaaaataggagtaactgaacaatatactacggaactattgttgaagttatacatgatatggaaaacctgcgatgctatgcttgaccaggaagtttaataaagtcaagatgaatgtctggttctaatttttcttggaattggatcttgcaggaagaaacttttccag

SEQ ID NO: 80996 - DNA, 992 bp, Citrus sinensis
  Intron number 1 from transcript orange1.1g009173m (locus o range1.1g009173m.g) derived from phytozome v7.0 (chr-ID sc affold00131; pos 182843 to 183834 reverse strand)
ggggccagaaaattgaagctcacacaggccagcaggtacgttgggcctaggcttgctaatttaatgtcccctctataagcgcataagcttgggcgagtattgtaggacgagttagagatttattttgaggtttttattatttttaatttttagttgtgatcagattttaattagcttattcggctttggtttaattttctaaagtggtttggctatttgagccggatttctgcttcttaaggatttctggttctttttttatttggtctttggccactgcaaataaggcctttttgtcagttttcagtcagacttttgataatggaatattgaataattgaataaagagttgacttctccatatattcttctgattatggtctctcttttgataattgaatacagagttggcttctccatatattcttatgattatggtctccttcctctcaagattttctccccctttctatttttgtttcacattattgagacaaacccacaagcttttgacattggatttttgtcatatgaatgctgaaacaggcttggcctctcatgcctatgagccgataacccacgtctgtcacatcccacttggtggatcagatggactagttgtttagagagtggactgagcccaaacccataacaaagatgtattttttttatgcatgggaaaatgaatgacttgtcccatcttattctcttcaagtacttggtagagttcatttagatttgaaattaattcttgcaagattaaacttggacctgttaactttggaatatttcataatttgtgtcactaaagatgttaacattggtattctggcaatctggatgtgtttacatatccttaaggtttggatctttataattgagtccagctagattctgtttatctgatgcattttttctgttcaattacagtatagctgtgaatttatttctttttcccttgaaaaaaatggttctgtgtgttctgcagatcg

SEQ ID NO: 80997 - DNA, 258 bp, Citrus sinensis
  Intron number 1 from transcript orange1.1g002522m (locus o range1.1g002522m.g) derived from phytozome v7.0 (chr-ID sc affold00018; pos 1207003 to 1207260)
tcactctctcttcctctgtgccgccgcgaacagcagtaagctttctcttctctgtttgtttcccgttcaaatcaggaataattttaatttattttttgtatataatacgaaatttattttgtttaatgtctcgcagtgcgatttagttcgttagggtacgttgttttgtggtagattttgatttttcttttcctttgggttttgttttgtctcatcaaatcagatttctgatttcacgcatctacaaggaaagaacaa

SEQ ID NO: 80998 - DNA, 488 bp, Citrus sinensis
  Intron number 2 from transcript orange1.1g039443m (locus o range1.1g039443m.g) derived from phytozome v7.0 (chr-ID sc affold00028; pos 1145002 to 1145489)
cgggtgatcgggtcatcttctctgttctgtccaaggtgtgtgtgtcttcatgtttctgtctaatttgttttttcgctttatgatttttttttttgggtgacagtaaaataagagaaattaaattgaagaagaatatgaaaccaaattgcttttctgctaaaaccatcgtatcagctctgtcgcatttaattatcttgcataaaatttctctacacttgaatatatataattaataaaaaattaattggttttcaattcctttgctgaagaatgaatagggagcataataatttaaaacttcgctttgaatcttaattatgttatcctatgaggatgttagcatctttttaatgcactgaaagactaaaaaaaaaacaagaaaaataaagactttaatatatatattttttaatcttttagctcacattggagtttttgttttttttgtaaatttattttaggtccatttccgtccaacccaagccgag

SEQ ID NO: 80999 - DNA, 704 bp, Citrus sinensis
  Intron number 3 from transcript orange1.1g006386m (locus o range1.1g006386m.g) derived from phytozome v7.0 (chr-ID sc affold00387; pos 46900 to 47603)
ttcttcctgctcacaaggtgtttcatttctgtcccattttgttttcattactgcaatgaaaattgaagcatggtatctttagtgttagcaattgaattgaaggttggtgaggcataatatgattgttttatcagatatgagtaaagtattttatttttattgcttccattatgggtctgactacagtgtgcacacttcatgtttgattcgtaaacatgttaacagtttaaggattaatgttattgttatccatataaggtttcttgttctcatttgttatattaccaatgtgacattccatgctaatttcattattagtttggtgaccaattttagcagtaggaaaatctctccagcatcattaacagaattttcatcacgaaatcatacaaaatccatcaatcatatgatcgatatacggaaaagaatttgttagcactggacaattcattaaggggcttataaatctgccattagatactgtagttttcagtctgttgttgttccccttcaagtagttctcgttttccttgttcttctcactggagatagggattcattatttcttaactattaggaaatgatcctgactgtgtttatgttgactcatagtgaaatttataacattcttttgcttcaattccccatttactcctcttttgggaattcctgatgtatcgttgacctggtgcagtttggaaccc

SEQ ID NO: 81000 - DNA, 1008 bp, Citrus sinensis
  Intron number 4 from transcript orange1.1g026475m (locus o range1.1g019718m.g) derived from phytozome v7.0 (chr-ID sc affold00221; pos 182276 to 183283)
tctgtgtcgttacacagttaaattatttgaacaaggtgagtcagttattaaattatttgaacaaggtgagtttgctattaaattatttgaacaaggcgagtccaccactattagtatcggtagtgtcagttgtatcagtcattgacaccctctgacaagtttgcatgttttttccacatcatattataaacatcacatggtagagttttatgaattttgaggtatttgttgtacatgatcttttgaacttaacaagctttcaaaaatacatggatttccttattgtataaatttcttcattgtgaaaggtatttattgtccctcttaacatttggtgtattatgacccaacgtggccgctgaaaatttgattcttctatagtggcgaaacacaattatgtgtgtatattgcaaaactcgttgtcaccagatgcgccaaggctaaagtttgaggactttgtttcatgttgattttattatgtttatatcttttcttttttctaaaatagatgctggaagatccttgttgaaaagaagaatatatgatacaattgtatttgatttgaaaatagcatgcttgctggatttaaaactcaaccgatgttttaatgatgagctatttcactcatgaatcaaacaaatgaactttcttaaatacttgtgatttctaaaatttcgttcaatttgccattccacacaagctattgcgtttataagccctttcatttcttttctgtctcacctgcattgctgattaatgaaatattgatcttcaaactgattcatcaaaaagctgaggtgaaagatgcttgaatggcgaccatctcatggtgccattaatctgagttggtttgatggttttccttctgctgtgggattcttagatctttgtgaaatgtttagtagaacgttttcaaactgtgcaattggttccctttctcatgttcattgatgtatatggcttctttgttcaggcactggatacattcaacgcggctattgtttcccc

SEQ ID NO: 81001 - DNA, 491 bp, Citrus sinensis
  Intron number 3 from transcript orange1.1g011572m (locus o range1.1g011572m.g) derived from phytozome v7.0 (chr-ID sc affold00365; pos 1979 to 2469)
gcatttcaagaggtgagcttttctttcttcatattagcatattttacataagactgacttagtactatggtatcatatctttttgaatatgaacctattaaacatatgaaatttaatagttttcaaaaataaaaattgatttcatattgtatgtttagcagtaattttggatgtgagaagttagaaaatgtgggtttgaattcaatttcggttcagattgtatgagtaaaagtgcaacaatatgtaaaattatgtgatgaagatttaataatattttacattttggacttgtccgtcaggcctcctacctacttccccctcccaaccttaaattctttggagattgctcattgttatttaaacttcattatccaataggcttccagctcattgcagatttctttaaaatgtgaaatttatactacttttcattttcattcaaacaatagaaacttaattgtcagatttaaccctttgtttgtgccaggact

SEQ ID NO: 81002 - DNA, 585 bp, Citrus sinensis
  Intron number 2 from transcript orange1.1g005313m (locus o range1.1g005313m.g) derived from phytozome v7.0 (chr-ID sc affold00028; pos 7798 to 8382 reverse strand)
gttcaaaacttgaggcaggcacaaggggaaatcaggtagatgctttacttgtttttggaattgttacttcgacattcagtggtatattgtttctaacatacaagagtcttcccattttacacgataattgcggtatgttttgcacatgaattctgacgatattggaagtcatagttactaaatatttgattgtaggtagtcattacactcttatctaactaggagatttcagttgtcttttcttgttgattctggcttgcaaaatgtaggtaaaattttttggacactttgcattaaactttagtgtattccaatttaaatttaaaaaggacatggacagctgaaatggaaaaagaaagggtagatagacttgttaatgcgacaattgttgtagcctattgaagcagcacggtcaatgaaacccaagaatagtaataataataatatctgtgtgtgtgtgtgtgcgtaaagctgtagcggagttttcacttaaaactttaatttttctaatttctttaaagtaatgcctctatgtcctttttttccaaagagtgcaagaggtggaccagttcaatctcataacat

SEQ ID NO: 81003 - DNA, 481 bp, Citrus sinensis
  Intron number 1 from transcript orange1.1g005313m (locus o range1.1g005313m.g) derived from phytozome v7.0 (chr-ID sc affold00028; pos 8681 to 9161 reverse strand)
ttctcgctgtctctctcacgaaacggcatcgtcaggtacgatctataatccaaacttctcttttttaattcttcagatctgaatgcttttttttttcttcttttgaaattaattagatttacgtacttcctttcgtgattgaagggagtatagaaattagggtttatatatctgagcgcgatttacttacatggtttacaactgtttgtttgctcagaaaaaaaaaaggtgaggaaattttgtagatttacgttgcatgttgattcctcaatgaaacgattcgcttttttgagaatttgatgctgctttttagggtagcgtaggccatattttgattttttgagctgaacgcgcacacacacaaacttggagttttgtgtgtatgtctacctgcgtagaatttgttccttatcgttttgcatattatcctggaactcacatattttgatttgagtggttgtaggataatataacttcctac

SEQ ID NO: 81004 - DNA, 840 bp, Citrus sinensis
  Intron number 3 from transcript orange1.1g030780m (locus o range1.1g030780m.g) derived from phytozome v7.0 (chr-ID sc affold00009; pos 385535 to 386374 reverse strand)
cttgttgaactcacctttgccaaagtcattgagtaaaaatcttgctctttgcctatctatctctctgtctgtctttatagccaagtccgttaaatgtttccattcttaatttgaggcttagtttctttttatttggaattttcttgttctattttaagtatctcctgtagtttgttacaaaatacagagtttcccaagcaaataaaaatgtcacgtgtatacccatacaatttttccaaaaccactgctatctatttgtgaggcaaaaaaaaaaaaatactttgtttcagttgactaactaatgaaaaattggttattgagcccatacattagaccaaaatttaacagaatagcaatcttcttgaaaaatgtgcctttctaccattatcaaagtatatattttccaaaaatatataaatcgatccttgttctctcgatgtcttgatgcacttattgcattatgtaaacttgtagattctattctgttctccaagaaataattcaaagaaaaacatatggagccatccaaagattcacattgatgtaatttttccatgatttcacctcaaaatctcctgcttgttattttagccattctagagaactctttactcttaattcagtcgagggaaaaacaaaatgtgagtattgtagttcaagctatgatttcaaatatctccaagcctcataggtttggtggttagattatggtcggtacaccttatcttgcagggattctttatgacataattgcttcttaatttattcacaattgtagagtagcaggagcagatatagagtctaatctaaccccttgtggcaggattcctatttggtcgt

SEQ ID NO: 81005 - DNA, 414 bp, Citrus sinensis
  Intron number 1 from transcript orange1.1g007839m (locus o range1.1g007839m.g) derived from phytozome v7.0 (chr-ID sc affold00478; pos 51424 to 51837)
aatagaataaggacaaggacttgtccaaatttcaggtagttgcatttttttaaaagaacatttatttcattttttgtttagctagaaattgatttgattgaatctattagtttcccatatcagaattctcaaatcgttgacgcgttcttctgggttttgtttatttttgtcatttcaccatccgttttggtgaaacagttttgtttttttcttaatggaaaaaaaagttgattttgcttcaatgctaaggtgaattatgcttaatgaagagaaccctttgtagtatatttatttatttttactagtctttggctgaatctacaagttaagtacttttcttgtttgattgaagagtacacataaatttacatttaattgctgaacttgttacaggatcagcagttgataggattg

SEQ ID NO: 81006 - DNA, 573 bp, Citrus sinensis
  Intron number 2 from transcript orange1.1g013702m (locus o range1.1g006709m.g) derived from phytozome v7.0 (chr-ID sc affold00006; pos 715989 to 716561 reverse strand)
tccaaattgataagcttttgtctgagaggggtatgtgaaagacaaagcttatacttttgcctgctcttatgtttctttcatttgcagctattcataagaagatttctatttgaattgtatgatactggattttgtgtaattgtcattattgaaagtacaaggtttttctttccttctttccttcttaaaattttctattatcttgctgccgcctttcactcccaagtcacttaaggacccttaagcatcattaaagagggtagttcgtgcctattctttcattgttagcatgccagtactgatgatgtgcatacttgttgcatctatgagtactattgcttcgctgctctaatacaagttgtggagatgatattcagctgaaatttaattttccaaaattttctttctggtttcttgtaattttattttcttagtttttgtttacttagcattgctgaagatatgaattaatgctttttggttaaacttttagaaagttatctagtagttattgtttttcgtaaatcattttgaccacacatgattaacaagtttagaagaacttattcaggg

SEQ ID NO: 81007 - DNA, 769 bp, Citrus sinensis
  Intron number 1 from transcript orange1.1g006208m (locus o range1.1g006208m.g) derived from phytozome v7.0 (chr-ID sc affold00018; pos 916469 to 917237)
agcttcagcttcatgtaagttgattttttttttcattttctttgataatatttgcatatgggttgcatgcacctttctaatagaaccatggacaccatcagtaaaacgttgttttgattagtccttctagtctcaatcgttatatgattatgtatagaaatgatcccgtgggcaacgttgctcggcttattcgcttgaaaaggttaatgtttgttatgaagctctctatttatttatttgtgttttatgagcttatagaaagcttaatacatgctatggagttctttgataattgatagtttgagagctctgtaattgtttgtgctctgagatttggattttgatgggtgttatatgttcaggagagtggtgtaattttcgagaggtttggtggaagagtgttagataatgaactttcaaacgataattgtttatatgctgcaaaagctgagtcaggcgagaacagaatcttagaagaatttttttttttttgggtaaattaacttgtctaaattaagagaaacagttttccatggtagttattattcatttgctttggtgctatttctggaaaggtagtaattacatggtttatttctaaggataaatgttccatatttttagtttttagcatgaaatatttgtgcctttgtatagtttagtcatgaggacaaccattttcttaggctgttattattcatgcttagtttttgttttccttttgtcacaaaatgttaacatttgttatgttcagatttcaggggattaa

SEQ ID NO: 81008 - DNA, 480 bp, Citrus sinensis
  Intron number 2 from transcript orange1.1g044673m (locus o range1.1g044673m.g) derived from phytozome v7.0 (chr-ID sc affold00171; pos 146088 to 146567 reverse strand)
tcgatcaatacctactcctactgagtcaagctggggtattgtttcgtctcatagttttaatcagatttgttagttttgattattgatttttatgctttattttattgatggatttagaagaatatttgcccgttgcgtgacatgctacactgttgaatgtttgatattcttactcataaagttatttgttatttgaatttctgataaacggaaggtctaaagggcatgtttgcgattgagatattgcgacttttaattcataaatgatctgagtggagtggaattgctggtgggtgtttaccaaaaacttcagttgtgttctcaatgagtagaagtttgcaacttgttaaatattggagctctttctgagagatggagtcagcaaaatagttagttgatcagataatgagatttcatttatgtgatctcattttctatttaagtaatggctttgttcctgtaggtacagggagattcagt

SEQ ID NO: 81009 - DNA, 601 bp, Citrus sinensis
  Intron number 3 from transcript orange1.1g034779m (locus o range1.1g033799m.g) derived from phytozome v7.0 (chr-ID sc affold00096; pos 411503 to 412103 reverse strand)
gcgaagtgagttttatttaatcttattcagattttgcaaatcagcttgtggttgctaattggattaaagttcaattttagcttgttatgttatagaacatactgctagtaggagaacaatatagtgtttcgctaaaggttgtacttctttgatcttaattattgttatgaaatcatgtcttgtttgttttctcaactcacagctgtctttgctaagttctagaactgaaatagattagtttcataagcagtgtagtgatgatttatagatcttgttggagttaattttatttgccaatggcttgtgtggctgtataaagagattaattaccttaggatcaaacattgttcatgtatttgttaattgttttgatagcaatttgagaggttgagataaatgccaggatggcagaaattggcttttcatgtgcaaaacaaattacgattcagcttagatgatatatttggtagttgatagtatcttctcaaaactttgaatttttcttccagaaatttgtgatttctatggtttaccctactgctatgccattcacaacatcgtccaatataaccttaatcccttaaaagttgtttggacagga

SEQ ID NO: 81010 - DNA, 756 bp, Citrus sinensis
  Intron number 1 from transcript orange1.1g008001m (locus o range1.1g005243m.g) derived from phytozome v7.0 (chr-ID sc affold00006; pos 1814306 to 1815061)
atccgacttctccggtcgcaattgaggtgggttgtaacttattggtctctgtaaatgctaacttaatgaagtctttcttcttttccctattctcatctgtcagagggaaaaaggttcttacacctgttcatccttgaaccactggtattctttacctattctatagttcctgatatatatgcattgtaagaaattatgaattctcattactctcccacaattcaaaactgataacaggaacttagatatagttttttcgtgaagcaagttgtccattgttaaatataggctttcataatgcatctgctttatgcagcccctatatatatatataggttgagcaggggtatggagcagctgcatcccactaagactaagaccaagtgcaatatcctgctaatgctcgattaagttgctgtgaatgcaataagactacgagctttatttgattagaatttctagctttgttgaatatttagtattgctctttttcttctttcttctatgatatgtcttctttctctgtttatagttttatcttgtctttattggatgggtagtgtttttaagagcaagctagcaactgagttctggttctgctgttaattcagttaaattctactccggtattgtcaactattcatacctgcatgctgaaatattgttgtttgagtagccattaacctaaggcatctggttttatgtgctgtatctgtttcagtgggctgaaaggcggaggtttgaaattgctggatt

SEQ ID NO: 81011 - DNA, 771 bp, Citrus sinensis
  Intron number 3 from transcript orange1.1g017092m (locus o range1.1g017092m.g) derived from phytozome v7.0 (chr-ID sc affold00270; pos 162635 to 163405 reverse strand)
agctcattcgccaattcggcacaatcttgcgtaatgtaaatcaccattgctttcaatattttgatttgttattagaaattatttgttctatgattaatatgttattgaattatatttattgacaaattgagagattttctgcatgtctgcgctttatatgcaataagtttgcagaaagtttacaatacacttgcaatgctaatgagatgttttgtacatggccatgctgaattctgtgtactgtaattttacacaaccagataggcgtgttatactactttagataggtgacaatttgtttgtatcttttggattaagttttgattttattcctcaaatttttactggactaatgtgagaattagtggtcgagttctgctaacttcagcgctaaaagttcaaaagggcatgtgaatcagatggtgtggatgcccatgctcatatatttgggtaaatgttgtagtgatatggtaatgtcaacctaactgtggtaatggggtggttgagtaattttaagaaggaattatcaggtgacacatgtccatactactacatgagttagacggaagcataatgggcactcttccagtcttcctttttgtatgcttttaactccgcaaacaacctcattatatattgtttcacatgtttcaaaaattctatgctttaggtttggtcacttgggtgctttaacaaatggaatttgcttcctctgaggactcacctgtcatatctttatccttgtttacagattacacagcacaagtgggc

SEQ ID NO: 81012 - DNA, 855 bp, Citrus sinensis
  Intron number 5 from transcript orange1.1g018541m (locus o range1.1g015271m.g) derived from phytozome v7.0 (chr-ID sc affold00598; pos 44723 to 45577 reverse strand)
gctctcctcacataggtttgtctcaaatccattttttgtttgttgttacaacaaggttgtgttatctaatcatttttaactattcttatcaggattgaatgcaaatcgagagaatatgtattttgcttatcaagtgtctttgattgttcacaaatatgactatttaatgtcatatgaacagtagagcgtcaaaagttaaaaagcaagtgtttaagcaagtaatatgctgagtgctgtgccctacagattttctggattagtccatattcaatcaactaattcaaagggataatagatttatgattttttcccaattcatatggacaatcatgaaatttcaaagtccttggtggtcaacctaatgtcggaaccattgatgctagtcagtgttaccatacgtcattctatgaattaggtttaggtctgcagaaggttatgggtctgagttcaaagatgattattggtgaattaattgtactcatcaactttgttattcattgagacatggtgtatgcattagagattgaatattagaaaaatgtggttgtaaacagtttaaatgataaaaaaacccgggcaaccttctcatgtttataggtatataacaagagtccttttctaatagccaagaggatgagtactccatggtgatttggcttgaatggttagaagtgttaactcctataatataggaagagcatgatcagcagttccccttatttttgaatgttgtactgtgcgtttctccttacaaagtgttttgcttaatgatatgtggttgtgtactaaggttgaattgatgtcatttttggtgcttcaggtcattacgagtattaccctattcaatacagggcc

SEQ ID NO: 81013 - DNA, 498 bp, Citrus sinensis
  Intron number 1 from transcript orange1.1g018541m (locus o range1.1g015271m.g) derived from phytozome v7.0 (chr-ID sc affold00598; pos 46648 to 47145 reverse strand)
aattcgcttgtttctaattctcattttctcgacgcgtaagtttcagtgattgtaaaggttttactttttaaattttattattattattattattattattattattattattattattattattattattattattattttaagattgctgtgtaatttagggtaaaaggctgctgttttaatattatttcattgagttttctttcgttttttttggggggggggggggaaggtgaaagttaagaaacatgctgaacagagctatttactcttaagattttgtcgttttgttttatttgattgacactgtctcaatggataagaagttctttgatgagatggttttaattaattatttacttattattcgtaggattggtatggggggttgttgggtatcaatattttttagtggaaatccttgtgtggtatcaaaagttattttgttgaaattattgtgcagattttatcccgagagggctacttcacttgcatttg

SEQ ID NO: 81014 - DNA, 1020 bp, Citrus sinensis
  Intron number 1 from transcript orange1.1g024319m (locus o range1.1g024312m.g) derived from phytozome v7.0 (chr-ID sc affold00086; pos 138651 to 139670)
attcttttctgctcacatctctccacttcaggcgagtgattaaatcttgaatttttttttttattcttttacaatttagcccaattcttttccgtagtgtaaataacaagttaatcctggggaaatagtggcacattttcactggttgttgtgtaaagagtttaagggatatgattgatatgctctgtttgtgatttgatagatacagatcagaccatcatcatctattgatctttggaactcactggagcaactaggtttatgttccagtgagttccaaattttggacccactccttccttaaaataatttccagggcccaccattaaacgggtgctttttatttttttattttttcccaaatttgaggtcaataaacctcacatgcggtatgcctgtatggctgtatctgtatgtgccccttttcttggatcaatattttgggttgtgactatagtatattgggtgtcgtactagaatataaaaataccgtccattcttagatttaattaatttgtgttaactttataattttgaaaatgttcagactgtagtgcacgatatatttaaagttaggccccagtatttgggctacactaaattaattgatttgctacactgcttttggcttaaacaagcatgacttcatcgacatgagccatcctttgttgtggggtatatgcaattatctaagaagatgaaaatttttgtaaccattatgaaccccaggaaagtttgtgccaacaatagggtaataataagtaataaccaacacaaccacctccattattatgaaaggctaatgaattttggccccagataaaggtaatcaatcaagcccacagcagctagctttgtcttcattgcaaaagatagaaaaagggcacgttatgttattgttgccagccttgacttgtatgtaaagacatggttagcagtttggtggtgggttgcttgcttttattaaggttttgattcttctttttttttctccccccctttgtatttttcacagtcagg

SEQ ID NO: 81015 - DNA, 761 bp, Citrus sinensis
  Intron number 1 from transcript orange1.1g026242m (locus o range1.1g026242m.g) derived from phytozome v7.0 (chr-ID sc affold00019; pos 383559 to 384319)
gagtacgtcaccaaggttctcacatttctttattcttcttcttttctattttcttcttttaatttaaaatcatgacaattataagaaataagaattgatcagggagtccgttactccttgattataatttagccacatgatcatatatgagcttcaaatgatttattgagaaccgcaaaagcctcactgctttggctaaatagcctcaatatcccttggttgaatcataaagaattttttattttttttcattgtttcttttttcaattttctggttcttcttatttaatggcgttttggctttatgtccgtactgcatgattttttaatcttcttgaccatttacttaatggtatctagtgtttaaaattttcaattcattctgttttgttcggtagtataaggccaatttttgaagccatctgcagacgggtttatgtttacattagagccttcggtaactgcagcttttcttttggcctctataccccctaggtcaatcatttatttgcagatcgtatgtgatactttatttatatgtgaatttattgctatttgcccccttatattcatattaagtaccattggcatatcactcatatcaaactgaagttgcctttttagattagtacattcacgaatgatctctatatttgttcgagggagctctgttctgtaatttcttgtaagcttaatgtaacactattttctaattctatgatacattcaggtacaaaatcttgtggaagcatcaaaggcat

SEQ ID NO: 81016 - DNA, 820 bp, Citrus sinensis; identical to SEQ ID NO: 80651
  Intron number 1 from transcript orange1.1g025603m (locus o range1.1g022953m.g) derived from phytozome v7.0 (chr-ID sc affold00040; pos 212775 to 213594 reverse strand)

SEQ ID NO: 81017 - DNA, 546 bp, Citrus sinensis
  Intron number 1 from transcript orange1.1g024724m (locus o range1.1g020083m.g) derived from phytozome v7.0 (chr-ID sc affold00405; pos 97402 to 97947 reverse strand)
aaactcttctgggaaaggttatggtcatttctttgaattctcttacctcttatataattcagacataggtcaagtggtaacttaggaaccacagtcctgatgaaatatgtttgtttaggaattggtgaataattacttttgtatcatagaagggaaaccttgtcagaatttttagaattttattgaattaaaaaaaaaaaaaaagagtactccttcgatttcaggccttcaagatgttgcccagagaaaaggtacaaatagccacaaagtttggggttgtaggactaagagataatggcgtgatcgtgaagggcacccctgattacgtgcgctcgtgttgtgaagctagcttgaagcgacttgatgtggattacattgatttgtattatcaacatagagtggacacatcagtccctatcgaagaaaccgtgagtgatattttttctcctgggctaactatctgaaccgtaaagttctgtcttaaattacaatatttaaagagtttttttagaaactatattccttgtcatgttatagattggcgaa

SEQ ID NO: 81018 - DNA, 517 bp, Citrus sinensis
  Intron number 4 from transcript orange1.1g000779m (locus o range1.1g000779m.g) derived from phytozome v7.0 (chr-ID sc affold00134; pos 300371 to 300887)
ttattccttttgcaatcttgtataaacgcgctctggtatgcatataaacacactcaggcattattcctttaggatgtattatatctttggttcactgtgatagaggcatttgtttcttttgacacatcttttatattggacctttcctttgccataggtaggcagcattcttttccttttatctatttgaccatctctttttctcttttccttttctttttctttttcttttttctttttgtgttttgcattttggtgttgtttattttcctgagagttggaaggggtacctattatttcatctatcattgcattattggcgtttgtctgcagtaatgctggaaattacattgataaagtcttttagctttctttatgtcctaatcttttagctttttgattcctccggtaagggaacagtttgttctatgttcaattgaaggattatcattgattaccttgcaagtcgtttgcaaccattttgaatgatattttgatgaaggaagttggcacggag

SEQ ID NO: 81019 - DNA, 986 bp, Citrus sinensis
  Intron number 1 from transcript orange1.1g029462m (locus o range1.1g027685m.g) derived from phytozome v7.0 (chr-ID sc affold00018; pos 1267842 to 1268827)
ttttcggagcagattcgctgattcgtccttccgaggtttgctatctatctccttttctgtttttgtttttatttttttatgcttaattttaatatttcgttgattctttagttttgagatcttatcggtggaaaattcaaaatttatagagattaatttatatgcttgtctataagacgatctgtgatttatttgtactgattaaaattttgtacactcgttaattttaattgaaaacttatatctgatactatattttgttttcatttgttacatcttatttggtttagtttgatgcttttttctctggatttgcagtaatataattatactaacgggctttgatttttttttttaattgttatgcgatgggaagttttgatgatcattatgccctttttttctcccctttataatatagattgtagattattgcttttgcacctaatggttaattttccagtatagtatgaagttttctaggagttccttgtgattatgcattggggatcatccaaagcctaaggataagtttgtgatataaattagaaataatatttgcataatagggctatttagtagagattgtgaaagttttgggttttttgctagaagttataacattgggtttcaactttaatgtggagttataatgaccttggaaggaagaaagaagataagaaatatatacatttacctttggtggtgccatgtgattgttattgcttgtgaacttgataacacacgcacacatatatatgtatacatatacatatatatatgtgtgtgtgtgtgttgtatgtgaaattacttttactgaataatttgtgggatcatttggtcgatgtgagtgaaggaattattctaattgcttgtcatctgaattgtgggtgttgccttacttgcaccagcacagaggttgctgcaattaggaatttgttatgttaatttgttgggctgattgtaggttgtgacatagagtgcca

SEQ ID NO: 81020 - DNA, 567 bp, Citrus sinensis
  Intron number 3 from transcript orange1.1g000379m (locus o range1.1g000379m.g) derived from phytozome v7.0 (chr-ID sc affold00013; pos 999885 to 1000451)
atgtaagtttgctctgttaataccccgaattatcataatctgcatagtgcagcatcaagacatgtattcctttgttatgatcttatatcgagctccctctatctccgatgtccctaaatagcttttatttgcaaacttatagtaggaaccaccacatcatccaaagtaagttgtctacatctgcgtgtgtgtttgagtaaatcatttcttgaaattttctttaagatctgaagagggtcttgtttgccacactttgttggatttgctcatctttcttcagtctatatgcttaataattgaatccttaaccaatttattttgtttggttgtcttgtgtgattatgggatcttgtttgattatcagaaatttgattgttgaccgtattgttgttagcggaatttgataattatccatgaatgttgcttgttataaataagaagacaaacatatctgtgatattgagtgaaattttccaaaattcttcgtgcatgttaaatgatcaagtcattatgcagatagtgctgtgtcaattcatatcctttctttatttcttgtaggtactggtt

SEQ ID NO: 81021 - DNA, 830 bp, Citrus sinensis
  Intron number 2 from transcript orange1.1g032324m (locus o range1.1g032324m.g) derived from phytozome v7.0 (chr-ID sc affold00037; pos 477695 to 478524 reverse strand)
atctgaagtcttgactgggacctacctcgttggaggtaaggggtgaaccaaccactcaaagggatacacatctttcatggacttccattgagtagttgtattattatttcccttttaatgaaaagcttcatagatggactcttaatcagttaatcatgcttcttcattttgtcttgcttaatattgattagcctaagtttcttccccatacaaattctatagtaaaagtttattttggttttagctgtaataagatgttgatgactcttttcagtttttgttataacacgtttttgtgctttcttgttttttgactggaaaaaaggaataagatgttgatgactcttttcagtttttgttataacacgtttttgtgctttcttgttttttgactgggaaaaaaggggcaactattctttcaaatacaagttcatagtaagaatacatcatctttgagtatgttgtatcattttagtttagggttgtatttagtatgaaaaatcctttattattcagctagcaacaataatatatctattaatttggagttgatcagctttgaatgaggaaccagtgctgaacatattatgatgagtttattaactgaacagtctggttgatattcttgtcttgtaacttacttgatgactatctggtagaaatgattgctaaatttgatttggttgtttggatacttcgtgctgttttggtgggacttctataagtggcatgtaactcttgattgcctgttatgttttcgtcttttactacgcattgtaagtcatttgcaatttttttattagggagtataaggtataaaggtgtcgaag

SEQ ID NO: 81022 - DNA, 905 bp, Citrus sinensis
  Intron number 1 from transcript orange1.1g032324m (locus o range1.1g032324m.g) derived from phytozome v7.0 (chr-ID sc affold00037; pos 478589 to 479493 reverse strand)
ctgactctatactcttggtgagttctaaattttgcttgtttcttcttcttactttttaaacaactctgcttcacttagtttcctcaatttacggaaattttgttcaatttgctgcttgatttcctctttattattgtttgagtatgcctttgctatgtgtgttaactgcatggtagttatcataatttcttggttactatttatttaattgtgtttatgttggttaattatattccttgattgatattagattaagatgatattccttgatattaaataatagttaattggaagatcaaacacgcaaattaatttatgattcattcatgcatcctaaatattgattttcactagggacccacaaaaatcatttcttttatctgggtttgttcccccatcaaacacacaaaaagacaccattatagtcctaagttcatttatatatttggtgtttgtgctttagtcgattaataaagtaatgaatggttagccatttttaaattcattggagggtctagattgtgtagacatacgaacccaatacatcacttgtttttaatattaagtaggtgaacgtgactttcactgaaagatggaaaatcttgtctatttgtgcgctcagaattagttcagtatagtgatattgtttcttaattatgcaaatgtgtattttgtattgtgttttgcgtttcatttctgaccaaaacagtggatgtttgttttatttatgcaaatattagcaatattatgatatttatttgaaagatgtcttgtatggctataaaatgtttgattattttaatctataatgataatggtgttttgtttcaccttagatgattgtttaatcaaattaacctcattggatagtcaactgtgattttacattattttgggtatcatca

SEQ ID NO: 81023 - DNA, 596 bp, Citrus sinensis
  Intron number 1 from transcript orange1.1g007514m (locus o range1.1g007514m.g) derived from phytozome v7.0 (chr-ID sc affold00006; pos 571275 to 571870)
gcacttaccttcttctgctcacactcgaaatacaggtatgtgttttattggtccaaattttattttattttattttattttatttgcttggtttattttttgaagtaagtttttgttttttgtctttatttatttttttttttgggaggtggggtggtacaaatgtgtgtctttagagatggatatttttttgtcgcatttctgtgctaaaaatgggatttttagtataggtaagtgtctttggtttcaattactgttgagtgtggagggtcttttccttggcttttttcttttaaacaagatttttagcctcgagtcttgccgagaaaaagcattttttttttgtttcctttcctctgcacgctcctgggtttcttttactttggcttggagaaacaaaaggggtaaagagcaaggaatggtaggaaaatcagtaggactagcgattaaggcttgtttggttttcttttctctttggtatgactttttagcgtaatgactttttcaccttgttaaagttgaatcttttgattagacatgcagcttctataaatgttactaagttatcttatgtacaatttttacaggttacggtt

SEQ ID NO: 81024 - DNA, 939 bp, Citrus sinensis; identical to SEQ ID NO: 80868
  Intron number 1 from transcript orange1.1g004794m (locus o range1.1g004252m.g) derived from phytozome v7.0 (chr-ID sc affold00068; pos 78755 to 79693)

SEQ ID NO: 81025 - DNA, 557 bp, Citrus sinensis
  Intron number 2 from transcript orange1.1g013587m (locus o range1.1g013587m.g) derived from phytozome v7.0 (chr-ID sc affold00018; pos 1050566 to 1051122)
ctaaacctgccaaacccaggagacacattcctcaggtacccgtttttttaaatatattttaggtaatttgattatggcatatgtttatccttgagttaatcctctgttacattgaattcctttttttttttggggggggggggggggggggtgtagaaaatcaagtttgatcattagatgattaaaacagtttgatctgaacttttggatatgttgcaggtcaatcaattagttgtagtgattttagatattcttatcgacatgcttgtgaacaattgaaggtggaggcttggaactgtgtttctcagttaatttgtttaatttctatctaatctgttttgtatgaagggcatgatgctaattgatagtaaatttgtggaatttaagaatatgggtgtttttttgtataattatagtgtctatacatttttgagaccattaattgatttggctgctaactgtttgctaatttgcttgtacttttaattttaagcttgtctctgcttctgtattaacatttctgcaattgcctgtgcagtcttctgagaggacattgg

SEQ ID NO: 81026 - DNA, 1013 bp, Citrus sinensis
  Intron number 2 from transcript orange1.1g004333m (locus o range1.1g004329m.g) derived from phytozome v7.0 (chr-ID sc affold00184; pos 189517 to 190529 reverse strand)
aggatatcgtgtcatcatctgttgataggtaagctgattttttggaagaattgtatttgttgtacagtcctttttcctctgtttctcctcgtttctgttgaaaagtttactcaagatattttttgagctggattcttccatgtcaaacaaataaagattcatgtgcatttgtggcaattgctttgaaaatttagtttttatcaatattttatcttctttactgctgttttatggggcttagcaagcaacctatgtctcctataaacttcattaacatgcatatgttgttagttaccgactctgccatttctatgttgttggcagcactcttgctatgatgtccacctcatagttggaaaatctgttgaccctagaacctaataattaagcggttgaacttgaaagagatgccaaaatcccatggaagctattgaagtatctataatggtgttgggttacgctctccaccactttactgattgcaagcattgcatgacagtttcataacatgtatcattcttaaaaatagctttgttatttgagtattgctcaattttccgtgtcatgacccctttttacaagtgattggaagattatgcatgtcttagttcatattatcattgaacctttttacttaaaactaagccctacatacatataatgagatattctaggagttgaaaatgctttcatctggcaaagaacgcccaacaggaaattttacttgtaaattaaatcagcatccacaaaatttaatcagtcatagccaacatagaaaccaattaaggcatattttgagcttaaataatttattttattgtttctcaaacagaaaatgccattattttcagttttcccgaaacttaatgagacaattgacttagtgtgtatcactaagacattatcattgtcactagttaaaccattgttgaaacatgattaacaatttgaattttttgttgggcttcttttttgcagtactttaaaacggtggaggaaaggaaaacttgttg

SEQ ID NO: 81027 - DNA, 625 bp, Citrus sinensis
  Intron number 1 from transcript orange1.1g004333m (locus o range1.1g004329m.g) derived from phytozome v7.0 (chr-ID sc affold00184; pos 190823 to 191447 reverse strand)
aattgagctccgagcttcgtggccacgaagacgacgtaagatctctctctctctctcactcgctcttttcttttcttttttttttaaatctttttatttttcattaaaattctttttttttttttaaaacgaaacacagcagtttcatacgtcaactaatattgttcattatctgaatacttaaaaatttcaaccgagttatcgcaatcacgtagttgtatattaattgggttgactttataatttgtgtaaattgatgcaattagaagttacaatgtgattatttaatcttaaggttgatcagctgattctttgtagctattcttgtgaaccaattttgatgtgttctttgatattatgatgtgggaatgtgattatagttagggaaaacagttataattgaagttgatcatcatatacacaaagtttggttctaaaaattgatttatttgaaatgtggtattttatggcgataaatgtgggtatgttgaatcaattaattgaatttctggttgatcagtatatatttagatgcacgaacactctactaatgctagagatatgctttgtgtatgtgtaaattttttcaattttggatgtacatattatattaggttcgtgggat

SEQ ID NO: 81028 - DNA, 498 bp, Citrus sinensis
  Intron number 1 from transcript orange1.1g005039m (locus o range1.1g002429m.g) derived from phytozome v7.0 (chr-ID sc affold00419; pos 100853 to 101350 reverse strand)
cttgtctcttctcatattgatactgtttctgcagggtatgctttctgcgcctctttaatttcctatcttttgttttagcaaattatttttatctctttgtcactgcagttctataacttctgtctataacgggatcttcttcttcggtgtgaaaatcttcagttaaaaaattgatcattgtagtttattatcgaggatgagttgtgagagttgtggatttccatgtgaaggaggtgcaaagtttgagatagggtagaaaaatcccaatttgatttaaatacaaaaagcggttcagtaaataattaccctggtttgtcccatgctattaccatgaaaccttctttattcagatttggcaattttaattgtctcactgcatcttatcatatgcttttctttacccctcctccctcttcgattttgttattttgtacacttttcttgctaccttacgaagtgctttgcatcgttcagggaaggggctggagattgtagttc

SEQ ID NO: 81029 - DNA, 739 bp, Citrus sinensis
  Intron number 1 from transcript orange1.1g002595m (locus o range1.1g002418m.g) derived from phytozome v7.0 (chr-ID sc affold00006; pos 1503831 to 1504569)
ctcctaacagatcggagcctctcaaaagctcttcggtatttgattttgaattttatttttctggaaagtcttttcagaaaatgcatgtcaaagtcgtcgataatgctcatctgtaaacctttttcagaatttcatgtcaaagtcgtcgataatgctcatctgttaacctttttcagtattttcttctttcgttacgtgttgtagctgatatttgaaagacttatatctgcattcgttcttagcggatgatttgacctaattatgattttttttggcgcttgatgctggacaatttggtgcattacgtggagaatactgaaaattgtcgttgaatttactttattttgggatttcagaatgcatctgtggatgatttaacggaaattgcataaatgaaatgtagaaaaaaattataaatggaatgaaaaaaaacagaagaacgtgcattgacttttaaacataggtgatctctatttgagtttaatacttttatctgcttattttttactactgaatgatttgttgattattgtatgataagcaatactttacattgcaatgcaagcggaaaattctgtgttttgctatgtcttcttttggttttgtattatgatttcattttctgtaacttttggttcttgaagttgttctatagtgttgtttacccttttagcagctctttcaaccttttgttcaatcatttgatctgttgaattcttacagttgacaaaaacagaaa

SEQ ID NO: 81030 - DNA, 693 bp, Citrus sinensis
  Intron number 1 from transcript orange1.1g017375m (locus o range1.1g013090m.g) derived from phytozome v7.0 (chr-ID sc affold00019; pos 1363438 to 1364130)
ggtaggtgctaacttggttgttatcattgtttttgtttctcgtgctttctgggttttctttattttcagttttattctttttggttaatatatcttggtttttgtgtttctgttaagttggtggtctttgaggcctttaattgaaagctttgctcagacaaatttttttgtgcttgtgttctattggtgcttccttggtatgtgggttctgttacagagtttttgagctcttcattgtgggtggggtgggtgggtcagttttctgaatccgaagatgtttgtaagaagtccttttcatggttatttgcttaaatttctcttcttttactcttgcctttttaagttcaagtatctcttttttgattggccgtgacgattcagttgtaaactttactctccttttgttctgttattggtctgtattatccctgtttctgtatctgaaataattccattttcttttctctcctcagagctgagcatgagctattcacatgacagtgatgatgaatatgagaaactcatcagaagaatgaatccacccaggtatcaacacaacctcaaattcttttcttacagataaagccaccctctcacccctcccactctcttttttcaagtgtgaaaaaatttatagactttgcgatttacaccactttgtacatgggccttttgtcagggttgtgattgata

SEQ ID NO: 81031 - DNA, 681 bp, Citrus sinensis
  Intron number 4 from transcript orange1.1g016198m (locus o range1.1g015613m.g) derived from phytozome v7.0 (chr-ID sc affold00089; pos 256741 to 257421 reverse strand)
tggaattcctgattatagaaggttttgtcttgtcttcagtttctttaatgaccttatagtatataaaataccttgtcattacaatatatattggtggcattgcagcttaaacaattttctactgatccttgacgttcactttatttattgtcaactgttgagcacttatcctttccattcttgtataactgttgtttgcgagagattctcagttatcaaactttgaccattcatttacactcattaataatatgtgatgctgcattttgatacttggcagtcatcaataacacacacacatactctgatttagttgttcatgtggatattagtggttatgatctacttttttatttaaaaaaaaaaaaaatcaaccattttttctcttgaatatgtggtatgtgcttatcacaaggttcattcatctgttcatacaattgtgtctgctacatatgagagattatggttttgctttgtagtggaattcgctctgcaattgaacttgattgtttacaattgtatttctcagttttcaattcaaagacagtctcatttgccaaacttgatttgcataattctttaatttcctttttttaaaaaaaatttggtgtcattttttttttaattcttctgttctttaagttacaataattacttttcattatctttttggcagtccaa

SEQ ID NO: 81032 - DNA, 835 bp, Citrus sinensis
  Intron number 1 from transcript orange1.1g010326m (locus o range1.1g010326m.g) derived from phytozome v7.0 (chr-ID sc affold00006; pos 2337149 to 2337983)
agatactttacttgtttcgagtgagtcagagtctcgtacgctcaatttctcccttacctatcattttaaggattagcaaagctgaattttttttgtttttttttttttttttgttatttgagtattcaatggaagggtgttgataattgttttgatagaattatggggtgttatgtgatttgcttttctattaattctaggccaccaatagtcatattatatttggaatatctgggaattgggcatttctttcaggtgatattttactctctggttggtcagtcattcaggattgccttcaattctttgattcatttgatggaagaaaacttatttttggtattttaattccaagctgatcatatggctttgataattcttttacatgttgatgcaaaatgattaatgattgaaggatgtcttgcaatctcacgtctccatgtgttcgtcttttaacctccatatcaccttcaaatattatttatttactattttctcttcatctgcatggatataccactgtagccttggttcttttctattttaggatttaggatttaaatttcagataaaaaacacttcatgttctgttttctgctctgcaatgattctgaatatggtctcccccaaattcgtctcactgattgatgtattctccttttatctgttaatgtgtgtgaacttcaaaaaatccatgatattatatgtagattttcttaaagttgtcggtgatgcagcaaatacacactggcatttctttttccctttctttggtgcctaattgagtgactttgtggcagggagaggtttgccatcctgctagcaaataatttct

SEQ ID NO: 81033 - DNA, 602 bp, Citrus sinensis
  Intron number 3 from transcript orange1.1g010326m (locus o range1.1g010326m.g) derived from phytozome v7.0 (chr-ID sc affold00006; pos 2338329 to 2338930)
agttgaagtagaccagaaaggcaaaaaggtgataggtaaggttgcctacctgcaagcactcatcatgagtatgttttgtgattgctactgggaagtttgcacttagtaattacaattgattgctcagtgtgtaaagtacttcatggtgacatatcaaaaggatacagaatgaaattgaaaagtaatagaatgctgatagtactgatgattgattgcattttttattaagtcttcaacttttgtcaattagatctcttcatcctcattggtcaaattttgctccacaagttatgggcaagaacacaagttatttctgtccttattttataattttatggtgagtctggattatgaacttatgcctttgactaacaagtaacatctggctgcgttttgaatgaaatcctcattaatgactgttagccgtaaaaatgaatggccttcgtataaactttgtttgttaattgagcatgcattatgcataagatcaacttaagagaccaactttgtatataactgggcactgatttcaatttgattcagacatttctaattttatattttctttctacttagtctcatcaatgtttatgttttagaaa

SEQ ID NO: 81034 - DNA, 468 bp, Citrus sinensis
  Intron number 2 from transcript orange1.1g021302m (locus o range1.1g021302m.g) derived from phytozome v7.0 (chr-ID sc affold00006; pos 2862881 to 2863348)
tttcgttcatcaaatctaccgcctgctgcattgaggtaagtcttaatttttgttaattacttcacttgtgaattagctcgactaattaaaaagccattagggcccatcttaattgttcatctcctgtttcagtttataaacttcttttatttcaattttaagattttgtccgaattattattattattattattattattattattattataagtgcttaatcataaaccttctaaatatccacttttacttgtccgtcttctactgctcatcactcacttgcttacgtcttgggaatagggttgcaattagtgaaaaatgggttggtgggttttagcaccaagcatgtcaaaatcaaattaaacacactaatctttggttgtattgataatttctttgattaaatgagtgctctttttcttcttcttttttttaattttttcttcgattttcttattagttcgaaag

SEQ ID NO: 81035 - DNA, 502 bp, Citrus sinensis
  Intron number 2 from transcript orange1.1g018240m (locus o range1.1g018243m.g) derived from phytozome v7.0 (chr-ID sc affold00424; pos 23335 to 23836)
attcattttttttaagtattttcatctgggaacaggtttgaccttctctttatctctctctttgttggggttgaagtttaaagtttgttaaagttccttaagaatagttcaaaggactctttcagacaagtgtctcagaagatctcaagttatggctaataatcagttttcggaatttggtgcttcaatttggggatgttatgtacttaggaaaattaaaaaaaaaaaaaaacaatgctactttcgtacttgtgtcatatattccatacttaatttttatttgcttatatcacagtagcattttgtttttacaaatttaatcttatgattgaatttttctctgactgttaattgccttcattaatattatccaacttgttaagcattgatatttttgaagagagaaatatgaaatcatgattttgttctctccttttctagtatatgggaaatagaaaaccaattgatttcaatttttgtttttgggtcagtgtgagtgaaa

SEQ ID NO: 81036 - DNA, 897 bp, Citrus sinensis
  Intron number 1 from transcript orange1.1g012751m (locus o range1.1g011658m.g) derived from phytozome v7.0 (chr-ID sc affold00628; pos 42537 to 43433)
gctagggtgacgagtccgacataaaactaagatacgtatagagagagagagcgttaagtttctaatttgttaccaaaaagaaaagaagaaagaaagtcgttttgtttttaattttattttttcaaaatactgttttgatggcgagggcgtggctggtattggacaaagcccgccgtattgtgcggacggtgttcttcatggtggcgatggtggcgtcgctgttggtatcgtcgctgccgcttctggtggcggtggctgacgtggtggtgacgtgtgttctcatctcgagcttcacgtgcgtgaggtgttatggattcaaagagcatttgcgtagatacgactttaagagatcgttgacggatattcctctcgtttccattatcagatctcttattattacatgtatgatcatgttcgtcatcaatttttttttcaattttgtatggtttcatgttaggttacttggaaaggaagagtatatttttaattttccaaggaaaatgaaaaattttaaaaattttgacaaagtgttatgtttcttaaaaattttcccattcttttggcttacattatgtttggtcgctaagaaagtgaaggaaaactgaagaaaatgaattttgtgttttgggactatttttcttcacttctctgagaaattgaaaagttcagaattgctagataaagctaagtttatgcctgtttttatttttttttcaggattatttatttttgggttaaatttattaatattatttgaactttctatcatattagaaaatcctctgaaactggaattcttttattgttaattggtgggaagctgatagttgattggttccagttcaattatgcgattatggatttttttttttatcacaggtgtatattcggtgtgtg

SEQ ID NO: 81037 - DNA, 726 bp, Citrus sinensis
  Intron number 2 from transcript orange1.1g027706m (locus o range1.1g026534m.g) derived from phytozome v7.0 (chr-ID sc affold00006; pos 1648563 to 1649288)
tcgcggaattggatttataacttttgctagtgcaggttgaatgatctcatgtttaccttggtgccttctcttaattttaatttttttttcatttatgtggtaattttgttggttggtcatccctccccagttgttgataaaatcccagttttctcgttcgtaactaagtcgatatttttggtgaaaggactatgaagatatcacttccattttgaaatctagaaatgtgtatgtttaaattttgaaatttttggtgttataattatttgcagcaatcattatttcattagataagagagataagccatgttaactggtcaaaattattcactccggtagtattgtgtaaagtttgatataaaaaactactcgtacagaatttttgagtatccaacttgtgcaacaaattacatttcaatgatatttggaagattttcaaattatcttgtgttttaggaattaagcgaatcgtagttgaagagagtattatttgaataaattgttttttaagcttattctggacttcagctattgctagatgcaggtgtgatttggactatttgccttgttttccctaatgttttctgcttgaaccagaaaatatcatcaatgaatgcaaggatgtaacacctttttctgtgttacagattctgtggagaatttaatggttgatactcatgaattaggaggctccacagtagttgttgatcgggcaacacccaaggt

SEQ ID NO: 81038 - DNA, 831 bp, Citrus sinensis
  Intron number 1 from transcript orange1.1g035463m (locus o range1.1g035463m.g) derived from phytozome v7.0 (chr-ID sc affold00018; pos 1186164 to 1186994 reverse strand)
tgtcaccttctctctcttctcgcctctttgctcaggttcgcttcagttcccttttccgctgtttaattattcatcgtctcttttaatttacgatgtcgttttcagttttgcctttttgttatttttacatgacgcttatggctttgatctattgcaagctatttgttactgaaataatatttgttgtcgtacagtaaaaattaatttgaccatacctaattgcgttaatgaagtaaaatatactttttcttttttgaattgatgaactttacagacgtgcctattggcttgtttttgaattgtttggttggtgagaaaatgtttatagaaaaactagggtttaaagatcattgaaaataagtagtcaaattttgccgcatttgttgttatttccttatctgtctgataacacacttgatgtttgatagcgcctagtttatgaagctttattttgatttttttttattagtaacatgccaagactaggtgttactttttgagtaattttgattctgtgttttatgctttatgttttttgatgttatgttagcatataaaattatgttttagcaatttgtgtagtgtatattgtaaattttgctgcgaaatatgacttttattaactcatagtttcaattgggtattgtagtgaataattgctttttaaattctctttaatgtttttgtatgttggattttgacctcatttgattgcttgctcatgtgcatgtgggtatttggaagtgtcgttttcccttgatgtaatgttcttccagtgtgatgttttaatagaatttgttttgcttccatgttcttctatgtgtatgcaga

SEQ ID NO: 81039 - DNA, 453 bp, Citrus sinensis
  Intron number 1 from transcript orange1.1g012501m (locus o range1.1g012501m.g) derived from phytozome v7.0 (chr-ID sc affold00040; pos 232178 to 232630)
acgtttttcttaggcttcggatatctcattggctggtaattgcttttgacttttgttgattctgcattaaagatagattattgcatgcaatcaaagtgtgtacttaattagttttttttctcagtgcgatattcaatgacaaatataacagtagttgcagtagtcaaggctgctgatgattggcgactctattttatatgtgagccaatgtttgaatttctttgctatgcgcggccataaggctgtttaaagcaatttagggggatgtacttttgaaagagggaccgtagagtcatccggcttactttgaagtgatgagttgattttccataacatgttttgctgtaattgattttttttaaaattacttaatgaatatttattttatctgcatatgcttttttgttctcggaattcttgactattcatttaatttgtagccacgtatactac

SEQ ID NO: 81040 - DNA, 447 bp, Citrus sinensis
  Intron number 2 from transcript orange1.1g012501m (locus o range1.1g012501m.g) derived from phytozome v7.0 (chr-ID sc affold00040; pos 232668 to 233114)
ccactggtaagcatacttgcagcctttctctgtgccttgcgtttccttctttgaatgctactatattagtgataagtgattcattattttatgatgtaacttctgatttgaaaaatttgctgatagaaaacgtctattattttggtacttagttctttagggaagctgttctatcccttttctgttcttgcctaagttgtgatgagtggtactacctgtgaaagaaatgagaggttttctgattattggtttataacatctaggtttctcttctactaggctagttgaattttggacttgttttgaatttctatttgtgtttgcatatgcatatataaatgttattcaaatattttttctgttattatgcgtgcaacaattcttctgcttcatattactaccaaatattgtctgtgaacctggtttctctaatattcaggagcatta

SEQ ID NO: 81041 - DNA, 624 bp, Citrus sinensis
  Intron number 1 from transcript orange1.1g015929m (locus o range1.1g015189m.g) derived from phytozome v7.0 (chr-ID sc affold00508; pos 102165 to 102788)
caaaggcctctctctgtgagtgcttttgctaattcctcgaacggttttattgcttgaaattgctttatcggctgtttaatgaaaagttacaatttctgttatgtgaggcattgttttttcttgatttgtgatgtaaagttaatttttttctgtgtaaattgaccaacgaaaagtatgctcggcttctagatcattgaatttgatttggaaaataatgaattgggatattggattgaacatgagaaagtggagcacttagacttactatggccattatattggaaatatgattgtcatggaacatttttacacctattatgttttgacctgtacattttcggtgaatcggttatgatgttactatatatgaattcaattggctgtttgtcattcatgtcgtagtctgaggttttggcttccttttttccttttttctttggcatacatgtttgatttactggtttaaatgtcttgagagatgaagattttctattttgaaggaatgactttgataatgtagaaagcatgtgataatattttatttataatacataaattgcaaatgagtactagttccgagatcgtgagtttcctgtttcacaacttttgttagatactctttgg

SEQ ID NO: 81042 - DNA, 500 bp, Citrus sinensis
  Intron number 1 from transcript orange1.1g031085m (locus o range1.1g031074m.g) derived from phytozome v7.0 (chr-ID sc affold00041; pos 346917 to 347416 reverse strand)
tctcccttgcgtcatccttatcctgcgcatatccggtacgttatcctacgcaccgcctctcccccctttttcacttcatggatgccaatcatctcatattcgctcgtccttctcttttcttttttaatttcagcactttaactaaaatctccctttatgttattttgttcccattaaatcccttctatttattattattatcattattattattgaaaaaatcgctgttattttttcccaaaaataatatacctttttcccttttgctttttgttttgttttgtttgtttttttaagactacatggaataatcgacgcatacgtacaaattaagccaacttgctcaaaacgatatgtttgaagattttgaatcttgcaggcattttgttggccctccgagaacaatttgaagaaattaggatataattagaatacaattaagcagtttttattttgtttctttaggtttaggattgcgttaaaaaaaaaatccaagcaat

SEQ ID NO: 81043 - DNA, 370 bp, Citrus sinensis
  Intron number 1 from transcript orange1.1g041527m (locus o range1.1g041527m.g) derived from phytozome v7.0 (chr-ID sc affold00150; pos 185411 to 185780 reverse strand)
atcgtgggaattttcttgaaatattggaagtgttggttgaagataatgaaacatttgctgaacttatatcaaaagctcatagaaatgcaatttatatatcaccaaagattcaaaaataaattttgcatatttattcaatgaaagtcagaaagacaattagagaagaaattggggatgcaaagttttgcataatttttaatgaagctcgcgatgagtaaagaaagaacaaatggcaatagttttgagatttgttgataaggatggaattattagagaacggttttttgggctagttcatgtctctgagacttcagcacaaaccttgaaaaaaagagatatattttgtattgtctaatcacactttagacat

SEQ ID NO: 81044 - DNA, 577 bp, Citrus sinensis
  Intron number 2 from transcript orange1.1g020345m (locus o range1.1g020345m.g) derived from phytozome v7.0 (chr-ID sc affold00134; pos 280064 to 280640 reverse strand)
ggggagtcccttttcttttcgagaaggtacctattgttagtatatcttgctcttaccattgtatcggttttcttgttttcattcaccattcatgattttgtcattaaacattacttctatttgtacattacttctattcgtaaattgatggatttcagggttgttgggacttagggatgcactggatatttgaagttgataatttcctgattgtctagctaaattcttcgcatggaaatatctaaaaattatgtatacattcaaaacgaattattctgtcggaaacataaaatgagcactttcttgaaggaattttaagttgaaaaaacaaaaaatatttattataaggttctgtgaaatagaatagtagactcattttctttcctttgtcatattgtgtgtgaacttttcaatttttttgtttaacttaatgtgttttttcaagatccttccaagtttatagtttgtgaaacatggcacatcacattctgattagggtgtctttgccatatttatgcctgatattaattttgattccgaaacttttatcaatttattgcaggttcttttcccactc

SEQ ID NO: 81045 - DNA, 661 bp, Citrus sinensis
  Intron number 1 from transcript orange1.1g020345m (locus o range1.1g020345m.g) derived from phytozome v7.0 (chr-ID sc affold00134; pos 280867 to 281527 reverse strand)
cggcatctcccgcggcctcaaactaagagcaagaggtaaagtgtttttattcttttgatctaattcaatcaaaattctatctgaagctcttgcaattcttagtttttaatttttactttttccttttttgtttcagttcttgccaactaattacaaacccgattcattgaattaggaagcaacctacttaattttattctattatctaactagtagataaaatatatgagcctcaaccctttttatgctttgcatagaaaccaaaagaaacacctttttgagttaagtttgtaggaattttagctttaaaccgatacaacactattttagtgtttctttttttgtttctacacccattaaatgaactcttctacttcttttggggtttcttgaaactgtaaaccactgtaagtttttttttttctccctcttctttttgggcgagattttgggagagctaggtttctggcttttcaagcctcatctgggtttcatttttcaactatttttgtcatatcacactttgactagtcgatttgacaacggtttttacatgtgctggtgtcaagacatttattttgttatatgcttgcatcaagccacttgattcttaaagtagtagtttttgtttcatgcaacaaccttctgtgtcttgatgcag

SEQ ID NO: 81046 - DNA, 441 bp, Citrus sinensis
  Intron number 2 from transcript orange1.1g001155m (locus o range1.1g001155m.g) derived from phytozome v7.0 (chr-ID sc affold00219; pos 108431 to 108871)
aaatactcgaggtaactcatattacttgagtatagaattaggcaatggggtaatgcaaagtacaaaccgatggagtcagtttgactttatcagaagccattctgattggaatggttaagtatctggatgtagtcaaccagaaatagttttttactttgtgaaagcgttctggttgattgtactggaaaattgtattactatgtttcaacttgtatatactgttttcttattgcacttcatttaatcagtttggagcctttcttgttcatttcggctttaaatttgataaaattgagcaatccttctggataaattatggaggtgctatgttttgatccagtccaaagtcaaatttatgttgtagttttcttcaatggatgttgatttttctgcatgcatctatcatatgcattaatttcgtgtttttgtttcagactatcg

SEQ ID NO: 81047 - DNA, 448 bp, Citrus sinensis
  Intron number 1 from transcript orange1.1g017939m (locus o range1.1g017939m.g) derived from phytozome v7.0 (chr-ID sc affold00009; pos 1384480 to 1384927)
aaggagtttaagcccaacgtatgttttcttggctttcgttttgtttttccaagaaggaacttttttctgtttgtgttcaaattttagggttaggggttttgtacagctttttgtttttttctttttttcccttgattctctctacatttggtttgttagggtttgacaaaattggaaaaggatgattcttgattggtagcacagagaaattggtagtagaatattcagatgattcttgattctcttgggttgctagggcttgtcagtattcggaagggcaatagctttttgatgattcaattttgctcctcatatatatcttattttctgttcgtttgctgagaaattgttggaaaagtgatggaatattgcattgtcgatttttgaatgggtttcttggagtagtgacttttgtataattatttcatcagactctcccaattgttca

SEQ ID NO: 81048 - DNA, 247 bp, Citrus sinensis
  Intron number 1 from transcript orange1.1g005963m (locus o range1.1g005963m.g) derived from phytozome v7.0 (chr-ID sc affold00759; pos 2762 to 3008)
gcctcgctgctagcggtgatgattaattattgagtctttttctatgttcatttcttttaggtaataaattttcttgtaagtgtttggttaaatttgaagctagggaaaaaaaaaaaaaacaaaaaacttgaagagtgtttgtttgtagttgtgtttttgttgttcgtaaatttgtttacttcttcagtttgatgttattattaatatgcaactctcgacagggggatttggttcgtccttccttgca

SEQ ID NO: 81049 - DNA, 436 bp, Citrus sinensis
  Intron number 1 from transcript orange1.1g008952m (locus o range1.1g008970m.g) derived from phytozome v7.0 (chr-ID sc affold02237; pos 7657 to 8092 reverse strand)
gagggtttttatacaaggtgaggttagttgtatgttcatttcactgttttattgcatctgggtatcatgaatttcattcagattttgatttaatgctcactataatggccatagagatagcagcagttgtggctgttgttttttatattcatatcgggctgtaacgtaaaaagtcttgcattgtattcttctggttttttttttttaataacgttgattcattgtaatgaaaaattcaattaatgttgcttgtttggaatttgagataattcttgcgacaaagacaagtggtagtaaacagaaacgtttgaatttttattgatgcttgattgattgttttctttgatttgtggattatcagtttttggctttttctgagctgttaatgtgccaaattgcagtgtaattgtccggctcactagtcgcactctagctg

SEQ ID NO: 81050 - DNA, 792 bp, Citrus sinensis
  Intron number 2 from transcript orange1.1g034400m (locus o range1.1g034400m.g) derived from phytozome v7.0 (chr-ID sc affold00096; pos 102673 to 103464)
tgcttgtgcttaccccgctgctcgcaagagaacgtgtatgttttcttaaattttcttctttatatgcacattcaaagcaaattttttatcagtagattggtgtttgtgtttgtttatgcatttgggtgttggttttttttttttagctgttttggtttcttggttgaagtgagatactttactgcaattcgattgatctttagctctgtgtaagaatggattttgtatgctttatttctggtgattttttttggttacttcttttatctgcgagattacatagaactgatatatctctagtatattgttgattttgagctctaagcatttggttgtatgcgggtttgagatctcttgctccttgtttatattctggttttattctttgccagagttctaataaaacgggtgtgtttctaccgtcatgaaatttatctgtggtcaagctggtctatgttttcagtacttttgttgataattttttatttgaataagaaagcttatgtattattgcttgtagtatgtgttattgtattgaagtagaaccatgtttcagcttctgtgttcctatttttttgttcagttaataatcaatgagattttatgtggatttgtggaaatatacttattcttcttgttgttctggattggcgaacttactttatcattgttgttatatgaaactatttttctgggtgtaaagtatatgtgcttgataaggcgagatttggctaatgcaattaattatggattttagataactggagtgtgaaggcaatccgaagaaagacc

SEQ ID NO: 81051 - DNA, 308 bp, Citrus sinensis
  Intron number 2 from transcript orange1.1g033830m (locus o range1.1g033549m.g) derived from phytozome v7.0 (chr-ID sc affold00171; pos 173155 to 173462)
aggaactgccgccacgcccagcagatcgcaaaggggtaagttcattttgtgctgcaaattgatattgttcacagtttttgttttttggatctagtttttcagataaattattttgcaggcatgcaattttttgtttttggggtgggggggttactttgctgtgtcaacttctattttggtttattagttagtttagaattcaaatttactaatggtgcaagatagtgctcagatataatgcggtctcttcttctcttccttgttgacatacagaaaacaagcaaaagggtccacttcgtgaggactgt

SEQ ID NO: 81052 - DNA, 985 bp, Citrus sinensis
  Intron number 1 from transcript orange1.1g018927m (locus o range1.1g013061m.g) derived from phytozome v7.0 (chr-ID sc affold00248; pos 11922 to 12906)
cttttcttcataattgtttctcacatactggtcaggtcagatttataggttttttttattataaaaattatgttttagaagattacagaggttgaatctaggtggatcttttgctaaaattacaagtttcaatgctagttgattaatgtagtgggatcttgtttctcaatgttatgctctctgatgtttttgtgatagttgtcgttgttaaattgctggataaaatgaaatgcatgctagcttgagctaggtcaacaattgtatttaacaggtgaaatagtgtgttattgcacgggtatgtgggttggatagttaattgacagctgattgttgtaatctcaattatcaacaaaataggttgatgattataatgcagtccgtttatggaatgcaaactccttctggggtcaaggaagtcttttttttttttttggttttcttatgaggtgatcttgaaatggaaatgtattgttaatgtctgctctctttgttgataaatttcatttgtcattcaagtcatgcaacttaggttgggtaaggtttgttcatccctttatgggtgggaggggtgatctcccatttcctactttagtctgaatggaaaatggatcactgatctaccttaacatgacgataccatttctggtaaatatggggaaaacaatggttagagtaaacttgacaattgaatcatttaaaagttgtttatttgatttgggctcccacagatcaatgcaatcttaaattataaggttaatgtagagacctcagtcctaatgtatgctgtgaacgctgttctttcctgtctaatctatcataaattgtgtgcttatgacaagtcagcttttgacaggtatttagtttcattcatcagttagtctaacatcaatcatgttgctagctttgatgaatttgatgcttgctgccctgtcttgttcagatagatgaacgattgacccttgtgtttaatcattgcaggttgtaa

SEQ ID NO: 81053 - DNA, 652 bp, Citrus sinensis
  Intron number 2 from transcript orange1.1g011326m (locus o range1.1g011326m.g) derived from phytozome v7.0 (chr-ID sc affold01891; pos 10065 to 10716)
aaggcctcacagagtaagtgaaatctgttcctgtattaatgttcttggaatttgtgaaaaggagttttattgttctgattgtatttccatactcatttggttacatagccttattgatatgtacctgccaaaggtttttaataagttaaaggatgtacaatgttggattagaaggaagtttctaggatcttactattgaataatttttctgctttctgagcaatactacaggaaaaggatagacttcatgatgagacctcaatggggttttgagtatgctacttgtaaatctactcgtcttatttctcaagatagtcatccaagacgaattcaatttcatttttgaagcagataaatttggtgatgagctagattggatattcttttcatattcttacttgaaacaatggacttttgcaactattttaccattttcttccaaatatttctaagattttgaggtgtattttatttgttttgcaatgaatccattttctgaaagtggttagtattatatttatgtggtcagacttagaaagatcaactcggccttgtgtgccatctttgatatgcatgtttatgtgcaagcatccatgagcatatacctactgttttagcaacttctctcatgctttccggtttgtttgcagtg

SEQ ID NO: 81054 - DNA, 700 bp, Citrus sinensis
  Intron number 1 from transcript orange1.1g011858m (locus o range1.1g011858m.g) derived from phytozome v7.0 (chr-ID sc affold00009; pos 1756211 to 1756910 reverse strand)
ggagagacggatcctagagttggagagacttgcaggtttctgttttttccttaaaaaaataaatcttttggttggattttatgattctaataaatttcgtaatttgaaattaacacatttacaaagatttggagtgggaatttgtcttttttgatagtattagaaaaacaaggattagtgagaatattcttaaaatttcaaaaatttgggaaactcagtgttttcttaggggaaaaaggggaccgcaattgtgtcccaagttctgttatgattgttcaattactgtagtgaaatgaatgtactggaatggttaggtggaacatttatgtttggtttggatctgtggaatcttgaagaaatggaaagttgaaattttgaaattgactgcatattaaggtttgcattatttttacagtttcagggttatgcatttgcagctttttgttgcagtgcacaaatcaatcaaagatctgagaagcctttgaaagttaatattgctgtttgttaaagctgaaaatttttatgggattaagttcttgaacatttcactgaatgtttaatgttggctgtacattgcttgattaaattaatgtttgcaattcagaaggaaaagtgatattacattttttttttttttttgggagaggaaaagtgatattacatcttgatacttaatataacagatacttggccgaggctc

SEQ ID NO: 81055 - DNA, 618 bp, Citrus sinensis
  Intron number 3 from transcript orange1.1g045467m (locus o range1.1g045467m.g) derived from phytozome v7.0 (chr-ID sc affold00009; pos 2292959 to 2293576 reverse strand)
taccaactccagagtcccaaccaagtgtaagtattaccaatcatctgcctttgttcatgattatattagcttaatgcatggatggcaatatggcattttgtgtttgatgcttttcgatatggtctctgtagattttgttgataactcgcttttctgttttcacagccccaaatcccaatctttcattgctctggccgttagaactaattaagtaaaagttgtaacctatctatgctgtctgacttcttttcttttgtatctaaagccgaattttttgtattgtcttacaattctttccggctgttgtattttctttttaagtctggagctggatctgccatgagtttgtgttgtggatccattatcataccctcgtaggtttatgtttttatctaggtacatcatggcccaagcccacaagttactgtcaagtctggacgcagatgtggagaattgtgtactgaatggcactgcccatttataactttattagtgataaataagattactggattgcaagggcaccaattggtacaagaaactatgaacttggttttgatacgagtttgtataaattttgattttctcatgattcatgtagcagacaaattacttggt

SEQ ID NO: 81056 - DNA, 734 bp, Citrus sinensis
  Intron number 3 from transcript orange1.1g014454m (locus o range1.1g014437m.g) derived from phytozome v7.0 (chr-ID sc affold00324; pos 137063 to 137796)
gagttgcatctacctcagttgcagaagtaggtaatatactggtttcttttttttttttcccctctctctcctctttatgttattaactgtagaattagattcaatgcctggttgaaaaacgattttgttctttgttgattgctattgtgagtctgcctttttctgggcatcttcaatggagtggctgtaacttacttcttgagttctttgtgtttgtgttttatttatttattttctgcttgttgatgaatcaatttcaacctatgttatctgtattaagttgaactttagcaaaatgacctgctttttcgggttttgtgtttttatcatttgttatgatggcttgtgtctttttggtgcattttcagattgttttcaggtttatgatgctttactgtttcattttaatacttctctgaatttgtctatttgaagaagttagttgtatcgaaatggtaattgttttgttgttttcgttgttgtggtttgttttgatttgaagataaaattttcgtgtttgacaagtaatttttaatcatatcttatgaaaaaaaaaatttcacttccatttgctgtcagtgttttcgtgtttttcttattttaagcttttgtaaggatttacatctttcctattgaagtagtgtacatctatcttatcttcaatgccttacattgatcttttcatctacggataaaaagttgctagggtttgtttggcttccaaactgtaggac

SEQ ID NO: 81057 - DNA, 772 bp, Citrus sinensis
  Intron number 3 from transcript orange1.1g003370m (locus o range1.1g002408m.g) derived from phytozome v7.0 (chr-ID sc affold00009; pos 2200544 to 2201315)
acaacagtcaaactgttataaggttgagcaaaaaggtagtgactgctatttttttttgtatctccgtctcagtatttcacgtcctctttttatgtatttattttttaactcctttatacaatgctgtgtaaaagcgagcttagcagtttgtagttaccacagcagcagtagataagaatctttttaacaaattgattcattcaatagcctgtgctgtgctacatctcttattcacctggaaagtaatttgaatttgttggttatggaattttggtagttaatggatggtatcacttttagaattttgtctactttctttgtctttctttggctgtccacctttagaattttttttttttaaattgttcttaataagtgaacttaactctgttgttggcattgtctgaggttttgtgcactcaaaagtttgggggaagtatatttttttaactaggctttttgtttcttatgagtcaggtaactcactttcttctataaagtgttaaatgggttgcatttcaatatcattgactgaatatttggtgtctgattatattttgttcgtaagtttacatttgagaattccggagggaacttgggatctgtaacaactgaaaaatatttatattctgaagtgaactccttagttcatgtcatactttctactatatagacatctattgaatagtgccccttttggggggtttatggttaatgaaatcctgtttctgaattttttatcctcctgtccaggcttctacacgtcagcttt

SEQ ID NO: 81058 - DNA, 622 bp, Citrus sinensis
  Intron number 1 from transcript orange1.1g010118m (locus o range1.1g010118m.g) derived from phytozome v7.0 (chr-ID sc affold00119; pos 360456 to 361077 reverse strand)
gtacaagatatcaggtataatttatctgtttagtatcattaatttttgtttctttctaacaatggaagaagtagaaaattaatacttcatgtaacttgaagtagttcataagctgtctccggtttttgtcagtgagtctctttgtctatctgctgaaacaagataagtgccgttatgttttgtaactggaatcaaaccttttgattagctagatccgaacttcgaagttcgaacctgggtggtcagtcgaagatagctgcttgaaaacgactgtcgactgtcgcgtttaaagttttgtgctttgatttgttaattgctcacacttttttctaatttgtatctgacagcgaatgatttagtcatagactcatagttgaatcatgctttgggtggtcagtcaaagatagctacttgaaaacgatggtcgaacttatgttttgtgctttaatttaataataactcacacatgttgtttttgacggcaaatgatttagtcatagttattctacagtgtgtttcattttctgagctgcttctttatagtatgctaatgtcacatgtaggctagtttttgattttatcggaactaattgaacgttgaactttcatcaaaatttggtag

SEQ ID NO: 81059 - DNA, 890 bp, Citrus sinensis
  Intron number 1 from transcript orange1.1g035582m (locus o range1.1g035582m.g) derived from phytozome v7.0 (chr-ID sc affold00078; pos 510749 to 511638)
ctttttaataaacaaactccttcgatctgaggctggtgagcatagtggatcgattgcaggtattcacatttttatttttatttttatttttatttttctcgcaactgaagtatagaatcctggtaattaaagtgtagcaactgaagagctctgtcttgcaccttcagctgctgcccaagacctttaatctaggttaaccagatgctgtgaagatgatttgataaaatcttgaccaagattgattatgaaacaagatgataatgaattaagaacaaagaataaatcagaaaagtagatgaacaagaaactgaaagtcaaagatcagaagatcataacgtggttcggctaatactcattagcttacatccacatgaggaacaaagtgacatgctttcaattaattgatcatcaagatacagagattttcatactacatttgaatgaacattctctcttaatcatagagtctcaattctcttatatactcatcagtgtaacgtcagttcgttgcaccagaatcagctgcattcagcagcttgtaaccacccagataaaaatttcagaaactcacgtgtgaggcacgcgttgtaacggcttctaacaacctgattcgtagcttccttcatcacgtgcgtctcatgtgctttattaaataagaagcggcaacagatgaagtcgtttcaatgagtgttgattttgcacaacaaaacgcacataatagaagtcgttttgaagctatttgaattgtttcaccagttacacaacataaagtaaggttctgatctgaccaaccccatacttcctgttttcacttgagattgtaccaactaaactaaatgctttcgacatttataggtattcgcgttgctaagatacaagtaacaacattt

SEQ ID NO: 81060 - DNA, 908 bp, Citrus sinensis
  Intron number 2 from transcript orange1.1g023111m (locus o range1.1g023111m.g) derived from phytozome v7.0 (chr-ID sc affold00171; pos 79168 to 80075 reverse strand)
ctttgttggtttttggtcccaaaggtcttgctgaggtgagttttacacgcgcgcgcgcgcgcgcgcacacacacacacatatacatatacataaatacacacatacaaaagcttacttatctctgcacgtggataatttttgggctgaccagactgtttgttagatatgtttatgtttaccatgagttttaaggcatgaatattagagtattgatcttttgctacctatttggttaaacgcttgtgaaaagaggggagtttatattctctagagagaaaaaggtccctatgtaattgcgatagacaatcagcaatggtctgacattggtgtgtgaatttaaagtgctctttaaagttaggagaagaaatccatacgtttcatggttaaatgttcatcaggcagattgagaattttcttgaggatttctactttgaaatatatgaagtttcttggcttgtgagtaaatgtagtatctttcctaggtgagttgtcagacaatataacacagctcaaatatttgatgaccaacctatccagtagtgataaggactactgccagagctaaatggtggtatatgttgtttcatcttgatgtcatctactctgtattactcaagaaatctagaggtttaactatttttgtcagttgtgttgtcgttgaaatatgttaatttacgtgtgaatagcctctagtttgcgatatgccttctcatttttcattttagtgtaataagattgtcattattatggatcagttgactctgctgttgctcttttggtgcctttaggatcatcctttgattgctttcagagtttagagttataatgtataattctatttttctaatcttaattcagttatctaaatgaaggttgctcggaatttggggaaaactctgcgagcatt

SEQ ID NO: 81061 - DNA, 639 bp, Citrus sinensis
  Intron number 1 from transcript orange1.1g008666m (locus o range1.1g007409m.g) derived from phytozome v7.0 (chr-ID sc affold00018; pos 1364963 to 1365601 reverse strand)
gtcatttcttgagatacaagtggtaagtgcccgtgaattgagtcagtctttgattttttttgttttttcattttttttaggttttttattggtttttgctttttggttagttggggttggagtaaaaatgtgatttttttcttttgtgtttatgagtacaaatgaatgcttgagggtgtgttgtaatagatggttttttactctatatgtgtttacgttagataattttctgattgatgggtttcatgaaatgtgtgaattttctgagttcttgtattaggaaacagtatttcaatatgtagtgctatccgttatagtagttatattttctttgaagaacagttgaggattttgtctgcagtgttaatggtggaattatcatttgtaacctttaaactttgcttgcatgtccaagttattatgagcaggcttctttgaatatataaatttcttatttatcatgaaaattgttattggaatccccttatattaatttaggattagacccctttttcgcaagaaaattactctttagagtaaacgagtagtgaaaaattgcatacctatttttatcctgtatgcatgtggtctctgttctgcaaaggagcaatttgctgtcctgagacatattgtacataa

SEQ ID NO: 81062 - DNA, 651 bp, Citrus sinensis
  Intron number 2 from transcript orange1.1g044158m (locus o range1.1g044158m.g) derived from phytozome v7.0 (chr-ID sc affold00150; pos 59402 to 60052)
ttataatagattggaaggaagtattaatattgaaggtaattgagcttcaattttgagttttttatttttataaatttagcttctttgatgaatttggaggataagttggacattagctggatcgagattcacaaatctgtcgcaccaaaaaaatctaaacttttacaaattaggtcctttattgtatttgttttgcaggtatgactatgttggaatctttggatttaagtggtaacaaattcaaccgtagcatcttatcttctctaactgctctttcttcattaagaaaattaaatctgatggctactgggttcaaaggaacctttgatgttcaaggtgagactaaacctgcttctcatttatccactatacatatttgtatcttcgagagaatttaatatttaatttgattaatctgaaggaataacatattagctataatacattaaactaactttcatcgtttactcaaaacaattaattaatgccttttggttttgaccccaaaaaaataaaaataataaaaaactctcatgttacattcgttttagttaagtttttaattaattaactcccgttgaagtaccttaagtcttatttataattatatatgcagaattggattccttgagtaacttggagggattggac

SEQ ID NO: 81063 - DNA, 736 bp, Citrus sinensis
  Intron number 1 from transcript orange1.1g009486m (locus o range1.1g008048m.g) derived from phytozome v7.0 (chr-ID sc affold00054; pos 222307 to 223042)
gctccaagcaagttcaattctaccgtaattttctatctctcgcgctctgttggttaatttcccatttttattgactttgttgattctgttgacatgattcggttgactcttgatttgtttgggaatttttccaaatttaagtgaaattttgatttcaatttcctttattcgtaattattgtctacatgcactaagctaatctggcaatgagttaattgtcaagaaaattacttgaaattggcaaactataggttgtcatttgatgttatttagagaaatttcagttttggcatcaaggctcaatctttaattttgattaagtctgcacacatttcattgaatcatgctagtgtgcgttgatcatctgtaattttttaaggaatttgatgggatgtcattagaatgagttaaatagattactgaattcatcatggatgaaatacggttagaattacgtagggaggtaaattatgcatttatagattgttctttttttttttaattttagctgaatgtggaacacatattatgatcttgattggtggcgttcattcacgtgccagttgtttggttggaagatttgttggcggattccttactgtttatggatcttactattaactgtcgtggcatatttaaatggtttaaattgtgaagtacaataaactacacttctcattgaagaagtcaaatgacttacgaaattaattttttcattgctaggattcctttggac

SEQ ID NO: 81064 - DNA, 996 bp, Citrus sinensis
  Intron number 2 from transcript orange1.1g011700m (locus o range1.1g011700m.g) derived from phytozome v7.0 (chr-ID sc affold00028; pos 82084 to 83079)
gcccgcattgagcaagggttatttacttccggaaggtatatattgccatcattaaagtcctcgaactgttgtttgaaatataaagttctatcagatttgtgttaaggtattgcccgtatctacttctttgtatcatacattctcctttgcagaaaggtcctccaaaattactggtgatagttggtaactttgacagtgttatttgtttgcctatgaacttggaaagcttttaataactttttcagctgcatttaatctcaaaactaatttcttttacacttgggtatccaaaattgctgtcactgttctgagcatctaacggtgggtaatagcctctaacctgtttgaacatttaagcagacttgataaagtgctcttttgacagtgttgttgaaaacaaaactaaaatcaaataccaaaaactggagaatgtccgtatgtgcatgcgttgtagttttttggctaagcaggtgtcctgctgtccgtttggtcagattgtggaggaagattcagtgcatatacagccattgatattgtgtcactctgaagtgttatgggaacttaaggtgggttgtcagggactggatgtgtgtattatgaatgacattgtacttgtgaggagaaaaccttcttctgttggttcttctccgtggaagtttatttttgcactcttgtttgaatgttttctcaatgcttatcggtatcatgtcttacttttacctgtaatcttagaaatattttctggttaatttgataactctttaaaacaagcagtagcttggttggtatctacaaagggacgtgaaaatctcaggaacaagtggattaatctgtttcctcatgtgtgcatgttattctcaactgtatcaacagtactgacaatttgttcctgtgtttttagtccttttctttctcttagttatcaggattactacttactggaacttctggtattttgcagcgccagcacgccttccatcatttcacacttgtgtt

SEQ ID NO: 81065 - DNA, 447 bp, Citrus sinensis
  Intron number 1 from transcript orange1.1g028577m (locus o range1.1g028463m.g) derived from phytozome v7.0 (chr-ID sc affold00031; pos 863949 to 864395 reverse strand)
ctctttccctcgccgtcgtgacgacttcttctcaggtagtcgtcttctatttcccgtccccagccctgtttcttttaaaacgctaatcttattttgctgttgaactaaaaatgcttggcggcgttttagtgtgacagagagaagaaataaactaaaaacagctatttttactcgctatcagaaaccgataattccttttaaacgctaatcttatttttctgctgagcggctgtttggtgtgacagaggaagaataaactcaaaagagctattttacttgttattggaagcagatagttcattttttctaaaatgaattttgaaaaatataattctaagaaataatcgttcgttaataccatttgttggaaacaggccgatgagtttgattagattctttctcttggtctctgtgatagtaattgacatttatttcgtggtgcaatag

SEQ ID NO: 81066 - DNA, 602 bp, Citrus sinensis
  Intron number 1 from transcript orange1.1g020022m (locus o range1.1g020022m.g) derived from phytozome v7.0 (chr-ID sc affold00088; pos 272429 to 273030)
ggaaccagttcgcgttctcgtcaccggcgccgcaggtactgtaatctctcactccgtcgattgagatctagcgaagtcttattattattattattattattattattatttaaacagattactgctttgatatgtttttatgaagatctataattgtaagaaatagttatattaggtaccgtacacgatcgggaattaaaaatgttagctttaaactgatctgagtatcaatgtttgtttcttagacttgtgtgataattaccacttgaatattttggtctaatgcccgaagtttgtcacgcgatccggctaatctgttagttagatgattttgagctaatgtaacgtttattgagactaaatgattttttgttttgtcattggtgatatgtacacattttcaaaaaagaaaatttcatctgttttagatatacttggatttttaataaattttctgttcctatgtttcataccaatttgattattttaataccaaatttacctaagttattctaatacttgtgtgtttatacattgatgtattttgttatgtgctgagactgtgttttgctatgttaatggggttgcagggcaaattggat

SEQ ID NO: 81067 - DNA, 1007 bp, Citrus sinensis
  Intron number 1 from transcript orange1.1g022025m (locus o range1.1g021988m.g) derived from phytozome v7.0 (chr-ID sc affold00018; pos 1494816 to 1495822 reverse strand)
tcggagaattgaaagggggtttctgggaagacctggtattttcctctttggtttcaatccagcttggttggttatagatatcggagatttattttatgacttatggaagatgaatttgatataatttcttgttctggttggctctgtttgcatccagtttattctttatctatgctcatactgtcattttggtcttttcagtcggttatgcaaattccttggttgatggaggaattgttccctttgacgtggtttttctcttttttcttctactggtcattcaaacatggtttgaaggcagcttagttcttaatttggaacgtctaattcatttttttatcattttaaattcattgattggatgggaagagagaagaggaaaatttaccaacttgaaatgtgcaaagtgaatctgcaattttgctattataatctttgaataaaacaataatagtctttagttctgattgctacactttgagaatggttgttgaggattcgtactgcaccctgcttgtctggtgtttcaattctataattaatccgccttctgtgttttccttccagatcatactgacaaaatttgaaaaaccaacaagattacagagcagtacatagtcgtcatcctttttaaagctcatatgttgaaattatgtgcttagagattcctggggagtctgaattgcccatactgcccaatgagaatgtcattcttgttttgttgtctatagatactgaaacagactactaataggttttgtcaattgctataatctgctcaaggtcctgaagcctttaactccggggttggtcaaagatcatagaaacaacttattaactcttttgcttataactgtgatcatcgtactaattgtatttgctgctattttcttcttttgcatttagaattttaaacattaaaaggaaattgcagtcggtgcatgttggtcattcacatgtaaaattcaatctttattttgtattacagaccaacgggagtgaagttt

SEQ ID NO: 81068 - DNA, 957 bp, Citrus sinensis
  Intron number 1 from transcript orange1.1g045859m (locus o range1.1g045859m.g) derived from phytozome v7.0 (chr-ID sc affold00086; pos 228929 to 229885 reverse strand)
tggaaaaggtaccgtgttcctattaaatgcttttaatttcttaatacactggtaaaccatataaattcatagatgaatttatagttatgtatgacattgaaagggtaacacaatgagacctaacataataaatagaagaataacaacctttaataatcttgatatgagaggtgaatgtagatgaattagtagaatgccaagaagagggagaagaggccctttgtggttttgcccttagcagcaaagacttgcacatgtatttcattctcccagaggagctggagtttagatgtcaattatcctgagattgttgcagacctcaagaaactgattggttcacaattgtaatggggaacaaaaggaattgtatttttaacaaatataatagttaagcacttatgttttcagcaccatattctggaaaatttttcaatctacaccaattcactatgatcatactttgacaggatgcgacttgttattacaaaatcgatcctcagacaaataataataggcaacagtctctgaagaaattgacttaaaccgcattatatcatgcaccatataaactatagctccatacccatagtctacctttgaattggatgctgcatcaaggtattcctctatgctcttggttcagtatgtacatccgaccaaaaaaaaaaagaaaaaggcaccatattcaggatataaccatctgtgatcaatgatagatatgttagttctattaaaggtgagaatttgcacccctaaagtgaatgactagtgtgtttgtctatcaaaatataccaagaaaagtatttttttagtttgaatagtctagctgcacaatttgatgctacactggctaaaatggaatttctttctttcattgtattttcaatctgatacttgattctctgtgtttgctacattatttccagagtagtacacgtcctggttgtaacaagggga

SEQ ID NO: 81069 - DNA, 326 bp, Citrus sinensis
  Intron number 1 from transcript orange1.1g030283m (locus o range1.1g030283m.g) derived from phytozome v7.0 (chr-ID sc affold00294; pos 52746 to 53071 reverse strand)
acaggttggttttcatctcaggttcattttctagaaacaaagtcatgaaaagttattggcttttcttctgtgcatgccttttgttttatgtgggaatatgtggctttaagatgaccatatagggttttattccttgtgcttctcttccatcctcccctaacctaaaactctagctgttgtttaatgcttggtcagtaagattgttgatgtctgatgttatatactcgttggtggatacagttgttacagaatttcattgtgacggatcttatatatctttgttattttcagaaaggttgggaagcggaaagctgctactgctaagc

SEQ ID NO: 81070 - DNA, 787 bp, Citrus sinensis
  Intron number 2 from transcript orange1.1g014013m (locus o range1.1g013334m.g) derived from phytozome v7.0 (chr-ID sc affold00054; pos 456472 to 457258)
ccactcggacagagtactttcttagtgcaattctgaatttctgtctttacaagtaagtttctttcttcgtttagggtgcgtttggggcagtgcagatattccctagaatatggcatggggagcagctgtgctgccaaagcgcacacttactcatccaaaattcaatgacagtcacttgctgttgttattgagtgttgggatgatgagttttccaacaaatgcttcttattgttattggtgcttagtagaagaatgaaggattatgtatgctttgtttttgttttcaacaataaccaatgagactacctataaacttgatgttgggaaagcttatggatggtctggcctgcatctttgcttactatcttaacattccaccattgttcattaagtacctgtctatcaatgtagtgagatgctttaaataatttttatgctgattagctatgctatcataggtgtgaatcacctaaatgacagtctgtcttattgttttcctttttgttgacaatccttaacgactaaggctccttccaagtttcggtccttctctttgaatttacatttatagttctaatcgattgaacctattgattttttcatgctttcccattgcttctttacatgatatgaggaggaaacttgttggctccttctatgctgcacaagcactgaagagtcgtttaagtcaatggcaacgtgaatttccttctgttcttctatagttataatccattcacatttagtcatgttgctttttccttttttaaatctcagagacacaaaa

SEQ ID NO: 81071 - DNA, 1039 bp, Citrus sinensis
  Intron number 1 from transcript orange1.1g024259m (locus o range1.1g024259m.g) derived from phytozome v7.0 (chr-ID sc affold00018; pos 1647612 to 1648650 reverse strand)
ttgaacgtaaaaggcgcagtcattggcatacacccgttagtctcgttatcattttctctgtacttcctatgtgggttttgtgattttgtttatgtctccatagtttgattggcattggttcgtgggaggaaaaaaagattttttttttcaaatctttcaagttatttcgtattgaattttatttttacgtttctaggatattaatgtaacgtgaggtggaaaaaattaattttttttttttgtgtgaatctgaaagggtaatgggaaattgtatatgagtccttcgactttaatttttggggatttattctcaagggtagagttttgccaattattgtttaattcttctgcttgttatgagaattatgtaaacaatctcaaacagttctgggttcttgattagaagattttgtgttatgaatggaaagagtgtttaatgaaggttgtgattatttagtttattcacgcttaaagagggcaattgtagcgtgaatggtcaacaaattctagtttaggagttttgagagacagcatgatagacatagcgcaagatgcaattccaaatagagaaaaattgtagaacatgattggtgtcgatgattagttaaggattaggttgttaaacttgaatttagcagtatgtgacgaagatgggcatgattaccatgtgaatcacattctcttagagaattgtagactatcttcggttttgctgtcataatggcctgtcttttggttgtaaatttaaccaaggtagctggtttttcccttgcacgaaatgttatgtagttttgattttaaagcattggctttattcttaatcttgttttcaattgtattttgaactaaatggttcaattggtctttcagactgtaagcaactctttctattaattatgctgttgtttttgtttagttttctattaaatcaaacagatatctctgcctaattagctttgatgtcaaatgcgaatttatgtggtgcttaaattgattacccgcagagatcccatcataatttcaactcttattccaaaag

SEQ ID NO: 81072 - DNA, 596 bp, Citrus sinensis
  Intron number 1 from transcript orange1.1g021550m (locus o range1.1g021550m.g) derived from phytozome v7.0 (chr-ID sc affold00116; pos 409038 to 409633)
agcaaagggctgcctcagctaggtaagaaatggagtttctcaattataaattactatattattatcatcatcattatttatttttatagttttaagtttgaatcttgagttttggactacgtcaataacactttaaatgaagttgtgtacagtcagcttttctagcatgtcaaggatgtcatctaaaggggtgaaagaaaaaagaagcgggtttgggatggggaagatctttggtttttaagttaccaagcatttgaaggcatagctcattctcttaagatacagtcctagtgcataagttttcaataagttttccaaagttaaatttaagtcatgtccagttttcagtttccctcattagtcattcctagaggaaattttagttgctcttttcctcagaagaaaattcaagttcagttataggttcgcctgattctatttccttaaaattaagatttcctatttcgtttgagggttggtgttcagggcaagaagatacattcacgtcgtccaatttgtatgatatatggaaatattctcatgatttcatttctttaacagggaagactttgagaggacaggagtgagcagctttg

SEQ ID NO: 81073 - DNA, 570 bp, Citrus sinensis
  Intron number 1 from transcript orange1.1g034506m (locus o range1.1g034506m.g) derived from phytozome v7.0 (chr-ID sc affold00018; pos 1391365 to 1391934)
ctatcacttctgttttacacgacgccactgctgtggtcagttccttctcttaatgtttttattgattgcattaatatatttttttctctgtattttctgttgctttatttggtatttgcattagcaatttagttgagatatttgattttaatttaacttaatttattgtatagcatttgattcttggttttacagaagttttattgcatgcgttttgtagtaaaatttcatatttggtaattgtttaatgttgttctagtcgaaatttgcttctgaagataaaacggaagtttaatttcttgctgtttggattgttggaattttgatgtctgaatattattattattattattagtagtagtagtagtagtagcttgggtgattgtagctgttactaatccactttcacaattgttgttggaaactcctggatcgctttaatttgattcaatcaaatcaatttaacagtggctcagcttgtggtcaattgttcctttggtccgtgatgtataattctagttgttgtttttttttccccttcccttataggctggctctggctttggtgct

SEQ ID NO: 81074 - DNA, 620 bp, Citrus sinensis
  Intron number 1 from transcript orange1.1g003504m (locus o range1.1g003504m.g) derived from phytozome v7.0 (chr-ID sc affold00068; pos 467061 to 467680)
tctctctctctttccgaggcacttaaaaaatatttgtaagcactttttttttttaatttaatacttgaagaaaccaaatctaaaaataaaatgaaaattccgtagaggttttcatgttctgtacataaaccaaaaagtgctcttcactttgggtatatttgtttttgttttgttggctttcacacaacaactccaaagccagacaagttctgctcgtgttctctttttgaagcaccccaaaaaacctcataagctttgttatttgtagtccttacaaaacccattcgaattttctctttttaccttttttttttttccagcacttttgtgggtttctgggcattacggtccctatttggcaggaaaaatggtttcttccatttgatttttaggcaaaaagtaatcttgaaaccttggtggttttagctttaatggagttgcagaagattgaaagtattttctgaagaggattttgggttcaagtttcattttttttttcttttttcactttttgtttcttaattttaagtcttgcgcacaaatgggttttggtttttttggttctattttgattctttcactgttcttcaagcctttaatttgccaacaacccaatacag

SEQ ID NO: 81075 - DNA, 643 bp, Citrus sinensis
  Intron number 2 from transcript orange1.1g023518m (locus o range1.1g015029m.g) derived from phytozome v7.0 (chr-ID sc affold00097; pos 242458 to 243100)
tctaaagcctattggcgtaaagcgtgggtgacttatatttcgtttctttgtaatttgtaatgcagtagatatataatttagcgaaaagcatgtctagaactgttcaatttttgtttaaaatatgcattttttttaatataagttaatccaaattatattcagttatgtttaggtgtagcaattgactgatattatagcactatctgcgagaaactgagaaattttgaattactttggtaacgtgaggacatcattccatgaatagccagccaatattatgggcataagttgattgcctatcttcgaatgtgacaagttaaatttcaggatcacataagatatgttgttgggggggggggggggggggttatctaggaaatgaatatttttgatgggctaagtgtagatgttttggtttttgtgaaacaccttaatctacatctaccttaaccaaattcattgtttaatggtataattttgtttgttctgtatgttttcaaatgcccctgttgcttatttattgatgtgcgtggacttgagtatgttatgcttgttatgtaatttcttacagaggaatcttgccgattgaatttccttcgcccattgatttttctctgctgtttctatttacagcaccgcttgc

SEQ ID NO: 81076 - DNA, 760 bp, Citrus sinensis
  Intron number 1 from transcript orange1.1g042697m (locus o range1.1g042697m.g) derived from phytozome v7.0 (chr-ID sc affold01031; pos 19820 to 20579)
caaactaggcaaggtgatcgtgcagtttctgagtatcacaatgagatgaagtacttatggcaggagcttgatctcttctatgaagatgaatgggcctgtacgacaaatagtgttcgttatttaaaacaaattgaagttgatcatgttcatgaatttttggcaagtttgaataagagacttgatgaagtacgaggccggattcttggcaaaactccttttccatcaatccgggaagtattttttagaagtacgatgagaggaaggtcgacgcaaagtgatgtttggagaaaaaacttatctgttccagaagtttcagctctaataatagggattaatcacaataattctccatcctaggtacagtagaacaagaaagaagaaaaggtgtggtgtgatcactaaaccacgtcacactaaggagacttgttgggatttacacggaaaaccttgtaattggaagccacaaaattttagtcagtcaaaccgtgactcaaaggccttccactcagccactgaggagaatggaaacactgcaactacagttacgacacctttattcaataaggaacagttaaaacaactaatatgattctgtggagccaaattcgatctcaaatgctggtcagcatttcacatctggaaaccagctccccaaccaaagaaaatgtcagactcaaaatctcagaagaagcatgttagtgctcaaacgcttgaagtttaaacaggccgaccaaaacgaagtgttcgcaggaaccctgct

SEQ ID NO: 81077 - DNA, 956 bp, Citrus sinensis
  Intron number 2 from transcript orange1.1g038063m (locus o range1.1g038063m.g) derived from phytozome v7.0 (chr-ID sc affold00632; pos 87657 to 88612)
aagtgaaactcaaggtacatgttcttctgtttggtttaatatatatgattatgtaaatgttttcgtacttcttagtttgaatttgatctgaaattgtttgtttgataacaaaatgaaatcacatctctgttttctacttcgtaaacagtcatctcttcggaatcaattttttgtgttgttcatgttgaattttatcaaaagtaatcattaaacttgtttttctcaaatttatgtttgatctctcagttttttttttttctcgactcttcaattcaatttcactggaaatttactagaagattcaaattctgctctgtttggacctgtttcgttttgaattctcgtaatcatttgaaggctcaagctacttaaattttgttaaaacattttaattagcttcaataaatttgtaattcacttgctcatagatgtgatctctccgtttcacctaaattttgcgcattgtttgctcataatctttgtttttaacttgattttaagattttattttcaatttttagctctttcatcctgttatcatttatttttctataattaatttgatttctcttagtctgaatatgaatttaaattgtttgcttttagttctgttctgagatgtccgctgtttggattcgtatttcggttcatttttatcaatattttattacgaaacttttacactctagtttatagaagttcaatttaaatttgaattcgatttgttgctggagttttaaatttaatttcacaacaagtatgatggaagattcaaattctgttctgcctttgaatcttcattttgaatttcttgtactcttttgagtgttcaagctaaattatatgcttctccagttcataattcggttcgtaaatttattattattcatctggtgtttgtaatctctctgtttgaatttaataatttcatgcatttttttccttcttctcaggtc

SEQ ID NO: 81078 - DNA, 594 bp, Citrus sinensis
  Intron number 1 from transcript orange1.1g017653m (locus o range1.1g017653m.g) derived from phytozome v7.0 (chr-ID sc affold00132; pos 45185 to 45778 reverse strand)
tcttcactcatgtgagttcactctgcacattttcttgtattattgatgtttcgatgtaatttaatgccattttgtttattcttgaagttgggttctgtggttctatatgttatgttgagtcttgtttgttattaggaattgattatggtgtttttgtatgttgattgtgatctgggtgtctcatgattttcgttttcatggcctcagttgattagactgtttcagattttctctgtctatgagtaatgattggactttatagatagtgatgtgttgactgttgctgttacattgttcacgattagtaatcttttttgcagcattactggcaaggagtccatgtttgtcattctatttttggaaaagttgtcatgattttatttatatttaatggttctatatgtgaaagctgattccgaagaatagtcataggaatgactatgaatggtaaaattttaaaatttttgttggcatcgcttgttggatcggttttgcatcttataaaagtgtaattaagctgaacaagttgattgatacatgtctttgaattgtacaacagtttgcaggaagtgcatatacgagaagataacagaa

SEQ ID NO: 81079 - DNA, 622 bp, Citrus sinensis
  Intron number 1 from transcript orange1.1g031660m (locus o range1.1g029470m.g) derived from phytozome v7.0 (chr-ID sc affold00006; pos 708668 to 709289)
tctctgggatccccgaagagcatcttcgtagaagagtacctctctctatgcttttctcttttcttaattaatttagtttttgacttgtttcggacggatcgcattttattttttgcgcgatggtgtgggaataatatttttttagttagcgaaatacttgcattttaggttgaattgattaattagggtttctatgttgatggaagacgcagctattgcgattgctaattaggattttgtttaggttttaattgtgtgacgtgctagattaatctgtttctaaatttttaaaaatgcaaatttaaacgagagaaatctcttggaattgaaatcatagcatttatgttctttcttgtagctttaaaataattcgccctaatgacttggagtgaaccaaatgttgcagccgtttctttgtcttcatttttttttaaaattttttggtgttggtggtgggggtgacgggtggacttctgctgagtgcacaacttcctgtgttatacaaggcttttatgtttctttaattagttatgtgtgtttatgatattccatcaaaatattctttcatctgttgatatgcatgacaggtggtgatttacacacctgctagaactgctactca

SEQ ID NO: 81080 - DNA, 676 bp, Citrus sinensis
  Intron number 2 from transcript orange1.1g031660m (locus o range1.1g029470m.g) derived from phytozome v7.0 (chr-ID sc affold00006; pos 709333 to 710008)
tcaacacaaaagtaagttctttcttctgaatattttcttccactagaagttcctatgatggccaacttagtcagcctgcatttagtagcttggtattcacggatagaattgaaatgtagttcatcacaatcggactggcatcttcataaccactcaatttcatatccaaatctaattccatgttactaaatgtagttttgtcaaatgtgaattcattttagttgaatagtacctcttagtggagatattttctctagaggccttttagtggaatgcaatattataaacgggatttttcctgagctaccagactgatcttttaagtagtgttatttacagaacttatatacattttgctacatttgtgcaccacagagtagttgagcttcgttgacatatttcaaagtatatctactcttctcaaattcgtggaaccaaatattttgtggatgattctagacttttcgtttggtagtatcaatttcatgactaatagctcaattttatgaaacttgtgtgcattactatgttgttctaaaacaaactgcttgttttcacccctcatatttacattattattttgattttgctttcactaaaattgttagtatgtaagatcacatggccaacagtttctcatcactaagtaaaatgttctaggtgggaaaatccattg

SEQ ID NO: 81081 - DNA, 197 bp, Citrus sinensis
  Intron number 3 from transcript orange1.1g001683m (locus o range1.1g001683m.g) derived from phytozome v7.0 (chr-ID sc affold00091; pos 108733 to 108929 reverse strand)
gtgaacgctcacttgatctggtaagatagaacttgtgctgctgcatgccctgtaattaagctactagtttgagttttttttttcctgttctacttgtttgagtttgttcctatcattacagtttatggattactgatattttgtctgtcatcttcttcgtagatttgcaaggacaaagttcaagctgaatcttggtt

SEQ ID NO: 81082 - DNA, 451 bp, Citrus sinensis
  Intron number 1 from transcript orange1.1g038459m (locus o range1.1g038459m.g) derived from phytozome v7.0 (chr-ID sc affold00013; pos 85652 to 86102 reverse strand)
agcagaatattgggcaggtttgttctcaattaatttaccatgtccttaggtttgggactttgttagctgtaaatcttatttcgaaggacaattttctgactcatggttatgcctactaagcttcactttgtgggcctggctgtactttggcctttagctgatgtttctttgtatgtcactgatttgagtttgtttggaaaataaatataattggccctagatacggttgaaagtttttttgttggtgctttgtacctgaccgcttctagttatagtatttggctgggagactataaaatgatgaaagattcatatactcttaccttggcattaaattaattgtattcttctgatattttatatcttgtgagcttattgaatttcgccttttagaatttgccattgcctaattgcagatttctcaacaacaaaggtcattcaatacatttgg

SEQ ID NO: 81083 - DNA, 963 bp, Citrus sinensis; identical to SEQ ID NO: 80618
  Intron number 1 from transcript orange1.1g000519m (locus o range1.1g000516m.g) derived from phytozome v7.0 (chr-ID sc affold00158; pos 251841 to 252803)

SEQ ID NO: 81084 - DNA, 1058 bp, Citrus sinensis
  Intron number 1 from transcript orange1.1g030135m (locus o range1.1g020389m.g) derived from phytozome v7.0 (chr-ID sc affold00097; pos 170153 to 171210 reverse strand)
cccgagcacgacaagttccttgaagctcttcagctgtaagtatgcattaaactcttcatttccctctcgttttgaagctctttaaactgtttggtttttaattgagttgtgtatgcttcagttgaatgttcgtatttgttattgatacttttggtggcttttctctaatttttggttagggtttgagagtttggaagtgattggattttgtttggatgtcgagaaaattttgaatgagaataaacgagtttagctcctatttggattttaagaaatccagtgagggaattcaagaaattttacttttttttacttcaaatttttgttaaaattagttttttattatttcaaaactttgaatttttgttcccaaaaaaaaggtttgagggaagctgaggaaaattaacattttttctatttgaaacattcagtttatttcttttttgaaaagaaaaaaagggggaagaaaatgttagctattaattaagttattagaagctatttcatttgcaaaatggatgttttctatatgaattgactgatttgtttctttgcttgagttggtcatttgttgggaatttatattactcaaattgacaattgaaagaaaaaagtctcaaatttttagatggggattcgcaaatagttaattctcttattaggtgcatcaaagaagcccatttttaaagttaatttcttctggaaaacattcattgtattgtgaggcacgggcaactgctgtggaaacaaagtaaaaggtacccagtaggtgcttctaaatagtgtatgttgtatgatcctcatgaatggagcattttttaaaaccaattctaaatattgtttaaaactttcaggattactggttctttattgatgcgagagagaatattgtcttggagaaattcatttaaggttgaaatttaattgactatccacagagacagaggatgcttttatgttaattcttattctggtgcctgtttttctttcccgatggccttatattatcatgattctgttcagatttgaccgtgactggaagaagattgaagcattta

SEQ ID NO: 81085 - DNA, 742 bp, Citrus sinensis
  Intron number 2 from transcript orange1.1g030934m (locus o range1.1g030934m.g) derived from phytozome v7.0 (chr-ID sc affold00097; pos 247783 to 248524)
gatcccactaagtatatgcttcattttcattttcacatttatcaatttcaatatgaagtttcgagagccaaagtgtattggttcatagcaggcttagttttgaaattcgatttggaatttgaattggatggttttggaggtctttgttttgaaaaattagagattgaatacttagttctgctaaatttttattttcggaatacgaagaaatattttgttagaattgtagagctatgattgctgaaagttggttttattgtgctcaagggacttggttcagatgaaacgaacaacattgtgaatttactatctattcctcatgatgcacaaacgaatgcaattttcatgatagtatatgttgtttggatattcttttgttcatcaattcatgatattttgcttctgaaggtataatttcacttctagattgatagaatggtgttttgttgaggttcgttagatgattcccatgtatgttgtaactcatgggggttcttattgatgtcttttggagtgaattatgataaatcttggtaaacggttgacttagttgatgaattctctaagaggtgaacaataggtttgggaattaagagacttctgcattttaattatacaagatttgagatcaagtcttggctatcaacttttatgtaatgtttatatggtttcattgcagtaatcatttgattattttatttgtgcagtgcagagaaaggaaacttgggggtgccccaattat

SEQ ID NO: 81086 - DNA, 650 bp, Citrus sinensis
  Intron number 2 from transcript orange1.1g010896m (locus o range1.1g010896m.g) derived from phytozome v7.0 (chr-ID sc affold00009; pos 1681331 to 1681980)
aagaagccagcctcagccctcaagtcctcgaaaatgtaagtcagtcacattgtcttaagtagcaaaatgtggtgacgaaacggaaactttattgagttttctggtataagaaagtagatttttgaataatgataagttttattgaaaagtcttgaacgaataaaattaggattttgaactatttttataataagtctaaataacgcgaatttattaaaataggcaaatctaaaatctaatatgataattaaactattctaattaaaataagaaaagaaaaacaaatggtattcaaatctgagttttagaaaaaaaaaaaaaaaaaagataaaaatcccagaagaataaggaaaaataggaaagaattttaaaactaaaaaatgaccaggaaagaaacggaatttccagtttgatcacggagcggaacagcttagacaattgtggattttgtttgtctcatcataagcttcaaaacaatatattatacgccgaaaacagacaactgtaacccaagttaggatctccagaagatacactgctcgcaacacacaacaccctacatcatgtggcagtggcagcccctccccctttcatttttctagactcagcactaatcagaattaaattaattttttcatccatgtgtgcag

SEQ ID NO: 81087 - DNA, 763 bp, Citrus sinensis
  Intron number 2 from transcript orange1.1g032979m (locus o range1.1g033020m.g) derived from phytozome v7.0 (chr-ID sc affold00405; pos 77214 to 77976)
atcctaatgtaagtaacaaagacatttgccaactttatcttgttctgtcatggattgaaagtatttactatgacaatttggttgttttatgctcactctttccaatgtgataacttgttttgtttctttggtatttgatgattttattacagtcatgaactctttgagatctctattcttttatccattatttattaaatcttttccgagttgcttttgatatatgtatactctttctccattaattgaagttggcttgaattcgggaagaagtattatgtatattatgatttgagatatttcagagtcaattgtttagaattatgtttatacttttggaaccataagagtttaaggatgtttaacgacgtttactcacctcttcgatgcggcctgtagggtatacgttctcgactgctcaaactgctgcatgcatgcatatgtacttctttggtggactggttacatttcttttaaaattcagagcacttttaaatgacttgacagagagattatagcattgcatttagaatatcttttactgcaggtctttactttattgtcgttatatagtacttgcgtgctgcagtaacagaaaaagtttcaattgttaagtttatacatggttggagtggaactttatgtttatgtttttgaaaatttttaccattttaaagttgttttttctaaacatatgtattcatgaatttcttgggtggcattattagccacttccagaaactgtagcgcttgtggaggacat

SEQ ID NO: 81088 - DNA, 613 bp, Citrus sinensis
  Intron number 1 from transcript orange1.1g008378m (locus o range1.1g006781m.g) derived from phytozome v7.0 (chr-ID sc affold00009; pos 1900071 to 1900683)
tctccgagaaggatccgtcgtgtcgttacggtcgggtacgtgtcatttctaataacttattattatttttcaaaaaaaatattatttcttctgaattttagaattataattcatattgcatttagattaatttattttgttcggtctaattgagtaacaatcagggctaggttacattacgtttttgtataattttatgattatcgaagaaaacgcccatctttgatggaattgctagtaattttaattgaatttttatatgacctcatgaaatgaatcctatctactgattatttgaagagcaggtggtttaatgattaggctgacagatgtgactgttggttagagatatttttgttttttgtgtaatttgtggggttacaataattgtctggtaaattttgaggtttgttgagtggatatgtatgcttttgttagacctagtgatatggtctttgtttgttttatttctccagtatgatgaaatcttgggaaaaggagcattcaagactgtgtatgtctctagaacctatatcttcttcagtttcttatttttggatttcatgggtagtggtgttgaattgtactttcatgtgtagatataagggttttg

SEQ ID NO: 81089 - DNA, 955 bp, Citrus sinensis
  Intron number 1 from transcript orange1.1g035144m (locus o range1.1g035144m.g) derived from phytozome v7.0 (chr-ID sc affold00156; pos 322798 to 323752 reverse strand)
aatcaatctctcaacaggtaccataccaccgtccttatttcttagtgtttctttagcttctgggttgtgttttcttattccgtatctataaatttctcttacaatcttcaagtagcaagaaatttaatcaattttatgcatttgatttcccatatctgtaaaggaattgcatgttctaagtgtctccacattgtgtgtgtcttatgttcttgtagttgcaattacttaagaatgtgggttgccggtgatttctagaaaagtcagcagtgagatctgtgcagagagattcatatatccatggttccttttgagaacttttgaacggattgattgtatgaatcttatagaatagatggtctctgagcaaaacaatttccttaatgtgcgacatattggaattcaagatcatttctgaaagcttgaaagcgaacatctaattaaggttccatttggtatcaagatgttgtagcttaaaagctcagccgatgggaaatggaagttttagttgtgaaataaaagcttgcattgttgcgtaaacgtaactttaaaatcttgagaaataataattttgaaaaaaataaaaagattaatataggttttcatcaaaacactgttgtggtaaaattatcttcgcttctaaatgacaattgaaagtgtttaccaataaacttatagttgtagattaaacagctgccagacaataatgccaaatggagcctaaattccggtccatccattagttttgttgaccctccttttcctccacacgtgtcttttcctgcaccatatagtatttttgtcgaaactatccaaatggggatgccttttgtgttgccattttgattgtgattcaatgctaacattcatcttgttagtttgcaaagaaaaagaatttaattcttattgtccactgtcctcaggtgaaaagccttcatcagtcattggatagacgaat

SEQ ID NO: 81090 - DNA, 819 bp, Citrus sinensis
  Intron number 1 from transcript orange1.1g032559m (locus o range1.1g032559m.g) derived from phytozome v7.0 (chr-ID sc affold00576; pos 740 to 1558)
gcacactttccttcaggtaattcatttcattgtttttctttgagtgggatgacatcaatggtctttctccctctctcttttggttaaagttgtacgcgttgagtttattctggctgttgtatctcgaacatatgtgagatacttcattggtcactttcttaaaccccaagataaattgggcatttttttagtttttccttggtgcaactttgagtctaacggtcatcttctccttgaagtcctaagttgctattttttactctattctttacacatatgaaggcactgatgttagattatcaaaggagaaaaaaatgatggatctctagacatgttttctttacaagtactttaaagagacatttcactaaatttggaataattcaaaaacaaagatggaaaacaatacttgaatttgttccaccataaacatattttgaaaatttgttagctgtttgctgcttgaatgtccttatcggccttatgccccaggctacatgagatttcttatttgaagaatgttagaatgtaccttcatttctagtattatcttcttgactatacacatgcttgtgtgaaagtgacacgttgcatgaaagagtgttttcagtcacgcacaaagaagagtgtttttacaagtcaaacatgtgcatgcatatgcgtgcccacaggtagatagaaattttacaattcagtggaacctgaccaaatcagttattcatttgtatttctaatgtgtgaaacattatgttaactgctcatcctttgactccaaagtgattatgttgacaggaacacagtggcttcatagcagggttg

SEQ ID NO: 81091 - DNA, 360 bp, Citrus sinensis
  Intron number 2 from transcript orange1.1g032559m (locus o range1.1g032559m.g) derived from phytozome v7.0 (chr-ID sc affold00576; pos 1611 to 1970)
tactgaagaatacagtgtcgtagagtgagtttctgattactatgtttaaaacttcatttctttttcgaagaagcataatttaaataatcaagacttgtactgatataatgcttgctggaatgggacctataaggtcaaagagccaagcatttgattgaattgttgacaaatagcataggatgtgtttgttttatttaagatggagtgttagaaaatcatgctctatctttctttgctactctaaaatattatctacctaataataaatttgttgtggctgcttgtcgtgcccaatgttcctttttctgtttgtgttatgcttctatcaccttttcttctgttgtaggaggagtcttcagc

SEQ ID NO: 81092 - DNA, 940 bp, Citrus sinensis
  Intron number 1 from transcript orange1.1g001660m (locus o range1.1g001466m.g) derived from phytozome v7.0 (chr-ID sc affold00674; pos 52383 to 53322)
atttcacacagcggttttccgatagcggtttcgaggtaataatggtggttttggggtttattcatccttatcacgacgtattactcgtttgatgaatgtgattctctttattgatgtttgtttatctcccgttatggatctggcctgctagggttttagtttatgttgttgttagcgattgtggactgtttcgtccggatctactttgtttggtacttatttgctgaatgacttgtattagtattattgtcttcgtttttactctcctgttgctactttttgtgtgttatgtactttttctggagatcgttagatcttctccgtttgtgtttattctgaattttgattctatgttttcaatctgtgggtcagtctcttggttctgaggcaagtgctttaattttttcttcagttattaatatatgactgggtatttttgaaactctttacttcaattttttcttatatattttattgtgaattcattattcagtgttgtagtgaagaaatgttcatgtttgtaatttttgttttaaagcgcataaattaactaatgttgttttcatatatttttcctttcatgttgccttttgcctaagtgagcgcacttgtgatgtacactattaatgtttcagtcctatttcctgcagtagttggtactacatctctttttctcttcttttacactgttgatggctaagatatattgcttctgtgactatgaatgttcatagtttttggtagatgacttaattagctcagtctttttacatgcaatgaaatgtcagggtgcagtttctgtctttgttgcctaatgttttcatgatcttaatttttctttttcattgttttatttggtaatcttttgtgttggattttatgacttccttgtggtattctatcatagttgattatttttttgttgcatccaggtatcatt

SEQ ID NO: 81093 - DNA, 574 bp, Citrus sinensis
  Intron number 1 from transcript orange1.1g007317m (locus o range1.1g007317m.g) derived from phytozome v7.0 (chr-ID sc affold00077; pos 469997 to 470570 reverse strand)
tcttgaggaggctgaggtcgttttggggatttcaggtgatacatatttttctttttgttagcaagctttttggttcgatcttcaattctcatttggtaaattggtttgctttgctcggtcaccatagaaaaatatctctctctttttaaaaaataaaaaaaataataaaagaaagaaaaagaaggaaatttttttatgtgttctgttttcacttgtttgcttttagtgtttaaagtttatgctgaaatgtttacccgcacatgttgtgagcaaagtcgaaaacaagtgattaagtatttgtataaaccctaaacccaaagaataggaagtgatatgcggaccaaattaattcataaagagtatgtttgtaacttatatgctttttgctaaaatatttggtatgcttgcttttacagtttagttagcaactaatgtttactagctacccacttacttgatacttgttgctagtagttccatcatcagaaattggatgtgctcttgttcatttaattgttttttcttgttttggtaaaaatctgacatctggtactatgagtaggtgtcacatcca

SEQ ID NO: 81094 - DNA, 471 bp, Citrus sinensis
  Intron number 2 from transcript orange1.1g015208m (locus o range1.1g015208m.g) derived from phytozome v7.0 (chr-ID sc affold00432; pos 48171 to 48641)
atcgaaaaggccttctatgtacttttttttttttatttactttcaattttctgtttttgattttatatttgtgctcatgtaactttgttcgtctatttggtttctttttttcatattaaacataggtattttgagatgaatttgggttttggtttgctaatttataacttttgtggtctatttgtattgtcctttaagttgttgattcataccctttgactgttaaagaaaagaaagagagaatgtggaatctttgaatgaccctttttaatccacttgctttttgatggattctgggatttcagatgcttttcttttactatggttggagtgacaaaaattacattcctctgctttcttggtttttggatatgattttcccctccagtggagaattttgatatgataatattttaagaaccgtgtccataattgatttttggaacaattctttttcctatcttttgccag

SEQ ID NO: 81095 - DNA, 743 bp, Citrus sinensis
  Intron number 1 from transcript orange1.1g013157m (locus o range1.1g013150m.g) derived from phytozome v7.0 (chr-ID sc affold00104; pos 245357 to 246099 reverse strand)
ttatcacaaaatcaaggcttcgctctctacttcttgtaggtattgatttcttatctctctctatttgccctattcaacaaaatcgatcttttttttcttcttttttttttcagttactcctcaatttacgtgtgtcgagattaacgacacgatgattacattttttttctttttttttggttttcctgaaaaaaaaggcactgaaaatataagaaaatgtgttttaataggtcagttccagaagctataatacaattgataagttgtcttgttaagcttcaaaatatgttgtatcttattgaaactattaaaagtgaatggaacagacttttttttaaaaataatttttgtctattattctctttttcaattgttctggtgattgtattggctggttgttgtaattgttagaagcttgtttgaaatttctgcacaaaatttattttagcatattctaaagaagttgcaaatgcggaaattattagtttgagtgctcttttttgaaattgttttgaatcaatgtggtcccaaagtgaatatgacaaagaaagtcgcccatctagattctagacaagaaagttctcatatatttcatttggtgcattgatgtaatggagatgaaatgtagagtttgggattaccttctgagatatttatgtttggtttgttatggtgtggaatctcatatttatctgggttgtattgtagcagttgaagggagaagctgttatttgttttgtcct

SEQ ID NO: 81096 - DNA, 940 bp, Citrus sinensis
  Intron number 1 from transcript orange1.1g012161m (locus o range1.1g012161m.g) derived from phytozome v7.0 (chr-ID sc affold00037; pos 233303 to 234242 reverse strand)
aggtttgttgtggttccttattctaacctattgtgtagcatggttcattgtcaaaaatcgtaagtcgaacagaactgtataattgttagcatttctatttacattgttttcataaattaatatgttttgtagatattaccaaaaatataatatttattggcaaatcttgtggttgatgtcacaaaaaagagggggaaaaattctagcaatactatctactctctttggattatatgtgaggttaccatgcattaagtaggaaagcaacaagataaactgtagactggaaaataacatattcagcattgcaattgtaggagaattatctttttctttgtcttaattaaaaaatattcttagcatttatgtgaataatgtgcaactatagcctatatttttttgttttctagaaatgaatgctcttgtttgcctatgctcagcttgtaatgttgaccgcgtaactgactattatttaggaaataggaagatactaagaaattacttttggaggtcatgaaaattgtttatttgaataaggggagtctgtcaaatttccattacaaagttttcacttagaaacctcaaatttaaacatagatttggcttaggagcttcgtcattgattaaaaatcagtttatctgaagctcatgcattgtcagcagcaccatctaaagaaaatccaatttttaatcggttaaccttatgtttagtttcattggtttatgttatgttgaatgtttctttatgcttacaaactttgttagtccccactgccgataaatcttctcagtcataatctaaatattgctagatgggatctatacatgcacagacaattttatccattaattccaacccgcatttaggtgatttatttattgaaactgcttggcttccattataggaagaagaagttgaccaatcactggaggagcttta

SEQ ID NO: 81097 - DNA, 509 bp, Citrus sinensis
  Intron number 2 from transcript orange1.1g047429m (locus o range1.1g047429m.g) derived from phytozome v7.0 (chr-ID sc affold00031; pos 942234 to 942742 reverse strand)
tagttgagttggacttggaaagcaaccaactttgggttcctctgctgggaagtcttgacttgggttcaatcgattaaatggaacacttagtgaaggcatgggacgcctttctatgctagagggactctctctggaaggaaattctttggaaggtatgatctctgaggctcacatgtcaaatctctcgaaattgaccatcttgggttttcttgtaattcattggctctcaatttgagtcctgattggtttcttcctttccatttgagtttcgtaagtttgtcaaattgtaatttaggacctcgttttccaaaatggctgccaagtaaaaacaaattagtctttgttggatatctctaatactggaatttcagatattgttcccacttggttttgggatttatctccttatttatatcatttaaacctctcttacaatcacttgaaaggaaaggtgcataggtgataatctactagaactggttgttctcagttacgattcaatcatatta

SEQ ID NO: 81098 - DNA, 787 bp, Citrus sinensis
  Intron number 3 from transcript orange1.1g031398m (locus o range1.1g027331m.g) derived from phytozome v7.0 (chr-ID sc affold00041; pos 661116 to 661902 reverse strand)
ccagtttggatcaccagcggcttctccagaggtatgtcttatacttagccactaaagtgggcctaatagttttttattatttttgttttttagaactaaacttttgttcaaatttatttattaatgagctaaagaactaaagttttgctcaaaatgtatttattaatgaaatacatgattctttaggaaacaattgtataagaggatagttatatgagaattacatgctagtaaaatgtgctcgtcagttcttctttgtaatctgggaaggaagatctgagaatgactcttgacctgaaaagcctcacggtgagaagccaccgagttattggccatctttatgtggatttatcatgacatgggaattgtatgggcaaatgaaatctcaccaagtaatattggaattttatgatgtgaggaagctccctcttctgcatggatgaaaaggtgtatgaagttatccggtcgtccatctaatcatgttaagagaaccttaaatatgataatttgaaaagaatccactttggtggttttacatttctcaacatatagaaagtatttctggccatccccacatgattcactaattctttctctgtataatttctgaatttacccctttcttccaaacttatgcatgttccttgcctccttggtctgtgctggacagagtattatgctagaagtttttaacaggaaggtctttggatgctgctgcttttgtcttagagttttttctttggtgaaggtattgagtaaattttttattattgttcgcccaggctaa

SEQ ID NO: 81099 - DNA, 884 bp, Citrus sinensis
  Intron number 1 from transcript orange1.1g031398m (locus o range1.1g027331m.g) derived from phytozome v7.0 (chr-ID sc affold00041; pos 662730 to 663613 reverse strand)
gtttatttgagataaatcatccatctcattcccaggtagcaagacttaatcgttttcttgaattctctcaatgtatataattaaatcttattcattttgattggtttcttatattctcttgaatcttgatgatcagtttttttttgctttttattcttagttccgtccaatgattagccttgttcttgttttggatttcaatcatagaaatggaatgattaacattctctggaccgtatgagtgtgcaactgttcattgtttggacagattgattcattttcatggacggccatctgccttgttgctattggttcattttaatggacagccatctgcctgttgcttttacatattacataaataccgtgtttatgtgttgatataattcagccactggcatttgagcttcttttgttgtaatgggtggcttcatattgatcgaaatctttattgggttgtgtcatgttcgtcacatttgcattttgatgattgtagtctattaattggttcattttatcttcatctttatgattgtagtctattataacatattgatgtgttacgttgcttttacattttacataaatactgtgttcatttgttgatataattcagccactggcatttgagcttcttttgttgtaatggatggcttcatattgatcgaaatctttattgggttgtgtcatgttcgtcacatttgcatattgatgattgtagtctattaattggttaattttatctttatgctgtgttgattgatatgaatgtatcaagcatgtcaaatgtgttatatctttattttcattgtaatggtagtgattcatttaagtttttatcttaagcagttctgtggcaaagggctgtttacttggtgtgatcg

SEQ ID NO: 81100 - DNA, 413 bp, Citrus sinensis
  Intron number 1 from transcript orange1.1g018796m (locus o range1.1g018796m.g) derived from phytozome v7.0 (chr-ID sc affold00043; pos 12258 to 12670)
actgttttgttaatgtaatcaatctctactctttgatttttcttctttttcaattaatattttaaaatatgaattaaggtcctcttttaatctgagttttgcatagtattttaaaaaatcttgtgtaacatgtccattattagtaatatatgattgaaaaaaactacgtacacttatatccttaacttctaacagtcacaattaagctcaggaaaagcttacatcatgggggaaacctggtcttacaaacttatataagacaatttggatatatgtatgtttatccaaaaagaaaatgaacaaatattcattattttcttaatagtaagataagaagaatctacctaattattaaattaacgatacaagagcagttgatcataacaagcttttaatgttatttcagggctgtg

SEQ ID NO: 81101 - DNA, 475 bp, Citrus sinensis
  Intron number 3 from transcript orange1.1g025276m (locus o range1.1g025276m.g) derived from phytozome v7.0 (chr-ID sc affold00009; pos 823298 to 823772 reverse strand)
acaacgtaagttaaagtttttcgtttcctatttgtaactataagatattgatgattgtatcctgtactgcaattttcttttgttctaacaaactagtagaaataattttttgaaaatattatgtgttttgatgtgtttcatgaattgacgcccacgtttttcctttgagggttgcaattccctttttctttgccattttttcgggtttaaacttgtcaaaattaattgccggactatgttctttgtaattgatctgggatattggatttctttattgggtatcaaaaaagaactcttctctggtcagttcctttgtttttcatcctctgtttggtttggtgtagttgtataaccttttaggtgaggggcaaataccacatgcctatattcagtcaagttattggctgttttttataaaatcatattgcttggttcacaaggttcttaaaaacggggtggaagttaagctgcaaag

SEQ ID NO: 81102 - DNA, 398 bp, Citrus sinensis
  Intron number 2 from transcript orange1.1g025276m (locus o range1.1g025276m.g) derived from phytozome v7.0 (chr-ID sc affold00009; pos 823799 to 824196 reverse strand)
agaaggctgttggccttggtggttggcactggctggtatattattaatctttcatttatttatttttttcctgataagagaacactaattttattgataaactcattagaagattatgttatttatgtacgtatagagagatcacttttaatgtttcggttggccaatttattgcattgagtgtgatgttaaagttgctttccacataggtttctttatgtttggcttgttttgttttctttcctattttgaatctgggctttagcaagccggcacagtatattattgtctttgaatttgatgagatctggattttaggtctagacctttttatttatttatttattttcttttggccgccagagtcgtaaacagaaccaagcttttaccctctttct

SEQ ID NO: 81103 - DNA, 711 bp, Citrus sinensis
  Intron number 1 from transcript orange1.1g046316m (locus o range1.1g046316m.g) derived from phytozome v7.0 (chr-ID sc affold00019; pos 974465 to 975175 reverse strand)
tgaagtgtcgcttaatcaagcctctcttcaaccaggtctctgtctctccccctctctctctctcatctttttattgaagtttaaatgttgattactagtgcttttgtacaccatcgttaacgattttgaattgtcaaaagtccttttgcagaagtacttgttagctgttatgcacttgcctgtaatcagcttgttggtacttcatattcaatttctgtatcttgtcccccaaaaaaaaaaaaaaatttaacgaatcttgaacttatctgccagatgagattgttgaagattcaattgattgtaatgttattttttttttattagtattatatgcatgtttcatttgactctaatctgttatttcttttccatcatcattggactttcttctctccttaaagaggaagcgatgtggtccatgcaactaagattataatgtgatgatattcttcttatgaaggttttggagcagcattatctaaggttgctgcaaacagggagatttcatttggattgcgccagatatccttccttacttccaaaaactacataacatgctgtttgactttaactttcaaaaatctgaatggattagaaaataatataaaaatataagtttcatagtttgatatttgaatttgtgttgtcttgtgagatttaacatgactttacctagctgcggtgcttctaaagcattttattaagaaacac

SEQ ID NO: 81104 - DNA, 902 bp, Citrus sinensis
  Intron number 1 from transcript orange1.1g008459m (locus o range1.1g008416m.g) derived from phytozome v7.0 (chr-ID sc affold00116; pos 262934 to 263835 reverse strand)
cttctgagaataaaccaaactcttctttgcctccggtgagagtgagtatttggcactctcttttatttgtttgtaatccagatgggttttgattattgtcgggtgtttttgtctgtgtgtgagatattttatggattaaatttattgtttcattggtgatgaattgctattcattaggtgaacgcaatgcgattagtgaaagatttgttttgtgctttgtttaactgttaacacttgggattaattttgggtccactttcgccaaatctagtgcgttgtctttatcttttgaaacaacggttatatatattaggagtcagcatcatagctcaaaatacactcagaatctgccaatggaatctagtgaggagcattatgcagaaatgtgtgtgcgtttttcccccctgtttgagtatagtcttggatttagtcacgcttggagctgagtcttttggtctcactattgttgtttactcaggttttaaacactgttactaaagtggcagccctgctgcggctttgtgctcatacattttagattctttatgtttccttggttaagctatctctcttctcttggtgtctgtgtgcaaacaagttggtgtttggacattggaagatctatcttttttcagttcctttatttgtcttcttgattggtgctttctctatgcatttagttcaatcattcttttttgattatttctttaaaaaataatattgtattggatttctggttctttgcttgggttatggacagttttgtgtaaattttgctactgtgttgctaggaggtcaatgatgatagcatttgtattcaacttgttttgtttactctaaatttatatgtttccttgttgtgtacagaattttggttctctggacaattttgactgcccaaa

SEQ ID NO: 81105 - DNA, 639 bp, Citrus sinensis
  Intron number 1 from transcript orange1.1g034730m (locus o range1.1g034748m.g) derived from phytozome v7.0 (chr-ID sc affold05009; pos 1000 to 1638 reverse strand)
gaagaagcgtgttcggaaccctcttgttcccatcggtatctattttccgtatttttcttctttcacttttttgttattatttttatttatttattttatttcttagtttctgcatttggaatggattttatttgatatatctgggatttgggcatttagtaaatggttttttttttaaaaaatatatatttgatattcataaaatcaccccgatatgttttcttttcttagttctggatttgtcaaataatttgtgccttactagctaaattttgtaggttaaaaatagggactagactgaagaaattctatttgaagagaaacggcaggctatttatgtaaaaatgcagaaatcttctttgccacttttagggatttaatgtaatgatcaattcgtcttggagcactctgttagtttgagctaaacccctgggtctagtctagactttgttcgattcataggtgatgttacaattaacttctaattgtaagcatttgaactgcattaaacttggagattgttggtgtactttcccttccatttatcaagagtctaagactgttagatctgctcttattgagtagtggtttttacccattctaagttttgtttgacgtatgtgtaccacaggtgcgctc

SEQ ID NO: 81106 - DNA, 988 bp, Citrus sinensis
  Intron number 5 from transcript orange1.1g020655m (locus o range1.1g020655m.g) derived from phytozome v7.0 (chr-ID sc affold00324; pos 37780 to 38767 reverse strand)
ttcccatactactgcaactaggtgttgctattgaggtgatactttgttttgactgtttgaatgctctctaatttcagtgctggttatggctgaacctcacattgttccttgactagctatatcatatgaaattgtttgttcctaaatactagttacttgagttacctgtgatcagaaacttgtctctgtcaaaagagatggattcaattagattgacctgcctttttgttaagaaataggaatttatatatattaatattcaaacctcataggagtattaggcactaaacaagaacaacaaaaactataagatactttctgcgcactgtaatgaaacagactggccctctacagattctgagaactaggaggtaaggattaaggaccttggctgtggaacttttagtaaattagtgcctttcttgcttctgctatttgacacttaacaatagacattccacaactgtttcttttgttgtgtcacacagaaacctactcagttactttttgtgtatttccattttaaaggttgttttgtgtctgtggattaaccgaagacatagttagttatgatgaaactaatttgtccagatcatttgctaactatttgctgtttgtgaaattgtatggactcatgcaatttagtcttgtttcaatcacctgcgaatgcagatggcttaagagtcaatacaaatgtctgtctctggtgattttactgtctgtttagtgattcatacaatttagtgggtgtacgccttcctttgcatgacattttaaaatttgtcgtttaagcctagaactgttagtttttagtgctagaaaaagaaaaagagtcatgtttaaaatatttggttgtctctggattttgttttatttttactatgtagctttgttgattgatttattaaggatacaagaagttgtgacaattgctattacctattccctttttgatgtcaggccttaaaagatcagaccactgttggat

SEQ ID NO: 81107 - DNA, 630 bp, Citrus sinensis
  Intron number 2 from transcript orange1.1g034364m (locus o range1.1g033424m.g) derived from phytozome v7.0 (chr-ID sc affold00121; pos 152276 to 152905)
ggcgaaaaattcttttaagcttgaacaccccctcggttagtgattcttctatattattgtctacgggtattgtaaaaaatatttttcttttgttttttaaaaatgtttttcttttgctttttgggtgtgtcttaggaggaataggttttgattatttggaaccctaaccctaaatattatgattaaattatttaaaaggctgaatttatgtagtagttttgctagtctcgcgttattgttcctgggatattgttggaattgtaattctgggttggcagcacaaaataactgcaattgatgcgaattctggctctcattagaatgagtaggatgacttaattgtacctaatttgactcattaataaaattggtttaaactcacaagaccttttttttataattaataatgttttcagtttttagttgttaaacaaagagttttgaatcttttggtgcataaggcagtttgtgtgtgaatgttgtggaaactgcgagagctaattgacaatttcaatgaaaattcttatacttaaaaactgaagaattattactattaggttgtgtaagttaaattttgtaatgttctatatgccagagaggaggcaggctgaagctgctcgcatcagagac

SEQ ID NO: 81108 - DNA, 318 bp, Citrus sinensis
  Intron number 2 from transcript orange1.1g039302m (locus o range1.1g039302m.g) derived from phytozome v7.0 (chr-ID sc affold00086; pos 224839 to 225156 reverse strand)
cttcacgcctttcacattggctggccttgtttaaggtcctttctttgcatccttcattcattattatttgctctgttctgttctgtttgttagaatgttctgttgtgtaactgaaggtattgaaagttttgattctctaattttgttaaatggatcaaaaaattgaattggggttgtcattttttctgctaaaaaactagaaaagtttatttccttgtgagaacaattagagagaatggtaacttcatttaattttctgttggaatttcattcttttttacagctttgatatcttgcgtgatacgttgggtttagtgc

SEQ ID NO: 81109 - DNA, 559 bp, Citrus sinensis
  Intron number 1 from transcript orange1.1g010904m (locus o range1.1g010904m.g) derived from phytozome v7.0 (chr-ID sc affold00068; pos 94620 to 95178 reverse strand)
tttatactggttgccattctacataaggcacacaggtacttgtttctacttctaatattaaatgtatgcttgcaaggtgaatttcaaagttgcttgttggtatctgttgagtgacattttgtttgatgcatgagttagtgtggcaatatatcaacttgattgggccattgtagagagtctctcactggcacaagtgatggtgtaacttttgaactttgtgaaactgatgttatacaattagttgggacattggttgaggttcagttgcagcgccgtagataatggatctggatattgaaactgttttctttacctggcatctaatattattgggaattagtgtcattcgctaaaattgtcgtggtaatgcttcggctttcttttgattgctccatcatatatgatgcatttatctcttatattgctttccttaccgaagaacattttgtttgtttggaacttgttagaaagctatctgattatttttagtggtgaatattcattgaactcttgatgaaatgcagctgttgctggtgtgcatttgtcacacaaaactgct

SEQ ID NO: 81110 - DNA, 381 bp, Citrus sinensis
  Intron number 1 from transcript orange1.1g003711m (locus o range1.1g003711m.g) derived from phytozome v7.0 (chr-ID sc affold00342; pos 84507 to 84887 reverse strand)
gcaacaacataacaaaagcaagcccttcctccaatgtaagtaattttttaactgaaaaaaaaaatttcaacatctgggtttcgttccgtttgattttcttgttaatgggttctctttgatttccttaattacggttaaacatttgatttttttttgtcctcattttattgtaaattcttcaattttcttgaaagtgggtactttttcattttgccttttcaagtgaagtatgctaatggtgtggttattcattttcaagagtcaagacttgattttatttaatcttttttttatcattttagtattgttatctaaaatctttccttttttgtgttattttattttattttatttttgttaagaagaagaagctcggtgttg

SEQ ID NO: 81111 - DNA, 522 bp, Citrus sinensis
  Intron number 1 from transcript orange1.1g033398m (locus o range1.1g033398m.g) derived from phytozome v7.0 (chr-ID sc affold00009; pos 444819 to 445340 reverse strand)
caagtccaaccagcaccgcgtcgtcaaaacccctggtatcgtcctctatcatattcgctcccttcatttatagtctttttgagttggatctgtgtcttgtcacttttaattatctgatcctttcgtaagagtcgcctgcttagcttaaatattggatttttagtttttctgaaacatgactaatatttttcactgttgtatacggattgattatatttttaataatctgaaaactaaataatttgatactttttatgcgggcaaattgacttatagttgacttagatgctggaaatgcttacttcattgttgtttacagattgattaaaattttagtctttagtcctcagctgaatgtcagttaatatgcttttctaacttattagtttgtatttctcatttacgctcttaacggatattgatgagttcctctgagatcaatgctctgtttatatttatgatttttgcttgtcttcatgtaacttaggggggaagctggtttaccagagcaccaagaagaga

SEQ ID NO: 81112 - DNA, 200 bp, Citrus sinensis
  Intron number 1 from transcript orange1.1g043313m (locus o range1.1g043313m.g) derived from phytozome v7.0 (chr-ID sc affold00028; pos 322416 to 322615 reverse strand)
agctgaggctgctcgtaacatcgtcggcatcatcggtaaattactttttttttcttttttttttttgttttgttttgttttctgtttttgctttcttcgtttccaaaaacatttttgttaaatgattaattaatcaattttgttttctgcatttccaaaaacaattttgtgattgttattatgcttaattggtgcaggga

SEQ ID NO: 81113 - DNA, 636 bp, Citrus sinensis
  Intron number 2 from transcript orange1.1g034774m (locus o range1.1g034774m.g) derived from phytozome v7.0 (chr-ID sc affold00006; pos 1155631 to 1156266 reverse strand)
cccgtgctttctgcgatttatcccagggtaccttgtgtttctgtttctgtttctattttaactgcctggattttagggtttgttttatgccatttgtttgttgattctaatctcaaaaaatgtcggcatctttagctttattgtttaatcatttctaccaataataatcctaaattgtttttatttgtcaagtctttaaatgtttatcacaatttcatcttctgcccctttgcataaagcttttaaattctgttatctttcggtcaaatggttgatattttagttgatcgatgatgtagttgagaatgtacttagctgtttagaatgcaccttccttatatatatatttgtgcggttactttagttgcacattttctaatgattttcagacttgaattcagcttgatttctgctaaagttctcttcatgatcttgaacttgtattttcctttttaaatctaaatttatctattcatttatgagttgtgtgtgtgggtgcccgcgtgtgtgtgggtgcgtctgtaatactctatatctgtgtcgtgatgacaatatgggatgtctatgcagagctaattgtttgcattggtatgttttctaggtacttaactaaactgttggttggatcagcacaca

SEQ ID NO: 81114 - DNA, 547 bp, Citrus sinensis
  Intron number 1 from transcript orange1.1g031592m (locus o range1.1g027033m.g) derived from phytozome v7.0 (chr-ID sc affold00091; pos 207568 to 208114)
caagaacgccgcaagctcgccgctcacctccgactgtgagttcgtaatacatttttaggcattattttggcttgaattaaaattatcgaaaaagaaaactcacgtggctgtgtttgttcatttagtagtacaataatgttttttttaatagtctaattttgtttctagaatttattagctcttttcaattttaatatcacagagttaataactgaaagtcggctgatataaatttactgtttcaaattgtttatcaaaaatatgaaagtttgatgttaaaagacaaagacaatacagtgaagaaaattatctcagtagtaaataattgattcttttaggagaaaaataaccaaaaaaacttataagatgtttataaaagatatggattttaatttggtaaattactatatctgtatctttacgattgatttaatatttatcataatgaacctaaacctgtactctcttatttacaatcttatgtttttgttgtgctggtttcaattttgcagcaactaagataccaaaattttgtacggttgttagt

SEQ ID NO: 81115 - DNA, 339 bp, Citrus sinensis
  Intron number 4 from transcript orange1.1g033648m (locus o range1.1g033648m.g) derived from phytozome v7.0 (chr-ID sc affold01019; pos 43852 to 44190 reverse strand)
caggtgagatttgatgcatggacaaaaacatacaggcatacacgtacatctacacattcacctatactagtttaatgtgaatatggagcttgaaaaaataaatctttactttagaataatgaagccgcaaatttcataggcttcacattctatttgagtttctggataataaaattactttcttatacaatatttttactcataataatattgttggactaagcacgcatcttctattgagtggaagggcgggttaatcagtagagcaaaccaaaactccttttgttttttaatgagattgttcctgattctgaaagctaccaattgtaggagggaaga

SEQ ID NO: 81116 - DNA, 679 bp, Citrus sinensis
  Intron number 1 from transcript orange1.1g032352m (locus o range1.1g028705m.g) derived from phytozome v7.0 (chr-ID sc affold00006; pos 1317527 to 1318205)
ccgttcgtacgccgcttgcccgagttcaagttctggtaggtttggttagtttttgtgtttttttaccccctctgtttttgtttttgatcatatcaagtaatggaatgataaaattcggcagttttacttgatcatcaagcgaagttatgcattgggattgattgatttgtgactctagataacatttaactaatggggccattttgtctgtgatcttaaagttaactttacaaactgggctataaagtttctcttcctaaggaatgaattatatctgaaatgcaaatcaaacaggccccaacgttgttatcctcaatttttttattcgtggttattatgttctcacaattgtttgctatctgatagggaaaataagttaacatttatttgttacgtaagagaaaaggtttacagctgaccaattcatgaggccagtaactgaagagactgtggcatctgttgtaaaattatctaaacttcaagaaatgtagaatcttgatgcgcttttcatatttcgtgtggtcctgattccctagtatatatgtcagtctgtttcacagtcaatgtatgcatgaactcttaatgattgattggaaatatgtgtttttatatggtctcttccttttctatatacaattttgtctgtctgttttttaacagcctgaccagaacaatacgt

SEQ ID NO: 81117 - DNA, 1033 bp, Citrus sinensis
  Intron number 1 from transcript orange1.1g020916m (locus o range1.1g020916m.g) derived from phytozome v7.0 (chr-ID sc affold00006; pos 2842566 to 2843598)
ggttccccagttgcctttacaaagatttccttgaggtaatcaatatgcaccattcttatttctctgtgtgtatgtatatatttaattgtttacccttaatttccttttgcgtcttttgttatctgtacaattaaatgctgtttttctttttaagttcataacaccatgtgtctttattttgagaattgctctttgcatgacttgaaatcacaatttttgtttttaatttttttatggcataattgactaccatgactagctaacagcaccagttaggtagagcttgcacaattgctcagaccgagttaaatcgataattgaagcttttgtttatctaagctaggttatcattgtttttgtaaacatctcgttcatcttttgttttgttcccttcaagcccacccattaggcgcattacttgatggtgcatatatgagcatggcttcaacaggatgtacaagcgaaatagcacatatttacaaaccaatttgagtcgtatttcttggttacgattctgataagatcaaagtacgtacatcaagaagaaagtaattgagatgtgaaagggcagtgcaataagttactcaactacagtggcccttgatgttggaagcttagagatgggtgaaaaagattagccattctaagcagttcgtcggtcaatttagtgtttcgtatttttgtaattctagaatcgcttccgcaactgggtgaggaccggtagtgtggtgataacaacaataaatgattttagctcaactactaggcaccccacaactagtgcggaacatgatcctcttttgatatgagtattattgagtttttaataattttatcatgtgtcttttagtagtaagatttaacttcttttatttttttatttattaataaccaatcaataattaatttatttactcaaaatatgatcaaatcataaaagaatcttgatcctagtcataactataatgtagttcaacgatacgccagggagcaatgaccattattaatgtgttggagattgcaatgacaggtg

SEQ ID NO: 81118 - DNA, 663 bp, Citrus sinensis
  Intron number 2 from transcript orange1.1g030111m (locus o range1.1g030095m.g) derived from phytozome v7.0 (chr-ID sc affold00184; pos 250720 to 251382)
gaagcaaagtgctggagaattgcgtcttcatagaggttccgtcatacagcctccatctgccagattgtagattggttttcgcttcattaacacctttaattcatctttttcttttttaatattactacctttcacatcaattccagacaaactctgccttgcaatgatgggcagaaaaaatttggttattttcattcattatgtatggtttatatgggtacctcgcatatatacatggaagaaaaatgaaaatgtttttagtttcttcacatgcttcctcacatccaagtaatttattcagaaaataatagaaatactttaattctgctggctgccccatgaacggtgataaactattattcttagtcattgttgtttctcattaatatagtttgtcatgtgtctcatgacctatttttagccgttgtttgaaaatggtctgtactctgtatagttttcttccaattcttgaaaccttattaccttggacatatacaacttggcagtgttcctgcttattaacttaatttcatctgttcatatgaaatttactctggattaaatttgattcctccagtaaagtaacacttgagttgcagttcaaattttcatttttctcatcttgcagacatcagtgaactgaacctacccaaaacttgcagc

SEQ ID NO: 81119 - DNA, 639 bp, Citrus sinensis
  Intron number 3 from transcript orange1.1g018672m (locus o range1.1g018672m.g) derived from phytozome v7.0 (chr-ID sc affold00104; pos 147455 to 148093 reverse strand)
tttggagtctttggttagattttccctcatcatctcttgccttggagagatattaaattatggtatttacggaataaccatgtgatgacactgtaacaaagtgtccaacatggcgacaatagaagattcaaagtgccacatggaagttagttttcaactggttatctacatgcacgtgactgatgggaaaagacatgctataagcaattcttcttatcatgtcaatcttgaccgttataagtatggtaattatgatcctagcgcaggatgtctatatatggaaattagttaagggtcttaaaacgcatttcagcccttaatgtcactcaccataaaaagtacacaaaagggagcattgactatatatgctggtcaatgttgtcttagctgcagcttgttgtttttcttagttatgactatactaaaaaatataatataattgcttatcaacagagcaaggacgatacttgcttgaaggtctcagatttccttattaaataatcgagttttggacctgtttgtgtcatccatgtcctcccatttctgtcatggataccgacttctgtcaagattttgtgttttgttctacattgggaagaagcttgtttttctaaatcctaaaatgtgctgttacaggtc

SEQ ID NO: 81120 - DNA, 751 bp, Citrus sinensis
  Intron number 1 from transcript orange1.1g033992m (locus o range1.1g033992m.g) derived from phytozome v7.0 (chr-ID sc affold00031; pos 244511 to 245261 reverse strand)
accgagctctccaagcccctcaccgcgtattgcaggtactttaatttggttctgtttcgtaatttaaataccagattaatttagagacgcctttttttttttcaaattattgttgttatttgttattatttacaggatgtgttcggaataggaaattgatttatgagataattgttagagaaccacaaatagaaatagaaattacttgagagcgtttggacttggggaatttgaatagaaaattacaaatagaaataggaagtactcttctgaaagagaaaaaaaaaaaaaaaagttaaacgctagagctctttctgctccgaagtgctttctatataaaatatacatatatagtagaaaattaaatgttatcaacttacctactaggactaacttacatacccagatttttaatcctcactaatattcgaggcatgaaaatacgcacttgtggggggtgcttgtgataacttacctactaagatcaacttatatcaatacttatggagttcgactcagatttttaaccatcactaatattcgagagatgaaaatactccacattgcgcttgtggggttacttgtgggggttcgctgccctctaagtaataatcttatttgtaaatatcagttctaatctcatacaatatgagttgtagtttaagtaatagtctcgtgtaattaaaaaaaaaaataacttgtgatgtcgaggttttgatcatttgggtttgtttgattgttttgagtgtag

SEQ ID NO: 81121 - DNA, 566 bp, Citrus sinensis
  Intron number 5 from transcript orange1.1g029848m (locus o range1.1g028220m.g) derived from phytozome v7.0 (chr-ID sc affold00009; pos 2021709 to 2022274)
aagcatatagagagatacgtgcaaattctgctgctgtaagtaatgctatactctctgaggctcatcatgttgaatggatgttatcaatttgttgtcaattttttatgtttctgattctctacatcctactttctgtgctatatgatattagagtagagcaaattgttaagggaaatcaagcctaagggaaggatctatatagtgtaaacaatcaattttaatatcttagttgctgataggccattttcttcaaacttttattagttacttttttctgttagttttttctttatcacacttcgtgctaaacaagtaaatatgtacatgcactgctgcttagattgatattcaaaatcttatgctgaaaccaaagtttaaatgctaattaataattattggagtattcctttagaattcagaaaccatgtaatttaaagtctctattgcaaggttaggaatatattgtgttcacgttcttgttctattggtttttgccactggttattattaatcaaaccaatttgtttcaaatgcaggaagcaaagcgtcttgctcaatcacaaagt

SEQ ID NO: 81122 - DNA, 561 bp, Citrus sinensis
  Intron number 2 from transcript orange1.1g026190m (locus o range1.1g024190m.g) derived from phytozome v7.0 (chr-ID sc affold00077; pos 452936 to 453496)
gctcctcggaagcgttgattttgacaacattggaggtattaatgttcttttggttatgttttgtatccttttttgttagaatttgtttttgttttttaatttcttttgatatatatatatatatattttcattttcatgttgactgtctataacactaatggtatctatccaggggtgctaaaagatgtgaaagttcaaggctttctttatactagataatattaatctctttggtttgtttgctgacaataaatcttaatcctttgagcaattgaggactgtcctaacctttgttcaataagttcattgcttcattttaggtcacattagaagacatgtcattagatggggggatatgtgcatctcttgcgttttttctgttctgtaatcaatctcatttgtatgaattatatccattgaacttaacttgttctattgctttctctctaagaaactaaagcttaaccaacctcactgctatcagcccatttaatgtgcttttggttttcccttgacttgatgcagaaactcttgaacctgaagtgaggatccttagcctc

SEQ ID NO: 81123 - DNA, 625 bp, Citrus sinensis
  Intron number 1 from transcript orange1.1g015973m (locus o range1.1g010607m.g) derived from phytozome v7.0 (chr-ID sc affold00193; pos 101884 to 102508 reverse strand)
ttgtgcctccttctcttgttatcaccgccgactcggtaaaattctttctagtcctcctcctcttaaaacatggagtaaactgttagctggatactcggtcatgatttcgattctttgaccatgtgtattagttagtgagtgctgtggtgtatatggcattagggtatgcttgaaattgaagtgctgtggcttttaagtgacaattgctatgaaatggaagtgcttggttaactttagctgctaagtaaaaggaggtgtttactgaacattttggcaattgtgcttcaaaactaagcaaattaaagcatgatttggtacattagcaatttgagaaaaagcaaattacattttttgcaattaatgaaacctgtgatgcttcaactgattttgcggtagattataacttactggagcttaagatttgtgttttcatatagtgcacagagcaaaacagcttatgaatcagtttatcatctagttatgatggctgtagttctctagttatgggatcttttcttagttttctgctttagtgattcttcaaagttattctgctgtctatgcataaagtttgactttgtggggtgataatttctctctctccatggcattttggatgatagaa

SEQ ID NO: 81124 - DNA, 796 bp, Citrus sinensis
  Intron number 2 from transcript orange1.1g047369m (locus o range1.1g047369m.g) derived from phytozome v7.0 (chr-ID sc affold00096; pos 271738 to 272533)
ttccctggtgtaagtctttgattaaaaacgcttttttaaaatcagatctgcattttaatttaatttattgtgaatatatttatgaaattatatgtatttgctatatgataatagtttctaaagttgcaatttttttttttttttatgggatcttgttgaaagctagttagtgcaaatttataaaatttttgtgattattaaaacttttgcgaatggtaatatctgcaatgtgacttttcaagatgaaagtttgaagatcaagtgcattggcacttaaatgggattctgaataggcttcttttttattaattgaaatgttcaactttgagagtcttattgtttatatcaataatgtgtaagtggatgagagtgttgctagagagaggagatcttaaagtagtcatgaatttcattgtaaattcagctgtggccttttaaatttaatctagaaaatagattagttattgggtgggcttgtttgtttttgcatagcctaaaatcataattttggagtagccttctgttcatttaccggggtttatcgttttctaaactaaatcctgttatgactcagtatatgttcttttcaaggttctttcacattctttgatttactgtcatatttggttttcagatgaatatgcatattttaggttactttgtacttcctttttgattgttactcaatttgaaatggtgaatctcagttgtcttgcttgattttgaatcgcccacttttagtagcttatcttagatgttatttaattcttatcctttttaaaaggcagatcgaaaa

SEQ ID NO: 81125 - DNA, 586 bp, Citrus sinensis
  Intron number 1 from transcript orange1.1g017834m (locus o range1.1g017195m.g) derived from phytozome v7.0 (chr-ID sc affold00131; pos 131429 to 132014 reverse strand)
tgttccctgcagtcactcctcataaggtattatgtcaattatacttgcattaggcttaatgatcgattatgagaaactgtggaatttgattgatgattgatgatgagatgagtaagtgttagtattggtatgtttgctttcttatgttaggggtaatacgtttgctcttcttaatcaaccacaactatgttgtcaagattagtgttaggatacttttgatgctattgcttctctggcatgtcaaattgtcgatgactaaaaaacttttgacgctttctgcaatgaagaaaaacattgaaactatgattatattgaatgttttgatatctttcaatctcaggattgttcttgcaaggagaaaaccacatgaaacacaatgatacatttttatcttatatttcttgttttataatgatgctgctcagataagaaaatgttttgagctgcagagttttatttgtagaacttgtgcttctgttgcgaccgtgctcattagaatctgctcctttgttacctctctgtttcttgatttcttgaggtgcccataacaggtgcaagcattgctattactactgggagagtgtga

SEQ ID NO: 81126 - DNA, 777 bp, Citrus sinensis
  Intron number 3 from transcript orange1.1g022104m (locus o range1.1g022104m.g) derived from phytozome v7.0 (chr-ID sc affold01063; pos 8096 to 8872)
cagctccttgtcaagtatgctcctgtttctttgttatcagcatcagaaatttttatgagtagtgtgaacagggaagcaaactaagcaattgttgattgtaattaaagcagtttgtaatcactaactgaatgtggttttgattatgagtagtgctagccatcctaaaatttgatcccaaatattgtgccatcttattatttcacttggaacttgtgaaaattgtcaatcacttgatgaatgacacatcacattgcacaacagttggatgaaatttgagataaaattttgggatgtctattattgttattctttgattatttcaaattccggcaatggttgggatagttgtggtggaagtcatttcttgcattttctgcaattagaaagccttatttttatattacgttgaaaatatttcagattatacagtttgaaataggagagatggaggacctttaaatatttcttctataaaattctcaaattttgtttcgtctatatatctcttttcccaattctagtaattgacaatgatcaagagtcaataaacttgattgactaagcagagggtgctttgccacctaaatttgaaagccagtacttttaagtgttaaaatacttatatggggacaattggcaatttgttgaaggctgctggactctcaccttcataattcaactattttttgaatctatatatagtagaataactaaaattatgccattacttacattttccttttcttcaatgccatgttaggtccgttgattcaccgg

SEQ ID NO: 81127 - DNA, 653 bp, Citrus sinensis
  Intron number 1 from transcript orange1.1g037413m (locus o range1.1g037413m.g) derived from phytozome v7.0 (chr-ID sc affold00581; pos 52661 to 53313 reverse strand)
agaaaggagacgttccgacggataagttccctaaggtaagaatgtatatttaaccaccaatcacttcaatggattttacttaggagaaaattagattatgagaggtatctgatccgaatttttttattatacatttttacaaagccaacactaaaatcatatatattaacactaaatcttttgttttggtttaccaactatattcctatttatattttgattcaatactcatatgagatttgtgctgatcgttttataataatattgtaattggttattttcgatagtaatatatgtatttgttactaaatctcaaccattaaaattagaactcaactcaggattcaaatttttattaaaaatatttttttgatggattaagaatttcacctaatctttttctctcctagtctcttctagtgttttaaatctagcgaaaaaactggtttgattgtaaataaactgaaataaattggcttgaatagtcaacatcaaaattcgaaattcaatcttaaaaaaaaataggagagtatccttatctttttttataggacataattttgtttgctgattgagtaattttaacttaatttgtcttaaatcggcttagtttgtctgcaggttctttggtacgccatcacaaactatagaac

SEQ ID NO: 81128 - DNA, 635 bp, Citrus sinensis
  Intron number 2 from transcript orange1.1g017972m (locus o range1.1g010437m.g) derived from phytozome v7.0 (chr-ID sc affold00107; pos 426443 to 427077 reverse strand)
gcggccaagtaagtaaccagaagtacctcctcaagttgtcaattttgatctgagccgttggttctgttatttcgagtgtttggagaccgttcgtttaccgtttgcttctccctcttttttccgttaatagtacgataacgatctcaaccgttgagatctggatccttagatctggatccttagatctggatcgtttattccgttatttgttattagtcggttggggttccgctgggattccttcgttggttgtattgagtgagatcaagaatcagaaaattcgtactttttttccacatttccattactaccctcacacactttccttttcttttgcttttcatgaaggttatttcagtaatttaactcgttcccgccgacggttcccctccttagtttctctgtcttcagaaaaagctttgctaacggttttactcgatagtgacccctgcctcattcttgagcagtgtacttcgtatctactcttattttcccaactcgcttcatgtcaccgacacgtgtctttcatttgactactaattaaaaaattcttcggttattaattattaagtaattgaattttgttgtttattatttttacagagctgaagtagtagccgaggccttgagtaaac

SEQ ID NO: 81129 - DNA, 431 bp, Citrus sinensis
  Intron number 1 from transcript orange1.1g017972m (locus o range1.1g010437m.g) derived from phytozome v7.0 (chr-ID sc affold00107; pos 427111 to 427541 reverse strand)
tctgtacgtaacgagcaagacgtctctgtttccaggtctcgtttaactctttctctctgtctctctgtctttatgttttcttcgtcgcttctctaagtagttctgtatcttgagaaactgaaactacaacgttttggcttcggttttgagagcaaattaagctgcattttcaatttatttaccatttttggcctcgtttttttaaattccgaattcattgacaattccacattattatgcaacttcgatttagtaaacaaacgttattttcatggtcataaatctggttctctgcttcatattaactgcatttatcagctgaaaatgaccgtaaacaaaaatgtcaattctataagtacagaaaagacagtttatttatttttttgttgttaagctttaatttatttgattaatttaatgtttacaggaag

SEQ ID NO: 81130 - DNA, 1022 bp, Citrus sinensis
  Intron number 2 from transcript orange1.1g040615m (locus o range1.1g040615m.g) derived from phytozome v7.0 (chr-ID sc affold00482; pos 56510 to 57531)
ggaatattactaatcaagtggaggtatcgatctgcttaatttcttaagtcttattgagtggtctctctctctctctatatatatagatatatatgagtaattaaaccacgtaattttatatagcattgaaaactcatctatttatgaaactacatagtttagtaatgtgtctactaaaaataaaagaacgcacgcacctaaatttttgtattacaaaaatttaattttgaatgtttaatcctagattctgagtaaagtaatgttaatttaaaagggtagtataataattaggccggcaaattctgtttggcgccggcgacatcaagttttatccttttagtcttgtttgagcttaatgtagctccactgcagattaattaatttttttaaccaaaatagtattcagtttgacaagttgcctataaaatacattaacatgcccagataatcggcataaaagaacacattgaatgtatgcaatccatttttaacttagtgtagaagtagaaaatatactcaattttattacaatagccgcccacccattcatatcacgaatcttttagataaacttcttaaagaattagaaatcttagtatattgccatatgtgatttgatcgaaattttgatttgatttagtagatatatgaaactatcatattagacaatcgaattgggatgccctgcacatggcatatctcttgggaggtttgaagctcagactgatggatgtattcaatactcttccgcgaatttttcaggtgtgattaaaaattcacaataagtctctaaaatgaaaattaaaaaaaaaaaaaaacacacacacacacactcacaaattgaatcagattactagtttttgcatactgctaaaagaattagaatgagtttacattgttcataatcagataatcagcttacagtgttataaaactataatattattcgatttcttctatatgtaactctctgcaatgattttgcagaacattttgttgtgtgcccggggaagtctcaagaa

SEQ ID NO: 81131 - DNA, 715 bp, Citrus sinensis
  Intron number 1 from transcript orange1.1g000184m (locus o range1.1g000133m.g) derived from phytozome v7.0 (chr-ID sc affold00487; pos 75314 to 76028)
aagggtcttcttcatttctctcactttcccttaaggtgagctcaatcttgtcagatttttagctcttttgccgttttgcattgatgggttgttgttgtttttgccaaatctgaggtcaacatttaatttttctttgtcgggttgttttggaatctagtgttagtaggtgcttgcattggggttttgttcagtgtgattggattttgaagtcagtgatcagtgatttgaggtttcagattttcgttcatttgggtttgatctactggtttgtgtcctcattggtataattcggttgaatctgactagtttcgattgctttctcttgatttggttctgtttggctacggggaaagttgaggaaaggggagtaaattattttctggatttgtcattcaatgtttgttttctcatttgtactaagttggcaatgttctggttttttgttattttgttggttcattatgaagttttgttaatgtattggttaattggtctgtattgcggtaacccaaagtaattgagctttatacgtcttgatttgattatcactgtatcattgattagcagttatttataggaattggatttggtttttcttgttttggagtgggcttaacttcatttaattagatttatttttgtttgatctgcatttcgggtgttcgtatcttcagcttggcttatatgttcatttttttttccaacaggaggcttg

SEQ ID NO: 81132 - DNA, 868 bp, Citrus sinensis
  Intron number 1 from transcript orange1.1g004959m (locus o range1.1g004959m.g) derived from phytozome v7.0 (chr-ID sc affold00006; pos 1967702 to 1968569 reverse strand)
gtttctaattcttcctctaattcccctatcgccaggtttctttttaatttctcttctctttccttccctgttgtttcaattcgataaattaattgcgtcaatttgattttgcactgtacattcataaaataaatttcttacttatggaatggggtattattacgcaagataattaggtgttttatgatttcgaaattgaagagcagatgcgtgcggttatttctttttcatttcatttctatctcctggcacctgtgtaattgataggattctagggttttgattagagaattaagagagaatagatgaagaatttaaagagaagggagaagaattaataggaattagaattaattttattacttgcctcccaaaacataatagaaaccacttatttgtagtagttcaagataatctaattgcaatttaataaggacttaaattgaaataagaaaacctaataggaattagaattaagagagaatagatgaagaatttaaagagaagggagaagaattaataggaattagaattaattttattacttgcctcccaaaacataatagaaaccacttatttatagtagttcaagataatctaattgcaatttaataaggacttaaattgaaataagaaaacctaatactaataggaaagaaattaaaacaagcaattaaaataaaataaactattagagtcctaacagtaatatttcaaaaatcttaagcattccaactattttagattatttgaattttcattcgtcgttcctacttcaataaatatttttctggcatgttgttgatcatatgcattttttgcattattgtcctgtttcagcgtgttttctcgccgtgttgggaggaag

SEQ ID NO: 81133 - DNA, 626 bp, Citrus sinensis
  Intron number 2 from transcript orange1.1g020020m (locus o range1.1g012942m.g) derived from phytozome v7.0 (chr-ID sc affold00673; pos 29391 to 30016 reverse strand)
atcttacagggcattgaaagccgtaaactttgttaatatttgacagggaaacctaaagataaaccccattaaaactctttttagttttctagtgctgttatttttttgttgagttattgaacatgtaaatttgctttttgtttatttttctttttgtatgtttgttttacctgaacatcatttcaagttattttgcacttatcagcttgttacttggtaattattgaattggcattgcgttcttattgtctctatctaatagaagaatgatgcatttacttgtatttcatttcgggcattttgttggttggacagccgattgtaatataatttgttgttcatcgagaagttctactgctgaacttcttataccttgtttgtgaattttttgaactacgacaaccatacttatgattgtttatctatagaaagtaattaattttatgcaatgtgtgaatatctttatgttattgtagcattttttttttaaattaagaatgcaattgattgccatttttctctggatcctttcacttccttttgcattctctaaatatcagctggaagcagaaacttcattattccattgtatttagagcaggtgaaagttcttgctctgactgatc

SEQ ID NO: 81134 - DNA, 1009 bp, Citrus sinensis
  Intron number 1 from transcript orange1.1g020020m (locus o range1.1g012942m.g) derived from phytozome v7.0 (chr-ID sc affold00673; pos 30405 to 31413 reverse strand)
cttctaagcttgttgagagagctcattgtaacggggtgagtctgatttctatattgtgtttgtttttagttttatttttttatcatttttaatctgaaaaaaaagcagtccgaatgatttgggttcatttttgtatgaagaatttcgtagttcttgtttctgtaaatgtattattgtttttctctgtctttttgagccctcatttatatattatttctggagttgcgctgttattggttgtgaacttgagtctcttatactcttttggattattattaatcgcaaaagtctattttttttttttttgccctttgagaaaagtctctttgttgttaagttgatatataattgccaatgctttacctcttaattaatttatcagttgatgcctttagtcctgaccgtcttctgctgtgctatcagttatgcatctttaagatgttaaatgtgtttcacacatttttcttattggggataacatttccctgtttgattaacaacggcaacctttgcataatttgatgatgatgaggagcctcactgtagatttggagtgaggatgtagtcaatgataatcacaatgatgctggtaatggatggagaataatttcatttaagtcatggcagaattctatgcaaaacctttttttctctaagttacaagcacacaacactggcaaatgaaagtaacttacagaaacttgattgaaagaagtgaaaacaactgagttagaagatcttctctcaggagatgcagataaaaaggatgaagatgaacaataaaatttcaatttaaatacagcatctatagactcaagcttctttctacttagaagctgtcaccttaagagtgctcctttgtattggaaactctttgaatgaagtagtttatttgtagtcactttcaccttgatgttttatttgctataacattttgaatggtgataacatttctgttctagttttattcataggttgaggaggctttgacaggagaacaaccatcttc

SEQ ID NO: 81135 - DNA, 1007 bp, Citrus sinensis
  Intron number 1 from transcript orange1.1g020215m (locus o range1.1g020215m.g) derived from phytozome v7.0 (chr-ID sc affold00403; pos 133369 to 134375)
gcctccttcacttgttcaagggtatccgctctttaccattttctttttcttttcttttttgtttttgcgtttgttggtttcatctttcatgtatgttttaaaaccttttctagcgtcactttaaaaaaaaaaattggaatgttagtgggaaaataatataatggcaacattttcaatttgatgcgaccgtgtgggcaaaatccaaatttcgagttgaaaacgataaagaaactttttttatatgttgttttaaatgttattttcatttgtttaattgttatatactttattttatttagagttgtttctttgtttatgtttttgttttgcttgtacttaactgaatttgttggtgcaaactgagctactggtattattttttaaaattaaaatataaaattgagttaaatgctgttttataattcatttttatgttggaaatgttattatggattgtagttttgtagaattttatgtagtttaggttaggaatttgatgtgaagttgaaaatttcacatccaaatgaatgatgatattgtgagacattagaaattatgttattgattatacaaaatgattatattcttggaatgaattgcgtatgattccacacagatgtagtcattcatctattattttggtacaagaatgtttgtgggtgcaaaagtaatttgtgatttgtataatccgcataagtttattttatatttctaattggcaaatgaaaaaaatcgcagtctttcgttttgttcaatttatgttttgtattcatattgcaacatgaattgtattctactagtccatttatacctttgataaaacaataacatgtattgttctgtacgctcatgtctatgtaaatggtgatacttgtagtttatttgctacttacattttctctgacttttttctgaagtgggtatttcatgattttgtggtaattaagattggaaatgtttcccatgttttaggggcagagtggcctttgtgttgtgccaggaccaag

SEQ ID NO: 81136 - DNA, 683 bp, Citrus sinensis
  Intron number 1 from transcript orange1.1g045404m (locus o range1.1g045404m.g) derived from phytozome v7.0 (chr-ID sc affold00603; pos 49831 to 50513 reverse strand)
aaatctaaacttgtttcaaacaacaacaaggttactaattcaaacaagactttttcctgaatttatttttcttttctattttggtcaatggaacatatgctgacttctgtggaagcactactggcttatagaaagactgcattactttatttgatttcaatttgttaaattgttgtcttaaatcttcgccaactgctctgcaaaaagttaaattgtttccttccaatcatcatttcagttgtttgtaaattcaattttgattttatgaaagttaattgtaaatgcacttatttgagttgaatggaaatagttttaaaaccttgatagctaatatatgcatttgttttgccgtgagagtagatggaaaattcttccgcaattcaatttgtgactgcctttgcattttggactacattacatattgggacaactttattacaattttaatgttttctgcttcttatagttgtgaaaatatgcaaatgaatctgcttcttgtagttgtgaaaatatgcaaatgaaactgtccatagatacatcttgtttccatcagtcaaaaaatagttcttcaaagggctatatttatacattgtttgttttgattttatatcttaaatatgtgttcatgaatcttagttgtggtttcagataaaggagtcagttgagcaagtgaagagcagggc

SEQ ID NO: 81137 - DNA, 626 bp, Citrus sinensis
  Intron number 2 from transcript orange1.1g026946m (locus o range1.1g020781m.g) derived from phytozome v7.0 (chr-ID sc affold00482; pos 90736 to 91361)
ttaagacattacagtagcttcttgattttctttcttctttctgttgagtttctttttagcactgcattagatattgattaaacatttggattctgatcaagatttatgagcttgttgtgaatgcgcattgtccagttgtttcttgataaatcaggggaagaaccaaattatttaatattaaaaaaataagacacctcacacttgtccaacatttagaagtaaagacttgaacacgtgattcatctttaggccatacagaaagtttcttaatggaaaaaaaaaaaaatgaagtaatacttctattaaaaaatcaaaagaagtttttggtaagattcaacaagtttaacctgcttgataacaaataaaaaaaaaattaacaaaacacacacacacgcacacatattgtagtgatcgagtttagaatcttagactttgtttattttttcagaccttaataatatccagatcttaaattagaacatttctctctctctatatggattagtattatgtagtaacatattacttgttgacacaattaaactcctgatattctaaatttctaatcgcaatttttccttttgttgtcagaaaaacaagaacaaaaaaattgctaatcagtccat

SEQ ID NO: 81138 - DNA, 929 bp, Citrus sinensis
  Intron number 1 from transcript orange1.1g002683m (locus o range1.1g002292m.g) derived from phytozome v7.0 (chr-ID sc affold00013; pos 112563 to 113491)
ccaccttctcttttttcatttgccttcttctattggtaagtatttgtatcagccaattcgattactgtcaattacgcttcgttcatatctcaatttcgttactattacaatctggcatcgttttggtttgcgaaatgtgctcgccgagtattttattattcagaatcgaagaactaaatgtgtttaagcttgtatattgaaaccaacagactgaaatgtctctgttgattttttttttttcattttatgggatagattttgaaatataattgtcctagaccagtttaaggttcatgacatatgggtttttgattccatatttacgtatttctctaattaatgccgaatttctctaatttggcttctactttttattgaaaacttgaatttcagcatttgttttggatttttttttttcattagaaaatcagaacttgtttttgtttgagaatattatgattgcctagcatatgtctagtaaaaaaaaaagcttgtttgtgaattaatattccattttttaattgtttagttgaaaatgaaggtagattaaatgagtacttgctaacagttcatgtacatgacaaagttcaaattagaataaaacaagactagtttgagatacagagcatatctaaaagtgaggatagagttatttctgttctaggtgtccgcatctttttaaatcaaagatcatttcataaatcttgatgttgtggaaatgaaattttacagatgtttttcctgaacttcttgaattgaacttttatctttgttatatgaacaaatatttaacttctcttggcatattcacaagattcttaaagataaacggttttgaattgttttcctttgtccgaatcttttttccgagaaccttatagaactgattctggagttatgtttttattagttccaagcatccagctcat

SEQ ID NO: 81139 - DNA, 997 bp, Citrus sinensis
  Intron number 2 from transcript orange1.1g043241m (locus o range1.1g043241m.g) derived from phytozome v7.0 (chr-ID sc affold00088; pos 62567 to 63563 reverse strand)
aagatctctcaaagcaactcgaggaattcgccgctagagactgggaaaagttccatagtcctagaaacttactcttgctatggtatgctttttaattaaaaaaagctctttgttattattattaattttttcttaatcctcgtatctaatccaggatcctgttgcatctgaaacaatgctaaaacattttccagttccacgtgtacttggaagattgttacatatgaatagatacgatgttccttcgaaagtgtcgttgttttgtatttgactatggtcttatttagagctgtaaggctcttcccaagccaaaggactctgctgtcttgtgaatatcaagtgtcactatctggcatattggtacaacatgaaggcttctgttatttatcataagaataggtaaatatcaaagtgactgtgtagctaatttcttgtctatcaatttaaaatgctcccttatgggcttctacgagattaatatatgatggttgaacacaaaccaatggtttaggagcagaatcataaggcttctgtcggttcagaatcgacagaataatcggagaattcaacatgggtgctaatattgaagttgatgtttcattttgtccatgatttgttacattaggagcatgctgggcaaatgaatggctcataagcacacagcatatgcttatgcaagtgtagctaaatcaggcatctttaaaatgtcaattgtacggtctgagtgccaaacaaaaccagaatctctgaggaagttttcacttgtggaagatttcagggaatttgtgcttggggaatttgcaacccacctttttcgttttaaaaattttggaagatgcttttgtcatttctcagtaagatcaaacttttttgccgcatataaaaaatgatgatgaaaataataatgcaaagccacggttgatatgcagtctcattctaactttaaatctcctgatgtgcaggttggggaagtgggagagctatcagaaatattcca

SEQ ID NO: 81140 - DNA, 728 bp, Citrus sinensis
  Intron number 1 from transcript orange1.1g001073m (locus o range1.1g001073m.g) derived from phytozome v7.0 (chr-ID sc affold00031; pos 929081 to 929808)
acgaggaccatccagagattacagtcactcgacaggttggttgtgtatatggtgattccttgcaaaattatacttactaaagtttttattgtttcaaatatccatttgtgatatatccaaaaaaaagaaatccatttttgatgtttcataaattgtttctctggcatttctgttccataaataatagtttttttttttttaattttctgagaatagaagctatttgattaggtgacacgaaagtgtagtcattacattaaagaagtttgaatcacaccaattactaccttcaaagtatatgagtatttttgtcaaaatgtttgagcttgttgacataaatgtatgacgtggctttgctttattggtagattattaatttggagtttaagcatatgttgtggtgtttgcaaagagtagaataagattggacttcatatgttaccagtatttcatcattaacttaattttttttgttgctattccagggtagatattttagcccatgccattacactaactagttttgttgtgcttggatgtcacatggaatcattgtgttatatcctgagaaaaaacgtgggagctgtatcattttagcactgttataaagccatgaatgagaaattgcagttgccatggtgcttcagtgaagatttttctatttatgttgagatgtatcttcttactctgcagattgtggttggtggaaggaacaaatatctgatcaa

SEQ ID NO: 81141 - DNA, 469 bp, Citrus sinensis
  Intron number 2 from transcript orange1.1g003595m (locus o range1.1g001555m.g) derived from phytozome v7.0 (chr-ID sc affold00006; pos 2828376 to 2828844 reverse strand)
tggatctttttgttgggctgccaaaggtaatttatcaaatcaaactgataagtatagatgggattataaatttccatttaactgtgataaaattaggaagaagtatggatggattgtgtgattttcaattaggttagctaatgcattattcaaaacaacaagctttgtgttgtttcacggtgaataccatcaaacataatgctacatatgtggaatattattttaaattgatgatatatcagtctatgagtgataaaatatgtgtgtgaatataccatccaaaagttgggtagcaacagctagatttgagaattgagatgaattactttatttgaaaacctgaagatataagcatttgtgaagttgccatactattttgcctgcttcagtactttggatatatacatcccttttaggtctttttattagtttattttctgagagctttttggccaacaggagtgtttcc

SEQ ID NO: 81142 - DNA, 367 bp, Citrus sinensis
  Intron number 3 from transcript orange1.1g039467m (locus o range1.1g039467m.g) derived from phytozome v7.0 (chr-ID sc affold01647; pos 8719 to 9085 reverse strand)
gatactatacaaagtcatcctgcacaggtaatggttttgttctagtactgtttcattcgattgattgcactcttttttcaggaggtgattttacttgattgtttaatgaatgatgttctgtttggttactgcttttgattttctttgctctctggctgctttttacacgtgagattgcttttgctgtcattctgaaagctgccctccaaacttttgcttttgctagcagcgtattcttaatctatcttgtgattgtgtactaaagctacataaatcaacatccccctgcttgtttgagcactgattagttatgctattaattgccattacaggctgcccttggtggagttgttggaaatttacagag

SEQ ID NO: 81143 - DNA, 919 bp, Citrus sinensis
  Intron number 1 from transcript orange1.1g045659m (locus o range1.1g045659m.g) derived from phytozome v7.0 (chr-ID sc affold00408; pos 99440 to 100358)
cctccgtcaccaacgtcgtcggctttagttttcttgtaagccttaattttctcttctctaatttcttcttctttttttcccccaatacgctagagttttgaattcatgagagagttagcgttactactacttagtgatattatatatgacctacgtattgtattttgtggtattttcttagacattgttgttgtacaaatgacattaggagcggagcagccaagaatcgtcaatctagggggtcattgtgttataaataagaagtcattggggataaagtaaacaattcgcaattttgaaggttcagtttctgaaaatatagcgaccattttgggttaagaacaatatactactactttcgtacataagacaaaaatgacaggaagtttgaaatgatttataagccgtgcgttttattttgtctaagttatttgtatttttatttgaaaagaaaaagtgaaatgagatggtcagttacaacgttattgtcatctttttgttaataaaagaaaacaaaacattttagtcatttttgtcacattgattttatgtcaatgtagcatgactgttacttactaactaaattattgccacaacaactgggtgagataaaaagttcaataaaatctaatgtcaaagttgaatttacaagaagatatattttattatattcattctcaatcacttgttttactagaagagactagaagggagaaaaaaaaatccctacgagagaatcgttgtcatttttacaagtccatatttcttctaactatttcataaatttgcctctagagatgacctgatacctctaatgaattttaatcttctccaatgctttgatattgttaataacttggttacattttgtacgcgggaatcagtcaggactggccggtggattggagacactgtgtgg

SEQ ID NO: 81144 - DNA, 501 bp, Citrus sinensis
  Intron number 1 from transcript orange1.1g007033m (locus o range1.1g007033m.g) derived from phytozome v7.0 (chr-ID sc affold00068; pos 543582 to 544082 reverse strand)
ttcttttgtcttttaattcctcgaaaaggtatgtaaatctaatgatctttaatttcaagattttgttttgattgcttttggttagagacaggtaattaaatgtttaatcggggaacgatcgttacaatcgaatcaaaaaattgtcaaatctgatttgttgatcgactgtgctgggatttttttttttttttggttttttatattgaaatcgtagaaatttgtaagtttcttctaacctagacctgtcaaatggtatttttggtgttagagcctgatttttgctgcatctgattggttatttgttgtttaggtttcatatttttgctgtatctgattaggtattgaagctttggttgttgcggcatctggttgtgcttttggtgtgaaattttatatttttgctgcaattgattgtggctttggtgttaaatttgatgtccttttcttttctttttgttttttccccaccttctctttgcaggtattttgtgaaactccata

SEQ ID NO: 81145 - DNA, 574 bp, Citrus sinensis
  Intron number 1 from transcript orange1.1g031546m (locus o range1.1g031546m.g) derived from phytozome v7.0 (chr-ID sc affold00193; pos 148413 to 148986 reverse strand)
cttgatatttcatcatcaaccccaactttgggtgagtctctttgctcaatttgtttctgttcttttctgggtttgttttaaatgctcatttgttattattattattattattttttttcattcatttgctcggtgaaaagttgtgtttgttgttaattgatagatctcttatttcaatatttgatagaaatttggcatcttgatttggtatcatgttaaagatgtcagtttttattccatgttttgtgatgatgatgatctttttttgtatttttcacgagggcatttccaattctttcccatattttatattcttcttagaaacgttggatcatgattatgattttattgtgaaagtgattatttttatttcttttattagctgcagtgttgttttgatgcctcggattttatgatcatgggttggatcatttggatttctgataagatgatttcccagctggggttctgggaattttatgagctttcttttatttcttcaaaggtagcttatattgtttgatgttggtttgttgcaggttggaattgctatcttcttttggctctttttcag

SEQ ID NO: 81146 - DNA, 446 bp, Citrus sinensis
  Intron number 1 from transcript orange1.1g021640m (locus o range1.1g021656m.g) derived from phytozome v7.0 (chr-ID sc affold00091; pos 321740 to 322185 reverse strand)
aaaaataaaaaaaatcgaagcatttcttcttaaaggtacgtgccgatttcgtgtcttttgattcatttaatctctcgttcgattgtttatatcacaatacgattccataaaattttgtcatattttcactttcaataataatgacgtcatcgtttccggcttttctgttccgtttggtcgctgagaaatagcggaaattaaaacgaaatttagaaattattttttcgtaccggataaattcagtttttagctgatcatttaaatgaagaagaaaagaacaaattagaattgaaaattttcgtaaattttacgtttctgttagattgaatgatagctgaagcatagctttgattcttgactttgaattgtatcattgtttttgctttttattttgtaaattgatgttagcagttgctgtttaacagttgggtttcttgttgacgacc

SEQ ID NO: 81147 - DNA, 715 bp, Citrus sinensis
  Intron number 3 from transcript orange1.1g024734m (locus o range1.1g024734m.g) derived from phytozome v7.0 (chr-ID sc affold03295; pos 844 to 1558 reverse strand)
ccgggttttaccttcattcttgccatcattttcaggtaatgctcccccctttgctatgatcattttgactttcttttgattttgttcattggagtccgtttgggaagtttatgttactgatgctaattaattgcaaccaataatataatcagttctctctcttcatttgtatgagtgtctgattcagtacttcaattgcataattaagttttgtgagtcccaattacaggcttgcaattacatagtagacatactgctgaaatttgctaagagtgtattccagttacaaaataatgattatccagtctgattcgtggattagagtagtaagctatttgtaattaacccaccatgcagggacagataggtcataatgttactcctaatttagtggattcttttgttgcccaaaatcacatcttttggcgttttctcatttgagctcctctgatagtcatatcatctgaagagttcttcagcgactggatggttgagctccttttagtttcctttctctgtcagacttttctatctcaaaaagttttaactcatgttttaattaatgaatgtgctaagcatatggtagaaaactttggaagagtaacagactcctaaattgcttagagtgatatttttattgctaccgatggatataaaatgattcaacttcgtgatttcagggtggaaaaactagattggagaagctccagtagcc

SEQ ID NO: 81148 - DNA, 339 bp, Citrus sinensis
  Intron number 1 from transcript orange1.1g046537m (locus o range1.1g046537m.g) derived from phytozome v7.0 (chr-ID sc affold00043; pos 306702 to 307040 reverse strand)
atcaaacgtttgacagtatcaaatcgacgatcgtactatgtttttttaactcaaaattaatttaaattcttagccccagcacttagccagagttttcaaggaactttaattagctgacaatctgtatacgaatcatgaagtaggggtctaacaaattaatttgggtttttcgctcctcttatcttttttttttttaaattcaactctcagcgttttttctttttctaattagataaaaaattaatttttcctgatgtatatgtttaattgtttttttttttttaatttatttttttgcaagcaggaaaatattgctgccacggacacaattaaagttac

SEQ ID NO: 81149 - DNA, 563 bp, Citrus sinensis
  Intron number 1 from transcript orange1.1g034321m (locus o range1.1g032720m.g) derived from phytozome v7.0 (chr-ID sc affold00037; pos 49331 to 49893)
gcgtcgccgccgatttcaactgcaactcgtcaatcgtaagtttgcattttaatgtatttgttcttccgtttgcactttgcatatcagatcttcacacgcacacttaatcttacctccttagatataaagatccgaaaagaaaattattattttttttataaaaattagaaaaaaaaagtttattttaatgcattgaacatatcacaataattagctcactttcaattggaacacatcacttaatttgtaaagtgattggtcaaaattaactatatatgctagaaaagcttaatagagatatggtcattttcatattcaatccaaattatataataaacttgtgcaatcttcactgtagcaaacatcaaaaggaaaaaggggatgagttgaaactgatttgattgtttattggttgagtttgataagttgattgctgtggttttggatgaaaagcaagccaaccccttgtgatgttttacttttcgtggtgcattttaattgactttcgcttatattcgaaatttgaatcctattattttgaataggtattgtgacgaaagagg

SEQ ID NO: 81150 - DNA, 597 bp, Citrus sinensis
  Intron number 2 from transcript orange1.1g034321m (locus o range1.1g032720m.g) derived from phytozome v7.0 (chr-ID sc affold00037; pos 49949 to 50545)
aagctgaagttggatctgctgttaaagtatgctaatttttcttacttgtttctgtttctcttttatatagttagttgtaaggggaattctattcttttagtttgttgatttcagattatatttttgatgtcaataatggatttctgtagtaccttgcaaattgtatttatcagatgttgtattcgtggaggtgagcatcaacgacctatggttgtgtcttttgagattcatggtgattactggctacaagttaaccttgagaaaaaatcatttgatattctattttcaattttcagcatgtaaatctgataatcataaggtactgtactcacaccaaaaagggcattatagtgctagacccttgtctaagtgaatattatagttgtgtggatgtttggtgctgtcaaatgtagtggaatgtggaagtggtactctactgaacttcagtactaagatactcgattatctgtggcgacataatttcaagtccttatcttcagtttactttaatatctacttgtgttttcatggccttgctttgcaaattgtttggatgctgctagcctgatcccatgtctgctttatgatagagagaag

SEQ ID NO: 81151 - DNA, 470 bp, Citrus sinensis
  Intron number 1 from transcript orange1.1g008951m (locus o range1.1g008762m.g) derived from phytozome v7.0 (chr-ID sc affold00013; pos 235528 to 235997)
cagctgggacagagcctctctgctcaatctggtattgcttctttctttttcttgttttggctttttaatttctttagagtttaatcaattcttttttaagtggtctttcaaatattttgaaaatgttagttgaaaggtttttgaagcttgtttgtatttgtttgtcaactttgagatctcagtgacgcagttgttgcattttaattcaaagttttcgctctgtttttcttgtttagtgtctgcatctggttgcaaagttctaactgtgctttcattttcatctttattgttcgttgaattagtaaatatcttcatagcactgacggggatctgatgtatgcactccccaaaaaaggaaaacaaaaacgtaaaagaaatgagaatagagttgctgctgatgcatcattctatactaatacatttgatttttgcattttaattgcaggacctcaacagcaatatattgttga

SEQ ID NO: 81152 - DNA, 602 bp, Citrus sinensis
  Intron number 2 from transcript orange1.1g000815m (locus o range1.1g000815m.g) derived from phytozome v7.0 (chr-ID sc affold00018; pos 804536 to 805137)
tttacgagtctgatattcggcatccaaatttagaggtattattgtgactacttggttaatgcttcatttgtcagcttagaagatgtaaacgaaattcctcacttgttagagataattttaacaatatacttgagttgtagacaaggagctgtggatataattaggagataggtaatgcaggaagaagggaataattaagatatactttagcaacattatactgaataacctatttatacatagtttgcccattgtagtttctcgacactccatctgctcgcaatgatattttgattttgtatgaaataaacaactactggagaaaactggtcatttaagtttatcctttagcatgtttgaattcatcaagtttttggtgtatataattgttgtgcttcttgcttcccactttttcatttctactcactcggtgatttaaaagccacaacacatgaaaagtatatctttagtttgatatggatgttgaatattgtgcgcatggaaattaaatttaacccctgtctcgttagagtttttgatttgataacatgtttctttggtaagtaggtagcaaaggagcagctgaagcaggttattacaag

SEQ ID NO: 81153 - DNA, 1063 bp, Citrus sinensis
  Intron number 5 from transcript orange1.1g008457m (locus o range1.1g008457m.g) derived from phytozome v7.0 (chr-ID sc affold00013; pos 555556 to 556618 reverse strand)
gcgatttttcacctcgtgccgttaacttggtcgtttgtttttcttcctcttgcactcgcctattgttatagtttacaaatgaactcattttttaaagtctgcttatacttctgttactacgtcagtcaacataagtatctatggaattatagatctacattatgatatccatgtgatattggttaagtggccttagagtttgtaatggaggtgataagcagtcttgtgagttaatctcttttgggtttgttataatttgtatgatgttatcttgaagagccatcgctgcttgtaattgcttattattctcaaaagatattattgatgagctttcacaatgggtaacaatattagaatgccataacttcaagttgcccattatccgagtaaacaatgaaaagttgactgctttaattactttctgtagttatcaatactatacgtaagggaagaagaaaaataactgaaagttttgcatctacagttctgaaacgaatcaatcacccaccttagtcttttcttgattattcaaagaaatatcttgtagttttcttgtctatcaatcacttaggatttatgttaggatttaagaattgcctacataaataggtataatacaagcatttcatacattcaatggttgaagagaaaactaataacttgggagtgatttaatcagcgtcagagaccgttatcgatgtcaaactctatgaaattgatatgttgcatagtaatacaattctacataaatttgttggcataattttacctacgaataaactcatgattatgctaagtgaagatgaattgaagttatgtctctaatacatagtggaaataaattttgataactatccccccggtcgggggtgtttgttgtaccagatttcttttttctttctttcttggtaatgattgtgttaggtgttttatatatgacagatgtagatgtatgggtggacctgctagctaaacatttattttgaattgggtcagtggctcaaattattttatttttctaattgcagacccataaagacttcacagagactcgtgtcagcac

SEQ ID NO: 81154 - DNA, 422 bp, Citrus sinensis
  Intron number 4 from transcript orange1.1g008457m (locus o range1.1g008457m.g) derived from phytozome v7.0 (chr-ID sc affold00013; pos 556657 to 557078 reverse strand)
ttttagaggtaaataactgtgtttcattcttcattatatgccaagtatacttttggtgcttgtaattttcgtatttttatcattttaacctgggttaatcgaccgggagtcaagaaaagtctcagtggataaatgtattataaatcagttgtaggcattcggttgttctgaattgttggggacagcttgtttgatctcctttggtttttcttcgttgagtaccttttcattggttttgattgtttcattttctccctcattttatcatattaagggttagaaatggttctgctttaattgataaagattctttgcaatatctgtacctactccttaaagtttttatatttgggattgggattataacgcagctgatgttgactacaggttggctgtggagctggaaacactatctttccatt

SEQ ID NO: 81155 - DNA, 349 bp, Citrus sinensis
  Intron number 1 from transcript orange1.1g004525m (locus o range1.1g004525m.g) derived from phytozome v7.0 (chr-ID sc affold00089; pos 479318 to 479666 reverse strand)
ctgccgccattcattatcctcgcagtgttcctggggtcagtcactctcctttccttttttgtagtctttttgttattacaacattctaacttaaatggggttagttcttttttgtttttttttccttgttctcttaataaggaatttgatcttttgtttgattgctgagaaaaaatagttcgataattgaatctacattgaagtggagcgcattcctttatttatttagctgttcgtttacttgagttttaatctttcattggaatatgcattgttttttgaagcttgaaagcaatctgtgttctcagttctttgtaatcttctgagtataaatttgggtgtgtggtag

SEQ ID NO: 81156 - DNA, 960 bp, Citrus sinensis
  Intron number 1 from transcript orange1.1g024220m (locus o range1.1g022688m.g) derived from phytozome v7.0 (chr-ID sc affold00156; pos 161377 to 162336 reverse strand)
ggttcagcgacgcttctcctgctcataaatcttcggtacactgttattatgttcgctgatattgattaagtttcgtaattaagatggtaattagtgtcagattatccagtatttgcaatttcttcaaattgtttatgcatgaggagcaattgaattgttagtgcgatgtgggggatggctttatgaattgagcccaaggcatggagttgcggacctcagtgacgcatagagaagaattagggtttgcttgtttacatattttgcacgtgtaatgacagtactgttatgggtgctcattttacacttatacagcgtacactttagctgtgcattcaaagtagaagcacatcagtccccaaacatatactcaatcagggtggtttttctagactgatatttgctcaattgtcgtcttttagacaacttttgccagaatttgtgtgaactatagcttagacaattaaactgtaaatagattattaacaaagaatcttccatggattcttaatgtatctaagttcgaaaattttgaattggagaaatacaagtaaagttattagcttggggatgaatttattacagggttttgttgtctgatcagagagagagagagagagctgaggaatatattatgccctttttttgtttttcctttggttcttttgagaagagaggtgagagaggtaaatgcataaataaatgtttatgttacctgatttcatgacaaatgctttctttatgatagatttcaagcgcttggacaaatatgagctttgcaatcatacatagggatatagagagggagtgggagaatcagggtggacttgtgggtttttttatttattattggagattcttgctcactctctggagatctatacatctgcaaaaattcatgggaggatgaggagaccaaattaaatttcaattttattatagctttggagcatcctggagcaa

SEQ ID NO: 81157 - DNA, 474 bp, Citrus sinensis
  Intron number 3 from transcript orange1.1g001887m (locus o range1.1g001882m.g) derived from phytozome v7.0 (chr-ID sc affold00308; pos 41338 to 41811 reverse strand)
cttctaagaacccattacggattcccaaggcaagttttatcttcttgttgactgaaattatatctgcccaaattgatctgtttataaaactttagaagttgtgcagatgaagtgttctatctgctaatcgggattggaactttatcaataaaagactaggtaatgtaaaaaaattcaaagttggtgcataagctattggccaggatgatagttaaatcaagaatatagtagtcattgtcagaagtaattctggtttctgattcattcgataagttacagtattttagagaaacatttttactttctctgggaacgtcgatgcggttcaaatacgatgataaatatgtttgagaaattataaagaaaatattatgaatccaaaatctaattacgctgtatatttctggctattattgttattcttctctgatctttcagtttctttggacagataaccactctcctagagcaacg

SEQ ID NO: 81158 - DNA, 817 bp, Citrus sinensis
  Intron number 1 from transcript orange1.1g014038m (locus o range1.1g014038m.g) derived from phytozome v7.0 (chr-ID sc affold00680; pos 50084 to 50900)
aactgattcaactgtcaggtttgttttcttagcaggtacttgtcttcttgaaacttaaaagaaaaaaatattttcatcaatgcgttgccgttttttgttgtttattttcccatttttgcttcgagcaattcagtttgttttcgttctttgatctgacggctttagttcgtttattttctgctttgtttcttcttcgaaactctgtttggttgccgagaaaacgtaggaaaacgaaagaaaatgaagaaaaaaactgccattaacttgatgaaaaagttcccgttttaatcaagcgtaagcttgttttgtttttattatattttgttttggtaacagtctaacagatccatacgatttaatcttaataaaaaaaaaggaaaaaagcaaactttgtttctattagataattttattttagtaacttttaaatttatgcaaattagatcgaccgtttacttgtctttattcatataataaatgagttaatttactagaaaaaaaaggcttaattgttgtaactaatgagagttattttgtgtaatgtgttatcagtttcaaagtaagacgacaattctattggaattctaagttgttgtttgggtcatatatatgaatttgatgtgtgttcgtgtgtgtgtgaatctcgactttgacttttcgtgggatggaaaaatgttccatttttgacttagttttattgatttttacaatgcaaatttaatttaaagttctaaatttgaccttctagtaggtatcaaccttaggttaaaatctcaataagcataatttgaccggttgtgtttttgcagttgtgtaa

SEQ ID NO: 81159 - DNA, 276 bp, Citrus sinensis
  Intron number 4 from transcript orange1.1g009530m (locus o range1.1g009530m.g) derived from phytozome v7.0 (chr-ID sc affold01147; pos 15651 to 15926)
cttggcatcctggtattttcttctcctttgaatcataaacggcttatttatggcctgctctgtggtttgattatgaaaggaagtcaaagtggaagtcttttgctttcaattgccttttctgtttgctgattgattgtgttctttatgattaattgatattgattaaacatcaagaacattaagaactcatagatcatactcatttaataatcactgtttgactaactttttgatttttcagccaagatcatttggttttgcaggtacaaaggacaa

SEQ ID NO: 81160 - DNA, 967 bp, Citrus sinensis
  Intron number 2 from transcript orange1.1g000424m (locus o range1.1g000346m.g) derived from phytozome v7.0 (chr-ID sc affold00006; pos 1908365 to 1909331 reverse strand)
taaatcttgcttgccatccccgcctccctgttctggtaagatgtttatttgctcatgattcttttccttatttatattggtcaacattatgctatggattgagtgagataatgcatatccgattctcaaaaatttttatctaatcttttgatctagatcaatagaggccaaccaatttggaagagagaaatgtatgcttgttgtagagggttatacaattctttcgtattcaaaaaaattatatttagagtaacttaatcatttaaaagatctttattctctagtattacactggattttatatgaaatttttatgcatattaaatttttttccccctttagttgtcaaaattaatgccagagaaggatttttttaaaaatttttttttgttattggcaaaattatgaatttattaattaacaccatagaacaaagttgtatcttaaactactattaaatgtaaaagattatttagtgacatttgtccacgttagagtcaacttcaaatctttatagtatatttcacatcataaatattttatcatatttcagtctaatgggataaatgtcaaacattttgttactggttggtttaagatacggttattatgtagttacttattttttggaggctcgttattcaattggattattaatgtatttatattttattttaacttctcggaacttctagattggaattgtaaacattttcaatgctctttctctctctcactcccacatagcacatgcacttgtatttatgatatttgaccacgcagattgggatattgaaatccaatttcagttattggatataattggattaagactgcaccaaatctgatgcatggtggctcttattagcaaccatgttgattgctgaattacgtatacaatattcttgaaatgatgctcaagtatagttttggccactattttttaatttcttttattattttcagt

SEQ ID NO: 81161 - DNA, 657 bp, Citrus sinensis
  Intron number 1 from transcript orange1.1g000742m (locus o range1.1g000742m.g) derived from phytozome v7.0 (chr-ID sc affold00078; pos 495874 to 496530 reverse strand)
tcgagcacttcaaagacgccttgatttatcaggtagttgctatctgggtttctttcttcctttttcttatttaattttttgtgacatttgtataattttaattgctttggggtttaatttaatgtttattaggtgctcatttgttgtcaggcacgtattaagttgcaggctctatgatttttaacttttatggaagttttaaagagctgtttgtaaaagtaacagcacttctcaaatgcctgcttattcaaaacgagttttacaatgggactcattaagtgcttcttgaaagagtactgcaagtgatccgacaattcacttttatgcatacccaaacactgccaagaaaaataaggataataaaaatagataaagaagcacatttagctgtttgaatgctcttgtagcaccagcctattagaaatggtggttgtagtttgtttgatataatgatatctgaaagacaacaacaaaggttaagtatcttgataatttttgtgatttgataaaagtttaattgttggtattgcactcccgttttgtatcattagcagttactgttctggtgcgatataggcctcgtaagtgaatgaattttgtatatgttattagtgattatttttcgtttatagaaaaaacatctagagctagccaagg

SEQ ID NO: 81162 - DNA, 711 bp, Citrus sinensis
  Intron number 1 from transcript orange1.1g010092m (locus o range1.1g010092m.g) derived from phytozome v7.0 (chr-ID sc affold00104; pos 277520 to 278230 reverse strand)
ggtatgataatctttgctgcatttttcttttttaatgcttaagttgaaatttgtttttgtgcgtggaagctgaggattatttagagttaatgtgtaatctttggctttggcttgtaattaatttgtggtggcctggcgcatatgttatgtatgtatgttcatttgatgcatatgggatatacaaaggtgatgatgggtagcctatgtggttggttttcatcaaaattgcattttaatggtgaccaaccatcaccaattgttggatcatattagctagacgattaatggaagatgagcttgtaatagtgtccgtttgagtttcgtgatggttattgcgccacgttgattagtggccatgtgatatgattgacatagccggattttacaagtaattcgggaggaggttagcctgagtctgcctccaagctcgaatctaagctttgattaggatacctctagggagttatgcatatggataattaaggaataactttggaattgcgtgtctccaacgattgaagactcatttgctgatgtgcatctcatttacaagtgctaccattattaagtaactctgcttcctaattttcttagcatttggaaggaaatttgagtaatttatactataattaaaggcttttgatttttgaattctatgattgtttgtgtgtgccagattgccagtgttgtaacaagcgaagaacttgaact

SEQ ID NO: 81163 - DNA, 757 bp, Citrus sinensis
  Intron number 2 from transcript orange1.1g027227m (locus o range1.1g023268m.g) derived from phytozome v7.0 (chr-ID sc affold00096; pos 337412 to 338168 reverse strand)
aacgtgctgtggaaacaagagcaaaaggtaaggtctgaacctagaattggctctttgtctaatgtgatagttcttgttgacaggttgagattcctgggttcctcaaaacttctatcttaagtaggttggagatatttgatgaccttgggactgatttatagggattagggaggaaggatggttgtgcacttgttatgtcatctcgttcactgttttgagatgattaattaaagatgaagcttcctgcctataatttcttgtgatgggctttgttgctggttgattgaaatatatttgcaaagaacttctctaacctttgagtttgatggatgcccttgagacgaatgtaatggatgaatatgactgttaatttttatttgctgtttgttttggaaccttctcagaatagactatagttattgggagaatagtatctgtttcaatccttgggcccaaatgggaaatttgaaaattaaagcatgcatttctaaatgagctttttgccatttgaatatataaacagtatttttgttcgttctagaaagtagttctttcaagataaaaaagtcaaaaggggcccagtaagtgggtatcataacaaccaggatttctttcatgttttcatattccagaacagaaaaattttgtttcctcaataaccatttattttgttgtgtcttttgctcagctacctaacctactaagttcaaacttgtttttgcagtcagaactggtttggagggacctggacttacga

SEQ ID NO: 81164 - DNA, 702 bp, Citrus sinensis
  Intron number 1 from transcript orange1.1g011968m (locus o range1.1g011968m.g) derived from phytozome v7.0 (chr-ID sc affold00013; pos 1785577 to 1786278)
attgtttgggaggtaagcttcattttctatctctaattaattattttgttcattttcaatgctggtagttttctgttaccaagtaatttgaaagtgatgcttattatttggtaggtttatggtttggtttgatgctattgggaataaaacaaacataggggtagaggccactcggtttcttattttacttgccagtaaatccaaaataaataaataaatttctacattgaacctgaacctatagttaactaggccttggaaggttttacagacatggtattgttagttcaatagacattatgattggtatagcataaaatttaaaatcttgataatcccaccgggtggggtggtggggaagcaaatttagagtgagtggtgtattactactacgcacttgatcacaatttcagttcggagcacataaaagtttgatttaggcagcgtgattctagagtagcattgtcaggaatgaaggcatggaagagtatccatgtggacccaccctccaaaccacagttatgtggttgcaaagacagcacgggttcaattttccttacactgttactgtgcttctttagtgtgcaatcatgtcattatttctacaggcaaatatttgtctttgacaattttatttgattagttgattggaatgtttgtacaatagaatttcagttcaagtgatacggtattttgtgggat

SEQ ID NO: 81165 - DNA, 621 bp, Citrus sinensis
  Intron number 1 from transcript orange1.1g033102m (locus o range1.1g029494m.g) derived from phytozome v7.0 (chr-ID sc affold00068; pos 564792 to 565412 reverse strand)
ctggaagaagcccacttcttcttcaaatttttccagtaattttctaccccctctttctctctgtataataatttgttttgttaaattgttgtttcaaagtggcaaaatatgaattttcatgttcaattttgacattgacggaaatggaaatatatgttgctttaagagtaaaaaagagaaaaaaaaaatgtaacttgttatggggtttagatttgcatttttagtgaattattttggttgtgaagtgttgttcacttgtagatattctaggtttaagtttgtattgtatgcttctatgttttacaatatgaaagttgtgttttttgtgatgatagatgtcatttttgtatggatttgttcattttgtttgatttgtttagacaatttgttttggagttgtatgtggataagggcaatatggcttcgttgaaattttattttatttatcatcatcatcatcatcatcatcgtcttactcatgctaggttattcacttctctttgaactatcttttctgttttcttcaatttgtgatgcggtaagaattgcttatttatatatttttggttactctgctcatttccagataacctaaatttaaattcaaaccttgctggtaag

SEQ ID NO: 81166 - DNA, 494 bp, Citrus sinensis
  Intron number 1 from transcript orange1.1g020156m (locus o range1.1g015401m.g) derived from phytozome v7.0 (chr-ID sc affold00009; pos 1986989 to 1987482)
tcttgcctcccgattctcccgtcctcattttggttaggcctctcctctttgaactcttttgtttttgttcttatttttctggtgactcttcgcttcgatagatagaggcggtggcgtactcgtattactggtgccagtatttttaattcttcattagctaatttgaaagattatgtatctcatgctatttattatttaatgagatgtgctgagcttttgatggacctgtttacattctcatctcattcaataaccaccgatcacagtcttgtatatgtatgtgtgcgtgtgtttatatatatgggattgaggtgttgtgaaaaattattggcattcacatataagcagggtgacttgagtgattagtaaaactcggtaatgtttttaaagctaaatagaagcacaacagttagggaaggttattttgctggagatattgattttgattggtgattgcagccaggtttaacaggagggagtgaggattcatacgt

SEQ ID NO: 81167 - DNA, 1030 bp, Citrus sinensis
  Intron number 2 from transcript orange1.1g019859m (locus o range1.1g016342m.g) derived from phytozome v7.0 (chr-ID sc affold00131; pos 358649 to 359678 reverse strand)
aaagacaatacaaggaggctgctgcgcagcttgaggtgatttaattctcaagattttaatttataatcttcatagtagttcagagatgttttacttttcagatattactgtggacgttttctggtttttggaaagttccttaaattttttattcatctcctgaaattttttttctagtttttcctgcagaatgcattttctgtccataaaaagatatgaaagaaacttttgggatttgtgaagttatgatgatcaatatgttgtttacagctggctcatatgatgccattttttgttctgtctctcattccaccattatagataagaaaagcatgattcactttaatgaagttttttgatacttcaatttttgtgaaatgtgaactgccgctttagtttagggaaaaagcaagctttcatttctctcatggattcagcaaaatgatttttctcatgtattttgtattctaaatcctgttctttctgttaaattgcaatgaaacttcgacttgaaatttgaagccatttttctcttggatttgaaatttgacggttttcatgatttttgactgaataagtggaggtcttgacgattttttaaagaatgtgtatgaaatattttatatatacaagggtcctattttgattgtgcttctctctctctctctctctctatctatattctgcttaggtattgatacttctctcttctctctttctctctttcacacactttctctctgtcatatagatcctacacttaatttggtcttctgattagccttctatagatctctttgtaactttgagaggttctttcattgtggacttcttgttcactttttgtacatgttttctcctaaatataaatctctcagtttcctattaaataaataaataaagaaagaaagaaagagggaaaaataccttttttaagtgttttatatgagcattacctcaatatctttgtatgggagtgaatcatgcttacctaagctaattttaatgcgttgcaggctgtaaatcagtt

SEQ ID NO: 81168 - DNA, 911 bp, Citrus sinensis
  Intron number 3 from transcript orange1.1g018540m (locus o range1.1g013096m.g) derived from phytozome v7.0 (chr-ID sc affold00006; pos 996907 to 997817)
ttatagaacttccttctttacatatatttttggtggtaagggtttggttttactgtaagctttgtcttttgtaatctacacaatgcaaactcatagttgtcacacgattttgcctggacagtttatcagttcttatttaatctttatggacatggttcatttgaacagcaagggatatcaaatttgtttaagtttgtgttatttcttccatgattgaaatgaacattttctggagttgctgcttccttactgctcttattgcactattaatgaaggtttattttttcaatctatagatatctctttgctgctcatcctaccaatgattaaacaaatccaattggtttttcttgttttctttgcttttatagtagaaatgagagggaatacctcgtagtttaatcccgaaagttgtggcaatgtatttgattgttgtagcaacataaaaattgcctttttagtccagaggattgattgtgtctgatgttacatcattatctgattatttaaattcgtcaccctttatgaatccacaaattttggcatgaaattgtcagtgtattgaagtaattaccttgcaaagttttcttttatatctgaaaaagactagttttctaaattttagtgggtacaagggatgctaaagtgcctcttcatgttattcttaatttaccatgattcttggatgcacatgttgaatggtaatccaacctgattctgtttcaattaagtgccaacatggcattcccagagttcctaaagaattttatggatgcttattaaaatcatacaggattgcttattatctactttagagttttatttccatacacttttggattaaatacctacttgtgtcatgagaagttttcatcttcgctaaactttttattattaacagataaaaggat

SEQ ID NO: 81169 - DNA, 481 bp, Citrus sinensis
  Intron number 1 from transcript orange1.1g035011m (locus o range1.1g034455m.g) derived from phytozome v7.0 (chr-ID sc affold00068; pos 582845 to 583325)
gttgctgcactgtatgaactctctctctctctgtcgctctcgttttctcttgctttctgtttggttacttagaaaaaaaaaataaagttttttttttcccttcaaaggaacgaagctcgaacttttcacatttcttttagtgacctaacagatttgaactaattgcttgtcacattttctttttcagaaattctttttgttttgttattctctatttggctgcggagaaaaagaagaaacctttctgatcaaattcagctaatttttttctttaattttcttggcaaccaaactgtgacaatttgatcagcagcgttagttctgattgccatgaaactgttggtcttttctcttgtaggcttcttgcataaatggataatttatggtttgaaaaataatgagttatttgattgttataattagactaattggttctgtttttgcaggtggagttttgcatctgtttgctactcactattct

SEQ ID NO: 81170 - DNA, 628 bp, Citrus sinensis
  Intron number 1 from transcript orange1.1g019718m (locus o range1.1g019718m.g) derived from phytozome v7.0 (chr-ID sc affold00221; pos 180611 to 181238)
gctgaagcgtgcaggagcttctggtactcgcgcaggtactgtacaatttcagattttttttttctttttacgaattcttttttaatctttgattgattttattatctgctattataacttggaatttagtaatttttctttttttgagtttaattcagtttattatggcttgatgcaatggctgtcagggcaaaaataggcataagatgattgaagtaattgaatattgagtgatttatttaattactacgttgatacaatctggtgataatgaagaggataaaatagttccaaatatcaatatcacaaaatctgttttattaatagatgacagatcacatatgaaagatactgaggtcttgaattcttgaaaattacttagcttggatgtgtgcttgagtttgaacgttttgtggaagaaggtttttattcttatgtcaaactgaggcctagaaagtcttttttaacttctaatttggtatgagttatgttttcaaaagcactaagctaaatagattgtgattgatttttctcctgaaccagctacctttttttttttttgttattaatttttttccccttggaaaatacaggagttgggggttatacgtacttactagaacctctt

SEQ ID NO: 81171 - DNA, 453 bp, Citrus sinensis
  Intron number 1 from transcript orange1.1g009793m (locus o range1.1g009793m.g) derived from phytozome v7.0 (chr-ID sc affold00240; pos 36119 to 36571 reverse strand)
tttacgaattggacgttgttactggtatcaatttttattaattaattttgttcttttctttttttaagaatttttaaattctttgacaagatatcatacaacctgctgctgctgctgctgctgttgtttcttttatattattaatatcggggtcctacttttaggaagaggagtatactaacgatcggacggtggtttctgccagacagtgttcattaaaattggaattttcccccccttcagtcagcctctaagatacaaccaaataggggctcaaaattgagctctgttgtcgttttgtatttatttattctactaagaggatataattaaatgtttgatgctgtatatgtaaatacaacattataaatacatgcaaatgcattaattacttgagttattaattacttacacatgaggtttttgttttgtgattcaggaaaaggagagcta

SEQ ID NO: 81172 - DNA, 1005 bp, Citrus sinensis
  Intron number 1 from transcript orange1.1g020141m (locus o range1.1g019853m.g) derived from phytozome v7.0 (chr-ID sc affold00364; pos 100126 to 101130 reverse strand)
gaagcccctcacgacgtcgtttttcaacggcggaggtactttctttattaaccttttgggctattcttgttctctatcattttttgggcatattttttttccgtttatatttttcttaagtatagttctcacactgtttggctgctgagaatatgaaagagaaggaaataaaatttcctagaaatactcaattgtggcagttaatgtagtaccttagtgagttctgttcattacaatttgtttttatatttttgggtctcacaattaatgcaaaattttaaaaaaaaattgcattcaatttttattgcctttcatttttattttttttgagcgtccgtgaaatttggtagtaccagtaggtttggcaagtattagaatgattattaatttttgtatagtttgcgttttgtgaaatttgattgttgggtgtgcttgctattagtataattaagttcatatacagtgttcatatgtacagctctacttttagtggttactacctaaactgaaggtaactcaaataaagatgaaatcttttgttttatagtgagtattggattttcaagaagtgataatgaataggtggtatgatgattaggacagtggcaccaaggttaactggtttggagtagaagtataagtgttgaaggatttttttttttcccttgttgagtcaggagtaccatgtgaaagtagacgtggagaaggagatagagataagaatttacttggattctgccctattttgttgttccatttgggtcctcacatgttcatgtaaattgcagttgacctttatttatttatttaaagtatgatgaaacttatttggaattggttattttgttgattaatgttgtttttgaaattatgactgtatatggtatgccatagatgttttgataacttgttcatactcatttctgtattttggtgatgttaattttgcttatagtgggagctctaaaagttacaaggttaaggattgctccttccagccgatcc

SEQ ID NO: 81173 - DNA, 717 bp, Citrus sinensis
  Intron number 3 from transcript orange1.1g032142m (locus o range1.1g032142m.g) derived from phytozome v7.0 (chr-ID sc affold00087; pos 421841 to 422557 reverse strand)
aaaaacatttccgctatactttttccctgacatttgtaccatttgttgttctgcacctacagaaggtacaactttcactcaaattgattcacacccaattcttatgtcttatgcatctacctctttgaacaatttgtagattcatgcaatgctggtttcattggcatagaattctgaacctgcagtaagaaactggggctttagcatttatagaaatgaatgattgaattttatgtcatattctgtgtttgtggtaataatgagcatgtcaattgctacattctgtttatggagctcatgaaatttgaccagaaactttgtcactgtcaaaagatttctctgcattgcttaggtttagacattttgttgagaaccatacttacataatatgtgattaacttcttgatgatgatgcattggaatacataatctatgcattggatcactaaatgacgatcgatgcaaagcatcaactatgtttcacatattctatgtaaaatgaaaaataaagtagaatgtttaacattttattaataattcttgtaaggaaaaatattttgctaacaaataagtacaaataaattcgttttaggacaaaaatataaatacgtatgctcgacttatatcaaaactacttagactaatttgaagtgaagaaggaaaaagatgaaaaaaaccgcagacaatcgatctcgacttatatcaaaactattaaga

SEQ ID NO: 81174 - DNA, 441 bp, Citrus sinensis
  Intron number 1 from transcript orange1.1g037150m (locus o range1.1g037150m.g) derived from phytozome v7.0 (chr-ID sc affold00054; pos 337241 to 337681)
tcagctatacaaattcagtccggcgcaactcgaaggtatttcacgaacctgtttagtagggtaatctctttaacatagagtgtaacacattagctagggttacagcacaatcttctttttccattaatttagggtttaattttgtttcttccacacattgtatgttagggtttatatctacgtaattacttggattaagaagaatttacaacatatagaaactagggctgtttataaagcttacacacgcacttccagagtaatcgcactattatgaatcttacatcctactaataaattaggatgtaatgaaaattaggatgaatcttacatcctcatgcctttcaaacaatcttctattttcttaccatacacagtttcatatgctatttacatgttattaatgaggtatttcaattttgttttgattcataaacagtg

SEQ ID NO: 81175 - DNA, 693 bp, Citrus sinensis
  Intron number 1 from transcript orange1.1g021263m (locus o range1.1g021263m.g) derived from phytozome v7.0 (chr-ID sc affold00018; pos 1091975 to 1092667 reverse strand)
atcctccttactccacactttgtctctctctactggtaattgctttttctttatattgagcaaaatatttcatgttattaatttgttgggagattcactattacaaacacctacgtgttgtccacgttttaaattgtgttagaattactattacgtttagattattaacttgtatcagttttttcttcgaacctcgcccacacagatgacagaagggtgtttcaattaatatttaatgcaataattcaaatgtaatagaagttaggatttcaagtttgtgacctaacgtgcgtgtatatctgctacttcttatgggaattcaaggaaatttcgatcagtttatagagtataggtgtccaacaaaatatatggatccacttggaggccaatgtagtttgtttactactttactttggttcaaaatagcagatataatttgtgtcatagtggtgcataggagcatgttaagagatttcacattttatatcaagggcttgagtttccgtctgttggcgtctataacattacatgtatgtacattggcagagtcggctagttaatggggaatgtttgttagtttaaaatttgggtctgagaaaggtttttgggtttattagtaagccaatgtgtttattttttcgattttggatgaaatgacagttttgattggtgtctgatgaatattatgaaagg

SEQ ID NO: 81176 - DNA, 652 bp, Citrus sinensis
  Intron number 1 from transcript orange1.1g015051m (locus o range1.1g013697m.g) derived from phytozome v7.0 (chr-ID sc affold01238; pos 17562 to 18213)
ctccggcttcgtttgttgtcgtcagcccgcacagggtaaggttatttgtaattcaatcttcttttgggcatgggtaagagcgtcacaggcactgatactgttcaatcttcttttgtataatggccatttgtaattgttgctgattcggtttcttaacattgtaatttttgttgtcttgagtattgatggtgatgggttattaatgtattatatatgtttgtcatttggtatcattattgcatcattgagccgggctggtatttgattttggaattttaggtggctgcctggcagggatttgattcattttgaaattttgagtctctggaaatttatgctttttagtgtttccctttcaatattccttcgttaagctttaattttctctttgtatcctaatatatattcaaagtttacttccttagctgcttctgtttggttgaaaaaaaagctataaattattattattattattttcttgacctaatttgaatttcttatttgctatttttgttgattttggtattcctgtattgagaaataattaggtagtggctttgctactgttgtctctgtttcttaaattgtataactcacaagtttcatattgcttataggaataagattgcgttgatactaaatacattatata

SEQ ID NO: 81177 - DNA, 657 bp, Citrus sinensis
  Intron number 1 from transcript orange1.1g029706m (locus o range1.1g025938m.g) derived from phytozome v7.0 (chr-ID sc affold00009; pos 488050 to 488706)
tgggacaggcaggaagcagcagttggctactcttggcaagtcttttacttttgatatggttttgatgtctcaactatattgtagcttacaggattattcagtttgtgatgcattttatctagatagtgatcataagtcataatgtaccttataatattgtagcatttttagtgtttaattaaggagacagcatttttttttaactcgttttagagtatattttcttctatggtcagttattaaagacatacaataatagtcatctgttttcatctttttaaattgaatttagtgtattgcttgtatctttgaatcaattatccattatttagaccatcttattttactttttgagatccacctaattttagcaattgtagatactagtgactgcaaaacactattagaatttggtgattatttttggaaacagaagccagaatttctacagatgaacgtgttttatgtttggacctctaatttctgaaacagtcctcgcattcatgtttgctgtgaaatatttatatgaaaagaggtcatgaattttaatgatagtgtgattaattatgccttgcactttgatatctttatttctgtttgcatgctaaaattcatgttggggcttctcaaactgtttaactacttttatgtaggtga

SEQ ID NO: 81178 - DNA, 554 bp, Citrus sinensis
  Intron number 3 from transcript orange1.1g026528m (locus o range1.1g026528m.g) derived from phytozome v7.0 (chr-ID sc affold00077; pos 139585 to 140138)
ttgattgcagcccgactgcagagccaacatttgaggttgtgctctttgattctactcctctttgagtatcatactactttgttgataatggtcatttgcaaggttgtaaatgttggtgatattctctagctcaggttattttgtgcaacagtttggagatataattaagttgaatgattaataacattggagataagagttattgcccattagttttctctgtgaccatgctaatgtgtagggcgtcattcttgatatataatctttacgttgattatattcttggtactccttgtgtctatttagtttgacatttagtatggtgtttatagctctatgatgcaagtctaagccctaagttgattttcctcacacatatgcgactttaatctgttcagtgattaacaacttttttagatgctatgatttgtttttatattgatttgtttttatatcttctcaatacctttatcttgtcttgttatttctgctagttaattctatgtacattgtacacagggtagagggggtgaagaactgtctgcagagctctc

SEQ ID NO: 81179 - DNA, 985 bp, Citrus sinensis
  Intron number 1 from transcript orange1.1g030296m (locus o range1.1g030296m.g) derived from phytozome v7.0 (chr-ID sc affold00043; pos 574780 to 575764)
ttacaactgggtcgccaccatcattggccctgctggtgaggttcccctaagctctaactcgctctcttttggcaatttttttctttttatcatttttggtgacgggttgttgttttttatgataaaatttcaattttgatcatacttccgtgatgggtggtcgttcttcatgataaagtttcaattttgatcatattttagtggtgggttgcggtttatattgtttttgaaagataaaagtttcaattctgattattttcgagtgatggttgttgtttgtattgcttttggtcaatgaagtttcaatcttgataatttttgagtgatgttggtggttgtttgcttgttttaatgattctgtttcaattttgatcattttcgagtagtgggtggttgttatttacctgttttcttgttttttattataaaataattggtcattttttgagtgatgattgcttgttgtttcttgttttttgatgataatgtttcaacttttattagtttcaaatgatggggtggcgtgtaatttcttgtttcatgctccttgtcttgattttgtggtctgtcttggttgaattataatggcaacttgttggaatattgctgatgctatgagtttcaagcgttaattgaactaaggatcgttgctcaattattgatgctcattgtctttattagcaacagactattgggaaaggtaagttcacatgttgaattatctagtttttgatgcactgcatcgttgatttgtgggctttattttatgtgtttatcaaattattaaacatgtttctataaaagttgcatatgtctttttccgactatttgctttccatttgaattgtctattttctgttacagcagcttctgaaatctggttaatgcctgagttgtcttgttggcatgtcagctttgcagtgttcactaagctcattttcatgttgtaggaacaccataccaagggggtatattttttcttgac

SEQ ID NO: 81180 - DNA, 768 bp, Citrus sinensis
  Intron number 1 from transcript orange1.1g004324m (locus o range1.1g003913m.g) derived from phytozome v7.0 (chr-ID sc affold00248; pos 174154 to 174921 reverse strand)
agactggattcagggtataatttcattattctttatgatgttattgttgctacttgcagttaacacttgtcctctgtttgttataaaatttctttgctttttgaatgattacttgaagttgaattgtgttgaatgttcaggaaggtatttaatgtggatggtttatttgataatatgagctagcaggtgttatgttcgtgctctatcaatgcgaattagtgaataaatattagcaatttctggtagcaattggatttgctatttgttttatagtgaaatggtttatataaaattaggtgtcatataagaattttagatttttctggtatagcatgctgggttctttattgagttcttttgttgagggttggacttttgctttacagttcttaagttgatttcagttcatgggagtttaaaactggaaaggctgttcaggtcgtgaatgctgggcataatttctgaacgcagattgctgtttcatgttatttatatcactagatatccacaatctgctttgaaataattgctatttgcacgaatatttattactgaaacatcgaaataatttgtttgctaacagttcactttgttacttatgtccgtcccaggaaatgtggtgtcttaatgtgttttgcatattattgtcttgaactcaatgatttgaagattcttgtctttctgttaacaagttgtcttttttttttttttcttttagccaaagtattgtcattgaaaaatcatttgttacatgtttcaggtttacga

SEQ ID NO: 81181 - DNA, 813 bp, Citrus sinensis
  Intron number 1 from transcript orange1.1g031387m (locus o range1.1g030552m.g) derived from phytozome v7.0 (chr-ID sc affold00068; pos 476185 to 476997)
gttatattgtcatcaaaaatcgtccttgcaaggtcttttctctttttaaataaaaattctctttttttttcttctgatttttttggggtgtcaagttttggtttttcttttgtttgtaatgaatttgaatctgggtattcgttggtcagatctttgatgggttgttttttggtttgatcacaattgaatgtatatgtatgtcaatggggttttattttattcattttatatgctatttagtgaatttattggcgcttgtgaaattttgagtagtgaattttattggcgcttgcgaaatattgagtttcaattgtggatgttgatggaatcctcatatttgctttgtcggttagattttggagttttttttttttaattcagtttgattttggagattagattttataaaacatgtagattacgattgtagtttggtagcttatatgggtgaatttgaagcttaatggtgacacgtagtgtttttaaatcacaaatgttcatgatctgattgtagtatacgagggtgcttgagggaaacgtgtcaaaagaaatgcggtaaaatgaccttgtatctttgagagaagggttgctatgcaatcattttattagtacagtatagtaattgtctaacatataaaaggagattttatgtaaaattgttcctctttgccttttgcctgactgtgttggattatatcgtctctaatagtacagttttacaattccctgacagccacaagtattcaagtttccatctttttcccttcactctaaacaggttgttgaagtttccacttcaaagactggcaagca

SEQ ID NO: 81182 - DNA, 567 bp, Citrus sinensis
  Intron number 1 from transcript orange1.1g005564m (locus o range1.1g005564m.g) derived from phytozome v7.0 (chr-ID sc affold00054; pos 357604 to 358170 reverse strand)
cctcacggagttcggtcgtcagagctgtgtccacggtctgatttttcgtatattttctgaattttaatttttagaatattctctctttctctccttttttttaaaccctccgcatgttactatttaattttcttttattatgcgtattgcgagaagtatgttagttaaacgtatggcacggcgtcgttttttttttttttttttgagaggtgttggacacttttttggctttactaaatgaagaatttctttgttgatttaatttgaacagatttgaaacaacttttggaaaaagtaaaacagaaaatgaaaatgtaaagttgaatatttgattgtcgagatcggaaaacgtgattgattactaaatttaaaaagaaaatgtttttttgagtcaaaagataatagggctctcccttgaacattctaatcgaaatattagggtgaattttgtgttaatcaaattcgtattctgttgttaatgtgttaatataataaaaatggtggaataaagtaaggtgcttgttttgtgcagccagtaaagccggagactgagaccaagactgagac

SEQ ID NO: 81183 - DNA, 182 bp, Citrus sinensis
  Intron number 1 from transcript orange1.1g015254m (locus o range1.1g015254m.g) derived from phytozome v7.0 (chr-ID sc affold00077; pos 392002 to 392183 reverse strand)
cagatataagccaggtaataactgagccttaatttgatgatttatgagattgaatatccccactagctatgatttttttgattttttttcttttttaaaattttaacatgtataaataatgttctctagtcattttaatcaaataatgtttgttgcttcttgtcttaattaggctttaaggg

SEQ ID NO: 81184 - DNA, 758 bp, Citrus sinensis
  Intron number 2 from transcript orange1.1g034866m (locus o range1.1g034866m.g) derived from phytozome v7.0 (chr-ID sc affold03133; pos 4738 to 5495)
agtcccacctcaaaccagcgctatcatcaccaacggtaaatcttatttcgtgttactttaattctattgatattcatagttatatttagttttattttgtatgtgttattaatatagagattacatgttgataatgattcctgattgctcgtattatatttttccctttcttaaggttcaaggttgtcgatttgatgttcagtagattggtttttattcaatttctgtaaatttttatagattagcgtgattttatggatggtatgtggcccctgcaaataggaaattgatctgctagtgctagtgttttatttggcatttgtaatatgaaacaaaggctatttcctgtttgtcttctttaatataagggatgagcttcttttggataaaaaaatctattacaatgatactattcttccatctgataaccctgaaaagcataagagaatataaatataatggacatttgaaaattttgatcaaggatgtctatttggtttttcctagttaccccattgacgtgacctagataaacgcgattgatgtgacctagataaacattctagttatttgttatctccagtaactgaagattttcatttaacaagtgtaggtaatcaaactcaataaggtaagatttgcacacccgtaattattattaaaaatggattttgaattgtgtagtttgagattttcaaatgttttcagtgtggttcttctaccaatctcactcaaaattaattgtctgtaatttgcag

SEQ ID NO: 81185 - DNA, 486 bp, Citrus sinensis
  Intron number 1 from transcript orange1.1g022365m (locus o range1.1g022320m.g) derived from phytozome v7.0 (chr-ID sc affold00068; pos 3449 to 3934)
ccaataatagtacgggttttttttccaagatcaaggtactaatttttctctggattttgtattttgtttatctttattcttcttcttttagatatttttattgatttttaatttattttttcgcctaagttaattgaaacaacaaatatatgcatcatctactttacgtctactgtgaatacttagattaatgcagagatacaagattcactttggtaaaatcaatgcatggtttttgttttgtttattttcctatcatggttttgaatctcggtaactagttagtcttttttgagacttccgaaactcacatctatgagtttcgattgttatttctttaagttggattaagaacttttctgttattgctggatttagcaattccattgtaattaaattgagatttttattgtttaaattcatggtattcattcgtttcaatttatggcagaattctacttgttttagttcatcatcatccgacac

SEQ ID NO: 81186 - DNA, 136 bp, Citrus sinensis
  Intron number 2 from transcript orange1.1g044681m (locus o range1.1g044681m.g) derived from phytozome v7.0 (chr-ID sc affold00726; pos 48054 to 48189 reverse strand)
tgttagggtacctggctacttatagtcttcgcaaattaatcaagctgtttgattttatcgttttaataataaatttgtttcctttttctttttcgttttgttaatttatattcacagaatcattcccagagccctt

SEQ ID NO: 81187 - DNA, 482 bp, Citrus sinensis
  Intron number 1 from transcript orange1.1g029505m (locus o range1.1g029505m.g) derived from phytozome v7.0 (chr-ID sc affold00091; pos 378509 to 378990)
gccttcaccgcttccccaagtaagaacttttctctctctttcttacaatatcacttttgacgctttttgttccatcttgaaaattgcttgcttattttttccttcaaaaagttctatagttcacattttttttcttcctctttatcatgagactagaaacactatatattagtaatactcaaatgggattttaagtttaccagatttaccttctcttctttgtgttgttgttcatatttatgtttgtgttaaacagacatttcctttgcaattgcttcacattttgatctgggttatgtcaacgatcacttcttttactttgtttcctcctggttattcctgaaaaatgcagttatcaggagctcggaagctttgcatttgaactataatgagtttattttcaaagttttccctttttcactttaatctcaaaagctgtaatttcatctgggttttgtttggtttcagttcccaggttgcat

SEQ ID NO: 81188 - DNA, 758 bp, Citrus sinensis
  Intron number 1 from transcript orange1.1g023819m (locus o range1.1g023819m.g) derived from phytozome v7.0 (chr-ID sc affold00375; pos 109666 to 110423 reverse strand)
cacggtatgctttttctttaattttatactctcgttcttgtattttttttcttcttttttctttgatggttatgtctgtttttgtgtgagtttatgagggtttgtttctttttttttcttttttctcattttgttctgtttagtagctttagagtattgtattcgtttatggtttgttttgtgaagctgtatgcaaatttgaacaacatggagtatggggcatggcaacaaatggtaattatatcaggctttggatatggttttgtgggttttattgtatttgagagcttaatggcttgggattgtttgtcgatagttttcgaatcaaactgctgtctggacctgcaaatttaggagaatatttggggattaggtgataaaggcctgaattcattggtgggtaatttctcttgtgtttttgtgggttttcgagtaatttggattgatctcataagctaatttgctgattacaaatatagtttgtgaactagttaggagaatatttggggatgacattgaggtaattaatgggataatgttgtgaattcttttaactgaaaattctttatctttaagttctttgaacactgaaatggtgttgttaggtttggatttctttgagttggaaaattttaaatatgattatccacctttggttgttgattattagtcttggctatttggtttgatactcatggaataagtcagtttgtttgcctgcagacttctgtggcttttacaagtcttgttgttgcggc

SEQ ID NO: 81189 - DNA, 678 bp, Citrus sinensis
  Intron number 2 from transcript orange1.1g048248m (locus o range1.1g048248m.g) derived from phytozome v7.0 (chr-ID sc affold00596; pos 33790 to 34467 reverse strand)
tcttcttcacagtgccatcataaagtcacagtttggtgagtctttacacgatctttgttttttaaatattcatttatagttaagattctaaacaacgggcctgcaattgctaatgtttaaatttactttttaggcccttcactcttctagtacttgaacctggatggcagccaaataaaattatttgaaaacctttcggttagtcctctcgcccataggggtgaaaacgtagggtctgaactttataccacaaaaatgtactttttttaacggatttctcaagattaatctcgtggccacctggcttgctatatgcaaagatgataaggataaattcgtacattttattttcagtgaaaggtgactcatttgcaataatctcaagcattcttgtacctcgtcatcaaaaagctccattgaggttctctaagaagaatccaagttgctgcaggattcgaattctatcatccccgccaaaatactctctttgttgcatttcatcgaacatctagtcatttccaacaaacacgtgaatgatttgctaaagttttgtgggtgtcaaatttgttataatttgatactatttgttgatgaatataccttaactattagaaatttaatgataaaataaataacattattctaaacctctcgttttgaaatttaaattcagttgta

SEQ ID NO: 81190 - DNA, 362 bp, Citrus sinensis
  Intron number 2 from transcript orange1.1g007894m (locus o range1.1g007894m.g) derived from phytozome v7.0 (chr-ID sc affold00018; pos 270297 to 270658 reverse strand)
aaattaaagcaggtattaaaaaatctacttcaattggttaagatcctggagattgaaatttgcttagatttcacctgatcaggtgcaaatcaaagttagttgttagaagacaataaacggaacatttatatgttttaaatagggaagagtgcgctgcaatccttaattttgcatgattccacaaaaaactacaaattatttcactttaatacactcagattactgatatgacacttgtccaaactgaaatgatggaccaaaggtaagaattgttaattttattttcttcactgatacaagtttctgttttcgttggtcgctatggatcatacagaagacggacgtatcatctgttgcaggca

SEQ ID NO: 81191 - DNA, 502 bp, Citrus sinensis
  Intron number 1 from transcript orange1.1g025502m (locus o range1.1g025388m.g) derived from phytozome v7.0 (chr-ID sc affold00013; pos 1517723 to 1518224 reverse strand)
tggtcgttaaagccgctgcagtcgtggctcccaaggtaattttatcctttaataaaagcagcattgataattctaaaatttacttattttttcgaatgtctggcctcatgtttttagtgcttgatgaattgatgcattatcgatttttcatgaatttttgggagatgattttttaatgcattttgatttgtttttaactgaaggcacttccatgactaatttggctctaaaacccactgacaaattgagtcattgataaattggtttgtatttcactttaaatgagtcttgcatttgtttctttagtctggtagtgtgcattatatttttgttctgactgtgcgtgttatattttcaattccgtgtgaatgttgcacatctatctcttctgttaatgttagtaaatgatcagatgatttgagcttgtttgcttgtcattcaattattttgatcttatggctgtgcagtacacttcaattaaacctttgggtgatagagtgct

SEQ ID NO: 81192 - DNA, 469 bp, Citrus sinensis
  Intron number 3 from transcript orange1.1g028853m (locus o range1.1g028924m.g) derived from phytozome v7.0 (chr-ID sc affold00013; pos 178237 to 178705 reverse strand)
ataaggtaatctcttaaatacccttgaggcaaatctcctgttttgcttaaggaccatcttttgttgttgattttggtctttgatgttttgtccttctcagtagccacatgatttgctagttcaggatgaagcatgttattttggctgaaagtaatcagattaagagaagatttcataaaactttgattgctgaattttgggctaatgtagtattggaacccaatgtttaatgtatcccactttgcctattgccctctccaatattgtatagctatagccattttctgactgtttgttgtgctcataatactagttgtattaaaaataattgacagaggaacgttcttttctttatcattttgtgcacttgcatttctaattgatgtttctaagagcaataaacatctaacagttctcactgttatgattcactcattgcaggtggttcaggaatttatcttgggagtgt

SEQ ID NO: 81193 - DNA, 708 bp, Citrus sinensis
  Intron number 1 from transcript orange1.1g020153m (locus o range1.1g010382m.g) derived from phytozome v7.0 (chr-ID sc affold00006; pos 1114588 to 1115295 reverse strand)
ctttggtctggtgttgttattactgctctcgattggtaagtcttttgtttgttttgttttgttttaaactttttaaagcttggtttttaacattttagtttgaaagataaacccaccccacaaaaaaaaagcaaaaaaaaaaaaggactggctctcttgaggctgtcgatatgttagtttcaataatttatgtgcatgttagttcagttgattagaatttattttacatatgctcattgtactaaggattaaagtcactatctctgtatgatggactttaattaaatacagcaaggctgattgctcggttccctgaaatggcgtaagctcagtattctataataaaaatataaaatgtattatgaatttgtttgttagcctttgtactggcggaaaagaacgaactttggcgttaacttaattttttggtattcaaaatatcaatcatttttctttttctttctttctcttttttaaaaagaggattcaaaatgttaaattcagttttccatgattcttttttattttttcagtgactgagcagagcatgtttccttttttttgtttcaacaagattttcgttcatttttttactagtattgacttgattctctctttcattgttctttatacagttttatctttctatttcttgagaactatggtgtcagaaaattggaagctgtttttgcagttctcattgcaaca

SEQ ID NO: 81194 - DNA, 872 bp, Citrus sinensis; identical to SEQ ID NO: 80772
  Intron number 1 from transcript orange1.1g005092m (locus o range1.1g005092m.g) derived from phytozome v7.0 (chr-ID sc affold00096; pos 81638 to 82509)

SEQ ID NO: 81195 - DNA, 712 bp, Citrus sinensis
  Intron number 1 from transcript orange1.1g023974m (locus o range1.1g023971m.g) derived from phytozome v7.0 (chr-ID sc affold00018; pos 1473096 to 1473807)
tcaagaactttagctgagcaggttagctttcatctttctgtgttctccttttattcaatctttttgcgttcttgtgtctctttcatttaacttgtgtaacttcagggaccaaagtttcgtatgggttctagttttatctcttgccacagttgcctctttatcgttaactttctgctttaatttgttgagaaaactgacacaaggagaagatcatttaggattctcttgggttctaagaacgtgaaaaaattaattcaactcaagcctggaccaaaattaggatttaggtttcaattctaatttctttttttttcttttttttcataaatgtatttagagcaaataaatttgggtttagggctttaggggtttaatgctgacctttgactaaattgtgctactatccgttttcaacagtgttaccaataacataacccttgtcactgaattaagctaacgtcgcttttaagtttaatattactaactgaatttagctaatattgccttgtggattttctatataatttttcattgtgttgccatcaagttattgaagtaaactgaggaagctgggatgtttgatgtacccgctgctagttattcgaatgttatctaggctgtttttggccccattcattgttttgtatctgtacacttttgagtattgttgacattggtttctgcttgttgacaggggtgcagtattagagat

SEQ ID NO: 81196 - DNA, 780 bp, Citrus sinensis
  Intron number 5 from transcript orange1.1g029352m (locus o range1.1g027737m.g) derived from phytozome v7.0 (chr-ID sc affold00134; pos 207709 to 208488 reverse strand)
cttctgatcttaagagaaaagctatcaattatcaggtcaatttcaaatttgcttttctttcttcttttagttatcatctctcttttggtctatttcgctttgcattggtaaacaaagattatcagactcttgttatagcttcagttgcacatggtagtgacatgactaaatccatggaatttaatgctaagtttcgttgcaaatatgtcaactttgctggtttgtcctatttattagttcaatcatgcatcaataatgtgcctctcaatttttagagaagaaaaggtagaagtttttcaaaatatatgtaccctctatagagcgtctgcaaatgtaaatcatattagtgcccatacagataactttctattgcatgtttcagacaccacctataaccgtagagttcgcaatgcacaacgtaacagagataaagaatcctaattttcctgttctgggcatgcaataaactatccattttccactgcattaatgttttggttgtggaacgtaccgcatccattctcctatgcaattttatcaaaagtgtgtgtcagatttggagaccaatgcatttccttttgtgcccaatttgcaggctgcaaatattgtttcctcgagcatacagcctcttcagaatcttgcagtagtggtctgtttctaaaagccatttcaatcatgagtttaaatgtttattacatggttgtaatttttttttttgaaatttattctttttgcttcgtttatattcacagaagtacattgaggaaaaagctggtgcag

SEQ ID NO: 81197 - DNA, 552 bp, Citrus sinensis
  Intron number 1 from transcript orange1.1g020913m (locus o range1.1g012129m.g) derived from phytozome v7.0 (chr-ID sc affold00954; pos 23762 to 24313)
ttcttttgggttctcttggtgactgaggaaagtaggtaaaacttatatgttccttttgatattgtgattctacttcttattcttttttttttcttgaaaattttctcttttgttggtcaatttggttttgtaagcattttttactttgttctgtggttttttttgtgtataattggaggacatcattcatcttttaattatatttaaatataggacaggcttctttctttggtttttatgtttctcgtatacttgttttcctgtctttattcattttttctaatgttgtttgttgattaaattacttgaaatcacaccttttaatttgggtcaatgtgaatcctgttcaatgacaaacaattaggacagcctttcaagtatattctattccaatgtcacatggaagaatcttttttatttgttctacttgctgagttttctctacatgcagccatttctggggttctatgacattatatcataaacaattccattaactggcatctccttggttttttcagctggttttgttatcgattactgttacctccc

SEQ ID NO: 81198 - DNA, 897 bp, Citrus sinensis
  Intron number 2 from transcript orange1.1g033350m (locus o range1.1g033350m.g) derived from phytozome v7.0 (chr-ID sc affold00141; pos 99776 to 100672 reverse strand)
tgagaatctgaagctactgccattatatattctaggtattacctcttgtttatggtttgacaaatattagttgtcattctagtaaaagatatttattgtttttctctgattatcctgtgttttcttttgcattatttctgccgagcacttggcttgttttctaatatgatatgcttcttagttcagctgctgacttttatatcttgaacaaggactatagagctagtttaatttgctgcaatatcagctaaaatgttctgccactctcttaacttcttatgccaaaattgagcaaaatgaaactatggttcgactgttggtgactagtacatcaaaagaattgtcgaagaaatatgttttcaaagttgattgtgctgttctatcagtactttaagagtgctttaatttcagaatttctttcgtttttgctagacaaggtacttcatcaacttaggagcccatatcttgttttgagtgtcttagtgttatttggggggcatgaaaaaggatcatttaccttcccatgtttgttttaaaattgttgatgttgaagtatataaaaactgtataaattgtctgttttccctctcataattcaataaggtaagaattttccaggaaaacagatattgtcggagtgtttttgaaaattttgaatattcttagacttaacaaaacctttggtctttgtgggggcaagtgaacaaattcacaccttgtaagtatttggtcttcctagctgttaagaatttttctcacagctaattactttataagtctttttgtggacggatttcagcattaataaaaaatatgggattgcaaactgctggaaggatagatgattgctcctattggattactcatgtgtccttcatttctgtttcattggcagta

SEQ ID NO: 81199 - DNA, 588 bp, Citrus sinensis
  Intron number 1 from transcript orange1.1g033350m (locus o range1.1g033350m.g) derived from phytozome v7.0 (chr-ID sc affold00141; pos 100797 to 101384 reverse strand)
aagaactgctgagtattttctctgtggaaaaggtgtgctttgcgctcatccttgttttaagtcttcccccttataatcgatgtagtcatgtagataaatacattatatttttgcacacttttagatagttttcatgtcatgaacttgtctggaaattttttagtgaaaaagtagctatttaatttcttctatcattttttgatgagtatcttctcttttaactcttcactttgctttccttatctcatggcactaacaatgacatgtaatcagaatatacaatatgctagtactcatttcttgaagcaaggtctctcattttctaccgccattcttgttttcctattatttggaattgaattattcttatcaatttcttcaagtgcaataatattgataatttggtacattatgggcaatgctataaaaaattgtttgatttttagttcatgctgtgaaatgaaagcttctaattacttgaccaatagatctatttgttccgtttttggtttaaataatgcaatttaacttctatttttaagcaatttgaaagttataactattttatatttgctcttgcagccgcaa

SEQ ID NO: 81200 - DNA, 556 bp, Citrus sinensis
  Intron number 2 from transcript orange1.1g026212m (locus o range1.1g026212m.g) derived from phytozome v7.0 (chr-ID sc affold00009; pos 389683 to 390238 reverse strand)
ggttagtgatgaaagattttgcctttgatttttgatatttcttcatagcttctaatcatgtgacgttcaatgttcatgactaaatgtagcgtaaaacttgtatgacctttgttaagagctcacgatgtgaaactggtgcaagctgcaaaatgctgacattcttctaattggctagttagtaacatatgagggatctgcttgtgcagttagtgtaggacgatgacattggtacctgtgtaatgctgtgtatagattaacaaagcaaacggaaagaaacacaatttcatggcaccagcagaaggctaggtatctctgggaaaaaaatgcttgaaacttcaatgaaagtttgatgtaaatacttctctaggagtgtccacgtccagcttaagcaataagcaaattgagttctttagtttattaaatgcctggaaatattgaagtggtttcacttggatagtggagttgcataaaaaatctttttttaactaacttagatgtctgaaagctgttttattgtgcaggcattgtccgaccaaaaagaataagagcagagttc

SEQ ID NO: 81201 - DNA, 645 bp, Citrus sinensis
  Intron number 1 from transcript orange1.1g026212m (locus o range1.1g026212m.g) derived from phytozome v7.0 (chr-ID sc affold00009; pos 390320 to 390964 reverse strand)
aaaaaaaaaatcaactttcattttagcgttacccggtaagcagtttatcttacagctgttgctataattttgttgtgatgcagggtttctttgtttgcaatttctgtatttcatttgtgattgtgcctgattggttgctaagaaactgatgaaagctgcaggaaatataagaagagaacaacaacttttaacaattttatgttaattataaaatcaagatcaaccaagagtcctgctccagattcttttttaagtgttttggaaattagattagatgacgaatactgaatgcaagcactcacttctgttctataaatctgatagttttagaaagtgcttatatttaccattttgtttaatatgaattagatttacagtttttggatcacatgtttgatgctggtaataaactaagttgtggtctttattgaacaacatgttggtgatagcagtttttctttgttattcaacagcagattcgaaatcactacaatcatgggttttcttgaatgaatttcaagtagtggctactttgtagatttgggttgtttgtttctttaaaatggacaagaaaggttcaattgagtggatttttttttggtcatttcagaggattttgcacagggattcaaatctcaaactcat

SEQ ID NO: 81202 - DNA, 706 bp, Citrus sinensis
  Intron number 1 from transcript orange1.1g022602m (locus o range1.1g020758m.g) derived from phytozome v7.0 (chr-ID sc affold00489; pos 91758 to 92463 reverse strand)
cacatgtaagttattttatcgacaggtttaggagtaaacagtttagaaatttatacttggaaaaacttgtatcatctgcaataaaaaaaattggattagatataaaaataatagaactgaaaaattctatgtaagaaatgtaaagatgatagtaagaaagaagaggtatgttaactagaataccttctcagttgaaggtgtgtccacatttaacatttaacatgcacctttttattcgaaagattgtcatcttatgggtttccacatttgttgtgtggttcatgtgatcaaaacataatttaaaagctagggatatgttatgtaactagtggctttcggctttatgttgttgccaaaggcaagtgtatgtacctggaccaggcagtattagcattaatcacattataatccaagataacaagcaacggggctctatagattttgggtaaatttagtgcttatgtttttctgttagatattcatttttattcatgctttcatttggcgatgatagtattcatgttgctctggtaaatgactgaagctgtcagcaggttctgcatttgcaatgttcctcacaattcattagtttatcatggttcattttggtattgttacttgtttcttaaatctttttttgaacttttattgaagatattttgtctacttaggcaagccctcatactgaggaaagaagagaaaaatc

SEQ ID NO: 81203 - DNA, 687 bp, Citrus sinensis
  Intron number 1 from transcript orange1.1g006822m (locus o range1.1g005569m.g) derived from phytozome v7.0 (chr-ID sc affold00019; pos 1182772 to 1183458 reverse strand)
caacacaaccctttgaagatatttgcataattaaggtacttgcttctaaatccatcttctaatttttgtatgataatttttttttttaaatttagttagctctattaatatcagcgtgtgtatacttttgctgagctcattctatgatctgtcgttcaagggtttttaaaatttttggtacatgtcattatttaatacagaaattaacttcttggctaatttagtgaactaaatgtgaatcaataaattgtcttgagctaattagaatgtgatatgactgataaactgttttgccccttttcttttttgaacttcaaagccttgtacagattatttgctgattttaatgctcattgctcttagtttcgtaaccttaagagaggatttttgagaagtgatttgtgagctatatttggcgaggggagaatgacgattgctaattgtgaactgaattgtgaattcctttttttgttttttgttgaaattttgactactacttgcaatatctcatgaactacaaactggatgctgcaaatcaacatcctgtgttctttcttgatccatgcctatttctgtcagtttcagtgctccctctcttctgcactagttgtatgagttcatataagaaattctcactgcttatctatttttgtcatttcctaggctgcttaaccaaagaattgatca

SEQ ID NO: 81204 - DNA, 574 bp, Citrus sinensis
  Intron number 3 from transcript orange1.1g013884m (locus o range1.1g013871m.g) derived from phytozome v7.0 (chr-ID sc affold00037; pos 506103 to 506676)
tggcggtatttgttccagaatctaaggtttgtcctccctgttttcagcttagtctgggagctcaattttgtttacgttaatggatgggggaactaatgcagaaatggcttaagatgtcaagccttgcatgcaagttactgattacaattttcctatttgttcgtatcttgggtgaaaaatgtactgagactttgtctgtttgaattgtcaaccatgtcatagatctgaaggtttacacaagtatctagttcatgtgttgttatatcgatgtattacttgaaggcttaaaatttgttaaagctgaactttcagaagtttcaaattttattgatgttggaggagtataatgggaagaagacgacattatggaatattgatctatctttgtgatctcgtcggttgtggtagatctgatctgggccaacattctaggttatcaagacaattagcgtttcactttggtctgaagggttccttcttgtatttgattttcaagtagattttatattcgacttataaatattaaaaaaatgttttttgacaatgtaggggagtcctgccagtgtccagatat

SEQ ID NO: 81205 - DNA, 540 bp, Citrus sinensis
  Intron number 1 from transcript orange1.1g012439m (locus o range1.1g012439m.g) derived from phytozome v7.0 (chr-ID sc affold00043; pos 757967 to 758506 reverse strand)
tcaagctccatgtaagtttttaactttttattattatacaactaactaacgaccctatttctaacataaaccactacacgagtgttacatattgtcaatttttaagatgtgtttcaggagggtgtttcagacagactaacgagtgttgtttggtttttgtgactgttgatgtcagcttcagggcatttgaagtttgattttttcttttcctttcagtgcttttcattattgttggaaaataaataaataaataagattatcttttgttctcttcaggtgtcttgattttggtcttgtttgcttggtaagataattgaggagaaattattttttaagtaatatgtttctgtaatctaatttataaattagaagacagttcgagctaaatctgctatgaaaatgtctaagcttttatgttccattagtaagtgatggcaagtgctcgttagtttcaatattttcctctttcttttcctttccgtagttactcttgctcatctaatgctttgttctcttgtttttgtttgcttttgtaggcag

SEQ ID NO: 81206 - DNA, 263 bp, Citrus sinensis
  Intron number 2 from transcript orange1.1g030126m (locus o range1.1g030126m.g) derived from phytozome v7.0 (chr-ID sc affold00006; pos 2442879 to 2443141)
aaggatattatcagtaagaagtttctcttttatgtggctttcaaacaagttattttgccccatggtgaaatttctatttgtgaaatcaaaaattttataatgaagttttttccaacttattgagtggtttttacctagatttccctttcgatacagaagcaagattcctctgttttcttctcaatattttgcttgttatttaattttatgtagtggaccgcaatgatcagttgatattgtccttttctaacattgttacagaa

SEQ ID NO: 81207 - DNA, 867 bp, Citrus sinensis
  Intron number 2 from transcript orange1.1g034948m (locus o range1.1g034948m.g) derived from phytozome v7.0 (chr-ID sc affold00006; pos 982288 to 983154 reverse strand)
tcgatccaggtaaattttatggttttttagataaagcttatgctttgcattgatttatgttactacttttttttttccatgttggtcacgtttttgataagtgaattgagtttttctgtggctttgcacaactatgggttgttgcaatcaggatggtagtgcttgattgtcactgttttcgtgactttaattttaaggtttgattgttacaaatgcagtatagcggttgatactgatacttttaacttgaagtggagattctctattaaggtaatcacaacaagtggtgataagcggcaggcttgttgcttttgcctcattacatgcaaagtggtgctaaaactcacaatggctctaatggactagttaacaatgtttttcagtgtatgaggtgtttctgggaccttcccactagctactttttcccagcagaagtgttggggtgacgcgaaaggaattctttttttattttgggaagggggggggggggtgggggattgagaatattaggactcatttcttcctgattactgaaattggctattattttttgggaagcttcttttcttgcttctataatgtgtagttacgtgctcatgaggattatctgctagaaaaggcttttgctattctcaggctgtatgttttgcgattgttgatgggcatacgaggaggccttctacacaattattatagcatccatttactaatttgtaatattctcggatcttctgtgttgttcaatgttgcatttgcatattattgaattggttttgaatttcatattcacactgaataatcagctaggtatgtttgctggttgtttgttaatgttctgtttaactgtatatgcagtgcaaggtgtgt

SEQ ID NO: 81208 - DNA, 677 bp, Citrus sinensis
  Intron number 3 from transcript orange1.1g012372m (locus o range1.1g010205m.g) derived from phytozome v7.0 (chr-ID sc affold00096; pos 376976 to 377652)
aaggtctttggttttattctttcttttttcgtctttatcaacatgacctatgatactgtttgctatcacagatggatcatttgttggattcttttgtttgctaatccttgtctgatggtcatagaaatgctacatggtgcagatgcaaacaaactagcttgattgtggaccttaaatgataaaatacctataagctggtgacacatttcttgattcttaaactggaaacggtttctttttcctctcatatttcattcttcctttgtttgtcagtctttttttctcctcgctttttgtccggaaaaacagttttcagattttcagatatgacctaagttcaaaacattgactcttaactcataatcgataattgctataaataccctgtcattttaatagtttctgattatcactatacaatatttatctcctttggcaacattggatggtgttctgctgattgtggattggccttttatattaatgtacactggtcacattgtagatatcatattttatttctaacagttgattttttgttttaattttttgtagagattgaaactgaattttgtatttcactctcaaacataaataatgcgatttttgttggtttagtaacatttgatattgctgatgggacctttgatgtcaatttttagaaagcttggtaaagg

SEQ ID NO: 81209 - DNA, 485 bp, Citrus sinensis
  Intron number 1 from transcript orange1.1g044432m (locus o range1.1g044432m.g) derived from phytozome v7.0 (chr-ID sc affold00028; pos 1126915 to 1127399)
cggagcctcgcttcagcgtccaaggttcgtcccaggtaccatttttcgttttttctactctgtatgattttgatttgtaaattttgtaatgtgaattgtgtttcacagtgttcttgtgcaactgattgcattgtaatgcgtcttccatttggatgaaaacttgagccatgcataaagggattatcttgttatccttgaaattttgaaaaactaggaagggcctgtatgcacacacataatcatgtgagcagggtttaagccccaaaacttttggtagcatgagattttacgatctcaactagatggcatccacattgactatatctatactgcatcacttcacttctgtcgctgccagaaagcatattattgtatgtgttaaaatttattcctcgtgtactgtctatgcttttcgaattctcatactctttaagaattattattattattattttgacttgtttagttgctgcttataggtaagc

SEQ ID NO: 81210 - DNA, 811 bp, Citrus sinensis
  Intron number 1 from transcript orange1.1g000272m (locus o range1.1g000272m.g) derived from phytozome v7.0 (chr-ID sc affold00013; pos 1400754 to 1401564 reverse strand)
agaggttgcggtggctctccccttaccacttctcggtatgcaattaagcaattcaagtttttgatgatgcaatattgtgaccttggatgttttgatacaattaggtggttgtgtcgataagagtagtcatcttcttttttctgagtttgttttatttatttgtttattttccatataaactggatagcaatatgatgaaaagagactaacacttgtagattaactagcaacttttgattgaataagacattgattattgtgttgcttggagtagatgtgagaatttgacaagagaataagtggtcatgcttgaattgattataggaacaggagcagaatgctctttgccaatagccaaggtttttgttgttattttgcataatagtgttttggattgattgggtgggactgctagtgtgtgaattggagtgagggagtttttgggtaagactagtaggactgggaggtagaaagttgacaattcttgggctgcagtagactcaactcatttgtttcttatttgtttgttttaccctccaattgtgtgtgtgtctgagtgtgagggagagaggggacaacttttggtgtcttgcacttgtatgttgttagaaaatgagaaaggggaaaaaaaaatttatttgcttttatgtatgtgaaataagaagagaaaaattaaaagcatttcattctcaatctctagatgactagtaattttctccaggctcttgttaaaagattattgcaaaaaccgtctgatggtagggcttcttaattacttcattatgtaggttatttacagctgctgacagcg

SEQ ID NO: 81211 - DNA, 800 bp, Citrus sinensis
  Intron number 1 from transcript orange1.1g028845m (locus o range1.1g022037m.g) derived from phytozome v7.0 (chr-ID sc affold00013; pos 1097594 to 1098393 reverse strand)
ttgtcggggaacgaggtgtttaacaacaccatcaggtatgtgaccttagatctgtgtgcatttgtcatcttgctgtggctaaaaggagctgaaaaaggagaaaaaagtttaatcgtagcagtggtataattttgaccattattgcaaagattcgttgacgtataaaattggaaatgttgacttattttatttagaggatattaggaaatttagtttttgggtgttgtaaggatttatacggtgatggggtaataactaaagaaataaattgttatttctattgaaagctttgagttatggactctgtaattagcagtttactgctgagtcttatatcttttatggaagaattaggaggaaaaatgtatatttacctatcagcttaaatttttgggctgaatggtttatggaacactttctatatgaaagaattcgtggctgaagttctagctgagaccgaacatgttattgagggcaatggttcaaaaaagatagataataatggtaatttggaaataatgggtaacttcggagacagcaagacaggacacatcataacaatgttgaagtgtgattatgagtttggaaacactaatgtttgtgcactcatctttgcctttctcatttacaaccattggagaaaacagatagaagatgcacaattagctttgtctaccaacacacttgttttgatgtgtatttcaacttctcagttttaggctttgacaattttttcatgtgtgtatatatgtatcatattggttttataagggccacggcaatcccaacttctggagtga

SEQ ID NO: 81212 - DNA, 438 bp, Citrus sinensis
  Intron number 2 from transcript orange1.1g047226m (locus o range1.1g047226m.g) derived from phytozome v7.0 (chr-ID sc affold00018; pos 1718072 to 1718509 reverse strand)
aaaggttataatcatttatgagcttaatttattcatacttatataataaatagaaagtgatatcagttaacgagtctatctcttccacagacgtgtggtagagccatgaaattttcagaaaaccttttttaaaattcaattaaaattttttttgtcctcaataaaaattgtgatttttttccatcggttttgaataatatatataaacaaataagctcaaatttatattttcattgtcaaaatctctttaaagaatttgttaaatttaaaattatttaaacatacttgagagaaaaatctaattttttacagtaaattaaattggttcctactgatcttgaaatctggcaacgccataatatatatatttttaaaatattgtacgtaattatttagatatataagtggcatcacatagtttaatttgaaattgcagat

SEQ ID NO: 81213 - DNA, 378 bp, Citrus sinensis
  Intron number 1 from transcript orange1.1g006488m (locus o range1.1g006488m.g) derived from phytozome v7.0 (chr-ID sc affold00186; pos 222118 to 222495 reverse strand)
acgaaacctccaaatcatttactaattgaaaaaaggtgagtactatagctattcaacatcttcaagcatattttctatagttattcaacatcttagtttgtagtttgactttcatcttgcgtgactttcatcttgtgtgactttcatctaatttcttttgaagaaaaaaagattgattttttgtttaatttactgaaaacagtttcattaacagcatctgggtttgtttagtgtgattaagtgaaattgtttcgatggtttctggatgttttgcaattgattgattactgtcaagcaatttatttgtgtgtttgtgtatgtgtttgtatttgtgctttactaggttgggaggttatcatctttggaggtgcaagttga

SEQ ID NO: 81214 - DNA, 1019 bp, Citrus sinensis
  Intron number 1 from transcript orange1.1g014603m (locus o range1.1g014603m.g) derived from phytozome v7.0 (chr-ID sc affold04685; pos 4439 to 5457 reverse strand)
tattcatccactgtcggtattctccccgctaggaggtatttgcatggtgatgcgttgcatttatgcttagtttaattcaagttgttggatatatcattgactaagtgagtgctccttaattgctgttaaaagattccattggcatttgagttgtgtcatacgttcttggagacgacagaagtccaatcgccaatgtcattgtcatcattattataagattatattgtcaccaagaggcagttcttttttcttttttttttaattagaattctattccaattctagttttctttttttaaaatcactattccaattctagttgtttgcctataattatattaaattttttgttatatatggaaaattaaaatatcctctttgaattggttttgcttttggtacattttaatcaacttaatagaatagttaggtaccatatactgtactcttttctgtctttctttctaatatttatttgttttttttcctttgttcttatgactaatttgttatgaagttggtatttgatagtttcataaatatgatttctaaacaataactttgaaaaaaataatacgaaatttttatcaaataaatgtgggagtaagtcacctaactttcaaactacagttgcaagtgtttactaaacatactagagttatagtttaaaaaagccacaactgttaaataataatagtaaacagagattgagtcagtttcttgaaaagtgaaagtaatttaaagtttgtaaaatgttgagcattctgtggttatctttgaatgttgaacaatgagatggggaacaagaatgtcaactttgtaacattgaagatgtgaagagattgatattagaaggaaaggtttatatcaaaggggtttttgaattatctcatagataactgcaatcttggtggttaatctcaatattattggaacagaaagtggactaaaatgtacaacctgttcactgttgtggaatttcagggctatcgcagattatcttaatcgtgacctcccat

SEQ ID NO: 81215 - DNA, 528 bp, Citrus sinensis
  Intron number 1 from transcript orange1.1g039828m (locus o range1.1g039828m.g) derived from phytozome v7.0 (chr-ID sc affold00668; pos 85649 to 86176 reverse strand)
ccctgtgaaggttgccattgagctacaaaaactaggtaagtagtattttccagcaggcaatatacgcatgcatgcatcttttatttgaattcctagaatattcataaaaaataattatagtttattgaaaattctcgtgtggggatagcttcattttatttagaaagatgcgaaagaacgctgaatgccgacagagcactgtcagaactattgatacatctagcctgagttaccgtgttaattgattatttttcagtcaacacaatagcgttggccagatgtcatgttatttttgttagcgctctgtgaaatttttctgtttagttatcattgctcttttaattatatttttttgtttgtagtatgattttacgtatatattacaatttgggatctatggactcaatgatctactgagaatggctaagaaatctgtctcaattagagatgctgcattttattagttcttaatttgtatgtgtaaataaaacttctaattttgtttccttcaattcaggtttgttgaaa

SEQ ID NO: 81216 - DNA, 963 bp, Citrus sinensis
  Intron number 4 from transcript orange1.1g019494m (locus o range1.1g013150m.g) derived from phytozome v7.0 (chr-ID sc affold00104; pos 243709 to 244671 reverse strand)
gcagcttagtgcatcaggagaaagagcacatgtgtgtttgtctcctttctccttttccttaacactgtctctttcttccctacacttcctccttaccttcctattcgtatcattctaatagtttagggtgatttcatttcttttctcttgtgcatccctctgtcttttcacttctgcgtgctctatgctatgttttggttgttgtgtagttaatgatggtgtacgttttatccagtatgatcattttcaggcttttgtgataaatacttttacttaatcaattggattttggttatagtttcttttttttagtgtaaataagatttgtctgtctaccatatgcaaagtttatacgtatagaatttgactcccccccctcccccggggggttggtttcagtggtgttgaatgggggtagaaacatattctcactcccttgttcaaagtcctgagtttatagagcagtcagtgatcctactaggttttaagaatatgatgttacttttagcttgaaagaatgaatctaattagttgtttttttgtaataatactatgcagtcaactgccgcataacatattgaaaaattgccttttcttagttagttttttgaaagatagatgcttatctttttatccattattaccttttcaactttcttgtacgtcttggttcttgtacaagtgttgatgcaagcttaagtctcccaggagtagtagagttctctagaactccttatttccttgcttcaatgcagttttctatttatcttggagaaaaaaatgccactatctgtttgtttaaaacctcaaaatttgtgtatcaacatttatgacaattcttagatgatacagcgcaggatattttctttgaaacttttagaatatgtgtctcacactatctcttctaaaagtcattttcatattgcaggtcttttcagcatttggttttgtgcataagataac

SEQ ID NO: 81217 - DNA, 263 bp, Citrus sinensis
  Intron number 3 from transcript orange1.1g021552m (locus o range1.1g021552m.g) derived from phytozome v7.0 (chr-ID sc affold00270; pos 196323 to 196585)
tgaaggttagccatctttgctgagtgattgtgcaaacaaaaggagattttgaattatgtgtttgtgtatcttataatgatttgggtttgctaaactttaggtttttgtttgaaaatataagattcatactgatccctgaatcatgtcttttattgactaagaaacactgactaattgcttaatttgactggatttgttgggtttgtcttctattatttgcattgatgtgatgatattttccagatagtggctgctagttccgt

SEQ ID NO: 81218 - DNA, 542 bp, Citrus sinensis
  Intron number 1 from transcript orange1.1g045913m (locus o range1.1g045913m.g) derived from phytozome v7.0 (chr-ID sc affold00040; pos 498367 to 498908 reverse strand)
ggtatgctatttacattttttgctaaattatatatagttttaataattattttcagataaaatatgactgaaaattaaattttctacccactcatatcagcgtaatcgtttatcttgttgttagctaaaatattacacgaatgtacgtacaaaagaatgtcattcatttggttagattaataaaaaaataaatacttttttcaaaatagaaatgtgattacagtaaaaagattatcacacggggcagaaggaaaactatgtagaggcctggtccctgaaaccgaaaaattcaaataaagaaaagggtcttcattggaattttactcattttatattgtagttatcaggtttattgtatacacgttatagccttacatataaaataatatgtttaaccacattttttgcggtttctaacattatgtgcacctctaaccaaaatcatagttgcattcgccgctgcttagaaatgtttcaccataaatgttttactgtatgttaaaatgttgttaactctggattcacaggtggagcttgcgggt

SEQ ID NO: 81219 - DNA, 332 bp, Citrus sinensis
  Intron number 1 from transcript orange1.1g025565m (locus o range1.1g025565m.g) derived from phytozome v7.0 (chr-ID sc affold00088; pos 471193 to 471524)
ttgagaagcctggcttgattattctgggaaagcaggttcgttttgatcaaatttttaatcaatttgtgggttttttcttcggggatttaatattatgttgcagtgaagtgattcctgtttagttctaaagcaagttgagaaattggaaatgggtgtataagcttctaatttcgatgaatttaatactatgtgaacataaaattttgaattttccttacttatgttgtctgttgcattggaagaatgtagttttgctttttccgcccttgatttcagaaatttatgcagaagattgccgtttcttatgacacagattcttgtgtaggcaattg

SEQ ID NO: 81220 - DNA, 681 bp, Citrus sinensis
  Intron number 1 from transcript orange1.1g024548m (locus o range1.1g024548m.g) derived from phytozome v7.0 (chr-ID sc affold00018; pos 41634 to 42314)
gacaaggtgttcgtggtatctctgatataattacggtatgaggcactaaaacaaattcttatggaaatatcaaaatatattttccctttcatcattagctttattctcttttaaaagttgaaccttgaattttattacttctcttcatccttgcaaagtactcgacagagtacttacaattgaacctgttgataatcattgactatatcttttattcagttgatactctccaattaaatggttatgtcctttcttgttatgtttatgtccttcaaagaataaaagaaatgagctaagacctttaacatccttgtccaaggaatttttatccatttgactttcagcaatttttagaagatatttaaaatggcgtgacttactttatccaggttaggtagaccgagaaattaaacagactaataaaattaagttttgtttggaaagtctggaaattaagttacgactttctgtttcgaacagaaattttggacatcccaatgcagaatggtccccaaaacttctgggagagaagtacctaacattattagacttatcgttgagaactagtagtttggtgttgtagctctgatttctcattaaacattttagtacataggaactatttcttttgaattctaattattggtgtctttccttaatcacagatccctgggctcgtaa

SEQ ID NO: 81221 - DNA, 882 bp, Citrus sinensis
  Intron number 2 from transcript orange1.1g040830m (locus o range1.1g040830m.g) derived from phytozome v7.0 (chr-ID sc affold00211; pos 212495 to 213376)
gccaaatcaaacctgttcgattgctcggtctcaaggtttttttttctttcttttttttcggattatggtattttgtcattgttaaatttatgaataaattccgctctgcatgactgctgctggcagagctgtagttgtatagcttttaagccaatgcggttttgtctaatggtcttttgaggaaaaaaaaaaaaatacaccacgatagccaacagactctttctgttattgtgccttgagcaaataaaacataagtttgttttttgtcttctaaattttcactatatttgatattcatttgtttatatgacttgtataataagaatactgacttgcatgcacatccaacgctttcaaatgcaatgctttcatagccttgagtttagaacagaacatactgacattgtgaggaaactgccttaatctattttaacaaagttagaaaaagggaaacttcgttgtacagcctttcattttttctatgtggaatttgtttgtgggttattatggttattctaaaacatctatgtaaacttttaggaagctgtagctgcttctgatggtcttatgttcattaggagaacatacattgtagctgcttctgatggtcttatgttcattaggagaacatacattgtagctgcttctgatggtcttttgttcattaggagaacatacattgagttctttgatagtgtgatgtatttaaaactgttatttatggtctaatattgcatcataaacttagcaaaaacttattgctcactcgtagtttccttttgcattttgtatctgttatagtatagttatcttgcttattaagtctttcctgttttgcatgttataggtttggccaattgaggtggacctgaaattcttaga

SEQ ID NO: 81222 - DNA, 430 bp, Citrus sinensis
  Intron number 3 from transcript orange1.1g009894m (locus o range1.1g009800m.g) derived from phytozome v7.0 (chr-ID sc affold00405; pos 62947 to 63376 reverse strand)
agactgtgcacccgtacattagtaaagttctcgtaatttttatttatttatttatttatttatttttgctctctttgatttagagtatgtggtggtttctttctaaactcttcttttattctttaattgctgctgacatgttcgatgagaaacacatatcaaatttgaaattttgaaactccctacttgacagcatcagtgaaattggaagaatatcatttgaattgctgccagttttcttttccttaacattaattttccacataaataaataaataaaaataaccgtttgaattgtttagaggaaaatgaatttgctttcttcttcatttaatttcataattctctttcctccattggtaatacaaaataactattatgcctatagaaagcaatttgttctattgataattgatggattttttgtagt

SEQ ID NO: 81223 - DNA, 896 bp, Citrus sinensis
  Intron number 1 from transcript orange1.1g001277m (locus o range1.1g001277m.g) derived from phytozome v7.0 (chr-ID sc affold00176; pos 1634 to 2529)
cttcattggagaaccaacaagctgtaagttttatcttgtacatttctcttctactttccgagttaatttacatatcctgtatgtttaaaaattgaagcaaagcttgaatgttaattttgtataaactcttggctctaattaagatttgcttaggtagaggtcggggcgcacactctcttatatatcagcatctgaaaaaaatttctaattacatttcgggatttattaggtataatgttttcttacggggggaaaaaaattaagtaagaagctgcggatcagttttttactttttaagaagaggatcactaataaatttaatttcgaaaccagaagcattctcatgttaactttttatactagtaaatatcttatttattgcaattaagatctatgcacaaagtatttattaaaaaaaatatatatgccaagttctttttgtttatatataatgtcaatgattagtagtaaccttaatgttcttctgaattctttctaaacgatatgtggttctggcacactattttatttaattatataatatcaatttatttatttttctttagttattaataatttattatttacttttattgataatttttttaaaatttttaattaagaaagttaagtaataaatttaatggaagtaatggtagaaaatattaaaattaataaataaaaaatattttatttattatgatgcaacttatgcaatataatatgacgtacgaaacacatcctaaattaattatacaactttgagtctttgacacttgatatatacattttcgtttttttggtgcccatagttttggatgaattttgtcgtttgcattgtattcttcccaagatgtcagtgtcaaatttttcattcagtttcaggaacaaagata

SEQ ID NO: 81224 - DNA, 808 bp, Citrus sinensis
  Intron number 2 from transcript orange1.1g001277m (locus o range1.1g001277m.g) derived from phytozome v7.0 (chr-ID sc affold00176; pos 2974 to 3781)
gtggccaataaatctggctgggaattgaaggataggtactcattcttgttctctattattattattattattattttgcttgcctagcgactacaaaacagattttagttttcatgattcaacactgtttcaattaagcagcttctatttaatacgtatatatatcatatgatatgtcgttataaaaacagtagtactataaatgaattaatatttctgcaaatgaagagacatggacgttgatacgttaaattattgtattatgaacctttgaagactatatattgatttaatgctttatgctctattaatcagatttaaaaaaaaaatacataaataaaactttattcttagattgactcttgagctagattgctaaatactaataataacatcaatcgcaacaccaatgatattcaataccattacatatttagctaatctaattaatttcatatgtgtaataaatgatcttatcaaaaattgatctaaattctctttcaatctaatttgtcgggctatagaaagaaataatgtatcaataatgattgggaaaaaaaaacagcagaagatattaaataaatttcgcaccctcaatttttatttggttgggtttgaattttcttattccaatcgtctctgacttgtgtgataataacatattactttggttatatgacttcaatttgatgaaatgaatattgcatagtttggattttatgcataatatggaactgactagttactacgttcacaccaactttaatttaaccacaacaatcttttcttgttatttcaatctgcagca

SEQ ID NO: 81225 - DNA, 852 bp, Citrus sinensis
  Intron number 2 from transcript orange1.1g003611m (locus o range1.1g003601m.g) derived from phytozome v7.0 (chr-ID sc affold00811; pos 8368 to 9219)
gaagataattgcagtcctaaagaaatttgtgacaagtaagattttctttgtctttttcttttttttgaaataatttatttcgtttttaattttagaatcatctaattcataaaacagacttataatctcctgattaataatgctgttattaaatgaagttagctttggtgttatctaattgttgatatcttgtatctgtttgtgtgaatttgggttcaccttcagtgcagcattggtaagtaacatctgccatgattgtccgatattggtatcaaagttgttgttgatatactcctatacaatgaagcagttttaacaataatgaaagacttgttatcagtaatagaaaatgtggcatatgttacttacagatgttgcaatgtagtagtgcttggaatttgtgggagtatgtatttaggcattatgtttggaatcaaatgtatttataattttgaagcatatttatgtgcagttaatattaatgtgataatgtgttctgtttactgtttttcctttacagtatgttttgttgaaaatgatttgcattatttgcatgctttttaagtgtattgccttgatttgaatccataatagtgttctatatgatatttccctgatttgggtgatgctagagaaattgctataaaatcttttgcttactgagtgatataacagttgatttgtgctatttaggggtgcattctgtgtattctctaattcataggggaggttctcatttgcattatgttcttttctatattttgtatggctctatttgtgcatgatgatgacttcatattgcaactccttggactatgtattcaaattgagaattgtgtctttatagatatc

SEQ ID NO: 81226 - DNA, 1043 bp, Citrus sinensis
  Intron number 1 from transcript orange1.1g027055m (locus o range1.1g018263m.g) derived from phytozome v7.0 (chr-ID sc affold00270; pos 9344 to 10386)
tccatcaagagtctctgcggagaacacaataggaggtaatttataaatgtatctgcaaaattaaaaaaaaaaaatctcttttcacctgtcttttcttcatcttcatctgatcattttatgtaacatttctggttctttcatagaaagctacatatatagaatcattagttgtgttatgtttttagtgcccttatctagagattagagtcttaccctcgaatgaatttatgcattttttaaaaaaaaattggagaaccagttcttcctataacaaattgtaaaaaaaataaaagtttgttcaactcgtggcataattaaattatgaaattaatgatttttatgttttaataactctatttacacaaaattttatctagtaatttaccttgtgatagttcattttccccatattcaatattagagtcgcaattgtcaacaaatccagccatccacggcggctgaaggcttaggctagttgccaagtgcccaaactttttttttttaaattttcctatttttactttttgagaattataacttttctactttaataattcttcttttatcacttatcccctacaatttttataatactcccgttgcccttaacgtcaaaatttttaatgaacaattcatcctaaaatttttgcggagaaaagtgacaatcactctctttctctattttttgaggtagcaagtgaaatggacatagaattaatttcataaaatctaaaaaaaataattgtacgtcactttcatgtgataattccatgtgataattcatgcatcttactttccacaagctgctttttttttttttcaaattaatttgagtcatttgactatcacttaagttggtattacatgtcaatccagcatcgctgtcacatcattctctaaatgtaaattaattatttgtcttcagcaaattaacatcatatgcattatttctcaaaaataaaaaattatatgtattaacatatagctaattttttttaaaaaaaaattcatgaaataaggtgaacaaattctgaaaaatatta

SEQ ID NO: 81227 - DNA, 450 bp, Citrus sinensis
  Intron number 2 from transcript orange1.1g027055m (locus o range1.1g018263m.g) derived from phytozome v7.0 (chr-ID sc affold00270; pos 10444 to 10893)
agattggagaaggtggatttggctccgtttataaggtatgttcattctataatcttacattaattacggtatatatgattgttccatttttcttcttctttttttccaaatacttttttatgttttttattattattttattgttaaaaaccgtctctaaaaatatgctgttgaaggcattctcaaattctcaaattacaataaattattttacaaatgggcttagacttatattttgaaaaaatatgccgaaagccttctcatcacagatttcgaaccatgtttattagtatatgttgtcctaattattgaagcaagtcaatactgggaatatatatatatatataagtatgaattgagtttatggttccaattcaaatgactgtggtaacactagcgttttggtttttgaaaaatgttaatatttgatcttaaagggaaggcttcaag

SEQ ID NO: 81228 - DNA, 797 bp, Citrus sinensis
  Intron number 2 from transcript orange1.1g014449m (locus o range1.1g014449m.g) derived from phytozome v7.0 (chr-ID sc affold04620; pos 3846 to 4642 reverse strand)
ccaagttgattcatcaacgtaaagataaacttaaggttagttgagtgcttatttgactggtgctgatattttctaattatggagtttttttcccaagaattttgttctcatatagttaattaatatgactgttgctgatgagtactaagatgattttgttccattttattcgaagaatgggatagtgctaagtaccatggatggacacatctttgaatttattgggtgctagatgattccttcagctgttatcactaactctgtggtacttaaaggaatcaacgatgagtaatagtttcaaagactgcttggtaattctggaatgcccctagctttgtttataatggaaacaacaaggaaagactgggcaaaaaccatttattaaaacagtagaacagaatttattgatggggcaaatctatttttgtcccaaatgtagctaaatttgattaattatctgttattgataacatttaaggaaggtcatctgaagtttatttatatttactttttactttgatgatgattttgcatttgagttgtggggtttaagtggtatatttaagttaatccattcatcttcctgtacccatgaataaattgcatctattatgcatatgtttgatgatgtgcttccccatccctttcaagctattttgcgtctgggttcatcctccccctaatgttttcagtcatattgatttggaactttattttcaatctgatctaatttgcacaattttacttgatttgcgttgaaagggaactgtgagaattcttttccaacctgctgagga

SEQ ID NO: 81229 - DNA, 500 bp, Citrus sinensis
  Intron number 1 from transcript orange1.1g015195m (locus o range1.1g015195m.g) derived from phytozome v7.0 (chr-ID sc affold00006; pos 754508 to 755007)
gtttctgctcccagctgctgattcttcaatttcaggtacttttatttcactctctctctcttgttttcttggatcattgctttttatgtttctgttgatcatatatttgtttgtcggtgaactgaaggaaaatacaagaaaaacaaaagggtatttttgtattgattattgaactagaaagaaagaaatatgcttcgtatgttttctcacatcatcttgtgtttgattgttggtaaagtgaagcaaaaaccaaggaaacgggtatgtttttttcatattaaattgcaaaacactaccatcatgagcttagatataaccggcaatcttcttaactcaactgaaatataatagcgtatcccttttcttttttttttaataagaaagataatagcgtatcttgcttggcttaatgaggctgtttgaattttaatatgacaagctttgattgaaaaaatatcaagatgacaatttttttgttttgatattggttttagcagagg

SEQ ID NO: 81230 - DNA, 787 bp, Citrus sinensis
  Intron number 4 from transcript orange1.1g023526m (locus o range1.1g023526m.g) derived from phytozome v7.0 (chr-ID sc affold00184; pos 52853 to 53639 reverse strand)
tcaaggtacagaaatattgtacagaaacttcttttttcccctcccccccagattcttctcttgataagcatgaattttgagtaaagtaagcattccaaggcacctagttaattaataattcagttttcaagctgcaattactaggagtggggttttagacgtctttactggctgtaggaccagtctcttgtcttaagtaaaaaaacatagggtatagagaaacatggaaggagattttgaagtatgctaaacagttaattattttctgccaaattcagaacagaatcttcctatgtttgacctgtctcccaatctcattttgaccctctctctctgtggctcattttgttatccattttgttttctcgtttttcgttaatagcttttctgttgagtattttttgttcacagccactatactttagtgtgttttcagcctttttttttgtttaggagtttgaagagtgaaatgcttagttaaaacttcactgatagagtagaccattctaaatggaaattttcataaaaattttcgctagtaactgatgaagaagcatgagacataatgtcattgaaaatttcaaagcaataaatttattttccatttactattattgctagttcataaattgtttaagttgtattgaaataattgtcttctatggagctcctgagggataagatggatacactgtttgcagtgagccttgcattttcaagatgtcttatgtatcttttttgggtcatttcagtgggccacagatatattacctatctagcaccagtg

SEQ ID NO: 81231 - DNA, 1003 bp, Citrus sinensis
  Intron number 1 from transcript orange1.1g044881m (locus o range1.1g044881m.g) derived from phytozome v7.0 (chr-ID sc affold00009; pos 1748285 to 1749287 reverse strand)
aatatcatctctctcttcttgttcttatcaccagtgtaagcgaaaacatgtatttatttatttgattttgagaaaagtatggactcaacttaattataatcttttgttgttgatgactgtgatttttgtagttcacgagtcccataaccgtaagttgtcacttcaccatgaaagacagttaaaaccccacgttatctgccatgtttggaatacatcaaggggcattgttgggttttcgagtagcattcattgaaactagagccgtaactgaaccgttaattaatatttccaccgagaagtaaattgcggttatcctttaggaaaagtttaaaaaccaatatctaggtgccagatttcttgtccttttcttcccttcccagctgcaacttaattccattcctaacaagatgagtggagtttgaaaacatatatgttattttcaagataagagatttatgatctcaattaggagaaggtttttggtgtttttttgagcattactccttctccattcagtgatatgaatatgaatattatcgtgattggttgaagtatcgtcgtatgaatatgaatattatcatgattgattaaagtatgcacgtagcaaagaccgaagaaaaaaaatcagtacccaagacttatccctacactagttgacgctcataaattatcaagtaattattttttctgtattcggttgacatagtagttatacatgatacaccaattaaaggtctgtcatgttaagtgccacggaagtggttccatacatcccaattagtacataacttacttggtaagattagtcgtactgaaattaatatgttaattagttaatacacaagatcaattttcaatttctgcacaatcaccccttgagaaattgaatgaaaatgagttatatataataatgaattatgaattgataaagaaaaatgattatttgataaatgtaatggttggtgcaggccaacatttgttgagatagtgaagaaagggacgg

SEQ ID NO: 81232 - DNA, 706 bp, Citrus sinensis
  Intron number 2 from transcript orange1.1g024843m (locus o range1.1g020345m.g) derived from phytozome v7.0 (chr-ID sc affold00134; pos 280064 to 280769 reverse strand)
acccaaggcctgctgaaggtgacaccttacaacctgagccagaaacaaggactaaatcactgatccgctggatcagaaccttagcactatgcattcttcttgttataataattctcattttcctcaaatggggagtcccttttcttttcgagaaggtacctattgttagtatatcttgctcttaccattgtatcggttttcttgttttcattcaccattcatgattttgtcattaaacattacttctatttgtacattacttctattcgtaaattgatggatttcagggttgttgggacttagggatgcactggatatttgaagttgataatttcctgattgtctagctaaattcttcgcatggaaatatctaaaaattatgtatacattcaaaacgaattattctgtcggaaacataaaatgagcactttcttgaaggaattttaagttgaaaaaacaaaaaatatttattataaggttctgtgaaatagaatagtagactcattttctttcctttgtcatattgtgtgtgaacttttcaatttttttgtttaacttaatgtgttttttcaagatccttccaagtttatagtttgtgaaacatggcacatcacattctgattagggtgtctttgccatatttatgcctgatattaattttgattccgaaacttttatcaatttattgcaggttcttttcccactc

SEQ ID NO: 81233 - DNA, 613 bp, Citrus sinensis
  Intron number 4 from transcript orange1.1g033570m (locus o range1.1g032678m.g) derived from phytozome v7.0 (chr-ID sc affold00018; pos 250874 to 251486 reverse strand)
ggtacattcaatttttagagaaaccctgtctgttttttttggtattgcagttgtattgttggttaatatagtctaaatttatgctaagaacaacgcttctagactgtttagcccattaccacttcacttaagttgagttgcggcttgtatgttgggactattacgttgaactctcttttgcaattgaagtgcaattgagagcatcacagttccagagattaatttccatttcaactttgtcaactgggtttacttactatcagttgattttcttgggtggtatatgatgtattattgattgtttacttaaataattcatgaatattgaatttcattttgcgtataaatgtgcttggttggtatcactcctgaaaccattgttctgtttgacttataagtggctcgtctagctgtaacaaaacatcactgctatactgtggttttgtgaaagttatatgcagtaaaccattgccattttctttttcctttgactttgctatttagggtgggcgagattgcctttcaatattattttttatggttgcacatatgctctggttagcaattaaattactgtatttgttgttaaactaatatggttttgggttgttag

SEQ ID NO: 81234 - DNA, 1007 bp, Citrus sinensis
  Intron number 1 from transcript orange1.1g045099m (locus o range1.1g045099m.g) derived from phytozome v7.0 (chr-ID sc affold00305; pos 118806 to 119812 reverse strand)
tgagaattggtttggaggcgtctctgagagtaaaggtatgtacatcactttttcccccctgtctgagcgatttgcgccaaagatgacttgatagcacccaaaatacaggaaaatgactttactgttctttattaactgtgtttgtaaaaattgactctagcttctttatttgcgccaaagatgacttgactgctggactattaggaaatttctaaaaattgatgtgactctagcttttctatctgttctgtcaaattgatcttgtcaagagaccgacaagcgagaatattctctcagcctcaggtacagaattacgtagagcactaaaagcagctatcaattgagcaacaccacaaatttcgccaaaaacaatacgttggttataaatcataaaccacctactctgtaaatatgagtgagattcagatctggaattaaagttcgggactgttttgctggggcttgaaactgttttgcgacattgtaaattatcttttcaaggttttcgcccgagcgaaaaagtcccagattttatttccggaatttcattttagattgaaaaattttctttgtgaatattatatggggacatgtttgttgaaaaaatcttgcgagtatcggagtgttgttggaaatttttagaatgctgtgtttgaaattttgtagttgaattgcttttaatgaaaattgagtattttattaattaataattactccacttaagcgtcacagtcatttaatcctcaaaatttcgtcatgtctatgaattgtagggattattgagtcatagataaaaaccagtaaatataaccacttcttttccctcataatcagtgttttagcaacttcctgatcaattcccggagtgctattttttttttttaaagtaaaaacttatatgagaaaagcccaagaaaaatataaaataaatcttgagttactaagtattgcatacatgcctttactttgcagcctacaatagctctgggaatttgaagcagctgaag

SEQ ID NO: 81235 - DNA, 747 bp, Citrus sinensis
  Intron number 2 from transcript orange1.1g014340m (locus o range1.1g014340m.g) derived from phytozome v7.0 (chr-ID sc affold00043; pos 214144 to 214890 reverse strand)
gacgtggacgataatcgaccgtgaacaccgtcactgtgagtgaaatatacaaaacctatttttatagttaattataatagtaaagcatgtttgcgaaataaatattttaaatgttctgatttaatggtttcctcgaactggatttcacgtgatggtggtagaagatatagatgtttttgttaggacatcttggtcatcttgttcttttgggattgtataattttgttatattattcttttgggattaagaataaattgagatattaatattagttataatattatcttttgagactctggagatacaaaactcagcattttggttaaggatgttaatcactggagtttgttgtatattgaattgtattgggagtgttatattcatatttgtagattgggagtgttatatatataaaggagactttgccgaattttcggcagaatctttactaatagaattattatcaagtccgttttgatgagactagatagactcgcttggggggattcggggccggtcgtttcaaccttgttggccaaagcctctgtcaaataatcgaacatctttttgatattcaaacaattcgccaccaatatcatctccttcaactcatcactgctcttgctcttcccaaactcctagtcgaacgtcttcacctcctgtttcggttattgttcttaatgctacctgttttcgttctgttttactgatttcatttattttgttgctactgcagcgagcaatta

SEQ ID NO: 81236 - DNA, 606 bp, Citrus sinensis
  Intron number 1 from transcript orange1.1g044417m (locus o range1.1g044417m.g) derived from phytozome v7.0 (chr-ID sc affold00041; pos 493050 to 493655 reverse strand)
aggtcggtcttacatttgtttcagataattaagaatagttactttgatgcacggctgatgtaaatgaatttttattcttggttggaaaatgctcttagacttctgtttggaaaattacttgataaatgattctgcacaaaacggttttgagttagataggctctttttaagttagttctcatgaatggtaatgccttgaattatgtaaataaattctgtctagaaagttgatatcatctgcaacaattactattctgttcgcaaatctgcttgttcttgagactgaaactaaattggtcaatctagtgtagtccagaaaatggtaatctgcaccgtgtcaatttattgtactgagaagataggtcattcagaaatgtttatactatgacataatgagcataattttatgcaatttccttataaaaattaacgtataatgatgtaacgtgttgctgtataacttgtaaaacagtccatatttgtagcgtgtcttctcctgtattttctgttgcagatatcttgatggttactcctaagatttgtttgtaagtagtttttgaagcagtttgactttgattttgaccaaactcttcaacaattcttagg

SEQ ID NO: 81237 - DNA, 1050 bp, Citrus sinensis
  Intron number 2 from transcript orange1.1g039292m (locus o range1.1g039292m.g) derived from phytozome v7.0 (chr-ID sc affold00139; pos 89636 to 90685)
tcttctattgttgtacagaaagggcattgcgggaggtaagaatgctttgattaatagttgttcaagaatttaattcattcagctgatttatttgtgatgacattttattcgttatctgcgtaactttcttctattgttgtacagaaatggcattgccggaggtaagaatgctttgattaatagtttgtcaagaatttagtttattatgctgattgattcgtgatgacattttactttctatgagtgaactctgacaatatcatacattagaaaattttggattttgtgctcagacggttgtgaggatagaaaattggaatgattctacaaaatttactgtgaatattttttttcttattcttagttttgattattgatattttgaatcgccaaagaagccttgttattgaaagtttaatttacattagctgtatacggataaagcttgctttcttgtcatgataaatagagatgatgtgcatgttatcgggcgtatatcctatctttattctcattttaaaaagtgcaatgtccgatcaccatacaatccatgcttgattagatgacttgcaagtctgtataaaaattggttctcaaaacatctcctaaatggattgctttgtttttgagaaatgagagctactcttgaggtgcaagatttatttaaattccgctctcataggtttccaactatgatattttattatttttttctcattccatttttttttgttgtttttcctaattatttatagtggatgagttccaatgaacttggaaaatcctaagtgtgctctagaacagctataaaaggaaccagtacggatgtgaaattgttgtactaaagtgagctgttgtctattgtactatgttcagctcttgaacctctgataatttaagtttgattattgtgatcctactatgtcaacaattgcattgtttttaagtttcagtatattgttatcggaatagttctcaatactaggtgtaatttgaaatgatcgttgctgactttcttttgcatctaatgcagccatattggcagacgag

SEQ ID NO: 81238 - DNA, 884 bp, Citrus sinensis
  Intron number 1 from transcript orange1.1g037568m (locus o range1.1g037568m.g) derived from phytozome v7.0 (chr-ID sc affold00080; pos 61979 to 62862 reverse strand)
cactaaacttcggtggtcggtatgttttgattatctgctcatctaatgctcagttttttggtaatgtgttgttttatgttaatagatatggcagtattaatacatttgttggcattttccaatctgcactctgaagtttcttttctcattggttttattcataagaatgaagtgacctaatgccattttgattgagctgggtttgtactgatggtttgaaatttcatgagcattttattatcagtaaggcctatacatttttaaatatgacaacttgattatgttctttttactggcataaaacaacacataagcattttattatcagtaaggcctatacatttttaaatatgacaacttgattatgttctttttactggcatttaagaatattatccttttgtttgagtttcctaagttcttaataatttcttgtgacaaacttgtcaatgcatctatttattgctttattgttaatttttttcctttctcctctccatcagtaatagcagaagaagcaacatcatgcacatgtaaaatccctaacattcagtaagataaaaattaccaacagttaaatggtaattttagtaaatttaaactatcaagtgtatctgtgcttctaattttgaagaatcaagcttaaaaatagctctcattgaatgactacccactattcacaaccgttacctatgcatttattgtggataaggatacttatccgctaaattattgtaaaataaatacaatacatatttaatttaacaagcatgcacgtaattcgtgcttttgtgtagcttattttattgtaaaagcatctatattcaccgagtaagttgtaaatggtatctctgagtgaagatgctttttaatatgcagactga

SEQ ID NO: 81239 - DNA, 915 bp, Citrus sinensis
  Intron number 3 from transcript orange1.1g042232m (locus o range1.1g042232m.g) derived from phytozome v7.0 (chr-ID sc affold00037; pos 837575 to 838489)
catcaatcatttatagagcttactacaagatactggttatgtgaaactattcttgatttgatttatgccaaatggtttattaattttgaaattgaaggtttccttaattttcttttctttcttcttctttttctttttagtgttacttgtagggttggatttgtgcacagaatattgagctgtggtttgtatgtcttctgaacatgccggctatatatccatcctggtctattaaggcatattatggtttggattgcatgacttggttatcaatagattgaaaatcatagaacctgaatcttgtttttttccttttttaatccttgaaactgaaatcaagtaacatgttattcaacaaatcaactcattgcccccccccccccctcttcgtttggttaagattctacaactcacagcttgctttgttgtaataatattttttttgtgaaagttacaagaccatttttggttgagcatgtcattcatgaatttgagtcacaaatgtagttggcttggtagaagttgccaagtgtattagttcatccctagtggaaggggggtggtggctgtgtcactaatgcctatgagttgtatgaggggctgatagttgtggagtgacggcaagttagggaagtgtttacagaaaaaactgatgtgatgaattaagcagaggagtatgatgattaatttgtaatttgaaaaatctgttctttgtggttgtattcatgaatgagtttcttaatggttttgtgttgtttatctggtgcatattattagactttatagttttgttaatccttcgctttcttttactgatatttctacttttctgttgacgtttgtggaatgtagtaaaataatttcccctattcattatttttttcttcttctgattgaaagcagcaaagttgcatc

SEQ ID NO: 81240 - DNA, 480 bp, Citrus sinensis
  Intron number 1 from transcript orange1.1g041314m (locus o range1.1g041314m.g) derived from phytozome v7.0 (chr-ID sc affold00247; pos 10850 to 11329 reverse strand)
ctcaagcagttattaaagcattcagtgaactttcaagtggatggggttcaaatcaagaggttacttaaaagcgatctgctgacacatgttggagctcacattatggtatgttattgagcataatcaccatgtttccatctattattgacatgcttgagataattttgaatgagggaaattttgaacaaagatttcaagctacaatgttatattaagtgcatgtaattatttgaatttgtgtttagtttgttgttaatgaaaaaaattcttggatttgcacgagttatcacaagcatcacaaaaaaaggattaagacattgtgaatgctataaaattaattggagtgtataagagaaacttacaaaatatgagagaaaattgataggactctttacttggtgaaacttcttcttattgtgtgaagcatgatattgatgttcctaatatggatgatttgtttcaaacttaagggagatcaca

SEQ ID NO: 81241 - DNA, 773 bp, Citrus sinensis
  Intron number 4 from transcript orange1.1g006144m (locus o range1.1g006140m.g) derived from phytozome v7.0 (chr-ID sc affold00442; pos 10813 to 11585)
gttattacgggattgaggtgggtaccaccaccaacttatctagattctttattgtcaatgttgctaatgcatcctttttgaagtagctttgtctcattctatgttaaaactaggttagtttataaatttgtgcttcctgcttttaatggttttcaagtggtagatcttctcggcaacacatgcgatcattttatgaagtttatgattgaggcttgccccatccattgtcctttattgcacttccatggcaaagctaaattaacattaaacttgatatgacccttgttcttcttttttgtgttttggggtttcctataaatgatcatgacgatctgagatgagttgtttaaaatgttacagttataggcatctgagatgttatcagatcatttttagtccaacttccaagatataggatattagatttactgtaaaatcatgtctttctcagacatttatatatcggccattgtctctaggattcagtagtcactcctctgggacatggtgatgatcctgtgaagggatcaaaattttggtcaccaacatatctgatatgcaagattctttgaaactacattttatggatttcttctgcctgcagtttgttgaaacacaaaagtttgctggaaaggatgatgaatatttttttcctgtatgtatatacaagactattttgttgcctttaggctttaattaatctggatttctttcacgttgccatgcactttctaataggtgttcccatttggctcggtaccattgaaaaccta

SEQ ID NO: 81242 - DNA, 733 bp, Citrus sinensis
  Intron number 2 from transcript orange1.1g038812m (locus o range1.1g038812m.g) derived from phytozome v7.0 (chr-ID sc affold01461; pos 22470 to 23202)
tgtgtcaccgtcgccttccaacattcctcgtgaaggttatctctgttttagtttcttttttcattttttttcaaatacatattgtgaaatttgaggtctttgtgttgatttatttcatgaattgagctgattttatgctaattgatcagattgtcacaaaccctagaatccgtcgctgccgccatcgttgaaggtttgctgctgccaatattctgactttgttatgaagtttaaattctgactttcatgtaacatcttttgcttgtcagttatgaaattgctgttgggaattttagaacatatgaatttatttataaatttttaatcattacgtgttttaagtgaaatgttttaagtgaaactgatttgctgggctgcaattgtacgactaggtgtttgagaagtgtttattatttttgaagctacctaatatataggacttgaaattattgtttttgttctttttttttactgttatgtatgtgatgaaaatgagggaaaaaaaagtcaaaattaaagtgaaatgcccaaaaatccaggtcgcctagaagaaaaatgattcattgttttgggtttgtttggttttctgaagaaatcaaaccgaacccaaagcgtgcggtgtaggctgcaatttggttaaaatatcagaagaactggctttcctttgtcgaaaacccttcacctgagacgggcttgaaagccttgcagtgttgctactttagtgcagacagtg

SEQ ID NO: 81243 - DNA, 667 bp, Citrus sinensis
  Intron number 2 from transcript orange1.1g009330m (locus o range1.1g009330m.g) derived from phytozome v7.0 (chr-ID sc affold00037; pos 214728 to 215394 reverse strand)
tttttacaccccattccaaagaaaaactagccaatgtaagtgatcttgtggctatggtgtttgtcggaagctattgaaaggaaaaatgaaacttctttgctgttgaataatatatttgctttttcagattttcctttctgctagtttctttaaaacaaaggaagaagaaagaaacagttgtagttggccttatgtgtaactgaaattgagtactgaaaacctgatgattcctgatggattggtagtgcttctggtttcaaaacacataaatgatcaaacttactaatatgctatttggaaaagctgtaaaattgtcagatagaataagttctgaatatatatgatgggcacgtaaatcgcttgggatgcacaattttgaattcttttgcagaataaaggctacaaagtctcgatttcggttttgaagttgtgtccctgctcttgtcaactgttgaaattcgtatgtctctgttctctagacaaagacaacgaaattgtctagggaaaaatagttcatgaattttacatattttcacttcacgattactttgccttgatggaaaagcattgtatactgtgcttatatatgagcagcaatgatttctcttagctaattcttgatcatattgcaggaatcagataagaaaagcaccaaagaaaagaaaaa

SEQ ID NO: 81244 - DNA, 801 bp, Citrus sinensis
  Intron number 3 from transcript orange1.1g004826m (locus o range1.1g004826m.g) derived from phytozome v7.0 (chr-ID sc affold00118; pos 399560 to 400360 reverse strand)
aacttgaccttcggtatcatcttaggtggtgctttgcttcaagaaactttcttgtgctgcatgcttgaaagttttcattttataattctgtattacatttgtctcatggtaacaaacttaaatcagcacacatagtataatctagtgcctgtgtgttgtatcacattttcactcttccctaaaaaactaacataaactgtagacttttcattcttgcatgaagaggaatatgcctctcatccctagttaaagttattgactgttattgactgttcttgtgacaacgtaaaatagtgatagttcatgaataaaatgtatgcttggtgggattcttgaatgctctatcgaagttataggctgggtgctgtaattggatcagtgggttgtggacaatactgagatagatccctgatcgagccttattcaaagtttttatatgtatatttgattcaaagattcctatttgactgtttggatgttgataagcatataacaaaggatctaaataaaatttcatgatccatgcagattcaaaaggactttcaaatctgcactcaacaaacagtgtattaggaaaatatgatacaactgtaggcataaatctttaaaattatgatgaacattttttttaattactatgctgttgtagagtatacttttttttaaaaattattatgccgtagtcatataacagccttgttctgatttaagtttttttcaaagcacccaattgtactcatttgattctgtcattgtcatgtgtcagtcgagaaacgggggctttaaatagaataatcgatc

SEQ ID NO: 81245 - DNA, 1057 bp, Citrus sinensis
  Intron number 1 from transcript orange1.1g017170m (locus o range1.1g017170m.g) derived from phytozome v7.0 (chr-ID sc affold00006; pos 159320 to 160376)
ttctctacttcatttgctccgcaacggctgctcaggtgcgtgtttcatattttttgttgactatttttctgagtgtgctctttatgtatataaatatattaggcttcggttgagccggttttgtcttatttcttttcaaattttacttgaaatttgtggttgtgaacactgagatcttgtagttagtgtgattttttcctttttcggtaatttttgaattttatttctatcaacaattttggagctctcttttttagtttcttttagaaactatttttctttgtttggttaaattttaacctgaaccatgctcattgaagttcgaacctcccttttagttattttctctttattctttctgtttggttgccgagaaagtgaggagaatagagtgggaaaggaaacagatttcaagaagtacaacaactaaactgtttttttttctttattttattattaagaatacaaaaaaaaattaattgtctgaagaaaacaagtgaacaagactgaatgtgaatgcagttgactttttagctgaaatactctaaatgtttgcttcagttttcaagcatgataataaactacatgaaaggcattttttttttcttttttgtttgaagtattttactgcaggcttgaaagtactatgaaccgtggaatcattctgtagtcattttagtcattttaaattcatgaacatgcttgcacttagacttatttctgtgctttctcaagtagttttttttttctctataatcttgctatgttaaacaagaaattatttccttaatggttggcacgtgtcaaagttcaaacctccttaatggttagcaaatgtcaaagttcaatatatctactaatcttttctgcttttggtcttgtctaagtacttgataacaaagtcgcacagacaagtttagcgattcaatttttacagtccatacatgcctgtattttgtaatattaagaagtttctctcattaacaaagaaataaagctgcaagtttgatctggaatatgttcacgcttagcagttactgggcaatttttaagtctg

SEQ ID NO: 81246 - DNA, 833 bp, Citrus sinensis
  Intron number 2 from transcript orange1.1g038642m (locus o range1.1g038642m.g) derived from phytozome v7.0 (chr-ID sc affold00159; pos 199548 to 200380 reverse strand)
tcttgtctgtttcctgtccaagttttttacagaaggtgcttgcttttaattcagtctatgctacttgttcctcttatgtttgtttatttatttcattaatacatttgacacaccctagccccaccccaccccatcccatgcacaaacaaatattaaagggattaccccctctccaaggtggttgtgagaggaaaacttttcctagacctcttgtttccactaaaagggtcgaaccaactgggctatccccattggatacaatcataacccacttgatgatggtagttttgcagtgaggattatcaggttgaagattgattttacagaagttttaacgtctatagtgtattttatttcaagcgtcataaaatattctataatatggttttaatattgggatacctgtcatttgcattatattttgaacatagaaaattcttccttgcatttaatatttctgagtggtttgcaagagaggtatttttcctctctctctctcttctctctctctctctctctctaagttagtctctctgtgggtttgattatgaactatttttccttagaccttttccctggcaaatggtttgcaagagaggtatttttcctctctctctctcctctctctaagttagtctctctgtgggtttgattatgaactatttttccttagaccttttcccttggaaatgattttttctgaattatcacagattcatgggtattctggatatataatgacggaatttacataatattttggaatgggaaactagttgtctaattcatcatggtttatatcttgttctgatcatatatgtttacctttgtag

SEQ ID NO: 81247 - DNA, 467 bp, Citrus sinensis
  Intron number 1 from transcript orange1.1g033543m (locus o range1.1g033543m.g) derived from phytozome v7.0 (chr-ID sc affold08683; pos 591 to 1057)
aaaccaaaatcaagcatcagctaccaaaaacacctgtaagttcatcagtttcttgttttcaattattatttattattttttatccaaatctgttaatcagtagtgtgagcacgatctgagcttagcttattacaggattcccttttagactacaatttgatatactataatttatttattttttgttcttttgagttgattggattttaatttgttgcttgtgaaatgaatttcgttcgctagggaaaatgaagataaaaattttaatttacaatcgaatttcagattaggtcgtcttgttttggaaattggaactccatatatatacatataaaattaattttttttaatgaaagaatatttgtatatgtggcttagatcgtgattaataaataatctgaacttgaatgatttaattagggcaattttatataatgtgtttatgttgaaggtgggacagcaagttg

SEQ ID NO: 81248 - DNA, 1001 bp, Citrus sinensis
  Intron number 2 from transcript orange1.1g033543m (locus o range1.1g033543m.g) derived from phytozome v7.0 (chr-ID sc affold08683; pos 1322 to 2322)
gcggacagtattttcgacaagttgccaaaagcttggtatgaatgcttcctctgattttgcctttattttaaagccctttctgagtatattggatattataatttcatcttgatttgtagtgtaatagaatattctttcacagactgtgataaacaatgtcctgcttttgagatttcaagcagcagccatttttcagtccatttacttcatggttattttaaattgctctaacaaatgtagagttcttgtacattttcctttctttcttacatgatttggaaattttctggtaatcgataatatgtacaagaaacttagcctttacgatgattacagaattgaaatatttctcccaacggggagaaggggagggaaaaaaaaaggcttttctatctttcacagagagggcaactgaccaataataagttagagtggttgatgatatgaatttaattttttcacgaaatgttttctttgaggttggcaagaggtggctcgcgataacccagcttgttacttgaatacaagtttacaataaatacttgataaccatatcatgattgttattggatttatttttttatctatttactactagcaaaagacatagacattgagcctggacaaacacctaattagaatatagattatatactcattgctttcagtacatcaaggtcaagttaactgatgcatttgttggctgctaaaagttagcagagcaaaaaataacataatgttgtgctacatttgttattatgtctgcagttttaacctttctattgaataagtcaaggaaaagtgttatattgttaaaatttagagtttgaattctacatccagtctttcttgtcctatggtgattctgagatttatatgtattcattattattaatttatgaattctgatgagtacttgattgcacaacttgagtttttttttttttctttcatatgtctttgcaggttcatatacttatttattggtgttggagttgttc

SEQ ID NO: 81249 - DNA, 788 bp, Citrus sinensis
  Intron number 1 from transcript orange1.1g047619m (locus o range1.1g047619m.g) derived from phytozome v7.0 (chr-ID sc affold03364; pos 7529 to 8316)
tctgcttcagagctaggtatccgtttacttgtttaagttactccattatgagaacttaggagtgccactccagttagattagttccatatttttattgtgtaatttagtaatgagttcagattgagatgctcctttcacaaaaagcagtttctgggtatggcttctgtgcatagaattctgctgctatttgaatcattttttcttagctatatgattattgacttgctttgctatatctgaatatgctgatcaaggagcgaaaggtgagcctaggacgaagatagtggtgatagtcatttctactgctgctctgttagctgtggtgcttatagctggctacttggttcacaaaagaaggagaaatatagtgggtataatattgctccattttccttcacaaattttcgttgacgatttgatgcaggaaaatcaaactcttataaatattaaatttacaacagtcgattaagtttttatatgcaacaataactgtatgtttgtttcaagatgaagagttaacagtgcatatcatttagatcaggggcaaggtaattaaacttgtaaatttttcacctatggttctttatttacttgcactttcatattgactggaatatagctttaatagaaatttacagaaaaagaaccttctcatcaagaacatgaaaattgtagttactagttagtagtttaatattgtccagtatacgtactgcatatgtgctttcagttaataatatccaatatttcagagaaaacagaaaacaacagggaaactgatcaggtt

SEQ ID NO: 81250 - DNA, 372 bp, Citrus sinensis
  Intron number 1 from transcript orange1.1g031998m (locus o range1.1g031998m.g) derived from phytozome v7.0 (chr-ID sc affold00037; pos 54533 to 54904 reverse strand)
tcaatttcacccttcaggtctcctctttgttttttattttattttattattattactattattattattattattattattattattattattttgtttgcaattctggggatttttcttgtttttatcaaatgggcatgttccaaataatcatatttatttcagtaatgcaagcttctagattgctgggttggtacaactatttgtttatttattttaatttctggtttcgaatttattatgctttgattcctgtctatgactggttgtcttttatttttttcttgtcaaaaatcacatttttttttgagtgattgtattgaaattgattgtttgtttgaatggtaattgcctgtagcaagcgtacttcaa

SEQ ID NO: 81251 - DNA, 462 bp, Citrus sinensis
  Intron number 1 from transcript orange1.1g026020m (locus o range1.1g026020m.g) derived from phytozome v7.0 (chr-ID sc affold05653; pos 2305 to 2766)
aggtatggagtttacgtatgtcttctcattctgtttgattttttttccacaacaatgccttcaaatttttcattcttgttggatggttgggatgtgctttggcacatgttttagaataaactagaaagtgtagcaaaaattaaaatcacaattataacaaagtataatctatcttgaaatatacttgatgtcatgccaaatggtcctatgtgtattaaatttctgcttctgtcatatgatttctattcatggcaattcttcttgaattagccataggaaagctactttccatgacttaaaagaacttgaaataattaaaagatgggaacaagattggattttctgaggcttttatccccttttctggtaagaatgaaggacatgtagcaacgttgatttttgccttaatgtttttcattccattcagggtctggaactgttgaagaattctttgaagtcaaa

SEQ ID NO: 81252 - DNA, 572 bp, Citrus sinensis
  Intron number 3 from transcript orange1.1g022123m (locus o range1.1g022123m.g) derived from phytozome v7.0 (chr-ID sc affold00092; pos 162807 to 163378 reverse strand)
cttatattcaggtatttcttttctatttttgctttgacgtctctggctcatttttatatactatcttctctctctctctttcattacacaaacagtttgtttatgtattagataattgaaaaagaaaagcacgtaaggtatctgatcatactaaaacattagtttattagttattatcaatttaattggctggttctgtgctgcttttggtgatccatgcatctgttttagtggtgtagtttctctaattttctatgtaattgttgtttttggattatatgatatgcttttgagaactgattgtgatattgaattgtaaagtgtttgtttttggagttttttttttcattttttttttgggtgcattaaatgtcagaaaaaggtcttgacattctgtgattcaaatgcttatttcttttgacttggtaattaggtgttaatttcttctatttttaagttgtctatcttcaatcccattttaacttagaggcataaagaggcagagtcattaagattgatcattttaaataattgcagtctcatagacaggcagcaaatttcaagaataaagc

SEQ ID NO: 81253 - DNA, 841 bp, Citrus sinensis
  Intron number 1 from transcript orange1.1g043681m (locus o range1.1g043681m.g) derived from phytozome v7.0 (chr-ID sc affold00366; pos 40082 to 40922 reverse strand)
gcaggaagttcttggtgttggtgaaaagttggaccgtaagatactttaatttataatttcacttgatttctggtaacgtcatatgttatgcttttccttgaatgaattaccgataaatggatgctaagtttattttatggactaagtagtgctaaagaaagctggatttaattgcctatttgaagatgataaatggtttttattttgatattgcatttgtaaagtccctattgatggttatgaatgtgttataacatcttttcttgattaacttacaattctgcatccattcacattgcatattctggtatggcatctatcttccactgttgattgtctttactagttggtcaagagacattatagcgtattggaaatcaaagaatctgaaagaagatgtttgcaacatgattttaatgtctccagggactacgaaatgcacccgaccaattgcattcttaggttctttccagtggtcactttaggactagacactatgatttcaaactgttatgggaattaaggtctatgtttatcttgtaattttttttcttcattaatgaacttaagtatcgtgatatttacaaatatgtttttactttgatatctttttattctttctgtaggttatattacgttgttttcctggatttttctcattcccagaaaattaacaaaactgaaattacattgttctctggtggacttcttaataaaatccttttctctctctccctcagttgatagatcccatttctaccccctatacacttgtacagtatgtattgtttgtgttttggtattaactgtttctaatatcaattttccagaggtcagtgaa

SEQ ID NO: 81254 - DNA, 447 bp, Citrus sinensis
  Intron number 1 from transcript orange1.1g004065m (locus o range1.1g004065m.g) derived from phytozome v7.0 (chr-ID sc affold00009; pos 1150156 to 1150602 reverse strand)
tttcctcatctaatcagcagacagcagataatgtattacgcaatacgcaatcttttcatttactctggaaatttcataattaatattttaatctgagatcaattcagctgtggcgtcgatgtcgtaaatgttttatctacgatcaatcttttgctttgtcccagtcccacgttaagcaaaattagctttatatgaaatccaatgtaataaattgctgtagttgttcatctgattaccacgtaatatgccagaaaattgtattttgtgattcatcatatgctagatttggattttgttggactgatgtactgatcttcgctccgcttcagcttacgagatggtgggtgttttgaaacttttatcttctgattccaatactcaaaaactctaatgtgtttgtttgcttttgaagcaggttgaaactaaaagcccgcgtcaggaatttct

SEQ ID NO: 81255 - DNA, 936 bp, Citrus sinensis
  Intron number 1 from transcript orange1.1g008519m (locus o range1.1g006486m.g) derived from phytozome v7.0 (chr-ID sc affold00006; pos 209972 to 210907)
gaggcacgacagaaacagcagctccagtccatcaggtttaatttacacacgcaatacaccttataataatatgaaaagacgttttagacatttgagacttgaatcaataattattattattcttcccaaagcccccccacccaccaaccaaaaaaaagactaattattaattcaagaaatgggaccccagtttctgtttccagtaatatcacggtggtgattaacaacggacaagttgaaacacatatcaatattaacttcaacgctgaagcgtttgttttgaagtaattcatataagatgcgggtgtacgtggtaaagtcgttgcagcctttgctttgtcccaaaaatccgattgaaatatataaagagtaatgttattggcacattaaattgtacacactacacaagataagaaatgtattttatattgaaaagataattaattttatctttttatataactgattttatttaatttgttataatttttttatgtgtattttttggggtaaataatatttttttcacgtataaatttatacgattgctttaatttaaaacacgtgtaagtgggccttacctggtgacgcaggcaagggcaatctcgttaatgtgtagatctttgaggtggtgtgtttctcatgttatgccatgtatgtaatcgtgtttacaacttttgactaacaacgtaatttccttgtaagtttccacagaaaagaaagcgtggagcggtggacgtgctaataaataataatacttttagcaaattatattttatgataggaagattttttttaacaaattaaacaaaaaaaaaactttgcgcaaaaatattaattaacaagaatttcctagcttttgttttgaatatctcaatttaatgatttgcgggtgaaacagtgcatcgttggcgtcactgacaagagaaacagggc

SEQ ID NO: 81256 - DNA, 685 bp, Citrus sinensis
  Intron number 1 from transcript orange1.1g010375m (locus o range1.1g010375m.g) derived from phytozome v7.0 (chr-ID sc affold00068; pos 184847 to 185531)
atattggaatttcaggtaccttttccatctctttttatcctagattaatcaatatctttttgttatagagcaataagatagtaagaacttgaaatgtctgattggaaatttcactgttgcatatcttgcagtataggatcagaattataccctgtccttttcttttctttcagtttttttccctttttggttggttggttggcttaatggtttttgttcagaattacaactaattgaaacttgaaagttcaaatttttaactgcttagatcttccagaagattttttttttttttggtggttggggggtggggtgttgttggggaaggggaattagcctttgataattcggatccccttttcactttgtttagaatctgttgaattataccagcagccaacacagaggggatcaaaatatgggttctattcttatccaaaaagtaattcattgatattaatgacaatttacttcaataatgatattttagtcgtccttatcctgaagaagttatggttcaatcatattaaaaaagaatttactttttaacttctattagaaaccttgttttaaacttttagaaaatagcagaatcagctgacaaattctatttgggatggatggatgcggggcatttcttcctaactgatagttcaatgattgattggcaggaggagttacatct

SEQ ID NO: 81257 - DNA, 785 bp, Citrus sinensis
  Intron number 1 from transcript orange1.1g003231m (locus o range1.1g003231m.g) derived from phytozome v7.0 (chr-ID sc affold00097; pos 354383 to 355167)
agtttccttattatcttaggtaagcaagagagttgcagtttgttaatttcctttcgtttgtgtcttattgtgttagataatttttttttcttttaaatgtttggttttggagttctatgagcattttaagatcctgagatacaaagatgataaataaatgttcaatttaaaatctctgtgatcctctgttccttttactagtttgttcactggcttttaataaatagagagtttttactttttttgttttggcagattactttttccatgtcctgttttactgggaaaaaagagatctaattcatctctgtgaaaaagctagtttgatttcttagttttcttttgaatattatatagatcatgtgatctcaataattaccaaaaaaatgaaataaaataaaattagattatgactttgtctctgcattttgataaatatttgatgttcttgttttcttttataaatgaatactcaacaaattttagattatggcctttttccccctggaagaatttatggtcttatatactttttgtaatagcatgtactgtggtattaacccggaatttgtggattatgcaactggatatatcatcaactttttctgtcttttagtcataagttagtgatgttgttaagctaaggagcctaacatgtaataatcataagaagttcttgtatcaaacaagctttctccaacacgtcaattagagacagatttaatggttatatctaatactaatatcctcattctgatgatggcaacgacagcgagagaacgcgg

SEQ ID NO: 81258 - DNA, 605 bp, Citrus sinensis
  Intron number 2 from transcript orange1.1g012505m (locus o range1.1g012505m.g) derived from phytozome v7.0 (chr-ID sc affold00419; pos 82875 to 83479)
ggtgagtgatgattttctaaggttatgctgatgcttatctttgctgttaatcttgcattgtcctctggtatatgtgatatgtcgtataaatattgatgggcccaagcaaatccatttgatgcccattctgagttctggctggagtgatgttgctttgattaaaactcattttctttggtctacatcacgcagttttgcgtaactgcttataaattggttcaaatttggaacaatttgaatttttataactggacagggacagcaggacacaagatttacttttggtcttgcacagaacatggtggattaggttttgctttactcaattaacaatggcaatagctcttaacctctgctttcaatgtattagttaatataaaaacaaagctgtagtttaattgactttcagttgcttttactagttgtatctctgctcatgtgattcagtcttccctgttttcttttcaaatgaatcttttacatatatactgtgaattggtcatcccatcatcaagaaacttgtttccctagtgactacttataagtagtcatctaattccttttgttgtcctcttgcattttgcagtttagcttcaacaccagca

SEQ ID NO: 81259 - DNA, 454 bp, Citrus sinensis
  Intron number 3 from transcript orange1.1g011633m (locus o range1.1g007866m.g) derived from phytozome v7.0 (chr-ID sc affold00403; pos 143235 to 143688)
gactaaggtttgatactgttgctgtgttaaaaaaactccataatttctggactgggatggacattgtattaacattttgactgccaactgaaatttgaatgcaattatggatctttttggaatcttgttcacatttttatccccatgtctttctttctacaaaccttagtccatccaggtttattttaaatatggactaaggtttgtttgaaatctttttgaaatgatgcactcaagttcccagccacaatacaacttattttagtaatgattcttaaatactacgcagacctgatcattataagctccatttttcttttcttcacatcttcaatgttcagaagttttaatttttgtgttattttgtatttcttattcatgccagtgttttgttagaacttttctggagtaactgaatttctcatttcagtttattataggaagtggtgaaaat

SEQ ID NO: 81260 - DNA, 700 bp, Citrus sinensis
  Intron number 3 from transcript orange1.1g028511m (locus o range1.1g026519m.g) derived from phytozome v7.0 (chr-ID sc affold00419; pos 87917 to 88616 reverse strand)
tttcttccaagaaaaggacctctccggcagagaaggtgagtcgaacatatgcttgtttttttctttctcttttttttaaccccttgccttgtttactcttgttaaaatttttggcttgccagaatagaagttagaatgctttttttttttgggggcctgcatatggacactttttcttatttcatctctactaatcttagtaaatgatgttggttgttgatttgcaggatttatgtgaaatactgattcttattgtttgtcattttaacagaatgaaaaatatttctggctaaccatttctctgtgagcttactcgtttgattactattattagtttacatgattgtaaaatggaaaagaaaaaaggaaaaatgaaagaaaagaaagaagcttgtatcttattcttaatagctggacgtataatagaaaaaaaccctttgggtacccatgaccgttgtttgctctttttcgttgaaattgtactagtttctgctcccatgtgctgaactttgctggataacttgaaaatgcctactatttgcctctattgagcattaatagatattgttttaactaagtaatcggtaatgcgatttgtggaacctaatatatagttcatttcaaatcaacttatctagcttctgtgcggttcatttactttgaagttcttttcacaggactggaattgcatacatatcaa

SEQ ID NO: 81261 - DNA, 532 bp, Citrus sinensis
  Intron number 1 from transcript orange1.1g028511m (locus o range1.1g026519m.g) derived from phytozome v7.0 (chr-ID sc affold00419; pos 88995 to 89526 reverse strand)
aatcatcttctcccccctccaaattaggtaccctttttttattttcattttcttttaattccatcaatctcactacaaaaaaaaaaaattattaattttgtaagcataagttaatatctaactgctagtcaggatcctgaatatttcatgaattttttcattttattttatgattcttatagcttcaattttagcaatacagaattattgtcataagaaagcctttgactagaaattgatctcttatcatattttgaccaaacccagatacttgaaaatctgttttttgtgaggtaatattattgttattattattttgtttattctgtctgtttagatcttgaaatttttatgcaaaattctccaattttgacttcttcctcaaaaatgtgctgaatcctacgacggtggtttctttgttatcagcagcccaaaagagcttcaatttgatagtttgaattgggtcattttgcgcaattgtgtatgtggaatattaatgattgcttcaaaatggactttggattgtaggagt

SEQ ID NO: 81262 - DNA, 1004 bp, Citrus sinensis
  Intron number 1 from transcript orange1.1g010425m (locus o range1.1g009077m.g) derived from phytozome v7.0 (chr-ID sc affold00334; pos 87008 to 88011)
ccaagctcggacaggtttggtctctttgtcttttttactttttattttttttttttattttctttcatatgataaaatatcaattaattagttctatagatctttgcatttgattttttttttcttctttttgtttgtttgtcgtgtgctttgtgattgttagctctcttatattattttggcagggccggaaacgtcccattaatgttcttctcccaattcaggaattacctattcagcgtcacaagaaatatttagtgtcatttaatttgttgacgttacccaaaatatatctatatatatatatcctagtcttttttttttgtgtgtgtgtctctcctctctttaagaaaaggtcttttttttttttttttgcttgtgagggcagcggttatagcccccacaaaagtattgtgggagctaaatgttctttatatctttctcccttgcgaaatgcaagtggagtatggacattctctcctgtgaggggttatttgtattgggcatgtacttcatagaattcattttaataatgtaagtcccaatcatgtatatctgattgtaaatatcagtgtaatacttctgctacaataagcagttgttgtaaatatctgtgtaatgcagtaatctgatgattaatcagtctaaaaaaaaaaaaggctttttaacataggtaggttggaggaaaaggaagtcaccgcgtctttttagttattaattaatataactagttatacaagttttgtgcaattgataatcaaaatttatttataaaaattaacgttacatattattaaatatgccacatgttttatattattattatttgttttttgattctcttcaaaatacaaatgtacatgtacaaataaaataatatgatactgctaaattaacttgttgcactaagcttattcaatctgtatgtaataaaataaatgcggcaaatgaccaaatggttattatttataattattgtgaaagccaatcaaacgtgcagggtt

SEQ ID NO: 81263 - DNA, 454 bp, Citrus sinensis
  Intron number 1 from transcript orange1.1g000669m (locus o range1.1g000669m.g) derived from phytozome v7.0 (chr-ID sc affold00124; pos 234481 to 234934 reverse strand)
tcgctttaagagtgtcaagctcagttgtggcgaaggcaagtttagttttctttattgggttcatagattttctctatctattcattgtaactctgtaataaaacattgtttcttttatattacccactttaggagttgtattctaacactttacaagctatgtgcttgatgatgtgagtttaattctttttcactgtgttggtctgtttaattttttcctatacggtgtatttgctttcttcaaaaataggcttttgactcttttgagtttttatagtataaatttaaattttcaagtattagaattttcatcttgaatttcgtcaaccaaactgaggattcaggtgctatttgctaatcataatcctatgcttttatatgtgaaatattgactattatttaagtaattcttttccatgttctgctttttgaaattgcaggtggttgcggctgc

SEQ ID NO: 81264 - DNA, 530 bp, Citrus sinensis
  Intron number 1 from transcript orange1.1g011658m (locus o range1.1g011658m.g) derived from phytozome v7.0 (chr-ID sc affold00628; pos 42904 to 43433)
tctcgtttccattatcagatctcttattattacatgtatgatcatgttcgtcatcaatttttttttcaattttgtatggtttcatgttaggttacttggaaaggaagagtatatttttaattttccaaggaaaatgaaaaattttaaaaattttgacaaagtgttatgtttcttaaaaattttcccattcttttggcttacattatgtttggtcgctaagaaagtgaaggaaaactgaagaaaatgaattttgtgttttgggactatttttcttcacttctctgagaaattgaaaagttcagaattgctagataaagctaagtttatgcctgtttttatttttttttcaggattatttatttttgggttaaatttattaatattatttgaactttctatcatattagaaaatcctctgaaactggaattcttttattgttaattggtgggaagctgatagttgattggttccagttcaattatgcgattatggatttttttttttatcacaggtgtatattcggtgtgtg

SEQ ID NO: 81265 - DNA, 203 bp, Citrus sinensis
  Intron number 1 from transcript orange1.1g025865m (locus o range1.1g025865m.g) derived from phytozome v7.0 (chr-ID sc affold00096; pos 383871 to 384073)
tgttttcgccggcgttggctcggccattgctttcagtaatcttccatcttcattttctcttaagcacataattaaaaaacttcgttgtaacataaaccaaccctaattatgataattaatatatggccatgcaaacacattgactgtgatttgattttttttatttatatatttttggtttttgacagacaaggtgacagcag

SEQ ID NO: 81266 - DNA, 599 bp, Citrus sinensis
  Intron number 1 from transcript orange1.1g028410m (locus o range1.1g027039m.g) derived from phytozome v7.0 (chr-ID sc affold00293; pos 167793 to 168391 reverse strand)
atcaagcagattgtggaattgtttaggacttcgaggtttgttgatgctgctaatgttaccgttaacgggtctaatatgacaaggattttaatgagaagaactagattgcctgtttgatgggttcgatttcattttttgtttgttgtaaatttgattgattaatttgggtgcggggaaagtgaattcttagacatgtatttgaggaatgaattgcctgtgaattatggattttgagattgagttccttgttccttgtgaatcgagcattgacggccttgtattggtttctaggttctgtccagtggtataatttgcttttcttgctgttttctgtgttgactttctagttatagaagtgaaaccttaattttctgcattatatgtcagcagatgtttatatcatattcataatactgtaattgaatcagttaaattcacatacatggagtattttattctaaccattttagtgatttggtaatttagttctgcgtttaccaaagactttttaggctgtgatatgttacatgggctgtcatcaactgcctttttatgctgtttgctgaattttgtcagtaaagttttacagaggcagtgag

SEQ ID NO: 81267 - DNA, 896 bp, Citrus sinensis
  Intron number 1 from transcript orange1.1g008416m (locus o range1.1g008416m.g) derived from phytozome v7.0 (chr-ID sc affold00116; pos 262934 to 263829 reverse strand)
agaataaaccaaactcttctttgcctccggtgagagtgagtatttggcactctcttttatttgtttgtaatccagatgggttttgattattgtcgggtgtttttgtctgtgtgtgagatattttatggattaaatttattgtttcattggtgatgaattgctattcattaggtgaacgcaatgcgattagtgaaagatttgttttgtgctttgtttaactgttaacacttgggattaattttgggtccactttcgccaaatctagtgcgttgtctttatcttttgaaacaacggttatatatattaggagtcagcatcatagctcaaaatacactcagaatctgccaatggaatctagtgaggagcattatgcagaaatgtgtgtgcgtttttcccccctgtttgagtatagtcttggatttagtcacgcttggagctgagtcttttggtctcactattgttgtttactcaggttttaaacactgttactaaagtggcagccctgctgcggctttgtgctcatacattttagattctttatgtttccttggttaagctatctctcttctcttggtgtctgtgtgcaaacaagttggtgtttggacattggaagatctatcttttttcagttcctttatttgtcttcttgattggtgctttctctatgcatttagttcaatcattcttttttgattatttctttaaaaaataatattgtattggatttctggttctttgcttgggttatggacagttttgtgtaaattttgctactgtgttgctaggaggtcaatgatgatagcatttgtattcaacttgttttgtttactctaaatttatatgtttccttgttgtgtacagaattttggttctctggacaattttgactgcccaaa

SEQ ID NO: 81268 - DNA, 601 bp, Citrus sinensis
  Intron number 3 from transcript orange1.1g024929m (locus o range1.1g024539m.g) derived from phytozome v7.0 (chr-ID sc affold00041; pos 123895 to 124495 reverse strand)
aggtagcttatcaatcaatttcttaattattttatgacgtttacaactttaattttcctattatttatcaagggaactgtaatattgctccttgatcaactaatctcatcaagtcttttgtgctgttggtttctagtctcttgtgaagttgttattgaatttgaggtcattgggcctattgtctccattggtgtaatatcgagttacttttttctgggtgatattatttcccagttacttttgaagaaattgtgattgaacttcagtttgtgtgtcaactgaaataatcaaagcatcaaagagttttgctttatagagctttatatagacctggtgaagcaacctgttttttgaaaattcgttattgtatttttaatttttcagttactttttttcttattggctttaactatttttgaactttgtggcttttattgatagatatctctatttgctgcattttttttaattttaattagatcagattacctaacattgagagaaagctgcattacatactcacttgcatgagcgaaattatcttttgccattttatctatttgcagacagctaccactgctgcagaggctgatttgccacc

SEQ ID NO: 81269 - DNA, 1017 bp, Citrus sinensis
  Intron number 2 from transcript orange1.1g026815m (locus o range1.1g026815m.g) derived from phytozome v7.0 (chr-ID sc affold00091; pos 217321 to 218337)
cgtttgttatttggggagctaaaacaaaattcagggtatgcttctctttgttagaagggtaaaaatttctatttgaataaggatttctagaaaaatgtttagtgtttaccaaatgctttagcgcactcaaaattaagctgggctctcaagttgaataaagtttttgtatattgaattttgaattcaatattgggtgatattattattccctgactcatttaagagttttacatcccatcattatggtgattgacttgactttaccatcttagttgctatggttcatcaaccactcaataatgtcaagttaattgctatagcattgggatacagaagttgtaataagttgagacactagtgaatatttgatcttaacatggtatttcaatgaaatcaaatcccttttaaataaatacagtttgctggtcttacaagttaactttttggtgatattgaggttcgggggatgttatgtaacatgttaatgcacgtaaacattgtaaaaatatctgttggaagttttttctatgaacctttttccaatatttaagttcactttatacttgttactcctgggatgaacagctttagtatcagttgcttttctttcaccaaagaaagaaagagaactcagtgcctctgcaagactaaaattcaaattttgtgatggtttgctgttgtatcataattggcgatctttcatttgtgcatctctgaacatgcttgtcacatgagtttacagttttatctggtggagtaacatgacctgaaattggaaaacagatgcgggtcttctgtaattttcttataacgacaggctttatttatcttttatgttttgtttgtttctttttcacccaaataatactaggagaaaatgaaactttctggtaaaaattagcatataaatgtatgaatttaggtgtttcacataaaaatgatattatattatattatgatatatgtcctagtttcatatttttctcgcggttctgcagctggagaataatcagatag

SEQ ID NO: 81270 - DNA, 757 bp, Citrus sinensis
  Intron number 2 from transcript orange1.1g030770m (locus o range1.1g030824m.g) derived from phytozome v7.0 (chr-ID sc affold00040; pos 678121 to 678877)
gaagagatagatcgcggcgggtcctgctgtaacaggtatcatattacccaaaccttatctgttttttttttcttatttttagtttggaaaggaagaaatgatggatttgatgtttattcgaggtaaaatgtagctcagcaacctcttgatttttattttatttttaatctgtgtcaaattctgcagtttggacggttcagatcaagtctagctagttggtgttaatttaaataataataataataacaataataaatgagtttgtcttcgagacagtgccccggtgcgtttaaatttattatttgtcctcaatagttttgagaccgaagaagtcgggagagggtaattgcgtcttttcgcatattaaataaaatccttgcgcaattaaattatgattatccttaactagtgcgagttcttctggtccttcacggaatttgtctttccatttacgacaaccgcctcacaataaatcctgattttccatgtctacccaccactactgttgtttttaaccatgcagaggagggcactgtagtctttttacatgatgtcagtattcggaatattgggaaaactaataaaccacaatctatataatggggcgattatgtgtgtggagttttcatgtttgcgatttttctttcttattgactatttgactgctctgtttttcacgagaaagttttaaaaaactaaaagacactaattggcaattgcagagtccgagaagatccaaaaccctaattcggaaaaa

SEQ ID NO: 81271 - DNA, 693 bp, Citrus sinensis
  Intron number 1 from transcript orange1.1g004576m (locus o range1.1g004576m.g) derived from phytozome v7.0 (chr-ID sc affold00419; pos 21306 to 21998)
gtgcccagttctgaaaaagaggtattttttatttttttattttttttttgtacattttcttttgttctgttcttggtttgtctaatatgttcatgtggcttacgttttggagaattttaattatgtttttatgttttttttcatattcttatgtttcatgtatgattcttttgtgttgtcaaattctaggcttgtgttttctgagctttgatttttattaaatgggatgtatgaagattgtatttgtgtttatgcattttgacatgtattgtggttcttcactttgtttttcttcattttgttttgcttttgtgaaaatttgcgagctggttggcagttgatatataattcagtttcttgtaattgtttggttcatagtcctgtaagcctaagattgtaggtgtgtcctacagtccttggaaggaagggcttcactgtttgcatcttatattagttttatccaacatatgttagttatgcttgttggaggatgatatcaaagaaagagattccctagtcatatcgataagtgtattacagccatgagcaaatggaaaaatgtctcagattttaaactttactacttttagccatctaattttgcacttcagctagtattgtagaagaaaatgataatttgttgctatatggactatgaaacacttcttttatcaggaaccagttaaaagcgct

SEQ ID NO: 81272 - DNA, 716 bp, Citrus sinensis
  Intron number 2 from transcript orange1.1g024959m (locus o range1.1g017083m.g) derived from phytozome v7.0 (chr-ID sc affold00009; pos 948468 to 949183 reverse strand)
aaaatgtaagcttagcctctggtgactgtagagataccctgaaccaagggtttcacactaaaattttgtttattggtttactatcttttgggatgctaatctttattttatgtttacattttgtttttctacgatttattttgtaatcattagcactgtctggctcatgacatgaaaaatgttaattcccagttttttgaatttatatggtgcatcacatctaccgaactatcttaatacagcaaagaattattgtagcttaactggagtgtatttatggcatcaaatgtgggtaaaagcttaaaagggagcttataagactcccatattatatatgatgttcacagcctcgaaattagtagtttctctgcatcaagttttcaaataaaggacgtgtagtcactgtgccacaaagctatttgacatgcattatcaatgtcagaatctaatgtggcacctcagtgattattaatgattcatgtctgtaattttttattcttataacatgcaacatgttaactatggtgcagactccttttatgaaaatcagattttcaaatatctttaaccaatacaaacattatctggatttacattctgttaccatggatgtggttttgtatctgtcactctttctgtgttgacccttgttattacagctcagtttttgtattccgacaggtcatcgccattaaggatatcattcggcctcccaa

SEQ ID NO: 81273 - DNA, 804 bp, Citrus sinensis
  Intron number 3 from transcript orange1.1g027147m (locus o range1.1g027147m.g) derived from phytozome v7.0 (chr-ID sc affold00406; pos 42646 to 43449)
gttgaggtattttctttttcagattatttacgtatttgatttaatattcattacataatacaaccttggccaacgtagtgttgctctaaactgacggttctgaatttagttgggttctttttcggtccaatctaatccattgtaccaaatgtagtttcgaaaatgctatactgcgttttctttcacctagtattcttacaagccgtagttaatgtatttcatttgttttagaaggacaaatatcattgatgaaaataaactttttatgaaaatatgggtcctgtaaggctctcgcctcaaccacctcagctgagagagagtggcctcggctccttggtttgccccaccacccgaggcaaagtgccaaggatgcctgtcttatatttggttagagtgtgtaaatgatttgcttttgagaaagtagaacttcagccatggctgcataatgagattaaagctttagtttccaggatacattgaaattgtctcggtgcaaacaaacttatctgaagacgtaaatatcattgatgaaaataaactttttatgtaaatgtgagtccagttacgcattcatgtcaaccgcctcacctgagagagacttgccctgccttctgggtttgagtgtgtcaaaattttgcttttcagaaggtagaacttaagccatggctgcataatgagattaaagcatagtttccacgcaacattgaaattgttgttgtgcaaacttatctaaagttctgtttttgtatgtatttttgttcctgttaaataatgatgcatgactttgattgttggaaccaggca

SEQ ID NO: 81274 - DNA, 482 bp, Citrus sinensis
  Intron number 1 from transcript orange1.1g029929m (locus o range1.1g028654m.g) derived from phytozome v7.0 (chr-ID sc affold00256; pos 138480 to 138961 reverse strand)
ctcctcaaagttataatcctcggagacagcgggttagttagttttctttttctgatatattttcacgcgaatatatttttgtttggatgccgagaaaatggaattgcgtgcgcttttggttccatttgttacattacatcgcaattagattaatcagttcaattttttaattacatttattatgatattcgagtattaaatctggattgtttgtttgatcggacgattttcgcatgtaatgtttcaattctccttttctttttctttttttgaattttagggttagtttagctgcattgtcctcgaaattgtgtttggttgaaaggaaaatggagaaagaaaagaatgaggaaagaaaataagaaatttgcaaagtgtttgatgttagttggttatgaaatatgattttgttttccttctcgtgttcggtgcttaatttctgatttctatttactttgtacagggttgggaagacttctttg

SEQ ID NO: 81275 - DNA, 638 bp, Citrus sinensis
  Intron number 1 from transcript orange1.1g023667m (locus o range1.1g022918m.g) derived from phytozome v7.0 (chr-ID sc affold00295; pos 141185 to 141822 reverse strand)
actctgtcgaaggtaacctaaatttcagtttttccgttttcattcaaacagaattttaaggtttagcaaacgggttctgtgtctatttcaatttagtctgttcaatcatcatatcttgattttgttcctttgcagaacttgtttcctctcatgttcttttctttgagtttccaagattgtgatcttgttcattaagttttggtgcttgcaatgaaatagtcgtctgtcaattagctaattttgctcttttgtgttgtcttgcttgagtttatgtgaactatatatctaaaaaaagggataaaagcaaatttggttgttattgtcagcctgcaggttgaactaaaactcaagtttcttttttctttatcccgttttctcttgttgacatccatttctgactttcttttctctagatttatctaagatagaaactaaaataaatacagtgaaaagttttgaattggaaatgtttagtttcaacttaactagttggatattatggtgcttgtctttctctctctctctctcttttaaatatatatgaatttgactttgagttgtatctgataggttctcttaaatattggtatgaacgcaataaagtggatatttcagtgtccaattctgctgtttgggat

SEQ ID NO: 81276 - DNA, 641 bp, Citrus sinensis
  Intron number 1 from transcript orange1.1g037832m (locus o range1.1g037832m.g) derived from phytozome v7.0 (chr-ID sc affold00086; pos 274098 to 274738)
ctggctccattcattatcctagaagcactcctgaggtattgccattattgccattgtcaccgtgcctcctcattctgtccatttaatttctttgtttgagtttgggaaaatcacagcacgtagttgggtggaattgtcacgtaaattttttcgacaatctttagagtccgcaagataatttctaaacacaaaagaagatttgtactttgtttatcacaggcaaaaaaaaaaaaacagtggtgcactaaggaccactcggtccaaaattcccagaagacattttctttttaatttgttacattacaaatttacctccactggactaattaaaaacgttaaatttaacttcaaaatgtattaaaaaattcaagttcaaagtttattttaaaaatcacaaatacatatataatcgtaaaattttgaatttatatgttttcttcattttatgtcggtcataaactttgctccccttagtttgattttttagctaccccattgcaagaaaaagtctagtaactatttctgaaaacaagagatatccgcgacctccatttcgtgaccattgcgtcaaactagaatgtcgatgtcttttttctttttgattttttttttcatttgctgtggtacattttttgttgcag

SEQ ID NO: 81277 - DNA, 821 bp, Citrus sinensis
  Intron number 4 from transcript orange1.1g000305m (locus o range1.1g000304m.g) derived from phytozome v7.0 (chr-ID sc affold00270; pos 104323 to 105143)
aactccttcctctgttgcttgcagttcctcacctggtatgtagctgaaattattcgcatattctttagttaggattttgtagatgctgtttttgctggaaaaactcagaactttaacattttgttagtagttattattgaattcttaccatttgatttcagcttaaaacttaatgtaatatcatcttgcccctcttcctctcaaactgatgcaaaggactttttacagctactgtttggtgaatcacgagaattatgagaaaatttagctatatcttgaactaagttctactattttctttggtgataagtggcttatgcctgcaatgtgttaataaacacacttataatttcctttctccttggcctggcaatttgatgcactcctatcaatctagaattttttgttgtccatccctattgttcttttttgctttttttcttgttcttggcaattagttgtgaaatcatcttcctacctttaatttgggtggaaacatcaagccttcataagctattttcctgatattgaattagatgcctgtaaatttcttatttatattgtctgtttgaaagtgtattctccaataggactattaacttatttgcagctactttttggtttgttactgtgtacgataagttacttttttagtggaggagcccaaaagtaaattcctgttcaataaataaataatagacctcgatcagcttacctcttatctttggatatgattcatctactgtttcagcattttaaaaaaatttagttgtactatcattgcaggtgtggaggagaaagcatttggcaaggcagtgtct

SEQ ID NO: 81278 - DNA, 718 bp, Citrus sinensis
  Intron number 2 from transcript orange1.1g026543m (locus o range1.1g026543m.g) derived from phytozome v7.0 (chr-ID sc affold00334; pos 8461 to 9178 reverse strand)
ccaggtattagctatcgcgatatcacgtaggttagtgccgctttttagggaaatattcttgcagagttcaggatgaagttctcaattctgtccgtattcatgatggattggttactgcatccaatctcaataaagttaacgaccccaacttttcatccatttgtgttgatcatctgagaagaaagtttgctctgtcagcagcgttacccataccattccttgatgcattatttctcaaaatagattaatgaattgctaccaatgataaattcatacttaccggtatcactatttgttgtttatggtttctgataaagctcaaaatttgaaagtctcagacaactttgctggaactttgtattaactaagaccacatggggcttgaattgtgaagtctcaaataacttaaaattttatctgtctgtctatgggcgaacccggaggtagaatgtgaaggatcctgaaataggtcaaagtattgatggcttccttcagatacttgtatgtgaacaaacctcatagtcttccataacttattacacaaacacgaatttgatgcagatacacatccgtactaggggaaccaattagaaaacttttatatgtatacatcagttttcttggcatttagaattagttgcatatcaaatgatagttaattgtttaattgtttcctgttgtaggggctagccatttgatcagacatctccacgccaaa

SEQ ID NO: 81279 - DNA, 602 bp, Citrus sinensis
  Intron number 1 from transcript orange1.1g009076m (locus o range1.1g009052m.g) derived from phytozome v7.0 (chr-ID sc affold00006; pos 2587369 to 2587970)
atcacagcgactctaaacctcaggtacttctactcgtcgactcccgtataagtattcgaattccttgatttgataatctgttaaaaccttgtaattttactttcaaaatttattagtaaaattcttcggtcaagtgtgcgatttgatgagggtttctttagttagggctagattctgattttgttccactggctagtgattattatttctttttttctttttctttgatttgagatacttaaggaactaatgctctaattagaagtccattactcctttaaagttagggttttagaaagcactgaatgaaattatggattatgcttgctagtaacatgcaagttcaaattagcatatgctataaggtattaggtgtgtttgctttgtgtaggattatgctgcgtagacttctactagcttcttacactggtgattatgttatcatatgcttaaatttatttacaatatttaatattctcagaggtcgtgttagtgagatgtgcaagtattcatcttttgaccaccttatttcaatgcaagcacctaataattgtctattaatttctttttctgcttgttaatctaactgatttgcatgcagc

SEQ ID NO: 81280 - DNA, 648 bp, Citrus sinensis
  Intron number 1 from transcript orange1.1g006004m (locus o range1.1g006004m.g) derived from phytozome v7.0 (chr-ID sc affold00176; pos 32780 to 33427)
cctttgagaagatagacaaagttagttcttgttattgcctctttcatatatgttgcttattatcttggatgtttggatttaatttgattctcagatttataacttttttacttgtttttgtctttttttttgtaataaagccatgatcttgaacatcgtaattggtggattcttggggagtctggttagatgaagctctcaagttaatttagagttatcttagagctaaagaaaagttaaacgtagtagtttacgctctgctttggtgttgataacaattatcttccttttaatttgacacaactgcttacatctaatatcttgtaataatggttggaatgatatgatgttatagttgttttatagtgatactttgaaatgatgacgagttgaaagactcggaaaacaatccatcgaggcagtaaggaaatttaccttaatcatgaagtacatactttggtagtctaagatgtgattcactggcaaatatgtttgttaatgtgcatttagctcatggctgtttggttggagttctaatttcttagatataggcttgctcagcttgttctgtcattttatatgctaatttccaaatgttatgataaatttgcagattggacaaggaacttatagcagtgtatataaagc

SEQ ID NO: 81281 - DNA, 998 bp, Citrus sinensis
  Intron number 4 from transcript orange1.1g025212m (locus o range1.1g025212m.g) derived from phytozome v7.0 (chr-ID sc affold00054; pos 618830 to 619827 reverse strand)
aatactaccacacgtgagagccccatagaatgtaagttgtgaggttcattctggtgtgaagtttcagataggataatctgttttctcctatagtccatggggcctgttaattgtagaagatttttctttttgaatgactatgttcaggcgttcataccaattaattgtatatattaaaagcgagaagatattaactgagtgtataaaatcactgcatgaggtagttctctccaaaatagtagtatgctgtcccgatatttaacaaatgatttgtgtgtgtaaagaattaaaccccaagattggggtccagtcatgagtcacaatgacacaacccatgaaggacttctatacaactgaccccgagagaacagaagaaaatgtaaccttaagaccttgaccaaggacttagtaggctttgctaagggagaaatcctcaaagaatgtctattgctcactaaatcatacttaatgctggtatagctttttagtgagattgatcacttttaaaacctttgaactattattgcattttttatttttctagatcatcatgtttttctttcgtgctttttctacacttcaaatggagttcttgaaagtgcaactttgaaaaacatcaaattttaagctttcatgcatttactttttatgcatttaagaatcaatctttgtgctgctgatcttttgctgaaacattctagtttaattggaactagaaagaaatagcagcagctttaaagttgttttgccatttcttttatcaacaatcttaattgctttccgctactgagaaggaagctggcagaaagtaatttgtttagccaatttcttttgttcagggataaaggatttgttgagtttgttttaacttaagttgtttttgcccacttgtttggtggtattttttgtattttaaaattacttatctcctatgtggatgactttttccctcagcacttactttctcttttcaggtccacggagacatcaaaatactc

SEQ ID NO: 81282 - DNA, 495 bp, Citrus sinensis
  Intron number 1 from transcript orange1.1g028811m (locus o range1.1g028788m.g) derived from phytozome v7.0 (chr-ID sc affold00013; pos 1383830 to 1384324)
aaaatcgcccaatcgggacctgcgttcaagttcaggtactgcttctgcaatttaattcattcattttcttttagcttaccttgtttctaattgcactgcatattttgatttttatcagtatatgtgaaattttacaactatattcgatgcgccgtgaatattaatctactgcatataattcttgttagtttctttgctacttttgggtaatttaagatggttttggtttaatatttaattgaaattttaatttcctctcttattatatgttccggagattttttacctgtttacaactcttgaaacgtctcttcgtgaagcaatatcttatgaacatgaatgacgccatactttcggtttagagagtgcagccactgctcgacaatcatggcattcatagattagttcatgtcttgctagcacagcacaggactgatcaaatataggtaattcttatttcacgacacgttttctcagttcacttgtgccggagaa

SEQ ID NO: 81283 - DNA, 761 bp, Citrus sinensis
  Intron number 2 from transcript orange1.1g018977m (locus o range1.1g018977m.g) derived from phytozome v7.0 (chr-ID sc affold00068; pos 528314 to 529074 reverse strand)
ctagaaagtcttctacgcattcttgtttgtcgcgggtaaatttagattcctcttattttctctgtttctggtaggtatgagtgacagtgtgagagagaaagaatttatgcttttctgggtatccaaacataaattcttgacaaaagaagactttcgtggattaataaaacaataatactgtgcttccagaagcttgtattccaattgacgtggcatcgttattttattatctcactgtcatatggtgaactgtaagagcaccgcctatgtgtcaaatcagttgggatcaactttttaagcattactcataactatatttgtttgacgaaacagcttgtaagctttgtggatgttatttagagagatatgctgcaagtgtttggatgatccggttaaatcttttgtgctgtaaaattcagtagttgattgggtgtttagcttgcaagagcatagattaaattaaattgctatatgccattcaattaaaactaaatcatatgaattgttatattcattcattgcgataagaagaaaagatgaaaaatggaaaaaagcacaataatcaaaagtaatttatttattgtacacgagttatttgtaaatgtttcaaatgattccctattagttgttttggctttctgcccctcctgtgtggttgatgccagtgttgactggagattataggatttgagaatctcctaaggttacttttttcacttcttgcagttgtgcccttataaagggcttgggtgttccgcata

SEQ ID NO: 81284 - DNA, 525 bp, Citrus sinensis
  Intron number 1 from transcript orange1.1g024618m (locus o range1.1g024618m.g) derived from phytozome v7.0 (chr-ID sc affold00013; pos 1805714 to 1806238 reverse strand)
agtaagtcctgcatatcctgtgtttcaattagtttagaatatagctgaatatttaattttttgtttttgcaatcaatggtctgatgatgacgtgaattatggttcctgtactcactaccaggagcgccactccataattttttattgtatccttcctgccctcattttccatgcgttttttaaggttatcgtaacttatgcagtacaagcagataatttcactataaacttattctcctgccagctggggcgctcattttatttttcttccattttttctgtaaaaatgttttgtttaaaagttaatcagttggttgccaatcctttatgtttgagattgacacttattttttattaatattgatctatgcacttcaaatgttttccatataataaaactgttcaaagttttgagcttttgtctagctgccgcccttttttccttataaatgtgttgttacttgacaccatttttggaattatactctaggttcctgaacgagcaagtagttgccaaggtgcgtt

SEQ ID NO: 81285 - DNA, 426 bp, Citrus sinensis
  Intron number 2 from transcript orange1.1g034396m (locus o range1.1g034396m.g) derived from phytozome v7.0 (chr-ID sc affold01597; pos 8423 to 8848)
tcatcattcttggttagtcatgggacttatgaagatcttttcttttcttatcttaagttcttttaatcggtgtcacgaatgctgagaaaaaaagagtttgcttctaacatcagccgcaacatgcttgacacaaatttatgaagagcatttgtagttctaggaacattattacctcaaagttcctctcatgttgagttggaaccttgtcgcattactcgtttacggtatttttaatttgagtcatttgctcagtgctcagtctgtataaatgttcaaattcctcattttttttttggaaagtgttgctaggtggatatcctcaggttgaattgttaaggttttttaaatgtctatctgctgaactttggataactgttatcctttgaacatctgtttatgctattttacaattttattgacagagac

SEQ ID NO: 81286 - DNA, 454 bp, Citrus sinensis
  Intron number 3 from transcript orange1.1g027952m (locus o range1.1g027952m.g) derived from phytozome v7.0 (chr-ID sc affold09922; pos 606 to 1059)
tgacatccaagcgtgagcacttctatcaggtaattcttttctcttaggacggtcttctctcctttgctactgtaccgtatgaaggaaattcttgtaccaacattcgtcaagtattggaagtttcatgtgtgacacagagcagattttttatggggctttatttactcttgaattttatgtatttaatcagctgtttgttgatctgtcacatactgttgattttacttaccagcgcctccattggcatacttaaagagtcaatctaccaagttttgaggttttttagtaataagcacgtacccacatgaaaaggctaacctaagttttattaactataacttgctgcctctcattgtgcttgagacaacaattgctgcctctcattatgcttgagacaaaaaaatatatctgtttcatgttggcatagctttggaagacctacatcaaaaggccc

SEQ ID NO: 81287 - DNA, 719 bp, Citrus sinensis
  Intron number 1 from transcript orange1.1g033296m (locus o range1.1g033296m.g) derived from phytozome v7.0 (chr-ID sc affold00534; pos 49869 to 50587)
gcctcaggttcctactctgctgctggattgagagcgacttagagaactgatcccttaagaaggggagaaaatgatgaaaataatgggtaaactattgtatgcgatacccctatgaaatgcccaagctggaattggcagctgcatgtgtatcattaaggtactccttttccggtccatctctgtcttactgatgactggtgtttgagtgtttcaactgttcatcctctgtaccgtttgtttctcctttaccaaatttctttctgtattttgagtctgaaagcataattgtagacagtttgcctgctttcaagtatatttcaaatctttcaaaccatttagctttatccagtaacttatgactttatagaaagtatttgtttcattgtatcactgatggtcaggccataaaattagttgaatgatggtatcaagcactttgctaatccaactttctacaaatgatagaccttttctaattctgtaatagacccttagtcttgtttccattatgtcattatctgtgctcgatcagtcgcatattcatgcgccagatattcacatggcggcgcgagagttcctaagccactttataggacctgcaattgtcttcaacaagcatcttcttaaattattttaattcctaaattaccatcttatagtttttacacaaaatcgattctgcagatctctctctagccataagtgaacaagaaacccta

SEQ ID NO: 81288 - DNA, 636 bp, Citrus sinensis
  Intron number 3 from transcript orange1.1g013847m (locus o range1.1g007885m.g) derived from phytozome v7.0 (chr-ID sc affold00018; pos 1424746 to 1425381)
ctgtcgtacaacaggtacagtctcgcctagatttcttgtattcggaacttgtgcctttcttcaagttgattatgagacttgtttctgtggtagcggctggttttcaattaatatgcatttcctaggtctcagttactacgtaaatttactttaaaatctgcaattttgcaatagatattataggattttaaatgttaatttgaggacctgaagagtcttagaattgaaatgttgggtgattgacacttctgtgtaaagtgaatcacggccattaggcacaaatggagcttattgatgtcaccaaattttggacaatccttggaatatattgtcatttagactgtgggcactaggtacaaactacaaagcaaacattcatgttgaaatccgtggatatctgatctattttttgttccttccctgtttcctcattgtaagcaaaattggaagacagttgaaatttgtgtaagagtagtaagttttttgatgcactttaatttatgccgacatctctttgttgggccacaaattcttgcataattcaatgtcacattgtatctgttctggaattatttttctcatttttcatctcaatatgtagggatctctgccaatttattcaaggaagattgctgt

SEQ ID NO: 81289 - DNA, 884 bp, Citrus sinensis
  Intron number 1 from transcript orange1.1g025477m (locus o range1.1g025477m.g) derived from phytozome v7.0 (chr-ID sc affold01229; pos 18246 to 19129)
ctctccgttcattacttcccgttgcagatcaaacggttagtatttagttgaatatatttatctaattccacaaaaggcactaattaaccgataacttataaaaatgtaaaaaaaaataataacgcgttaatatcaaacatataattcgttcaaaaataataatgcgtcaaaattaattgaagagtcagatcaagaaaatcttctagcttttaatccttcatgaagtatatggaacaattgaaattaacaactttcttattctttttcaccattcaagtagaattcgaaaagagagagaaactggtgactttgattttaattattaatgttttgtactctagtttgatttttacaattactaaagtagcgaaccctaaattattttaataactaaaataaacatttaacattgttaagtaggtgtagatctagatccaagcttattttgagacctaaatctgcctactttcttttcatttaagcacaaaccattccagcaaaaccacccttagctaactagtggttaacataaattccctcgctccactcctgaggtttatggttcgagtcatctcgtatgaattcatatttatactgcatcatctaagtgtcgactaattaataggtttcgatgacgtttaatttcaaatatcattatattgtaatgatagtaaagagatcacctctcaaacccatccattaagatcgatccatgtctgaggtcttgcaggtctgtggtggaccaaccccgttgtcatttttaaccatgtccaatacaaccatcaaaactttaattttattaaatactttatttcagaacgtaattatggtgttttatgattgtttcagaagaagttaagcattccagccacagtttcacgtgt

SEQ ID NO: 81290 - DNA, 879 bp, Citrus sinensis
  Intron number 2 from transcript orange1.1g043543m (locus o range1.1g043543m.g) derived from phytozome v7.0 (chr-ID sc affold00078; pos 124814 to 125692)
acacagctatttaaggaatatcaggtatgtgtaatattttgttgtgaagtttcaagttgaaaaaactggatcttggttttgagcagagggccttattctgtgtgagaggattttgcaactaagctaatctactcttactggtgtccagcagtctattgcagttagcacctatgaaaaactgtggtgtttgctatttctttatctgtttatgatatttcatatgggccctattgttgcgcttagaattgaaaagaccatccctgttccctgatataacgtttattatagccaacagagaaacaatcattcaactatcaaacagcattgggtgtaagagaaccataggacgtcctcctacggggcttatccacattactctaccttatcttttatgcaaggatttttgcaacttaactaatccacttttaatgtgtcgtgctaatccattgcacttagcacccataaagactttgtgccacccccatcctcccttttttcctcttaatcgttttatgatatttacgtatggatgccggtttggaacttagaactgagaagacccgtgttttgcactggatttgatactgcaaactgggaaaaagtcactcacttaacaaacataatcattaggttattatggtatataagttcatgatttgtcaatttcttgaatactttgaagcatgtcccctgaaacttttatattcaaatattttagaaggcttgaccttgctttacactttcacctttgaaatcatggctaattattgagtgaaattagtggttgctcaagttagacaatcagttcttaggatttatttgaacggaaagatgactgaactcaagatggcttatcaagtcaatttctgcaggtaatcc

SEQ ID NO: 81291 - DNA, 571 bp, Citrus sinensis
  Intron number 1 from transcript orange1.1g031518m (locus o range1.1g031518m.g) derived from phytozome v7.0 (chr-ID sc affold00414; pos 116663 to 117233)
ccgtaaattccctgtccttctctgaagcctttactttattggcttagtctcttcttaatattcattaccctatagaatatttatatacacacgtactcaattgaataaaatttttcttcttctctttattatttcttcgctgaccatttctgtgtcgcgattgcaaatccttagttacttactggccgttctttttccgatttgttcttcgtgaactttattcttgaattcttcaagatgagattgaatttgacaatcagtactacttaataccaaaagtgctcatagaattagagatagacaagtcttttttgttgaaaagaaaattttctattatcacttcagtactctaacttaaaaatatatatatattatcagttctttttgcttgttgagtatttgtttaattactataaataaatatatgtctacgacgttggttagaaaaacagagagagattgtaaaggtacaatttttgggttctaaataatatcgaatttgattatgttacttattcaatttgttgtactggcagctgagcaaaacatcaatcatagtggacgcttcaaa

SEQ ID NO: 81292 - DNA, 923 bp, Citrus sinensis
  Intron number 1 from transcript orange1.1g040889m (locus o range1.1g040889m.g) derived from phytozome v7.0 (chr-ID sc affold00006; pos 2193697 to 2194619)
gattgacaaatcttcctggtttgactttaggtaacttttctgcatttttttgtttcttccttttctggtttttggtttttcatcctttcttcaatacatcaatgtttattcatcatttttggcggacgtatttttaacatcgttgttcatgtataaatgtaattagctgtaggcataacttccagtaactaattacgtgatataaaggtttgtgtctgctattgcttttttctcctttctttcttgcggcatgtttagattgttttatttcagattggatttacatttttgagttccctattgctatgctttctgtagttgtgaaattagttaaggtcaagtagttggtgcatgataaaataatgaaggaaaaaacagagagaagaaaagctctcttaattctaatttaataatatgaattacattgatttttaatagaaacgaacataaggctcggctcctagaattaaggagcagaaacaataatagaaagaaaaagaaaaaaggaaaaaactaaaaaaggaaatatcctaaaatttgaataattctaattctaatttcctgattctatgggatcggattcgtaactttcctacaaataacctgtgattttcctgactgctaaagttgtaaagttcagctgtattcctcaattatagaacttggaaaaagtagaaatgctggtagatttttgggtatcaaaaaagaaaaaggatgtgaaatttagtttctcttctggcaggtaccttcaaatttattagcaaatgtattgatggcaaagggttctcagggacaaaacgttacttcggtgatcttggaaaaactgtaagtttaattttctttcagtttcttgtatgattgctactgctcttgtcaaaggtgttaactgaatgatggcttgcagttgaaaacagcagggtcta

SEQ ID NO: 81293 - DNA, 576 bp, Citrus sinensis
  Intron number 1 from transcript orange1.1g019199m (locus o range1.1g019199m.g) derived from phytozome v7.0 (chr-ID sc affold00009; pos 2331680 to 2332255 reverse strand)
tcaggagttttgtcaccatacagcttcaaccgcaggtgtgtttattctacttccttttgaccaaacatgacagcacataagtaatgagatcaagaaaatgctcatttcctttactttgttcctactttatccttcatttcaattttttgctgtcttttatgtgcgataattaatattttcttcttttcaacccaaagaacacatagatatttcttttgtttactattggattggtgtcgaacttatcaataatttctttgctttatgttaaaatggctatgccattttccaatttggtgtctgttcttcatgcatttatgcatgttgtacactattcttcaaacatctgttatgtttgccatagatatttcttgctttatagctatcttccaactggtaggttgaccactcatcatggacgttttaaagcaatggtgatttcaaaattacttgctaacatttactttactgcattatgatcttggaacttatgaaaacaattatttatgtccttcactgttatatgtataagtttaccaacaacattgggaaaatttttcagggctgttgggagtg

SEQ ID NO: 81294 - DNA, 903 bp, Citrus sinensis
  Intron number 1 from transcript orange1.1g023443m (locus o range1.1g023142m.g) derived from phytozome v7.0 (chr-ID sc affold00295; pos 54518 to 55420 reverse strand)
cctccggcttcgttcgccattgtcagcggcacaaggtaaagttatacatgcgattccaaacagagaatgaatggctgtttgtaattcaatcttgtgttgggcatgggtaagaggtgttactgacactgaaactgttcgattttcttttgtataatggctgttagtattgttgttgatttcgtttcttaacattgtaatcttttgttattttgagtgttgatggtgatggtttattaatctactatatatgtttgttagttggagatgcttttatggagatgggttattaatcatttttgtgattttgaggatgtttggtagctggtattcacttttgttttcattcttgcatcattgagcggggctggtatttgactcattttgaaactgaattgaattttggaataggttgtaacctgaattgcaacccaaaccgaaatttagacccaatttttcaattgaaccaatccagaacttctatccaaaccggttctgggttgcgtttcgaaccaattgagttgaattttccaattcaagcgggttgtaaaccaaacaacccgaagcaaaacctgatatgtccgcccctaaaatgcgttctcttacttctgtactttggcttcttccattttaatctttatttattcttatttacaatcattccatcaagattaggatactttccatttagatccataatagcgtagatttatcatcactcttgcttttttgcttatttttcacagctagtaaaataccaaaatctttttatcggatacataaatagcactctaaggctctttgcgagtcccattcaatctactaaggccatcttcgacacttacaccctaaagtcaccctatcattgcagtgaaattggtggatcagtagaagatttaaaaaaca

SEQ ID NO: 81295 - DNA, 579 bp, Citrus sinensis
  Intron number 5 from transcript orange1.1g017472m (locus o range1.1g017472m.g) derived from phytozome v7.0 (chr-ID sc affold00019; pos 738212 to 738790 reverse strand)
ggctggggaaaagagcatagccagaagagtttttggtatcctcttttctttttgatctctgtttatgctcggcagtcaaagtttggcttttctttttcatctctgtttagccacaaaaatgagtgattaaattgcttactatgatgcatatgtggtttctttcttctttggaagtcttgggaagtacttttgcccaacacctagaacaagcaatagcttagggctatatcatgggagaaaggaaagaggcaagttaaaaacggcatgggcaatcattgcagattacttaaccctacccatttcttccttttgtattagtaagaacccatggaagaatatttagatgctgatgagtatgtgtttattgataattatagatacaaggctgatgatggatgactttgtgtttattgatacttttcactttgataatccggagctctagctaggatcttcatgtaggaatgagaatttctacgtaggaaaaacacttgcaaaacatgttcatatatgatgacttcatgctggaatcttcattttataggtcagagcaagcggtttcaaccaaataaaccctca

SEQ ID NO: 81296 - DNA, 504 bp, Citrus sinensis
  Intron number 3 from transcript orange1.1g024881m (locus o range1.1g016486m.g) derived from phytozome v7.0 (chr-ID sc affold00212; pos 139827 to 140330 reverse strand)
gagaaagtggctcttgaacttgctgttggccttgggtattcaacgttcttccttttgtgtttttaatgaaagtttgacctataagtatgtaaattcttgcttccgtttgcattagtttatgaattcataatacatgtgaggaaagtgtgtaattgtattttagaggtgcacagagttagtcgtcctccctaagctactgccattcccatatttagtcaatattcattttctgtttcattctcattagctaattaagtaacctctctgttagtcgtttatacgaaatttatttctgtgtgtgtcgtgattatatgaatggccaagtaattgatctcaaaatctaattttgtggcttactgctgataggcgatgctgcctgtatctatgatacatacttttctgtttggttttctttatactttctttcacctaatgtcttcttttccccttgattgatacggtctttcaggtatacacctcttagtacaaaagagttgctggaaa

SEQ ID NO: 81297 - DNA, 990 bp, Citrus sinensis
  Intron number 1 from transcript orange1.1g034580m (locus o range1.1g034580m.g) derived from phytozome v7.0 (chr-ID sc affold07604; pos 1438 to 2427)
ggtaacctggacttcattatttatgtcaaaaaagaaatgcatgccaattcaaaattagaatttttagggcaaaggaaaattcatcatcaaactgaaaacagagacaggttagaactagtgtgatagctgaaaaacattagaggccaagtccccttatatgttacgcggcaacaggcatgcgtgatgcctctactctcaccgctactctgctctttattcatttttgtttatatttctatttttattttttttatctggactcatattgcccaacttatgctttagaatttcagtttattgaattgtaagtttgtaaaatattatatttttccattaatttagaataagttatatatttatctctattgggtttattgaataaggttatatatttatctctattgggtttattgtgtaagttgcatatattaacatgataatggggaatggacttgactctttaagtgtctgaacttgaggtttgcttcttgtggttgtttgtaatgaccttttaatgaaactcccaataattggtctggccttgtattttttggtactcagataataaattagcatgaatatttaccatacatacctatctctatttgcccgttgaggttggcatttggactatgagtgtaaattggaccaacccttgtgctgtttccacaaaggttaagtagggttaaagaaacgcattaataattttgaggacgttacaggtgtggtttgttaatatgattccggtcggtttggttattcctttctctttttgtaacatgagctaattacttgatgaactttgtttttcttttctataaatatttctggaaatgaaaattttttggaggaaaatgaatgtctttatagttggttagtaccctgattaagtgtgagttgatatagttgtgtataccacatctgcgtggtgtggtatattaaaatagattgtcttttgattttttggtttgtgtgtgaaaatttgcagat

SEQ ID NO: 81298 - DNA, 950 bp, Citrus sinensis
  Intron number 1 from transcript orange1.1g000529m (locus o range1.1g000529m.g) derived from phytozome v7.0 (chr-ID sc affold00080; pos 380373 to 381322 reverse strand)
aagttcttgttaaagctcaagaatcgtattgagaggtaataagcttatctattatttttgttctcttctctaattttttttttttttttacattaataactcaagcattcatcaagctcaaatcctggactcgagccttaagaagacttattctaaccactagaactaaaccttaatttacccttctttcaagtcatattatttatattacaataattaagctatatatagagaaaggacatttttggataaattaatattcacatgctttattttaatattatttaaagagcattgatatttgaacaccataagacactaccaagacagaaatagatagttacagtggcactttaacatattaaatagtaatgttggtcgtattcctggtggtcaaatattacttaaaattttgaaaaatgagaagggagcgaggctgcacaaaatcacagcccatctctctcatccgctgccctgtacccgctaaaaatctttcagcttgagtgtttcaccaaacactaccaacttttacagccactaaaaatcaatttttactctctgttaaaactcgagctcgggtgtgcatgcatgaactttgtttacggctactgctgatgtttctatcaaatgttcccaacagttgggtttagtaagtagtatgttgactgcctaattcatttctgattttccgctcggcgccctcttctcagcaaaagttgggactttatttccttcacaattataaacttgggtagggaaaaaaatctccctcactgaactaaatattcttcaaaattactaagaacagaaatctgaaccatgcttttagtaaacttgatatggagtcattttaataaaattctgtttaaaagaaaattctgatttttcatttttctttgattatattcgtctcagagttggaatagtgcttccaacagtggaagttcgat

SEQ ID NO: 81299 - DNA, 960 bp, Citrus sinensis
  Intron number 1 from transcript orange1.1g043082m (locus o range1.1g043082m.g) derived from phytozome v7.0 (chr-ID sc affold09739; pos 361 to 1320)
agctggctaatgttagttatgctagctgtaatttgttagcattctgttaatacatgtttagcttagctcagctcacgtgatttgtttttatataaatcaagagctcttgtaacaataacaatatcaatatagcaattcatttttctctccctgaagcctctgttattttctcttcactttctcagataccaaacacttttctggtatcttaactactgccttattccctgaaccgttttgacaggttgcccatcctttgttataataattattttaccacctctaccggtaccttattttgtgttaaattccttaacagtcgttcgatctgaaaattgacgaatcgaacaatccattttaccggtctgttacttgccttaaatgtaacataagcactgccatcattgcaatatagcataacaattttttcatactttattaaggtatgagaacccccaccaaataaacacattcgtaagttaaaactttcttcaatttaaataagaaccattcaatatctagtacaagttagttgtatttatagaacttttaggaaagtattttaactcttaattcaagtttgtattgtctatgcatgtttcataaacattttgttctgctcggttgacttgtaaacttaaaatttataaattagaaaagaataaagaaaaacgaaaaattattgacctcatatgacagatttgtttagtatatgaaaagtaactttcaacgacactggtcccttcatcaatggaaaagggcacttgcatttgtaaatttattttatagatacaatctttataacacaaaccataaacgtaatccatatgcacacgtttgctcaatcctaacttctccactcctcttgatccctaactgagcaaggctacttcacatttgagttcttgttcttcttcatttgaagcattacaagacacaactcttcagtgacttcattgt

SEQ ID NO: 81300 - DNA, 646 bp, Citrus sinensis
  Intron number 1 from transcript orange1.1g019120m (locus o range1.1g015366m.g) derived from phytozome v7.0 (chr-ID sc affold00006; pos 2107881 to 2108526 reverse strand)
caagccatattgtccaagtatgcattttgagtttctgtcaattgaatattttttattggtctctggtttgttttgtaaactatttgtgaaagcacttttgtttttatttttatgagctgttgcaatattgttactattttttttccccaaatattctttggattgaataacaaaatcttagctggcaagacgtacatcaatttatagtgtttatatgctttttacatatgacttttgacatgcctaattggcaacttttggactatgatacttgtgttttccatgccacaagagtgttcaaatattgaaaagtaatgacaaaatgttctgagtttgatttgtaaaatcttggaaggcataagatagttcaatgatttgatatcaccgtatctcagtcttcttttgcttgaagagcagctataaggttgtgatattgagttaattaacaaaccatctaatgatgtaatctctcctcctctatcaatgaccgtcacaaggcctaggattgttttctctggcccttttattttttttggcatgagttatactattatctttcacaatgccattctaaatgcaacgtcatggcataatagtgaatattcttaataaattttggaaggaacttgggggaatcagtacttcc

SEQ ID NO: 81301 - DNA, 635 bp, Citrus sinensis
  Intron number 1 from transcript orange1.1g000649m (locus o range1.1g000645m.g) derived from phytozome v7.0 (chr-ID sc affold00171; pos 210362 to 210996)
gccgcggcgtcgttattgcgattttcggtattgaaatttattttatcttactctgttccgttcaattgaaatcagttgcctactcactgtttagtagaaaaataaacgaaagtaaaaaaaataaaaatagaaatgctaagtaaagttttggtagtgaaatcgattactatttgtctgtttgctggaaaagagaagaaaaataaacgaaagtaaaatgatgttgttgatttcccgtgccgctgcaatccagcagttgttgtgatttgctgtccgtccaacaattcagttgactcctctcatgcttaagtttattttgaaactttaagataagttggtagtttcaataaatgaatttgacatattattgcagagctagttatagactttgttggggtgttgatatcaattgcttgttttctctttgatagaaaaagaaagaaatttgtcttgtcataggtttttggagttgaaatcaaatacttattagtagacctctggtggcgatttttgtaattgaagtcaaatactcctctgcaaggcagaaaagaatagaaaaattatatctaatctaatgtgatttcatggtatttgtgttttcagattctggtgtggaccccgctgctgctggtttgcag

SEQ ID NO: 81302 - DNA, 498 bp, Citrus sinensis
  Intron number 1 from transcript orange1.1g022775m (locus o range1.1g022775m.g) derived from phytozome v7.0 (chr-ID sc affold00018; pos 328854 to 329351)
gcgccctcggactctcaggtcggcattccatatacgtgagtgctttatttgtttattaatttttcttcaatagtttcttcttttattcctttattttcttttaaaggccgttttattattccttttcttatgccctttggctaatttttaccttaatgtaacagtcttttaattgaaatgtggttgcatttgctcttttagaaatttctttttaagtgcttttctagaaagtgcttttacagaaaccatctttttacataagtactaccaaacacagtgctaacatttatttgaatcccagtaaatgcattggtatatatgctgttgtgtcaggaaaacagttctactgcatttttatagagtcggttttacttgcttctgtagaatttttttttttttataaaaatttgtctcaatccaagttgatacattgttgtattagtggtgattatttgattgattctatgcagcgtgttactaggccaagaggaggaatta

SEQ ID NO: 81303 - DNA, 596 bp, Citrus sinensis
  Intron number 3 from transcript orange1.1g022775m (locus o range1.1g022775m.g) derived from phytozome v7.0 (chr-ID sc affold00018; pos 329858 to 330453)
ttttcgttgttcaggttaaactttatcctttcaatttttacctactggaagctgaagtagcatttgtatgataaatgtgctgaaatgtgaggcagactgttggttttccatgtgcttatgttttcttatgcctttcatgaatctaggagcggtaaatcatttggtccaatatggcaagactgctgttcattctattctgttatttttgttttcttcaacattgtagatagaattctgagtctcgccctcatttttggtagttttgttcagatacttgtagaagaaaaataatttgaattcaggttgtattgtttgcttttctatttttgcttataagaagataacacttttgtgtgtgattttacttggtttttgttgctacttaccattacattcatctttctgcaaactgtgaaggattatatttgcttcactttgcattttctatttactgtattttatttcagttaaaatgtggttatcgtgcgttggatgcgcattcggcatgcaaaactggtaacatatagttcttatgggttcccctctgatactattttacagatacaacatcctaggacgcatctgaataggtttga

SEQ ID NO: 81304 - DNA, 1026 bp, Citrus sinensis
  Intron number 2 from transcript orange1.1g014994m (locus o range1.1g014994m.g) derived from phytozome v7.0 (chr-ID sc affold00942; pos 34762 to 35787 reverse strand)
aaagaccgcgtttttcttttgcaggtaattgtgcttccctgctatttgtattgcttaaatttatgcttcttggtatagttttaacatatatgggattgaaatcaatttcagttgtgaagcaacttcggtggttcccaatattaggcattatagtagatccaaaacttcgtcttatctcgcaagagtctgttgttttattttgaaagagacaaaagtgatgatgatgggcagccaactctaggaatcaaaacttgcccacactgacacccaagaatgataaaaaataaccaaaaaggtatagattacatgagtctgaatttgataagtgcacctatcctatcgcaaaaagcttttgcgttgagtttctaaccaaggaaagaaactttgtcactcctgtctgtaggattcatagatttgttcaagccttcaaggatgtctagctgttacttactgtccaacaatggtgctccgtttctagtgaatgatatgttattctacatctgtatattggaactttgacaaacttcgccttttctttgttgattcactcgtcttacttttattaaattgcccgattatgaaacggtctattggagactagcattggaaggcttcttctggaaaaaaatttacttgaccaccaattttcatttgggtgggtgtcagttcatgctctggcttgactgttctgttatttaggttgttttatccgattttctcactcacttgatagttagttctctcatgctttcaagctcaacagttaatgcgaatgcgagagattctctttttccccgtccaggctataacctagcaaatcattaatgctgtagagtaacatcttgtgtagccgagcttgtgtctctgaacattggtccatcggcatttaggttcgataagcatggcactgattttccccctcattattattttcctgcacagattatccctgttaagtatttgaattttgaatatattattctgaatcagaactcttatctgtccgtgcagcattggcttctgggc

SEQ ID NO: 81305 - DNA, 569 bp, Citrus sinensis
  Intron number 1 from transcript orange1.1g041103m (locus o range1.1g041103m.g) derived from phytozome v7.0 (chr-ID sc affold00009; pos 1823881 to 1824449)
gaggtctactattgggattcttactgggttatcaggttagtttttgtatttgttctattttccctttttcaatgccagtccaatgacattgtaagacaattttttttttctctctagtgttaagtgcttttgtgaggctaaaattttttatgggtgtgattaaacatgcgtgcatgggcttgctagcaagtaagatgtataagacagcgaaggcgattgtgactaatctcatttatcttattgatacatacggttatgtctttaatggtgcaagagcttattacaccaacaggaggtaatgtttcttcttgtgttatctaactaattttggttccaacatctattgtattagttacaactgtcaaatcatgcttattcgccattcagtttcccatcagaccaaagttttaggcatagcgtctgcagtgtcttctgcattgaatacatgtaaaatgttcccatctttttgaccatgtatcgtatatgctttcattttgaatctgtgcaccatgcttgctattgcatagcatgggtttatgtcttgtagccagcctcccattctcagtgca

SEQ ID NO: 81306 - DNA, 560 bp, Citrus sinensis
  Intron number 1 from transcript orange1.1g036257m (locus o range1.1g036257m.g) derived from phytozome v7.0 (chr-ID sc affold00068; pos 455944 to 456503)
ctgaactcagctttggcactacgtttcgtagaattgtgagttgttagctccataaagcttggattttccttctgctgaaactgttgtttcctctctgttatatagtcatatttgttgatttctttttctattttcgtttgtttaattttatatcttgatgtttaagacgtgctaaaaactctgtttggcttgtgttttgtctaattttgtttgttaaaacactcaatggatgaaagttcttaatgatcttgattattagtatacgttttgatttcactacagtttggtttctgttacttagttgatctctttacttatggaagctgcaatactgtttcgaattccgtgttcttgttgagaacatccttttgggatttgattctgctgtacttttggttgaaacttgtctaaattgtttacgaagatattattgagttttaagttgtagttgtttgatcgtaggacattgaatttacactgaagttatccaaaagtaactgtgatgatggtgtgtatgatttacagggtgctggtcttgaaaatcttggaaatacttgttt

SEQ ID NO: 81307 - DNA, 817 bp, Citrus sinensis
  Intron number 2 from transcript orange1.1g036257m (locus o range1.1g036257m.g) derived from phytozome v7.0 (chr-ID sc affold00068; pos 456549 to 457365)
agcatacttgcagagtggcaaacatcaaagttcttgtaagtagctttcttctgctccacttcatttcatctattactcctctcaatatgcgcaataaaattatacagacatgcattttttacatcaaaattgtatgtataggtgcatttgaatttgttatgtttgtgtcttgagaatgaatttggatttgttattgagctcttatggatgttttgtagctcaatactcttcaaggacttaaaaggttcagtggttttggtaatgtctcaatgaaaaagattttatttgtagatacaaacaattaagcgtatgaagaaggtttatatgatcatgttcaataatgtagccattcaactcatcatttgaacacataggaatagttctgttcggttgtttatgtaatgtcacaatgagtaagcttttgatgtattgatacaatcaattagaataaaagaaggattagatgattgtgatctataagatagcaattggacttctccttttcgtgggtgccaccttgtgtagccggtaaaatctctttgggttgaaaacaagagatttggggtttcaacccacacaaatgggtgggaggaggatttggcaaccaaaataataataataataataattttttttttaattattattattattttaaaaagctcctcttggatatatagtcattctgatttggtcgtttatttttattttattgtgcctttatttatcctatgcactaattgtgaatgatataattattcttttctgatcctctttcattgattaataaaggtcatattgctgggttctgcgcctt

SEQ ID NO: 81308 - DNA, 596 bp, Citrus sinensis
  Intron number 4 from transcript orange1.1g039840m (locus o range1.1g039840m.g) derived from phytozome v7.0 (chr-ID sc affold00405; pos 80032 to 80627 reverse strand)
gacaagtaagttccataaaattcaaatgtgataggcaaattagttcttgatggaagtttatactttagggatattcaattgtttatccccttttctttttcctttttgtctacccttttaattctaaagatcagctgctatgagtattagctttataatctttaattcatttaatgtttttgtgaattgtgttgcttctcatacacaatcagaaccatatgtcccctgtgttgaaagttggacccccatattgtcactcccaattgtaaagaccattatcaccttccaaacaagaaaagtcaaaagaatttgctgtccagttaacttgcatacaacaaatgttttgggttggaaattttttttcccttctgttttatatacaataggaacttattctatttttctgtcgtctctagttggaagctgcagtttttcctcacgtttcttgcatttgtttcttttccacacctactggatttttacaatctagccttggtttttctatggaatttctactgtgctctctctcactctatttttatagactagtttttttaatggcacataagtttctcaggaggtagttttctgtgaag

SEQ ID NO: 81309 - DNA, 805 bp, Citrus sinensis
  Intron number 3 from transcript orange1.1g037365m (locus o range1.1g037365m.g) derived from phytozome v7.0 (chr-ID sc affold03714; pos 2069 to 2873)
cctaacaaaagcttggacttctttctttttagttagtgttttgcaattttttcttattcttacattttccttacttcaatttttattcatacatttgtttaaactcctatctaatatgaaattatacatcaaaaattatttaagctagaatttagcttatattacatttccaaattttattcattagtttatttaaaatagcatttagcatttaatttaagattatatatcaaaattattcaattattaatttatcttgaaattgaatatctaatataatattcaataattaacaatataactttaagaaacaatcattctttttaaatagttttttttaacttcctttaattgaatttaatatgagtgggtccaacactaaaccaaacacaaaacattactataaaataatttagtctaattcaatccaattcaatcttaataactagtccaatccaatcctttattttgcaacaaacctaacctaaaagaatatttagtattttctatttcaatttttaagtttaatgattaacatcatcgaattatcagattaaaaaaacaattaagttgctacatcaatttacatcaaattatgtggtctgcaatttttggttttcatgcataatgacatttagtcttttgttgtaaattagatccaaccaagcgaacgttattagattggataacacgtgctcggattattgaagggatagttcaaggacttctttatcttcatcgatattctagagtgcgaattattcattgagatttaaaagccagtaacatcttgttggataaagac

SEQ ID NO: 81310 - DNA, 473 bp, Citrus sinensis
  Intron number 1 from transcript orange1.1g042477m (locus o range1.1g042477m.g) derived from phytozome v7.0 (chr-ID sc affold00494; pos 34281 to 34753 reverse strand)
ttctggtttgccaccttcatttcctcttctttatcactcagttatttgtaaattttacattgaatttctttcaatatctttgacctagttgtacgaggagaaaaactcaaattatttttatctctttataatgatcactcagctccaacaaatgtgaatgtgtgtcaaaatatttttatatgtgggtacaattaacatgacatgtttatctcatataagtttttctcgtataagagaattagtaaaatagttgagaaatataaaatgacactttatttacacctcatcatgtactttccttaataaattgtactataaactctacagcaacaacggctatttcataagcacttttcattttttttttccaagtactttaataataagcgtattgactctgtgataagcacccccaaatggaccttaagttctattaacaattaatttaacattgtttctctgttcaggggcta

SEQ ID NO: 81311 - DNA, 742 bp, Citrus sinensis
  Intron number 1 from transcript orange1.1g044506m (locus o range1.1g044506m.g) derived from phytozome v7.0 (chr-ID sc affold00143; pos 19250 to 19991 reverse strand)
gtcccaccaaccctcgcaccgaggttctcatccgtgtaagtaaaatttcttatcacactcatttaattttgttgctttcacttcctataattgagttatttgtctcttctttagtttgagcttattaaccaacgagatcctgtatatttaaaaattaagtacctaaaaaatcctcgtcgtatatctgtttgttttccttaaattatccagctttggtctgtatgtaaaatttgtttgaattttaagacacactattttattcttaatttataaggataagggtattttagataattttaaatactattgtagctaacggaataattaacccaaactattggggttgaatgaacatgtacccttattttatgggtaaattatgatttagtccctcaattatgggaaacattactcatttagtttctatatttaaaaatcgcccaaaacattcctatggttaactccattactgttggatctgacttttccaatgtaaatatatagtattattattattttttttctgatataacttaaatataaacaaatctgacatgttacaaatgaaaaataagaaataatcaagtaaattttaacaaagtacaaatatatagcatgaacaatttgaataattttggaaccacaggagctaactttattatatatcttataatcaattggcattagaattgaattttcgtacttcaatatttcttctcatagggatacagctattcttccg

SEQ ID NO: 81312 - DNA, 454 bp, Citrus sinensis
  Intron number 1 from transcript orange1.1g006838m (locus o range1.1g006838m.g) derived from phytozome v7.0 (chr-ID sc affold00009; pos 1653206 to 1653659)
acaacgcagcaggtgcatatacaaattttttgccttgcccatttttcaattttggctcttgcgcgtttttttattttggatttttagctaacccatttcctttgaaaggaaagattttgctttctgctgtttaattcgttaaaacaaatatgcaatggaacaaaacttttgaattattattattattatttgctttctctaaaatgcctagttttatgtagattcccattattcatattagtcaatagttctgtattttaccagtcatattttgtgagctggtttgcaaagcatctttcttctttcatgaatataatgttcaaatgataaacaaaaagttcatgttcctgctggaatattgggcaaacttgtttctttatatcaaaaacttctgtactgattaaggatatgaatttcagggaatccgccgcctgataagggaaggacgccttct

SEQ ID NO: 81313 - DNA, 691 bp, Citrus sinensis
  Intron number 2 from transcript orange1.1g021163m (locus o range1.1g019877m.g) derived from phytozome v7.0 (chr-ID sc affold00078; pos 415788 to 416478 reverse strand)
ttgcaggagatcacacacaaaacattgacccaaaggttgagatgtgaaggattatgctattctcaaaatttctcttatctttgttcttatggtttttagggatggatttatctttaaatgtagattacaatggccattgctagagaggttgcatcggttactcgcctcggcatagaggttttttctattccttaagatttatttgtttggcatgttatttgtttttttagttcctatttttctttatatttttgtggatatgtatatagttcttttttctctttagttagaaactcttattactttctctatttgcatttacatagcatattgctgatttttgttgaattatcttgtagacatgagtatagttagtagtttgagtattcccaaggacataactatgagtgacgtaatgcggttcgagtgtcttatggatagaacctgcataatttggcaattagggaaaaagaaaaaaaaaaaggagaaccacaatatgttatgaagggaagaagaataaatatcaaagggataacggttctgtgtttatgttcgggttattatttaatcaaagggattgtgaattccaaagtaggttcatagtccgtttccattccactgtctatcgtctaaaacatttttggggaatgtttcaggttgctattgtggttggagggggaaacatattccg

SEQ ID NO: 81314 - DNA, 626 bp, Citrus sinensis
  Intron number 1 from transcript orange1.1g012484m (locus o range1.1g012484m.g) derived from phytozome v7.0 (chr-ID sc affold00121; pos 108586 to 109211)
gcggaaccaaaaaccaaatacgaccgccagctcaggtactcaaccccacttcctcactgtcgtagttgtattgaccgttttgccctcctcaatttccattattatcgtcttccaccttctctttgctccgtgttttctgtaggccgataactttccactcggaataattttcgtttaagctctcttcgcttcaatagtaactcttttgctggaaaaatcatagatggttaaataataaatctaccgatatttattgataacaaattatatttcatttcgaaagataattttcatgggatgtctatgtcaactctcaggtgatcattaatttttttttgcaccatttaatttttatttatattgtggtaggagcttctagtaattatatagtgtttcgctgtttagttttcttgcaatgacagtagctcatgaaacataaaattgcaaaaaataatattaataaggatattaccaaacatattcgtttagtcggaagaaaactctattgaaattcaaaagtgaaaaataaaatgctgaacataatgtttatatttattatttttaaaatttgatctaatgtcgaaattgtaggatctggggtgagcaagggcaagcagctcttgaaa

SEQ ID NO: 81315 - DNA, 622 bp, Citrus sinensis
  Intron number 6 from transcript orange1.1g009217m (locus o range1.1g009217m.g) derived from phytozome v7.0 (chr-ID sc affold00006; pos 229418 to 230039)
gcggaacttcgccgcttcggcagtggaagcaaaaagtaaaattttcaagtagaagtttcgattgacttttacttttgaactctcaaggaaaatgttcctatatagaatgctaaaagaagaaaaactatgcatgttctggcatatgtatacatatacacacacaacagagacacatacatgatagtagggttagacataataactatgcgtggtgggtttgagttaataaaagtttctcccataaaatgtgaatgggtttgaactgaattagacatttaaaatactaactaacctccatccttaacacaattttgaaaagaaaaactacttgcagtctgcttatatgatcattgcccaagctaagaaaaggatgggtagctgaggagggttgtatggagaaatggttaaggtaaatggtttgtggagtcttgcaacaactctattatacttgagattatgtttcctgtatagcacttcaataaatggaacttttctgtgttcacttagcaaagttctgttctgttcctcttggtgaatgttgcatttttttccttttcctacctctttcattaaataatttttctatcctaataaccttgctgtttatctctgcaatccagga

SEQ ID NO: 81316 - DNA, 702 bp, Citrus sinensis
  Intron number 2 from transcript orange1.1g033142m (locus o range1.1g033142m.g) derived from phytozome v7.0 (chr-ID sc affold00019; pos 407560 to 408261)
tccaaactgaacggtgagatttcagtatatggctttctgctttcttatcttatctcttcaagttgtttcacaattgctttgggctgtttctctgaacacttagctagaggaatcttcgaaccagtgttgccacatgcagttcttttaccagctaaaaagtaggtctccattttccacacagtgtattcggaggtggtccagggtttgtacctcatatgggcatcactaaaacttttgtatagccttttgctcttttcctagagtagaatctttttatgccaaaaattataaaaagaaaactgtctttactcaatatttatgcaaaatgatccgaaattcagagtttcagacagaacatgtggcaaaaatggagccacagaatttaaagcaaaacaaaagactgtgcaacaagccagttatcttgctatttttctttgcaagctgtaattataatgttaagttgcttaatggtgtttacatgttcagtggcactgcatgtctccaatggataagctggactgctgtagtagttcttcagctacagcaacatctttgaaaattggaactttcttttagattttcttcggctaggatcagataaatatttcatttgaattatgaatccaatgttttgcaatccattggattagcatggattctaaaaatttgcatattgggcagagacagagtctgtgttggtca

SEQ ID NO: 81317 - DNA, 1060 bp, Citrus sinensis
  Intron number 2 from transcript orange1.1g009502m (locus o range1.1g009502m.g) derived from phytozome v7.0 (chr-ID sc affold00018; pos 1212526 to 1213585 reverse strand)
aggttctcaagaatcgggtagaagagcttgaaaaggtaagtcaatgcacaattgcaacatttttatttgtttgagcaatgaacagtgtagccgttgtgattatgtgagagaaaatgcaagcactctatcaaaggcatttatggtttagaattctagaatcagttttctttcatatgctgcttctttcctccccctctctctctctctttaataattttgaatggtcatatgctggatcctgtcctttgcttttataattcaaaatataaccaggcagagaacctacctattttccaaaatcaaacttataattatccactacaagctgcaatttcttgataaatgagaggagtcatgttattaaacaagcttttaaaagattgtcgaaacatattctgtcattttgcaacttataatagtggggtacaatcttaggagatgccaaacacagataataggtcttctcattttgttgagtatacatagatatcttgaatttatgatgaaatgctagtagcctatgataagaataaacactttacaacttgtcataaaatcaattcaaccgctgatagtttattccagtggaagtcacaagtgacattaaaccttgacatattgcattttttatcttggtgtttctgatgtttggtaaaaagcttatgattagttaagctgactctgtgttatacattcaaattcttgatgctatgttttctagaaggataaaaacattaacattttagattctctgatgtgatataatttagtttctcagagttggccattttctgcaatctgtatctttgttgttcttgtgattatactcttagtcttacttcaagtagccaaacattttgtagcccaactgatttagttgtatactaactccttgaagttatttatgactaatgtcaccatgttccacactctgttttcttgattctatttttttgaaagtggtgatatatcagtcaatttataatttcttgttcagagcaaaagaatttgatctttcttgacagtcatatttcgacaagttggccgaagctccagacgt

SEQ ID NO: 81318 - DNA, 574 bp, Citrus sinensis
  Intron number 1 from transcript orange1.1g009502m (locus o range1.1g009502m.g) derived from phytozome v7.0 (chr-ID sc affold00018; pos 1214475 to 1215048 reverse strand)
aacgtcaaattttcaaacaagaaaggtaatttttgaatcttcttcataaaaaatttctcagttcaatattattattgcatttttcttgtttgatcgaaacaaaattagagtcgcactctcattcgctggatcttcaatttaattttgaaaaaattttatatgtcacccttgtaatttcgaagaataaatccaaggtgattctcacattctatttaattaattttctgttattttgatttcctttttgggtaaatttatgtctatgaattggaattttgagtaactgtgttgaaattgaggcaatttggtattttggttatgtttaattgaatgcaatgctgttgatttgaattgaaattttgatttaagaagttgacccatttgtgaagactaaaggatggttaaaataaataaatgaataatcatacaagaatccgatgactcaaataatttggtgcctctgaggattgggctgttcatgctgagggttggactgttttgtttttttttggatcttctagcgtaaggtcacttatagtggagatgaaatttgttttacaggtaacagaaagca

SEQ ID NO: 81319 - DNA, 350 bp, Citrus sinensis
  Intron number 2 from transcript orange1.1g024549m (locus o range1.1g019125m.g) derived from phytozome v7.0 (chr-ID sc affold00009; pos 1056973 to 1057322 reverse strand)
attgtacgttgaattattttactgctctgatcggtgacaaaaaactgaaattgaatggtatgatgacacttatgtagaaaggtaatgatgagcaacaatcaaaatataaaagtcaaagcacctaactattttcattaatttgggaagcatcttttcttaatcatgcatattttgaatgctcttgaattcttttaaattcacttatcatgatcaaatcgtctcttgttgataatcgaagaatgttcctatgtgtatgtgtatgttaagtcggcgtacctgtcaactgttttgaatctcatggtactcatatgtcattgataaataaggtctgtgtatcgttttgccaggtg

SEQ ID NO: 81320 - DNA, 1059 bp, Citrus sinensis
  Intron number 1 from transcript orange1.1g024549m (locus o range1.1g019125m.g) derived from phytozome v7.0 (chr-ID sc affold00009; pos 1057351 to 1058409 reverse strand)
tcttctcgagcttgaagctcctataaagatttgtggtaaaattatgtttttgatttgtggtaaaattatgtttttttttttaatttatatttttaaaagcaaaaaactaagtccttttttgcctccgtactggtgctaataacatattttttaggctgtttatgtggtaaatttgacttgtttgtgtgaagttttttgtgtacttttgagtttcagatgaaaattgcagaatcttctttttttaaaaaattgtttcctttgttttttttcccttgtatattttgtttgttgaggacatattaattggattctattgaaggaaatgaatgtaccagaatttatgtgggaaaaatgttgttggtgtgtttatatttccattattgatcttagaattagttgagaggatgataaataaatgaaggtgtggtaacaaagtctaacacggtgaattcactaaaatgatttgaaagagattaaatataatgtagcgaatgtgtgaatgggttttgaatattttgaaggagactgttgaaaagaaatatcatcaagggcgacatgatgattgatataattagttagatcgtggaaagtaacatgagttgattgctgtatttgataagtaatcataaaacaaccgggaaagtgggtttacgtgcatatttgccatttgtgagatcaatgtgaaatgttgtacctattaagtctgccatgtcgttgcgcgaggactgcctcattcatattttgtatatactggtagaatgatctttttgacttcattaatattatttattcgagttggattgccacaattgattaaatgtttgactggtgggtgattgttaactcatttattttctgaaatttataatctaactcctatttttcccctatttatcaatttaactgccttatttggagaaaactttttgctttgcatatgtaattttgtaataacccgcttttctctgctaataagtttttatctgtatttggaagttaatgaaggctccttccgtcattttaggggaaaattctaatacctgtttctgaaggtttcat

SEQ ID NO: 81321 - DNA, 467 bp, Citrus sinensis; identical to SEQ ID NO: 81247
  Intron number 1 from transcript orange1.1g033542m (locus o range1.1g033543m.g) derived from phytozome v7.0 (chr-ID sc affold08683; pos 591 to 1057)

SEQ ID NO: 81322 - DNA, 628 bp, Citrus sinensis
  Intron number 1 from transcript orange1.1g048384m (locus o range1.1g048384m.g) derived from phytozome v7.0 (chr-ID sc affold01118; pos 11504 to 12131)
tcttcctcaccagcttcttgttcttcctctgatcggtgagtcccccacaaatcactctctttgtttttttttctttttaacattaattttttgtttaatcactcattgtcttgtcctccatcgtttcttgtgagtttatgtttaaaatttttttctcattattagttattcttagtgcttatcgagtttgatccagatcttgatctcgggcttatattcccttccctttctcttttgggatcggcgtgttcgtgtttctggatctgttttaatcgcgtggtagtgatgatttcactgatctcactatgatagagatcgtgtcaataactcgtttgtagttgttctcatttttaatgtattcaaagccattaaccagattactctagtattgttggccaaggaatagtgcttaatcttagacattgactcagtctggtggtcttttcagctattgtggttttcttatattgaagctttaaatctagaatccttgaggattagtgttgagtgagacttagttgagctccattttatctattgcagaaggctctgaatcatgagtggtttcttactctaggactctaactttgtcttcctgtcatttcaggactggtcgactgaagtcacc

SEQ ID NO: 81323 - DNA, 509 bp, Citrus sinensis
  Intron number 3 from transcript orange1.1g022256m (locus o range1.1g022256m.g) derived from phytozome v7.0 (chr-ID sc affold09005; pos 1015 to 1523 reverse strand)
caggttagtttgtctactcagtctgcatcagaaaatgaaatggcaaaaaaaaaagggaaaaactagataatttccatgattaatgaaaaaataaactacccacttagaccatttctcatgattcaagccactatatttcttgcaaatatctagttcatgaccttttgggttaagtccatgtattagttcctggttcacattgctacctaacagacctgtgaatcattatattctcaaccgcagaactgcttcatagaagttataatgatttgtagtcaatatgtgattcatcatcaattgtattgaagagcatgagtggcaatttagacgctgaagtaaggtttctcaatcaggaatgaccaatttgatgattccttcagaaaaagtgattaattagagaactgagaagaaacatatacgatcttactttctgaaatgtattaaatattaagaattttttatcacttctcacaggcacagagagcacgagggaaattaattagggaagt

SEQ ID NO: 81324 - DNA, 714 bp, Citrus sinensis
  Intron number 2 from transcript orange1.1g016867m (locus o range1.1g016867m.g) derived from phytozome v7.0 (chr-ID sc affold00375; pos 126962 to 127675 reverse strand)
ttggctgctagttttggatatcttcttttcaataagtatgtgatctagttccattgctgttacagcttgaatgttttgagttatatcattcctttcctttcttttgactttgaaattaaaggaacgaaaatgcatattcatactaaactctgacagaaaccttgtggtcatacaagtaatggcaactaaaattatgagcttttccattgaccatagccccatcaatagaagactgtaaattggatctccaaaccagggacacaagttaacattgcttgtaaaagccaaagaggaaaatatttataaaaaaaaaaagaaaataaaatgacaagatcaatgatttctagtgcgtgcacttccttcgtacctcatggaaacttccatggcctctagaatttggctttggctttgcataggcacatttcagtagtcgctgctggaaacaaattcatccattgtcttagtactgccgtatttctggtgcgagaaacaaatcactctgttgccatggccaagtcctgttctttgatatttcattgggacaactaactgtaccactgcttggcctattttttcacaataaaaatgatgctctaggtatcaaatatttccattcttgtatctcatctttgaaaagtgcctcaaggaaataattattgtatcattcgtcttaatgcaggtataatttactgagcttagaaagtgcaagagaag

SEQ ID NO: 81325 - DNA, 679 bp, Citrus sinensis
  Intron number 1 from transcript orange1.1g001733m (locus o range1.1g001733m.g) derived from phytozome v7.0 (chr-ID sc affold00019; pos 1211281 to 1211959 reverse strand)
tcggtatgtttgtatttattttgagcatgcagggaaagattctacttgcttttaatttgtttgtagagctataaaggtttttgaggttttgataaaatttacctgattaaattccgcagaaagtggttattgcaaccagttttgttttctctcaatatcattggcatgcaaaaggaaagctttgaaacccgactacaatgtgtgtcgatcatctattaaatcttttataggactattttcgagatgtttcatcttcgtggtggcagaggatgcaatcaagtgtcatctgagcttcataataggcgcacacactaatacactatctgtggagccttcctattccattaaaattagacattcttggtacctaattggagtatctgatagaactctgcatgcacggttcgcacaaaaacctgcgaattagagaatactattctcgaaggactattccttttttatttacgttgacaggtctaaaaaacaggaatataacttcctcatgttcttgaagtgaatattattttttcgtatagtgttttcttgtaatttacaaaacgaaagaaatggtatcttgtcattgcttatataacttggaatgcttcatatcagagccagactaattttctccgctttttctttagttcaacaaagctggaacttcaattacaagtcttgc

SEQ ID NO: 81326 - DNA, 468 bp, Citrus sinensis; identical to SEQ ID NO: 81034
  Intron number 2 from transcript orange1.1g021327m (locus o range1.1g021302m.g) derived from phytozome v7.0 (chr-ID sc affold00006; pos 2862881 to 2863348)

SEQ ID NO: 81327 - DNA, 785 bp, Citrus sinensis
  Intron number 1 from transcript orange1.1g011139m (locus o range1.1g010981m.g) derived from phytozome v7.0 (chr-ID sc affold00125; pos 257585 to 258369)
ccagttcaaggctcctccgatccgttcctcattgggtaaatttatcattgctcactcttttgttctttttctttctcttttgtcttgtttctgtaattataatttgtagtttctttctagtggggtttgttttattaactgaaaaaagttatcaaaagattttttttttggagtacttcgctaatgcttgtacccttgttgttattttgtgggtatatttattatctgggtttcacttcttgttccaagctaaaaggtgtttaatgggctgctctttgcagtgattcatattggtaagttttaggctagttttcatttatttatttttgtaccttggcaatcaaatgctgttctttggtctctctttcttttctttttagtcagtttttaatcattttcttatgtatgtatatataaagaattttcgtagtttgatttggaatctcaattagaatgatgtgaaggtgggcgaaaagaaaaatctttgctcaaaaagattccaatgcatgtggccactggtggaataattggcttttttaactttgtctagattatattgagttctcgtgttgttctgttttccattggggtaacataatatgctatcttacaatgaagtgttgtgttaagatacgtcaacgtgattacagtattaaattactctgttcgtggtttgtctaggctttattttgtgttaagatatgccgacttgattataatattaaattactctgttcgcggtttttctaggctttattttacaaaagtgaagctgggttctcctc

SEQ ID NO: 81328 - DNA, 867 bp, Citrus sinensis
  Intron number 1 from transcript orange1.1g011550m (locus o range1.1g011550m.g) derived from phytozome v7.0 (chr-ID sc affold00375; pos 90246 to 91112 reverse strand)
cactggcagtctttcttcaggtcccctactactaggtcagcttccttgactctctttctttgttttacttgtttaacaacaatttgtttgatgcaatttggagtccttaatgggttaatgtgttcttggcttgagtatctgcagaagtgatttatttatctatttattcactgaaattaattgttaactttctttctagtagcaataggataggataagcaattgggtacttttctttttttttggctgaaattcttggtcacccgtagtttgaaattgagtgtttcctgctgaattcactctatggctcctttatagaaaatgtgttaggcctaagagggcactaattagcaaattactaattatatgttttttaaatggcagcagagtaatgcttctgtcactcaaaagtgttgagactagaagttgatttggaatttgagccattggttgttgttgtattttcttcactacatgattcagatatatgtacaattcgtgcaatttatttgtatttaattattactttgatttgaagattatttaatgatttggtaccaagagctatatatgagaatgtctgacttaaaatttctccatacatttacatacatacatagagccatcaatttattcataagcattcgcgttcagtaatttacaaataatttggagcaattggatttatataataggaaaggatgatgctatagaatgctttaaagatcacttcttttgtcttatatgctgcttcaagttgaagaagcacatatgcattattaaaaaggttgacaaataaataaactcactgacatatttcaatgataatcagcttgcaataagaagaactctgacactgaactatta

SEQ ID NO: 81329 - DNA, 947 bp, Citrus sinensis
  Intron number 2 from transcript orange1.1g045852m (locus o range1.1g045852m.g) derived from phytozome v7.0 (chr-ID sc affold01019; pos 332 to 1278 reverse strand)
tagcgcaccaagattaaaagaagtgtgtctaagtcaaaattgttgggacggtgacctcaatacaaccatacaactgtcgtattacaaaacggtgcgtattcatcaaccaaactattttttgtttttttttttttcactggaggattgtttgttttttaaccatatttgtatggactatttgatttgaattttattatttaatttaaatcttttttattgaaattaaaattaaatatataattacatattattataattagataatataataacaaacagtacaaaattatatatatatttatttatttatcgtaaaaaaatttaaaagaagtagcattgtgtatttaagtagttaaaaggcactactaattttaattaaatattaattcgattctcttgtttataatattatatttcacatgttaacacattaagttacaatacaatttgaaatttaccaatataatttgtttattattgcaataaagataaaatagtttgaattaatattcagggttgactttcgagtttttggggccttaggtgaatttttctagaaggcctcattttttctgcaacttaaatactcaaagaaatataaaatatctcaaagtccgttctatatttagttcttgaatttcaacaataattaagaaaatctttaaaaaattttaaaataaaataaaataaataatgaagaagatagttttttaacttccattaaaaccattacaaaactaaacaaataaataaataagaaaaatactattttaaaataggatatccataattgtatagtactaaagatgaattaatgatcagataatgtatatggactttatatttcaagaaattatttttttcttttttaaatgaactaatgaatgtaataattttttttttgtagataagacatcgagaaattgttttatctattgatttttgag

SEQ ID NO: 81330 - DNA, 949 bp, Citrus sinensis
  Intron number 1 from transcript orange1.1g004705m (locus o range1.1g004711m.g) derived from phytozome v7.0 (chr-ID sc affold00068; pos 522652 to 523600 reverse strand)
aactgataaattaaagcagaagccattttttcactgtaagtttttctttcttttgattttcttattcttgtctccaattttattaagatcaatacttattagttattaattgtttgttgcaggttttaattttactttaattttgttgcatgatagctgaagttgtgttagattttagtgtaatttcggtactcgagttctaaacgactgtgcttgtaatctatgaagtgaactgactttgttattagtttaattttattgaaaaaagttttttttttaaagttagtcttttcattgaagttatgagattaggtattcatagtggagaggagttgagaaaaaaacactgttgtcaatcttttggaaaacaaaagaataatcgtaagattagaatcaggttataattattttggagatctaagatatcgactgataagatgttccgagtgatggtaaaacatgggtttgactttttgaataattttgtattattcttgggttttatggaaagctcattctgtaatgctctgagtgagtacttgcagtgtgtgacatcgatgaggccatgctttgtaggaaaagtgtatctatttttgctgaaatttcttttgtggccaaaagtgtaagctatgaacagccatatgtagtgttatgaatctcaaatagtagtggcttgagcaatcatttgtgagacaattctcatgttcttgctttactgtctacaacctggtctgtgcaaatataaccctgatcttcatgctttgtgaacatttctatttactgaaacgggaaggttcaagccgatatttgcttggtgggttagtgtttgcattatttacatggcctgcatgctgagccttgaagttgatgttgtttcatgtcaatttatatttgctttaataaactcttttgttggtttgcaggggtattttgtgttcaactgtaaaaa

SEQ ID NO: 81331 - DNA, 497 bp, Citrus sinensis
  Intron number 2 from transcript orange1.1g033389m (locus o range1.1g029962m.g) derived from phytozome v7.0 (chr-ID sc affold00009; pos 805260 to 805756 reverse strand)
gaccaaaagagagtaaattcatcaacgccgccttttcttcatttttcttcttttatcatctgtttgtaacttttttatggttaattttactgtatttgatgttttaatctctgggtttttctcatatcttgagtttattgtttttataactttgttttgcatatatagatattatattaatcctgaatacattagcaaacaacatgattttttcttttcttatcttcttaagttattcaaatttttggccggtgatatatgctacttttttttttcccttttatctatagttgaatgttatctaccttagttatttcaataactaatgaaatgagctgcaactttcttgttcactgagaaaaatcagtgacaaccgaaataccttgtgaacgatttttgcttttgaacacaaaatatgcattttttttttaatacaaagtaacttcatgtggaatgcaacaggttcttatcagggaggtgtgtggaagataagggtg

SEQ ID NO: 81332 - DNA, 824 bp, Citrus sinensis
  Intron number 1 from transcript orange1.1g031536m (locus o range1.1g031546m.g) derived from phytozome v7.0 (chr-ID sc affold00193; pos 148167 to 148990 reverse strand)
ggttcttgatatttcatcatcaaccccaactttgggtgagtctctttgctcaatttgtttctgttcttttctgggtttgttttaaatgctcatttgttattattattattattattttttttcattcatttgctcggtgaaaagttgtgtttgttgttaattgatagatctcttatttcaatatttgatagaaatttggcatcttgatttggtatcatgttaaagatgtcagtttttattccatgttttgtgatgatgatgatctttttttgtatttttcacgagggcatttccaattctttcccatattttatattcttcttagaaacgttggatcatgattatgattttattgtgaaagtgattatttttatttcttttattagctgcagtgttgttttgatgcctcggattttatgatcatgggttggatcatttggatttctgataagatgatttcccagctggggttctgggaattttatgagctttcttttatttcttcaaaggtagcttatattgtttgatgttggtttgttgcaggttggaattgctatcttcttttggctctttttcaggattctgcagtcatcatttttccttttttaaaattttcgcttctcaggtaattttaaaagtttctctgatggtttttatttagttgcccatttagtgattgtgtgtgtttgattttctaatgaccctttttgctgtctttcagatatcaaggaagcagtcacaagattttgcttgatttctgattcagtatctcaaatttagtacaaaattgggtatctgtaaatttaaaattttaattcgaaaac

SEQ ID NO: 81333 - DNA, 961 bp, Citrus sinensis
  Intron number 1 from transcript orange1.1g046979m (locus o range1.1g046979m.g) derived from phytozome v7.0 (chr-ID sc affold00069; pos 251884 to 252844 reverse strand)
gagaagatctacctcggtggcaaagttcgtaaattttcttcagttctcgattctttgtttatctttttaagtttattttattcatttgtttgtttttacttgtgaaacgatttctgcggtgtgatggagaatatacggcgtcggtttttgtgattctccgatccttacatttttcttttttaacggtcacagtactattcagtgttagtaggtttaatgtgtatttttttatgctacattacattcttttttggattttatttgttaatttaattaattttgcttcgtttactttcttgttcccgcatttggatttatacatttcttcttgtgaagctggaatcaatttcttttggtttattcaatgttttatctttcttccttttttttttttctggcagtccattgcagaagcattgtttatgccttttttaaaaaaatatattttgatgtctagctgttattattaatattttttttttgttacatttgagttttaaagtcaatgtcttcttttgatgcaagagattctttttaagatgtcttagcttttgtaagaacacaatgattaaaatcaggaatcactaggtattatttcttgattcgtttattaactttttgataagttctgttaatttggtgtatcaagtaattttatgtttccctaaaaactatagcacatggggaagaagccctttttagggaataatactatctggttaaagtaggagctttcttttctttaaagggtctaagctatagaagacaaatgattgctcttattttactgaagccaattcttgctgaacaagtatccgactcatctgaaaatttaatgggagttgagtgtttgcaagtgttaatagcttttagtattagctggaaaatttctgctttgttcttttctcacgcaattatttgtttgttagtaatgtgtttattaaaacttttcaggaacatc

SEQ ID NO: 81334 - DNA, 544 bp, Citrus sinensis
  Intron number 2 from transcript orange1.1g040614m (locus o range1.1g040614m.g) derived from phytozome v7.0 (chr-ID sc affold00069; pos 230193 to 230736)
gcagaggctattccattgtgtacagatcggcacctgtaagtgagttttgagttgcttcaatatatttggttctatatgtttggttgatagacgaggcataaattcacgtagagagatacttgaagtctgtatggagattgtcaaatagattttgtggcgtgactggtgtccattcctctcttgagtgctacattctgaattatctcatattgcatattctttcgctggtactaactaccaactgaaactgggcttagtcaaggcaccataaatcaaaaagttccctcacattctgtaacgatcaagacttgcgaactgaccaagaggataacacgactaagttctcttcagattcgtttgcatttcaattgtaatgaatagagaaacaatcgtttgcatttatgtataagctcaatgcatttgagtggttctggttaattcacggatatacattattgaagtagggcctgcttgcaaagtttggcatatgatttctgaaatttgatttgttttcttcttttgctcccacctcaatgtttgtcag

SEQ ID NO: 81335 - DNA, 489 bp, Citrus sinensis
  Intron number 3 from transcript orange1.1g028081m (locus o range1.1g022657m.g) derived from phytozome v7.0 (chr-ID sc affold00781; pos 51107 to 51595)
ctaccacttttgggtcaacccattgcattgtataggtaaatgccaatatcttgcatcaacaatattgtagtattccaacaacctgtgttagatattaattttttctatcaaagtattgatgtatggtttaagagggacttccgtgtttaaactgtaacctatgttcagttacattcggtatgaaaaatcaaatagaatgtgagaggtggtctttctgggaatatggagttttcttcttgatccagtaacaaacattatagtatttccatagtgttgttaatgtgattctcagtttattttagaatagtaccttgggttaaaggtaccctgggtgggattcagttactgaggtctggccctcaggcaaaataacagttatgtgtttaaagttgtaatagtcgttgtttccattgcttatgactgatcctcgttttttcttctgaaaataataaaatgcattttttcttcagtttctacactttctcacgc

SEQ ID NO: 81336 - DNA, 776 bp, Citrus sinensis
  Intron number 2 from transcript orange1.1g008050m (locus o range1.1g008050m.g) derived from phytozome v7.0 (chr-ID sc affold00621; pos 15189 to 15964 reverse strand)
gaaacctgcttgctaccaggtatctctctctttctgttcccaagtatatttatattacattccttcagacatccataactttgcaatgttcagactacgcttgtcatgttaagcaatgttttgtttctacatgaagcactcacttctgtaattaaaagagccaatttgtggcctcaggagcccacttttattggttcttgtcatgagaaggccactccgattatttctatttctcacattattttaacattgcaatttataaataagttgccaactattgagtgtatgctgtggttgataatttacacatctagatatcaagaaaatcagaaagtctggacttaagtaaaattgacacagacactcacaaggaccatgaatctcactgattattattattataattattgtttttgtctataaataaagcttgtaactctaaaaaaaaccacccattaaactctccaaactacttggctaaagaatctggaatactgccatattcttctagttaagtaaacagtttcttttctgtatttgaaagattgcatatgatgaatctgttgaactagttaatacctttctcttcttttgggttagaggatacatattcaagttacttatcggaagttcagctgaaaattgcaacctacatttgatattaattatgactttacatcagcacagaaagagtccatttacaatcctatctgagagtaatttgaggtctttccttgtttttcttttgttagctccttgagtggagttgttaagat

SEQ ID NO: 81337 - DNA, 493 bp, Citrus sinensis
  Intron number 1 from transcript orange1.1g034967m (locus o range1.1g034967m.g) derived from phytozome v7.0 (chr-ID sc affold00041; pos 19584 to 20076)
gtctccatcgtcggtgtcgtcgtgtggatcgtcgggtcggttaattttcactcttctgttcatttctatttttctgcccaaagttaaagtttctagaggaatttgtcacttcaactgtctctgtcaaaggcatccaatatttttctttatttttttatttttttggcttttcaattatcaaagatcatccctctattagttgatagtagtttaatcttcttctgggtgtctaaaatttctccgtttgacgctagaatttgtctctaaaattatgtgcgtgacaagtttagtgaatgcatttcttttctcttctgggtttcttgacttctcactagttgtcgtaacttttcgttaaagctctgctggggtcgttgatagttttttcgtttttctagcataaacatagaatcttggcaggattagaatctgattgaagtcttttagttaatgcgaatattggtgattgtgggtgcaggctgctgttgacttgcat

SEQ ID NO: 81338 - DNA, 486 bp, Citrus sinensis
  Intron number 1 from transcript orange1.1g033884m (locus o range1.1g031719m.g) derived from phytozome v7.0 (chr-ID sc affold00009; pos 1864467 to 1864952 reverse strand)
tggcttggaccctcgttcatctctctcattttttcgtatgttctctctctctctctctctctctctctctctccttgtagtaggtctttcagatccccttggaattgtaatttctgcttttcataaattccaaattatatattaaaatacctagaatattaattttttttaaaaaaattgaaacgaatagagcgtatttgtgatggatatgacataattgattgcctacgcccgtgaaattgttgaaattatacatataggctgaggtgataattggataacaaaacaaatagtttcttctttgattattcgattcgatgcacacttttaattacatattgttgtgctgcgtagaaacaagggcctaatgttgtttttggaaccgaataaaagattgtagaggaacttgatgtgtttgtcgtcactttcattattggtgtttttgtttcaggttacttatcacttctttcactggaagaaggggac

SEQ ID NO: 81339 - DNA, 555 bp, Citrus sinensis
  Intron number 2 from transcript orange1.1g017631m (locus o range1.1g017631m.g) derived from phytozome v7.0 (chr-ID sc affold00515; pos 1036 to 1590)
cattgtcggacgagattttcttcctcgaggatcaggttgttataagctttgaattttgatttcctttgtttttgtactgttgtattctgtttggttggtgagaaaattgaagagatggaaaagggaaatgctttttagtttttaattatttaaataatgataacttttggtcaatttaagtcaaactcttttaaataatgataacttttggtcaatttcactcaaactcttttcaaacaagcttgtactcagttttgactctactgtcgaaaagggaaaattgaaatgtgagatcaaactctttaagtcaatagcttcggagaattgaacaagtgaactcaattaaaagatgtctaaatcaaaagttacattagttgaattcctgcttcgttttaggaaaactggaactaaagcatatcataatcaaaagattttaagtgatcttggaaaatttatgtgcatgcaaatgaagaaaataacttataatttttggttctgaagtattttgtgtaattttcaggtattgtgacaaggaggcctttggtgctgcaattg

SEQ ID NO: 81340 - DNA, 775 bp, Citrus sinensis
  Intron number 2 from transcript orange1.1g035107m (locus o range1.1g033799m.g) derived from phytozome v7.0 (chr-ID sc affold00096; pos 411329 to 412103 reverse strand)
gcgaagtgagttttatttaatcttattcagattttgcaaatcagcttgtggttgctaattggattaaagttcaattttagcttgttatgttatagaacatactgctagtaggagaacaatatagtgtttcgctaaaggttgtacttctttgatcttaattattgttatgaaatcatgtcttgtttgttttctcaactcacagctgtctttgctaagttctagaactgaaatagattagtttcataagcagtgtagtgatgatttatagatcttgttggagttaattttatttgccaatggcttgtgtggctgtataaagagattaattaccttaggatcaaacattgttcatgtatttgttaattgttttgatagcaatttgagaggttgagataaatgccaggatggcagaaattggcttttcatgtgcaaaacaaattacgattcagcttagatgatatatttggtagttgatagtatcttctcaaaactttgaatttttcttccagaaatttgtgatttctatggtttaccctactgctatgccattcacaacatcgtccaatataaccttaatcccttaaaagttgtttggacaggaatgcccaatcaatgcatagtttggttcactgggaaagagacaacaaaggcactatttgggcactgctgaattacagaatgtttgatgaattgtttacttatatgcatcaagctcaaaagaatttctatatatcttaatcccaataatctttcattggtcttctgcagaaactta

SEQ ID NO: 81341 - DNA, 719 bp, Citrus sinensis
  Intron number 1 from transcript orange1.1g026340m (locus o range1.1g026340m.g) derived from phytozome v7.0 (chr-ID sc affold00040; pos 851014 to 851732)
agcccatccctaaaatcactctaggtacttccaagttgcttatgcctgcctttacattgataagaggattttttaaactagaacaagtcagttagtccaacgtagttgattcctatgtgacttattgacgcgaagggacaatttaattcaaagtgaaccaattaagcaagcttttctttttcatttaggttaatatgatcaagctgaggttatcatctattcatgaacgtcatttcttccagacgattatttccttattcctctaatgtgttcagttggatgccactgctttctgcaattagttagagaagattgctcggagagtgaagactttggcagtgtgattgttgtcgatgttaaggaaatcgattatgtttttgtggaacttgtggagctttgattacagcttctgttgtttctcttgtcgtgtaggaactatgatcatgcaatctcatctttacaaactcttgccatctgctatcgtgccattgaggcttacacaagaatatagaacccccttgacacagcttaaaaacttttaaaatagtgtagaagatcaatttttttattttacagtaacataatgtttctggtggtaaattttagttatctgttgtcttcttgcaatttatattggaactaattcttaatttcaatatgaggtatctttcttcaatttggtttctgtcagcatgatctatgttaacatgttacagacc

SEQ ID NO: 81342 - DNA, 876 bp, Citrus sinensis
  Intron number 1 from transcript orange1.1g009975m (locus o range1.1g006898m.g) derived from phytozome v7.0 (chr-ID sc affold00019; pos 443725 to 444600)
gctgcgggaggatattgagatcggtgagaacatcttcagttctcagtcatttccatttatcgtaatttttaattattagttttgttatttatcttcaccaatcaatattaaaacatttaattctcgcttaatgattagttggcgcacaatttttaatcaagaaaataaaatagaaattttaaaaattttaattattctatttaatgattttagtcactcttagaaatgattaatgaaaaaactgaattcagtttagcctagttgtactattaggcaccttttgatttggtaactattttttttcttttatttaatttctcgtgcccttgttaactgatcaattttactttcgttttcgttttcccagttaccaaacacatcattagtgtttgaggcctcaaactcttccttttgttttctttatggttaccttagtttctggagttgaactctagggtttgttgcagatctcaacgttattgtttcacatgatttttccttttatgctctgtttaattgccagccaaaaactatcagaatgatagtacttcataaaatttgggatcttggtgctggacaatgtggaattggcatcttatagttactggaaattcaaaccatttattagtcatcaaatcggttttgaatttgaattttggaaatctttttgttgaattttgtgataatatataagttgcaattcatctgatttgcagtgcttctgggtagatagttgatcataagggttttccaagcgttttgaaacacaatggcaatggttgatgaaccattatacccaatagccgttctcatagacgagctgaaaaatgatgacatacagcttaggttgaactcaatacgtaggctgtcaacaat

SEQ ID NO: 81343 - DNA, 444 bp, Citrus sinensis
  Intron number 1 from transcript orange1.1g030969m (locus o range1.1g030969m.g) derived from phytozome v7.0 (chr-ID sc affold00006; pos 2357281 to 2357724 reverse strand)
gccagcttgcagtggggtggaaccattgcagccctgtgagtcacactcgtttctattttcattcctttattttattttatttgttaattttatgttctttttatatctccgctctccggcttccaggattcatggtaataaaatttttgtttttttttttttttatggacttcaattcaaccaacaccacgaaatcttggctcttgattaaaaattttttgagatattttatcttgtttctccggtgtcattttcttctgctacctttgattctcttattacctcttatatattctaaatatgaatttaaaattgaagacaaacatgtaatagtttatacactaagaattcaagtctcttgttctaacgcggcttattggcatatactagtgacttttttttttcctttcattttttattttctcttgcagattcttgttactg

SEQ ID NO: 81344 - DNA, 1011 bp, Citrus sinensis
  Intron number 3 from transcript orange1.1g035162m (locus o range1.1g034876m.g) derived from phytozome v7.0 (chr-ID sc affold00054; pos 648365 to 649375 reverse strand)
taagggaaacttatttcaattgcaagagaggccaggcttgttctcttttctcttcttttcatatatgttttctttttcttttgacttcctctgaaaacttgtaaggctacaagctctgatttaattggaacgagataatcagtgatagctggtgaagttaaattcttctacattatattgtagaaacggaatgatacgtcctgtagagacaccataaactgtagaagtacatgtgcatctatggtatttttcatatatatggtttctggttttgtgtataagcatgactacataaatagcatgaaatgggtctttgcattcatttaagtctacctaaggaacttgcctgttagtatcaaattttaaagaaacctggtggagctggaggatagagaagataatttgtattttgtgacatgaagccaaactcatcttttttcaccttgatagtgtgatgaaactcaatagataatccatatctgtgtgagcacacatgactgattaaggaatagaattatgaaaatctaaactcctttttgtgataagttaactaacgcaaggaactcaatacagaaaattgtaatctgtatgagtacgattgattataggatagaattatgaaaatttgaactttttttcttgatataagttaactgaggctttattacttcagtttatgtcacttggtttatctagaagcctataaccctacagggcagcttgagcactttaaactaggcatatctcatgtattggaaaaacttaaatttatgcctatatatgaggagggatattatgattttacacttacactttatatgcaatttgtaaatttattcttgaagacttctcaaatgttgaagttttagctatgttgaacaatgaatactggttatcatatggtcaattctgtaacataacaattagactttctataatatttgagtcaacaagatcccttcttttaatgtgtcattccttttcttcccctttttggttggtcaggttgac

SEQ ID NO: 81345 - DNA, 556 bp, Citrus sinensis
  Intron number 1 from transcript orange1.1g035162m (locus o range1.1g034876m.g) derived from phytozome v7.0 (chr-ID sc affold00054; pos 649643 to 650198 reverse strand)
gactctgagtctgtaagtatcctcatacgtccccgtttcattcatcaaatttatcgatgcttatttgtgcttgtttaacatctgatttggggtgaaagctagggttagggtttagggaatttagggtttttccaaaagaaacaattttttggggaaagaaatttgggatgttcgtgattgggttctgagattagcatgtttacaaaaagtttctatctttcgatcggttgcttagaaaacaggaagaagagaacaaaatttttgtgtgctgtcctctgctttttttttctttctttctttcttttttatttgttttttcagctagtatttcaaattagatattcattagacactttgtatttggatccatgtttatctgtttataattttctttctcctaatgatccgtaagcgcacccagagaaccatggcatcattactgtaatccattgtacatgttattgggggcattctacactttctttgcaaactcacttttttcgtgctaactaaccatgtgttatccatttgttagtttatctagttgaaacacaaa

SEQ ID NO: 81346 - DNA, 644 bp, Citrus sinensis
  Intron number 1 from transcript orange1.1g012625m (locus o range1.1g012625m.g) derived from phytozome v7.0 (chr-ID sc affold00091; pos 129560 to 130203 reverse strand)
gctgttcaagtatgtatacaatcttattaattgtagatcaatttaattctttatgagttttttttttccatttattttgataagattctcattgacctccaatgctactgtgcttagtcatcattaattttgcttcttttttgccatgcttcagtttttttttttttaatttattttaatctatgtcggaataaggaaaatatattattatgatttgaggttttgtggtgaaatgaaaatgaagtattttaaataattgaaggcaattaaagtgtatcatctaaattctagatcttatacgagtctgtctttagtagctcaggtctgttaccttgttcatgcgcatcaaatacccaacacaacgttgaaatgactgaaaattgaaaatcagttgtgattcaagtggcgggacattgatcacacatgtattacttaacgctttgattctatgaatatgaaattattaacgtgtttatttacctaatgatatcatgctatctggatttgtaggaacgtgtgaactgagaaggaacttttgtgtgtgatctgagaaagaatattgttattctgatgaagaaaacttttatcattaacttttgaaatgggctaatttttttatgccccttttgttttctataggacga

SEQ ID NO: 81347 - DNA, 732 bp, Citrus sinensis
  Intron number 1 from transcript orange1.1g003892m (locus o range1.1g003892m.g) derived from phytozome v7.0 (chr-ID sc affold00092; pos 148342 to 149073 reverse strand)
gcaatcccgtagggcatcgccttttgctggtaggttcgatgcttgcatttattactcggctttgtattcttatttactttttgactgcgtttcttgtttgcgttagttgtcgttttgggaaacgacatgctgaaattgccaccacgtacgagtgaaatgcaatgaaacgaaacgaaacgaaacgcgtatactttgtttcgtagtgttatgggagaaaaaagaaaaaaagaaaaaaatgacgtgatgccgagcatttttcatgcctggatcttgtctcgttccgctgaattttcgctttctgtggaccgtggttttgactttgttgtgagtttttagtgtaacttgtttatgctgtttttttgctctgcttcagttcatctcgagtttcaggtttgttttgtttggctttgattcgttgatagtttcgcttgtacgatttgtactttaattatcgtaaattatgatcagatcaagaattctttaagtttcagtttttgatattcaactgctaatacttctgttgatcatgtttggaaattggatctgaaacgttgtcgttttactttcctcctagcacgtagcatctgtaaagttgtgatactttgtaggctaatcttcgtttgattccgacgtagaatgtacgcacaatgcatctggtgtcctctgtgtgctcatcaagtctgatatcttgttgcagattatacagggtttgttgtttaattgaagaatcgg

SEQ ID NO: 81348 - DNA, 970 bp, Citrus sinensis
  Intron number 1 from transcript orange1.1g018924m (locus o range1.1g018924m.g) derived from phytozome v7.0 (chr-ID sc affold00018; pos 1165976 to 1166945 reverse strand)
tgcgatttttcagccgattcactcacgctcttgaggtatcaatttaagggtcctttttttgaaataatttttttaaaattgttttggaaattactaattaaacgatgcgtttggttctcttgaaaagaaaatggagattttataatttaatttgagtattttgcattgcagttcaagaaattccgtgctcatagactgaatatttgtaatgaatttattagaaaatcttgacgacgcccatgggctccattgattttttagcaaggtttatttgcggttcattttgcaattttgagtaacaatttgtgccataatgaagtcatatgttacatttgcctgttctatttgaaggtattgagttgactgtttcttgaacttctcctggtttttgggagctgaaccgccaagctttagtatctgatctcttttgtgtatttctcagatggatcttttacatttatttatcataagattttagcgatgagttgtttttagctgtcatccaattcctaattgataatcccaatttttttatccgggcaaactacattcagcaaggagagggaaatagctgcagttatcaacactttttgctgttctactcaactatatttttggcgaagaataaaaatcattagctgctgatgctaattagacactgtattgttgttattaaactttttggatatttcatcatgattttgggtatctccaatgtttggcttcctaatattatgatctgtcccccctctcttccccagatatcgatgtggatgacagacaaaaggtatctcaatattacagctgctgatgctgctgttcagctggacttgatcgctaaagttaaaggcatagaagaagcagaaaattatttcagttatatccagaaaaaataaagggccttgaggtttattctgctcttctcaactgctattccaatgtaaaatccacagataaagcagaggccacc

SEQ ID NO: 81349 - DNA, 792 bp, Citrus sinensis
  Intron number 3 from transcript orange1.1g024514m (locus o range1.1g020469m.g) derived from phytozome v7.0 (chr-ID sc affold00142; pos 267279 to 268070 reverse strand)
ccatcagcctggtatgtagcgatgctatggtttttctttaattatatttaatgcaaagtaaatagaaacctaaatagtgtctaatatttcacttttaatattcttcaggagtggaaagtaagtttggagtgggtgtagggaggtttgaatggttagaggataagaatttgtggtcagtgtcagggttggatggacaaagtcttggtcaatttaatggtgtggtagcttcagacaaaaatgtggtttctccaagatttagagacgtaacagggagaccacctcctcttggtatatcgacacattccaatctttccttaaacagaactgttggtgaagattgtttctttgttttatcactctattacagagttgaaatccataaaataatgcacacagagtttcttttccattttgcaccattagttcaatttgttattgtctgaaataaactattatacaacctgaaattaagaaaatggaatggctttgtttcttttggttttactgtggcttaatgtagtgttacattttgcttatcctcatcactttgttaacaataatactatgtgatcattcacaaggatggttccgaccattctttgttgatctcatctttcggctggatttcttccgaaaagtgccatgacttcctttttcttcttttttgcaagttgcaaaaatggtatgaattaatttgtgacacaaatcaattttgttagaaacagttataattttgtggttatttgttttggtacagatttgacttttgccccagatttggctgtgaagttg

SEQ ID NO: 81350 - DNA, 493 bp, Citrus sinensis
  Intron number 1 from transcript orange1.1g031038m (locus o range1.1g031038m.g) derived from phytozome v7.0 (chr-ID sc affold12372; pos 1014 to 1506 reverse strand)
tcttgtgggttttgttttttctttcggctgataaggtatgtagttcttcatattgattcatttcatttttttttttcttgggctgtgttttagatgtgtttgcgtcctcaattctgttcttttaatgggcgtggctgctattggacctttaacgaaagtgtttgatgttaaaagtttgaaacttgggctttctgctatttgaaaatctggataatttttttaaatgtggatgttcaataatgcttcagcctggagatcatgtgatctgtaaatgaataatttggcatctaagagtgtattagtagcataagaagaattaaggcattctgagctgagaaacatattggcaagtgattcaaagaggtttattttcccactgaagatcatgttatatgttcccagtgttatttatgcttcatattttgacttgctgtgttctttaattcttccatgaaaaggtgttccgacttgtgtgaaattcggttccttgttg

SEQ ID NO: 81351 - DNA, 570 bp, Citrus sinensis
  Intron number 1 from transcript orange1.1g033182m (locus o range1.1g033182m.g) derived from phytozome v7.0 (chr-ID sc affold03483; pos 4812 to 5381)
ctttttgaagcttgtatgttactcttttatccacatttcattcaataacaacactttgttttgtttgtgcatcctaaagtattaaaggatttagaaaatgtgaattgctaaatgtgacagcgttgttactaaagaagaaattagtaaagcatgaggcatttgatgtttttgagttctgtcagtcagtctgtttgtttatgttctgatttcatcccggtttgtttagcattgtttataatgcattttttttattagattccgaaaaccttattctctatagtagttcattttactattacctttggagtttactttgagtggatctgatcctttctccttctgatttgttgtattgttatcaaatagacatgatgatgttcaagttcagatggtaaatgaagatagaaatttatggagaagtacttcatattttaaaatctgccaacttttgtttatcctgtggaatctgcggttcatgctgtttgttttgcatccaagattcctatagtctttctaactccagattgatgataatttacattagggaaaattcgaggagtctatcaaaga

SEQ ID NO: 81352 - DNA, 688 bp, Citrus sinensis
  Intron number 2 from transcript orange1.1g026974m (locus o range1.1g026974m.g) derived from phytozome v7.0 (chr-ID sc affold00006; pos 2523067 to 2523754)
tcgtcgtggagaaaacccgactcgagtctgaggtatattagctttcttgtttctaattataatgttaattcacatcaacgatttatttatttgtttgtttaattcaatattgacacatttcattttcttactcaacatgcaagtagtataccttgccgctaaccattcccgcaatttatgactgactttgagttattttaaagaaaatgaatctgagttgaaacgtcttaattgtttcttatcctctataaaaggacaaaagtgccaaagatatttgattgtgaatgagctctgggctcgaagaaagccatcccatgcttatttatttttaactttttttttaataaatatttatttttaactaagaacaggatactacttttatacttgccacctcacttttgacggcaaaagccaccaaaatgatacaggttcataacttggtattgattgataataataataacacggtgagcattacgttagtctttacaacgttgttaaaagtggttagttttgggcttgattatggcctaccctggggagcagcaaaaagaaggaacttacgcccacgtgaccttggaaactttttttcttttcagcaacttcctgttcttgatattgtttaacaagcgatttgacttgatttgcaggtggcaacgctgaaagagaagctttcagttgccga

SEQ ID NO: 81353 - DNA, 293 bp, Citrus sinensis
  Intron number 1 from transcript orange1.1g023291m (locus o range1.1g023291m.g) derived from phytozome v7.0 (chr-ID sc affold00028; pos 365288 to 365580)
gttgtttcttggaaacggtgattccttttttggaggtaattaatcttctttatttatttgtgttcttgttttttcatgagagaagatgaagttgcagatagatcggacagaaaaattcgataagatgctgacaaaaaaaggataaaattagtgctggcttatttgattaactgaaaaattaaataaatcgaaaccgtttttactttgcttctgttagcactctatcaagtaaattttagtttttataaaaaattattaaaatttgtttatgtgcgtgtgcaggagcgagatcg

SEQ ID NO: 81354 - DNA, 728 bp, Citrus sinensis
  Intron number 2 from transcript orange1.1g024962m (locus o range1.1g022179m.g) derived from phytozome v7.0 (chr-ID sc affold00099; pos 138600 to 139327 reverse strand)
tgcgcacatcggtcaaggtttccaatgtgagttatttttgttatgcaaggaattttttgttctctctatattcattccatttgaatctcttcttttgttttttaaaaaggttgcattgtttctattgaagcaatagtgaatcacatgtcaatttgaaggctttcttacatgaaaattgtccgtaaataaaagcaattctgtgagaatgattttccttcttcattgttcataaatcttatggaatgcctggaaatgattatagaattttggacattacacttttcatcaagccaaagagaacttggtttttcttactctgtcatgagttctttttttttaaaaaaaaaaatttcatatcatttctatggtatataatttcactatctatgttcttgctgagctttgctttcgctaccgatgaaattaaatgggattttccatctctcttttcttcccttttctgtgcatttaatagtctttgtgctgcttttgagcacagtaattgaaagaagatgttcttcactcccattggatttctctttgctacagctggcttataccagatgttttagattaatcatagcttgatgtagtttgctttgtgtactgtaccagatatatatttttccattttgaggttgtttgctttgggtattgtactgaatatatattttccatttttcatttttacagcctgctggtggtcagagcaatatcctgttcggtga

SEQ ID NO: 81355 - DNA, 966 bp, Citrus sinensis
  Intron number 1 from transcript orange1.1g029363m (locus o range1.1g029363m.g) derived from phytozome v7.0 (chr-ID sc affold00018; pos 1462429 to 1463394 reverse strand)
cctgatcccaagaccaattgatcgggttagttttttattttttcttattttttggaggttgagccactgtctatgttctaattttgctagtttttagtattaataattagtgttgtatgaagcagtgggattattcagttgtatgattttgtttaattagtctaatcaatcggcttcataattgtgatatgggttgctttctgaatgtttaattatattggatggtttaatgggattaactagcatcaatttgatttgatatgatgggaattgcagtctagacttgggatccatttgaattggtttttgatttatgtcagcaaattggtgtttcaaggtctttttggtgttagttgactcgacaatggatcacaattctctcatgatcttaaccgtataccatttttattgtacacctggcgtagcgtctttacaagctaggtaggactaagattatgaaaaaatccactaatccatcaataataatatgttatcgtactcattgtgaataacttgctaaaacatattctttgtaaagcatgggaatgttcatgcgcaattgggtttgttccaatttttagattgtttggtcatgatggtggaatgggtttcggattctgatttagtaggtttgtttagtatttagtgctgtttgttgatgatttgatggtatgatttgtaattctgttagctaattgatggattggaggcgtaacgtgattttgtatattgttaatgatgttttgatcataagcatgtagggatcaaaattttattctattctgcagcacatatcattgttgatatgattctagaagaagcatgcatgcataacttcatagaagtgtagaattgcattgttgaagtttgaatttataaatatcttttcttgtgggtgtgccataaacattttcttttaactctgcactttttcttttttttgggtattctgctataggcaatagg

SEQ ID NO: 81356 - DNA, 640 bp, Citrus sinensis
  Intron number 1 from transcript orange1.1g000525m (locus o range1.1g000525m.g) derived from phytozome v7.0 (chr-ID sc affold00040; pos 317210 to 317849)
ggatatctcttggaatttcaacagacactgaaaaagtgagaccctatttcagctgattattcacttatgttatgtgcctggtgtcctttcttttgtaattttattcattttgacgtgtttgtgtgtaaatcacgtaccgatgtgcatgcatgtgcatttaagttttgaccagtaaatgctacttcgaaaaggtagtgtacattacatcattaatgtactttctttttctgttttatactttgaaaagtttataaaaggtagttttgctaccccatctccttagagctatcagattgtattgctgcacgtatcagtttaatgaagtttattctttgaagcagccccacgaatttcctatttccatccccccttacactcattctgtacttttctgttctgtccgttcttacttcttttgatgttcctttacaattgtttcttgcgttcaatctttgatttttttaacccatcacattgtgttcttgtatgttatatgctttggctgtttagccgtggcaaaatggagaaagaagacctttttactatttgattgcttaagtttatttttcagaatgatgtgatgtatttatcatgataaagtttaatattctgatttattaaacaggaaaagttatccgta

SEQ ID NO: 81357 - DNA, 540 bp, Citrus sinensis
  Intron number 1 from transcript orange1.1g009124m (locus o range1.1g009078m.g) derived from phytozome v7.0 (chr-ID sc affold00013; pos 408717 to 409256)
tacctttctctttcccttcaacaattcagctccaggtaagccttctgatctcactctgatcatcagagaagtcttccttatcactgacagtcatctggttgtctttgtttttctgcttttctgttgttttcgttgatgttatgataggattctggagaaatttgtgttctcttttttattagatcttttgatgataagtcaaagttgctgtttttagtttcgtttcaattcaatattaactcatgtctctcccttcacttctgtttgtatgcttgtacaagacttgtttaaattccgaactttcaagtatgtggccgttacttttttcctttcttttcttttcggtttgttgacttttatggtttgttagtgatgattagatcttaaatgatgtggtatgagctctaaattatgggtttggagttgagggttttaatggatttgatgaaacttataagagttatacaagtttgaattttgacttcagatggtgaattggatttgcattgtttttgtttatggagaagttaacaagggtaa

SEQ ID NO: 81358 - DNA, 809 bp, Citrus sinensis
  Intron number 1 from transcript orange1.1g029721m (locus o range1.1g029721m.g) derived from phytozome v7.0 (chr-ID sc affold00104; pos 228927 to 229735)
ttctcaagaagcacatcagagctcccgttcatcttgtaatgattcttataattttacatattgttatgcttcttcaagtttttatttttgtttttttcattttttttttatttttgtgtgatcggtggattggatttagagctgtgatgcttgtgagttttgcagaaatgggttcttggaatctgggttgcggggttttgaatgtgagattgaaggggatttggatttgtggtttctattaattttttgttgattgttattggatgtttgacttgttctacgagggagtaatcgatcttgatctgtggggttcttgaagatatttgtttagtggttagatgtgaatcaattttcttttgtttagatatttttgtggaagctgtgataagtatgatacgttctgacttctgattttaagctaagtgggtatgatttatccattgtttaggttctgagaaaatgtgtgaaaagaataaggaaaacagattatcattttgtatttaagtttcttgccttggggtcttagagtcgatgtagcatatggcccaaaatttttgctttcatttatttgctttgtgttttttcacctaacaaatgcatggttgttattagagatgccatattgataaagaatataccttaaagatggatttatagttaagtgatttctaaaagttatagtattgcaaaacttgaatgctacagtgggcattctataggttgctgcataaattcaactttttatgcttgctgaatttcggattctttgtataggtttggtctttggtgaggagattcgatcaacccca

SEQ ID NO: 81359 - DNA, 533 bp, Citrus sinensis
  Intron number 1 from transcript orange1.1g039964m (locus o range1.1g039964m.g) derived from phytozome v7.0 (chr-ID sc affold00097; pos 473036 to 473568 reverse strand)
tggctggcatgtaagcttgccacaactagcatgcaacttggagaaatgacaaaacgtattgaaaaattagccaaagttggcaccgacccttgacaatttgaaaagaactcaagacttttgctttgaaaatggcaagcatgaatggcaaggctcagctataaattgaggagcgatcattcattttaagcatcccaaaatttgttaagcttataagtttctaagcttttgagagaagtgagagaagtgtgtttggggaatttatatttcctgcagagtgtgagagtattgagtatatttgggtttttgggaagtaagattcgttaatcaaatattgtactctaataattattagtaatacaattatttttctcttactcccgtggaagtaggcatattgtcgaaccacataacttttgtgtcatttattttttgtgattatttagtgtgcttgattccgcattccgtgcacaacaccatattgtttttttcaattgaaaggcgtgcatttctcattaactggacaaattactcca

SEQ ID NO: 81360 - DNA, 446 bp, Citrus sinensis
  Intron number 3 from transcript orange1.1g003388m (locus o range1.1g003388m.g) derived from phytozome v7.0 (chr-ID sc affold00203; pos 255409 to 255854 reverse strand)
atcttttactgctttccaaagaagaggtaaccaaatcaacaaaaaaatttccagcattgtttttgcccgtatacttagaatagtaaatgacgtaagttttagatctcatgttatgttttaaggaaataatcaataaaacacaaacaaggaaactctaactttggttcctagcttatggaaactcaaggaattcatgctttttaatataataacatgatttgacttgagatttttctccttcttttttaatttattattttttaatccaaatataattctaagtaggtggttttgtttttttttgttctttcttcccttttctagatcatgttctcttatttttttccctgcatgtttctaataaaggtactatagcttctggtcttgactgttgggaggtatattgctcatgcagttcaaagaaggttcaacatttccaacaacat

SEQ ID NO: 81361 - DNA, 442 bp, Citrus sinensis
  Intron number 2 from transcript orange1.1g003388m (locus o range1.1g003388m.g) derived from phytozome v7.0 (chr-ID sc affold00203; pos 255956 to 256397 reverse strand)
agctcagatcattcaaaagaaagacgaggaagaaggtatttctcttttgtaacttctgttttgttccccagagcgtttgagaatttaaaaggaggagaattaactttaattgttgtgtttaatgtccttttagcgaaaattggtacataattgtttgaggtagagaattacacttattatcatgtagtagtttttcggttctaaagagagtttgcaattagaaatgaaatgcaatttcaatttcaatttcattgtgttatgttgtttgggtgttgttgccacaaaaattgttggtactatgctgttgaggtgtttttttacattacatttctttcaatttttttcttggtaattattttgagttctatttcattattcttctgggcaatctgagatctagaatctgacccaaaaagctgtgtttggtaattgcagtgcaaga

SEQ ID NO: 81362 - DNA, 510 bp, Citrus sinensis
  Intron number 1 from transcript orange1.1g043908m (locus o range1.1g043908m.g) derived from phytozome v7.0 (chr-ID sc affold00033; pos 823947 to 824456)
agaaggcactggtagcgttgtaatttttgtagctcaagcggagggtgtaaaaaataaaataagagtgcttttctaatttaagaaactgacacatttatttacgctctaagacacatgtcatccaagaagcagcgagtgcaacagtcgcttacgtgagcgactatagctagcactcctcttttgcatcacctgtcagtagcgttccacgtcgtgaccgttattttatattatttattatttatgctttgtttcttccttataaaagctgcgttccccgcggatacctctacattgttttatctttccgattaactgaattggcctaaaaaaattaacgataacgtttattaaaatacaatgtttgaatagaaatcttaccctcaaaaattcaaatactcccataactctcacgcacacctctcaatcaacaccgtaacctttgttctagcttgaggtcttattttcactactctagccagctcttcttctggttttgttcggaacatcaca

SEQ ID NO: 81363 - DNA, 486 bp, Citrus sinensis
  Intron number 1 from transcript orange1.1g046819m (locus o range1.1g046819m.g) derived from phytozome v7.0 (chr-ID sc affold00028; pos 104594 to 105079 reverse strand)
aaggttctctctctctctctctctcttgtagcttccgtatatttatacgtatttgcatgtattttttctgtatgttttgttgtagttggggttcgtagacgatagtataagtgtgtgtttgtgtatgttatgtgttctataattttgtgaaattgagttgattgtgcgaaaatgaacttttagtttgaatgatcattggttgttgtctgtttgtttcttgagaaaatggagtaagaacggagtttaaaaatattcgaagaaaatctatataataggctaaattacattcctgtggttaaaaattggtgttaataaaaaataactattattaaggtgctccttggtgttatgatgttagcatttttgtgactacggctttgaggatttctgtgttttgttttctgaaaaatcattttcagaataattgtattatacttttctatatataaagaaatatttgcttcctttgatttcggcaaagaaaat

SEQ ID NO: 81364 - DNA, 257 bp, Citrus sinensis
  Intron number 3 from transcript orange1.1g026450m (locus o range1.1g013325m.g) derived from phytozome v7.0 (chr-ID sc affold00139; pos 27683 to 27939 reverse strand)
cgtatgtttttttttcccacaattttttcatttgtttctttaactgaattggatttatatgatttcagttacatgtttggttagtttttctgtcacctccagttgggtacagccaaaaatgcgatttttttatcttatttccttattcatttgtttttatggagggcaatttgattaatattgtgtcgggccttttcttctctgattggtgatttctttgtctttatctagagggtcaggagcaaggtacccgctcc

SEQ ID NO: 81365 - DNA, 454 bp, Citrus sinensis
  Intron number 3 from transcript orange1.1g047963m (locus o range1.1g047963m.g) derived from phytozome v7.0 (chr-ID sc affold00037; pos 270726 to 271179 reverse strand)
aggtggcccactcaaagcatgtaagatgctttattggaaataaaatctttaattttattatttcttatcacttacataatgttgatgaaaatttactcattgagtttttttttcttaatttttctgtcatgcttcaattaacattattatttgaaatatcaaatgataagatttataagtataacaacaagttttttttttaaatttatgacttaatacaatttaattccatgaccagtggattaaatttcaattgtttaattaataaaattctttttttttcttccttcctttactaacgaagctttatgtataagaccaaatggtagagctacaacaacaacaacaaactaatcctgaagaagcagaaccactaactcaaagggaaatatgtagtgaagtacttggaaagaaatcaggctatttttcgaggacttggcaacagaccacaccc

SEQ ID NO: 81366 - DNA, 510 bp, Citrus sinensis
  Intron number 1 from transcript orange1.1g009096m (locus o range1.1g009096m.g) derived from phytozome v7.0 (chr-ID sc affold00041; pos 105305 to 105814)
agggctcatcagagattggcttctctttattttaggtaattaagttaagtgatacttattagtcgctgtctttatgttgtgtttcctgttcgttttgctataaattggatctgtttcattgggttctattagtcccttgtgtggttggtttttgatttgctgaggttttgggttttgtttagtattctcttcaattgttgaatttcttttttttaatctttttggtgatgtaggatgttagatctcttgtttctttctcactggtctgcttttattagcctagattggttgaccattctatgttgttcctgtctttgattgaagttttatttgagagttgataatattttagtattcaatttaaattgtactgatcataacacacctatgcaatttaggttcatgggtttttcaagaacatcttgctttttgctatttattaatgaattttccatgatagcttatccacaacttcaactggatttcacttcagattagggcaggttgaaa

SEQ ID NO: 81367 - DNA, 871 bp, Citrus sinensis
  Intron number 1 from transcript orange1.1g019001m (locus o range1.1g019036m.g) derived from phytozome v7.0 (chr-ID sc affold00054; pos 386346 to 387216 reverse strand)
ttttttggtttcaatttcttctcgattaacaccaagtaagtgccttttttcaatttagatttcgttaattatgatcaagcttttcgatcattacatcaatttcattgaattgtttgtatttcagtcgttgcatgttgtgatatgatgttagttccgatgtttcgtgaatttgggttcaatttgatgttctgtcgatcaaattctgttaggttgcctagaaaatgcgagaaagttgagactttttttgggaataaaataatttagcttgatgtgagtgtgcgactcagtctaagtggaaactaaaacagaaaggaacaatgaaaattaagatgttatgttatgtggttaggctattaactacacgatcttagcttgaattgttgtaaggtttgttgcttatgattgcatatgatttgattttgctgtttctcatttgattggaggagaatggagttgaagaattgaagaaaagttatggagtctactgtcaaaagattcggtaaaaatttacgaagggtttaatgttgcatgatatctttactgagtgctatgaagtccacttaaaaattttttgtgggttgtatgaaagctagggtatgattcatattttattttcttttatctactaggtggtttgagcttctgggttattaagagggaggttttatgaattctgattaattgttgttcctttctgtcacttttagtttctgttcagtagagtcaggttcacacgattcttgtttacgttacttctatgtctgactttgtagttagcatgctgcttttctggaggtctgctgactcggagctgatgtatttgtatggttggtcagggaataagtgatttactgttgtttaaaggaatctc

SEQ ID NO: 81368 - DNA, 1013 bp, Citrus sinensis
  Intron number 1 from transcript orange1.1g004127m (locus o range1.1g004127m.g) derived from phytozome v7.0 (chr-ID sc affold00033; pos 895090 to 896102 reverse strand)
caacttagctgagcattacgcacattgtgctaaaggtacatttttcttttctggctctttgaaaaattctttgcttcacgactctagcttttgttggggttagcttggtagttgttgaaagtttgaacttggttagctttgcttgctctttcaagtaatgcaagaaaatgcattcttttgtagtatatgtttcttgatggctttgaaagttaaagctagcacatttttactgaacttgggtaacttcccgttttgtctttaacatatactctttgtgattttttcatttttatttttatattagatctgttggtacaaatctgtggggtgtttacgttgtttggctactaaatgttatgatgtaattggaaaaattataaatcttggagtctacattacatgggttagatatgctgctcagctgagcttgattaaaaaaaaaaagaaggaatattgggttcagttgagtttaatttgtaatgatatattcatgtgtggccgtatatatttaggaagtcgaatttgacactcaaactctcattttctttcatctatatcagttttgatttgcacctaaatggcaggtatgagttgtagttaattgtagctcttgtttttcttgttctgattttgcaggttcttggtgctttctgctcaaatgcattgactgaagtgcccagtgtttactctattatggttgacgaggtcctttaatctttttcctttctcatcatgcactagagatctgaaatttagaatccagaaactatgtttgattttctttccttgatttatgccttatcatatcttttagcttcattacacttgtgtcctcaactttctgatctctggtttgtacaatagcctactagctacaacaaaagagttggggtttcgatcattggagacattcattgtgaggttgaacttgacttagaaaatctttgtttcttcttgtgtaactgtaatattcttctgggtagccttggttttgttattacatattagtgaag

SEQ ID NO: 81369 - DNA, 897 bp, Citrus sinensis
  Intron number 1 from transcript orange1.1g023632m (locus o range1.1g016617m.g) derived from phytozome v7.0 (chr-ID sc affold00116; pos 38902 to 39798 reverse strand)
tctcagcctcacaccggtgacggagccagccctgggtaaattttattttctcactcatccttctgtttgattctcgagaaaactgaggaaaagacagacttaaaaaattgaatttttttcttgtttttattacgtagactagaaaaaaagaaaaataataatacaacccttatctaagttagcttaatgggtattttctttttcttgttttttatttaattaaaaatttaaaatttgcagaaaaatttttattggaggtttagctagagagacgtcgtcaggttagttcattgttctatgctagctctttagtaatagtagtagtggtataagtagtaactttagctcaacaaattttgttgttaattcttttggcgggtggtggttgttttacgtagctcaatttatcaagcatttcggtaaatatggtgaaattacggattctgtgataatgaaggaccggaaaacagggcagcctcgtggatttggctttgttacttatgctgatccctctgtagttgataaagtcattgaagacactcacattattaatgggaaacaggtgggatggacttcgttgttagtactatgcttgtctgaagtcgggtagctagttttagtggttcctgactagatgtgattttgagactgttttaggtggaaattaagcgaacaattccaaaaggggctgttggctctaaggatttcaagacgaagaagatttttgtaggtggaattccgtcatcagtgaatgaaggtgacttttttcttgttccttcttttttttttgggggggggggcgttgttcatacttcttcattttgggtttagatcacaatgtgtctttatggatattagtgtgtagaggcactaatttatttttatggaattgagcag

SEQ ID NO: 81370 - DNA, 464 bp, Citrus sinensis
  Intron number 5 from transcript orange1.1g014070m (locus o range1.1g011729m.g) derived from phytozome v7.0 (chr-ID sc affold01381; pos 9751 to 10214 reverse strand)
atcttattactatctttgtaagtctcttcttttaattctccccattcttcacttttaatctgctgtaaccgtgaatctgtttcttcttcgcgtcttcctttttgtttcctttatttttgagtcttttagatatctagtaatgccatttttttccttcttttgtttttgcttctcccaaactgttgcaggacaggaaagctctctataatgaattaaattttgttaagggaatgaaactagagtggggtcttaaatccccatacttcttcacccataagaataaaaaagaatgtgtaagaatctcagtttattagtgggttattatgttataattttttattgtactttaatatggtacaatgctgatgtgttaattgtgagaaagttgtatcattctcacttggtactaaaagattattggatttgttgtttacaggttttagacggtgcattggttttgatct

SEQ ID NO: 81371 - DNA, 756 bp, Citrus sinensis
  Intron number 1 from transcript orange1.1g012677m (locus o range1.1g012677m.g) derived from phytozome v7.0 (chr-ID sc affold00644; pos 54894 to 55649)
gtcaggtagtgcttcaatttactttattgtttattttagcatctgggtgtctctgtaattgcatagatgggatgaatttagttcttgttcgtttatgtgtgcaatacttgtgagttttcggttaatatttctagtttggttattggagtttactgtcttttgatgtttgggatatagcaaagttgtttccttggagtgttgtcagcctgagcccttaggtgtctcaattttgaagcattaagaaagttgtttggttgattgaatttaagccactattttattggtacttagccaaacttggatatgaaatttggttgtttggtaggacttctaacactcggttcatggtttgtgtgtggcttttcaaatggtggtagaaaagacgtattaaaaatattatgacaagccgggccagtttaatctttcttgcaagaaatttataatggatggtctgttctatggaaataaaactttgctcttatgtatgaaagatatataaagaatcttgtttcagacgtatcttctagaggcataaataaatatgtagcctgcaaaagagaaatcttccggtgttattgatgctaatataatatctgtgaaatcaggcgtggtacttattgaggaatttttattttcttgtatctggtgaatctttcttgtctaatctcttgatgatcagtaaattgacagcattactcatatgagttcttaatttgtgctggatttgcagacttttgatcgcccttgcatccagag

SEQ ID NO: 81372 - DNA, 607 bp, Citrus sinensis
  Intron number 1 from transcript orange1.1g018688m (locus o range1.1g018688m.g) derived from phytozome v7.0 (chr-ID sc affold00006; pos 810264 to 810870)
acgattttggtttgttatttctctatcaatgtgatcttattatatcgtaattttgcttttttgaaagtattatactatttcattctttaatgtatttatgattttgcttgtgatattaagggctccaaatgtaaccaatgaaaatgtattttcaagagttttaggcgtttattatcccttctaaggtgtgttgtctttggattcccactcgtatgcgatctgtgaagcttgaaattccttaagcacaaatgaaattctattatcattttgatagaaatctggtcaattatcatggccaaatttgttttcctttgttgtttctcttttacgagatctatgcctgacattattacgttctgaactttttctttctatgctcatttatactcatatgccaagggcttaatattctaaatgcaaacagtgcatcaaacaagagttttgttgcttttggcacctgagaaactgatttgttttataaagaatccttttggttgggttaggtacaagagccactctattttcattgtgcatgactttttcttttccaagaaaaggagtcatcctgacatcagttgtgtttaatttgtttttttcagattttgac

SEQ ID NO: 81373 - DNA, 821 bp, Citrus sinensis
  Intron number 2 from transcript orange1.1g026884m (locus o range1.1g021037m.g) derived from phytozome v7.0 (chr-ID sc affold00006; pos 1214231 to 1215051)
tgtgaaggtggagaaagaggacatcaaaagctgtatcaacttttcttttctcccttagttttaaaatatctcgtcatctgtaccattcattggagatcttactgaagttatttttgtgatactcattttgccatgatgcatgcgtgtgaagcaattgccttacactatatcatttacatgataatattctcataatgtatttcttttaataattaaaataaaaaacaaccttcaatggggagatggatatatgtgtctaatcttattaatttcacgatgtcaaattctgattggagccatgaaaacctagttaagtttgttgtcaggacttcactgataattataacatactttgcttttatgtttgttatgagttcagtttcaatgctaacttcagattaatatttggcactcaatatagtggtcaacaaaggttttggagtgctatgtcattctgtggacaagattatttgaagatgttgggattacaagcaattcaccattataatccttcagccttgagagatccataatgtctgaaaatttttcagcattctctgtaatatttggcactcaatatagtctcttctcttttcttgataagaatatagtctcttttccgctaaatgcattttgaaacaaactgaaatttcacaggatgctgaagcacggccgtatatctaccttttgcttgctttgaagtttgtttttgtttatcaatatgaaaatgacatgctataggaggactctgaactttagttgtaacataagctaattttgtggcagtggcaaaagggaagaagcgaaagagtgactcaggc

SEQ ID NO: 81374 - DNA, 252 bp, Citrus sinensis
  Intron number 2 from transcript orange1.1g046893m (locus o range1.1g046893m.g) derived from phytozome v7.0 (chr-ID sc affold00013; pos 20520 to 20771 reverse strand)
gctggtatttttcttatctagtttttttctttttaattttttagctttgttgttatcattgtattattactctagctagtagtcagaaatcaaacttctttatatgtatggaattttcacactaaaaatgaattgaattgctgtttttcaaccttaccattttttgttttccttcaaaaaagaaaaggagaaaactataccattgtttgttttgcaggcagaagtcaactatttaggacaacttaggcattc

SEQ ID NO: 81375 - DNA, 618 bp, Citrus sinensis
  Intron number 2 from transcript orange1.1g029433m (locus o range1.1g029380m.g) derived from phytozome v7.0 (chr-ID sc affold00031; pos 225995 to 226612 reverse strand)
gcaatcaggtttgcttcttttttttttttttagaacatatatattttatttgatttcaggtttaggccagaaaagtagtttttatgtttttctattttttcttttgagaaattttttttatgtttttaaccagttcgttactgttatgatgcatatataattttttgagaacgaagtcaaaataattcatccatgggtttcgtataaaaagttggctttcaaattaaagcacaagggctttttaatattaaaagaacaaaaattaagcacaaccctaaaacgggctcgcagagtttgtgtgtgggctgtcgcagactcccagatgatatgttacaaaatttatgggggttgtattcgagcgctgtcttatgtatcgatcataggtgtttttcaaagcaattgcttcttgatgaagggcttgtgctttaatttgagtttatagaagtaattgtgctgctaattaggtcagttactctgctagtacgctcatgcttcttgaatattttcgagagctttatccagaaatatatttaaagctaacatcttagtggagtttgatgttgatttttttcttctatggtaataattaatattgttgaaacaatgataatcagattt

SEQ ID NO: 81376 - DNA, 713 bp, Citrus sinensis
  Intron number 1 from transcript orange1.1g007192m (locus o range1.1g007192m.g) derived from phytozome v7.0 (chr-ID sc affold00496; pos 61811 to 62523)
ccaatatttctattcctggttgtgacaaaaatgtaagcctttttttcttacaattataggtctcttttttacttcattttcatttttatttttattttgtcttctgggtatcttttgttgttggtaaccttgtgaagttttgtctgcatttattatatttgtcattcttttaccgattttgacaacgtgggcattcgcgaggccaggtttcatgttttttaattattataattaattaattttttttttttaatttgggtttgggggatagtttagagttcaatttctggtactaagctcgaagaaagcttggtttctgttttctttacaggatggtgtgatataaaaaggacgttgagtttcatctcatgagcaaagacaatttagtttttgctcctatggttttcaaactgtattggaggttggatttcctgagtttgaaaattaaatattgcattatttgtttaaaattaaatcattttcctaagcaattagctgcttttttatcgttaaatatgaataaggtgtaattaagtcatggtctttgtaagacagtaactgctagaccgtctctgtttctccacccctcttgtcttttctttttggctctttgattgagttgaacttgggttatgtggtacatcatgcgcatataagctgtctattccattatttttgcagaatctgaacctaatggcgtttgaattgtgtag

SEQ ID NO: 81377 - DNA, 566 bp, Citrus sinensis
  Intron number 2 from transcript orange1.1g009383m (locus o range1.1g009383m.g) derived from phytozome v7.0 (chr-ID sc affold00068; pos 38631 to 39196 reverse strand)
gtggttggaatatcagcaataaacattattgggccgtgagtttttcccatctatgtcagcgttgattacccgtactgcttatgatgttttgcaattaactgtagcatttgtaatgagtcaaaataaactcgtttttgttctgattttgggtatctgtttgtgcttgtgtgaaatttatgagttgtttttccgcgttgtttatatattgtatttacgttttgatgttactaggatgagttttagccttttatcccttctgagttgttgttcctgagtaagctgttaatttgaattattcttccacacaacaatctccccccccaacaaaaaaaaaggagttctaagttttggttatacacagtagtcttattattattattttttggttggggggggggggggggttcttcactttgaatttgctcgtgtgtggtatttttcgtttctcaaattgtgtctttgatgttctaatagttaattgagtgattaattgttgcatcttctaactctgattcctattttcaaacgcagtctgtcggttttactgcagctccattttttattat

SEQ ID NO: 81378 - DNA, 734 bp, Citrus sinensis; identical to SEQ ID NO: 81056
  Intron number 1 from transcript orange1.1g014448m (locus o range1.1g014437m.g) derived from phytozome v7.0 (chr-ID sc affold00324; pos 137063 to 137796)

SEQ ID NO: 81379 - DNA, 985 bp, Citrus sinensis
  Intron number 1 from transcript orange1.1g031165m (locus o range1.1g031165m.g) derived from phytozome v7.0 (chr-ID sc affold00018; pos 1375491 to 1376475 reverse strand)
ccaagcgcgccatcggcgtggagattaacaagcaggtatgtttcgttttctgtttcccttgtgttttttgttaattattttttggggtttttttattgtatttctgaaaaaagtggttccttaagatttggaaatggtttgataacgttttttgtaatttgggtttgttctgattttgtggctaatgggttctttttagcactagggtttgttgatatggtgtgatcggtgttattaatgaataactgttaggccagatctacttgccgtgcgtatttagttttgatatacttgttgatttttgattgggtgatggctgtgttatttgatactttatatgatgcgttagatttatattggtttgtaatttgggtaacttaatgttgggtgctctgcatatttgttgacccgatattatcaattttaagcttaatgtatctcttttctgtgctgactaggttaaatttttcatgccattttggttttacagcttctatgtgaattgcctgatgagttagctcgaaaatagctgttctgttgttgagttgattgataattatgttcgaggagaactgttgctgaacaaactttcactgtttttcttttatggtacattgaaattgagtcttcaaaatgttggttgtgtaaacttcttttgattttggtaataacttgttggccagatgttctgtttgaattgattttctatcatctgaatggacaaagttgtgtttgtatgccaattgaattttgtttccttcaaagttttaatttgtcccttccattcacttgctctggggaggtactcattgatatggctctcatcatatttaatgacttcttacttggtgattctgtattattgtaacttgcttgaattggttataattgtcggcatttgcgttttttgatgataaaaaactgaattgcattggaatatgcatctgtgaccaggttggtaacaggatcatcaagaagaggattc

SEQ ID NO: 81380 - DNA, 664 bp, Citrus sinensis
  Intron number 1 from transcript orange1.1g047030m (locus o range1.1g047030m.g) derived from phytozome v7.0 (chr-ID sc affold00006; pos 2175558 to 2176221)
gaagttcgcggcgtcgacgtcactctatctgctaggtagtcggactcttgcttttctgtttctatttttctttctttcttcttattaaataaatgaattctattttgaatttttgatcacttcatgaagggaaatcaaggaaagaggactgcaaaaggataagaaaacgagtcgttctgcttcagagaatgtaaaaaagaatatttctgcaatcgatcctgaggtaaatttgtgttaatgctaaacaattttagctaaattctggtgatatttgttgccattatttttattacttggcaacggctactagctttaaatgttccattacatttcatgcacacaaaggcattgttttaagccagctttttaatgaaatggagactgagtgaatagtcagtccagctgctcttttagcttctgtctagtgcacaactgtgtgaggcttcatccatatgttgctcaatcaaatttttggtggcttggcttcatagattgaaatctattgttaaagttagaagacttaaaaaagtttaatcttgtgaaatttttaatccccttggctgatttatgcagttgaaggcttgtataccaatttgatcagtttacttggtgataataagttgataactgagacatttaatctttttccagggtggtgctgtgc

SEQ ID NO: 81381 - DNA, 758 bp, Citrus sinensis
  Intron number 1 from transcript orange1.1g020553m (locus o range1.1g020553m.g) derived from phytozome v7.0 (chr-ID sc affold00028; pos 402082 to 402839)
gtggagactgagtaattcgtcgatcactttgtctggtactctatctcaagctctattaaaattcaatttctgattattattagtcgtatttttctttttgaactagtcatttgaaatgctttatttttggcggagaaattacgatctgcgacgcagttttgaggcgagatcttgttttaattttgtgttgtgtttgtatttcggtgttatgagatctctatttgcgtcttttttttgcgcttactcggcaatgttcattgaaacgaattgttttttagctaggttttgatgctcttatttagggctagattgacactcttttgtgattacagctcatgtcttgtgaaaataatttttgaatggaatgaattgtcattgttttgatctatgaatttagtgattgaatttgtgagattcagttcaaattgattattgactaagttgttaaaagcattggtgtcacttgtgtcttataaatgaagcacattgtgattactatatatgataatcttgtcaaatgcttcatggctttaggtactatcagtactggataaatttgattgtgtattgttgctgttttcaaaatttctctgagtagttattctgcttcacctttttacttggtaaactgaagttagatattctcgttaatttagtttgatatgttacggtctttctttctgcctatgcgctagttattttgttgagaagacagtttttgatgtggctttctttctgtttagactgtaaacgtagta

SEQ ID NO: 81382 - DNA, 875 bp, Citrus sinensis
  Intron number 1 from transcript orange1.1g015158m (locus o range1.1g015158m.g) derived from phytozome v7.0 (chr-ID sc affold00013; pos 534306 to 535180 reverse strand)
aacaagcttccacctttcatcatcatcactatcaggtttgcctaacttcctttattatttttattattttctttttaacaatcgcttttgtgtttaattttatatcgctgttcaaaattttgaatctttcattattagacatcctaacgcttaatcaaacttaagattattattattattatttggctatgggttttagtcgatgaacgttcgatttcatctatggcggtttggttcgtagattcagttttttcttacttgcacgagatgcctagataattgatagggctgtatgacgtttgtaatcttgtcgaaatatgcagtgacgttttatcgcttgtgtttgtccgatgaattcattttgtggggttatatatgttattaaccgcagagctttttgttttcggtaattgaagtgttatggatttgtgtcgacagaactgaagaagtatgtagtaggagttaatttttttgggctagggctgagtttcctcttttatgctcttcgttgtggataattgaagccagtgcgtttttgtatagatgataagattgcttacaagtttacagtgtgaggatttgcctccttttatctgcatatttcttagaggtttctgctagaattccagtgtctgttttattgtattttctctcccctgttgggttttattttaataactttaaatttaagagaactgaactttgcttagtagctttattaggctaaatcactttagcggagggttgcagttttgtttccatgcaattttggtgcatcgatttttcattttgaatttcagtgtggttactgttgtttttgtcacttggaactcattgcaggtagttacaatttttttttttaaattttcctcagt

SEQ ID NO: 81383 - DNA, 1016 bp, Citrus sinensis
  Intron number 1 from transcript orange1.1g044463m (locus o range1.1g044463m.g) derived from phytozome v7.0 (chr-ID sc affold00131; pos 117635 to 118650)
gaggaaacggtgggtagcatttgagccgccggcatccattttggagtcaagtgcgttcttaaatttgatttgtgcagtagtgttgtgttttggtaaatcttgatttgggtattagggttttgaaagcggcaaaataaataatttttttttgtatttttaataaggcgtgacacattaagaccttaagtgtttggcagatatttgctcgttaattttttaatttttttataagcattattgttctgaattgttaagaaaccacaaggtggaactcactcgtaaaaaaacgattagtaagaaggtgccttggagttaataaactaccaactaatcctaacattccactctccttcataatctacgacaacgaaggttcacacacgactacgataccccaattaggtgataccctcaagatcacgactacgatgattcacatactccgactaggtgacaccttcaaggtcacaagctaagaacactggcaagggctaacttcagaggtaccaatagttacgacccacaaggtggaactcactcttaaaaactaacttgtaagagggggtgccttgaagttaatgaactaccaactattcccatacctagtcaatgtggggtcctaacatcaatctggctcatccatattgctaaaaggaaagaattagtaaagtaattgaattgtgcttttctattttgtgaatatgaaagaaaaaaaaagacagatttttatggaacccagttgcaaaacacacatatatatcaaaagttttagcttttatattttttttgcaattgagataaaaatactttacttctctatcttgatattttctttgcttataattaatttgagaagaagagaagaagagtgcttggtgcctcctgccttttgggtactgggtttacaattttatctctccttaacattatctatatcaatatatgtatttgcatttgcaaatgaatctaatatggttgctgttttaatttctcttgcaggctgaatcctggagcag

SEQ ID NO: 81384 - DNA, 843 bp, Citrus sinensis
  Intron number 1 from transcript orange1.1g002132m (locus o range1.1g002132m.g) derived from phytozome v7.0 (chr-ID sc affold00738; pos 33924 to 34766)
tgatttccttcgttgctaaagagataaaacaacaggtgatcgaagtaacaccccccatattataaatacttctaatgattttaattggttttgtttttatcgaaaacattgtctttgctttattttacttatttagtcgttttaaattttgaaatttgaattgaatttaattaaaatttgatgtagttagtaaccacttatttttattttatttcatttatattctcaacaactacccataatttggtaacttactgtaacccccgtatctaaaaaatgatcaaaacccataattttaactgcacataaatattctgtgttgagctaagtttttgcataacattcaagtttgtcaaatagtcattaatttaatgtttaataaaaacttatctctgaaaaatttcacaattttctttcattctttgagtttgctaagtgacttcatattatttctttccaagttaaatttaatttggcttccgatatagtctctttgctgaatttgcatcttttatgattcttggattttggtcttcaacattctaagattcaatagtcacatattacgccatgcttagattgattttcatgatttttagtagtcgttaagtgacttagatttgacagaaacttgaaaggaattctgttttaggattctgttttaattgaccttatagtagaaataagatgcttataacttaatgtggatagttcgtaaaatcattaaatttggataggattaaatagaaatatgcacgagactctccatgaagtctcataatttttcactgggtctggggtattacaggtgaagcttgtgattggtgtcgaaaaagaagtgaa

SEQ ID NO: 81385 - DNA, 855 bp, Citrus sinensis
  Intron number 2 from transcript orange1.1g000684m (locus o range1.1g000241m.g) derived from phytozome v7.0 (chr-ID sc affold00408; pos 62387 to 63241)
aaggcaagaaaaagaagccccaaaaggtgcagtcttctaaattttttcttttttttttccttttttttgaatacaatcttagattatgagttattacatgctggtttctgcctttatttgattttttgattctgaaattgatgctttttccacattgagaagaaagccttgttaattatctagagaagttcaggagtagaatgatattttcttatatgaccttcagcaattctaaagtatgtaccgttcatcatttgtgtttatatgtggagttgcattgtttggttacccttgaacatgtgttgtgttttctaaccaaatgataactggaacatagtttagaatttccagtgtcacttgaaatatatagaatagaaagccaacaactgatctctctgcatgtgattcccaaacctaactttatttgttttctattgagttactcacatttcattaataggcttacctctgtttttgagtatttatgacatgccggaaagtgatgtattttatctgaagttaattgcacatataaacctagactgattttgttattaaaggttctgtgtaatggaactcttttagttattattaggttcttgactttccattctagttattagttgtagttccatagcaagaaaaagggtccttgactgtccaattgaaaatgggttcagttcattttgtgggagtttatgcatgtgtgagcgccaagtatattaattggctttttccttagttgcatacagtgtgtatctttgttctttatccattagtataatgaattttaattttttctgttggattgtattatttttaattttaatttttatctgctattaattgtttagg

SEQ ID NO: 81386 - DNA, 565 bp, Citrus sinensis
  Intron number 1 from transcript orange1.1g019793m (locus o range1.1g019846m.g) derived from phytozome v7.0 (chr-ID sc affold00040; pos 843138 to 843702)
tgttggtattcttgccgtctctcgattactttcaggcaaagtctctctctttaacgcattcggttttttttttttttttgggggggtccttgagtcttatgttgtgattgtttgaataagtggttcaaaattatgattgttttccacttaaaaagtatgatattgaagaggttttttctttgatttttcgtttgtatgccttttggatcatgttattgttagttttgtgtcttgctgtggtggcattagggtttctggtgtagggtttgggagcttaacgagaataattaattgtgaattgtggtattattgtagacgtttgtttgtttctggtaaatgtttatgtttcttttagtaaggatcacgtagatgtgggcttgtttcttttggtatgtttctcatgagtaggcatgtcagattttaccgtttctggctattgtgtttctattgatccatgttatgctgatttttagtagatttatacatttttgtgaatgatcttcatggtgtgctgatcctagttttgtggggttttgttagtttctagggttttagctttggccag

SEQ ID NO: 81387 - DNA, 615 bp, Citrus sinensis; identical to SEQ ID NO: 80672
  Intron number 1 from transcript orange1.1g004653m (locus o range1.1g004240m.g) derived from phytozome v7.0 (chr-ID sc affold00068; pos 195902 to 196516)

SEQ ID NO: 81388 - DNA, 379 bp, Citrus sinensis
  Intron number 1 from transcript orange1.1g006853m (locus o range1.1g006853m.g) derived from phytozome v7.0 (chr-ID sc affold00366; pos 138954 to 139332 reverse strand)
aaacgcgctcggttaattttttttttctttttggaacttcttttacttcctttggcttgatttatattatattgtaatatgttttgctctttgtagcaaattttgatcttgttatgattcttttctattaccactattgttgttattcatgctgttaatgagaaaatatgatgttgttttttgttgttatgttgatgtgttgatgattttgcattggctgcaattaacatgatagaagatacagattttgacttatattgttcatagagttttaaggagttatgacttagttttgttgttgtgtttaattgttgcgtagtgttgatgggatttttttttctttttttgggtttatttattggaagcagaatttttatat

SEQ ID NO: 81389 - DNA, 593 bp, Citrus sinensis
  Intron number 1 from transcript orange1.1g027591m (locus o range1.1g026998m.g) derived from phytozome v7.0 (chr-ID sc affold00013; pos 1949439 to 1950031)
tttgcttgcaacggcgtctggaagttttatagttggtgagaacttggcttcattattttttattgatctgcgtataacacaaggagaattggaagaaaaatttgttctttttatctaataattgttgatcaaaaagagcttttggggaggtagatggattgactttctataaatcaatatcatttgatatttggtttatatcttatattgcactatcatgagatggaatattaccatgttggattttaatttctggtgcatgaagaatcatgcaagtttctgtggttatatataaaggcatcattgaaaaggtggtagtttcatgactctcatcaaataaacaacaaattctttgaatcatgtttacgtctgataggaataagctattctaatatttgagtttgtgactgagcttgcaattgttattatggtgaacttttcaatttttttttttaattttaaggtcatgttaggcaaagtagacgattctcagatgattgttgtttgcctgaaaatttggttgtaatgtcctaacatcttggttcctgacatggccaggctcagagttacctcataacttgcatcccattttg

SEQ ID NO: 81390 - DNA, 270 bp, Citrus sinensis
  Intron number 2 from transcript orange1.1g027591m (locus o range1.1g026998m.g) derived from phytozome v7.0 (chr-ID sc affold00013; pos 1950215 to 1950484)
cttaagaaactgcaaagctatttttgagaaatttggtgggtacatggttgtgttttatttgtttgttgaataacctctgtatgtttgattaaacaggttgcaaacctttgggtgtagtaatagcattaagatagaattctattatcagtcatatttttggattagctatgtttctaatgatttcatggtaaaatttaagtgctcaagtcacgtgaaaaccggtttttcttctaacttctaagaagcatttgcttatgctattctctacag

SEQ ID NO: 81391 - DNA, 662 bp, Citrus sinensis
  Intron number 1 from transcript orange1.1g041224m (locus o range1.1g041224m.g) derived from phytozome v7.0 (chr-ID sc affold00396; pos 59306 to 59967 reverse strand)
agggtaagcatcttgatatctttctgcttcttaattttctcactgagcttcaaagctgcataggatttaatgtgtaaggcatttctgtcttttcgtttcggtttcgaaacatggattctacgtttgcttcataaaattgttctatctagttctaagatttgagtgatagtaatatcacgcattacagagcaggagaatgacattttgatctttaacgtttcatttttatcactcaagtctctaatttttcttttctttttcttttttaattacatacctctcacacacctaaagataccattttaatgttcagactttacacttttacagttgaatggtataattttaaagtgcattttttttttctattattgtcatacaataataaatgcaatagataactgaaaaaaaaaactaaaatcataaaaaagaaaaatattattcctatatattaataatgttaacttatgcatagaaaatgtaggcattgacttttttactttttattcttctaataatatcacgtcccattaacgattttgttaaaaaggaaaaccaatataaagaatctgtcagcgtttttattagaagggatatcttatttccggttttgagaacgtttttcattgcaggaacttttaatcataatcttgattttgtcc

SEQ ID NO: 81392 - DNA, 603 bp, Citrus sinensis
  Intron number 3 from transcript orange1.1g048173m (locus o range1.1g048173m.g) derived from phytozome v7.0 (chr-ID sc affold00234; pos 200836 to 201438 reverse strand)
ctcttgctgctgttagttcaatctaccaacataaggtcatttcgcattaatgtttcttgttctgttgcttgatttcattcaaagtgtcaatatttactattttagtctcttagagcaaaaccatagccaattttttcgtctgattttggtcatttagagaatatttttgggtactaataattttttgcttggtttcctgttatatgatggggacattatatcagcaaaacactctcagagatgcaatatatggaagattaataaatgccaaaaatttgtttacaagaatgcaacatttagaacttctaaagaaatttctttgatttgaaatcaggctgggtgttggaacttatcaatgtcttgtaactcaatggattttattcttattttttgatgtttgaatcccatatgtttctcatccccattagatggcttcacaaaataatatatagtttattacgggatattattagtgggcgcttattctttttctcactcccatcagttatcatgtggggcaaatccgtaaaagtttgctcttaacaacttgtttatgttataaatttagggtgttggtcgattgttgtacttgaaattaagaaa

SEQ ID NO: 81393 - DNA, 568 bp, Citrus sinensis
  Intron number 2 from transcript orange1.1g019856m (locus o range1.1g019856m.g) derived from phytozome v7.0 (chr-ID sc affold00091; pos 285383 to 285950 reverse strand)
tattggattagtaagtattaaataaattgctttcgagcttattaaatgaccatccagaagtgccatgaaagttaaattagtccctggagaatgattacatctcctctttggtttttcttaatctttgttaaaggaagtttgttttgggtcctcagaaatgatctgtttcaatttcattttgcttactgccttgatgtctcaaacacttgcaaataatttgtttgagcttttataaggaaaatctttatctataagtgccgagtaaggtttcggaaagcacaaggagaagaataaaaaagaacagaatagaggtatgagcaaagataagcatgctgaacatatggttgtagaaagctaaatgtcatcagctaattcaattagaagagatcaagttctggttgaacagagatgtgtcaatatctagaattataagttgacggcttaagctttgctcataacacaccatactttgattaacttgcttttgttttttgttacactttgtgggaaaaaaaaaaaaattatgtggtaagatgctaactgctattcttttcttggcagcgcaatt

SEQ ID NO: 81394 - DNA, 901 bp, Citrus sinensis
  Intron number 1 from transcript orange1.1g026459m (locus o range1.1g026457m.g) derived from phytozome v7.0 (chr-ID sc affold00069; pos 443736 to 444636)
tcgccggattgctgtcctcacgtcactggatctgggtactttcttttctctctgtcttatctttgtgagtttcttttctttctgtgcatgcattatgagatttgccttgctcttcgatatgaatgaagcccttgatatttcttataacaattttttagattttttatttaatccaagtttttttttttttaaatacatatagatcattttggtaacatattagaaagccttgcacagttagattggcctatagctaaaacaatattgcctgcttttgtaaatacttcttgatttatttttgcaatggaaatttggatcgattcatatttttcctggatttttaacgtttgtatttaatattacgtaaatatttgaacctgaattttctagatgtaactgtaatcttgactcagagatgctgcctagcttttaataagaaatgagacttgccttcttcaccttggcgacaaattaattgaataacagttatgaaacagagccaacctatacaataaattcaaatgacataaaaagaaataaattaaatattataaaacaggattcatcttccaaatttacatatacacaatggtcttgtttctttccagtataatataatagttttgattctttgccatagattcttgtcatatattcatcacataatggccttgatctgcgttttcatgtgcatcacataatggtattatcttttctgtatgtgcgtcacctgctaccatatgatatgtgcatgtcagaatgacatcttcatatgatcttatcacttcctctcacttagaatttgtgcacttctgaagagagctttctttttttattttattttatttattttcctttgaggggtcagtcaaaatatcttatgtgaagcaggtggagagca

SEQ ID NO: 81395 - DNA, 642 bp, Citrus sinensis
  Intron number 1 from transcript orange1.1g039019m (locus o range1.1g039019m.g) derived from phytozome v7.0 (chr-ID sc affold03667; pos 4792 to 5433 reverse strand)
tcaagtaagcatatacaatctgatatccatctccgctttttcaacagatttttttcccaaacaaatttatttcacaattggatcatatcttttcttcttttttttttaaatggatcatatcttatttgatattggtcatgtatgtgaaaatattgcgactttgcctttatgtttttggttttttcaggaatcaacaaaagaaacatactagataaaaatacaaatgagcaaacaagattctcccaaaaattatgaattcctcgttaaattcataattctgaaatgaagaaaaccttgtttttcttccaatcctcctcttcatatgatgagttttcggttttctcagagttctatggcttttctttttcttttttctggcgctcttttacaagtttttggtgaagtattcaccaagtgaatattaaaggaaaaattatttttaaataagcgcatattcaaggagagaaaactgtttgctctataccaattgtcacataacagatttgtttttcgtgatctgcagtcaaattttttgtggcattcatttacctctagtgtgaagcagtatgtcaatctgaaagcactagtaataaactgtcttttgcagaagaggaggctcaatcgacttcaaactttgtttgg

SEQ ID NO: 81396 - DNA, 379 bp, Citrus sinensis
  Intron number 2 from transcript orange1.1g018322m (locus o range1.1g011885m.g) derived from phytozome v7.0 (chr-ID sc affold00387; pos 68108 to 68486 reverse strand)
cttcacgcctttcacattggttggccttgtttaaggttcttttttatcttcattatatgcgctcttctttttcttagaaagctagattctgttgcttaagtgaaggtattgaaagtttggattctgtaatgtcattaaatggaataaaaaaaaaaaaaaattggattaggatcattgaataaactgaaaaagttgataactttgtctcgaatatgtttgtcctgtttctagcaaagcaaaggctgatattagcgatttctttgcttttactcatttctttgagaacaatgttgattatgagaactttatttaattttctactggaatttaattctttttgccagctttgacattgtgcgtgataccttgggtttagtac

SEQ ID NO: 81397 - DNA, 612 bp, Citrus sinensis
  Intron number 1 from transcript orange1.1g026520m (locus o range1.1g023167m.g) derived from phytozome v7.0 (chr-ID sc affold00143; pos 64804 to 65415 reverse strand)
ccgtaagtttttttaatgtatctttgttatttacttttgaaaatattagatggttatttttggcccttttgttagtacccatttgaggaaattctgaattttgtgtgcaattgatatgggtatggacgtttagattgtgtatttgaaggtgaaaattcaaatgttgaatgtgatgggatgtttcaagcattgaaattcagttctgatgtataatgttatggatggcacgtgtcttatttgtagggtccttatcaagtttaatacttggtgacaatgttaagaaagacattcattcgatttcaagatcatatcatggctttcgaaagcataatttgtgttgctttacctgaaactacataaaatagattcttaatttctatccctggattgtgttcctatgttgtgtgtgtattcttttgatgaacaggaagcaatcatttgctttaaaatattttctagattaacaaatgatcttagtttggagcatatccagttgggtcactgggtgagtcaactctgcagccctgaccattgaaaacctatccttttgatcaaaggcttttacaaaattgcctacagatcttcttcgtgtgtttgtgcagtgattgccag

SEQ ID NO: 81398 - DNA, 1025 bp, Citrus sinensis
  Intron number 3 from transcript orange1.1g018440m (locus o range1.1g018440m.g) derived from phytozome v7.0 (chr-ID sc affold00688; pos 63013 to 64037 reverse strand)
gagaataatagccttgcccgtattttacttggtagtatttcctattaatcttctattatttgattatttttaattcgctcacttacttttcaaaatttaaatccacctccatttttattaaaaagaccaaaaagaaaaaaaaatcatccattagtccccttttttccccttatttttataacaaatataaaaattatttaaaatttttaaaaatgaaaaaaatgatatgaaaataatcaatttatgggggataatatgaaatttacccttattatatcataacatctctttcaatatcacataaaatcttgataaattcattaaatatgataacttcctttttttttccataaatacgccagcagccaatatgatacctcttttatcttttatctttttctaattttcttcacaaacggacaaacaagccaatcccaatatggacctaatataacatgcataaagactaaagtacccctcatttcttgttacacaataaactcaaagtcaatgaatcaattgccttccattttctactaaacacttcaagtatatacaaattagtactctaaataatattcttttaactctaaaaatttcacatattctatgaatctagctaaaatgatagatgagttaatatgagattttgattgtacgtagcttgtctttataattacagtcttcccaaagaattaattaaatgacataaaaatgaatctcagcatttttcttttttctttttcttctacttacgtgaatgtgaacataataagctattaatattcatgtatttatttagttttttaagagttcattgctatgagttttgatcgtgtaggaatcaagtaataatatattgaacatgaaatcaacattcattggttcatagtagaaatcactagtgggtgattagtaaaaaaattaaaaaacaattatttgaaaccatttggtcaagcctctaaaggcagaaacattttagttcttatacatgcattttcataataggcggggagcaaaatagg

SEQ ID NO: 81399 - DNA, 385 bp, Citrus sinensis
  Intron number 1 from transcript orange1.1g046728m (locus o range1.1g046728m.g) derived from phytozome v7.0 (chr-ID sc affold00031; pos 36444 to 36828 reverse strand)
atcaagtgtgtattttatttttttaattaaaaacaaaaattaacgtttgcaattttttttccaacttatttatttttttctccaattttattttatagtacatacaagcatagcaaggattacccatgggaattatactctctgaaagagcttcttcatgcaacaaatgactttcataatgataacaaaattggcgagggaggatttggaagtgtttactggggccgtacaagtaaaggcgacgaggcaatgatgatgtctatatttgtgttaattaatcaaaagggtctttttttttctttttaaattaaaattaatagctaacttaaattgagttaattgatcttcagatagcagtgaaaagattgaagacgttgaacgcaaa

SEQ ID NO: 81400 - DNA, 800 bp, Citrus sinensis
  Intron number 1 from transcript orange1.1g033095m (locus o range1.1g033095m.g) derived from phytozome v7.0 (chr-ID sc affold00739; pos 62934 to 63733)
gggttttttccaggtaaaatgctttagcagagttagaaagatttttcatgcttgtctgtgatttaaaaatcatgaaatctgcaaaaatctcagtcacaaaatatctatttttgaaacccagtttccattgatttagcatgtcatgatttcaaaatttcccatctagtccttttgctgctttcagtgcttctaggaccgcagcttgtgaaatgtcaaggaagttgtctcttgttttattgtacaatttatgaggcaatatgaaaagaaaacactcaccatttatttttctgaaacccagattccattgatatatttgtttttgactttatttattactttagctttccatatagccatagatttgttagtataatttgtattaaaagatgcccatgacaaatttcacctattttgtctcaatagcttttggtagcttatgaaaaaatatgcttctgtcaatatgtgataaaagatataattaattgtataagactcccacagattattagctgttctagaatattcaaatttctccaaaactatgagtaaaaaacacttgtaaaaaccaatcattgattagatttataaacaaaataaaattggtgtttaatgcaacaacaatgtttgcagttgaaatgtaacaaatgcttttagccatcagtaacaacaaatcttgtctctaaatcagtcaaataagttgcaatctgtcttcataaaacgcctggacgattgtgaacctagtggcacgattatcaaatcttagctgcttttcattcctgcataatttcagctggtaaacc

SEQ ID NO: 81401 - DNA, 330 bp, Citrus sinensis
  Intron number 1 from transcript orange1.1g040760m (locus o range1.1g040760m.g) derived from phytozome v7.0 (chr-ID sc affold00710; pos 20911 to 21240 reverse strand)
cattagagggtactggtgggaaccttctgttaagggtttatctacaaagaaaagaaaaagtaatggccaggtagaagccattttgtccatccttctttttaaaaaatcttttcaatggtaacttgtctttgtttttttttttttgattttttttttggtttggtggtaggatactgagcttgatcaagccaatggaggccagtcattaggtgaagctacaaaggacaacattgaaaatcaatagaagtgagatcataacccatcctcaactggaaataagtctactcgaaaatagggaaaacaggggtctcaaacttcagatcaaccaaa

SEQ ID NO: 81402 - DNA, 429 bp, Citrus sinensis
  Intron number 1 from transcript orange1.1g011430m (locus o range1.1g011430m.g) derived from phytozome v7.0 (chr-ID sc affold00009; pos 1174494 to 1174922 reverse strand)
agaattcgctaaatacagtcaattcttcgcttaaggtaatttcggtgattcttcttgtccacgcttttccttcagctaaatcgcaaacgagtctcctgtttttagatttgctcttcaatcttgaatttatcgtgatataaggtccctaccttactgttttctcacgttttttagcattatttctccttaattacagcatagcggattgagtaatgacttaaattctagttttcagatgaggcacattataatttcttttccttctattttaaaaatattttcaccatgttttctagtttgtctgtcatcactttttactgctgtaattaatttatatacttatgtactttgttaaattgatacacttttgattatttgtttgttttgtttctagatttcgagattcaaaatcttgttttgctggtcgct

SEQ ID NO: 81403 - DNA, 722 bp, Citrus sinensis
  Intron number 1 from transcript orange1.1g034011m (locus o range1.1g034005m.g) derived from phytozome v7.0 (chr-ID sc affold00019; pos 1611717 to 1612438 reverse strand)
tccagatctgatccaaatcaatcccaactagtaaggtaatcctttcttcttcttcttcttcttcttcaattttttttttttttttgcctctttttcattttcccgcttctttattattactgttatgtaccttcaagatctgttagttcatctccaactgttactcccccacccccccgggggctttggcacagtttgattggttttaacatttgatataagaatttatgtataagatatatatatatatatattttcaattatgtgggcgtcgataaactttcaatgtgaaggttttacttgggcttgtttgctttaacctgaagtgtgtcaatgtgtaatttgatgtttaggtttaatgaaaagaactggaaggcaagaaaagaataaggaaataattaattctgttgatcaatagtatggaagaaaaagatggttgtaaagcattcaaagattttgataattttgggcccttagttatgtgatgattttaggggcaatttctctctcttgaacttgaggcagaaacctacactcttattataacatatctaatctgattcgatgggaatgttttttaggagttaaaaatttattatgttttgctgatcgtgtttgatctggctttctggattgagctctattttgattctactgtctgtcttcttgaattttcttggaagacagggtgtggggcttttggtcttagaagttggagagaa

SEQ ID NO: 81404 - DNA, 511 bp, Citrus sinensis
  Intron number 1 from transcript orange1.1g031984m (locus o range1.1g031984m.g) derived from phytozome v7.0 (chr-ID sc affold11811; pos 596 to 1106 reverse strand)
aaattacccacgagctctcttccaaccgctttcaggtatacataactggtgaatgtaatacaactatttttaaacccataactaggtgaaaatattaaccaggatttgcttttgatgctttattgatgatgcttaatgggttttttacttcttttaagcatgcttttgtttcgtactaacaacttcggtgggccattgggtgttttgtggaagttgagttacaccattttgttgtagatagtatttgacgctaaagaagcttttattcgtaataagaacatacaaggaaacttacccagaaaaaatattaggaagatttaaccatattctttttattaaatatgtagcatgcttattatctttcggccatctgatcaccacatacacagggaaatatattccaatagtgtgtctagtactatgaattcaagaaattaggggtccttttcggctaatgtatgttgatgggcatgcaggataatcaaagtggtaccttgggggattttaaggt

SEQ ID NO: 81405 - DNA, 879 bp, Citrus sinensis
  Intron number 1 from transcript orange1.1g045108m (locus o range1.1g045108m.g) derived from phytozome v7.0 (chr-ID sc affold00723; pos 46367 to 47245 reverse strand)
caattggaacgtattctggaccttgatccccttatgtaagtaatataatccttaatataacaattgctgaataagctaatttaattatctatttctgtttgcttgttgggacagtggaggaaattgaaaccaaaaaatatatatacatatattattcttctttcatttgtcttgcaatgcaatatccattgttattatttttggtaggatattaaatattttggtttaccaatgctatacatacaaataatcttttacacactcatccatacaaattgacatggcatggtatttttgaaaaactaaaatggataagtcaaaggaataaatgataacaaaaagtgtgtttttcgctttccgacttttccactcattttatgcgatgcctgtttgtatggattagtttataaagataatttgtatggatgggttggtgtggatagttcgtgttgtgtagaacaattctggcttctatggctgctcggaacggattagaactgtattctaaataacattaaatattttcaccccattggtagtacagaaaattataagttttaattcgatgtgtttttactgattatgacactatggcagaactagaacaaataaggagctgatagactgctgcttgtttattcatctattcaagtagtttgtagtttactagtactttattattgtgtctgtgctacatgagtgtggtcgtttctttaatatttctttcttttcacttttgcatgtttatcatgaattttgtttgaatagtttctcgtgcattttggttctgctgttttcatttttgttatcatgatttaatatgttggctttatatcaaatgtagtgacgaagtaggattcattcacccatcccagttag

SEQ ID NO: 81406 - DNA, 1065 bp, Citrus sinensis
  Intron number 1 from transcript orange1.1g009142m (locus o range1.1g009147m.g) derived from phytozome v7.0 (chr-ID sc affold00403; pos 48617 to 49681)
cgaagaaattttagctcaatcaagctctgtaccaggttagaattctcattttgtttctttctccttctcagtgtctttctttttttttaataaattagtggtaaatgctttcattttgtaaaagctgtactctttaattctttctttgtcgtcgagttgggctgcagaatgcgtaagcgctgatgcttaagcaatttttgctttactaaaagtttgtgttacataaactttaaattatggggtttattagtgcaattcgaacggttgagattgttcaagttgttacaagtcaatggtggacccttacccactccatcctatatctaagattcaatgttgagttaaattttttgttaataatttaaaagtatataattaatggttattggataagaatataaaattaaagtttaatcatatatcggcatttatatatctgtgataaaaaattatgaagagttaaatacatataaacttagtactgaatccaaattctctatgattagaaatatgtctaacaattttaggtctaaatttctggattgtagtacccaagagcaatcagccgtctacatcaaaacaaataaatcattgaagcgattcataacattggtttaggggaaactaagaaacttttacacaggtgtaaaagtttgttttgatattaaaaatgaatattaaaattattgatagttgtcttggtacgcaggtgattcaagtgaaacacataataaagtaagaaatttgaatgtgggattagtttacctaaaaaaatttttaaaaaaggttaatttagtacaaatcatctcagtgattgacgttggcttttgttggcttaggtaatcggcacttgagcccatattgtgtattgtgtcaacccaaggcccagcaaatcccccttgacccaatcaacaagtttccattttgcttaatgtctattttactgatttttttttaatacataagcaactacgaggtaataatttcttaatcttaaagataattaattatacgctattttctttttcagatttctcaaggaggaatttgcttcaaacaaacaat

SEQ ID NO: 81407 - DNA, 718 bp, Citrus sinensis
  Intron number 1 from transcript orange1.1g033995m (locus o range1.1g034005m.g) derived from phytozome v7.0 (chr-ID sc affold00019; pos 1611721 to 1612438 reverse strand)
tccagatctgatccaaatcaatcccaactagtaaggtaatcctttcttcttcttcttcttcttcttcaattttttttttttttttgcctctttttcattttcccgcttctttattattactgttatgtaccttcaagatctgttagttcatctccaactgttactcccccacccccccgggggctttggcacagtttgattggttttaacatttgatataagaatttatgtataagatatatatatatatatattttcaattatgtgggcgtcgataaactttcaatgtgaaggttttacttgggcttgtttgctttaacctgaagtgtgtcaatgtgtaatttgatgtttaggtttaatgaaaagaactggaaggcaagaaaagaataaggaaataattaattctgttgatcaatagtatggaagaaaaagatggttgtaaagcattcaaagattttgataattttgggcccttagttatgtgatgattttaggggcaatttctctctcttgaacttgaggcagaaacctacactcttattataacatatctaatctgattcgatgggaatgttttttaggagttaaaaatttattatgttttgctgatcgtgtttgatctggctttctggattgagctctattttgattctactgtctgtcttcttgaattttcttggaagacagggtgtggggcttttggtcttagaagttggag

SEQ ID NO: 81408 - DNA, 852 bp, Citrus sinensis
  Intron number 3 from transcript orange1.1g025006m (locus o range1.1g025006m.g) derived from phytozome v7.0 (chr-ID sc affold00019; pos 67979 to 68830)
ctgtacaggtacggttgaaactctctgcttggtggcttcatgatataatgtctattcttgttaatgttaaaattgttttgagtgaagtttgctaaaagtggctcataaattggtgtgtctgattaatttgtttgactttaaaacaaatttttgggtttatatataatagcttttcagcaaatgttaaagcttggagtttaacttcagaataaagtgaatgttgatgttataccacattctcttgctttattgtatgattagtgaaatcgttgattgttattatcaatgaaatttgaagttttaattattgaaaagaagaggaagaatttagttcagagttcaatactgtttttgaatccattcacgttaggacttaggaatgaaaggggcttggtttacatttatgcattatataattaaaaacagaaaagccttatatctaagatttggcttactttccaaattttgggtttggtcttctatggtccaatagtatcatatttaggatcagttgaaacccacccaattttctgatcaagaagccaaagagcttctctatgccattttatagtactttacaatattgaccttggttgatgcatgttactggttttccatattgtagatagagcttcagaagtaaacaaacctttatggaatgggaaattcttacagccaacaacagttaacctagtcggtgtcttggagtgctttatcctttgtatgtttctagagttcttaaggatgaacttgtttacatttaaccctgtttaaataattttaatgtccatttgaagtggtaacactaatgtgaaatctttggttttaacctgccactgcaggtctggaacc

SEQ ID NO: 81409 - DNA, 738 bp, Citrus sinensis
  Intron number 2 from transcript orange1.1g033365m (locus o range1.1g033365m.g) derived from phytozome v7.0 (chr-ID sc affold00143; pos 243157 to 243894)
gagctgaaaagatcaagtggccaattcatcttgaggtaattgtacatcttaggttagagattgtatttcttattgttctattcagacttaccgagaaatctaggatgtgattggaaaataaaacctctcagtttcaatcctaatgctcgggatgtccaaaagaaacataatgaaaagaagaattcttagatcctgtaatagacgttactaacttccgcgacttgatcttcacaagagatgattatactttccgcagcctctctccctctgtggtacttctgtgcaccttattgtcataattaccttaattaatgatttaaatataaaatttgcacaaaatggaaaagattaaagcatctctctttagacagttgtgcctctctagaatattcaaaactcaatctctttaacatttatgaatgaattgacataagcttatactttttgatcgctggacatattctcctgctgttcctcgtaaggtcatcaatttctacacttagtagcactatacacactacaaccttattaccttaatagttaggatagtggtaacaagtagatgctttgagggtttgagccactgactctgtttctggaaacaaagacttaacccatcaaaccagagattgtggttaatttgcagaatacactttgccttttcctttattttaaagtcgcaattctgttactacattaacaggcgtcaagagtaaccgttagggcaaaagcagcagt

SEQ ID NO: 81410 - DNA, 796 bp, Citrus sinensis
  Intron number 1 from transcript orange1.1g001615m (locus o range1.1g001615m.g) derived from phytozome v7.0 (chr-ID sc affold00018; pos 797397 to 798192 reverse strand)
ggcgtgccgagcgcttgaggcagcaagcagctgaggtattgcgatactgaatcattctcacgtgttgtacgcatttaagggtactagcaggttctgtttgaaagagattgaggaaatagtttaaactgataagttaggggttattgattgtgttgaatggcaatttttttaattaattgaaaaatgagtaacgtatctgtacagtacgattgaaagagtgaaaaccataaaatcaatgcaataaatgagaatagaaaatgtattccttattctttcaatgagaatagaaagtttgtgttcattgagtttgtatgtgtggaattatcttatagaaagttttaagtcatttgattatctatcatgtttacacatttttttatattgtcatgttagctcagtattactgatatttgatgaaagcaaataagagtaactgatttttgtttatgaagtttgttatgattttttttttcttttttcaaagtataggattgactcatttttaagttttacccatttaaagtaaatatattggagtaagtgggaagctcatgaagtttgttatcaggcaacaatagatagttttgctagattttttttttcttaagctaaagaagtgccttaagcaaatgaaacgacatcttatttgtattctttgctaccagttaacatttgaatataacatctctttttttcttgtgataatgcattgaaggttcgattgtctttttattctatttttttttcctgtaagtaactatattcacactattaatgcatccttattgaaattcag

SEQ ID NO: 81411 - DNA, 969 bp, Citrus sinensis
  Intron number 2 from transcript orange1.1g027123m (locus o range1.1g027123m.g) derived from phytozome v7.0 (chr-ID sc affold00041; pos 783393 to 784361 reverse strand)
ataacaattttcggcttgtttctgggtatttaatcttgaattttttttttttttatgtcggttttcattcgggtttaattcttcattggattcttgtgattgtacacaattaattaggatgtttcccaaaaacagttttcagaacaaaatcctgagaacgtaggggaaattttaatctaaattgtttgtgaaattttggaccaatgaggaatccttatcagtaactcgtatggtttctagacaaggggaagaatatttagttctatgagaaatttgtcttatttgttgtgtttaaagtatttgcattgcaatagtttatctcttatctgtgggctttatcattgacattgacttcgtgcaaacatataattttataatttaatctggtggtatattttgtcctatatgtgaaattgtcttccctaaatcattataaaatttgctggaatgaattattattttggcgtttcctttggtaggcgggggccaggtgtaggtggaaaaatggggaagtatctgaactttgatccggcgtgaaacatgatggtgcatgttattttcaaggcttaaatggctgttctgttctagattgttttaatcaacaattgacccaatttcgtttcaatgtctttttgtaatatgcacaaatgttttgtagattgtttctagcttcacctctatatgtttgatgtgtgattgtaaaatgataagacaattcggaaaactaatgccgcgtacagatatattgagttaagaaacctgaaatatgatcatcttttgatcttgagttcaataatcagtattcaaatgtctaaaacatgataatgatcaatggggaaattttttagaatcaagttctttcattttttctgcataaattcaaacaccacatgctcaatatttgatgcttattagcacaccatgtatcgtgtattgttgcatagtatactgatattttccatacaacag

SEQ ID NO: 81412 - DNA, 344 bp, Citrus sinensis
  Intron number 1 from transcript orange1.1g002956m (locus o range1.1g002958m.g) derived from phytozome v7.0 (chr-ID sc affold00149; pos 145856 to 146199)
tttcatctctggcttgtgttcagccttcaaagtaagttcttgtccttctttattcttcttcttattcactgctaatactatgatattttaccttctgttttctttttcgtttttctcctgtttaaatgctgcatgctgtttttgttcttgcatgctcagctgatttgctgactgtaaatcattttcttgctaaagattctactttttgattactaaatttgatttgctttgcttcgctatttttgatcaagcatgctttgtactgctaggccaccttacaagttgcagttttcgattttatttaatcagattttgcttctgggtacttccaaataatctgctaa

SEQ ID NO: 81413 - DNA, 444 bp, Citrus sinensis
  Intron number 1 from transcript orange1.1g028468m (locus o range1.1g028468m.g) derived from phytozome v7.0 (chr-ID sc affold07159; pos 244 to 687)
tttccctcgccgtcgtgacgacttcttctcaggtagtcgtcttctatttcccgcccccagccctgtttcttttaaaacgctaatcttattttgctgttgaactaaaaatgcttggcggcgttttagtgtgacagagagaagaaataaactaaaaacagctatttttactcgctatcagaaaccgataattccttttaaacgctaatcttatttttctgctgagcggttgtttggtgtgacagaggaagaataaactcaaaagagctatcttacttgttactggaagcagatagttcattttttctaaaataaattttgaaaaatataattctaagaaataatcgttcgttaataccatttgttggaaacaggcggatgagtctgattagattcttcctcttggtctctgtgatagtaattgacatttattttgtggtgcaatag

SEQ ID NO: 81414 - DNA, 519 bp, Citrus sinensis
  Intron number 1 from transcript orange1.1g041120m (locus o range1.1g041120m.g) derived from phytozome v7.0 (chr-ID sc affold00365; pos 59739 to 60257 reverse strand)
tggtatgtaatatttacttacaagaaattgggatgttttcaatgcacgttagaagatagggataaacactgacttcatttttcatattatattacaggactggctatttcattatttcttcaattcaatttcattcaaataaattcaaacctccattgccaaccacctgctacttgatgatctagtctttgaactgaaattacacccccaaaaggagaaacagaaggcatttttaaaaaagggcccaaatctagtcacccggcagagtttctaaagacaatagaaattattttaccatgaataatatgccttaaacaccctctgtgaccaacataatgcctgaatatcaatttcaatagaggttattcaatattatctaaatcaaataaaagcagttatatgggaagactgttttctgtttgaaattgaactgacagagaaatgtcaaaggtagtagtagatgacatcttaccttttgatgcaggaagttgttgggcgttctctgcagtggcagctgtg

SEQ ID NO: 81415 - DNA, 646 bp, Citrus sinensis
  Intron number 2 from transcript orange1.1g044091m (locus o range1.1g044091m.g) derived from phytozome v7.0 (chr-ID sc affold00294; pos 44732 to 45377)
agtggagttaaggaggaaaaggaaagctttataaggtacagtttataaaatcaattaaaggatatatctaacttttagcttttactaaaatattgaaatgtggtgcaaattttgaaattaaatgttgaattggatgttaaaaggttgctgttttcatgaggttatcgtataaatctgtgaggaaagtagatactcagggtatattttagactgttttgctcggagcttgttgaaggatttgaagttctcccccctaatgacattctttgcgactagaaatcttatgcaaactctctgaaaccacagattttgtcgtgtgtatcatgatggcaatcacttggttgctagtggggagcagctttttagctggggttgtggcatgttctgggaatatgatgcttttacatttcctagttccaaaatttgttgttatcctgtttgtctatttcatgtttttttactgcaaacataaaataatgcagtgaacatttcagtaatactccttaaaaagttttcttgatgaagctgtcttctattttgaattgttaatggcttcttagaagcttgtggtgaaaaaacataaatgcatttgttctgtttgcttatgccagggagagaatccgaatatctgtaattggggatactt

SEQ ID NO: 81416 - DNA, 792 bp, Citrus sinensis
  Intron number 1 from transcript orange1.1g010223m (locus o range1.1g010223m.g) derived from phytozome v7.0 (chr-ID sc affold00376; pos 126677 to 127468)
ggttttggagtttcccattattcaggtcagtcttgttctttgtaattaattaattaattaatattagttaatgcctcggcacataaatttaatttctgagctaatgctcggtagatagttcagattaccagcagacccggagttataatctctgtaaatattagctaagcacagtcttaaagagtatcatattgtgtatattcacattatgacatcatttaatcgcaacaatacatgggctactttcatcatttgagtgtttgtgttgttaaaatggacagtgagtaattgtgtcaggtcttcttaattatgtcaatttttcagtctagagtaaatggattttattttattattattatttttttagtaattgatcgtgcatgagtgtaagattgcctatgtatatttggtgatcagtttgacattttgaaatggaggtatcgttgagttctcaattaggtttttagtttgtaggaggtaatatctatcgattttgtatttttgatatttctatgttggttatgagagcatatctggtaatgttggcgatgaattttggaagacattttggctctatctccaacaagttgaggtattatgtcatattatgttctgatgggcttggaagttgaaatggattgcctagcatttactttttaactgcttggacgtccttgatgattttcttcattaggaaattttcatttccctttaactttccagtcattagactcatgaccattgattttcaaatgtctgcttcaacagcggccccctttcttcagcttcaag

SEQ ID NO: 81417 - DNA, 635 bp, Citrus sinensis
  Intron number 1 from transcript orange1.1g003260m (locus o range1.1g003267m.g) derived from phytozome v7.0 (chr-ID sc affold00041; pos 746828 to 747462 reverse strand)
ctctatcgatataacttgtaaggtttctcttttcttttggaaacgttgtacattttctttttggattctattgcataaagcaaaatgcttgcttttgctgtttaagattagtttgtaaaggttggtttatattattgtctacaagctgattgttttacatctcagacagcaaattttgtatttgtttatcacgcctacacttgtgctgatgattatcctttgtttttgcttgattggaacctcagttatgctttttattgtaattgtgctaattgtattcttaaatctgttattcattacaatctttgcttctctcatgttaatgatttatggaaaaagaggcgtaatatagtttatattagatttattcaagaaccactagagttttgcttagttacttccgaagtaactgggaagatgcatggatgaacttaagctttttgaaactgtgaaatttgatacaagaaagactgagaaagcattctatgatgaaaatgggtggattatttgaataaactatattgagaactttcaaagatgattgagcatctgttcaacgctctacttcatgcatatgtatttatgtaattcctgtacttgcggttcaattatgttctgttatgatttcaggccaa

SEQ ID NO: 81418 - DNA, 871 bp, Citrus sinensis
  Intron number 2 from transcript orange1.1g005445m (locus o range1.1g004767m.g) derived from phytozome v7.0 (chr-ID sc affold00581; pos 90574 to 91444 reverse strand)
ttagtagagaggaagtgcttgggagactagaccaggttttatctctttcctcaactctcagttttatattgttatgtttatggttagctgaatggtccaagtacccatgatcaagctgttttgttggtaggtttcgttcaaaatgttttgaacaaaaataaaggttaagaggggaggaaaatgatgaaaaatcttaggtttaagttttttactttgatggagaatgtcagaaatgtctttgctaattttgaacctttttatgatgttgtaaaattaacagattgtgaagatatgggttaagaaaattagtcgtgcaaaaggtttgaacgaccaactgcttcaagaagcaaatgccaagatatttacctttggttcttatcggcttggggtatgataaatattctgtaggttactttttttgtgattctcctttccctatgcttatgattattaattatgcttacatgaccattgattgggtgtccctgtacttgtataattgggattatttcaatcagagattttgtcttgtaaaagtaatagaacctgtcctcgtttttggaagattaagttcattttttgttttataggaagtttctggcgacaatgattatccttaatattaagaaaagattggtggtgactatagaagtcttagttgcttctgaacctgttggtgtaacatgcattaagatttatgcaagacaaaaaaaaaagtgtttttatggtcaaacctcaaagcagagaaatgatgtgggaaatattttagacatatgtgagcaagatgctaaagatgctatcttatgaagcttattttttatttttcatgttaataggtgcacggtcccggtgcggatatagacacactttg

SEQ ID NO: 81419 - DNA, 608 bp, Citrus sinensis
  Intron number 1 from transcript orange1.1g002441m (locus o range1.1g002273m.g) derived from phytozome v7.0 (chr-ID sc affold00018; pos 311681 to 312288)
cactttgcggtttcgttacaaggctttgatttgaggtggtaaaggccaagagctttcaagtatctttcacgtatgtagccatgtgtttgtagtgttgccaagcaagaaactctttatatatatatatatatatatataatttcaatgcgagtttcaatattcgtagccctaatatatttcgctatttcttcttctttattttgtgttgtatttaatagattatcattgattttgtgatttgatattcgttattttagtgattagatcccagttttatctttcttttaactgggctttgctttttttttttccccctctttgggggtttcatatggtatcatcaatttgattgaagttctcagcttttgaaatggagcagctaatattgcttttgcatgattagggttttttgtgggggcgtaactttgctacggggttttgccagtttttgtttactagtgtcaaatagttgattttcattgagttttttgttttctttttgctctaaaaatttcaaggtttagtttactacagtgcatttgattgctttgaaatttgatttggatattttttcagttaaagaagcgagctttggataatttaaccag

SEQ ID NO: 81420 - DNA, 659 bp, Citrus sinensis; identical to SEQ ID NO: 80894
  Intron number 1 from transcript orange1.1g023500m (locus o range1.1g018675m.g) derived from phytozome v7.0 (chr-ID sc affold00018; pos 60006 to 60664 reverse strand)

SEQ ID NO: 81421 - DNA, 556 bp, Citrus sinensis
  Intron number 1 from transcript orange1.1g012145m (locus o range1.1g012129m.g) derived from phytozome v7.0 (chr-ID sc affold00954; pos 23758 to 24313)
tctcttcttttgggttctcttggtgactgaggaaagtaggtaaaacttatatgttccttttgatattgtgattctacttcttattcttttttttttcttgaaaattttctcttttgttggtcaatttggttttgtaagcattttttactttgttctgtggttttttttgtgtataattggaggacatcattcatcttttaattatatttaaatataggacaggcttctttctttggtttttatgtttctcgtatacttgttttcctgtctttattcattttttctaatgttgtttgttgattaaattacttgaaatcacaccttttaatttgggtcaatgtgaatcctgttcaatgacaaacaattaggacagcctttcaagtatattctattccaatgtcacatggaagaatcttttttatttgttctacttgctgagttttctctacatgcagccatttctggggttctatgacattatatcataaacaattccattaactggcatctccttggttttttcagctggttttgttatcgattactgttacctccc

SEQ ID NO: 81422 - DNA, 641 bp, Citrus sinensis
  Intron number 1 from transcript orange1.1g021082m (locus o range1.1g021082m.g) derived from phytozome v7.0 (chr-ID sc affold00019; pos 1267998 to 1268638)
actgaagaggtgcaattggattacaaagaatagcggtaagctccatttgttatcaaccaagagtttattcgaacgcataatagttaatactgcgtgcttcagatttttccatggcgattcatttttctatgtgataataatacaagagaaaagtttcttagcagctaaactttgacattgttgtagtggttaggttgtacaatctattctgtgcttgtgcatttgaaaagaaaggatttagtgaagtcatactaattaataaagaagaaacctacaagcttcaaatactattagtggttaagagttcaatataagatgaattaaaatgataaaactaaatactgtgtgtcatcatcgtggccattataatgggggttgttacaactgtttgggctcctcaacgctgatataaataactcttttaaggcattcatgttccaactgtacagcatatatgtattaagtcgtatgttttgaattcagaaatggcaactggtgatccaaaatgatgttcaacatctctacctactctacttttttcgattactcactctttgaggacattaatatgtactaaccaagatgtatttgctccatggaaagtgtggatattaacacgaattttgatgcagataaagttt

SEQ ID NO: 81423 - DNA, 753 bp, Citrus sinensis
  Intron number 2 from transcript orange1.1g022963m (locus o range1.1g022963m.g) derived from phytozome v7.0 (chr-ID sc affold00019; pos 1328066 to 1328818)
ccggctacctaaacgaactcgtattttctccctttctttgaatacttttttcttttttaactataatgtggacagtataatgaatttcagcatgtcttcactgttatgatcatcatcatcatcatcatcacacacacacacacacacacacacactatgttaatgtgctgaagattaatgtgctgaagatgcttggaataggatttgaaatagtcttatgcataccttttatttctttttaatgaatttttcaaatccatctgtgtgtttaactgaaggcaacgttattttgggtgcttgaagattatgagcttcagaatctgcaacttgatggattatttttgctaagagacatatactgtctgaagaattcaacaaacaccttatgtgaagtttatgcaaggagagagagagagagagatgaaaagtgaaatatttttcacaatccccaaacttgattgaaaatgggaactacttacagagtaatatcaattttttgaaacagcatattagtgcattctagaagtggagctggatgtttaggtgctcaaacttttactgacatattgaatattgatctatatacaatgcttgtttgtttgcacgtgtttgaaatattttgcaattttttttttaatttctagttatgcactaacctacctggcatcatttgttgctatccatggctttgctttacattaattgaaacttactttcgtctaattaccctttaatcatttttgtttttgtaga

SEQ ID NO: 81424 - DNA, 353 bp, Citrus sinensis
  Intron number 1 from transcript orange1.1g032927m (locus o range1.1g029869m.g) derived from phytozome v7.0 (chr-ID sc affold00068; pos 408214 to 408566 reverse strand)
ctttgattggtgagcctaccaggaaatatctctgggtatgtccctttgatccttctctatcctttacttagaaaaggatttggcattttgatcatggttttttaattgggtttttgttttttttaccattttacttgctcaattttttttaaagagcaatttttctgcgaaaggtgaaattttgatgctaggaactaaactttattgcataaagtacacatttaataatgttctttctcgtcaactacctgatgttattgtttgttgaaaatttgatttttattctttatgggttggttcttgttaacaaattgttgtgttggtgtgggaagattttatgcagggagcctcat

SEQ ID NO: 81425 - DNA, 1023 bp, Citrus sinensis
  Intron number 2 from transcript orange1.1g020701m (locus o range1.1g018517m.g) derived from phytozome v7.0 (chr-ID sc affold00009; pos 1186711 to 1187733 reverse strand)
gggaccttggtgatattagcagaggttttgcctcagttaggaaaatctccctgtaacttctgcaattggccccttattattattattgtttttcaaatttcgagacaaaacttgtatctgcttcactgccattcaaaatgcacccccacattaagaattattctatgattacaccaaatttatgtccagtgatgtttactacattaaccatacagtttttgcgtataaaaattcagctatactgtaacatttggtctagcattcaacatccttaagtaagttagaaaatttaactacatttaaatccagtcacaactccaagtcatagtaatgttggttacattctgataaagtatgccctgtttatccctctgtgacactcactctttgttgcaggcattcttgctcatcttcttttccgagctgggggacaagaccttttttattgcagtaagagtcacagtagtataattacaacctgtaactgagatttttaaacacgattctacaagtcagatggacctatgtgtgtccaaaactgagtatttgtgcttgtgaatttgggccatgtttctttctcaattttagaaagtgaaatttttataactttctgtcagagtttatcacttggttccttttccagaccctagttactgttgatagaagtggaactgaaattattattgttgttgttttttcttttcttttcttttcttttttttggttctgctccaattgagtgcataagaatacaattatatgaaaaaaaaaatagattaccagtcaatggacttagcaaattttagaaaatcttctgagtgaaatattttcccccagtaccttctatttttctttagaagcatacataaatatgcatatttttatgtgtatatgcacatgtatatacccctgaaggtaaaatattgaaccaagttcaatatatataatatcaaactgactttgttatggatttatacttattgcgcaggcacttttagctgctagaaattctgctgcaactgt

SEQ ID NO: 81426 - DNA, 852 bp, Citrus sinensis
  Intron number 1 from transcript orange1.1g029749m (locus o range1.1g029749m.g) derived from phytozome v7.0 (chr-ID sc affold00149; pos 114830 to 115681 reverse strand)
ggcagagttggcgctggttctggtggcttttcaaggtgtgtttcattgttatcttttgtttcttttcgacactgctacttctaacagtgctaattctgtatcatttgggactgtctgtggtttatcatttgagaagtactaattctgtatcactttgataatggtcgaagtcttaagtgatgtaggtcagtactcgaaaaagaaagcgaaaggagacaatagaaagaataacagtaagtagggggaatgaagtaagaaataactaggaagaagatgaaaagaaagaatatgagagaaacgtctgttttcattatgtcaatcaatcatccaccccccacaatctgggtcagcagatttagtgggcaactcctgagtcaactattcttataataataacagcagctatgtcatgtaacttcattcccaaaaaatgaaacactttaaatgtgtacatctttgctatgtacaattgcagtcatactctcaagccttcatccgatttgttgtgggaatacaagattagtatacttttggaggtttgagagtgagagtgacactcccttatttaccacataaaattagtagataaactgaaatattattgttacacaaagggaggctaaaaggcttctatattaatattttaatatgtgtaatattattgtttctggaaattcaagtattcgatttttctctttaaaaaaattaaagagaaattgcctccttgactgcttttcgcaatatgaaaagctcgtcgcaacttgtgtgcgtgttatggttttcttgtttatctacacaaactctgcaacttttacgttctgctgcaggctggtttgcctgagagtgcacccc

SEQ ID NO: 81427 - DNA, 833 bp, Citrus sinensis
  Intron number 1 from transcript orange1.1g045353m (locus o range1.1g045353m.g) derived from phytozome v7.0 (chr-ID sc affold00595; pos 77431 to 78263 reverse strand)
aggttcgtctaatactgtttgtgtcacataatttgatttttttttttaaaatcaactcatctgaggtgaatttgttatcttcaatcagttaattttaactcctaatagtgattaaacatttgtgacttttcatttgtgcgaaatttggtgcatttaacaagaaattgttgagatttgtgatattatttttaccttagtgattgttgggatggtctcagagtggcagtttggtttcatctgtagttcagctaaggtatatcaagcgtcctatggtccaaaaaatgcataacatgactgtcaagggaatatctatttaaaacttttctcctctcttaccaaatatgtttgttgtgttgcatatttactagagtaactggaacagtgtgatgcgaaaatctatatcatgagatgcctgattttgtaattttcaagaaattttcaggaagaatttcaattcctatgagtatgggttactctcaaagcttacttcaagttgcttacatctttgcccttgtcaagctttatgattttttttttttgggcattagatatacctttggattttttagtggtcaatctatttctatcagtttaatcagtagagacaagtgcatctattatttcttgcataacattcttttttggtcaaatattgaacagcaatgattaatcctcttctcatctataatttctgatgatgttacatattgtcaatgattggtcatgcatggttagtagtcagctagcgcgattaactgttttgcaatttgttttactttctcttcctttactgtctttgactttctggttttgtgcaggatcacttggcactg

SEQ ID NO: 81428 - DNA, 1047 bp, Citrus sinensis
  Intron number 1 from transcript orange1.1g042009m (locus o range1.1g042009m.g) derived from phytozome v7.0 (chr-ID sc affold00845; pos 10493 to 11539 reverse strand)
tgcattcttcttcaagcctccactggctctcccaggttagtatttattgactgtatccactggctctcccgggtcattatttcttgactgtagtatgtatagtgtagggacatatactacagatgtgtgtctgcgattccttaaacagtttttatatttccaagtcaaagcacacacaaaccgctcctggcggagagtaattttcactcaacttgcatctactgcatgcttaatgactctgaaaccttgaacataggcatattttatttatatatatccaatttttggaactcctttggaaaggtcatgctgatcagttgctcaagtatttcttatcttatgttggtaccaaaacagaaatcttccgtaaagaatggataacgtatgaaacgcgtcctgctcaaagcatttatttgtttttttaataaatattttaggatattatcattttaccacataatttttttctaacatattattctattaccaaagttttctaataattacattttcctatttattattttaatttttatcattttaccaccaaacaattgactcaattaagaaattgctaacgtcacgtgagtaatttagaaactttaatacattaagctgaaagtattataatacttacaattttatcgcttaattattttaaatttacaagataatcaattcataaaagtactatctcttttactataattaattttattttattttatttgtacttatacagattagggtaaaataaatttttatcataatttttttgttaaaaattacattatttttaacagcttggtaataaaataataataatcgaaatgtgaggtgagaaaaaataattgttaagaaagagcttcagtgcatggtaggcgaaaactgtggctacgaaaaagctgaaagaaaaactagttagattttgtggtgaaatcaagattcgaaaagtatgtaagaactagattgtactttcatctgaacgattaatgaaagtaatctgaaggaaaaaatatgtacaggtaccacctgctctggagagca

SEQ ID NO: 81429 - DNA, 838 bp, Citrus sinensis
  Intron number 3 from transcript orange1.1g034813m (locus o range1.1g034813m.g) derived from phytozome v7.0 (chr-ID sc affold02368; pos 9722 to 10559 reverse strand)
tcataaaggtaacttgcactccatattatcgtaatgttcgtttattctgatacttcttcacaataagtaaatttcttgatgtctacaaattaaggagacttttgtatgggtaaagttgacattttacaatggcattctggatcctgaaatcggtcagtttgagattcacatgctgtgatatgctctaatgttaaaactcaaaccttttctgtatcttaaatggattgtcgtggatatgcctgggatgatcattttcttcctcttcacttcatcatctttgtcatagtagttataattgattgaggagtgtgaaaacgcattgtgatgaatgaatgcacaagctatgtgattaagactgcatttattaggttggtgacggcaaatatcaggcaggatattcacaatagtgctactgaagctttatatggaataaggagaccaaacctctatatgataagagttgtatgaataccaaatgaattgtaagaggatatggttaatttagattgtaatttaagaaagcttgagttctaagagcacagaaatggggtcagtcttgctcaagtgtgaactccatcagttaggaagctgtccatcaaatggaaatatttacgtgattcagagaaattttggactttagatgaaaacaaaaatcctgtatgcatttgcttgctcccaatcctgtatgcatttgcttgccccgaaggagctgaaagttctcaaattgtttgtagacgtcatagttctcctgatgtcatttggcttggtaatcttttttgctcgaaaatttgcccattgtgtggtcttgacggtgggtgaaattgatttgtggtttcag

SEQ ID NO: 81430 - DNA, 803 bp, Citrus sinensis
  Intron number 5 from transcript orange1.1g047194m (locus o range1.1g047194m.g) derived from phytozome v7.0 (chr-ID sc affold00087; pos 93104 to 93906 reverse strand)
cgacgttgaggtggggcttctaatcttatttatgaattctgtaaataaagtttatatattgcatcattgtgatttctttcttgttttcggccgctagaagattttcttttccatgtatgaggaggcattagagacttttcatggtgcccctaatcattcctgtgatgattgttcttatcattgtaagtaagagcttgcacatttgagacataaagcatgctgtatatggaaactacattttatgttgattacaccatgtgttattggaagtctgaactttaaaagagttggtgacaagcatccatatactatcagacagaggaagggggttgagtataaagattctgttgacctagggactgactgcttaatatcacttgttagcaatctattatttgtttcatattttgaagaatttaaggagtgctttattcttttggattaaatgtcgcacaaaatatcagttacacatggaactgttctagttgttgctagttatcagtatcattgttttgtatgtttggtagcacggcctctacggctttcactatcatcattcaaacttacactcagtttttaaaagtgatgccataagtagattttggacattagattcaattttgaaatttttttatgtgattttataatttttggaaaattgtattcattgtgcggctgtgcacagctattctttcctttattgtcttttatataatgcattgcaatgagtttcattttttagttgctttagagcctataattaaatattttatatttgattttgaatggacaggtaagttcat

SEQ ID NO: 81431 - DNA, 412 bp, Citrus sinensis; identical to SEQ ID NO: 80720
  Intron number 2 from transcript orange1.1g027440m (locus o range1.1g027440m.g) derived from phytozome v7.0 (chr-ID sc affold00068; pos 257734 to 258145)

SEQ ID NO: 81432 - DNA, 1008 bp, Citrus sinensis
  Intron number 1 from transcript orange1.1g025610m (locus o range1.1g025610m.g) derived from phytozome v7.0 (chr-ID sc affold00018; pos 1094908 to 1095915)
tatctctgcgtcagcacgtaaatcggtaattttcattcttcagatttaatttttgttgaattttgaacaaatttcattttccccattataaattattctccttttcttgcacgagtaacaaattttcgatctttttgatgcgtattactgctcaagtaatttgttgaagtagctcaaatttaatattttctttacgcacgcttcgtcatttgataggttacaggtaccgctgaatgtaattcgtaatatttagttgataataaccttggtgatattggtttcttgatctaatgaatttgatagacacagaactgtctagttaattctccacttcgactgcacaccaaaacaataattaccatttaattttatgtcttatttatcttcaaaatgcacaatgcacctacttaaattcttctagaggtacatatctcataggtgtggagtctactgtatctattctgccactcgagctaatgtccaacctatctgtaattgattttcatgtttttgtgatttacataagtaccataaacaatgcttaaaaggtggttttgaatcctttgagaatgataacgaaagtgaattctttaattagtttggaggttgtgccgaattagcatgtaattcatctgaacactagtcttcaacattctaaaatgtctaatcctgtgatttttgtttttttggttctttgggcctgtagtctagtgggaaattgttctagtgggattggaatagtttgctggtttgaatcttttatagtgaccagtgatatagctagtaacatgtattcttagttggtgttcttcaaccacttagtaggattcattgatacagggtatctctgtgttgacttgacatgtatgcatatgaaattgctgtttagttgaagagcaatgtctttgttttaggttgtattttatttttgattctagaggcatttctattgcagtatttaatgtttggagcctattgcctaatgtataacaagcaggtctataacta

SEQ ID NO: 81433 - DNA, 862 bp, Citrus sinensis
  Intron number 2 from transcript orange1.1g001653m (locus o range1.1g001653m.g) derived from phytozome v7.0 (chr-ID sc affold00918; pos 7988 to 8849)
gaagtattgatattaaaggtaagcaagcttcatcccttctctcgtgtcccatctttgtggattttatttcatcgaccagctggaagtattgatacgagatctagctagactcttgctagtttaagcttcaaggctttgaatattataaaaataggtttaaggaattatcaatatatgcaattttctatgcttctcataatcagacacaattcaatctaattatttcgtatgtcctctcttcaaaagtaaagaattgtacactaaacggaaatcgacattgtagctttttattttttctaatgctctttctttgttaacgagtttatatcctgagagtgcattggattcaaaaaaaaaaaagttttgatgttcaaggtaagccataataacatgcatcttatttatctgtctatatctaaatttgtgcactgaatttagtattttagttagtgtgaagggatcagatattggcttccataaaccaacttgtatttacttaattaattaattaacaccatttagtatttaacaaattaaaatttcgtgcttaatttgtcttattttttattttttgaagcaagaataaggtatagcagtaggtaaagttgaaatacatatttattccttacaaatttaaattcgtttcagccaaatatacctacttaaaaccactcaatcaggccattggcaacagttttttaggtttttctagttaaccgtgtacttttttgcttattaataaaattcttttgtgctaagatttaaaacaaagaaggagaaaataagttatttaattaaccttgttttaagtgttggcataaatgcaggactgaattccttgagtaacttggaggagctggac

SEQ ID NO: 81434 - DNA, 536 bp, Citrus sinensis
  Intron number 2 from transcript orange1.1g031190m (locus o range1.1g028667m.g) derived from phytozome v7.0 (chr-ID sc affold00313; pos 161319 to 161854 reverse strand)
gcaaaagtctgttgctgggatcatcacagagagaggtattttcaaagcgtgccataattgaaaataatatgaatgtaccggaactgttagctgttgttggatgttttgatttatattcctttcgagttctcttactttttttctttttccttcagtgagttatttgtacttcttttgttagatgtcgccttcaatagtcgcaatcttattgagcctggctttggctgtagcaattgaacatttatctgtttaaattatggtgcataggcagaatgacgtgaagagtgaaaattctattactattgagtttctgattgaattagctcatttttctttgcaacttttgactttagcttcttgactttctcgttcacactctgtgtgctcggtttccttggtttaaggaatgtaatgatgtgcttactggtttcaatggtgctgtgcaatgcctttggcttattaattttttttccatttttctttgttacaattaaattccagattatctcaggaagatcatagtgcagggaagatca

SEQ ID NO: 81435 - DNA, 624 bp, Citrus sinensis
  Intron number 1 from transcript orange1.1g025424m (locus o range1.1g017292m.g) derived from phytozome v7.0 (chr-ID sc affold00028; pos 899829 to 900452)
tacttaacgatctccaggtaaaggaaaagaatgtgtgcatttcactaataattgcttgtaaccattacctgactgttgtagccatcatgacaggaggcactggaaaggggctaaaaaagaagtttcctcatctacttggaagttcttatattctctctaagcagctctttccagtgaccggaaaaatattttgttcaagctttgatcacttaagaggttttttacgtcagctaacatgtcttaccccttctgggtactgcttaaaaagccttgaagtcaattatgttatgccttaactttcctgataacgctcatcgctgattgtgtctgatgagattgtgtctgatgacggacacatagaatttggttagtcttcagccatactgcattatcaggctattgttttcttgctgattatttagaaaataatataattttcctgctgctttaagctatgaatttcggaatcaaaatgtaacttcttttgaacttcttgttctgtttttgttcttttgcttactataccctatctttctctctctccattttgttaattgatcaatgtctcacacttctcactcctgtgcagaatagttgggcggttgaaggatctaaaactggtgg

SEQ ID NO: 81436 - DNA, 946 bp, Citrus sinensis
  Intron number 1 from transcript orange1.1g034447m (locus o range1.1g034447m.g) derived from phytozome v7.0 (chr-ID sc affold01002; pos 15997 to 16942)
caacaatcatctgacctcacttcctctctcgagaggtcttgttttgtcatttcgatggatacctatttgttgtttcttttatttttttggttgagtgttgacccttgatgattatctcaactgggtttctatttttttcaactaatttagtgacaaagttaggacttttctttttttttctgaatttgttttctgaggtgtgtcgattttgattatacttgacattgagttgctgcgacttctaatccacaattagtgtcgaatagaaagaatcattgggtggatagttgataaatagtaatttcccatcaataagtaaaaaggtgaatgtatatcaaacagtttagttgcagtactttcctagtcgaatagagcaggactattgctgacttacccttcattttcttatatgtatgttgtattttgcaaatttgtttttggatgctgacactattgcaatttacatgctgacttcgctttggttagaaaaccttgattcctttgcaatgttcaatgccatttagttttgagcctaaagtgattagtatgttgtttataatgttctatattaatcgaaacatgagagttacagtgttaattttggaggtcaacaatgactttccaatgaacaagttggctagcagtcacattgcataagcactatagtatagtttgaataagaagaataaaataatcgtaatttcattgagtacctctcttttcttgactgcattcctcgttggaaaagtttgttagatggaaattctggttgtcttttagacttaagttttagtgacaatacatttggtgaaaatatttttacttcatgacatcatcttgaagttttgttgttatggagacaaatatgtagctcaattagcttggcattataagataaatgtacttctttgcagattagaagggatattaaaggtgccagacttga

SEQ ID NO: 81437 - DNA, 944 bp, Citrus sinensis
  Intron number 2 from transcript orange1.1g028477m (locus o range1.1g028477m.g) derived from phytozome v7.0 (chr-ID sc affold00206; pos 12431 to 13374 reverse strand)
tgtctcaagcctggactttctttttccttgatcaggtaaatagggctcgttttttgcttgcttttgatgacattcagcttgaattgaaataatttctacatgattcctttccttatcttaattagctcttctgttaagctttcaacacatcttgtgttaaagtgtacatcacatcaagggtagtgcatgattggaattcgaatactcacgtgaaaatgctagtttgacttaaatttattgacataatttggaccaaaaactgagccatcgtttacaagttgtttcgttaattttatgggcattttagggttttgattgtcttatggaaaaaagtagtgaaaaaaaatttcactttattatcatgctttaatataataaaacaacagtttaatatttttctaattttttattactaatattacataaacaactattaatatttataatcagataattcttaagattattctacattcaatttatggaaattaacctaaatcttcactcttactaatatttggggatataatattttgtgaaaaagaaaattatctctactcaattatttttcattgaggaaggaaatttgagttcccataaatactagtactcactaaataatcttcttcttatccattaccaccaattacatgtaagtaagaaacccaaatcagggaatcttcgtccatcatagttctcaataacgagaaacagatccatataggtcatccaaattctattatacaatttgttgaccagatacttaaattttttagttttaaaaatcaagttaaaaacaacgggtacgaaaactcctttagtgacgatgatcaaaccctaattttacttcaattatctaacttttgtcaaaacaagaatcaaaagctactgctaaattcatgaacccagttgctcacttacttgattctggcggctggagccgt

SEQ ID NO: 81438 - DNA, 453 bp, Citrus sinensis
  Intron number 1 from transcript orange1.1g001920m (locus o range1.1g001920m.g) derived from phytozome v7.0 (chr-ID sc affold00009; pos 2316198 to 2316650)
tgtgcctagagcgtgggcgtccgttcagatcgacggtgagtattcgctcagtcctaattcatttacgtaatggcttggttggtgctagggttttattttaattccttttttacgattaacgattcgttcttgtcaatgaaactatgctgattttattcgcattccatttttaacctgattatcttcaattttgttacgaaggttcgttattctgattttatttgttacaatgcaaagtaatagtgagtgaagtcgattggcaacggactatgtcgtttaatttgatctaattaaacattttctttttatctttctttttctatttcttctttttttaaaaaataaataaataaataaaaataaaaataataataaccgattctcttgtttcttgatttgcatttgatatttgtttcaggttggaatcaaatcaagactctgtgtaagtgtttt

SEQ ID NO: 81439 - DNA, 982 bp, Citrus sinensis
  Intron number 3 from transcript orange1.1g001920m (locus o range1.1g001920m.g) derived from phytozome v7.0 (chr-ID sc affold00009; pos 2317322 to 2318303)
tccatcttttggtagttcatcatcttcattcggtggtgagtatgcctatgaagtagcattatatatatgtatataagttttctttctcctccactctttacctgacttgttattacttttgattttaacttctgagatagatggttatggttctaggtcaatatgtgctttggggcattaaatgtggttagtgtcctaatgttattctggcaataatacatggcttatgaatataatttactgcctggtatccatatgtgagaaatttagcttaggtggatgctggcttaatggcttttgagtttttgcttatgatgaccgaggttcttcttgtatgtctggctcacatagtttctctttggtttttgatgctttcacgtgtcttttattttgtttctatcaaccagacaaatttttttcgatgatggtaattggaacgagtaatgttgttcttgggtttttttttttttctcatcctactatataatgtagcttcattttattggaatgagtaatgttgttctttcttttttttctcccttttctcttcctactagatataacttcatttagatgatagagaaacacaatatgttaaccagagttaacctgtttgatagatgttattgtatttgctttatcatccttccatagtattttatttagtttatcttttttcctttttattttttattttctcttgcactggtgtgccgtgatcctatttcacttaagggtcagaatgtgttgataagccccttggatttaaggggaatttttttcctaaagaaaataaactaaatttgaggagtaattttcatctttaactgtatgtgtgcattatatcctaaaattatttaacatattttattattcttttttccagttcccttttcatgagaacttacattaaatcttgctctctaaccatatgcatatatctctagggtcttctatctttggccagaagcctgcttttgga

SEQ ID NO: 81440 - DNA, 668 bp, Citrus sinensis
  Intron number 4 from transcript orange1.1g041494m (locus o range1.1g041494m.g) derived from phytozome v7.0 (chr-ID sc affold00068; pos 16989 to 17656 reverse strand)
ctttggaagcttacgtgctacggccattggaaaaagtattcttatctcattgtgtcattcacagtcatttgaaattcaaagtttcaggactttggtcctatttgctgctgtgaatcttttggctttgaattttatgcgtttataaatgtgttgctgagaaataaagttattagtaaattgttcttgcaagtctctgatatttaaaagttcagaatatcggttgtcctggtgaatttgttatttttcaaaacaatagctttaaacttgcaggaggaatatagagatggtcagtgaacatgcttattagtaaaatgtgtgtcctatgaggtgaagtagttgtctgaggaagattgcaattaaaggcattgtacattaattcgatagtttgtttagttttctttcttttccctcatctaatgattgcaaatctgtagtgtacacattgtaaatgtggttatgtaagggttcaaacgttgacagtttatatgatcactgttgtaacttggtgaaacaaagattgttcttattccttaaagtattttttcatataaacatgtgacaaacgagtatgaagtggcaacttggaaattgcagtgcatgatacagtgagaataaactgagacgactgcatatgatctaaatttaaagttacttgtttgcagtgctcc

SEQ ID NO: 81441 - DNA, 367 bp, Citrus sinensis
  Intron number 2 from transcript orange1.1g000231m (locus o range1.1g000231m.g) derived from phytozome v7.0 (chr-ID sc affold00221; pos 153354 to 153720)
tggttagtcactttcttcttatgttgttcttttgttttgcatgtggttttagttttttttttgttttgtttcttattctataatttagacgattcatcaattatttggattgttgactgggattgatgctttaggcttttgattctgttgttcaagaatccattcatcaacttctttttcctattgcagggtgtaggcctgctttattttagttggattattgactgggattgatgctttagtgagatgtttcatcaattacttggatttgatgaagcatgtagctctggttgtttgacccttttcatcgatcctttcctgtgattttgcaggtattgcttcagtattacatagagcgacagtgctt

SEQ ID NO: 81442 - DNA, 698 bp, Citrus sinensis
  Intron number 3 from transcript orange1.1g030608m (locus o range1.1g029333m.g) derived from phytozome v7.0 (chr-ID sc affold00096; pos 409700 to 410397)
gtggaggtgagatatcatatagtttcatgagacgtgtgtgtgtgcatgattttaatggtgatttgcttttttcatatattccaaatcagtagtcagcagtactgctatttccaagtgttaggtttcaagtttttttggccatttccagggcccttagttgtcagtgacacactctaaagctatgttctctgatctgatcgctcattagtgattaatctttcatctactgaaggttattgaaggaaaggagctgctaggcagtcgaacagacaaagagaaggaaaagcttaagagggtaagtgtaatttaaaggcagtagatggtactctcaatatgagagcataagtgctgatgctgaacccgagatttaatcatatattaatgtttgtttcccagactcaaatttatgactcttatctttagttatcggctgtgagagatacagagaggatatgtaacatacttcttgaagataaattgactatgatattgatttggatgcaatgagatgaccttcaaagatgagatagcttctccatattcaaaaaaattcttcttttggagatttgctctgtgcaatatgtttttacagtgtgattactaatgtattttgtgcataatgtatcaaatagttgaatgctgaagttcatttgtcgtatgcagaaaccaaaaaattggagattggcctgccaaaccac

SEQ ID NO: 81443 - DNA, 673 bp, Citrus sinensis
  Intron number 1 from transcript orange1.1g011939m (locus o range1.1g011939m.g) derived from phytozome v7.0 (chr-ID sc affold00018; pos 408786 to 409458)
atttgtctgatccatctcacagccccgtttccgaggtgagttaatttttgcatatgtttgagatttttttattttattttttggaatttgtgggggtatgcataatgaaattgaaacttttgttacatgttgaatttgcttctgtttcaatggcttgtgatgttgttgtgtttttttttttaattattttgcggtaggttcggtcgtgttgaaggtaagaggaacggttttatttttaaattcaggtttgttgtctgattgttgacgttgacacagaggtatttttagcgctttggcatatgatgctggagttatgtctacgttttgctttaatttttttggatccatatatgttctaatttgtccatattctgttagtaatcaggcgataacggtgatcctttagaacttagaagagtgcaataagtgtcatttaacatgatcacataaatagaaattgaaatcttgcttcaatttgtcttagttaaatattaaagaattgatccccattggaaatcaatcaaattgttggggataggattgccagggctggtaggtagcattcaaccagatgcagcagaatcatacttctgtttgatatgctttattgtcaattagatgttgatgcagcataacaggtcatttcattattaaatttattgatttccagagg

SEQ ID NO: 81444 - DNA, 341 bp, Citrus sinensis
  Intron number 1 from transcript orange1.1g043289m (locus o range1.1g043289m.g) derived from phytozome v7.0 (chr-ID sc affold00068; pos 165718 to 166058)
gcagcagccgcagcagctcaattcttgttctaaaggtaattttctctctctttatttccgttctttcattgatttttacccatttgcctaaactctgaatcagagcgtcatcaaatcaaaatcataactttcctctttcattttgtatcaaattgagcattgttgttcaagtaagctcgtctattattcagcagtttatggcatgtctttttaacccgacaggaactcagggtggcaacctttcgattttctgttttgacttgctatcttctttgtttatagattcttgtttgttttgaatttcagcaaggaaatccaatctgaattccaattctggcaac

SEQ ID NO: 81445 - DNA, 825 bp, Citrus sinensis
  Intron number 1 from transcript orange1.1g032867m (locus o range1.1g032881m.g) derived from phytozome v7.0 (chr-ID sc affold00018; pos 383006 to 383830)
ccacaagcacagctgcgcgacgctgcagcaaccacgtaatatttgaattaattttctcgttctgctttaatttctctgcaacctactgactgccttctgcttctagtttccttcattggatgtatgtgaggaagcactttccaacctctagggattatatagccttcaaattctacatcttgtacagcttctttaaaattgaatgagagtatgcttgatgttcttaaagtctcttgaatcacctgggaaaaaaatgtatatttattcccatcttgactttatacttgcctttggctttttgtttgctttgcaagcggatatggtggctatttatccacttggtgtttctttctttcatattctgtctcagatgcattagaaaagaaattaggatgataaatgcaattgttaatttcaaagcaattaaaaatggagatagtagcagcaaattgcagagggctaaaaattaaataggccggaaggaagaagagagggatttaaagaatttcatatagaattttttttatatgatatttgattaattgtcagaaaaaaattgatgagaacgctgcagcaaccatatagaattttaaaatttatagttttattaaaaaattatttaaaatttggttgaagcccaggcccgttcagattggatgggctttgagagagcttggactttttgccaagcccttaaatttcctagcctattccaatggtttgggggttctgtttctgtttcagggagtgtgtgtaaagtgtaatcagtaacagtattagtgcccgcgcactggttcgcaggcggaagagaaacgcagaaagaga

SEQ ID NO: 81446 - DNA, 503 bp, Citrus sinensis
  Intron number 1 from transcript orange1.1g044402m (locus o range1.1g044402m.g) derived from phytozome v7.0 (chr-ID sc affold00387; pos 113762 to 114264)
gaagacaagtactgctaacagtttttttgccacggttcattccaattactcttcaaatcctacactaaccatagataagtaaatgaagacaagtattatcaactccttagtaactttagctagatttcttgtctcattagattcaaaactatcttgttgcaagaacgttgaagacaagaccccctcgtctttggcgattgaaataagaaacattcacaaatatattttgagaaccctacttcagatataagttggtcaaacgaaaaatctcctgtacaaattgtcatgaagaaaagaaataaaggtatttgaaatgccaacattgtttttcatttttttaattttaaaaacatagttttcttttttttttcttttggagaaacatagttttcttttttaaatttattttaaacgctatatcaatatgtcttttgttttgaatttagatgtgttacaattgattaatgagcataaatcatagcatctgcttttagaagattgga

SEQ ID NO: 81447 - DNA, 620 bp, Citrus sinensis
  Intron number 2 from transcript orange1.1g037395m (locus o range1.1g037395m.g) derived from phytozome v7.0 (chr-ID sc affold00596; pos 50116 to 50735)
cccttcgatctgttcctgtgctaatcgaatcacccgtaattttttttctgaaaagatttaaaactcgtaattaacttgcatgtattagcagaatatataaattaccaccaacacaataatgaacgaacgagggcatttagctcggccaatcatatctctctactctcagcaacagtgagatttttagaatttttggtctgcttctacaaaatggtatgcttttctatctctatgctttttattttatttattctctttgtatgaatttatgttgttggtttgggtgaaaatcgaagtcgagtacaatcgatccaattattgttactagattcgcgaagtattttaacttgataataagataacaacgagattttgaatctggtgttggagcttttagaatttagatgtgtttatttaatacttatctcatattctcaagctgcaatgcttctttctttaatgtaacacctcccaatttgttatgtttcctcattagattttttgactgtcgaaaggctttaaattcttccaatttcttttttcaatcactatttttctctttccaatactgatgattttgattttggtcttgctttgttgttttaaaactttgccagccc

SEQ ID NO: 81448 - DNA, 328 bp, Citrus sinensis
  Intron number 3 from transcript orange1.1g012081m (locus o range1.1g009146m.g) derived from phytozome v7.0 (chr-ID sc affold00013; pos 1013785 to 1014112 reverse strand)
gtttgttgatagtgtcaggaggagtaagattcagcgtgttattttaagttgtagactacaggatttgatatgggcggaagttttcagaagataattaccttagttactgaactacggttgtgccctgccattgatgatttatgttcatattatactcattgtggagggtcatcattaagaatgggtgttcttcacatggttttcagagaattttcttttatgtaaggagtcagaattttgtttcccgaattcttctaatgcagaaacaacttaatccaattgttttgttgcagtgagattgagcgaatcactctacactgtcaagagt

SEQ ID NO: 81449 - DNA, 775 bp, Citrus sinensis
  Intron number 1 from transcript orange1.1g018448m (locus o range1.1g018448m.g) derived from phytozome v7.0 (chr-ID sc affold00366; pos 129847 to 130621)
gaacgttacgtgttcaagcgccgaaacggttcgttttcttaataactcttttttttttcatctgggtggttttattttctgttatctgctgaaatttttggtcgtagtatgtatgtttatgtattgtgagtattttttttgggggggtggttggtatggtcttagatttggagttgtatgtaattcattgggtatacggagatttttgtatcaacatgagatttttttgtgctaatgtttgtctatggtttatgatttcggttctgtgattttctgtaactgaactggcaacggcatgtttgttatgtatgaaagtatgagaattgttggatgatctatgagggattgcaagtttcattatgtcctgatgagctgttcattattcttatgtgatccaaacaaaggaagattagttgtcacctctagatgtttacttttgattttggtgtcctagaaattaaggattgtgaaaggagatgatagtattgttgcatttaaatttctgtgatatgtattttttttaaatttaaagctgcaacagttctgttttggattactttgatcttatatcagtctaaattgttaaatttggttggttcatggattgatgctattataattaactaaacaaatcatatggatggcaaggaaatttgctactagctcagcgttgttggaatttatttgatggattgctgaattcttaatctgtttaccgattccatgtttttggtactcaggaatttatattatcaatcttggtaagacttgggag

SEQ ID NO: 81450 - DNA, 663 bp, Citrus sinensis
  Intron number 1 from transcript orange1.1g004982m (locus o range1.1g004568m.g) derived from phytozome v7.0 (chr-ID sc affold00193; pos 112095 to 112757 reverse strand)
caagctttggcttcggttcaaaaggtaaattcgaggttttttttttcttttggttaaagtttatatattttaattaattcttttcttagaatgatagtgttcttgtaatcacttaatactactgatatataaattatatatatataaaagggtgttgtttgagagaattgttcgttgtagaggccaattttttgtagattgttgataatattttctgggtgctggtttctagttgcatcatgggcttatggccatttgatcatcttggaattatgaaaaatactgatttttttgttcgatgtttgagggtgaaaatctgattatgttgtgtacgccaatcaagttattttttgtgaattttattgaaggatggtctttgatcatacaaaattttgatttttcttctattttttgaaaaatatgtgtaagcgaaggtacatataagcaagttaaagtccaaatttgcctggtattttgtttatgaagctgtgaaactttttgtttcttctttgtatgactcttaaagttggtctgtatgtctctcatttggtcttcttttagctatataatcatgttttcaccaatccaaaatggaattatgtcgctgatttgatttcttcagttttaggtcattatttggtttcttctgaagagagaccccat

SEQ ID NO: 81451 - DNA, 798 bp, Citrus sinensis
  Intron number 2 from transcript orange1.1g035022m (locus o range1.1g034616m.g) derived from phytozome v7.0 (chr-ID sc affold08371; pos 1128 to 1925 reverse strand)
ctttcatctctacaagacagaagctttagatcattgtatgcctattacttatcttgtagcctacatttaacgtccgtccttatgggaaaacctccattctattctgtacttcatggacaatctatttgttgtgttgatgatacataaagtcttgatggcatatcagagtctagatttagtaaggaataagttattacctcttatattttggaacatgtggatggttttaagttaatggctaatcgtatagaagggtttagtgttatagcttttttgggttaagcagcattgttcttgggataaattctttaaaacgtattatattgccagttggttgatttccttcagttcaagttgtgttttgagtcttctgataagtaattgagtaagtcaatttcagatgtatcatgtttgggtgaatttggtgcgtcaaccttgaactcgattgtggtttgctaagtttcctacgttgttcaacctcttcttttccctcccccccccaccccctcttaagtacaatcttcctagacccttgcccatcattagaatttatcagttaacatgtcatcatatattgtaattttttgcccttggcaaattcaggactgctcaagactatttctgcataatgccttctgtgaaatggcagctagttagcttggaggaagttgtctgttcaacttaatatacctgttcacttcttctaccgcactcttctttaaaagattaaaagtttattactctgttcaagattgacaattaactcatttgtttcaacaattttcccctgttaacagc

SEQ ID NO: 81452 - DNA, 717 bp, Citrus sinensis
  Intron number 1 from transcript orange1.1g012062m (locus o range1.1g011627m.g) derived from phytozome v7.0 (chr-ID sc affold00099; pos 63247 to 63963)
tgagtttcccaaattgtgcacagagaggtattggactgtggatgataatgctgtatactaatttaagttaattatgtgctcaattttagaatatgataaaagttcagcccttaaataattgggatgtgttgattcttttaaaatcattttaggatccattctctttgctgtcaaatactcctaaatgtgagaaagaagtagcagtgaattattagaaacttctaatcaagaccttgacttcttactttgctggttaccacatacatgctaactatataatgcatgcaatgttttggggtttttagagataaaattcttagtatataatgcatgcaacattagttcttgcccaagactgcccatttggagggaaaaagatagttcttgttggcttcaacttaagtaatgaatgtctgtggcaatttggtggtaaaagtcaacttatgctatgaaatatagtgactgagtcttttgtagaatatcttcgtaatacgaaagaaaaataaaagggaaaaaaacttttgatgctaagtaatagtgatgaacttttaatgtctttctacaaagatgtggcagaaattgtatttttcttggagatatgtatggggtttgtactggaggatgtagctcaattatgaacttaaataacttgttcttattttgatattcatttattgtttattggggttcatgcttgtgtgtatcagtcaggtattc

SEQ ID NO: 81453 - DNA, 727 bp, Citrus sinensis
  Intron number 1 from transcript orange1.1g032438m (locus o range1.1g025529m.g) derived from phytozome v7.0 (chr-ID sc affold00158; pos 83598 to 84324 reverse strand)
cgcctccaagccagacaagcgccttattctcgttggtatctcttacttctctccttgtaattcatgcagataatatttctccgttcctattttcttcgaaactttcagatccgcaattgaattgtagtttctgtcgaaaagttcgaattttgattctatctatatgatttaaaaccgaattttgatattccaaaaaaacgaaaaaaaaaaacgaattttgaaaagttcaaattctgtttggtcgtggtggctcgtcagttttttttttttctctcttaatagttattaagttaaacaggaagctaacaagcattgttacttatttaaggtgtatagatttttggtagtttacgaagagtactgcttgagttgatatccatgtcggaagttctactttctgtttctgtttagttgaagaatactatggtttcaatatgtgaatgacagattgaaatgaaactgtaaactctggcaggcctgtttagagtgggactcgttgctcttttattttctgtttgctgtattttagtaacttagatttttcccgctgaagtaattaatgcagttgaataaccaaaagggacaattttctaattcctggtgattgaatgcaaatgtagagatgagtttgactaatgattcaagtcattagttagatgtttgtatccattagattattgtctggttggcaggcccacccggatcaggaaagggtactcaatcgccc

SEQ ID NO: 81454 - DNA, 818 bp, Citrus sinensis
  Intron number 1 from transcript orange1.1g042300m (locus o range1.1g042300m.g) derived from phytozome v7.0 (chr-ID sc affold00365; pos 96354 to 97171)
cagcaatcatcctcggtgagcttcgttaaccattgtctctccctctccaatgctcaatcctgattgcttaattaatatgtttagccaatgaattttctaacagttttggttcgtttccaaaatcaattagacaattgcttacagcacaagttttctttccggttcagtagcctgcatcgtttttctcttgcttctacgtttggaacttgtctttaagttgaaataaatagtactaaaatattccaatacccaaaagaactttgtcaaaaatttaattataaaaaaaaagtcacattttatattacaaatcaaggtcgaattgctgcttgtcgtgtgagcaagaccaagaactttgttcattagtttgtagattatccaatagttaggatttcttggagactgagttcgggtttttttttttttttataatttcctcaacaagtacaatcttaaaggtttcagacaaatacatttccattttcaagttgctttcattgagcgcaattcataaaaaaatcaccttctttgagtttgttggacgattgatatgtgattagcttctaatataaaattatgattgtaaaaattgattctgaggtacaaatagaaatagggttctttgagtagaaaatgaaaattctgtcgggcagtaacaatatacatagcactactctgtcttttcatgttgtagtgagtcctctgactccttcaattgcaagttatgtagccctgtcattaattttttattttcttatttcttcttactctctgattatccaatagcatccgggctatctgggagtaaagaaacagctcaa

SEQ ID NO: 81455 - DNA, 629 bp, Citrus sinensis
  Intron number 4 from transcript orange1.1g018176m (locus o range1.1g016887m.g) derived from phytozome v7.0 (chr-ID sc affold00076; pos 452901 to 453529)
ttccctcaggtagaatgggctctgttctaggtttaaagttttgaaccacttgtttccctgttttttccttattcttatttttatcttttaattttgtgttataattactggcatttgctggtttctgtccaagtgtcatctgtctggtatgcattcttatttacacttgtgtcctagactacagttgctgcatggttgaatatgtttctcaattactcatgtcatatacatcttttgaaaatacctgaagttatcggctagtgtaagcttggtgtcagtatgctaatgggcacttgggtcagagttcggtgtttgattttttttctcttaatttttttgagaactcaatgtttagaattttgttgaattggtgaaaagtcatttatacaaagcattccctttttaattgacacctgaagtcctgagaagtcatttagaagcctcactagtcaggatttagaacagagctgaagcaacaagttgcttgtttgaatgcacctttctttcctatgcctcatattcatattatgcttcttttcattacataaccttagaaattattttacccatatttttttccctatattttgccagtttctactgcagggagggctgcatcggaaagtact

SEQ ID NO: 81456 - DNA, 582 bp, Citrus sinensis
  Intron number 2 from transcript orange1.1g046447m (locus o range1.1g046447m.g) derived from phytozome v7.0 (chr-ID sc affold00156; pos 181099 to 181680 reverse strand)
agtctggtttaagcaccgagggaattttattaggcttcgatgcttccttgttgatcataatgaagatattaatgttgttactttcagaaacactcctctaaatttgtaaatgatatccccaaagattcaaaaagacattgtaagttgtgctgcagttaaaactactaattctattattagagagatggatgattcattattttttgttctaattgatgagtctcgtaatataactacaaagatcaaatggttgttgtattacattatgtggataagaatggatatgtggtcgaacattttgttggcattgaacatatctctagtattacaactgcctcacttaattaaaaagtctcttgataatatgttatcaaggcttgaattaagttcatcaatgttacgtgggtaaggttacaatggggcaagtcatatgtaggttgagttctatggtttgaaaacactcattttagaggagaatgaatttgcttattatgtaactgttttgcttatcaacttcaattggctcttatatttatggcaaaaaagtatgaataatttaattctttattcaatttaggttca

SEQ ID NO: 81457 - DNA, 668 bp, Citrus sinensis; identical to SEQ ID NO: 80580
  Intron number 3 from transcript orange1.1g027224m (locus o range1.1g027224m.g) derived from phytozome v7.0 (chr-ID sc affold01647; pos 587 to 1254 reverse strand)

SEQ ID NO: 81458 - DNA, 797 bp, Citrus sinensis
  Intron number 1 from transcript orange1.1g000849m (locus o range1.1g000849m.g) derived from phytozome v7.0 (chr-ID sc affold00171; pos 295980 to 296776 reverse strand)
tcgacataacactgggggagaggattactgatttggtaagagcatcgaatcttataattatatatatgaattatgtttatacagttattttagtttcattgcctgttatcctgctttctttgatatgtcctgatgcatgtgatattattatttattttcctgcaattaatatattattgattttgttattatattgcaggtctttatttttatttttatgtatggtgggggtttgagggggggtagggttgatggtgattaataatctaaattatttccctctgtttgattatcacggaataagtcaacaattttttcttcttttcaatcgtcagtcaaccttcattgatatgggcaaagtattttgctgcagaaatgtgtaaatttttttttgtagtatttgtcatttgaggcaattttacacttctttcactgtctagtgttttcatacgcactgttagcagaaaaggttatacaaggatatataaaaagtttgtgactacgcatgatagttgctaacctggattaacttaatcttttgcttttattatttgtttgttgaagattctattgttttgattgtctttagttccaaaaaggatgtttctttgattcttctctagtctgaaacctattatttgtcttatgatagattcatgtccatcttctagattcctggagtggttttgtttatgttcatcaggccttgtatttgttgatttatttggatcattccatttgatggaagttatgtttgtgacaattatttgatgtttttcagattcatacggctgcca

SEQ ID NO: 81459 - DNA, 262 bp, Citrus sinensis
  Intron number 1 from transcript orange1.1g048394m (locus o range1.1g048394m.g) derived from phytozome v7.0 (chr-ID sc affold11969; pos 601 to 862)
cacttgaggtcttccattccttccttgtcctcgataatatataaatttaaaatttctctttgctagattgtttttttttcctaagatttatattctttttgaatttatttttttgttgttctcagaattaaatgcctcagccgaaatattctatcttttatatgaatgtattgtgtactggtatattttgtgttgtataatttgttttgatgattgtgtttaatttttttaatctttttttaacaacaatgcaggtcattga

SEQ ID NO: 81460 - DNA, 958 bp, Citrus sinensis
  Intron number 1 from transcript orange1.1g017921m (locus o range1.1g017921m.g) derived from phytozome v7.0 (chr-ID sc affold00158; pos 291824 to 292781)
aagtgtattcagtgtggcaacgtcgctcgctcccggtaactatttcattctttcttgtttcttttttctttttataattttttctaggtttgttcataagagcatgatttatcttaaattgatttcaagaacaagaagcagttgatttcttggcgtaacgctaattgattgatgaatttaaatattttattttattattattaatttttgcaaatggtgaaattgcatttggacgtttaaaatttccgctaaatagaaggaaggtctcaaaagtcaaaacttaattgaatgtgatgaaatctccagaaagctcggatagttggattgatcagattataagcttattgttagatattaacacgacgcagtagcacatgttgtggattcatactttttaaaattggtttgtgtcaatcttcattaactgttccaagttattgatttggagttgagttgtttcctaatgatctcaacttctaaagttttaggggaactgacctagttggtgtttgtgcgatgactttaacccagtacttggtcaaccaccgaatgcatgttgtctatgacattataattactattatgggatatttacaatgtttacttatcctgtattcgttatctgtgttctaggggaagtacatattagtgctcagcttaacttgactgatacaattcagcattgattggacaatacattttgatttagcttgttttcccggtactctagcagttgttactgatggtgcttaagactgctgaaaatgttttaagggactgcccactgcgtagtttttgaattgatttctgagatttctgaaaatatagatgaatctatgaaatcttattacatcacaagcatcacatgcattcttctgttgcccagagctgtttgaggaattcatatattctcttatggtaatgaattggattacttgttcaggtgcccataccagtc

SEQ ID NO: 81461 - DNA, 662 bp, Citrus sinensis
  Intron number 2 from transcript orange1.1g011054m (locus o range1.1g011054m.g) derived from phytozome v7.0 (chr-ID sc affold00028; pos 1117628 to 1118289 reverse strand)
agggcttagctgctgctgctaagttgtccgaggaggttgtgtttttatttcgcagtttactaatttgtattcctaggccaataatcttcttaaattgtttgagaaaatatttacctaactatttatttaaattgttatatattttagtaatggaaatttatcttaactatgactattaaactcactagttcaggttttgggtgatgtagtgttcagaatgcaaaaccgtagggacttttttggagtatttaaagaatgtgattatgttaggccaattcataggcttgatagaaaacttggaaaatgtttggtctaaaaaattaacatgtttagcttagaaaactattttcgatttatacttcctatgtatccttggaccaatgcaaaatgatgactggtcttagagttctccctttcttggatttccttctgtaaggaagtgtaaatggagtttggaaataatttgataccctttatagtttgttgcactcaagtgttgctgctttctttgttgttactttctacagttgtgaagctgtacgaatgtgaattttctatgaaatcaaatgactcaaatattaatttctttttcttttcttttcttttttttcacttggggaaatgcaggctaaactcagagaggcagcgtcattggagaagca

SEQ ID NO: 81462 - DNA, 470 bp, Citrus sinensis
  Intron number 2 from transcript orange1.1g021156m (locus o range1.1g021156m.g) derived from phytozome v7.0 (chr-ID sc affold00018; pos 90914 to 91383)
cagttcgtttccgcccttgcattgacatacacaaggtatattacgaccaatcctgtttcagttattcatttatccttttatgtcaacgacttacttcattgttggatttttttctcttgtcattaaatggttttagaagttcgatttttaattaagcatttcggttatagcaaactcttttgaaatatttgctcggtaacttatttggttttcatttaaatttaagccttcatatttttctttgatatttaacatattaaaagaatggattagaatttgaaaggatgattctgaggatttgtcccacatgatttaattatgtaggtggtggagtagaagcaaaatttgtttcatcttttatttttactggggtgtgtgtgaggctgaacttattaattgcttgatttttatgaattaaagtaattttcttatcagggaaaagtgaaacaaattgttgggtccactcttca

SEQ ID NO: 81463 - DNA, 803 bp, Citrus sinensis
  Intron number 3 from transcript orange1.1g021156m (locus o range1.1g021156m.g) derived from phytozome v7.0 (chr-ID sc affold00018; pos 91548 to 92350)
cctatcctggtaaaccctgtgtttccttcacttttaatagggattgtattatcatgagagttcagtattattttgttgtgttttctttgattcttacatgttagggattgtattctcatgagagtttagtattattttgttgtgttttctttgatccttacatgttaagaaatattaattaattttatcaatgattttggtggatgttagtgctttataattacagaagttgtaatcattgggcttattatcataaccatttaaaagaaactggatcatctgctacttggtgatcaagagcatatagctggacaggcttgcatctacaaagtgaagtgaagtaaaaattgcctggttttaatttcctaggacaatttggattcgtttaagtttgagattattttagttagtatttcttgttcttatttttattacgcctagttggggttataagtttagagatgtcacttataccgaacagaatatttatcctcgagcaggaatgtaaattgaaatcttggttgctgcaaaatttaaatatatacatgtatgaaatgttttggactatcttcaaccaatggagcatggacagaactgcatgttggtttcttggaagaaaagattttctactttggctcacagagattcaacgtgttgagatttcttgtgagcaacctgcttctttttagatatatatgtttgatgatatgtttaaaacttacagatttttcctctgctgaaattactgcgaggactggataactgtaggaggtttgcaagttggaggtgggatcaattctgat

SEQ ID NO: 81464 - DNA, 834 bp, Citrus sinensis
  Intron number 1 from transcript orange1.1g024814m (locus o range1.1g024814m.g) derived from phytozome v7.0 (chr-ID sc affold00068; pos 570466 to 571299)
aagagttgttaaaggtattgccttcttgtttgatatgatcagatctgttttctttttctcaaaatttttatgttgatttgctttgcttgacttcttttttttttcacggttctcttgatttggtggtttttatgtatgattgttggatgtcaattaaaaaaaaaaagaattgttgctttggttcttttgttctggtttgtaaagtggtgagatcaggtcaaagctaaccttaaaaatggactttttatttccttttgtgcttgtatgtgtattttgttggcggtgttctatgtttttgtgaagttcccatgttattattttgtttgtggtgttctttgtttttgttaagttacatgtcatttggtttatttgttgggaagaaccgagggaataaacaagcttaattaatcagttaaattaggttgattaagcatccaaaaaataaagatgtattaaatctatgtgattctttgagtgagcatcattttttttaatattaaaaaaaaggaaagaaagaaaggttttgagacctcatggatttgatgttctatctatttgttgagtcttctccttctttgcagttcacctgaaaattcacatagtttgtttggtttaatctcttaacttttgatatcatatttgtcaaaaaaaaaaaaactctattgaatccttggagttttatttttcctttccttttttttttagtttggtttttcaatcagcttttataacatgtttgtagaaattatacttgcatgatttgcaatttgtattcggaactttgttattgttaggtagtgatcgatgatttaaactattaattttttgcaggaa

SEQ ID NO: 81465 - DNA, 721 bp, Citrus sinensis
  Intron number 1 from transcript orange1.1g038289m (locus o range1.1g038289m.g) derived from phytozome v7.0 (chr-ID sc affold06632; pos 2314 to 3034)
ctactgtgcttcttggaaacgggaaaactatcaaagtaagttttaatttcattcaagaatattttgttttttatgttttaaaacttatgcttctgaaaactaattttagaacctaattaagatcacaacaaaatgtatgcttagaaatatatttattgataaaatttttgctttgcaccgtttcgttaggctgctgtttagcttgccaagaaaattcgagcaaaaatgagtgaaaaagcgtttctctaacaaagattttcttgttaattatttttttaaaaggaaaaatgctaaagcaactatagtgttgacagaaattagataaaattggcgttagtttatcttactttcaattgagtaaactagctagcactagtttcattatcttacttttatcggcgttctgttaaattgttctgtgttgagagtattattaactttcaaaagttaaacaaacaatcacttagattccatttggtattgttttttaaatgttgtttttgaatatagagattattatttttttcccaatgtcatcaaacacatgtttactattcttaatttaaaaaaaaaatagacgaacaatattaaataagttttccaattttaagaaaattatcattttttaaataaaaaattttctcttactaatttgtaaaagctaattagcataattttgctggtagggatctgccattagtttatcaaacctctcgagctc

SEQ ID NO: 81466 - DNA, 696 bp, Citrus sinensis
  Intron number 1 from transcript orange1.1g041704m (locus o range1.1g041704m.g) derived from phytozome v7.0 (chr-ID sc affold00603; pos 8963 to 9658 reverse strand)
ggacctacaaagggcgggagggaaaattcgttcaagtaagtgggtcatttgttaggaattttatgggtgaagtagagccacagtttaaatgaaattggaagaaaataaaaatcaagcacaaagggaatactaaaaaattacgtggttcagtttttcgcctatttctatgggcgaagacagaaggaaaatacttttactagtgaaatgagaatgataagtattgtaatattttagcttactactcagaacaccaatgcactcccaatctctcaaatcactaaaacaagaacttaaaactataacactctcaatcacttaatttctctgtaaagaagagaaaaggaagtgaaaaaaataggatgatgagtggggaaatgaagccttctatttataagcttcatttccactctttttctaattaaaataatatatttttattattttattattttttcttccaccgcttttgatttttttctttttctttcttgtcaaagccatcagcctctattttcctccaaacgttgctgcaccttctccaattttttcttgattcaaacaatgcaacaacaactacatgcttcttcaataatggcgggcaccgccttttgattctggtgtgccgctgcttcaaataccgtcttcttcactctcgtcttagatatttgccattttttctggggttaagagggattt

SEQ ID NO: 81467 - DNA, 430 bp, Citrus sinensis
  Intron number 1 from transcript orange1.1g019954m (locus o range1.1g019954m.g) derived from phytozome v7.0 (chr-ID sc affold00009; pos 197816 to 198245 reverse strand)
gttcctctctggcccttctccttctccttttcttggtaattttttttttcctccccccgcttctgctttgtctggatttgtgtgctttcttttatgtgtgtacttcgtactaggtagatccttttatgtgtttcatttttctttgcagaaaattggattcttattagtacagaaaaatatgaaagtttacacctgattgtttgcttgtttagatggaaagctgtttcctaatgagtgctctgtgaaagtcaaaatttttatgtgactttcggaagatatgattgcctctttactaccgatttctatgattattggcaactctgttataggaacattgcatacctttattgaatgggaaaaatatgatgtgtttaaacgtaaaggcttctgaattttaatgacgtctttaataaattcaggaccaagatcc

SEQ ID NO: 81468 - DNA, 758 bp, Citrus sinensis
  Intron number 1 from transcript orange1.1g019290m (locus o range1.1g019290m.g) derived from phytozome v7.0 (chr-ID sc affold00019; pos 1007600 to 1008357 reverse strand)
ggttggactgagtttgctacgacggcccctcacaggtaatcaactaagaatatgcagcataatgcatgcatacacgttaatgcattcagatcccaccctctaattactatttgggaagaaaccatgcaattgcatgccagtatctgatttttaagattttctaaaaaaggaaatcaataaaatgaaatatgtgtgtgtagatacaaacatacgcttgtgtttgtagggcctcgtacttaccgttaataaaatttgaacacggtaggtataatagtaataaacttgtattgattttaatctgtatgtcctcaggtttttaatgatatcagcatcagcattaattgaccggactatgttttgacctactgcagacatcctctattgaattgaactctactgaactcgcttttaatctgagctctcctaaacttttaacaattaatcttatgccacttatcttttaatgttaatatatgattaaaatttaattaattttattttttaatttatttaccgttagttacatgagaaaattttgtttaaaaaaaaaagtctgagaatcttagatctctccctaaaaccacattgacatgctttagccttttcttatcatcattgtcaattttattttgagaatttcgtcgaaaaacaaactggcttcggaaaatagcactaaaaagggtctaaatctctagtgttttattgaaaaattcagttaacttattatttggaatttatttggttagggcaagggaaat

SEQ ID NO: 81469 - DNA, 705 bp, Citrus sinensis
  Intron number 1 from transcript orange1.1g025944m (locus o range1.1g025944m.g) derived from phytozome v7.0 (chr-ID sc affold00515; pos 11677 to 12381 reverse strand)
ttcaactggtgaaaattctgtggagaggtatttgtttatttattttaattgttgccattttttgtttttctgctctgatttgatcattattttcatgtatgtacaatataggagcttctgtgaattatttgtacgtcttttttcatggttttatttatacgcatcaactgggtaaatttatatgtgcttcaatgttaaatgtggattgcttgttcttattggtgttgaggaagatcttgtgtttgtgttagttttgtcgttaatgtaattagtccctcactgacttgcctttccaatcagtcttttgtttgaattatgtttggatggatttcctttgatgccatctctaaacccaaaactattcatttgatttgcctttgctaatggttcttaagtagcttttctgggtgagccattggtcactcgagttggaatttgaggagacaagagactaaatatttgatttcagattgtccaccccttttttttaattattatgaaaaggataacaatcgtttgattttcttttataattgtactgcaaaagttgttaccttcttgttttgctcatgccatggtggttgagggtttagaatcttttgcaaactttatcactcgatgtttgagagcttatgcccttctgattgtgagaatatataccttgctttgaccttgtttttgcctttattttgtgctgcagcaaag

SEQ ID NO: 81470 - DNA, 572 bp, Citrus sinensis
  Intron number 1 from transcript orange1.1g034753m (locus o range1.1g034753m.g) derived from phytozome v7.0 (chr-ID sc affold00006; pos 73729 to 74300)
cgttcgccgcctcttcgaattccttgtccagtttggtatttatttccactcttcttcttttcatcttcatataaatataactactatgagccgatcgtttgagatgatagtggaccgtttgaaacttcttaatatccatttcgtattcagatcagacggttacaaaatttatgcccttaataatataaatttgttttatcaagattagggctagatgttgattggaaaaaaaaaaaattctgaaattttgaccattgatttacgttttcagaaatgttgaggcacaacttaagcttgtaatgttcttgcatgtttctgcacattactggaatctaatttacttacatgaagcaacatataaagtttgttcactcattaaatccacattgagtaactttgagttgtaatttgagtcactttggaagttactctgtctgttctcatttgatcttcaaggcggtatttgattttgtgcatgtgttaaagtgagtttgatttgacttttacttattggaccattgtttgatgctaatttagaggctacaacaaagagcaaattggcgttgttgaat

SEQ ID NO: 81471 - DNA, 636 bp, Citrus sinensis
  Intron number 1 from transcript orange1.1g031076m (locus o range1.1g031074m.g) derived from phytozome v7.0 (chr-ID sc affold00041; pos 346781 to 347416 reverse strand)
tctcccttgcgtcatccttatcctgcgcatatccggtacgttatcctacgcaccgcctctcccccctttttcacttcatggatgccaatcatctcatattcgctcgtccttctcttttcttttttaatttcagcactttaactaaaatctccctttatgttattttgttcccattaaatcccttctatttattattattatcattattattattgaaaaaatcgctgttattttttcccaaaaataatatacctttttcccttttgctttttgttttgttttgtttgtttttttaagactacatggaataatcgacgcatacgtacaaattaagccaacttgctcaaaacgatatgtttgaagattttgaatcttgcaggcattttgttggccctccgagaacaatttgaagaaattaggatataattagaatacaattaagcagtttttattttgtttctttaggtttaggattgcgttaaaaaaaaaatccaagcaatcgattttcagatgatttttgggggaataccagctgaggtattcatatttagttgtatacagttaataagaattgtgatgtatatttattactatgtgatcatttactgtttgttcaatcaagattggcagagaggg

SEQ ID NO: 81472 - DNA, 578 bp, Citrus sinensis
  Intron number 1 from transcript orange1.1g031541m (locus o range1.1g031546m.g) derived from phytozome v7.0 (chr-ID sc affold00193; pos 148413 to 148990 reverse strand)
ggttcttgatatttcatcatcaaccccaactttgggtgagtctctttgctcaatttgtttctgttcttttctgggtttgttttaaatgctcatttgttattattattattattattttttttcattcatttgctcggtgaaaagttgtgtttgttgttaattgatagatctcttatttcaatatttgatagaaatttggcatcttgatttggtatcatgttaaagatgtcagtttttattccatgttttgtgatgatgatgatctttttttgtatttttcacgagggcatttccaattctttcccatattttatattcttcttagaaacgttggatcatgattatgattttattgtgaaagtgattatttttatttcttttattagctgcagtgttgttttgatgcctcggattttatgatcatgggttggatcatttggatttctgataagatgatttcccagctggggttctgggaattttatgagctttcttttatttcttcaaaggtagcttatattgtttgatgttggtttgttgcaggttggaattgctatcttcttttggctctttttcag

SEQ ID NO: 81473 - DNA, 636 bp, Citrus sinensis; identical to SEQ ID NO: 81471
  Intron number 1 from transcript orange1.1g031093m (locus o range1.1g031074m.g) derived from phytozome v7.0 (chr-ID sc affold00041; pos 346781 to 347416 reverse strand)

SEQ ID NO: 81474 - DNA, 955 bp, Citrus sinensis
  Intron number 1 from transcript orange1.1g022111m (locus o range1.1g022111m.g) derived from phytozome v7.0 (chr-ID sc affold00028; pos 678789 to 679743 reverse strand)
ctactggtcggtcttcgaatccgctcctctcttaggtaattatttagaatccctttgtctcacttttgttacgtttcttcgaatttatcatgttatgtgtaagcaaatcctcgttagattctcagatctgctgcgttttacatgtggctctctggttaatttgattttatcactagctgaaattttggccaaaaattgtttgtgggtaaatcattgttagttgttccattttgatctgggtaaggcacagaatttgaatttgtggtatttgatgtttgggttaggttttatgattcgattgaattttaggtgtaaatgagaatctcgtgtgttgtcttgtgtgtgtatagtggtttgatttggtaatctttgatgattcgatgaatttgattagttggagttcatcattaggcgaaaacaaatcttacaagaaagtgattatttcaaaatctattgtaattttaaacattctcttagtacatggttgcatggtgttatgaaggccgcagctgaaaagcaaagtttgaataatgctccaaaaagggaaaccaaattttcaagtatgtcaggccttggaaagtggtggagtgaacatggttgtaggctttaatgaagtctccagcgactgacaggagctgttactttgcaagcatgcagtgactagtgtgattagggttcatggtgtaatgtgaatattgggaatcaatgaattttgatattgtgatattgtgaatttagatgtagaatggcttcattgaattttgatctattcgcatttgaatattggcaagttcattttttttttcctgcaacgattttgttatcattgctgttgatggtgtaacgtgaatttcttatagaaatttggagctgagaacataagataaaaaggagctacgaactagtgatcaaggagttgaagtttgaggggtaaaataaagaaatataaagtaag

SEQ ID NO: 81475 - DNA, 1061 bp, Citrus sinensis
  Intron number 1 from transcript orange1.1g018337m (locus o range1.1g018341m.g) derived from phytozome v7.0 (chr-ID sc affold00171; pos 128892 to 129952)
tctggaaaaaaattgtcttcgtttaagcttcggcggtaaggtaatcaaaattctgtaattctcttatgaccaaaaatatgttatttttattatggattatgaacttaattaatgaaaatgttaaatgtatttttttatcaaaatgatgttttgcttgttagttagcttagttcaactatataggaaaggaaattgcaaaattgtaaacttcttttatttttttagcatctatttgattacttgttcttaaaatttatctgcatcccagcttaattttattttttaacgaacttgatactatagtatagcattagcttattgctgcaccggaataatctataataacttaatgatgttatcaaattggaaaacaaatttctcttgatatagctgaatgaattttggcttgcattttatgggttttgaaaatggtagactgtcattgtttcattctagcgatgtctaaagtggaatttttggttgggaaaagagtggaatttatgctacggagaatgattcatggagaattttttgcatacgaagtggcatatgatagtctcatttgaacgctgcagcaacaagcactattttgaatggtatttgaaaaaaattgaagtctcaaaataagtctttggaagtttttctgacaggacaagcatcgagagcccctcctcttgtccaatttctctttgtttcttcggaaggtttggtcgcacctttaatgggaaaacggtttggatttcacatattaatgaaacaggggcccacaaaaatatagctcctaaaaagcaacattaattcttctattaagtttttgtgtatatatgttcattatcggtagaactcggatcattcctagatgctttctgtggagtagatgtcttggctttgtacaaataactcctgcatgctataataccaaattttcatttttagtctaaatagaatttggttttagttaaaacactagcattttcttttgaaatgtaatttcaattgtaacatttcatgttgtactgtttatagagtgacaactgaaaagactgaggaagttttcctga

SEQ ID NO: 81476 - DNA, 614 bp, Citrus sinensis
  Intron number 1 from transcript orange1.1g019236m (locus o range1.1g019236m.g) derived from phytozome v7.0 (chr-ID sc affold00096; pos 351123 to 351736)
aaccaactagtgcccctgctgcaaagtaagctcatcttcaattttctttttctttcatgggttgcttttgtttatacctattacttttttttgtttttttgttttttgcctcaaggaattgactttatgggcagaactcagccttgattttgtttgtatgaagttctgctttcctgttatgtatctttgttacattattgtatagttttaattaatcttgagtatatgtgtctcgtttctttagtttcgaatgtcttggtcgattgatgctcgttcaatgcttacgcttttgttttgaacttattatgtctttactttgtatatgattaccacctcatttttttaattcaaacgtttctctgttgttagtctattcggtttagttagtgttttgtagaagaatttcactgagctgcatataaaatatcttcaaatggaataatcggcccttctttcacagctagatcataaatttgtttgtgtactatttatatttgctcccttttagctatttttgcattttcttcttatgttgtattcatagatgtatgagcacagttcatgtggatgcattattgagacaaatcttttcgtgacagggcacaggtggtggg

SEQ ID NO: 81477 - DNA, 676 bp, Citrus sinensis
  Intron number 1 from transcript orange1.1g007529m (locus o range1.1g007529m.g) derived from phytozome v7.0 (chr-ID sc affold00342; pos 63370 to 64045)
ctctactataggtatgtcttttcattagttgaacagcattaccagtgcattgcagcattcatattagagttcaagaagaatgtatttgcagaaattgttagtgacaagcaaaactttaaattccaatctaaatattaaataaacaaaaacaaagttcataccattgttatgcaaagttaaatgattgtccataaacttagtttatatgattattaagaaaaatagcttgagattgtccgcatactagagattcacttagagatcctccatagcccattggatcatatggatataccaatcattgacaaacacgcgtatgaaaatcctagccagggcttatttatgtataatctagtgattttcctctgccgtttaagattaagctgctcaattaaactttaattatcaattacagagataagtctgacaaatgccaccgtgcatgtcatgtgatcctaattcaaaattaaaacattggcatcattaaacaattacgtaaacatatggtcggcgaatgggttgcatcagtggttggcaccttagtaacagtaagaagaaagagactgcgtaacttctatgatttttatagtaactcatcctctcttaactttatgttttttacattttttcccttatgataggttgcctgggaaaaagactaggaccaaggatcctg

SEQ ID NO: 81478 - DNA, 498 bp, Citrus sinensis
  Intron number 2 from transcript orange1.1g011131m (locus o range1.1g011131m.g) derived from phytozome v7.0 (chr-ID sc affold00043; pos 650536 to 651033 reverse strand)
ttagcagccaggagcattgcgttggtgaattttctgtaattaccgttgctagtcttgttttatctcaaatattctaattgttgtgctattataactatgtttttgttttgtgaaattacctcatctgggttatgctgcttagtttgtatacttatttgcctcgactttctgttaattgcaatttttgttgaaaaactgaagaaagaactttgaaatcttacgcacctgtttctaccatatttagcagaggatttgatcgcatgtcatcttagaaatcttttataatgtttctccacatcatgcacccttattaggcctgtggcagcacttgtgtagcttcttactttaataattccatttagacaatgatgctgggttctgcattttgatgcctgtaatggtcttggattatgcgtcctgcttatgtagtaaatcattcactctgttttattggccttagcaggaccttgcagtcagctattggcatcaaattccatt

SEQ ID NO: 81479 - DNA, 638 bp, Citrus sinensis
  Intron number 2 from transcript orange1.1g033158m (locus o range1.1g033158m.g) derived from phytozome v7.0 (chr-ID sc affold00396; pos 50421 to 51058 reverse strand)
ggagtgaagtttgtacgggataacgacaaaaataggcaagtgatctaaccgctggcttgttgagtaatttgatgaataatgtgttaaatgataaatatcaaatgttattcgacctcaagccaaatgttccacaatgattgatcacgatcctttggcgttgacaatattcctagataggctaatttgatcttccccgttaaaggtgttccatgtatcagctcattttgatttgtacataattaagctactgcaaagaaaattggtcctcccagatttcgcacattttcaacttggcattttggcttgtatttttaagtttgttcatgatatttcaaattattacttcttatggttgaaaagtattatatgaattagttgaaaacatgattatgaatgctaaacaagattgaggtcactgaaaatatcacttcctttacctgctattaattatgaaccctccaaggaatatctttcttataaatgattttctttaaatccaaaagggaaagaaaatcatagaatttgtctcttcaaagtgtttcttagctataaatctgctcccaatgactgttcttcttcatatctttgtctggcaattgacaggagaatcaggtacgaagctctccagagtgaatcag

SEQ ID NO: 81480 - DNA, 476 bp, Citrus sinensis
  Intron number 2 from transcript orange1.1g029553m (locus o range1.1g023825m.g) derived from phytozome v7.0 (chr-ID sc affold00076; pos 475514 to 475989 reverse strand)
ctaaaggtcctccttcacctgtccaggcattgttgggtggattaacggctggtgtgattgccatcattctttataagttcaccactactattgaggctgctctcaaccgccagactatttctgataatttttcagtttgttcttcgattttcctttctgatatttgaatttaatggtttgtttcaaattggttgagctttcttttacatatggtgactaggctttagaaatactttcatcagattatttaggtgaaacggaaaaatgtaggatactaatccctggaaaacattttttctttttggaataattactctccttcttccagttaattgaacacagtgctattagaagtaagttgtgaattgtcttatgactttcctgtattattaagtagtaactgtccattgcttgtattaactttgtattcctgattttcaggtgcgtcaaataacaataacaataaggtagctcct

SEQ ID NO: 81481 - DNA, 238 bp, Citrus sinensis
  Intron number 2 from transcript orange1.1g016542m (locus o range1.1g016542m.g) derived from phytozome v7.0 (chr-ID sc affold00375; pos 41946 to 42183 reverse strand)
aattctcttactacaatctccccaaggctgctaaggtaattacttatttctttgattactattattactattaaacttttcaacatctttttacttcttcttctttttttcttgattttcttttttctaccttttccgtcggttgagattgatctttcatggggcctctttttgtgttaaggaatatatgtgtatttctttttctttctaattttttttttccggtttgttttacagg

SEQ ID NO: 81482 - DNA, 628 bp, Citrus sinensis
  Intron number 1 from transcript orange1.1g033895m (locus o range1.1g030248m.g) derived from phytozome v7.0 (chr-ID sc affold00396; pos 80055 to 80682 reverse strand)
gcatagagtcgatcaagtcccttcagatccgccaggtccttactcagggcgtcagtcttggttcgccccttaaaccccctttcatcttctctcgtaaaactcttgatttgtgccttaaaatttgatttttaatattgtgttaatggttggttaaatgggtatttaaaaggaatacgtattgtatttgttaagtgtaatgcgtcaagttttgttctttgtgataattatgggatttgtgtatcgttttcgatgtgggattttctttttcgtgcccaaatcctgtactctgcacgttgaggtgggaatcattaggatttgaaagcatgccttttgtggatttttattatgttatttgattcgattcttggaggtactgtattgcaataaagctgctgaaaaaaaaaaaacttttttgtttctaattgttttgaactgtgaaaataatttggttaccgtgtcattatgggtcttggaatgccggttgctccagttccattagaaaattatacccacttctgcaattttgattctgaatgacttgtcagaaacctttaattgaccccaaagaaaagggaagaagagtagctaaaatatatttttatgagactaatttaattttgtttcaggt

SEQ ID NO: 81483 - DNA, 793 bp, Citrus sinensis
  Intron number 4 from transcript orange1.1g038881m (locus o range1.1g038881m.g) derived from phytozome v7.0 (chr-ID sc affold00647; pos 13753 to 14545)
tggtgaagataccattattggaaatcttgatactggtgagttctagtttttgttttttggaaaaataaaataaaattatttgaccattttagtttactatataatttttttatattaatataatttatctatactacatgacagccactagatctaacatatggtataattattaaattagagttccgattttttgactctatccatgcgtggaaagaaagataattcaccataatatgactgagaaaattgaaaacgatgttttgattgttaataatttgatacagtataaacttgaaattcatatgaaccatgtttgtagacaaactctcctttttgactaatccaagttcaccaatgacaaaattatttgatttaatggtttctagatgtttaatatattcaactttagacaaccactttcggaaaaaaatgatcgagctgttgccgaataaagaattcttctccttatgtaacttgaaattaaattcttactttttaggtttgcatcagagccaagaccctgtgcaaactctaatttatcaacttaagctgttgggtctaatggtttctttaatccatagtgggaacttacatgattgatttcttgttggaaaaatggtccagatacatatatgttattatgaaacactatatgatatcaggtgtgccaatttattatttctttctctttcactatcaagtttgacattctgttataggaatcacttttgcttcaatggggattattttgttgtgttaggtgtctggcctgaatcaaaaagctttagtg

SEQ ID NO: 81484 - DNA, 835 bp, Citrus sinensis
  Intron number 1 from transcript orange1.1g039640m (locus o range1.1g039640m.g) derived from phytozome v7.0 (chr-ID sc affold00739; pos 8592 to 9426)
tcgactttgcttgcaaacaatcggggcttttccaggtaaatttctttttcaaagttagtacttgtctttgatgttcataattgcttcttctatctaccacacagttcaaatcatactgcatgcattaggattagaaagtcacactcactaaggttaagtaactcacaagcatgaacaagagtcccttcttcagagaaacattttgatcaccgtggcgtgttccggacaatgagcaaaagatgtcatgcctacacattagtttcaagaaaatatatcaatatgtaaaatagcaattatactctacaccgtctgttctgcactttttttaataactaacttgagactattttgctgttgtatggttttgctaataaacttaacaggaaactcttattcattcttatgtttgtgtttctggcatatttaaccagttgcaagcaacaagttctttcattgcatgatagcaatacgaatattgcaacaaattttgaggttatggattctgcgtcatgcttgggtgaagcattacgttataagaattgagtgaagctgtactggctggtttttgatcttgtaaagtttcaaaaagcaggaccaaatttgacgcctccttattttcaaaaattaatttgactaaccccaaaaagaatcctcaattgaatgcgaaacatgagttttacaattatttaaaatcactatgtagtttaatgttacagtgatcttagtgtactggaaattaatctatgcttatatacattgctgtaattgaatttggtccctaaatgagtcaaatttgctgttactcctttttttttatcatatcagctggtaaatc

SEQ ID NO: 81485 - DNA, 534 bp, Citrus sinensis
  Intron number 1 from transcript orange1.1g035092m (locus o range1.1g035092m.g) derived from phytozome v7.0 (chr-ID sc affold00037; pos 843116 to 843649)
tttgtgcggtgcaactgattactaaatttggtatgttggtatgtaatgtagaatgttttttctgaaatgtgggagcaaggtgtacatatagctgcattcttgataacatgaagctggtgaaaatttccatcaacatctgaaatttgagtttcaatgcacccctagagcatagtttaattgtatatctcctttttgtcttactgctagaggcctagaatggataatacaataatttactttcttctatttaggttggtaaatcttttgagaaaagaaaggaatagtattaggtacattggaaagtttagaccatagcatatccatgaatcaaactctacgacacaagtgtattggttctaaactagccctttgattgaattttgggtaatcttttttactacagattagttgagcattttagtgccattttttttccttatatttaactctcttgccagtccttgaaataattttttcttgatatcctgacttgctcacactttcatgcgcaggatcattggagaatttgttgca

SEQ ID NO: 81486 - DNA, 576 bp, Citrus sinensis
  Intron number 2 from transcript orange1.1g035092m (locus o range1.1g035092m.g) derived from phytozome v7.0 (chr-ID sc affold00037; pos 843652 to 844227)
gtgtttatcaagttgaggaggaacgcacaagaaaggtagaattaactagttataacattaatcaggattttatatatatatatattttcattttcttcctttttttggcgagtgggttgaattgggtcaatagatggagcttgttggtgcttgttctagtctagttgacaataagtctccaattaaggcctccatatttgaatttatgtggtcatccaggcttaatgatgtggttaggattcttgctggatagaaaaatacccccagtgacaaacagacatttactggttatgcagtatggatctaagtgtctatcatatttatgttttgacaatttaaacccaaaagccagttgcaatacattggctttaagtcggttctgattcagcttgatatttgctgcttttacttgattaaattttaaatgatcctgatggcatacaatcaaaatggtgtgtgtgtgtgtgtgtgttttaaatttatgatcacaatttatagtaaaatcatggttcaaaatcttttattcctttatctcatgcaggcgttgattacttttgctgatcaagctgttctaag

SEQ ID NO: 81487 - DNA, 893 bp, Citrus sinensis
  Intron number 3 from transcript orange1.1g011014m (locus o range1.1g010579m.g) derived from phytozome v7.0 (chr-ID sc affold00028; pos 486368 to 487260)
aagtggggagcttcttgttttggatagtgaaaacagtaacatttacaagatttcaacttcgttgtctccgtgtatgtttctttttgttagaattctcagtatgccgtgtatgcttcatcgtattcttctgataattaagttggttttattcagtaaatgagaatttaattttccttcatttttctgttttggaataattgtggtacttaacttcatactagggacatcacaacgaccaatatgttcttttttttccctgacagactctgaaatgcctttaaaattattagattagagtttaaaatgcttttgttaagtagaagtctccacttttaaaagtacaagacaccttttagttatgtttctgcatacccaaatcttactttgtgattagcttcacccttccactttttttttctattttaggactgatttttttttcctatcaacaagacttgttttttactcaacttttactgcttttgtactttatctttcttatctaactaatttctgtacttcattaaactgaagtatcttgatttcgatgtgagaatacctttaagcttcttccagaagcttaaactttttagttccttgagtgatgcgtaaccaattcttcttttgttgtatagttgtaaatgatatgagctaacttgttttcttgaacagaacagttgctcttttttttttcaatttaaggaaaaaagaaaaagatgaaaacttcttacttcttcagccacattcacagttttaatttaccaatttgagttacttcttcttttgtctgctcaacaagttgtttgagtagacattgtcagtccttttatgaggtaaatttaaaatgtcaaacaacagatagcaggcccaagctagttgctgggtcacctgaa

SEQ ID NO: 81488 - DNA, 939 bp, Citrus sinensis
  Intron number 1 from transcript orange1.1g031999m (locus o range1.1g031534m.g) derived from phytozome v7.0 (chr-ID sc affold00091; pos 234522 to 235460)
agaagccttcagcttgttcgacaaggacggcgacggtctgattttctctcttcataatctctttgcttttagcgttggattttcttatagatctattttttttccctctattcacgaagctgttgatttttggaacgtttttgactaattaaagctctgatctctcatattttcattgattttcgatgtgtgatgtgattttgttgattctgtaattgatgttcgattaattggatgatataattgactgaacattaggctgatgcgtttcgtatttaaaaagctgcacattgtttttgtgggctttgtttgttatgctttaatattgttttgtacatgaaagcagtcgattccgaatcagacccgtggatgttcaagctctatcgtagtgttctttcattattaaatgaaaaatccttctgattcactttgcctagaacaagttcttattctgatcgaatgatgcttgccaaccgcacaacataatgggctttacattaaattctgtaatacttattgaatctgcttcttactaaatttctggatagttcggcacattctaattcaattatgttttgggatttgcatcctttatgctcgttttgagaatttgctacttgtattgttttatctattgtgcttgttacgttttattgtctgctgttatgcttagtgttgtttttagactgattgggtatacttatcgtttgccaaaatctagtcagaacacttgtctcatgttgacactgtattgtattttgataaatcagcaatgtttagcaagttatgttgcctagctgtcagcaacttcaccaccgagagctgtactgcttagcatttttgttttacgtgagtatctaaaaattctgacagctttgtcgtggttcatataatattggatttgcaggttgcattaccaccaaggagcttggcactgtt

SEQ ID NO: 81489 - DNA, 976 bp, Citrus sinensis
  Intron number 1 from transcript orange1.1g010212m (locus o range1.1g010190m.g) derived from phytozome v7.0 (chr-ID sc affold00088; pos 317734 to 318709 reverse strand)
tttggtctctcttactcatctttgttcccgttgaggtcagtttatttgcagtttctgctctctctgctccctttttttggggattttttttttcttttcaatgattattatgttcaaaaatataatcttgaatacgggcgtttagtgttttttttttatctttatttattgaagctcgatgaaagagatcaaagttgaagttctctttgcagttttgcatgcaaggctttgaaatgagagattgtttttggagaagaactgttcataaattttgagcacatccggcttttctatgtgccaattcttataccaaatatttggtgtatttttagttctaaaatttgagacttttgttgcacagaaaaccctttctttgcctcgtgttaaagcattatattgtgattttagctatgtgttattaaaagcttgggattaacctctgtgattgcttcccctgctattccaagttcaggtatttagagttgtttagagccctgatcaaattaattcctctgaaatttttttttttccggttatttccaatgaaacttaaactgttacacgctttacactgctgaaatttttgttgctaattgagagagagtggagggactgtaaataattgggttatcaacactttattggattattattattattattattttaataacactttattgacccatgacttgcttaaaccctatcttatcattgtcaccgaccacatagtcaatgacttaatggtcctcacttggactctttaatgagttcgtatgtttgtggaaaagcctggccctcttttttgtcttcctctcttttgacctgttcttttattttattctttttcttaattttgtttgttgcagcataacaatcacaaatcatgtgtttcttttaattgtaaaatagttgtttttcagggaaacaatcaagctcagtgcggcagtgccaaagcttgtgacgagagctactg

SEQ ID NO: 81490 - DNA, 644 bp, Citrus sinensis
  Intron number 1 from transcript orange1.1g025781m (locus o range1.1g025781m.g) derived from phytozome v7.0 (chr-ID sc affold00277; pos 85438 to 86081)
acttctctagctttgttcgccagctcaatacttacgtacgtttacaaaatatcattttctcaattccattttcttcttttatttatttattttaaatttttgccagtagatataaaagatgtatgggtcctatcttaacccaactttagttccttcactagcatttatttatttattttttggtgggtttgtaatagttgattatataataagtgttggtcataaatacatgttaacttaattgatcaaaagattcttgtttgtccttcgaaaaataccactcaaaggttaaaagcaagcagctatacatacacgggcttttgtcagattacttagcatacatgtaggatcctttatttattcaattttttttttattaccgtaaacaaaatttagatcagtttttttagtctgtacctcctctacgaattcggatgagcagcaaaatgataactatttaaaaaccagtcgatgaggcgcaggctgaagagaaatttgattggctaatgcctagctagattgtaaattgttaaatgaataatattcgatttacaacattcatattgagatttatttgttattaaatagatggatgtaatatgaatgcagggatttcgaaaagtagcaacaagcaggtgggaatt

SEQ ID NO: 81491 - DNA, 756 bp, Citrus sinensis
  Intron number 1 from transcript orange1.1g038047m (locus o range1.1g038047m.g) derived from phytozome v7.0 (chr-ID sc affold02004; pos 9981 to 10736 reverse strand)
aattggaagaagagattgaaaaaggtttaaggccagtgggacaaaaggcactaggaaactaacttactcaaaacattataaacatgagcactaattgtgcttcatctgcagagagtgccaatggtccaaatgacagtgtgtgagtgtggtaggtaaagtttttttcttgtttaattattatttccttgaaaatgctacaaatttgctatatatttgatttttgaaattttacaatgattattatcaatattgcagcatgttaataacattttatttactttttggtgtatgatttttgttttcaaggtgacaaagacaaatgaagagaattaaagaaattacatttctttataatttgaatttgaattattgttatttgtaatattaaggatttggtatttggtatttgggtgactgtataatatgatttgaattatttgtattttattgtgggatattatatttgtgttttttttgcttaattttgttattaattatatttttctaaatgaattgtaaacgaatcttgattcgattcgatttgttatggattcgtataggataaacaaataataaacgaattcggattcgattcgattcgtttatcaattctattaaacgaattaaatgaatcgaaccgaatattcttttaataaacgaatcgaatccgaatcctaaaatttcaatttgtttaataaacgaatcgaatccgaatccatagaattttgacccaattcgtttacgattcgattcgtt

SEQ ID NO: 81492 - DNA, 936 bp, Citrus sinensis
  Intron number 2 from transcript orange1.1g042686m (locus o range1.1g042686m.g) derived from phytozome v7.0 (chr-ID sc affold00104; pos 36494 to 37429 reverse strand)
tcattgactgtttggccatccttcccatcccccaggtaaaggcactatctaatttacaattacgtaaattctgtttattgacatattatgtagttcaatccttcccatcccccatgtgcatatcgtaatagtctccgtgattcctgtcatatgtacatcacaaagtggttttgattgtgaaaaagatagatcttcatacgattcatgtcaaggataatgatttcaatgtcatttttccctttactaggattaaagttgtatttagacatataaccctaaatgttttgcatggatattaggggtggcaattttcgttagtgagtagtgttaaatttcagctataggaattcgatactttattaatcttgtcaataatttcaaacaccaactccacctgtctattaataattatgtcacatgcttaatatgctttgaaagtatatttttaaatttgacttgtttacaagtttttaatatatttgtttaattaagatatttatagtactgcctctcaaattcaaatcaattctagtcttaatataactagataattttgaaatatatacaaatagaaagtagttcaattgtatccaaaatctagtcgtacaaccattattaatcaaatagttaattatgtcataattaaataggctcacgtgacaggaacttaaaacctgaagaagtgaacagaacacaaaatatttgtgttccttttcaccaacgcgaacaaactattattttcatgccattggaatcagtttcgcaggtcatttcaaaatttgtcaccccagctataccatcgttttgcacaaaaataaataatcaattttgttcatattcaatatccttcaaaatatttatttccattattccataccaactaataggacaaaccgtccaggttttggtgatttttttggtgatttttggaataag

SEQ ID NO: 81493 - DNA, 564 bp, Citrus sinensis
  Intron number 1 from transcript orange1.1g035012m (locus o range1.1g035012m.g) derived from phytozome v7.0 (chr-ID sc affold00324; pos 141654 to 142217)
cctcggccatctctcatctctgatcaaattcataggtaatcattacattttgtttctcttaatttatttatgatttttcatcattaaattaaatttcatcattctttcaaatattgtatggtattccattccattgtccatgtgttttgattttgtgcctgcttaggtatctaatagattgttactgattttttaccaaacataataagaataatcatcttcagattgaatgcatataatgttgatcttgttttgctttctggggaaagaaactaacttgtgaattagactctttaattggttgttgatgtttcttatcttacgcactggagccaatctgcaatttttgacagccattttagttctttcttctttgaaactgaaactgtcttactcttagtggttttttttttatactatttatctttgctcgcctaaaactcgaggttggttaaatgggttttcaacttttaattaatttctatttattttcaatggagttcaactatttgcttttcgcatttgagtttgtggtttgattgatgttacaggtacagattggat

SEQ ID NO: 81494 - DNA, 547 bp, Citrus sinensis
  Intron number 1 from transcript orange1.1g003125m (locus o range1.1g003119m.g) derived from phytozome v7.0 (chr-ID sc affold00256; pos 81794 to 82340)
gctgagaaacgacaagctagaattacaggtatcaaaattttatataacgaacgcatcataatctttaatctttgcttataaaatgagcctacttgtgctttcattcttataattgagtgtgtgttttttataactatttatgtgcttaattaattgctgagagatccttggttgatcagttgtttacgagatcatttagaagaaggtgtttctattagcttgtttgttcttgaaatcttgataggggaatgacatttttctttgttctttttttgtttattaatatttgttttttgtgttattgacattatttatttgtttattgttggcggctacccattttattttattttttaatggtcttgttttcgatgagacagagccgaacaagtattgttttgttcaattccagacagaagttttgaatagaatagactccatgtaggtataatttatatgagaattttatagttatgagttgttttcattcttgacagtcttagaagcatctgactttgtcaaatgtttaattttcttttcacagaat

SEQ ID NO: 81495 - DNA, 847 bp, Citrus sinensis
  Intron number 1 from transcript orange1.1g026461m (locus o range1.1g026457m.g) derived from phytozome v7.0 (chr-ID sc affold00069; pos 443769 to 444615)
gggtactttcttttctctctgtcttatctttgtgagtttcttttctttctgtgcatgcattatgagatttgccttgctcttcgatatgaatgaagcccttgatatttcttataacaattttttagattttttatttaatccaagtttttttttttttaaatacatatagatcattttggtaacatattagaaagccttgcacagttagattggcctatagctaaaacaatattgcctgcttttgtaaatacttcttgatttatttttgcaatggaaatttggatcgattcatatttttcctggatttttaacgtttgtatttaatattacgtaaatatttgaacctgaattttctagatgtaactgtaatcttgactcagagatgctgcctagcttttaataagaaatgagacttgccttcttcaccttggcgacaaattaattgaataacagttatgaaacagagccaacctatacaataaattcaaatgacataaaaagaaataaattaaatattataaaacaggattcatcttccaaatttacatatacacaatggtcttgtttctttccagtataatataatagttttgattctttgccatagattcttgtcatatattcatcacataatggccttgatctgcgttttcatgtgcatcacataatggtattatcttttctgtatgtgcgtcacctgctaccatatgatatgtgcatgtcagaatgacatcttcatatgatcttatcacttcctctcacttagaatttgtgcacttctgaagagagctttctttttttattttattttatttattttcctttgaggggtcagtcaaaatatctt

SEQ ID NO: 81496 - DNA, 724 bp, Citrus sinensis
  Intron number 2 from transcript orange1.1g047998m (locus o range1.1g047998m.g) derived from phytozome v7.0 (chr-ID sc affold00097; pos 47426 to 48149)
tacttcccacaggtatggttctagattctctgtatggtagctgagaaagtgtgaaaaaggattttgaagtggttattacatgcgtgagaagctactctatgctcataatgttaattggttttactgtatgagttactttcagtgctaaaatatacgagatgtaaagaagatagatggggtttgatgttctgtaaacaaagttgtgagtattgagttcattttgtttaggaaagatagcctagcctctgctgagtcctttgcctcatttttcagttattgaacaaattttgagtgttgatccttggagatctgttgtctaaagtctgttaatgatggtgaattaagaaatattgcttcatgttttggttgcgtcatttgtatcacacagtttatgtcactagggaaaggggaacatctgatgacccaccatgcatgaaaaataaagaatcacaaagaatcttccaacaactggatctccagagactggagaagatttatttgatttttttttttggtaccaatttcatttttctttttgtggtgataataagaggtgaggtttctgattatttttatctgcattatgatgtttcttgtgtcccttaaaagtgtttaatttgtcaaattcctgttacatattaatattttaggctgatttgtgaaatttggctatttacttatcgctgcagtttataccatactccttcatcgagaaagaagccag

SEQ ID NO: 81497 - DNA, 1043 bp, Citrus sinensis
  Intron number 2 from transcript orange1.1g040993m (locus o range1.1g040993m.g) derived from phytozome v7.0 (chr-ID sc affold00018; pos 274991 to 276033 reverse strand)
aaggagccaatctgccgctacctgtacctctaaaggtcaatcattactgtatctcttgttttatggattttaggcctgcaatcggttacacatacgcacacatattcattcaaattttagggaaagcttcagacattagcatggatatgtgcaacacgccggttggtactatctctaacggaattcctcattttggagatcggtggcatgttataagaaatatatagggggatcaaagaataattggaaaaatgtttacataaataactttacaaaatcccctgacctcactgcagctctgttactggatatggtttaaaatgagcaacgcaagaccaaatattgtatgacaatgttttatggtttactggtgggtaaggagctgctctccagtaaactaatagaaaacttagtgtctgaggataaaaattaggattaagaacctttgactttacttgctttagacatttcaaactttttgggtccagttgatttaatggctttataattgttatttatttcaccttcttgttttctgtttcttgtccattcttatggactagaacttttcttatgccagttttccacttctccgatttctttgacctgataagtttgacttcatcctcaactttcaaacgacataaatgatcatattcgagtcacttggtcaagcccatgattaatgaactcataattaaccgaccttggccaaatccatggtgaaaatatcacccagttggccactcgaattgttctgtgattagccattattcaggtgcaccctgattacattttccatttcacgagctctttgcaaatcatgcttcaagggcagcctgtttaattctggtgactgttacttgttgactttaatctttgcttgtcggtcagcttatatggtcttaaacaaaagtagcatttaacctatagtccgttgacaaaaaaggaaaaaaaagaaaaagaagaaaacattccttaatggagttctcattttctatttaacaggtagataaaatacctggtggagccagattgggatt

SEQ ID NO: 81498 - DNA, 577 bp, Citrus sinensis
  Intron number 1 from transcript orange1.1g040993m (locus o range1.1g040993m.g) derived from phytozome v7.0 (chr-ID sc affold00018; pos 276018 to 276594 reverse strand)
ctgatcttcaacgctttgaatctttgctatttcaggtatgcgataataatttatttatttttttaaaaaaagtcatcatacatataatgaacattaaatgaaaaaaataacagtatttcaagatcacccaacacttggaaaattccactaaccacaaggtctttgatgctaaatagtaaagtatgcgtaccagggaaatttcttctccgtatgtggcgccctcctagcgatcaaaaaacatcgttgcgtattgataagtaagcgtgtgaagttggaccgtgtagaaatttgtagattgcttttcaaccttcgtggaatgccataatagtcggatgacatctcaaatggtccttataattaattatatatttatgcattgtttgacataataatttaaacaaaacggggaaatgaagttgatattttttaatttgatatttccctttcttcataatggccctttttccctttctttaagttgatatttttttaattttttttaaaaaaaagttgaagtttttctgcttttgtctttatgacagtgggcgaacagtctgtgtcaaggagccaatctgcc

SEQ ID NO: 81499 - DNA, 465 bp, Citrus sinensis
  Intron number 1 from transcript orange1.1g022501m (locus o range1.1g022501m.g) derived from phytozome v7.0 (chr-ID sc affold00037; pos 715751 to 716215)
taataataaggtacgaatttctcttttgtgggtgttttttaattcttttctgcagttaaagataattctgttaataaaacataaaaaataccttttgctagatgttagaaaatcccctattcttttgacttgatctttctgtctttcttcattttgattctgtaaaatagctttgagggtataattttcatctctccaaatatcgcctactaggaacgttcatgtagaatctctaataatgtagctgcagttaattatcccctagatctgcttcctattccataccaatgggagcaggtttgcaaattttcaaatagaaggatgtttattgcttcccattgtacatacccatcaaacatctgacgttttaaatttaaacatatggcaaaggcctacgtataatctttaccataactgccaaatcatattgatctcttctcatatctcttgttccagttgccacct

SEQ ID NO: 81500 - DNA, 553 bp, Citrus sinensis
  Intron number 1 from transcript orange1.1g002349m (locus o range1.1g002349m.g) derived from phytozome v7.0 (chr-ID sc affold00013; pos 895156 to 895708)
ctgtttgagctttggttctgtggattctgaaggtgagtgattgctgttctcttctaagagagtactattcttatcttgtttggttcccgagaaatgctaggaaagtgtggggaagaaagtgaactattttggttaaatttctttcttttctttgttttttcagcactcgatcgcttacttcaaacgtgaaagtttccgtttttcataattttttccttgaaaatttctgtcttttttcgagtatttagtattttcgaactcttctctttctttagatatttggctgatactatgaagtccgccgtacacgtttaattcaagctttgtgtgttaagtgctccattttcattgtgaaagttttgagcttttcttgttccaagttcagggttttgcttaaacttaaaatagggcttaaaacataatcatctactgagtttggattgttatttgctgggtgtgcgtgtaattcattttttgcactgaatttgaatctaatgaatgctaatgttgtattgaaggagcaacattattgaagataaagaagtcatttagg

SEQ ID NO: 81501 - DNA, 872 bp, Citrus sinensis
  Intron number 3 from transcript orange1.1g003191m (locus o range1.1g003191m.g) derived from phytozome v7.0 (chr-ID sc affold00134; pos 257613 to 258484)
ctatctgaatttcggattccaactaaagagcagaggtaagatatttttatgttcctgctttctatagcctgtcgtttattttattttaaattagtttctcactctacttcactataactcagtttgttgaagtcagcaattttttttgttactcataaaattttcttctttacacttatcctctcctctgatataatatgtttctagtttaatttagaatagttccagaccaatcctcttgtactagtagttcttgagattcccaatttattttttaattgaactgctttgactggttagagcatgctatcctttcttctgaacacttttggaatgagtgggggtctgtgtaaattataaaattattgctgggaccagcagattttgtttggatttccgaatttccgttatctctatcgttccaaatatgatctgactagaatttaaaaccttcaagattcactaatttcatgattggactgctgtgcaagttcataacttcatgtgatggattttatgtatttaaatgccaagaatttgatgcactttatctgttaggtctcatgttttcctccgttagaaacttgtaaccttatttagtttgctagaaaatttaaaaaaatcataacatttttgttttattcttcacattttcttctcctcctaatttttttaatccatttataagccttcagcatgcctgattgataaaattttgtaggcttctgtcatatataataagatatagatgaaaaactcatatccttcacagtgttggtgccggtaatttgcaagttttctaggttttatatgcagagggctatcatcaggctaactttccggctttcaatgaatttgatttcagcatttgg

SEQ ID NO: 81502 - DNA, 962 bp, Citrus sinensis
  Intron number 1 from transcript orange1.1g018811m (locus o range1.1g018811m.g) derived from phytozome v7.0 (chr-ID sc affold00043; pos 65767 to 66728)
actgctttgtcaacgtacttgctctttcattttctactggcataaaatgaacttactttttttttgggctttttttttgtggcatttaaaaattaattgaaggcttttttttttaattttttttaagaaccccatgagaaataaacttttctttggtagtttactcggcttatgagtttaattactcattttccttcatattccttttatgactgataaatttttactcggtttttagagcaaagtagatcgagttctagaccagctttcaatggaaacaaggccttgtattttctatgttctttcatcttagtatgcagaacaattctttggaaagaaaaatatcaagatatcggatttgattagaaattgatttcctaacaggccgtgattacaagtatcccaaaagtattgtagtctacaaatttggcaccgttgaatggccaaattttgttgattttattaatttttttaattatttatgccaggctccaaatttttttatttatcacttagattaaatttactgtcgttgagctgagaagttttgcctacgtacaccgaaccgcatattgagtgtcttgatagtattcactcgcacattttcattcttgacttttgtaacataaaatgtgtgggattaaaggaattaaaacctacaacctatttcaaaaatactttatcttttttcaaaaatactaatctttagtatcggagcttttggcacatcatggaagaaaagtcaaatgtcatatattggacaaaggaaaatttaaaaataaaaaaaacgtgtaagttctttgtggtctttaagttaggaagctatcaatatagctaacaaagtctttgcagtttttgggacccaaaacaacgacacatgatatcccctcattagtgagtttgtaattctttttttctgtcggcattacaattatttattaataattttttgtagggctgtg

SEQ ID NO: 81503 - DNA, 585 bp, Citrus sinensis
  Intron number 2 from transcript orange1.1g034529m (locus o range1.1g034529m.g) derived from phytozome v7.0 (chr-ID sc affold00268; pos 8020 to 8604 reverse strand)
caccttacaacttggtcttaggttcgagaagattggtagctaaattcagtccaactccaatatgatcccatcatcatcatcctcatttccaacattctaacttaagtgaggtattcgaaaataccttcttttttatcacaaaggttcctttattcattttcaaataatatatgagaaaacagatcacaatttcatcatttcttcttggctaaaatctcccaccaaagtcaaaatatattatattgcacatcatgtcattttcttttcgcttcatttatatgtgaagagaaggtaataatattcttttaaattagtctctaaaacttgagataaattctcagttaattttgttatcgtaaatctaagtttttaaggataaaatgataattctatttgatataatttaaaattgaaataaatttgaagtgcaacacgtgtaaaatacttggattaaattctcattttgtgtcattattaaacacgtgatgaagaaagatgggtgcgagtggccttttcaagttacgaaaaaataaactaataaattttacagaacaaggataaaataagagacgagtcgtcaccggc

SEQ ID NO: 81504 - DNA, 914 bp, Citrus sinensis
  Intron number 1 from transcript orange1.1g004801m (locus o range1.1g004252m.g) derived from phytozome v7.0 (chr-ID sc affold00068; pos 78755 to 79668)
ttctacatctccaaatcattactatctgatctcaggtattcttttatcgtgcgatttcttcatcctttttcttgctgattgttttctggttttaagcttaaggtgtccgctttctgccttttttacctttctttcttccttggtctgaaaaaaccctagcagctgggactcttgttttttgtttttttcttttcttttttaacgctatctgatgttgattatatttgttttttctgcaaatggctgtttctatttatgtgatttaagcctcatggaattttgcaatttggcaattgtgattttagtcactgctttccgtttccaactttgcgagttatagattaaaaaaaaatgaaaattttgtctggtcatccgttcagtggtttcccaatctcaggtccattcgtgtgcttattttgtgatggattcttaatcctttcacatttatatcaaagcttttgcttgtgatttcaacttcagctcctgtatctaatttacccctcagttgatttttagttatggcataaaatcaagttttattttggaagagttgcgatccccatatactattttgttgatatcaaagctaggaatttggccattacaaattcaaacatctatttttgaagggcttgggtcaaggtcaaatggcttacctatttcttggatgctggaagaagaagatcattatcttcttcaaacatgcataatctagctttttacatgttgagaagcaaaaatgtattctttttggagtatcacatactgcatcattcttgattttaaaattttacatcagtttctcgttgccatgattttgtagcattttcttatcaatgcatatatagctattcaagcacaagaaggtgactcttttagtagtattttctttctgtgctttttttttttttaat

SEQ ID NO: 81505 - DNA, 468 bp, Citrus sinensis
  Intron number 1 from transcript orange1.1g007079m (locus o range1.1g006998m.g) derived from phytozome v7.0 (chr-ID sc affold00132; pos 334486 to 334953)
gaacagctgaggttccagaaagaggtaaagttcaaaacttttgtctttgtgaatttgaattttaaatttgttaaaacgaattatttagatgtgtagatattgatgttctttggattatcaagtgatatgttctgtttcatcaaaaaacaagtgtttactgttgatattgtcgatgttataggtttgagttcttggttggcagaaaaaaaaggtgaaaagattttttttttctttttaaagaaaaaaatgattaatattactgcaagatctggggtacatacgtataatcaatgatttatcaaagtggctcttgcctatggttggaatattggataccaatttgttgcttttggttaagatctaggtaaagtagtttacagcatgtttcctattccttcacagaattctttttaatgatcttcagattcatcaggagcactaagtgcaggaatctttgtgcctcgttca

SEQ ID NO: 81506 - DNA, 610 bp, Citrus sinensis
  Intron number 3 from transcript orange1.1g031453m (locus o range1.1g031453m.g) derived from phytozome v7.0 (chr-ID sc affold00068; pos 72444 to 73053)
taaggaaattgttcattgcaaagactgcaccacaggtaccttgaaaatatcagttatttctggagtatctaagaaatcgaaacagtactggctacctggcattcaagaagatcaatgtaaacatacaaagcataaacccaaacaccattggtttaagaacttcttttcctagcttaactattgatttactcaagttgttcttaacttgagattttcacagtactgagtggatatgattttattattagaagattcaaattcaaacccctgaattaattgtgatttacaaattaattaaacttttggttattttaatttcttttcccctagatgtttcaattctctaactctctcatatagtgatctgtatatgccatttgggttgttcgatctgttcatatatacatatagtttttgtgttagataattcactaaactaagttgaatcaattattcactccttccaaaaaaaaaaaaatattcacccaaaagacagagaaagagatcccgcaaaattaatgaacttagggatacaagttgcgaatataccttatcttaagtatttataaatatcttcattaattttcacatatctattgttgcaggatca

SEQ ID NO: 81507 - DNA, 395 bp, Citrus sinensis
  Intron number 1 from transcript orange1.1g048532m (locus o range1.1g048532m.g) derived from phytozome v7.0 (chr-ID sc affold11901; pos 440 to 834 reverse strand)
cccgacaactgggagaacctgagttatctggtaagaatagggactcagttatatcaagcaagttttcagtggttccagatactttaattttctctgtttctcgttctctctgtgtgctggtcacaaatttctcctttttgttaatttgatgagaacaagtttgggggatggatgttacctatgtaaaacggctattgccttctaaaaggatgcttgtttggtccttcaaacttttatatacttgctaaaatgttgtcttcaaatgatttcttatttgcaattttttgaatttgtaggcatgcattttgcattttgaagtaaaagatcttgttatgttaaaaatacatggtgtattgatattatggccaccttttcagtcttgcaggtaagcaagc

SEQ ID NO: 81508 - DNA, 499 bp, Citrus sinensis
  Intron number 1 from transcript orange1.1g043470m (locus o range1.1g043470m.g) derived from phytozome v7.0 (chr-ID sc affold00091; pos 9289 to 9787 reverse strand)
ttacggttacgttaacttcctctccccacacggtatcataacgataattattttttcgatactagcatttcctctttattcatttttatttcatttataatcatcagatttatcatgttgcatttcctctttcttagttgaatatggtatttggtagtgatgcttgttttcgcatttattaattttatttatttgtttagtgttgtttggctgctagtaaaagtgtgggaaaaggaaaggaaatgtaattgatagattcttgtgattatctttttccaacgctgtaaaggaaacagatagtatttttgatactattagatttttctttacttgggaagaaattgagaggcgttttgatttatgtattgaccaaaagaaaacaaaaaaattgctaagaatttcatggtgatttttctttaatttctcctttagttgaaacatttactcccttctttgttaactagctattcgagcaattgaggtaaagaatcacactcag

SEQ ID NO: 81509 - DNA, 622 bp, Citrus sinensis
  Intron number 1 from transcript orange1.1g036199m (locus o range1.1g036199m.g) derived from phytozome v7.0 (chr-ID sc affold00006; pos 2896897 to 2897518)
ttgtagaaatttggtcctctcctacttcctttaaggtatgaaatttctcccttttttttttcgtgcttgggtttcactgtttggtctttttgttttgtctgcaccattgacattttacagactgtttccatgagaaacaagatattttaattctatactactcattttgttatgtgcttggccatcacatatgtgtatatcacaaacagaatgtatgaatggaatcacatatagttgctgcttatgcaattgattattattcttctgaagaaacaggatgatttgttgtttctgtgatttaatgagttcaattttttactgaaaattttgaagctaggaacaataacagaatgagaaagtttctaatatgtcttcagttaagcaagtagaacggagtcttctagctgtctctaaattaagttggtatttcactgaaaagagaatggagaggtacagtgatgtaatttattcaagtgacaacggatagcatggtaattctatggaactgggcgagtttcagctcatttgcatctttgaatgtttcaaatgctcttaatttagcttatatatccccttggaccacaattgctcatgaactgtggtttatgattgcaggtacatc

SEQ ID NO: 81510 - DNA, 503 bp, Citrus sinensis
  Intron number 2 from transcript orange1.1g036199m (locus o range1.1g036199m.g) derived from phytozome v7.0 (chr-ID sc affold00006; pos 2897663 to 2898165)
ttcagtactgcagcgagtctagtaaactctacctggtgtgtatatgcctttgatttgttataaagaatgggtgggaggtaagaacagttttttctaaatgtaatcagagtaataattgtcactcaagtagacgcagaaaagaaagaaataaaaatgggaatatctctcaactttttctatcaagcataaagcaaatattttctgagactaattaatacatagtgatttaatggctagagtttctacctgtaattggcttgtgttctttcatttcagctttcaatgtggagctctacgtactctgcaatatcttaggaaaatcttttattgatgacaatcatctatagacatttgcttcttgtctaactttatgtcatgtgaaaaactgttcaaaacttaatgggactattccagttatgcttatgtggtattatctgtcaattaatgattggtaattgcatatttcaggcaataaccggcggtgtgatagtctcgaggtgtat

SEQ ID NO: 81511 - DNA, 550 bp, Citrus sinensis
  Intron number 1 from transcript orange1.1g031952m (locus o range1.1g031952m.g) derived from phytozome v7.0 (chr-ID sc affold00018; pos 254610 to 255159 reverse strand)
tttgtgataaactctccgtgtcatcagtagccgtaagccgttctcatctccctctcctgtcattttcttttcagttagttttgagttcagatgcaaaacttcctcagcataaataccgtgtagttgtccaaaattttttgtataatgtttctttctctaaagaatggatgacaaaattcaattgaaaagtaccctttgtaatgttaatatgaagagactaatgacgatgatttagtttttgttttacaagcaaatcgttggtcttgcttacctgaactccgagaatctttcagtgacagtttcaatttttgcaaattttgtgtctttattttacttgttcttgatgatgttatgtagtggactttctgttttccaatttgaattaatattaaggaatatgtgtgcatgtaaattgttttgatgtttgccatgttgatgctacatttattagtttattaaagagtaatatttgagtatcctgtaacacttttacttttgcacgatggattttccagtcaagaagaaagaccagagagcctaaggaggaaaa

SEQ ID NO: 81512 - DNA, 370 bp, Citrus sinensis
  Intron number 1 from transcript orange1.1g005495m (locus o range1.1g005003m.g) derived from phytozome v7.0 (chr-ID sc affold00041; pos 471868 to 472237 reverse strand)
actattatttatttgattctcttgattcatcacaagtaagaatttcattgatttgacatatgattataaattttatgcattagtaagtggttctgctacaatcgtgaacggtgacccagatgggtaatttaaaaactgcttcatgtgaagtttcaagtctctcatgcttcttataatcgctgtcattcctttccattccttgttttagcagaagaagttgaattaaatgaatcagctgtagttttattctattgttgatttcttgggggatgtgttttgatttctgaatgtgatgtttgtcttaatttttttttttttttggattttccgtattttagttcctgctaatgggcttgctttgtttctacag

SEQ ID NO: 81513 - DNA, 969 bp, Citrus sinensis
  Intron number 2 from transcript orange1.1g047474m (locus o range1.1g047474m.g) derived from phytozome v7.0 (chr-ID sc affold00088; pos 203479 to 204447)
cacattgctcaggtatgagattttgctggcaacggtgttattgtagtcaaacaccattaatctttcactttcttgagcatcccctacagcttgcatcactcctcatattatttgagctctactttaccttgtagttaattagtggaacctactggttatttagctactgctagtttgttagtttgaactgaatatgatttagggtctaagttgtaagtttgcaccattcgaattataattttttaaataccggtggcttgacatttgatagttatgagatgacttcttgacctcgtacttgggtaccagccctttgcgtaagcgcctgatatcaacccttctaggagaaaaaagagttgatgtaatgtagcaccaaacgtccattgaaatagcagacaaagaaaggggaagcaaatagaagaggggggtgggggggaatgatagaagtattattggaggaaacagaaaactagaggagaaagggagaaaatttagaaaaactatgaagggaacatcagaaactttatccaatgatcgtcgatacacgaaagtctccttcaaacatggagagcaatccctattttcagtggccaaactctacacaacacaggaactcaaaatcaaaagaaatgtacttcataataagtaatataaaacctacttaaataataaaactgtgattgttcataaacagtgctgacaattaatgtagcaggattagctagattttttaaagtaaaataaataagttcataatcatctatatgctccttgatatatatatatatatttattttttttcctttattccttgatttcacatttattcttttttacgcttcacatcataggctcttatgtgatgatcaaatgctttaactctcattttctgtaatagttgttgtggttcgagcaagtttttgcctttctgtaacctgttatcgttatttgattgctgtacagggtgtt

SEQ ID NO: 81514 - DNA, 453 bp, Citrus sinensis
  Intron number 1 from transcript orange1.1g038048m (locus o range1.1g038048m.g) derived from phytozome v7.0 (chr-ID sc affold00621; pos 31287 to 31739)
tcagggccaaacatattcaggtgaaaagtcttctttttatttacctatttttttgattaatctgtgcttaaatatcttgttcatgtttatttgttaatttttggaaacaatttgattgttgaatgttatcaaaaggaacatggtgttaggaggcactttcttgtttttgattcctgcccacatgcattaagtctttttgaaggaaatatccaagataacaataacaaatgaattgtgaacttttatttttatgtttcctgcatttgacttataaatgaaaatttgaattttgggttgttgagcttaatatcaagaatagctgaatgcataaatgttcaagattaagggttttagaagtcttcagtggaagtctgcttctgtttgtatcttttgtaatttttgattttttgaaatacagttgatagacaaagatccaagcagggcagtttcctt

SEQ ID NO: 81515 - DNA, 999 bp, Citrus sinensis
  Intron number 2 from transcript orange1.1g038048m (locus o range1.1g038048m.g) derived from phytozome v7.0 (chr-ID sc affold00621; pos 31829 to 32827)
aggcaattgaggcggtcaagtctttcgtcatctttgcccttatgattctcaggagtcacttgacaatgtcctaattgaactttacaaagtaaaacatcattctcttttgataatttgcttatatttctcttgtcattccttatagtttgctgatcttgaactagttggtgttgaaaatatgagttacggatatgaatggtcaaatatgagtactttttcttgcatgttcaccatttaatatctacggacattttgaataacctaatatactataggaagggttgaaaggtaggtcataacatattcatctcatttgatgatatagttgcattttataatttcatacaactaattgagaatgtattaaaagagtctagtattgttatatagccatgtttctgcagagcgcaagcgagtgagagaaatttttaagattctacaacagaactgttgtattgaaaatgtggagcaattgatacttttttattccatcaattcaagaagatttttcttaattttttggaaactggtcacgaagagagaattctcttttaaggctaaatgtgcccaatttttgagtttccactggcttcattatttcaatgaattttcagtatttccgattaaaggatccatgttttatttatttatttcaagaacaaggtactagctttggagaaaggtaatatatgttacaagcggagtgtaaatagacagttgtcagattaattttgctcagccacaagcacatttaaggggtattatggagctgtaaagtatgaatttaatattgtgttcctggtttcttgtttatgttcaactaatgtggtcaaatctcatggtgtacagccaaatcaatcacttgcagtgatgctgttatgttgatttcattgctcttctatagcttttcaagcagctcttcgtgtagatccactagtttattattgttatgctgtttttgcagaggtctgggaggattgaagaagagattgaattgct

SEQ ID NO: 81516 - DNA, 995 bp, Citrus sinensis
  Intron number 2 from transcript orange1.1g033073m (locus o range1.1g033073m.g) derived from phytozome v7.0 (chr-ID sc affold00342; pos 73701 to 74695 reverse strand)
aagttaaggtaattgttaattatctgttcaaaagtttttaaattatgccgacatctttattttataataattttttttgttgtttattaaatatttctcaaaagacttgaaatattgtcttatcaaagcatttttaatattagactgaataatggatacttccaaataacattttatcatatgctgtaatgggctgtgacgagctctctttcttcttcattaatttatcctttttttttttatagaagcaaaaaacaaaagcaaatgcaaatgcatctctaatcattaatgtagattatagggaacaagtccatgtttaacaaaaaattgtaattcgggatttgttagttgtttattaaacatttctcaaaagacttgaaatattttatcttatcaaagcattttttacattagactgaataataaatacttctaaataacatgttatcatttgctgtaatgggcgtgacaagctctctttattcttgattaatttatcaattttttatagaaacaaaaaacaaaagcaaatgcaaatgcatctctaatcattgatgtatattggagggaacaagtccccgtgaaatagaatttactattataaaccacatactatttttttttaatccataaacgtgtctgacaatgattggaactggtgtcgtgtgagatgtgacttgttttttttttttttttaatttttgcagcaattatattatttaggtaaagtaaagcttatccatgcacacaatttggaataaactatgaattgaacagaaccaataattatttgagagttgtgatgaccacacacccactccttgttgactgacttgtataattatatatcattctttaggcaatgtgaaaaaggtggctaatgagaggtaatatcgcatgattcttattttgatcgtgttaaatacatcatgcatgtcgtttattctaacaatgatttttttttttaaataattaattaggtggtagcatcaaag

SEQ ID NO: 81517 - DNA, 573 bp, Citrus sinensis
  Intron number 1 from transcript orange1.1g021081m (locus o range1.1g021081m.g) derived from phytozome v7.0 (chr-ID sc affold00018; pos 837548 to 838120 reverse strand)
aagccttagctttacttctctttttctactgtcaagtgagtactttctctactttgtttttgtttttgtttttgtttccaactgattccagtttttgtcagaatatttattatctcttcagtcttcactccagttctcttgttgtcttacttattttcttcacagtttgatctcttgtatattcagctgatgcaatctttttgtttctcaaatgggttgttcctgactttctgttttctttccatttttatcttttttttttcagcattaatctaattgagttgccgaaaataatgatgatattttgatcttggtataatatatttttttgtcttggtacttaaaagtttcttctttctagttctatccatttttttcttccaacagacgtgtctgtaaatcttactagatcaaacagatatgttggattgtattatgatgggatgaccaaaatcttcaaagaaaatttccccatattcttgtgattgaaatttctctaataattggtggtaattttaattatgactttgagttgcaggcttagattcaagatactgaaaggcagcagtcaca

SEQ ID NO: 81518 - DNA, 830 bp, Citrus sinensis
  Intron number 1 from transcript orange1.1g046528m (locus o range1.1g046528m.g) derived from phytozome v7.0 (chr-ID sc affold00376; pos 163953 to 164782 reverse strand)
agaaaaaccatttgatttctttcgaattttgtttggtatgtccagtttatgtgtaagtttattgtgatggatgtaaatgcttcaaatattgtatggttgacattgttcatggacctccggtgtaaaatggacttatgtaaatccaagtgctaactgagaagaactttatttagtgctgctagcatacacatctaccttctctcccactctctctctacccacaacccctgctctctccccaggcactcatatatttgatttttttgtcagattgttatgctaagatgttctggttatagaggtttgagttgtcaagtctatatatgtttgtttacttattatccatgtggaagagtaagtaacctgacttgcttcaatgcatgggaagcatttcttgaattacgtggagggcagcattcaaatttttcattaacagcaaatcgggttccttttatgcttgactggctagaaatttttagtggcaagttttgcgaaatcttttttatatcaagagagctttctccacttggttcaattgggccttaatggtgcatcagaaaattcagtaattaactgtatgtttatcaattctgaacttgtatataactaaagcatgtttctatgatggccatgttcaaatgcaacaaagaggaaaactctgtattctttttctgtaatcaataaattttgggagacaatgtgtacagagtttataatgcctttgttccacaaatgtgagaaaagttagtcatatgtcattttcatgtacacttattaatgtgaccagttttgcagagggtgttatcgcaggaggtacagctggtgttgtg

SEQ ID NO: 81519 - DNA, 564 bp, Citrus sinensis
  Intron number 1 from transcript orange1.1g023070m (locus o range1.1g013813m.g) derived from phytozome v7.0 (chr-ID sc affold00006; pos 1354520 to 1355083)
aagaatttgccacctgtaaggtgcggcgtccttttttctttttccctattattttgatttcctaattttccagagaaaaaagggtcatactcgacaaatagcagatatctgtgtttgcttggccggtttgtgttaattttaactcttggatttttataacttgaaaacaattagtgaaagaaatttgcacagctgataggcttttattaatgtaatcttcataatactaaaggggattttgaggaacttttctgtcaattctttgaagatttacttgagctttaaaagttaagagtaagttagttttagtgaacatgaacaatggcgatactaggctattttatttgagttgttgataagcagatattcttcatgtttgcagattctgcatgtcctgatgtttatttctggtgaagttctggagggttttgagttttgattcatctctttctgttacaaaatgtcaatttgatgcagttgatgttggtaattgcttttcagcgtttcttaatgttggaaattgttgcaggaggaccgaccattatttgttcaattttgtgccaa

SEQ ID NO: 81520 - DNA, 904 bp, Citrus sinensis
  Intron number 2 from transcript orange1.1g046832m (locus o range1.1g046832m.g) derived from phytozome v7.0 (chr-ID sc affold00087; pos 412871 to 413774)
gctgcacctggccactcggaagaaacaacgcaaaggtaagtccaatctgttatttaatccaacacttgatagtttccattttcaatgaggtttgttctggtttctatattttccagatcattgtaagggagtatttgacttgagagccgtagatatatcatgtcttctggcttctatggcctggacttctattattagagccatgtttctgcaataatgtggttaaatttatattgaatgcgggagtacaaaatcttattcaaaacaagttgtaaaagaaaatggattatcccctgatataagcttttatttgtgttcaaacttgatcatcatcacctgccaataacatctgtcatatgatctttaagatttgtgcatttgtttggaaaatgggttagtatggattcagcgtgttcgtaagccaaaaggacaaatatgcactgatgagcctttccttactttcttcaattcagatattagttccctccaagttttaagttatgctcccatccttctgtttctgtggaatcatgctgactagccataagtgaatattaattggctgatgtccaaggaaaatagtgaacacaaacctgtgattaaaaaatttgcctcacttaaatgccccaagcttgtgctcgatttagcaactttataagtgaaagccaccatctattgacaaggcttggtgtttcaaatcctagaaagaattgtagggttagacacaggtcatgtgctgaaaaaaaaaatgaaatagaatgatgaaattgcttgaatagataacttaacttcttgggaaaaaacaaaaaaatcaactaccaagtatcttatgatttatctaccagccataatgagcagttgaagaatataatttacttgcaggtaatagaactgttacttggtc

SEQ ID NO: 81521 - DNA, 674 bp, Citrus sinensis
  Intron number 3 from transcript orange1.1g032634m (locus o range1.1g032635m.g) derived from phytozome v7.0 (chr-ID sc affold00414; pos 66416 to 67089 reverse strand)
ctgtagtcaaagttacgaacaccttagtaagataaacttgtattttgcttattacttggtgacatcttccagttgcatgttatggaaggattttgtgtgaatcaatttcattatgtatgacagcattttgccagctctcagtgcttactttttgccttgcacattactttctttttataggtcatagatattagttaatttttcgtatacttttcatgattgttgcatatcttctctttccgaatgctgtcaatagaggctacaaggtgagccgtgagattgaatggataaattgcaagtgttgttttcaccctttttttcccgtgtttgtttatatttaatatgctattgattgatacttctctgcatggggactgatgatttgattaccttcataagattatcttactttcttatatttagatcagcagcatcccagttctttaaaagttactgattgattctgatttaattagcatttatgatagtaatttttaaatcatgtgccttcattcttttctgtatctgacccttacagacaaagttcaaggttttttgcattgttcatgtatccctggattttgttcaggataataaatgttcttcggttggttttagagggccatccaagttttgagattatattttttgttgatgttaaaatatagggtcag

SEQ ID NO: 81522 - DNA, 531 bp, Citrus sinensis
  Intron number 1 from transcript orange1.1g010322m (locus o range1.1g010322m.g) derived from phytozome v7.0 (chr-ID sc affold07044; pos 2359 to 2889 reverse strand)
cgccctcgagcagctcaaggcctctgcccctgaccgtacgtgaatgtccgtttatttgattattttgatgaatgccggtggttaattttcattagggcttgttttgtttttccctaagcagatgattgaggctctcttattacaatgactaattaatttttttatttcaattcctgtgactttgttccttttctataatatacatgtatgtctgtgcacatgtgttaattaattgtccaccattatgtggaattctaataatgagaaaagaaaatctatttccggtggtgatcagttgagttatagattgaccaggtcattgtagaattaattaaacgcctgacatatctacgataccttactaacaagtaaggtcattttgagtcttttgacctgaggaagtgctgtgattactggaatttctggagtgtttttgtgcttttggcaaactattcaatcgccaattacctagtttttcacattttatatctgtcaggatacacgaaggaaaggagcagcattgtggtcatt

SEQ ID NO: 81523 - DNA, 446 bp, Citrus sinensis
  Intron number 2 from transcript orange1.1g018903m (locus o range1.1g018903m.g) derived from phytozome v7.0 (chr-ID sc affold00781; pos 48062 to 48507 reverse strand)
atccaagccctggatacaacattgagcaggtatgtgaagattggtttattcaacatttttcttcttttcagaaggattaaatccatttagattttatatgtaattgtaaaacatttaggtaaggaatgatttagaccagttgaatttttaagtctatatctgggccctacctgtgaagtggtttaagcatgtgtctcgcaattcgagaattgtgtttctattacctgcttatcttctgatcttcattcatcatttcctgaatcatcatcatggaaatatatacatgcattaggttatttatcaaaaatctttgggtactggcttgtgtttaattcttcggttggtagattgagtgatgggacagaaggtcttctattttgaattgcctaatatgattttcttctttcccagctggcaaagaaaggggaaaagtttcttgatcttcc

SEQ ID NO: 81524 - DNA, 580 bp, Citrus sinensis
  Intron number 1 from transcript orange1.1g006291m (locus o range1.1g006291m.g) derived from phytozome v7.0 (chr-ID sc affold00193; pos 26712 to 27291)
tatctaagcttgttgctgactcttacttctgtttcgtgagtatcatagtctgggttcttttactttcacataattttaatggagcttctgaatttttttttttttttttgatgctgaccctcaaccgcaacatctgttctgttgattagcaactgattttgagttcgtgggtgaatgattttgggtttgatctctcgttggacatttgttaaatatgttgacttgatctggtttggaatgtaatttctttcttttgtttaattatcttgctttcagtttgttagtcaataagtttccattgaaacccttcacttcttctctccagtttatatgcttgacttatcttatgaatgctacattggttttcattggtttcttttatcctaattatagcaaatgaaagctgcataatataatctgctagttgatgttagattgaaggtgcattgttcttttaattcttttcacttgttttggatcaaaccaaatttggttagcttgcatttcgcatttcattacttagctctgcatcaatctaattttgatattggttatcaatacataggtttttgttgattaa

SEQ ID NO: 81525 - DNA, 718 bp, Citrus sinensis
  Intron number 1 from transcript orange1.1g041261m (locus o range1.1g041261m.g) derived from phytozome v7.0 (chr-ID sc affold00248; pos 65083 to 65800 reverse strand)
tgctgggtaagttcacatcaccgtgaaattttaaatatatacagcaatttaagtacttgatacaaactttgtgtggatatatatattctcttctgaatacgtaagcaactacacaagtagtgtaattctataatgcctcgtgaatagattgtatgcatagctagctatgaattaagtcaattaactagacatggaccgacctgtgttatggagcatgtccccccttccaccaagataagaaaaaaagaaacaataaactcaaaaagaagataattaagctctgaacgaaaattagccaatcttcactttgaaaattttatgatttggatcccttagtttgtgatacttttattctaacttccttaaggttgcagtttctgcatttttggacctccttgaataatatcatcatgtgacaatatggcttattagacacacatgagcatgtgcgtgaaagtaaaagcccatctgcatttttgggaccgctaacttgttattcattttacaaaatacgaatttgtatgcaattgataactttctagcgcgaaatttccaaaaaaatgtcaagagttcttatatatatcttccgtgattaaataacaaaataatttaaaggaaggaaatgaaccttatttatttttatgcgcatgtaatctgatcgatgatggactggctgcatgcagtattcaagtacgatccaccaaacgacaccgtattt

SEQ ID NO: 81526 - DNA, 781 bp, Citrus sinensis
  Intron number 1 from transcript orange1.1g034634m (locus o range1.1g034634m.g) derived from phytozome v7.0 (chr-ID sc affold00142; pos 300543 to 301323)
ggctatttgccaggttagtggttaattagaatatatttagtaaccttgtttttcctttttgatttctaggcgataatgcttaagtgatgtgtaagttctattttaccaaccaaaacgaggtaaacaatgagaaaaaagcaatgaagtcatggacatggcaggaacttgaatctaatttggttgattcaggatgcctgaggatagataggaatcacactggtgcactagttttcattcccattaaactcaattttaagctttcgtcttctatcctttcttttggttgtttgtgtcctgatgtgacttattttaatggcaaagtgcagatgccccggaatggtttgaagactggaagagtagagtagcatgatgagttatttattctcgtgattttatgtcaaagaatctaattttctatgcatctgctaaatgaaaggatcataatgcctgttgtcttactaaattgttattttgctaaaagagaaaagaatagtaaaatataagaaagctattggaaatgccatatcatgcgacaccacttcatatgcactttgataatttgataaacttgtttgaacttggaagtttggtcgtttgtgtcatggagattggaaactaaaacctcagcatctttaaacacggttggcagctgttagtcccgtgcagcattatatgatgttcctgtcttgaacttgctcttggactgaaaatgatggttgaaatgaaaaatgtatctaatttcatccgttaactcttgacctgaaagtattctttgcagggc

SEQ ID NO: 81527 - DNA, 708 bp, Citrus sinensis
  Intron number 1 from transcript orange1.1g033569m (locus o range1.1g033569m.g) derived from phytozome v7.0 (chr-ID sc affold06434; pos 2188 to 2895)
aaaatgtaattacccacttcgttaatttctagggtttcatgttaattttgactcagggtttctatctgttttttacctttttagcgaataaaggtttgaactttatttgattagttgtgtgttttgggcatgttttgtgaaaattcttctgggttttgcaggtctatttattttctctggtttccaatgttggttttgagtttttattttttttctctctgttttgccgccgggaagatttaaagcttggaatggaaaggagaagtccttttttttttctttaataagtgttgaaataggaatattgactgaacgttaggctgtgtaatgcgtgcatttaagtaatggcaatttctttaatttttttatgcgttacagttagcctaataatcagtttcattaggcttaaggggttgttttcttgggacatatgtatcgagattagcaaatttgatatttgtctaaagttgtaattttcacttaatttaagcaaaaagtgtgattttgtttatcttcagttctgttgtaagcaaggaaaagtgtttcaattcatgttttcttttcttttacttgcctttttcggtcctttggtagattctatgaaatttttattaactgcaatggtttagaagtcattagctttgttcttttgcttttcggttggtttagtactacagtttcttatattcagtttgactttcccaggtc

SEQ ID NO: 81528 - DNA, 640 bp, Citrus sinensis
  Intron number 1 from transcript orange1.1g014298m (locus o range1.1g008061m.g) derived from phytozome v7.0 (chr-ID sc affold00500; pos 32489 to 33128 reverse strand)
acttatttgctgaatttgagcttgctacattactggtgagtttttgtgattgtgatagtctgattgatgattggttgaattgttgagctgatttcttttaatataattatactgattgtatgtagttcttaaataaatggattgcttgtggagttcaaaacatgtttgtgcttttcaggttgtcatttttcctctagttaggatattttgatttgcgttgaacataatgtggacattagggttttacttcttgttgtcttcctagtgagttctggtataacttgttgatgctttcattcaattgagttactggggatgctctggagtggttggaaagtagttatcttcttcaatattccagtgatgatgtgtcattttctatcttgacagggaacttctatttgtgcttagccagttagcctggtacagattaatttggcctagatcattgcttacagtacttctgtgttgttcttgtaaggttatctaataagtttaaaatgggttttgttcttgatgttcatatgacaaactggggattttatgaccagagagcctacattttcaaatctcttgactactgttttacgctgttgttgttttagcactttggaacttcaggaaataaagcttgctgcat

SEQ ID NO: 81529 - DNA, 739 bp, Citrus sinensis
  Intron number 1 from transcript orange1.1g013186m (locus o range1.1g013150m.g) derived from phytozome v7.0 (chr-ID sc affold00104; pos 245357 to 246095 reverse strand)
cacaaaatcaaggcttcgctctctacttcttgtaggtattgatttcttatctctctctatttgccctattcaacaaaatcgatcttttttttcttcttttttttttcagttactcctcaatttacgtgtgtcgagattaacgacacgatgattacattttttttctttttttttggttttcctgaaaaaaaaggcactgaaaatataagaaaatgtgttttaataggtcagttccagaagctataatacaattgataagttgtcttgttaagcttcaaaatatgttgtatcttattgaaactattaaaagtgaatggaacagacttttttttaaaaataatttttgtctattattctctttttcaattgttctggtgattgtattggctggttgttgtaattgttagaagcttgtttgaaatttctgcacaaaatttattttagcatattctaaagaagttgcaaatgcggaaattattagtttgagtgctcttttttgaaattgttttgaatcaatgtggtcccaaagtgaatatgacaaagaaagtcgcccatctagattctagacaagaaagttctcatatatttcatttggtgcattgatgtaatggagatgaaatgtagagtttgggattaccttctgagatatttatgtttggtttgttatggtgtggaatctcatatttatctgggttgtattgtagcagttgaagggagaagctgttatttgttttgtcct

SEQ ID NO: 81530 - DNA, 935 bp, Citrus sinensis
  Intron number 1 from transcript orange1.1g001724m (locus o range1.1g001724m.g) derived from phytozome v7.0 (chr-ID sc affold00143; pos 131746 to 132680)
ttcctcgtatatttttgtttctggaaattgaatgattgttgttgttgtaaaaattttggaacttttggtttgacatgttggtatgttgatttgaattgtgtgcgaattgaaggactaaaatgatgaaatggcatagtttgcgtggttgtttatgtatgtttcatattttgtattaaatagaagctgaataattgtgcgttgatagtggttgctgttgtaggtgggaaaggatgaaaattttgaaatccgggtgagattaaaatgataatgtgctgtgcatttgtcttttttttttcaatgttgatgttagtgtgccaatgtttgatcaactgtgaaactcccctgtattatggctctgctgaggattgcatttgtatgagattcaggaagagagcattctttagatttttaggggctacgttatggaaggcagtaatttattagcaatctctaaccacggagagagagtgagagagggttgaagattgggttgagcatgatacatccattttcgttttcatccctaatgttccattggagttgtatatatactcttaatgcatacaaacaggtatgtgtatctgtcagttttctttaaatttttaatttttttatattttttttgcatagtttcattttatgattctgccattcaacttgagattctgaggaatgaaaattgaacaagttgtatgagaatgagtcaagatcatgactcagctttattcattataagtttttcaacatcttccttttgttgcagaaagtgaacaggtcaaattattacaattgactttgtgctattgcagtcagttttaatgatgtcttgctgttgagtgtcttcctaattagttccactggttccggccattaaccatgcaaatgtttctttaagtacaggtggaaagaatagtgccgatagatcgcttttagta

SEQ ID NO: 81531 - DNA, 786 bp, Citrus sinensis
  Intron number 1 from transcript orange1.1g018668m (locus o range1.1g018668m.g) derived from phytozome v7.0 (chr-ID sc affold00270; pos 124823 to 125608 reverse strand)
tctgtctctctctctcgggtctctgctcttttaaggtatcattttaattttatcttttttatgggttttttatttgtacttttgttattattatcgatggctattcgtccatttgcatcacttttgtctcgattttaacgtttctggctaattttatgcttattaacaattgggtttttctgggtttttgttataatgatctgtgcattaataataattcattttcatttttgttacggtttcatgttggcaccaaagttgactttgtaatttagatcattgtggatgtttgattcgatgtcgatattaaaaagaaaaatgctaaggaattgttcaaattttgatccgtacaacttttgcgtattgtgattgtttattaagattcatgaagtcacagatcgttgattttgctatgagtctcagttatctaatatgtgcaggtctgcatgtttactttgttttagttaattgtggagggaaatttgctttttagtaacaagacttgataaagtcttgataaattattgtgttgtaaagttggacatgcttggatggttttggctgtgtacgaagttgtttttgtagttacttgattgctctttacttttacttttctatgtagttcttttgtttgaaccttaatagatattcacttaagctggtttttaacctgttgagattttggttatagaattggattttgcattttatgacttgaaaagctctgttgacattattgctgatgccttttcttctgcatacaggtgattttgctctgcaatcata

SEQ ID NO: 81532 - DNA, 615 bp, Citrus sinensis
  Intron number 1 from transcript orange1.1g030821m (locus o range1.1g030821m.g) derived from phytozome v7.0 (chr-ID sc affold00054; pos 375926 to 376540 reverse strand)
ctccaataagcaaatcagctctccaaaaataaagggtacttctctttttttttttctttttttttcctgcaattctattttatacatatgcttaattttctgatttatatatagatatgggtccaattgaagtgttcaactttacaattcaaattgccttcgagcttttcccatttgtagcaaaattaagtaattccccttaatcagcaaatgaaattcatgtttgttgatatgaaatgcaatacgtggctgagcttaattatatggagttttgataagacaatatgttgatatagaagaaccttcagcatgcatgtaaacttgttggcaccctctagcattctcataattaggtcctttatttgcagtttctctgctgagtttgaatctgcttactacaaatgtctcagaagttgaaattatatatgtcaaagtgacagaagattaattacaggttttgattttaacatcacttgttctgataaccaatcagtagtgaacacaatctgtcaaaaatcgaattcatttcaagctgccaattagcaattctttggatgctaatgctagctgcaactgacctaacttgtaactccttttgactaattgcagctgcgg

SEQ ID NO: 81533 - DNA, 430 bp, Citrus sinensis
  Intron number 2 from transcript orange1.1g025094m (locus o range1.1g025094m.g) derived from phytozome v7.0 (chr-ID sc affold00009; pos 857633 to 858062)
gttgactctgcagattgctgcttttcttgtatctggtgagtctctagaactatttgatttctttgtaattaatttaatctatggatctgttgatttatcaattagattttatgatttttaggtttccgtttagtttgtcagtttagggttagagcgaatgatgagttgacttgctgacaggaagctaaaagttatgccaatcagctctgttcaattttaagtgcatttagaatgattattgcaatttttactgattccgtatgccatttattgttgtaacttctcgcttgaaatttggtgctttccttttcttttcgttttttccttttctcctattatatcagaattcgcaatgtatccactcttgagtttttctctcctttgtgtcgctaaataaacttattcacatttgtttcatttacagtggacc

SEQ ID NO: 81534 - DNA, 962 bp, Citrus sinensis
  Intron number 2 from transcript orange1.1g033615m (locus o range1.1g033615m.g) derived from phytozome v7.0 (chr-ID sc affold00006; pos 18677 to 19638)
cggcaacaactgcaaaccttgcaggaaaaccatcggtacagtctttcttcttgaaatttggaaatacttcgtagtgtattctgtgtgtagtttacaaaattgaaagtgattcatgctatctaaaagttagctttgtcattgcatgctttatagtttactcatggcagatacaagtgaaattacatagcaattagcaagaaaaattatacaacgaagtccattgacatttcatgaggaaaaaagaaaaaaagtacactaccaaaattggagcagatgagatgctatggccaaatgcgcatagcttcactagtacgttttgactcattcaaatggcacatcattatgatttaggttattgaataagtattgcaagacgtggcagtttgtttattgtattccaagtactagataggctcagaatatgatattcacttgtgtcctcatttagtttgtcacagctaaaatagttctagatttagcatcactaagtgaaaggcaccatagaactcacctcatgtaaacacaattatgtaacttctcaaagttcgataatctaagggcctcctccggacatgctgcatatgaaagtgtcttgatatgctcaacttctgaggtgtatatctggtggtatctattaatctctgtcttcaaatcaagaaagacaataatactcaataatgcacagcattgctgcattttatcttagttaactagctaaggatcataagcaaactttgttactaaaaattccaaacatgcaaagtctattttctaaattgacaaggatgtgaccccatgaacatcgccataaccccgtaaaagaaaaaataaaacaaaaaccttttttttacgatttattaaaccaacataaaaacattgtagagtcagatatgaaagcagatgtaaaatagctgctgcatagtgattgacctacattttgcattctgatatgcaggcgattg

SEQ ID NO: 81535 - DNA, 966 bp, Citrus sinensis
  Intron number 1 from transcript orange1.1g004963m (locus o range1.1g004963m.g) derived from phytozome v7.0 (chr-ID sc affold00013; pos 1839175 to 1840140)
cttgttcatttagctttgactctttaatcaatcaggtaatgatttttaatcattctttcactttctctctccccatctctttcttttctttgttttgcttttcctcctttaatgttttgtaactctcaattttggaaaatatttatctttgataaattttgcaaattttgaggtaccactctcactctaataattctctttaaaaagattttatgatctctgtgttttctttttttggttttgtaatctgggttgtttttgtatttttaaaatgtcaattggcttatcattagatcttgattgatgggcaccataacttgaacaactggttttctatatatgtaaaggttcaatggatttgtatgattagtttccttcaactaaactttatcaatatttggaatgttgtcaatttttcttcatctatttagccatgtcgattttctgttgctacctctccacccctcttacaggataaaattttgggttttgttgagacatttttttttttttgcctttttcattttggaaaaaggtaaagagataatattattgcattattgaattatgacatgtttttagatatcttacatgggtgttccttcatctattccgggcttatctatatgcaactttgcgttgattctctttgtgtatatatcaaatcatttgataacctctagtcaaaattgcagctttatactccttctgggtttctgagtagcaaaactgggatttttattttattttattttatttgttgtttctgggttatttttagtcttattacggaaacccacatgagtgcacacctgtatttgaacaagttttttgtttgaatataatcttccatcttatctgcagctaaatttcatctccgtcattggtcattttctgattccattgtgtactgtgtgaacgaatctttcaggcattaaaccctttgcggaagactttgattctacg

SEQ ID NO: 81536 - DNA, 690 bp, Citrus sinensis
  Intron number 2 from transcript orange1.1g036932m (locus o range1.1g036932m.g) derived from phytozome v7.0 (chr-ID sc affold00031; pos 1015130 to 1015819)
ggatcttagtggttgtggaataactacacttcaaggtataccgaaataattaattcttagttttcgaaatattaagggtttttacttttcaatgtttttgagtatgtcaacttaattgaatcttaattaaacgctttattataatttttaaatttaattttaaattccccttctttattcttttgattctagatggactaattccgactagatcaaatttgaattagaatgctggtttctttttaaaatttaatacttgacatattttatcactattttctaacatagcccgctcatttctttcactctttcttttttctgattttttaaaataaaaaataatatttatcttcatttcaatatttatagctctgaatgaaaaacggttttttttttttaagttcttacatttcagtgcttttgaaatattattgacaagtgtatgtaacaacacaaaattatgaatttgtttaaatttattgacttaattctcctatgcctctcgtatttctaaaataaataaataaaggaggattagccaatttgacgaacttggaagtcgtggttctaaatctccaaataatataaactctgccgtaacattaaaaaaaaaaaaaattgcatctttaacatcatttcttctttctgggtgcaggattgactaaattgaaaaatttggaagcattggat

SEQ ID NO: 81537 - DNA, 552 bp, Citrus sinensis
  Intron number 3 from transcript orange1.1g036932m (locus o range1.1g036932m.g) derived from phytozome v7.0 (chr-ID sc affold00031; pos 1015825 to 1016376)
ttataataatataagcggttcttcagaaagccaaggtaaaatttttaaataaatgtacacagttatttttcattgaaacgtgataattttgtatatttacattaagatatatacgacttctttgttcgtcaaactagctacttgaaagacaaaattatgaagaccattttttttccatttaattaataatacctttgaaaagtgagttctttatttgtactgttaattgttatgagaggaaatatataaattttcgagataaaataattaagtgtattgtagaccatttattatttattaaaacaactcaaaaattaggaaaccaatatgatgtccaatgtatacgtgtgtaatatgcaggaatcttttttagattatttgaaatgctttagaaatcaacatcataatatatgagaataatacaaattgatttctaagtataattttttagctacaattagaaaactagaaagtcttctcattctataaattttgaaccttttattttcactttcaggagtttgtgagttaaagaatctttccgagtttatt

SEQ ID NO: 81538 - DNA, 794 bp, Citrus sinensis
  Intron number 1 from transcript orange1.1g018871m (locus o range1.1g018871m.g) derived from phytozome v7.0 (chr-ID sc affold00043; pos 53386 to 54179)
actgttttgttgatgtaagcaatctctgctctctcatttttcatattctttactttatcaagctctctgtccatgtacttactgatataacatagtttcaagtatgtcaatgaacagtatctttataatttttatggcattaaacaaaatatagagttttcataaagcctaaggaagagtttgaatatatcattttatgttcaacaacttccaaaaccatttatatatattttctcttttatctgtctgctactcattgcattcttcttctgaccgcatattcatgcacgtagagatcctcacccccaaccccaagctaaaagatctgattttttcgcttcagccgtacaacaaaactttcctctctaatttggatgtaccgaagaccatgtaattcttttttataaataaatttaatatggggttttcatgcactaaaaattttaatctagtaaagatttggtccaaaacaggaattaaaatccatctcatggcctcacccctgctgagtgcttttaatgatcatgggtccaatattaatggtgtatggttgaaaataaatcacacttgttttatattcttccagccgaaaatttaaatcaacaggaaatcctagtcataaaaacatatgtaataataagacaatttaaacaagaagagtttgcattatttatataatttttttgaattcctgtccataagataagaaggaatctatctacttgtaaaactaacaatacaatggactgttaacatagcaagttgttaattaatattattttttcaggggtgtg

SEQ ID NO: 81539 - DNA, 934 bp, Citrus sinensis
  Intron number 1 from transcript orange1.1g002672m (locus o range1.1g002672m.g) derived from phytozome v7.0 (chr-ID sc affold00033; pos 974685 to 975618)
aaagtaagtactgcgaatagatatgataatcaaacttttattatcctttaatttcttcctcatttcaaggatcctaaattacatagttctaaacttgcttaataacatgcttaataacatttttacacttctaaacttggaaaacatgcttaataacatttttacttcccatgttctaatagaggttggcattggtcgaattgtgtcaatccaacccaactcgtatatagtgcgggttgaaaaagtctagcccaacataactggttatattttttttaacccaacctgcaaaagtataagttaggaggggttggattggacttttgaaaaaagttcactttcatagtctaatttaacactttataaaaataaaacgttacaaaaataaataaattaattaaaaaaatataaaaacacaaatataaaattccttaaaaccaatccaatattcaaagtctaacaaataaattattagtttataattaaggaaaaaaaagtccaaaaattcaaagtcttgtttaacataaaatattaaagtctaaataccaatagtcaatataagtttaattaattgagagagttttattatattttcatatttatatttttgttttttgttcatatatatatatatatatatatttatttatatttatgatgaatcaatttggcaggttgagttgaaattgttcaacccaacctgcaagcagtataggatgggaatttaacaatccactccaacccgtttcttttaccaacttaacccaaaccgccaaaaatcatgcgggtggggtgggtttcacagcttggtgcccacccctagttttaaaacattttaaactacatattttctaatattctaagaataaacttttttaatagttctactttctttttccacattctctttcagataaacccacaattagtggta

SEQ ID NO: 81540 - DNA, 1000 bp, Citrus sinensis
  Intron number 4 from transcript orange1.1g008350m (locus o range1.1g008350m.g) derived from phytozome v7.0 (chr-ID sc affold00028; pos 14931 to 15930 reverse strand)
cagattcaatattggaaactctcctcacatactctgtgagtcaatacctgcctcatgccttcagtctggattgatttttatctttttagtcaccttagttgtgttttttgaaagttggatggtagttattgttttcttattgctttaccttcgtaatgccctgtttgttgttcagtaatgtcaatagtttgagcatgattaatatcagagaatctcactgttttcaaggactatgggatctagggaaaagcagttatggatcctcctaatatttggcttaaatactgaaatatccacaagttttgaatttcattaaaaccctatatgttttcagaaaattggaggtattatacagaacatacaaaaaaccctcatcctagaatgataggaaaagtttagcacctttaaaaaaggccgtcttatcagacacgtaaattgttacaaatttaaattgttacaaattaacatcattgcgtcattaacctcatatggagtgtatttagactaaaaattagggggtcaattatattcgtgcttaacaaaataaggggatattttttccctctcccttcctgtaagagtcagctggtcataattcctaataaatttccacttttaatagaatcctttttcttagtttctcttctaaaattaatgttgaaaattttatactttgcctaaaaatctgttcaagattgtacggtcaatgccgttttggttgggttggcaattcatgttcatgacaaggcaggggtataactacatgattcatataattaaatgtgtcaaaagtccaaacacaaacaacatgataattagatgggtgatttaaaaagtcacattttcagttgttcaataaatgtgatgttttcgtgttttgagatgaagacattattttgacaaaatactcccctgaacctcttatcccatttatttgttttccgtgctcttttattatcttgcaggctcttgggcaatcttctcaagcagagcaacacat

SEQ ID NO: 81541 - DNA, 606 bp, Citrus sinensis
  Intron number 1 from transcript orange1.1g033734m (locus o range1.1g033734m.g) derived from phytozome v7.0 (chr-ID sc affold08987; pos 1270 to 1875 reverse strand)
ttacagaggattcacttcgaagcttttcgtcgaaggtattctctctctgtgagtgtttctattatgtcatctttcttctttattttgcaaacaaaatattatgtcatgcatcatgttaaaggaactgattctgtggaatataaattttgattagggaagtttaaaacccgattttatatgctcaaattaatcaatcgaatccaaatggggggatctgatttttttggttgtggtggtggaacggacggagccatatatttggatactgacctagagatttctttgaataattttatagtgttgctcaattgcattgcccacactaatttggttgcatggaattgatgtttttcttgattatctggatccatctgtttgccctgttcggtccaaaatatcaaatatttataaaattcaaccatgccatcatctgattcccttgaacttgtaactcttaatattttgagattgaaaacatattcatatttgatttccttcattcagttccgtactacctttggctgcagaatttgcaatcttaccatctaattatgataaaattaactggcatcctttgcaggcgtatctttctcaaccactaaagag

SEQ ID NO: 81542 - DNA, 860 bp, Citrus sinensis
  Intron number 1 from transcript orange1.1g019788m (locus o range1.1g019788m.g) derived from phytozome v7.0 (chr-ID sc affold05829; pos 1115 to 1974)
caagaagatcccccaaagcttggttcgtcaaaaaggtgaacatacttactccaccaatttgccattttctcattgaatacatactatacatacttaatttcaaaaagtagactttactcctagatatacattcagtgattacaattatgagtatcatatagcagagatgtattaagtgttcgaaaaattattatataatttcttccattttttaagaaataaaaatgtgattattgtttaccatatccgttaatcttgtttctgttcactcagatacagaattggaagtcttcttgtctgaggcttttggtagtttatctgaattagaattcagtctaaactagactagttgtacactagaaaacctcatgtgcttaattgcaatctaatttagcttaccggtaatgttcctctacacatctgcatcaagtgaaggggaaaattttgactctgtgcttttgggccaatttcttcatgcgtgattttgccagtctctgctcatctaggggtgctcgaagcactcataagagcatgaacaaatatattacaacgtagtatttgatatatcccacctagattgctgttaaatgtcactggagccattttttgtcctagatttgcaatgtattgagccctatacaattcatttgacaactgtgccaaatatttcctccaaaaaactgatgcgaagttcacagggctatttatattatgaatagattttggaccctattctttgttcttcagagttgaggctaattcttactctagtcatgatttttttacttctgtaatcctaccaccaaaaaaataatgaaattccaggaataagcttgccttttttgctggagctgtcaact

SEQ ID NO: 81543 - DNA, 913 bp, Citrus sinensis
  Intron number 1 from transcript orange1.1g046277m (locus o range1.1g046277m.g) derived from phytozome v7.0 (chr-ID sc affold00078; pos 301154 to 302066 reverse strand)
ggacagtggtgggtgccagggaagctttttcaagtgtaagttccttgttatgtatggttactcacatatgaagctatagtgtactatatctatttgaagagtacgataatatgatttggtggatatggtaatgctgttctttggatattgcatgcaatgatcttccatggttacaatacagcatcgattagatttgccagcctaggctttgtattttggttggtgctttggtcatcttttctgaattgacatatttagaatcaatgttacacttctaagttattgaaaagcattcacatggttaaagaacttgtagagtagatggatcttcgacttaatttttttatgtttagagcgcctcgaatcttcttttggcatattttttgaggatttttctttttattgtataatttaacaagttacagctgttctctctttcttcctttctctattggtacgatctatgctaatgatggcctctttccttgcttgatgtgtgagttcctgctagaagaaaagacatctttctaaactattgtagaataattttgttgaagtagttttagtgattagtttctcgtttgacctctagagagaaactagttattatccactgacctctgagcaagagaataagttgaacagtttgcttatgaaatgtaagtgcaacatctggaaacaattgtgtcctttgaaggatatacacctttaatgaatttcttttaggcaatgactgtataattcctttgcatgagcaccatcatattatttgatctattgtgcactctgcattcaagcagacctactcctccctattgttgcttgattcaacatttctattaattcaagtatgaaatgatctcaaatgttttggacaggggttgctatttccaggttggaaattcactgaagc

SEQ ID NO: 81544 - DNA, 430 bp, Citrus sinensis
  Intron number 4 from transcript orange1.1g047092m (locus o range1.1g047092m.g) derived from phytozome v7.0 (chr-ID sc affold00092; pos 68508 to 68937)
tcttcataagcgttgaaccacgaacagggcatttggtgagttacattcaaagatatcttgctagtcttttgatggctggtgacctcctgaattttgacatggcctgtactatggatatcatagctttaatgaaaaaaatcctcacaatctgattatattgagttatttcccaaggattttgtcattttatttcctaattttcatgtcaatgaatggctaaagatgtgcaattcaaagttgtttttggttggctttgtgatacttttttcctaagtaggaatactgattatcattaaccagcggtacatctagtcgttttagctggtagaagagttaacatatgttcacccatgctatgttattcgtttgttcaacttttttttttctattttcaggttgttttgtcttgtgtagaagatagcccagcagc

SEQ ID NO: 81545 - DNA, 755 bp, Citrus sinensis
  Intron number 1 from transcript orange1.1g025278m (locus o range1.1g021628m.g) derived from phytozome v7.0 (chr-ID sc affold00028; pos 266186 to 266940 reverse strand)
ttggggcattcagcgcaactgactctcctttgcctgtaagtattataaacactttctttttctttcttagacgtgacacaacaattaattgctcaagtagtgataagcttatgattaaattttgtaaagtttgcaaaatttaaatgttactacttgatgccatttttcaattacaagggtttctgtttattgtgaaatctcgaaagcaggaaaattattaaagatgtaaagggaagattgtagttatctgagtcattttcaataagtctgtgtgatttgctaaacgggaattgtcacataaccaaggtgaggttttcgttattaattaattaccacttttatggcatgtttcatttaatagatagcctttgttgctaataaaaagtacacttggaaatagatggtacatggtaatggtatggacccgattgttgagctctgagattgaggggtgtatttgattcaaaaattcgtacttaagaaactttttaatgtaagtaaatttaataaatcactgccttatttgaggtcttaccaattcaatgaactaataccacaaattagatgtataataactgttaacctacatgttaaaatttactaatggaaattgatggctaactcggggacctaataagtgaatttaacggatcactatcttgtttaatttgcatgctcaattttgaatttgatcttatatagttctccatgttaaatttttgttccattttgaaatgtatagacgattcctgggt

SEQ ID NO: 81546 - DNA, 170 bp, Citrus sinensis
  Intron number 1 from transcript orange1.1g028636m (locus o range1.1g024653m.g) derived from phytozome v7.0 (chr-ID sc affold00090; pos 307912 to 308081 reverse strand)
cagtttctgaaatcgaaactaataagagaaaaaaggtaagcagttcatattttttgaaactttcttttttttcttctttttccaggacttggtttttgattttttatttaatgggttgtcttttgttttgagttttcagaattcaggaagaagaaaaagagtgaaaggca

SEQ ID NO: 81547 - DNA, 512 bp, Citrus sinensis
  Intron number 2 from transcript orange1.1g027901m (locus o range1.1g027901m.g) derived from phytozome v7.0 (chr-ID sc affold00405; pos 48389 to 48900)
tgatcactcgttcctcccctgcataattccagactgtaagctctttcttgtgattattgtactaaatttttggattccttttctatatataggaagtgattttcccatggcaaaagggtagaaggcaagcatggggtgatgaacattaacaaaaagattattttgagaataaacataagaaggaagaaaaaaaagaaaacaccaagcaaaatgttatttatgacacatatgcaagtgctcgctcgcaaatagagaacctatatgaaaggcaatatctttgtcgaacatcaaatcatccctgccaccattattaactgtaaacaatgtcataaacaaaaattaaaccagttcacatgatgttcttctttaataaattaccccttggaagttttatagtctgattttaacagaacgaaaagcttacgggcctattacagagatgaaagcttttagttttagcaacgaggtaacgttggtttgtttctttttattttgtccaggtactcttcact

SEQ ID NO: 81548 - DNA, 665 bp, Citrus sinensis
  Intron number 1 from transcript orange1.1g006168m (locus o range1.1g006168m.g) derived from phytozome v7.0 (chr-ID sc affold00091; pos 148371 to 149035 reverse strand)
ggagcccgcgtcatctatttagcctgctctctcaggtaacgaactactacgtgattgatcgctagctagctagtagctagttaatatgatacgcctacgtattcaaatatcatgaatacccctcgtgtttcttttattcataattgataactgttttagtgttacatttttgtggtgttgatttttgggattatcaaaaggctagtgtttttattgatatatatgtttatgaattatgatgatgatttttatatttgattttaaagggtagatctttttcttatttacaagatgagcttataaaagagattactcgaaattatagtttattaaattttatgaattttgattgagaagaaaaataaaagaataattattagaaaatagttatattcatattgtttatcgtcagttgtaatttagactatttaattagatttttactgccatgaaagtctttttcagtttaaaaaaaaaaagttaataacatttatcccaaatgtttgatagaaattgtatttatctaaactttaaggggaatatgtaattatctctttctgaaaataaggaaaattcaatcgcctgtagaattagaaacattactatattcgtaacaactttgtggaacgctactgatgttacccggcttcttggttttgttaggt

SEQ ID NO: 81549 - DNA, 947 bp, Citrus sinensis
  Intron number 1 from transcript orange1.1g004476m (locus o range1.1g004476m.g) derived from phytozome v7.0 (chr-ID sc affold00043; pos 694112 to 695058)
gtgtcaacatcaggtctcggggatcgcattttgaagtaagtgaataactattgattcattcttttgttttcatgttttgtatctgtctaatgtagtcaattatcatttggttacatattggatcccgtatgtgtttgttttttgttttcctcatagctcaattgagattggtcttctgttactgtgaaaaagtgtcacgtctcttttgctgctttaagtttaagcatctttttcatgtgctgatattttattgacttgtatcatagcatattgttgttgctgggattttgtcaaatatgttcttttagcggcaatactattgaatttcatttattttcacgaaagtttaatgtattcatttggtaattttttttttttttggatattttgacttacagatgctgtcagtaaattttggttagtgatggtttgagattacgtatgaataaaaacagaaaaacagttatgctctgactttgcgacgattttctgcattattttgtttttgcatttttccagaccaattgggtcacagctaactgcctgctcttttgagcattattgattcatttctcttgtttgtacctgcatttccattctcatttgaaaattttattctcttttctgttttaagaaatgtaaccatgctttctctacactgcatgtaggtatatctcacacgtgtgtccgggcatcaaattagcattatgaaatttcctgaatttttctatatttttctttgtactaaataacatatgttataggagtttgtgactttccattcatattttgttctgaattgttgctcttggtgttgattttgttgccagtatgattatccatgtgttattatttaattcaagctcttcaagacgtatggaaaagtttcatatgatatgaataatattgagatatattgatctctgtatttttattatttccccagg

SEQ ID NO: 81550 - DNA, 565 bp, Citrus sinensis
  Intron number 1 from transcript orange1.1g033691m (locus o range1.1g032278m.g) derived from phytozome v7.0 (chr-ID sc affold00077; pos 227033 to 227597)
tatttgagtattaaggtaagaaacagttcttgatggtacttttaagatgctttagggctcttgtttagctagatacgatcataaaaccagtcttaagatattatgtcacccattactggtcaattgtaggatatatggaatttattacttgtggacaggacaattcttaaaggagaacagagaaggctaatgttatctgcttgattggtcgtatttatgtgctcatagcatggattttattaatgatggacaaaattgtgatttgccttgttcataagttctccgggtgctaaggacatggtgtgattaaacatggaaataacaattatcattacttagcagcctgtcttttgaagaaagaattacatgaaataatttgacgagcattaatagtgggaatggacttggaaacctaacttattgaaattactcgaatacatttactttgtgctgatgaaaagactttttgatgcattgacctttttggtttatggaagaaaacaaaaaagtgtgaatatttggtttaatgacatgcctcatgcattgaccttgctgtcttttcagg

SEQ ID NO: 81551 - DNA, 1007 bp, Citrus sinensis
  Intron number 1 from transcript orange1.1g033223m (locus o range1.1g033223m.g) derived from phytozome v7.0 (chr-ID sc affold00028; pos 131504 to 132510)
ctgtggttcagaagaagctctctgttgatttaaaggtataagcctcattttgattctttactttgtttctccgcgagcaagaattaacatacagaaattctgcccctaatttcgatttttcgaccataagcataatctgttcgtttttatatatgtatatcgagaagcagtagtatctgagttaagggtatattgaagcagtagtcactttggtacaattgggttgctaaaatattgcataatgtaaatgttattttgtttgatttcatattctcaataagttttagtgacatgaatttctgggtcagtgtcatttggcttataagataggcttgtgtgatcttagctggggtgactgcttcgtgtccgtagtggttcagataaaatgatcacataatattaagtatgaggtgagtgagatgtttgagttcaattgtgaaaaattggagggttgtttccgagtttttgaaatgtgtggctgttaatagtcttatgcataatgggcaacttttgttacttgaatttttgagtattttgatgatctagcttcaaagttctacgtgattacaagtgttaagtctgtgactatattttttctgtatatggggaaaaatctacagggcttcaacagatgtgtgttctgcttcatagttatctttgaattatgtttatgcatttgattgtacttgaaaagataacttatgcatggcaagctcattgtttctgctgcgcattgtctgagagtgtcttaaatggctcaatgtcttccagtttgctctttcaggtgtttcttggttaacgataggttgaaaaactttgaaacacatccattgaagtttgaagtatacacttgacgtatttgaatttgacatttcttccttagtctgtattggaacaactaatgatcatgtcgggtctgttctaagatgctgtgtcattaattttctcttctgatatcttaaattttgcctggcagcggaacaaaacagatataatcatttgcagtt

SEQ ID NO: 81552 - DNA, 587 bp, Citrus sinensis
  Intron number 3 from transcript orange1.1g019426m (locus o range1.1g016288m.g) derived from phytozome v7.0 (chr-ID sc affold00013; pos 958819 to 959405 reverse strand)
ggctgaaaagcatattcagaaactattactacttggtgagtagaacacaagacaatcctttcttgtcactcgattgtcatttgttatgcatacaattggttaaatattttgcagttttattaaacttgaattccaattattgagggcagaatattggcatctggcaaggttttttttttactttgctttgccgcattttgaggaatgaaaacattttgataagttgtgaacaacctacacaagaaaattggcaccctttggtaatgaagtagacaagtagattgcaaacatgaggtcgagatttatgtttagcaaacaattatttttttctgtccttgctgaatgctgatgccctccttcagccacctagattcctgccacctcctttactctgcttttaccttcttgaatttgattatattgtgcttttattttctggccttaattctacttccagtactttcaattgaaaacactgtttgttagttcgcattttattttgtttttctttaaggttgatctgtgatataatcaaaattttatgttgtttaggtgctggagagtctgggaagtcaacaatttttaag

SEQ ID NO: 81553 - DNA, 360 bp, Citrus sinensis
  Intron number 1 from transcript orange1.1g030082m (locus o range1.1g027696m.g) derived from phytozome v7.0 (chr-ID sc affold00118; pos 309224 to 309583)
aacactaattgacggattccgtatgttatatgtttgttttattaatctgaaatttcttcttattaatacttttgattgattgctatagctataaaccttaaaaaatttatttgcattttttagattggtttttttgctttttcgtatttaattctgggatatcatgactagaggcaggtgttggttcttaaataaaactcatttgggtatcaatatccgtatgtcatgttattgttgcgtatcaaaacggggatttaggttgtttttgagttttatgggagattcactagtttcaatgtttaaaggggattttttgttattacaggacctgcaaggtgttatcgccagatcaaaaataag

SEQ ID NO: 81554 - DNA, 546 bp, Citrus sinensis
  Intron number 2 from transcript orange1.1g013096m (locus o range1.1g013096m.g) derived from phytozome v7.0 (chr-ID sc affold00006; pos 995782 to 996327)
atctctgatttgatgtaagttaaacttgtctttatttatcgcttgtgtggcacagttattagttacgcactaagtaatacatgatcaaaaatattgcattgcgtgtttcggtgtcgcactcgatgaattgactgatatgaaattagaatggaagcagaggaaaaagaattatgtggaaggcttttattgttttgtgtttgttcttgaaacttcctatattttattagttatttattgcatagaagacagagtgagttgtgcgtgtgtttaaatggttgggtatttgtgatggaccatattaaagttaaaataccggttgtttagtccttttaatgctgaaatttctgtttaattgctttgtttattggaaatcaaactggaactgtgagataaattgagaggttatttgtcttgcactccgctaacatctttatagcatattgtttcttatgttcaaattccagacttctctgaactctaacaaaattgatatttatgtgcatgtccaaagaggtcaaaagaaagtctgtttgatattcttcatcc

SEQ ID NO: 81555 - DNA, 717 bp, Citrus sinensis
  Intron number 1 from transcript orange1.1g035861m (locus o range1.1g035861m.g) derived from phytozome v7.0 (chr-ID sc affold00158; pos 25056 to 25772)
gtataggtaagatgcatgttattgttattcttccaatacattatttaagcaattaatgtctgggaattgggtcatcataactatggattattaaacgagtctaatgggccaaagttagtttatgaatgcttcaatttgtatcatcagtaggcagttctggttctgttggcaatcttgtgagttaattttatgtgtgatgaactttatttgtcatcattgttttaggactcctaagtgttctggttcagaggttatccagcttgtgtgcttctctgatgtttctggtttggcttgacaggaaaccaggtttttagtggttaatggtcgaaccatgtagtatggtggtttaaaccctgaagtaacctgtccttcctttagacctttctattaaccttatgactttttataaaaaaaaatgtgcagcacataattcttggatatttgagggacttcggttgattagttttctcctgatttttcttgttttccaattaaaccatatagtgtggtggtgtaagcatctagtcatttccttgatccctgtatgtaacctgataagaatacaatgtgtgtgcatgccttccccccccccccccccccccccaccccccttctttcctgcatcagtaaaatgttatgtttgtgctcatgttcagctggttgtttgattttaatgttgcagagctccggaacttctactaggagcaaagaagtatt

SEQ ID NO: 81556 - DNA, 583 bp, Citrus sinensis
  Intron number 1 from transcript orange1.1g031734m (locus o range1.1g031734m.g) derived from phytozome v7.0 (chr-ID sc affold00821; pos 59928 to 60510)
aaagctgctcttcattcactgactgataccttgaggttagttattcaaagataaccccacgatttttaatactagcgatcctgtttatatttgccccacatcagtttatgccatgagaagtcatttataagactaaacatattctcgttttgtatgaacaaattttcttgtttctatgggatgattatcatgatttgcatatctgcagaatgatgttatatattcttacattataaatatagccctccggttgggagaaacatggtatttgattgatcgaattttcatctctattactgtagccaagtatccacatcattatctcaaatacaaatgggattagggtttgggttactagttatacaactaatagataaatgaattaatgattttggatttatttgatttttgtgtatttgccggaccactttaaaagtttatttcatttttgtgaaatactcaaaccattaagcagtaagctcttcaaccgcagccaagcatcaaacatctttatgttagattaacaaataggattacattttggatgtattgtgcagattggaacttggtcattttggaatca

SEQ ID NO: 81557 - DNA, 507 bp, Citrus sinensis
  Intron number 2 from transcript orange1.1g024452m (locus o range1.1g024452m.g) derived from phytozome v7.0 (chr-ID sc affold12390; pos 589 to 1095)
ccagggtactaatatattgacatttcctttaaatttagattgattggttaaagatagtgataaagagtgaggcctgagaaatcttgatttatgaaacagagttcgttccaattcttctgcttaatgttttattgatctgtcgtctgcgcttgaagcttcagtaatctctgcatattattcggaaaatttgttgtacttctctgttaaagtcaatatgtatcctggtgaaatataattgcataaatacagatcctgccatcctaattctcattctccgtcagaaatagtaaaaggaagaaaaaaaaaatgcatcagtttcgcctgaatatttgattcgagttgcatgactttacagtcagagtttggtctgcattatttgaatttgacaagacttagtgctctttccctacacatatataccttgctttactgacagtacttataaacattttccattttgttgaatttccagacactgtcggctgctgacatccgtgaccccaaaat

SEQ ID NO: 81558 - DNA, 397 bp, Citrus sinensis
  Intron number 1 from transcript orange1.1g024350m (locus o range1.1g024350m.g) derived from phytozome v7.0 (chr-ID sc affold03331; pos 760 to 1156 reverse strand)
gctggtatacagaattactttttctcttttcttttgtttgctaatattggtaaattaaggaaaattatcaaaaccttctagttgtctatataaaaaaaattaatcatttgcatcacatattttgaacccatcaagatccatcagcttctacaaggatagttatcttcaattattttacttttgttgtggtaaaagaccaaaaaagtttaaagtccaagtgtttgtgaaatatgaaagagaaaagattgattgtaacaaacaattaataaagtattctttatcttggttaattatgcggtctaattttacaaactaagcttctaaaatttttactaactgtgtttggattttgaaaaattcaggtttcggttgaaagggcaaattcttgaaggaggaa

SEQ ID NO: 81559 - DNA, 930 bp, Citrus sinensis
  Intron number 3 from transcript orange1.1g037586m (locus o range1.1g037586m.g) derived from phytozome v7.0 (chr-ID sc affold00603; pos 53153 to 54082 reverse strand)
cctctctcgagtctgattcatccacccttagccaggtactcatgattctaaatttaattgtacccttagccaggtactcatgattctaaatttaattgtactgtgtaaagtaagttagaaagactatttcttagggtatgttcggaatcaaggtgaattttatgctttaagctgctgtttgtagttttaactgcattatatttgtaaaatataatcaaaacaaaaaaagcaaattctatgccaactttggtgggagctacagttatagattgctactgttttgagatgccactcgtaggcaaaagagtaaaaggtttaaaattaaaattacttttgaggaaaacatattaacttttttctgccataaataatatggttttgtactgttacctattttagagggaaatgggcaagttaatagacatattatcatagatatcctcaagtaagcaaaagtgtgagctgatttcattgttttctcgtattgtttgctatttggtttttactctggtgttccgtctaattgttgccttgctggtctttgagagttgatcaattgtataaataatagacttaatggtatggtgaattttgaaaggaatgtcttcttttaagggaaaaaaaggtgtcaaaattatgggcctttcatctgtgtaggtttgactttgtgatgcatcatgagggttggtggcaaacgtttaagagaacattgaattttagaaatggcttctggcattatacaggccatgtcatggtagaggttgttagcttttgagggttatcacgtactcttccaagtaaatgaaaaatagatattcatgattagtcaaagaaacatgtacttccaactttttctgttttcttgatcttgttcctactctttttggacatacagacgttagagcttatcacacaagaaagagtcagcat

SEQ ID NO: 81560 - DNA, 552 bp, Citrus sinensis
  Intron number 2 from transcript orange1.1g037586m (locus o range1.1g037586m.g) derived from phytozome v7.0 (chr-ID sc affold00603; pos 54152 to 54703 reverse strand)
cactattcagtccctggaaaacgacctcgtttcgggttcactctctgtccttctccggtttctcgtttactttgaaagtgattcttaaaaattgtttttattctgttatgaagtgtatgcagtagttgtggtattactttttgtttttgaaaactggtttggttgaaagtgcttttatgattagggtttaggaaaactaaaaagcacttatttgctgcttcattaaaaagcactttttcctaaatagtttttccagtgctttttaatcctgaagatattttgtgtattttaagtgaacgctagaaattgaagaaaaccttgcttttggctagttgaaagtaattttaatgatcttggaagtggattttcatagatttatctattttaaggacaattttagtccttcttttcagcatttcaaatttttgaatttatcatatctcagacacagtagttcttatggaagaagctttttgttatagtcattgtttgtatttatgaacgttttttaatattttgcagcaaaaactgaaacaaagaaatttaaagaag

SEQ ID NO: 81561 - DNA, 725 bp, Citrus sinensis
  Intron number 1 from transcript orange1.1g012626m (locus o range1.1g010375m.g) derived from phytozome v7.0 (chr-ID sc affold00068; pos 184807 to 185531)
tgctttgttgctgccattggaggctccatttttgggtatgatattggaatttcaggtaccttttccatctctttttatcctagattaatcaatatctttttgttatagagcaataagatagtaagaacttgaaatgtctgattggaaatttcactgttgcatatcttgcagtataggatcagaattataccctgtccttttcttttctttcagtttttttccctttttggttggttggttggcttaatggtttttgttcagaattacaactaattgaaacttgaaagttcaaatttttaactgcttagatcttccagaagattttttttttttttggtggttggggggtggggtgttgttggggaaggggaattagcctttgataattcggatccccttttcactttgtttagaatctgttgaattataccagcagccaacacagaggggatcaaaatatgggttctattcttatccaaaaagtaattcattgatattaatgacaatttacttcaataatgatattttagtcgtccttatcctgaagaagttatggttcaatcatattaaaaaagaatttactttttaacttctattagaaaccttgttttaaacttttagaaaatagcagaatcagctgacaaattctatttgggatggatggatgcggggcatttcttcctaactgatagttcaatgattgattggcaggaggagttacatct

SEQ ID NO: 81562 - DNA, 948 bp, Citrus sinensis
  Intron number 1 from transcript orange1.1g027743m (locus o range1.1g027743m.g) derived from phytozome v7.0 (chr-ID sc affold00009; pos 1713504 to 1714451 reverse strand)
aaagactcgctctcactcagaagtacgaggaggtagctagttattatatttcataaattttaatacttttatttaatttgattttttgttttcttcgctattttattttatttatttaaaaaatcagtcattttacaagtaaaatgataaattgttacaaaatataatgggttgcgtaagtttatcgtttgttgtaaagtatgctttaaagatattgttgttacttctgttgaatatctaatttcattgtgccttgttcactgtgagaagattcaatcttacattctagttttcatgtttaatgttagtgttttgagattgttggtgataggttgacattgaatacaagaaccaaagtgattaagcatattcgactaaatacaagaaccaaattgagaagattcaatcttatattctagtcttcatgtttaatgttaatgttctgagattgttggtgataggttgacattgaatacaagaaccaaagtgattaagcatattcgactactttctgctaatcaaatctttattggttttatgccaatttctctggtattgattgctgcgtcacatattttggttagaaatactgaaagagcttgtggtttgtgctctgaaataatctttagatctttagcaaatttggttaaatctttgtctaaatatgatcactgatgtctgatgcatattttgaaggtgggtttaaatcattaatttcaaagataagtatttggactaagctggtgattttaatttcttacacaaaagtcttagttaaggagctaagctgggcaagttcacttgcaatatgtctctagtaagtaaaatttaaggcgcatggctggcaattgggtttatcaaagttataagtgtattttattgcaagtattatgttttaggattttgctgatgtggatcttcttgcagttgcttgttgctgggggtggc

SEQ ID NO: 81563 - DNA, 847 bp, Citrus sinensis
  Intron number 1 from transcript orange1.1g038924m (locus o range1.1g038924m.g) derived from phytozome v7.0 (chr-ID sc affold00176; pos 223392 to 224238)
cccaaggtatgctgatgagcaaaatttgaacattttaaattcttctatgtctcagagttttatttgttggttttgccttctgtatgaatagttcagtatatgcttctctctgtatccattgatttatctagtgcacatgatcttggcattctatattacttatttgttcaaatgtcgcataaaaatatagatacctttgctttcagtacttccaaattcagacggtcgtatgccaagtcaattatgttattgataaaaaattaatccctaatgattaatataaagattggctccattttgaagagactatgaaatgcatttgcgttaaagttatcagtatagtttacaggaagagatttgctggggcagaagtttaagctattgattgggattttttaaaagaatgtaacagaactactgaatgtatgtgtctctcagtatgatccctgtctcactacaactacttctgtggcacttagaaggtgcttgcttacaatcggttgtgtcacccacagagttataaatcaatgattatgttgaaatagacatgtgtggatgctttagcacataaagcttcattaatcatctggaaacgtgttttagcttcattaatcatctggaaacgtgttttacaaccacaatatatgcttttgcatcacttcaccaaagtacaaaagaaattttgtttttagaataattgtgtggtaatcaatgaataaggtcttacgagtgttctgactaattttatgcctttttaaaccttaaatttcttccatcatttatgctttttgtttgttttttttttctttttgcattaggttgacccggggcaacctccccagttgac

SEQ ID NO: 81564 - DNA, 814 bp, Citrus sinensis
  Intron number 1 from transcript orange1.1g027067m (locus o range1.1g027067m.g) derived from phytozome v7.0 (chr-ID sc affold00068; pos 376383 to 377196)
tgcagttatcattccagcgatcgaatctctcaaacgtaagacttattctgtttctctcttgtctctgcgtgtgtgtgcgcgtttgctactccttgtaataattataataatattggatgagaaactggggaattgaaatggcggttcctttctctttttattttttatttttttttagtatttgttctgagctctaattgttccatgcaaaattcaaatgtgtatgttttgtttgtattatgttcatgtataacaaaaccccatttgctaatctgagttgttttccaaacccaatgaaacaacaaattaacaatgccgttggagttgcagcattgtcgacgagagttgtgctcaatgtgttcgatggaatgtctaactgcacttattagcaagatgatttgggctatttcattattaatgttacttattgtcaatcgttttcattatgggttatttcatattaattttattgtttttagttattgtcaatcttttgtttttaattattgccaatctttatcgccatgggttattttcattattaattttattgttcataattatacccagaagattatagtatgagcttatataggaaattatcataaattttctaggtgtccaattcgcaagaccctgttgtcttcctgtgaaacttctatcattagccttggattacgtttattttatatgattgagttcttggttggaatttactttgataaagcttttgtgatgtactaatgataagtttgtgctcgtgttctcttaatgaacagtcccctgaattttcatcataactattgctcttagt

SEQ ID NO: 81565 - DNA, 975 bp, Citrus sinensis
  Intron number 3 from transcript orange1.1g024173m (locus o range1.1g024173m.g) derived from phytozome v7.0 (chr-ID sc affold00006; pos 476947 to 477921 reverse strand)
tttgcatttagtacactgtaatggttgctctttgttcctgcttctcatgaatgaatcaagtatggagtttaggggctatgatctgttttttaattactcaaaaattaatttggagatatcactgaaagtctttttctgcgattctgttgttttgttcagttgttggatgtggtagagattatggcagagagtgctgtgagtgaataggtttctgagatactggtatgggggtttgcttgtcatctgtctctttccttcattaagcccgtttctttttagcacagtttccttcaaatagcctctcactgcagttctcctccatgcctagcgttctcctttatgcccagcgtcctagagggcacaactatctccctgataaagggctgtgagtgtgtgcgtgattgttttgttttgtttttcttttttttttaattcttttcatttttttggtgcctttcctcagattgtgttgttagttgtcttattggtatgataaagatatcaaaactatggagtaatttgacaagatacatctataacttgcagatcaatttggcttctctctctctctctttgtgtctctctctaccgcatcctttcattgatgccgtttttgatcaagatttcaatgaacattagttttctacagtttattccctaatattggtaattctcgagtgacctatggtgcatttgcttattgcccaaaagccaacactgaccataggtcccgggaaatcctagacaaagcatcgatgttttgcctatttgagccttttaagtatatgataagtttattttattcaattctatttccatatcaagtcgcgacttttaacagttgtagtagagacatagagcaaagttttcatttttgacaaagataagcttatccagcatttttctttcaatatttgattgcgcttcatttattctgtaggtgacttttcttgcacatcagaaatccaaagagct

SEQ ID NO: 81566 - DNA, 265 bp, Citrus sinensis
  Intron number 2 from transcript orange1.1g015495m (locus o range1.1g015495m.g) derived from phytozome v7.0 (chr-ID sc affold00193; pos 62636 to 62900)
tccagcggcagcatctgattcgataaagcctagaggtgttgtttcaaagcatgttgatgattgtagttagattagtccataattgcttatatttgtgagcaaaaaagtgctatgttaatatcaaaatttttaacgaaatgatttgtttttgctctcatacttacatggatagtaagaaaatattaggatactaaatttataactttcagttctaaaaggtagtgtgcttgccaatttttcaatcttctctctttatgttatacag

SEQ ID NO: 81567 - DNA, 519 bp, Citrus sinensis
  Intron number 2 from transcript orange1.1g010981m (locus o range1.1g010981m.g) derived from phytozome v7.0 (chr-ID sc affold00125; pos 257851 to 258369)
ggctgctctttgcagtgattcatattggtaagttttaggctagttttcatttatttatttttgtaccttggcaatcaaatgctgttctttggtctctctttcttttctttttagtcagtttttaatcattttcttatgtatgtatatataaagaattttcgtagtttgatttggaatctcaattagaatgatgtgaaggtgggcgaaaagaaaaatctttgctcaaaaagattccaatgcatgtggccactggtggaataattggcttttttaactttgtctagattatattgagttctcgtgttgttctgttttccattggggtaacataatatgctatcttacaatgaagtgttgtgttaagatacgtcaacgtgattacagtattaaattactctgttcgtggtttgtctaggctttattttgtgttaagatatgccgacttgattataatattaaattactctgttcgcggtttttctaggctttattttacaaaagtgaagctgggttctcctc

SEQ ID NO: 81568 - DNA, 1055 bp, Citrus sinensis
  Intron number 1 from transcript orange1.1g035178m (locus o range1.1g035178m.g) derived from phytozome v7.0 (chr-ID sc affold00516; pos 106780 to 107834)
tccaggatcgaactagcgacacaaaaattgaggtgactttacatgttccctttaaaagccaattatttacctttgtcatgtacaattgtattaaccagaggaacacaattgcattataaacagtgcccttttacacgtaggtggaatgtttttcaggacaagttggaaaaaattgaacgtattaatttcttggtgaactatagcttgataataatgtttcctttattgttgatttccacatggttatcgcggtaaagattgaagcaaatttctcgctcagatttcttccatgttaacctgtacatgtatgatgtgcctgcatttagggatgcctcagcctagtcacgatcacttgtgtgcggaacttccccggttattattatattttttttttctacactcaatcatccaaggatgaaccatattagtttgtaatcagacagaccgaaagaaccatgttagtttgtgtttgcttggcaccaaaattcaagagcttgggagatacgtcatattggacatagaatgttgtttaaatttaaactagtaacgaaacatgatgttatcgtatataaacaaattaatatgaaaaatgcagtattatttaaacagaaataattcagtgagtaacttcgccaaccatattaattacatacgacgcatcattctattacaccatatgaatgatgcgtaaaccgtaggctacccaaataacatcatgaacaatgtcatttagcataaagtgagtagtttcttaaagagtcaaatcaaggcaatgaaaatgaacccctcttttaaaaatttcaactgatcgttttctttttattgagtttagtggataggattatttacaaaaaattcaatgaacaatttcgtcaatcatattgtgagcgcaattatacaagaaacacaattttgtcactcagtaggtcatgtgtgcaacattctaaagagtcaattaactcattgaaaatgaaccatatttttattatatcctcaaccacccacttaatctttttgcaggaaaaagaagccaaaaaggaagctttcaggaagta

SEQ ID NO: 81569 - DNA, 645 bp, Citrus sinensis
  Intron number 3 from transcript orange1.1g044275m (locus o range1.1g044275m.g) derived from phytozome v7.0 (chr-ID sc affold00121; pos 24015 to 24659 reverse strand)
aagaaagctttcctgacaataaatctgttgcagctgtaagattctcaacttaattaattgttacccttgtttggatgctgagaaaatgaaggaaagtagaagaaaatatgaatccgatattaaaacgtgttgctgcttgttttgtacttgtgaagtttgtttgagaaactcgagttaaattgacgaggagttggaatttgggaaaatagtacttaatctatttaagtagcatttcaaaatacgataagtagaaacaaatatgcatcaatttttatgttttgaagttttgagaaactcgaatttaactgacgatttgaaattcggtattcaaatttcccttagttactttctgtttggctgtagagaaaatgaaaatactgacattcagtttcgttgtttttagacctttgcatttcaaaatatgagaaacttgaggtcaatgatttgacgagaagctgaaattcagaattagcatattttcttaacctctgtactttataataaaagaaactcaagaaaaataaagtgagcagctgaattttagtttcgaatttctcgtaatttcctcggtgttttctctgaaaccaaacagaaatttatagtttcatggcagagaattatctgctgatatgtatgaacttgcag

SEQ ID NO: 81570 - DNA, 658 bp, Citrus sinensis
  Intron number 1 from transcript orange1.1g044275m (locus o range1.1g044275m.g) derived from phytozome v7.0 (chr-ID sc affold00121; pos 24903 to 25560 reverse strand)
gttgttgctgttgctcaaaagaaacctcacgccgagtgagcctcacattttctttgcttctgttttctgtgtttctgcttcgtttttatctacttgcctcttttgcttttgtactttttagattatgtgctctgattttgaatttgactcgctttaatttaactctgtgactatgctctttgatttttgttcagaaactacttcgattaacgttttataaataattttgcttcagcgacatgctttcgctttcattttccatttctttttgtgattgtattgttttcttaaattgccttcgtttctttcacttccgttttctttcacttcgcgcgtttgtttacttgttcgattttaattctgttatactataaactagtgatacgaagtacgaacgatagatttgcagatccgccgctttaacgattgtttgtgcttcgtatcactatctcgattttgcttcttgttgttcatattatcgccttaagtcgcgatcctgtcgtttcatttactttctgcgcatgcttctgtttagtcattcgtttttgctttccgcccacgcttctgtttagttgttcgtttttgcttcacaaatctgttgttttttttatttggttttgtccgtttggttacgtgtgcgtgctttgaaatctgaagc

SEQ ID NO: 81571 - DNA, 950 bp, Citrus sinensis
  Intron number 1 from transcript orange1.1g012225m (locus o range1.1g007635m.g) derived from phytozome v7.0 (chr-ID sc affold00031; pos 700958 to 701907 reverse strand)
acatcactgcttctcctctaggagtccctcaacaggttcaccttttcttatctgggctgttattatttggtttaaaaagttgtaaaaatagtagtttttcgttctgttgaactcgttttctgtttggttttggttttgggtctactggggtgccactaaagagtaaaggcactgttcttttgtttttcacactcaattttttgggttaatgtttaaagttttatgctttatgttgtgctagctatttttatgatgatcttgtgatctgggttttgaatttttttcctctccttttacagtatttgagatttttttttttggtcattcttgtgcacgggcaatgaagtgctagtgaatatgtttatgatacatatattgtttttttcttttttgggtttattttttgaatgtggttggatttgatagtgcagtttgaggattgttgaagtagtctaaatgtaattataggccaatcttgaatatggggttcgtgcttttgattttatctctctttattttgtggcaaaggctatgtatttagccacattggatagtgtggtttcactgttagtgaagtggcttaatgatgatacgatagtggtgttttaatgtttgttgagtaatggttggttgtgtgttgctaatgtgccacctccgcaaatttgaacgagttttatttgctctttttcattcgcacgttctccccccccaggggcccaaaaaaaaaagttttcttaaatcacaatggtctttattgaatgtgtgaaaaagtttttgaattgagtagtatgtttgctttttagtgttttcagtaatctatggtttatgtttcaaatcttattgtgtgagaaactatgactttgctgacggtcaattggactaattgtacttctgttaaattacttgtggatgcaggttatagcgattaacggaaagtttcccggtgcggt

SEQ ID NO: 81572 - DNA, 861 bp, Citrus sinensis
  Intron number 2 from transcript orange1.1g035698m (locus o range1.1g035698m.g) derived from phytozome v7.0 (chr-ID sc affold00350; pos 23541 to 24401)
cgtcagtgaacctgaactttactgaactttacacagtttttcaactcagtgatttttggaacgcatattggtgtaaggaaatcaaacgaaatttatgcatagtcaaattctgatatttgctatattttatacattctaaagtttctccagtttgttctcagattaccatcactttttgccttcaccaaaaaaaaatatatatatatttgagtggctttccggtggatatttaatcggaggcatgactggattttttttcacttctgtagatcttgcattttaaactggcaaatttaactttaatttcaatacgactttgttggtgccttctgttccaggagctagaaagatgtgtagttttcagataaaggggcttgtgaattctctagtaagaatccaataatttgcttttgcacgttcattttatttgtagatccttgcatctgaatttgatcaatccaaaaggaactgcttttagagggaagaagaatagcagtacctattcgatgacatagtgtatggaccctcacatgttaactttcatgaaaaacacatttaagaaatttgcaactttttggttagttatgtatccaatgttgttttctgttttagcatttgtagaatctactgtattatattttggcagctacagtatctgaggtatcttttgcatttaacttgctttatatgttttgtctgtgacttaagaacaccaatatttgccagagatttagagaagcatatcaagatgcttggctaacttgacaaacttcaagatccttcattcttcacaatgcaaaacttgtgagtacacttatgcccgcaattattgtgaaatgcttgcaattttgatgcagcgaa

SEQ ID NO: 81573 - DNA, 486 bp, Citrus sinensis
  Intron number 2 from transcript orange1.1g003682m (locus o range1.1g002958m.g) derived from phytozome v7.0 (chr-ID sc affold00149; pos 146246 to 146731)
gagaggaggtcataaggagtgagctattcttatacttttttgtttactggggaacagctgatttttgtgtggatttttcttttactaacttgggcttccaaaatcatgtactgcaagtagaatctcttaggcttggcttagtacacatagttttctgttatatgatatacttaacagttgggattcagttctaattgtgttttatcatggggcattttgtagattattttgatctgataaaaaagggaaccaactttgtcctcttgctaatctcagtagatcaaaagttccttgtttgacctcaagatggtttcgaggtcgtattctaacctcttagatcttgcttctggagatttcccaaattttagtcgcgagaagaagaggcttcctcgagtagccactgttgctggggtgttgtctgagatcgatgatgagaacagcaatagtgttggctctgatgctccctcatctgtttctcaggaacgg

SEQ ID NO: 81574 - DNA, 246 bp, Citrus sinensis
  Intron number 1 from transcript orange1.1g019261m (locus o range1.1g019261m.g) derived from phytozome v7.0 (chr-ID sc affold00018; pos 389883 to 390128 reverse strand)
caggtatttactttgttcacattataactttttggtcactcgcattgctgttcaattttgaaagcacgacagtttataaaaaaagaaaaaaacaaatttgacccagttttattgtaaattctgcgggggaattaaccagcagtttatgtacattttgcctttggaagattaatatgatgatatttgtataatgcaattatgaaatttgcagggtcgggggtacagagccaaacgacgtcggttggg

SEQ ID NO: 81575 - DNA, 876 bp, Citrus sinensis
  Intron number 1 from transcript orange1.1g015134m (locus o range1.1g015158m.g) derived from phytozome v7.0 (chr-ID sc affold00013; pos 534305 to 535180 reverse strand)
aacaagcttccacctttcatcatcatcactatcaggtttgcctaacttcctttattatttttattattttctttttaacaatcgcttttgtgtttaattttatatcgctgttcaaaattttgaatctttcattattagacatcctaacgcttaatcaaacttaagattattattattattatttggctatgggttttagtcgatgaacgttcgatttcatctatggcggtttggttcgtagattcagttttttcttacttgcacgagatgcctagataattgatagggctgtatgacgtttgtaatcttgtcgaaatatgcagtgacgttttatcgcttgtgtttgtccgatgaattcattttgtggggttatatatgttattaaccgcagagctttttgttttcggtaattgaagtgttatggatttgtgtcgacagaactgaagaagtatgtagtaggagttaatttttttgggctagggctgagtttcctcttttatgctcttcgttgtggataattgaagccagtgcgtttttgtatagatgataagattgcttacaagtttacagtgtgaggatttgcctccttttatctgcatatttcttagaggtttctgctagaattccagtgtctgttttattgtattttctctcccctgttgggttttattttaataactttaaatttaagagaactgaactttgcttagtagctttattaggctaaatcactttagcggagggttgcagttttgtttccatgcaattttggtgcatcgatttttcattttgaatttcagtgtggttactgttgtttttgtcacttggaactcattgcaggtagttacaatttttttttttaaattttcctcagtc

SEQ ID NO: 81576 - DNA, 665 bp, Citrus sinensis
  Intron number 1 from transcript orange1.1g008498m (locus o range1.1g008498m.g) derived from phytozome v7.0 (chr-ID sc affold00414; pos 87183 to 87847 reverse strand)
ctccaacttttatcagcggagctcaatttagcctggtacggaatcttatgctttcattcaagctgcaaaaggaagattaaaaatatcttaactttagtctttagtatttttccgaaagttgattaaccatagtccttactaggtgatcgtgttgtccagttcatgtgggtacgcctttaacttcgtatgctttccttgcgcattagttttcacatcttctttttatcttttcgtgtgtttttttaattcattctttatttctctctccttgttgagccactgctgtatggcttgataatttttcattgaattaaggatttaaaggagtttgatttttaggattgcaagctagtttaggtactgtatcatcacttcttttttattcacaattttttatttatagtttgtttcttgacattggctcagcttttgcctgtcaaatttctgtcttgggttgctttttttgttgattgaaaaacttcttgagattgttcaatctttggttttgatttctttacgcttatcgattccttgtttcggtatttttggttcagaacaattttcagctggaaacgatacaaaattacaggatgtgttatctgggtctgaatcattgactacacttcaaaaagtagcattcattttttcgagtttctgatacaaga

SEQ ID NO: 81577 - DNA, 885 bp, Citrus sinensis
  Intron number 3 from transcript orange1.1g024223m (locus o range1.1g024223m.g) derived from phytozome v7.0 (chr-ID sc affold00478; pos 114164 to 115048 reverse strand)
aacggctcgaggttggtctttactaatgagtggagctattagcaacactaaaaagtccttataaaacccttgtatcacaaatttacattttaaaacttaattaaagtttaaagttcatctccccttcctctaatcccaccttgtttttattttttatttttaaataaaaaacacgtcgttttattgttatggtgaaaagatttttttaaaattttttttatcttttaattagtggttttggttggattgaattttttacttaatcatcacaaaattgtggaagacttgctttgttctactgttacaaagacttgttctcctgagtttgttattgatttttgtcttgacatggaagcatgtagaattatcacattgagagtgtaaaaaattggattagcatctaccaatctttcttatatgaaaaaacatttctttttattctttttttttttgtgtattgttattttttctttcttttataccgaaattactaagaaagaagggtacaaggatatttatggaatcaaaatgagtgttattagcagcaaatagaatttaattaatattttagtggctgtatttaaaagaggggttctacgggagtgggggttggggggggggggtgcatatttattgttaaaattattaaagtactaaatttatgaaattgacacaacaaatttttatttcacaacaattgtttggttcaccacaatgccaaacagagccttaggacttaggtaacatgcacaaatatttcctttgaagcaattctctcttacttcacttcagctgtggtcgttgtactgtgttttgtttgtttaggatgacgttaactttttcttcattgttagactgcagacggactagctttagattgttatt

SEQ ID NO: 81578 - DNA, 545 bp, Citrus sinensis
  Intron number 2 from transcript orange1.1g048069m (locus o range1.1g048069m.g) derived from phytozome v7.0 (chr-ID sc affold00009; pos 1632626 to 1633170 reverse strand)
ggaatagcagtaagcagaatctttttgcagacagggtatgcattatattatcaaattactttctgttttatgtttttttttttaatctaaagtatttgacttaattgaaggccagtcctgaactaaaaccttacttcctccattttctcatcacttttttactgctttctcattacattgtggaaaattttaccgtcatcatctggtcacttcttgtcacaatctcatcaatttttcgtcactttctcttactttctggtcatttctcataactttcacataactttcttgtcacttctcctcaattcttgtaacttcttctcgtattctcaccgctctcttcatttttcattgcctttcagtcatttactgtcaattctcctcacatccttgtaacttcttctcgtattctcatcacattcttatcactctaatgtccattgtcaatcatattgtctaatttctgatcttgttcaatctgactccatgccacaagttattccatcttaagcaagggtttttatagcagatatttgatttatttg

SEQ ID NO: 81579 - DNA, 904 bp, Citrus sinensis
  Intron number 1 from transcript orange1.1g011308m (locus o range1.1g011308m.g) derived from phytozome v7.0 (chr-ID sc affold00096; pos 228213 to 229116)
tctttgtttcgcatttccactcacctgaaaaacaagtactgaatttcactcatcattctctacttatttatttaacatcattcatagttattattgttcatgtatggaacctgatttttttttttaaaaaaacgaatgcatgaattttcaattttcattgttttattttttgacgcttactaaatggtgagcctctttgtttgtttcctgatcctgccgagcagtgtcgtttttgaagcttcagtttcgtttttgtgtgttttgagacaaaatgttgagagtctctgtttgcggctgatcctgcaaaaacgctgacgtgttggtgaaaatctacattgtggttggattttgatataataatcttaagagcttttatacgtaatttgatgaatcaaatgaatctgtgtttgttgctgacctccgagtcggagccgtgaagaagctcagttcttgtttacagttataaaaagaaatgtttattggtcgcgtcaattctctcttttgtttttttttgtaatttataaatcttgattagagctaaacattattgcttttgtgcttaatatctagtgtgttttccatttctctattgatgcaggtacacgtgagctttgatttttctttttctttttttaatttgagtatttagatctttctggctcaaaattttcattcaagacttgcgatcttgaaataaaataatatgaaataaataagacaatttctttagtccgttggctttgtactctaatctgtcaatgcaacttttcttccttttttttttttttgagctttagttatatgattgagtacaatgtttaaaaatgtaagtatattcgttaaatggtttgatctgatggttgttgcagttggctgctgattactttgtaaacttgaagggaaa

SEQ ID NO: 81580 - DNA, 407 bp, Citrus sinensis
  Intron number 2 from transcript orange1.1g023800m (locus o range1.1g019238m.g) derived from phytozome v7.0 (chr-ID sc affold00260; pos 211035 to 211441)
ccgtttttgatcttatagctcttcccatatgtattacagctcacctcagctcatgccaatttatgtgatgtttgtataattatagatgattattgctgatactgaatgttaagctaaataattcgttcttaattcatcttcatttaattttcgattgaaaatgcaaaaataataattttaagcaaagcaaaatatagaaaatgtttattttgttttaattttcagggatttccttattgtggctgttatcattcgttatatggtcctagttaaatatttcaaattgttgtagtcagtgaaattcttttcgatatttattctggcatgtatatttttccttttcaatttcttttgttgctgattctttgattatgttacattcttttttgtttcctttgtagtgtggc

SEQ ID NO: 81581 - DNA, 923 bp, Citrus sinensis
  Intron number 1 from transcript orange1.1g004839m (locus o range1.1g004839m.g) derived from phytozome v7.0 (chr-ID sc affold00006; pos 2141333 to 2142255 reverse strand)
gagctttccactcctcccctccgctggggcccctggtattattaatacgatcacatttctctcatatctcctttcgcgttcatctttttctttccgcagatgctactaaatgaacacgaattaagccgctgtttggggaaaatgtgtggaaactttggtgcctgttagtgctcgtgcgaatttcttaaagaatataacaaaattaaaatttgttccaattataaattaggatgcatttggagtgtctttaacagaaagcactttcgctcaaaagtgctttgtgtgaaggttcttttatcgttaaagagtgtggaaaatcacatattaacactatatggtaagtacaaaagctcttatgtcactgccgaaaacgctcttaaaacaatttattagcctgtttgatgctttattagttggtgctaaatgaatgtcacgtgtttcatcaattgtttgatgattagtttcacatgcagtttggatgcactagaaggaatgcaaagaaaaatataaatcttatgtttctttggttttctagaagcatgaatatctgacaactaaagctcatatcaagctaaccatgtaattttggtagtttgttctggttactaattatttaaattatgataattttgtgagattctttcagccatctggtttctaagaaaaacagaattttgaatgtattaattgaagtaggtaatttttggaaatcaagggactttagcagaggaaacagtattagaaagttactatgggtacattttccttccttcttctaggaagggttcactttttataatcacaaatcatccagatggatcattatttattctgtttcaggatctgaatattgtttcagaatctgaatggtccttttactatttgaaggtgatcttcatcaccgcaggttgtattatcggcgt

SEQ ID NO: 81582 - DNA, 617 bp, Citrus sinensis
  Intron number 5 from transcript orange1.1g023794m (locus o range1.1g023794m.g) derived from phytozome v7.0 (chr-ID sc affold00176; pos 211274 to 211890 reverse strand)
gaacaacctccttcaattgtgcttgttggccacaggttggacttctttgactagttatttccttttaagttttgttggataattaccatgtctgccaaaacaaagtgctaaaacttcgaagttcattaatcaaatggagtgtttcagttgtgtgggactatgtttatccttttttttttcttccttttctggttgcatggccttggttgtcgcctggcacgagaaattgaatggttatgttaataatttaaataactaaatgctacaatgcaaaaataaaaaaataaaaaaaatccaggctttcagctgagttttgatctttggacagggtgatagcattgaaattgagtttcaccagtttatttttgctagatgcttatgtgagtggatctacatatggttgccctagttctttgaaagtcaaaattatgtgattggttagttgtcaaatcctaatgcaaaagctgcctatcttccttatgctatttctgatcgtagagttgaagatatcttcggtccttcatagtccttagtcaagagaacaatttaatgttttcatatgatcctcactctatggacgaattactgtatattggcttgtgcctttactttacagc

SEQ ID NO: 81583 - DNA, 610 bp, Citrus sinensis
  Intron number 3 from transcript orange1.1g023794m (locus o range1.1g023794m.g) derived from phytozome v7.0 (chr-ID sc affold00176; pos 212144 to 212753 reverse strand)
gaggtggttattctgggtatgttcgagtattcttcagcttgattattccattttcacttcttttactgtaaattttttaaacacacgaagcaagatgatggatcattatatctacttaattacactttaactgaatgctgtccaagttccatattgtttgatcattaaatcatttataatcaaatgatgtgcttcgatgaatgaaactttttgttccagtagtgtaataagctaaatttgtttgttattgttattagtttttttagcagttcagtttctcttgagtttcttattgaaatatttcaaatttctgttaatagaagcctgttgtcattgattaccaacagatattgagatatacactgatgtttgaatactttgattttatgcacattttgtacacaatcaactaaatacatctcaagacttctaagttgttttcggttttattttttattttttcacctttttgggattctcttgtttatgtaattgacatatgatcatatttcatgtatgcacttttatatctttaactttctgaaaaaaaatatttacctatctcattttggcaggctctcctttgcattggcagctggtaaaattaagg

SEQ ID NO: 81584 - DNA, 965 bp, Citrus sinensis
  Intron number 1 from transcript orange1.1g023794m (locus o range1.1g023794m.g) derived from phytozome v7.0 (chr-ID sc affold00176; pos 212964 to 213928 reverse strand)
gctttcgcgtcgcttcctcagcgtcctccaactcagtcagttctcttttttcttttatctttttttctttgttatttattcttgataaattgatatactaatgatcttttaattagttaattaatcatttttttagttagtgatagcttaaactttgtagtttagatgaaggcgtaaaatgatctttattattatagtttaaaaaaaaaagaaatgatctctacaattgtgtgtttttgttttattgacatgtaaggtggattaaattggactgcatagttgaatgattatatgtacaattagtttgtaactagtagcagtttagaaggaaaattatgatcacgtgatcagtgtactttgtgtctgttgtagaatatagtctattggagctgtactttggggtccatacactagtaatcattaaataggtgattatcaatcttgatttgagcgtagattatcggagaagtgagtatttgataatttgccacaatcccagccgtttcactcttcggggaaaaaatgagcatttggcagaattagtacttgtgcgggaaaatgaaatatgaaaatgccataaatggtttcacagatatgggacattgtgtgatgacatggaaggttcttcaaaatgacgtccaatacggtggcaacactgtgttaataagttttcattaaggtgagaaatttgtgggaattggattctgctatactacttgatgtggaatggggcctctagatgaagttaccagaagttctttgcaataggcaataagggattgctgtgacaagttattttaatcgatggggtttggaaaaaaataatgatgtaaattaaatttttctaacatcataggtagtaattcgtgggggtgcgttcttttacattatgattcttttatttttggtaaagaagttctttgtcttagtttataaattttcttgcagcagttccttagaaaaat

SEQ ID NO: 81585 - DNA, 965 bp, Citrus sinensis
  Intron number 2 from transcript orange1.1g026917m (locus o range1.1g026917m.g) derived from phytozome v7.0 (chr-ID sc affold00125; pos 342045 to 343009 reverse strand)
ctctgtgtccttggacttagtttctggctttaaaagtgagtgagctatctctatctctatctctatctctatatctctctttatgtctatctttatgcatgctttacttttacatttcacatgtcaaatgctcaattgcataagattgatttatccaccgctatacttgctgaactcagtttgttgattattctataaccaagttcatataactgtcttgaaattgtttaagtttagtgtaatgatagcgtcacgaccgctttgtacaaataagtgtgtgaaaattgatgtggcatgcggacattggttgtataaaactattatgggctcacataaggagaaaattaactgttattatttttcagtcaatttctttatgttacatgagattgtacacactagtttttacaaaattatttgtggctctattattattgttaggcttatactattattaggagcattagcatcatagctctggttttgggtgtaagtgatgaatcatggtgtaagtgataaatcatggtgagtgtgaagagctttggttttgtttgactgtaagagttggggaggggctgatgatgttgtagaagctgcttgtttcgtattcatatatctttaggatggctgttgtagagcttccagagtttagtaatagtgaagccataaccagtcatttgagtgcatgggctttatcagcttgaacccactttttttctggtccatacagccttttgatcctctttaacttacctccccttgaattcccctttttggtggttaagaagagttccctttctatgtcaattttgatgtgtgatgctacagaatgctataggataggccttgttttacccttttatgtgtttcacatgagattgattgttcttctttggtggttgtatttctcctaattctgtttgcatgctctacagatcaatttctccggacgagccaatctggga

SEQ ID NO: 81586 - DNA, 964 bp, Citrus sinensis
  Intron number 2 from transcript orange1.1g014274m (locus o range1.1g008061m.g) derived from phytozome v7.0 (chr-ID sc affold00500; pos 32165 to 33128 reverse strand)
acttatttgctgaatttgagcttgctacattactggtgagtttttgtgattgtgatagtctgattgatgattggttgaattgttgagctgatttcttttaatataattatactgattgtatgtagttcttaaataaatggattgcttgtggagttcaaaacatgtttgtgcttttcaggttgtcatttttcctctagttaggatattttgatttgcgttgaacataatgtggacattagggttttacttcttgttgtcttcctagtgagttctggtataacttgttgatgctttcattcaattgagttactggggatgctctggagtggttggaaagtagttatcttcttcaatattccagtgatgatgtgtcattttctatcttgacagggaacttctatttgtgcttagccagttagcctggtacagattaatttggcctagatcattgcttacagtacttctgtgttgttcttgtaaggttatctaataagtttaaaatgggttttgttcttgatgttcatatgacaaactggggattttatgaccagagagcctacattttcaaatctcttgactactgttttacgctgttgttgttttagcactttggaacttcaggaaataaagcttgctgcatccgggtattccactttttttttttgggtttcttatagcattttattgtcatagctgtagatatttattaggatgaattttcttttatgttgttgttaaggttgtcttgcttttataaatttgatctttttggcaacaatataaatacatggcggatgctaaaaagtttttgcattgtaactttttttttaaatacatatgatggttaaaaatcttttcatgcttttatctgtttatgccttttttttgctgggtaggctggtttttctttatcttgtttccttttaattattctacatgctgtttcccttccagcatttctgct

SEQ ID NO: 81587 - DNA, 900 bp, Citrus sinensis
  Intron number 1 from transcript orange1.1g043857m (locus o range1.1g043857m.g) derived from phytozome v7.0 (chr-ID sc affold00088; pos 142189 to 143088 reverse strand)
gctttcgctgcccgagactaacaaattggtgcatattttaaatttttttcttttattttatttatttatttgttcattctttaagcttttcgttttttagttgtgctttacttttttatatattgaagatgatcagttgaatggaattgtttcagttgttagcctttagcttcctgttgtaagagctttggtaatttgggttgtgcagaattatgtgtgttgttacatgtgtatgttgtttcatgagtgtaatattagttttttgtctagagtgtggggatgggataaaatttcagtgccaattcagaatttgatggctcatttgaccctcaataaatgtagttagaaagctttgttgaaatgctttgaaattgggggggaaaaaggatggatttttaaatgagagggataagtacagaggagggggagtgttgtcttataacttataaatgagggggagggataagtacagaggagcggaacagtacaacttataaattgggaagggaatggtgaatattggtaggtaaaagatgttcaaacatgatactattgactgacatgttcaaacatgatactatagaattaagagggactagtggtttttagatgtctttttatttttctcatgtttttcttgatggctttaggataaagaagttaacaataacaaacaaaatatagctaacacccatgattaatcccgcagaaaggaaaatagtagcgtgtttttcttgacgtagtttctgatttcaaaatatgagacgaaaatcacgagtgtttgacttgttggatattgacattatcttttttgtttttggttcattttggactcaatgttttcattctcaaaagtatttctttgcgctgtttggacataggtgaagtcactgctgtctg

SEQ ID NO: 81588 - DNA, 692 bp, Citrus sinensis
  Intron number 1 from transcript orange1.1g046596m (locus o range1.1g046596m.g) derived from phytozome v7.0 (chr-ID sc affold00006; pos 1043698 to 1044389)
atctccggctctcccaggtaacctaccaagctcgccctattcacctccccgtatatcattttcagaccaatcatttttttagttctagaacttgtggtttgcttagttgaaatcttccgtttaagttaatctaatggggtatctttaaatatttaattaatttatcgtcttccaatactactactcataaattataatttttcatgtacattattgatcaaagaacagatggtacgtccttttcagcaaccagtagagcttgttaattgttttatctttatgtcactttagtattttcttttatttttcctaattttgtttcaacctctgatcgcttaaacacgatcagtagttttaactttgaagttgttaaatattcctagtttgaaattgacaaacgataattatatataataaacccctggcttgtagcttgaaagtttctaattaattattggtcacacatcagaggtttttgacaaatgacaatttttaatttgagtgagtttattcataattggaaagcttttgtgataacttatacgagaacttttactaattgaagaataaggttgaacagaagttcctaacagtaaaagtaatcattaattaattcatcaactagagacataaattgttcacctatgattttgatgggcattcttttcactggtttattgataggtatctca

SEQ ID NO: 81589 - DNA, 486 bp, Citrus sinensis
  Intron number 1 from transcript orange1.1g034297m (locus o range1.1g034297m.g) derived from phytozome v7.0 (chr-ID sc affold07362; pos 427 to 912)
tcgattttcaaaataattcatttggctgcataattgttgaaaaatccaaaattctagtggtatttatttatttatttttggattgatgcagctatgtttgttggaagtgtgttgttatcttctgttgagtccttggcatttatgttttatgtagtcatccatatttttttcttgagttatgtggtatctgttatcatattaattttgattgtctttttctcaagtcattttgtataaattttattgtttcttttagtaggcatcgatattttcactttagccttcctactttcatatatctgctggagtggaaagattgaaagattagtttggttcacttttacaatgagccacatgttattacaacactgcatcatttcaaccaaatagggaaactgcgacacaagaagaatgcccattggaaaatagggatcgtgcagctgcctgatagcagaaaattcctgaattcttggtgatagtgattat

SEQ ID NO: 81590 - DNA, 922 bp, Citrus sinensis
  Intron number 2 from transcript orange1.1g034297m (locus o range1.1g034297m.g) derived from phytozome v7.0 (chr-ID sc affold07362; pos 1718 to 2639)
aaaggtattttctctttcatgcccatttacctgcatttgctgtaatctccagagccttagcattagtatctgctttttggtatcatattgttagttcttagtcctgtctcatagttctgccactgcttttcaacattacaagatgataaaggggatatgcatagatatatcattaaattttatggttgagattgtttcaattgaaagatcaaggcagtaagtccaggggagagtaaaaatatatgtttgattatttcacttatttttgtaagaatatatgtttgatcattccacatatttatcttttataatgctaattggtgatgatttgtcttctctcatatttgtatttataactatttattggtaacttgatctaccaatattaagtttaacaagtccaataatgttgtcttgacaataatttatgattggttattctgtggtcaacaatttaaggtcaaggcttttgttttatacattctggaccattttttgctgctagagctcgtctgtcgtcttgtaaaattcggtttgaaccaccttggttactatgtttcattcatctcattcatgctacaaagtcatatgatcaactgtatgacatatgatgtttgacaacctatgcattcaagttgtcattaacgaaaggaagtttatggtctccgacaaagtcttgactcattcagccggttgacactgctcaatggaatgttaataatctaattgggtatcatagatttcttgaacaaaagacatagtaggagtaactgaacaatatactatggaactattgttgaagttatacatgatatggaaaacctgcgatgctatgcttgaccaggaagtttaataaagtcaagatgaatgtctggttctaatttttcttggaattggatcttgcaggaagaaacttttccag

SEQ ID NO: 81591 - DNA, 666 bp, Citrus sinensis
  Intron number 1 from transcript orange1.1g015910m (locus o range1.1g015910m.g) derived from phytozome v7.0 (chr-ID sc affold00006; pos 1013182 to 1013847 reverse strand)
tgatagtaaaacatcggacatttctggtttgtaaaaatagtctctttcagttttcatgctttttggctttcatcattgataatatgctatttttcgttctactttttagatcttcaagttactatactgaagaaatatatttcatggaagttttattctgtgctgatttggaaaaaaaaataaaaataaaaagaacaatactttttaaaagaagtgctcaattttctaagacatgcatatcatacatatacacttaatggtgtttatagttttacttacacttactcactctgcttcccttattttttaatttagatgctcctagatcttttattgtctacaacaatttttgattctgggtgacacatcaattaatgtatatgttccccgtcatttacatcttgcctgactggtgtctgtcagtttctcatactaaattgtctttccacatctaagtttcactgtgaagaaatatatttgacaccttgaaaagttttggcttcggtgaattcacaccagatagtgcgaacatatttgtatttaaccatcactgcctgcttaacttagaattattatacttgcttatattgttgtatttatgcatgtttcatttgccttttactgtttgttgacatttcttttgcccttgtattcaaggttaaacat

SEQ ID NO: 81592 - DNA, 555 bp, Citrus sinensis
  Intron number 1 from transcript orange1.1g043852m (locus o range1.1g043852m.g) derived from phytozome v7.0 (chr-ID sc affold00568; pos 43525 to 44079 reverse strand)
aaggctacacggagtaagtaaaattgttttgttcgttgtgctaatatgcttgtgtatttgatatcctattagttacttagcctcattgattatgtgtaactgctgaaagtaaattaagtccaaaggatgtataataatgttgcattagaaggaaaaataatagcttcatcggtgggattttggctatggtacatgtaatcttgtcttgtttctcaagaaaatcatgcaagtcgaattcagttttgttgttgagggcagcagagaaagttgatgatgagctgtattggatattcttacttggagctatgatttttgcaactaccttaccgttttcttctaaaatctaattattttgaagactttgaggggtagtttcttttttaactatgaatccctagtctgaaggtgggtggtattatttgtggaaagactcaattcaaatgattaactaggccttgctttactaccattgatatgcatgtgtattgcaagtgtgatgtgcatatacttatatttttagcagtccctcttatgctttctggtttgtttgcagtg

SEQ ID NO: 81593 - DNA, 912 bp, Citrus sinensis
  Intron number 1 from transcript orange1.1g039115m (locus o range1.1g039115m.g) derived from phytozome v7.0 (chr-ID sc affold00695; pos 893 to 1804)
caactgcatccgtgaaaagttcaagttcgtccaaagtcccatagacatcataaacatcatctattgttgttattaaggcattgaccattgtagacatccgtctactatatccaaaatctggttcgaatatcacccccacagtccagaagaaattctccattattctgtctcttacaaaattcaacctctcccgaagtcctgttttcttccaccacctgaccacataattaattagcatgaaattaattgagttacataaatacatgctcagttagatttaatcattcttgagtgcggatctccacattttcacaaatgctattgtgaagatagctcattatgcagaagtgaagaagaagaatcagcatggtgttaagccttgtaacaagaatgtcaagttaccagctgtcattagtgccacgtcagaagatccaagtcagcagcagtttccagcttaactaacttcacaatgcacactctgtattttgttattgttagctgagtgagcttgtgtttaataattagttagtgaacaattaattagagtatgtaaagcatgtataaatagctacatattcgagattgttaatgtgtacaaaatatcagttcattaatgaaataagaaattttcctctgtttttctcagctgccaaacaacagcacttatcaacttttacaatttcttcatggtatcagagccattcatggcaacctcaagcaatcaaaatacagtagctacaaatcaaacaactttttctttcatcacaccaatcaaattagatagatctaagtacatggtttggaaaaatcaagtgctggcctccattagaggaaatcgacttgaaggatacattaatggagaaaagattgcaccaaatcaatttatagcattaaacagatcgagaatcctga

SEQ ID NO: 81594 - DNA, 441 bp, Citrus sinensis
  Intron number 1 from transcript orange1.1g004537m (locus o range1.1g004537m.g) derived from phytozome v7.0 (chr-ID sc affold00018; pos 1015060 to 1015500 reverse strand)
tttcttcaaccaccattccttcctggttgcaaaaggtatcaacaatcttgttattaatgttttaattagtttttgcttgcactgtttctacaaaacaattctcggtgcaacactcgctcaagctcactcgtttcaataaagcatttctcctccttgcactccaatcatgtttgagtattttgtaatgaatttgatcattgtaattcaatctggttatatatatttttcttttctttggggggggttcttttctttttttaaaaaaaaaattcatttctattatgatttgcttcgaattacaagcctccattatggcttccacctcatcgaaaaccaaaaaaaaaaaaaactactacatagttagtctcttcatttttccaatctaatcaaattcttttgcttctagttgagttcagtttgtcaaattaaaactgcttgagt

SEQ ID NO: 81595 - DNA, 480 bp, Citrus sinensis
  Intron number 1 from transcript orange1.1g015514m (locus o range1.1g015514m.g) derived from phytozome v7.0 (chr-ID sc affold00019; pos 1702344 to 1702823 reverse strand)
cttcttgcctgaattagtagtttgttttacagcgggttcgtacttttgactgtccggtgatatttctttctttccgcctctcattttgttcattttgtgcgcctgaatgtaataatttcacttatgttgtcgctttcatttgccgcatcatgtttacatgtgttatcagcacttgcaatttttttttgtttttaaattttcccctgatttatgggaacatggtgggtaatttaatgggttcacttcctgaaatgatatcttctctgggtttgctttgatttttatactgttttaagtgcttctgagatgcactgatttatacttttgatgcatctaatttaaaggcaaaagaaacactgtttctagtgaaaatttgtacttgactagatagttatggaaggctaagatggaaatcaattgactcaaatttgcaacttgattgtaggatttcggggaaatcccttgcttgactactctgca

SEQ ID NO: 81596 - DNA, 489 bp, Citrus sinensis
  Intron number 1 from transcript orange1.1g021349m (locus o range1.1g021349m.g) derived from phytozome v7.0 (chr-ID sc affold00375; pos 84388 to 84876)
gagcaagcagccgctttttcacttcattgaagaaggtaagtgatatatccatttcgtccaattgattttttgtttccttttcagtgttcgggtagatcctttttgtcagtcaagttgaagaaatatgcacattcaaacagcaaaagagggcgagcaatacccatttcatgaatttaatcaaattttgggtgaaattgaataaatgttcatattcaagtagatagtgtttgtttgtaggaaagaaagattcatgagcataatttttctaggtagtgttagaaacagcaaagagagattatttttgttcaatttggtatgtagaagcgtttcaatttggacaaagttgaaaagcaattccaagttcataaatttgattcaattttggtctggttttagtattttaattggttaaagtgcttcagatgcaaagaaaattcattttcttctttgtttacttcaggtgagtgaaggacattccgagtttcaaag

SEQ ID NO: 81597 - DNA, 382 bp, Citrus sinensis
  Intron number 1 from transcript orange1.1g006241m (locus o range1.1g003622m.g) derived from phytozome v7.0 (chr-ID sc affold00203; pos 205170 to 205551 reverse strand)
atttaattgattgagaagttctcgcgggactagtggtacgctgatattctcctttgttagcaagttttgggaagggcgatgatgtgattcggtagaaacttagtaatagctagctgtttgagattcaaccaaatgattgaaaggaacaaacactcacccatcaaactccataggattaaaattaatgataagactatttattttaatgttctgcattttgtcattgacccggtgaagagagatattttactttgaacaagaatgtttgatcttgctgagagcttgttgttgtcttttgaattttaatgtttgctttagataaattgaaaagctaagagatgctgctatttttttttatctgcagctcctcaactgggctttg

SEQ ID NO: 81598 - DNA, 708 bp, Citrus sinensis
  Intron number 3 from transcript orange1.1g037346m (locus o range1.1g037346m.g) derived from phytozome v7.0 (chr-ID sc affold00054; pos 247153 to 247860 reverse strand)
ggaattgaagttttgtctaagattactgagcttagaaagtgtagaattttgagtgtttaactttcaatactactccaaatgcccccaagattacaaatcaaacaatcaagacgctaaaagaatctaccagatcaaatcacagcaagaatgattttctgaaagagttatgacacaatcttaatacccaatcagatgaatcgaaaaagaaaagaggaagtaatagcagcaagaatagaagagttaacgtggttcagctagttctcacttgcttacatccacggggaaaccaggatcagttttattgatttgtagaagatgattacagagcgtttacagagattattacaatcaagaagctttctctcgaatcttctctcctctaaatagctcactgtctcctctctccctgttgcatcagaatcagctgtttataacagcttctttaacgaaccaagatgaatacagaaacacgtgatgagcatgtgctataaccaattcttaacgaacttgagcagctgtctaacgcacgtgtttccctcgtgcttcacttacactaaaacgacgcttaatgaagtcgttccagtgacaaaaggaattgctcaccaaaacgcaacatcaattgtcgtattgaaataacattagctgcataacgcacgatcactctgccgtttcatctatcttgatttgcttcacaacacaacagaaaga

SEQ ID NO: 81599 - DNA, 824 bp, Citrus sinensis
  Intron number 1 from transcript orange1.1g000906m (locus o range1.1g000906m.g) derived from phytozome v7.0 (chr-ID sc affold00009; pos 88207 to 89030)
ttgtttataagtatcactgtgtcgctgaagacgaggtcatcttaattcactcactcacgcacactctaattcatacgcttcgatatttctgtttggttaccgagaaaatgctactaagaaaagtcaaaataaactcttttagttaaactagtgataattacaaaattgaatttggtgcaaaattcaattacaaaaaaagctttattacaaaattgtttggggtaattgttagagaactcaatttaaccggtgttattatttttgtttagcttcttttagaaacgtgccatttttattttatttttttgaaaactgagcaagtagttaaatgaagagataattgatgagttttcaaactagatttccataattgtgaactgcggatttctaagaggctgcatttggatttatttgattttcccggggccaatgttttggggtattatgataacttgctctaagaacgtaaacgttgaatttttcagactctgacttccattaattaaaatctatataatttactgggctgtaaaactttatcaagtcaaacgagtaggatttaggaacgacctcagttacaattctggacgtatatatttaagcaatttgaccaaaaggtccaaaaagttggatgttagtcataaataaagtgagaaaacaggaattagtgataatgttgtttttagcttctgatatttgttatccttttccccaattttcccttcgttttgcattccttgtaaaacactatggtttcaagagtgaaattaacttatattttcttgacaggtgatctttttagcactagacgcacatataaaaaa

SEQ ID NO: 81600 - DNA, 363 bp, Citrus sinensis
  Intron number 1 from transcript orange1.1g018718m (locus o range1.1g018718m.g) derived from phytozome v7.0 (chr-ID sc affold00006; pos 47163 to 47525)
tctcttgaagataatcctttgttgcaagacttcgagtttcctctatgatgtcgtccaggccaagcatgttaggcccggcattcgcgctcttatgaagaagctggtgcacagactttttattttaatgttttatttgtgtattgtttctgggtttgttctattttgttttgtttttggttttctaattgttcatttttgtttgattttgtgggtgtcagtgatttcaggagagtgaattggaggaattgtagagaactgtggagccgtcatggccaaagttagtagagccattatagaagcttactgatggattgattgtggttgggagaattatcggtcatcttaaatctgtcaagaacaatc

SEQ ID NO: 81601 - DNA, 723 bp, Citrus sinensis
  Intron number 1 from transcript orange1.1g003811m (locus o range1.1g003815m.g) derived from phytozome v7.0 (chr-ID sc affold00442; pos 41043 to 41765)
gctttaagaaaggtaacagtttttaagaaatgttaactgtcgttgaattcacgtgattctgccttttggctgctatcacgcaaagattctcgttctcctatttcgtttcgtatttcccctctgaaaaagatgtgacccctttttcatttttggacttgcattacattacgtatgcacagtgcagtgctctttttttgtagtatttgcttttgtcttttctaggtgaattttgtgcccatgagtttactgtttgtctgattctagtgtaagaaaagggtgaaaatgagactactgtagatgaaaaatgagggacccttttcatttatgagctttaaccggaagattctagagtggttgagcctcaatgcttgtgggattgaattgaaatttgaagtttttgagtgttcttctttacctaaataaatttcacaaaagggatttttttcttagatgttataatgagtttggtggggatgtgattggaatttagacttttagaggtatggatgatggcatgtgggtgtcttgaaaagttggggaatgtgacttgcttttatgaatgtatcttctctatttgcgggtgtagtgatgggcttcgctttgaaattccttaatgctcttatcagttattttaaaaaattctcgcttctttttagttactttatcaacgcttcttctactttttcagtgcagatctgctcataagtgagttaaaaaccagaa

SEQ ID NO: 81602 - DNA, 872 bp, Citrus sinensis
  Intron number 3 from transcript orange1.1g033059m (locus o range1.1g032678m.g) derived from phytozome v7.0 (chr-ID sc affold00018; pos 250874 to 251745 reverse strand)
atttgccgcaagtatgctcatgtctcactttttcttttcttttcatttattttcatcaatgcaattagtttttatgtttctgttgtttctttgcttggtgggtttgttttagtgataatgttgttttagttacgggacctgactttacttctactgcaaattacggtgcggaagaagtcatacgaggacccgaaatcaattcccattcttcaactttgtcaactgtttttagatcttgttgcagttgattttcatggatggtacattcaatttttagagaaaccctgtctgttttttttggtattgcagttgtattgttggttaatatagtctaaatttatgctaagaacaacgcttctagactgtttagcccattaccacttcacttaagttgagttgcggcttgtatgttgggactattacgttgaactctcttttgcaattgaagtgcaattgagagcatcacagttccagagattaatttccatttcaactttgtcaactgggtttacttactatcagttgattttcttgggtggtatatgatgtattattgattgtttacttaaataattcatgaatattgaatttcattttgcgtataaatgtgcttggttggtatcactcctgaaaccattgttctgtttgacttataagtggctcgtctagctgtaacaaaacatcactgctatactgtggttttgtgaaagttatatgcagtaaaccattgccattttctttttcctttgactttgctatttagggtgggcgagattgcctttcaatattattttttatggttgcacatatgctctggttagcaattaaattactgtatttgttgttaaactaatatggttttgggttgttag

SEQ ID NO: 81603 - DNA, 462 bp, Citrus sinensis
  Intron number 2 from transcript orange1.1g020253m (locus o range1.1g020253m.g) derived from phytozome v7.0 (chr-ID sc affold00013; pos 2123462 to 2123923 reverse strand)
ttctgttggtgatcgcaaagctttgtctcatccaggtaatgaatgaaactgaggcttctttggttttcattgatcctttcggtactcggttctttagttttgtatactaattcatgtattagctctggatattatgagaactttagagaacagagttgacagttaatgattttattaatttagtaattaagccttatatgtgaattaggaatctgtgagcattaacttgaagaaatttggaacttactgccaagaggaatgatcccacgagctcagactagattttttgctttaaattgtgctgatttctgataatttgttgtttacagttgtacaaaatcaaattttgatggattcatgtctagttcttacttatctttatctactagcttgaaaaattcaaggatttgtttcgatatctatgcagaaatcacagacaggcagctcaagaataacgacgat

SEQ ID NO: 81604 - DNA, 547 bp, Citrus sinensis
  Intron number 1 from transcript orange1.1g020253m (locus o range1.1g020253m.g) derived from phytozome v7.0 (chr-ID sc affold00013; pos 2124010 to 2124556 reverse strand)
aagtccgatcctttcaagatcggcaagtggaattggtttgttaatttcctcctcctctgttctttagttcttgttcttgttcttcttcttttttttaatcaatttcccatgtcttatttattatcttttttatttgatattttgattttgaattttggtgacaaatgggacggtgagagagtgtaatttttatgtttttgtttggtagctgagaaattgtgggaaagaggacgagaaagtatgacttttgactgccctctttttgttctgcttttgcaagttttgtaccttttcatcaatctcccattttttatatctgattttttttgtttaatgatattgttattataaactggattaggaaacatcttttggtgaaaaatgagataatttgtttggtagctgatgaattgtgggaaaggatgccccgtttttgcaagtctctgtttggtttcttttaatgggacaaatcaagtttttaaccgttttggcttttatttgttttattttgttgaattgaaggcatttatctctggagaagaaccgg

SEQ ID NO: 81605 - DNA, 695 bp, Citrus sinensis
  Intron number 1 from transcript orange1.1g026799m (locus o range1.1g026766m.g) derived from phytozome v7.0 (chr-ID sc affold00396; pos 74651 to 75345 reverse strand)
taggagtgctttaaagacgatattaacatacgggggtcagcttttatctctaaagatgattcattcgtattcatttatcttcaagttgtctcggttgttaagattttacaatccttcaattcattggtgctcctgcaatatgttctatttttgtaagccttgaactgaaattatgcaacttgaattctttctgaaattttcgtgaactttaaaacaggtttttttttttttttcattcagttatccgggttgtaaactcggattccgggaaccgggtttaagccggaccggacccggatttaaaaagatacggacagtgcaaatgcttttgatataatggaccttgtttctaagttgttgtgatctttgatgactatttgaaattgtttgttattttgtgttgtgtgtctcagaatttatgatatgaaaaaattggcttgttcaatataagtagccatgtgagttgtttctttgtcattgttatagtattgggtcacaaaatataagcagttgtaacgtctgagacaagtgaagttatttatatgctaatttaaataaactttcctgacttgcgtgacattttgtttcaaatgtaatgattttgtttcttaatgattgattgatctgctagaaaatcctagtataaatgcttttaatgtattttgaattttaattatcatgttctttgaacagga

SEQ ID NO: 81606 - DNA, 672 bp, Citrus sinensis
  Intron number 1 from transcript orange1.1g012881m (locus o range1.1g012881m.g) derived from phytozome v7.0 (chr-ID sc affold00019; pos 1416728 to 1417399 reverse strand)
caagtatggaagtttatgcaactttttgtttgctctcctttctctctgtctttatgcgtatgtgtgataattgagtatctttagtagtataatgccttcgtttctcatagtttgtttcaaaagaattcagttcttaatatctgggagtagcaagcccattaagggtttgttaaggtagatggtatggtaggttcattaaattttaattttataaattcatgacctttaataggaggaaaccagttaaagcaaaacagccagggtacatatgaggaccattgaagagaaaaataattaatgcctcgatatggctttttcgtactggttagttgtatctctaatactaggtgtgcactttcaagtgctaaaactctaatcataataacgtattatgggttgtttcttgttttggacagaaggcaatgaatttttaagtggttcttgttttgagattttgattgctatttgatttcatgtaacttacttatttgagtctgtacattagtgaggcaagatagattccttagcactgtttgagttttttgattcatatgcataaatctttggttaacgactcattttattctgttaaattatctactattcttggttctgtctttgactccatctttgaagtaaaaagcaatgtatccgcccttccccaggtatttt

SEQ ID NO: 81607 - DNA, 904 bp, Citrus sinensis
  Intron number 4 from transcript orange1.1g037167m (locus o range1.1g037167m.g) derived from phytozome v7.0 (chr-ID sc affold00270; pos 115264 to 116167 reverse strand)
atttggtaaatttgctttggcttgattttgtatttacttgtttgttttcataagttttcagatttgttgaagttggaagggtatttaaattggtctaaagttctgttcggaatgtcatgctcaattctcattatggttgtttttgtaccctgattgaagttctgtgtcatattcttggtttgatgtaatttttactttattatagtaaatgtctctaaatgatcctctggcatttaataaaacttggatatcagactatttgaatctaatgtttctgtcattgtgttactgagacgaaaacccaacctcaaataagcaaaatatttatgtatcaggtgcaatcatagagtactttttgcttctgttcaacatccattcaaggcccatgacaatataagtttgtcttcaagttcatttcagtattatgctcatagagtactttttctttttcttttaaaaaaaaaaaaaaaaaaggaaaggggacttttgctaccattcaacatcccctcaagacccatgattataataaggctggcttcatagaatacttttacttttgttcaagtcatgtttagatgatttctctcattgctcatgtattttgtacaaggaataacaaacaacaatcagtcagatgatacgatacgaaaagttctggtgcttagcttagataccccattgataattgtgtattgctttaagatctggataatttgaaaacttttacatcaatatctttaatttttttccttcttagacaagttgttagctcccaaaataaagccttggagcaagtatatgttaaattacatgtaatcatctgcccttgtagttttcaacataaattaattaaattgttttggattcagattgctttaaacaagccttctggtctgcaagtttt

SEQ ID NO: 81608 - DNA, 851 bp, Citrus sinensis
  Intron number 3 from transcript orange1.1g003122m (locus o range1.1g003122m.g) derived from phytozome v7.0 (chr-ID sc affold00277; pos 164708 to 165558 reverse strand)
ctgcgtgcagctgtgtgagcttccttccttttcttttcatgttgaacgtggtattttgaaaatatttggaacatcacttgatgcctctgttgtattaactaattattataaacattatcgtggctgttgtcatgaatattttttctgtacgccatattgttcacattgttctttttccaataggtagctgggaaattattctcgtttgaatcttaatgaggattgtgctgattctcaattttgtgtggaataagaagaaatatgttcatgattgccacaaacattttgatggagattgtaacgagttcctaggaaactattctccttacaaattattttatcttatctatatatttacttgggactctacttttaacttaaaatgcccttctttcttgatatcttggcttttgttggatagtacttggtcctggagcacattgaacttcatataccttacaagcaatcagaatctatgtggatgactgctgtatgttaattgactaaaaaaccagatttgaaatgcaatatgatatcacctcaccttgtatttggttccaaaatatgtattgatttcatctccaactatatccattgacatttcatgttttaatccattggtggttgttttagctttcatcttttacattatcacctaatgtcatgctgttttttagataatatttatcccttaactaaactatttggagataatttctcatgataatgtcattgccttagctttatgcgtacttttttttttgaagttaaatcttaggttgattttttttcttctttattataatttatgtgcaggtcgctcctagtcgatcaacctataataacttgat

SEQ ID NO: 81609 - DNA, 188 bp, Citrus sinensis
  Intron number 1 from transcript orange1.1g003066m (locus o range1.1g002063m.g) derived from phytozome v7.0 (chr-ID sc affold00363; pos 60172 to 60359 reverse strand)
taagtcaagttactgcacgagatttccatttctgggtatatattttctttctttgatccattaaagagaaaaaaaacagaggatttcttaaaaattttattcatactttatttcttttcttgttggcttaatagcttgtaatttgtgttgtagtttcagaattctctagagaagaaacttgaaagtca

SEQ ID NO: 81610 - DNA, 355 bp, Citrus sinensis
  Intron number 1 from transcript orange1.1g028130m (locus o range1.1g028130m.g) derived from phytozome v7.0 (chr-ID sc affold00009; pos 830967 to 831321 reverse strand)
tcatccgtgtgactccagcgatttcactaccaaaggtatccttatgctatcaatcgctacttttatgttaattttttctccgttcaaaacgtgtctccatgtagatctgttttgatatgtattgaaagctcggtgctccatggaaccgttggatttggcgtgtattaggtttgattttgttctgttttgttcccaagaaagtgcgggaatctcttctaaatcaatttaagaattagacaagtcaacatagctgagtttcttgttatatataactctctgtctccgattaattgtcggattgtaggtttatttctattttctaatattcggtatttcatcttttgtgcatagatag

SEQ ID NO: 81611 - DNA, 1005 bp, Citrus sinensis
  Intron number 3 from transcript orange1.1g017226m (locus o range1.1g012458m.g) derived from phytozome v7.0 (chr-ID sc affold00013; pos 1997941 to 1998945 reverse strand)
tcataatctgaagaaagaaattataaacgtttcaggtaatatgaaaactcagacgttggtgtttctctccctttttgttttttttttcgtttgagaagacgtttgtgttttgattgatgatgaatgaattttgtgtttgatcgggtgacacctgtgaggattttgataaatatagtttggatgacgcatcccaaaaaaaaacataaaatatctttattggcaaatttgattccgtcacggtatcctccaagttttattaaattagccaattaattactcaactttaatcggaggcgcagttaagagtccctgatatacggtttgattgatatgcggtttgattgatctgtgaaagtaaatcagatgatgacacctggggggattcttaataaatatatttttgactgaaacatacttccgagtccgccgtgtccacatgaatcatggttctttattatgttctatctctaaacaaaggcagtaaaaatttctttattgcaaatttgttccgtcccgtcgcgttttcctctactttctactttaataaaattaaccaaataatattcagcttcggattttagattttttttttttccccagtgttgaccaacccgtgaatcgaactatttctcttgcttaattaattattattacccatagctttaaagattcaaatgcaccatatggtctgcatgcttgaatgagatgatcactcttctttaatgatattttaagtggacatggggtcgaagctcaagattaatttgccataaaatgattcgagcaccattcaaataattttgctgtctttagtattctgacagaaattggtaaaaacataagcagtactagaaactacgtgcttgaggattttcacctgaaaaaattgctaattgtatatgatatgataatcgtttggtattaggttcatgtcagtcaccattcctttttatttttacctgcctgataaatttgatgcttcacatggattttcagggaaaacaa

SEQ ID NO: 81612 - DNA, 879 bp, Citrus sinensis
  Intron number 2 from transcript orange1.1g036593m (locus o range1.1g036593m.g) derived from phytozome v7.0 (chr-ID sc affold06255; pos 1624 to 2502 reverse strand)
ttttgatttggatcttcgtcataacaacctgcaaggtaagttcagcatatttgcatttgcatgactgcataattctttttattttatagagtggcaatactgccgctcatattcttgcaaaaccccccctcatctccattagataattgcaataagttcacaatagcttataaaattataaattaacaataagtcagataattaactaaataaattattctgataataattttcttttatgacttaggtcttttaacaatttttggcatttacgggtgcttcaagttaagtttaatttgactatttcatccttataatgtaaaatgactatattaccccaagaaacatgtactatagtatctagcatatagttttatgttttgtaatataatattttaaaaataaaattcaatatttttaatgccccataggtcataaatacattttgttagtttagttgaagtaaatttttgaggattttagtacttttaccttaggagggtaaaatagtcaattaaatttatgttaaaacaaccttagtacttaaatataataaaagaatataagtttcaaatataaattaatatggatttaattgattaattctagaaacttcttcttaatttgaatttttaagaataatgtgatcttgcggtaataattttctaaaagcatgtgtgttttacaaaaatcatggggtagaaatatcattaccccctaaattattataaaactaataacacatattttgtgggaaattttgattttcatgaattttgaaattaaatttatgtttagcaaaaaattcaataactcatcaatgttggtttaatcgatatgacagatcaaattccaaccgagattggcaatctacaaaat

SEQ ID NO: 81613 - DNA, 560 bp, Citrus sinensis
  Intron number 1 from transcript orange1.1g002602m (locus o range1.1g002602m.g) derived from phytozome v7.0 (chr-ID sc affold00009; pos 383293 to 383852 reverse strand)
agcagaatattcttgttgagagggacactgaacaggtattatgttttcttggatgttagtctttttttttttggggggggaatgattttgtcattttttttgaatgattttgtcattttttagtatttcagttattaaccttagtacaatttttaatgaaaaacaaggggctaatgctgatagttaatggagcagcaattgataacctcatttgatagtccgaaaatcattttacatctgtgttgccatcaaggtctgccaatgatcttggattggtttatttattattatttaagaatggttcctcaacattttctttagttatcttcgttcgattcaacaatgctttacggtattcataaacaaccttttttcttttcccctcaatttattccttgtcttattcctatgaatttttctaatggttttcctgagattgaactggggtaagtttttcttcaaggaaagttagctcatgttatatatttcttatttgaattatggatatatttttcatctctgcaggccgttagagtccttaagaaagggacatatctgct

SEQ ID NO: 81614 - DNA, 1027 bp, Citrus sinensis
  Intron number 1 from transcript orange1.1g048016m (locus o range1.1g048016m.g) derived from phytozome v7.0 (chr-ID sc affold00087; pos 86841 to 87867)
gctgggcaggagacaccccactgagagaatttcaggtcagattttgggttgttatgctttatatatctctgtttttatctccattttggttacttttttgcttgtgaatttttatctttggcaccatctgtgttgtttttgctgttgatttgaggtgagtttgcactgtaatggtgatataggttaaatactctgaaatttagggttttgtttatagggatctactcaattggtactaagttcatgctattgtcttctgagatttatgaggcattccctgtagcgggcatttgtggaactaatcgctcatgttgtaaatattagaagatgacatttaaacttgtataccagagatcttagaactgaacaataaggaaaattaaaagaagattagatcttatgctaaatgtaacgatcttgctacattgaagatatcaacaactggaaatggggattagcctttatgagttaagaagttgctgtactcttcttttatatgtacagcagacagttggaatgaactgttagttatgaaagaacttgctgtggtacaatttgactttagttggacttaattgaagctttactaaggatacccatttcttctgtggttttgagttacagcagatcgtgtccctaatgaacatgttactaggccaatgtacgatgcaggtatggttagtattatctggttatgggtaaaagacacctgaagagacagatggcaaattgtttcaggataattttctaatacaaattctttctatagtcaacaagatttttgggcttaaaatttttaatgtctagagaactccatctgttttctgcttgcatctagggtatattgtcattctgaaaattctgatgttctatttttccttgcctttctgacagttttgaatttttcctactgaaaagtatgcaaacaataaagatattttgtaactattgaacttctgttgctgtgaaattctaagtatgcggtagtaagcaaccttggtttatgtgaatgtaggtagtgctggtg

SEQ ID NO: 81615 - DNA, 432 bp, Citrus sinensis
  Intron number 1 from transcript orange1.1g023065m (locus o range1.1g023065m.g) derived from phytozome v7.0 (chr-ID sc affold00040; pos 197900 to 198331)
gtggcaccaaggtaattagtttcgttttcgtttcgattgcaagaaactgtggatatcatgtgtgtgcgcgcgcgcgcgcgcgttttgttatttgggattttcatttcaactcttcttcaagtttttctttcagattatgagaaagaagtgaattttttaatgaaattgttttgaactttgttgttttcttgttgattaaggaacgaaagataaaattcttttgtcattacatagcagaatttgttctcttatcggatattttaatcttatggccttgttgggatttataccatgaaccaatagattagatgttttttcctttgtttgcaggggctttgtgaatttgattctttttgttcattgggttgataagtttgcatataatggttgtgtgcagaaagtttggctagataagagtactgggggtgtctg

SEQ ID NO: 81616 - DNA, 585 bp, Citrus sinensis
  Intron number 1 from transcript orange1.1g001390m (locus o range1.1g001390m.g) derived from phytozome v7.0 (chr-ID sc affold00006; pos 1481450 to 1482034)
cacggtgactaatcggtgatacgtcgtcacaggtgagcgagagcggttacatttttgttctaaattgtgtgttgtttcttcggagatgtagaaagagaagaatcccgtggactttaaatacatgcattgatccaaaattaccgttttcctaatttgtttaatttttaataaaaaagggaaacttatgtgtaagagagtcagacaataatgattttgacgtttcactgtaatttttattttttaatccaaaatactttacctatttttggcatgtaatgtgaaaaaccagtagtaggctgttgtcaaattttctgtttcttgatcaatattttatttaatcatgcagtgggtgacagaatgtttgtttgttgaagtagacgattttgagccaacggtagtgactgaatataagacacttgtatcaatgatgcaatgataatttggtttatgaaaagggatttgttgtcatcgcgactgatcctttcgattatgcaagtgatcaacttctggcgcctgtctaattataattctttctttaattttgatgcaggtgttttcttttaaggtctttcaagtgttggagct

SEQ ID NO: 81617 - DNA, 382 bp, Citrus sinensis
  Intron number 2 from transcript orange1.1g043634m (locus o range1.1g043634m.g) derived from phytozome v7.0 (chr-ID sc affold00375; pos 30228 to 30609 reverse strand)
ggtaaatttctatcttatgcattggtggaatattggaacaagatagggtcaggaaactgttatgagatttatttctcttttcatatgtttctcttgaaaggggtttattttctttacccactctgtatttcttcttttataatttttaatatttttttgaagattcttttgattgtaacaattgttaggtaatttactcattttgtccgatttagctggacaattttgctagtttagctctcttgaaacctatggatattccctcccttttcacctacaaccttggcattgatgttaatcccatgtcaaacataggtattaaacttttttcttatggttctggttaggctgagatttcttggtaaagtcctttcagtggaaa

SEQ ID NO: 81618 - DNA, 758 bp, Citrus sinensis
  Intron number 2 from transcript orange1.1g011659m (locus o range1.1g011659m.g) derived from phytozome v7.0 (chr-ID sc affold00009; pos 943477 to 944234)
ctgttcttcttgcttcccaggttagcagctctgtactatcgatagttccttcaactgatcatacacattagtttattcattttactgggagattgaaaagactgcctgcaaggcaatgcatattttcttaaattacggccgttaggtttcggataagggaaaatttttccgagagaaaaacgagaagaataacaaatgtaacaatagaaacgcactcgataacagttttccagccattaaaacgtataatatcattcatgcgaactgcctcataataaatgtgttccttttgcttcagccgttaatgtgtgtcttgaatcctagaactagtctttttattgttgataaatattgactttagacctgcatttcctaggaaacacttatatcaggctaacaggttgactttggcagcacaactgattatttcctacagctactaaatcaaaaataagctctaaagtctaccaatgacatttatcaaacatctattaacttttccttgacagctagagctctcattcccaacaattgcggcttaaagagctatatcacaagaataccaaaaacggagtctaaagcatgtttctctactaataacaagatgcatcatgctgactattagcgtcatagtttctattttgataactttcatttataatgcttaaataatctgatgattagatgatgaaatgatttgtatcacgatctaatccgaattgattattctttttctattttttatcaattgggctagg

SEQ ID NO: 81619 - DNA, 425 bp, Citrus sinensis
  Intron number 2 from transcript orange1.1g012399m (locus o range1.1g008061m.g) derived from phytozome v7.0 (chr-ID sc affold00500; pos 32704 to 33128 reverse strand)
acttatttgctgaatttgagcttgctacattactggtgagtttttgtgattgtgatagtctgattgatgattggttgaattgttgagctgatttcttttaatataattatactgattgtatgtagttcttaaataaatggattgcttgtggagttcaaaacatgtttgtgcttttcaggttgtcatttttcctctagttaggatattttgatttgcgttgaacataatgtggacattagggttttacttcttgttgtcttcctagtgagttctggtataacttgttgatgctttcattcaattgagttactggggatgctctggagtggttggaaagtagttatcttcttcaatattccagtgatgatgtgtcattttctatcttgacagggaacttctatttgtgcttagccagttagcctggt

SEQ ID NO: 81620 - DNA, 765 bp, Citrus sinensis
  Intron number 3 from transcript orange1.1g035632m (locus o range1.1g035632m.g) derived from phytozome v7.0 (chr-ID sc affold00088; pos 240100 to 240864 reverse strand)
tattcctacatattcagaattctattgatagcgaggtaattggcttgatcaatcactatgaatttgttaaagcgttgatggattatttagatttctagtattttggcaaatggaacctttctcacaggtatgaggtgtgcacatcattttaccgtccagaaaaacaagatcagtcacttacgaattattttatggcatttaaaaagacttttaaggagcttaatatgttattgccttttagccctaatgtgaagattcaacaacgccaacgagatcaaatggctatcataagtttccttgttagtatttcctctgactttaagactgctaagtcataagttctttctgactctaagatcttctctttacatgatgtatttagtcgagtactccgcacagaatgtactatgtctgttcaactcagtggtgctttggtaagtcgaaataataattatgagcctgggagatcaactaatcaaaatggaaacaaatgaggaggctcacaagggtttgaagctcggccacaggattcttgaggaattgtgtgctattactgtcacaagccaggacatacgaagtgtgagtgtcgaaagctttagtacaagaatcaaaaagctcattcggcttatgttgcatccactaatgataattctgaaaaatcagttcttatccatgcagataaatttacacagttctcataatattaagaatcactaaagtctccatctccttctgtcactgttattgctgattcaggtaaaccaa

SEQ ID NO: 81621 - DNA, 464 bp, Citrus sinensis
  Intron number 1 from transcript orange1.1g046351m (locus o range1.1g046351m.g) derived from phytozome v7.0 (chr-ID sc affold00589; pos 4591 to 5054)
gttttactaggtaaagtaaaagcaaaaatttttcaatcaggattaaagttcgagacaagttgataatgttgtaaatgaatttataatattgtaaaatagtgaaaaagacagttacaacattgcaaattcctttcagattttaatttcgaaactaaaactaactcaaagtaaaaatatgaaattataacaataaaactatattctaacctcgatagtcagttaaataaaactgatcgaaaattatttggtgccaaaaattaaagttaaataatatcatttataataagtaaatgttgaagaaagaaaaaaaaaaaagattgtaaaactaaaacaacaatgctaatatatatgccttgtaggttgccacgtggaagatatataatcttttattttccaattttgatgggttcaatgtttcttctctttcgagttcagagaccggaacccagttacgaaaaaatagt

SEQ ID NO: 81622 - DNA, 701 bp, Citrus sinensis
  Intron number 2 from transcript orange1.1g046351m (locus o range1.1g046351m.g) derived from phytozome v7.0 (chr-ID sc affold00589; pos 5095 to 5795)
cttcgccatttctccgtcgattttctcccaagctcgtaactttcttttctctcttgcaaattagtagtataatttttatcatgttttgttttaattttagcttctttatttttgttgttgttgtggtttgtttgtttctccaatttcagtaatttaatgtagtttttattatgaagttaaagtgtatttggtcaaaagctgattttgattaaaaagaaagtgtttttcgtacgtgtttcctcagaagcgcttcctgatgcatcattacttctttctttaaattgataggaaattgaaaatgaaatgaattgattaggctataagataaatgaatccccgacaaaatcaagaaaaatgttgatgctaatatttgtaagcctgttatgattcattcaatgttattggggcaccagtccaaaattgggtttgatgagtgaatctgactcaaaaggttaagagaagtgcaggctttatttaatgttgtgttgaaaaggattaagatgaaagattctggaatctttttaacagaatgctgtccaaagttccctgatgaaggcttgcagttgtgttgcatgtgctaataaaaaatggttgctggtgctggttaaatcattactgttttgtttattgccagattttgatgctgataatgttcatttgattataggcgtttgatttttgaaattgtaggggagatcacc

SEQ ID NO: 81623 - DNA, 714 bp, Citrus sinensis
  Intron number 1 from transcript orange1.1g035026m (locus o range1.1g035026m.g) derived from phytozome v7.0 (chr-ID sc affold06885; pos 44 to 757)
tggtggctaagtccctcaagtgtagagttagcaaattgcaggcttgggtcgggctttttcaagccaggcctaagctgatgttattgtcactaggcccaagccttccgaaagtctatccaaatttatatgggtagggcttgggctggacttgggcagacttgggctatgattggacttttaattaattttgtaacaaaactaaaaaaaaagaacattaaaaactaaatgcataccagtaaaataatcataatcacaattacatcagcaaggaatataacacccactaagccgtttgatgctgagcaaaattgtcttctttcttttgaaatgatgccgtatatagaacatcatcatcttcacgttctattccattatcagagaataaacccttctccaagctatcaatttctacaacctcaaccctagatcctatttgaaaaaaacaaataaataaatgatcataatcacaattaatccaactcggatttcaccaaattacaagatcaaataaaaaagcttaaaaaaccgacaataacttgtgagaagtgcattttacctgttaatgaattaaaagtgtttaactggtagattctacaaattcaacaacatttaagctgcaggtttttgttgcatattacatatgaaagattaaaaacagaataattgtccactttattaggttctgttggcgctgggtttgttgttgttgcgtca

SEQ ID NO: 81624 - DNA, 686 bp, Citrus sinensis
  Intron number 1 from transcript orange1.1g018855m (locus o range1.1g018796m.g) derived from phytozome v7.0 (chr-ID sc affold00043; pos 16553 to 17238)
actgttttgttgatgtaagcaatctctgctctctcatttttcatcttctttactttatcaagctctctgtctatgtacttactgatataacatagtttcaagtatatcaatgaacagtatctttataatttttatggcattaaacaaaatatagagttttcagtaagagtttgaatatatcattttaatttcaacaacttccaaaaccatttttatttatcttttttctttctctttacaacaaatttttcctctctaattcgatgtaccgaggaccatgtaattctctgtttataaataaattttaatatggggttttcatgtactagaaatttaaatctagcaaagatttggtacaaaacaggaaataaaatccacctcatggcctcatccctgctgagttcttttaatgatcatgggtccaatattaatggtgtatggttgaaaaaaaatcacacttgttttatattcttccaactgagaaatttaaatcaactggaaatcctagtcttaaaaacatatgtaataataagacaatttaaataagaagagtttgcattatttatataatttttttgaattcctgtccataagataagaaggaatctatctacttgaaaaagtaataatacaatggactgttaacatagcaagttgttaattaatattattttttcaggggtgtg

SEQ ID NO: 81625 - DNA, 505 bp, Citrus sinensis
  Intron number 4 from transcript orange1.1g048506m (locus o range1.1g048506m.g) derived from phytozome v7.0 (chr-ID sc affold00086; pos 231451 to 231955 reverse strand)
ttactgaggacgagcgttatcgaatccgtatcgtacagtcagttttgcattttggatccctatgttaaaatctgcaatgacaaattcaaataaaaaccattcttataaaagtcagtatctaatttgcagactggcatagaaaatctgcaatgcaaatgtcttttgctttataaaattacaagaattagccctctaccgatggctaattaccattggctatttaaacaattggcactttcttgtcagtctatttcaaacttctgggttgctacattttttctgaaagattgtacttcataaaccaattatacctgtcaatgaaatctttattttgaaagaagcatgtaaaggataagaatgacagtctagtgaacctttttcatttttccttcttttgcgtgaagcctaagaagtatagttttatcattttgttgtaactgttgtcttatgctgttgctaatgatcaaaattcatttgcagagagaatcagcattgagaaagaaac

SEQ ID NO: 81626 - DNA, 589 bp, Citrus sinensis
  Intron number 2 from transcript orange1.1g038856m (locus o range1.1g038856m.g) derived from phytozome v7.0 (chr-ID sc affold00013; pos 509524 to 510112 reverse strand)
acagggcagaaacactcacttcctgttgttggcaggtacaccttttgaactttcctctgtcactcaactttgatgttattggaagcagggaattggttaatcactcttttgactccatccatgtgccttggaaatgcttgtcagctacttgttaaatcactaatgaaccaaaactgctgcatgatatgcttgaatggtacattaatctttttttttttccttcaaaatggataacttagcatctgtttctagcactttttttcactatgattcatatggggaaaaaaagtggctccaatattttcaaatttcttcaagcctttcatttcatatgaatcacggaacatataaagtttgtcaatcaaaattctgaaggccgcgtttctgtttgaggacataggtaaagtttatatataaatttaaattgggaaataatagtggcttcaccacacaaaaatgtaattcctagtacctttatgcacaatagtattatcttctttacattcatgtacctagtttccttcttaattgtataaatccaaggatttcatcagtgtggggattattttgctcggtgcatttcttgctg

SEQ ID NO: 81627 - DNA, 1016 bp, Citrus sinensis
  Intron number 1 from transcript orange1.1g038762m (locus o range1.1g038762m.g) derived from phytozome v7.0 (chr-ID sc affold00092; pos 185806 to 186821 reverse strand)
tggaacgttaggttgcgagagcccgcttactggtggtgcgtattctatttttcttcttcttcttcttcttcattttttttcaattttgtttttcttaaaaaaaaaaaatgttgaagcttcacgttacgctattacagtttaccaatggggtaaattgtcagtaatgtcagatagtgcggtctgaatgtgtacaaaataaaaaagtagaagtagaagggttttactgtaaatatacattaaaataggataaagattgaagtaggcgctgaaagccttatgggcccacctcaagggagcccacttgtctttcggtggcaaattgcaccgtcgagacgtccaacttgctgaaaagaatgggcgaatcgtatgaatgtctttgtagtttgttctgagttgtcgctttagttataaaattcactctaatattttaattcatgactattttaatcttaacacaattatttatttatttattttttaggggtttgatcttgtattctccattccaatatatatatatatatggtggagatgatttttattttcaataattttaaattttgcaaacggtaagtgatggttttattggagtcatttcaaggtttatatataaaaatttattctaaaatagctaaatagaaaatggactggggatgagtaatgtagttcccatatagggattctccatcccatcccattgaatttattagggaatgagttagagaatggtgtccaaattataaagagggtggggagtggaggaggcttccccgcttccgcccattgtcattcttgatttctttagttaccatatgagactatgagagggcgaaaattatgttgagccggaaaaaaaaaaatctagatactataagggcgctaattgaaacttcactcatgttatataaattttgtgttttgagccccttctaattttctctatttatgctattgtttgacaaattgattactttattgcagcttgcacatagtgcgttgtgataacacattcattc

SEQ ID NO: 81628 - DNA, 501 bp, Citrus sinensis
  Intron number 4 from transcript orange1.1g024426m (locus o range1.1g024426m.g) derived from phytozome v7.0 (chr-ID sc affold00041; pos 719743 to 720243 reverse strand)
gagcagaagaggtaagtgcttaattctcacacccttttgctctgaatttttcgctgcatcagttgggttttagtcgtcagtgttaatattggtccatatgctatttgtcttttcacatgatgtacatgctacaaaattttgctttatttagttcatgactttggtgttttaacttgattggtctgtgttgttggactttttatacttttatagttgagtttttcataataattttagtggatagtgaagccatattttctctttactgcagtagaatgttccaaaaaacatgtgtatttagtagcttatggcagaaacatacttggtttccatttaatttcaattgaagctgactgagatacacttatattagagatcactcccttaaagactcttccattgcttttgctggaaagctaggcatttctttccctttgctttttctctttaatcaaatttgttgaacatttacatacaggcaggagttatttctgctggata

SEQ ID NO: 81629 - DNA, 770 bp, Citrus sinensis
  Intron number 2 from transcript orange1.1g025306m (locus o range1.1g025306m.g) derived from phytozome v7.0 (chr-ID sc affold00018; pos 691315 to 692084 reverse strand)
ctcatcacggtttgcttttttttttctgtttaattatcatccaattggcactatgaactgtgataaatctgtgattaaattaatatctgttgtgcaatttagtggtagttaattaatttttttatagagagaagcgtagaaattgtttgagaaatccatgtagtgtgtttgatagttgaagtttgagttacattgtcaaaaggggtttcatttctcttgtttcgtgtaattttgagagctgcaagcagtgaaatttttgttctttcgagatttatttgattatctgtttgagatctagaaatatacattgttggtttctatataattgaatatggagccccattacacatcagatggtttgctgagttaagaagtttcttccaagtaaaagttttcgtttttataacactgatagtttaagtaagaataatgctacaaatcccaaaatttattccaaaagattcatcgcaatgaggtgtcaatgggatagtagatagtaaaatggtgcaattaataaattaaattagaaattgagaaagtccatcaattgttagatatgacacctcatttgggatgtgcagcattattgtttatcaattaccagaggtatattgaaaatggttagagtaaagtggcgatttttttttttcttttccttttgttttctgtttcatttgtaatcatctgtgtatactatctatttcccagtcctcagtttcatgaaaatgatcagttttacgctttgacgataacaggcatctatattgggg

SEQ ID NO: 81630 - DNA, 654 bp, Citrus sinensis
  Intron number 2 from transcript orange1.1g040262m (locus o range1.1g040262m.g) derived from phytozome v7.0 (chr-ID sc affold00364; pos 124715 to 125368 reverse strand)
ttactactggagatattgcatttgaaaaaccaaaggtttgtactaatcactcgagggatgttagttagttagtcactgtatgacatgtttactaattgcatgttaaaactttttgccatgttaatcagcaatcttgagtcctgtctgaattatggtcttttatgggttttctgaaatcagtttcgtggagccagatggacattgaatgttacatatgcactaggctaccaaagcaaatctcctgaaatctagcactgccataattttgaaaagtgtctagttactgttataagttacacgcacacacatattttgcacacttgcacgatcaatgaattcatcttttagctgaagattgatttgactttacgaatttcactattacactttgacagcatttcaaaaaaattgggaaggtttctttgccatctaaagctgtagtgtgcttaaattttcttattggttcttggcatttgctatgttttaacaaaaaatgtcagaggattgtgtaatgtttccccggtccatcgaaaatccttgacttgtgtagtatcagaacttctgcacctttaagaaatctggttttaacaatagattacaaagacgatgtgaatcctttctgagctgaaagtaaatcacgactggtacaggata

SEQ ID NO: 81631 - DNA, 989 bp, Citrus sinensis
  Intron number 1 from transcript orange1.1g012197m (locus o range1.1g012197m.g) derived from phytozome v7.0 (chr-ID sc affold00019; pos 655353 to 656341 reverse strand)
cactgcgtcactcttggtggtgagttcttttcttttctttttctttggtattactattacatttctctttctttttcttttttttttgaattaggatcttgttgttctgtttgagtttagctgaagagataaaaaggaaactgctataaagatgtgcgctttctattgtattcttgcgtttcatgggaaattattgatacccatttcgttaatttctttttttttttttcgatttgataaattgatggtagaatggtacgcgcgcgtgtgtgtgtgtttgattttttttttttaaaagttaatttgtgcttcactgactctacacgctgagttgttatataaaatttaaaactttcttttgttttgtggttaaatatctcctctttctggttaagacgatcaaatatgaaattattgattaaccatgttgttcaatgtaccatccggcattaagtcacttcactctactaccagaatgctttcattattcggctgtaatgtggtgattttcgaacttgtattgcaattatgctctgattttgaatctatcatttccacctattgtcttgattgggaggtattggaaaattatgagcttgggacacatgtggacccctacaaggtcctatgacgcatggtttgacacttttgccttgcaattcaactataaagaaagctatgagttgtcatgatggctctttcttcactatcacatatctagttttaaattttcaagcagttatagaagagcactgacttgcaaactaggaaatctaagctcatttttgtttttgccagtaatctattcaggctactttgtttatcttctttggtgggagggaggggagtgcttactacctatgttggctattgcgcgtgcacgttggctattaatgggagaaaatgctttttgtttttgaagatttattaaaaagtgtttcgcttttgtctgtctggcaggattgttttttctcctttgtggctatttc

SEQ ID NO: 81632 - DNA, 475 bp, Citrus sinensis
  Intron number 2 from transcript orange1.1g025422m (locus o range1.1g025422m.g) derived from phytozome v7.0 (chr-ID sc affold00494; pos 38565 to 39039 reverse strand)
ggtctttgattggctcatttatctgtttcattaaggtacttattttttaagtttaaatatatctttttgttaaatgttaattccactgtttaattgatgctatgtaatatttagacctcaattcttggtattgtccaagatattgttatatgataaaaattgaaaagaacaatctttttcatctgaatttgtaattagctgacagacttattgaattatagactatttttacaaataatgtattcttaacccggaaaatgcaattctatcagtcatcttagagtaatgtattttgtttgttttatgctgaatgaaattcagattaggagatactaatgatgtggagagcattagcagatcatcttggctgtcatgtgtagccatccatatgtattgattattttgtttttgtgactattctctttagtgttttgatttacactgttgactcttctcgatatgcagggttgcacct

SEQ ID NO: 81633 - DNA, 658 bp, Citrus sinensis
  Intron number 1 from transcript orange1.1g001600m (locus o range1.1g001119m.g) derived from phytozome v7.0 (chr-ID sc affold00006; pos 420259 to 420916)
ctctcatcgcttatattgctaaacttgaaaccgaggttcgttcatatccactcaagtatggttttttatttgttatcctgatttttgtttcattttcgtgttgtttgaattaaattgtatgctaagttctgtgggttgcataaaatttgaaaaaataaaagaaaaacaagaatgttacttatcatcctaaaagaagaatgtcaaggctccaaatactgttttatttgaacaaaactaaaatacattgtacaagcttctcagttttgatttgcatacactgaattgtcctgctaattaagagcagttgtgcgcttcccttcaatttagattttaatctgattaagtgtgtggttttaatctttaaatatgagggtgaggaaagtaaatagatttttttttaaaaaaaaaagattgattttatatagaatatatttaatacactttctgtaaccccagatgccaattagatttgagaatcaaactcccaaagatatttatttacacggtctctattaaggtttgctttgatgtattcctttcattgtatgttaaaagtttcatgtgatagtggctttgttattttgtatgtactaattaattctcccattttatgtattgagaaggaattgtacagggaagctgaagtcggatctgcaaa

SEQ ID NO: 81634 - DNA, 744 bp, Citrus sinensis
  Intron number 2 from transcript orange1.1g001600m (locus o range1.1g001119m.g) derived from phytozome v7.0 (chr-ID sc affold00006; pos 420980 to 421723)
gagaatatttaggtaatcctgtacccaaaaagaaaaaaagtattgagtctcttctttgctggggaaattttggtacttgagaattcttttggattttatacagtgacaatacatgtgttattaaatgttaatctgcttcttgagaatgcacggttaacattttgagtgtggaacttactaactgtttaatcttgaatcatgcaaggttgatgatagaggtgttggtttagctagtagcttttagaggcattcttatcttgattataacggtggtgtttgtctagcaagtagcttttggaggcattcttatcttgattatatcggtgatattgttgttttatatatcactgttttggaattgtttcaaaatatttaagatttatgttttatctatgcatttctaatatattctctatataatgtaatttatttattttgtaaattcaaatggtttcattgtaagaaggctattatatattgttcctttggctgagcttttgagtgctttgctaagcaaaatagaatatttgatgcttttttgcatggtcctgtcaaatcttaagttattaatcattattttattttttcttttgctgcaaaaaatgtttttttcccctgtaaattgctggtgtaatgctttacttttgtctaattttgtgcctatgctatccttgtattatttttcaaatatttgttatctcacaccagtgttacattttgaagatatttgagcaccagcaccac

SEQ ID NO: 81635 - DNA, 906 bp, Citrus sinensis
  Intron number 1 from transcript orange1.1g045616m (locus o range1.1g045616m.g) derived from phytozome v7.0 (chr-ID sc affold00009; pos 1225141 to 1226046)
cgggccacgatcaagttcagtattcttattgttgggtacgttgccccacaatatcatattatcatatgattatttttcgttttttttttttttatcattaattcattatacgtcgatactaagtaacgggatacaacgttcttaagagtactttagtcgaacccttattttgataattgatattaggtacggccaatttattagagagaggaagaaaacattgcaagattttctaagcgacactatattaacgtcgtattgaatcaagcccttaaataaacaaacagatatacggcaatttttaacggaattttggttagattcgatgggcagagagttacaaattacgtcgctaattgtgaattggtgaaaacacaacactccaaatgttattaggtcattttattcttctgtcagtccgtaggatcaatcaactttggcgggtgatgtaggtatatgcaaaacaggtgatccaaccacttcccgaaaacccttttgtcacttttgggatagaggtcatcataactcatcagtaatcagacagacgctcgactctctaaactagagaaacaacacagacatagtaaaaattccagacactgctgcacagctcaaaaacgtctccacacactttaccaccaaaacaaaaaaaagaaaagtgatgagagggaagaataacctaaaaagaaaagaaaaaaaaaataaaaacaattgtgaagtctaaatagagagggagggagaggaagaaaaaaaaaaggaaaaatagaaaagggtaagaaaaaagtgaagcagaaaaggaggaaaatttgggagaaaagttgaggaggggggtcttggttggcaaaagagggggccctactactccagtagtgtctacttggagactctgccatcctcctgaggcgc

SEQ ID NO: 81636 - DNA, 713 bp, Citrus sinensis
  Intron number 1 from transcript orange1.1g003955m (locus o range1.1g003955m.g) derived from phytozome v7.0 (chr-ID sc affold00018; pos 878239 to 878951 reverse strand)
ggagatcgctttcactgtcttcaatgtaagtctcttttgttttcatttttaaattttttctctatttttcaaatagatattttgtgggcttgatttcaatctaataaaagaattttattcaattggatatttagattattttgtgtttgaatttgtttaattctgttgtaatctgggagatattatatgataaatatgtagatttattattttgttactgcagttcctctgattgatgaataatcatgtgctaattagtgtatatgtgctattcttattgaattgatttctatggaagagtttggatttaacattacatattattatttctatgattgatttggtaaatgtttgtgctattggattaatattttattttttgggagattttgtgttccttgtgagagttgacctttggagttttgccaagcctttggtactgaaaatccgtcttttttcagaaaaggatattttgtgttgattctgaacctttcgggatttattcgtttgactagcagcccgcttttttggagccataaaaaatttgtttatcgttgtcattattttaaatcaatttatgattggattagtgtagtttgtttctgtctattgatttgaagaatttagtagcacaaatatatttcgaagagactcaatatagcatctttgtaaatccagggtttgaaccaggggccaaaaggcaaggttcctgt

SEQ ID NO: 81637 - DNA, 953 bp, Citrus sinensis
  Intron number 1 from transcript orange1.1g021037m (locus o range1.1g021037m.g) derived from phytozome v7.0 (chr-ID sc affold00006; pos 1211736 to 1212688)
gtccttgcatctacgaagccaaggcatttctttcttttctctatttctgctttgtatttcttaaattaacgttattttggtcacttcttcgtgtatctttcttaaattaacgttatttaactgtctttattttattttattttttaaatttattttggctttatatgaagttatgatttgtgttttacgcccgaaatctgggtcttcgacctagccctttggttctcgataaatctttagctcatagtttataaattaggtatgtgatatgtacttaaatttgttttgctcgtcattcatgttatcaatttccaaaagcttaatttgcgttccattgcaggtttttgtgttgttaattgagtcagtggctatactgagtacatttgagtggttgttttagttctggaattcctaaatttgccaatatcgagtcttttgcctgtgggtgtgtttgtgtgtgtctgtgagtgtctgtgagtgagtgagtgagtgagtaagtgagagagagagagagagagagagagagagagagagagattagatattctgatgtgagtcaaaattaagctatggttctttgttaatggctttagagcttgagttttttgtgacatatatagaaaatgctaccaaaatttgattgaaatgctattatgtggaggctgttgtccttcattattctgttaggaggaattaagggtcaagggagcatctgctgcataattataattgttttatattgtgcctccaattgtatgttgctgaagtggatgtttggttttacaattggtaaaatgttataattttaatcttaaaacgtgttcttgtttaccaattgattaatctttttctcgatttcttgtgcacatttcaactttagtgtttctactctgactactctgtgctcaattattttaggttcaaaaagctgagcttcggaaaaaagagtggag

SEQ ID NO: 81638 - DNA, 518 bp, Citrus sinensis
  Intron number 3 from transcript orange1.1g029435m (locus o range1.1g025413m.g) derived from phytozome v7.0 (chr-ID sc affold00450; pos 25877 to 26394)
gccgggaaaggacacatctttgggttagtattttattcttgtaatttatgttggtaatttctgttttctttatgtattactttccaaacattagtcatctgccatggttgttttatgactatgctttctttaatgttttatggacccctaagaatcacatcgataagaaatttgataaaaggctaacatatttatcatactttggatccttaaggaaaccatgcttaataccttgtagggcttcaattgttaacttgtgcagaacatagaattcatattcatgctatgatctataccaaaatgctattattgggtagattcagaccagcgtacacttaagcgggcattgctagcatgtgcgaagctatgcagtgcccatggacacaaatggcactgatattgatgtggtagggcacacatgtactcaacaggaatatgaaattcatgatttgttttttgctaacttgaacctaatcctttcagaggttgatagcgttggcacgatttcggcatctctt

SEQ ID NO: 81639 - DNA, 875 bp, Citrus sinensis
  Intron number 1 from transcript orange1.1g007938m (locus o range1.1g007938m.g) derived from phytozome v7.0 (chr-ID sc affold00091; pos 98468 to 99342 reverse strand)
tgatctctacaagtgtgaaccttgggagttaccaggtacgtacatacatccatatatttttccgttgccctagccagttcttgaatttctggtttatattatacatttaaaaaaaaggataaaaaaaggaaacaattaacatgttctttagcttatttatttaaaaacaataaaatacaaatgaatttttcttaaagaaaagaataaggaatatacttagggttagcaatgacctaaacggcaagtagttgtgtatagaaagcaaccaacatatattcaaaattaattaatgactacaatatataataaacagaaagattaatatttattgccgatctgcagctaacatatgttgaagaacaaaagacggtcaagcacctttaaaaaagttgtttacgtaaatatgtaatcattctgctctctttttgtttgtttgttatgtttatgtcttagaacaaactaaacgaactaatcaaaagaatcgaacgtgttttgtcggtcaaatgtcttaagcttttgcataaaatagaataaatatcacaactcgcaagtacatttgaaaaaaaattactgcttggccccaccaaggttaattagtattcattcttcttcttttatttgcttttctcgtgaggaagatgtgagaaacaaggtgagcgaccaagtcacaaagcatgaagcaaatatttcagcgtcgccacaccaaagatgatttattggattaattttttttttttcaaatgatctataatcaaatatgatccatttcctattttatcttatgttacttgtgcatttgtaacagtttttctcttgttattatcaatcaaaacttttcaggcaagtccttgttaccgagcaaagatttagagtgg

SEQ ID NO: 81640 - DNA, 622 bp, Citrus sinensis
  Intron number 2 from transcript orange1.1g012136m (locus o range1.1g012136m.g) derived from phytozome v7.0 (chr-ID sc affold00006; pos 1637137 to 1637758)
gaaggtatagttaattaataatttccattcatggccaaaagaagtatttactcttcttctttttttttggataggtgttttttaggtaactttttatttagctaaccacttaagttttgatcgttgtggaggtagaggtcaaaaaataaagtttggctttgtccacttccttactttttgaaaaaaaaacaaaaataaaaaaataataaatgaattatattgcaattaaaatacatagcattcgtttttatatcgaaaaaaatcaaataaaaatatgcccaaagtcttttaatttacagtgaatctaaataaataaacaaaaacctttttttttccaagactcattgtcagttttttaaaatttatttgtgtaattattcgtaattaattactaaatgaataaaaaatattggtaattatactctattttgaaaaattaatatttataagtgtgattagggtcgggtgaaaattctcaaacgcggtaatggtaaaatagtccaatttttaaaagattgatacccatagatgtctcacggaattttacaatctctggggattttaccttaaatttatattatgattaattttgttgatatgattatgttttgattttttgcag

SEQ ID NO: 81641 - DNA, 974 bp, Citrus sinensis
  Intron number 2 from transcript orange1.1g017209m (locus o range1.1g017209m.g) derived from phytozome v7.0 (chr-ID sc affold00270; pos 139810 to 140783 reverse strand)
atactctgaaaaacagaaaaccagttagtaatgcatttttactttgtttttatttttcttgatatccttgtgatgattgaaaatagaccatttttcctgaataagttagtctatattttgagcaacttgtaatttttaaattcgatatgagtatcttagatggttcattttcttttccttatattgacaagtgattaataacttcagatgaactgctaggatgaatcccaaaaaaaaaaaaaaattgtaggaacaactcatgattccgaattcacactgaagaatgattctttatgttcatgatccttatattattttcaattgattctcttctacttttggaggagctgctgttaataagtgtcttttgatgtatttaggggaatcctatggataaaatgttatttgaaggtaattcgcttcttagataattgcagcaatgttgacaattgagtatgaaaaatgtgtataacctataatggttatttggtgtatttccatatgcacattcctatccagaacttaccagagggtacagatcttgtgcaaaaggattgcataaccaatcccatttaactggaacaaaatccttagattatatttggggttgaagtgttttggcttttaatccacagctgtcgtgggacggacccccaaaatatcaagtattaagtgtttgggtgggttttaacgagttaactaccatgtaaaagtgagtgtctacgaatcctttagtttatgtgctttcacggttaaatgaagcttaaacaatccgaagcatacctttaatgggttgagtatttaagtactcatcttggctgagtctctgtctgtagttctgttttgaaggtgtgttcttaagaacttgcggttttgtggctgttcttgtgttctcctcactatgcttcatcatttttttcttttcccttattgcatcaggaaaatactgaaacccgacgtaagagttcaaagcg

SEQ ID NO: 81642 - DNA, 307 bp, Citrus sinensis
  Intron number 1 from transcript orange1.1g000104m (locus o range1.1g000104m.g) derived from phytozome v7.0 (chr-ID sc affold00018; pos 787119 to 787425 reverse strand)
tcgttcacccccaactcgacgagtacgttgacgaggtacgctcttttcattaacctcgctgttactttataactcttctttatttaatttcgtatttattgcttttcattttttttttttaaattttttcttgtgaagtttgttattatgaatctttgtggaaaagtgaagaacttgtatgttgattaatctcgtgtctgattacattgtgaatgaaaattattgatcgctttgctaatactttgatcttttattatgtttcttttgtttattaggtattgtttgcagagccaattgttataacggc

SEQ ID NO: 81643 - DNA, 572 bp, Citrus sinensis
  Intron number 3 from transcript orange1.1g024772m (locus o range1.1g021779m.g) derived from phytozome v7.0 (chr-ID sc affold00270; pos 47850 to 48421)
tgaagaaatttacgtaggtttcttgtattaaatatctttcatttactgatgatcattagtttccttaggtggtggtcagcactcttggtctccttttcatggggaagttgcttgaacctgtttggggttctaaggagttcctgaagttcatttttatagtgaactttcttacttctttatgcattttcattactgccgttgccttgtactacataacgaggctggaaacctacctgtaagtgttaccattttgcttccactgcttatgatttagaatcacatttcgtcttcttttttgttttacttttctcttcctgctgctttcaccagactttaacttattctggtggctgagaaataaataaacaagatattgaaaatcacccacaacaaactgtgcattgggaatattttcatttaataaaatgattgtcaccagttgcatatcaatttatgttttaaggattcaaaccagttattgtaatttatttatggattatcccttttttattatttttccttgttctctacccttgtaattgctgattctcttttctatttgtgatagctac

SEQ ID NO: 81644 - DNA, 746 bp, Citrus sinensis
  Intron number 1 from transcript orange1.1g003657m (locus o range1.1g003661m.g) derived from phytozome v7.0 (chr-ID sc affold00013; pos 1378088 to 1378833)
gcattcccattctcttcattgcgtttctaccgtccgtacgtttttcttgttttctctaggtactctgtttttctcttcttcccattcttcttcttttcgtctagttttgaattcttcttcgaggtcgaggatcgtgttcaatgctctagtctatcctgttgaattacttgttcatattttacgctgattttatttgaccacctctagaaactcagccttaaaaaaagctcctcagattcactgtttcctttgctagaattttctcccatgcttttgttggtggactactaaaaagaaaaaggataaagaaaaaagaaaagctttgatccaaaatttatccctggtagccacacaaagtggtagttcaattattatgcctacgctttaaagattttggtaatattatgtttggcactatactggccaaccagcacataagtgaatattcttaacaaattaagacgcaatgttaatttttaagacagtaatataagttgaacaatatagactctttgcgtaattaatattttaaagacttggttgttgaaacttgaaactggaggtgggggtaggtttagaaatttttcgtcttctagatttttttatttgactattcggattatccataatccatttcttctctatataatgaaggttggttttggatagacagctatatctttacgttatttacgtttgcttggttccttgtgttgcagttgaagtttttgtttgtctgagaatca

SEQ ID NO: 81645 - DNA, 766 bp, Citrus sinensis; identical to SEQ ID NO: 80538
  Intron number 2 from transcript orange1.1g014472m (locus o range1.1g014437m.g) derived from phytozome v7.0 (chr-ID sc affold00324; pos 137063 to 137828)

SEQ ID NO: 81646 - DNA, 680 bp, Citrus sinensis
  Intron number 1 from transcript orange1.1g001344m (locus o range1.1g001344m.g) derived from phytozome v7.0 (chr-ID sc affold02690; pos 435 to 1114)
gtgaaaactggagatatacggtttttggcaagtacatctttccttctggtcaaaaagaattggtcttctgaaatccgattacatgcatttaaaatgctccaggttcatgcagatattcctttaccttgtgtttgccatggatctagcccatccaaattgtgaacttgatattgatgggactcatcttatgttttaagatgttatcattgatgtctgactcatcttatgttagaatcatctgtaaaatcagtaatatgcttttgaatatgtccttccaactacactgttataagggtcggcggaaacttttcaaagcgctgtctcttgtaggaggagactcttctatatttctacaatgtggatgtgggacaaatagataccattgaacccataccgaacaatgttttattgatcaatatgatgtctttttgttttttgtttcctaatggcctaatcttaaagaacaaatgcaatcatccgaaaaaacagaaatctggctttttgttcctttctatcgaaagaggttgtattgctcacttgatatgaatattaggttccagctatttgatttttgaaaattagcgtttgtattcttatgagttgtaaagtttgaggataaattgagtgacgtgactataacatatctatctttctacagcatttggtcagattaaggtggg

SEQ ID NO: 81647 - DNA, 700 bp, Citrus sinensis
  Intron number 4 from transcript orange1.1g001344m (locus o range1.1g001344m.g) derived from phytozome v7.0 (chr-ID sc affold02690; pos 1568 to 2267)
aagatttggaaggtttgtggtgaaataccttagctatactctttgctatgtgtgctggaatgaatattttgttctttggaaactctatctaggaatgctaacttgtaatggttaaactagttgaatttctggacatctgaatcctaattgtatgtgtggaatgtccttttttttttttaatttatgtttaatgatcaggccttggttggttgaagggatagaaagtaagaaaaaaaaatggaagaaaagtgtttccttctgtctgtttgataaaaatggtggaaaactgaagggatgagggaaaattctcagattgcggcatttgtcgtaagttctaatgtcctcacccttttccatctaattagggagaattggaaacggagagtgaggatgtaaaatggatccctcccccattttccatctactccttttgtgatcgtacaaaacaagttaaaccatcattctcccttcctttatggtccccttcttttttttcctaccaattaaagccttagtgtagtggggttctctttcttctttaatgcttcttttatcccatcatacttttactgttcttatttggaggaagatttttgtgaatgcctttgtttgatatttatatagttgtttccttctcttcacatgattttgaatgtgttaaccaggtgatcgacgtaggctactgttgcgaggccttact

SEQ ID NO: 81648 - DNA, 386 bp, Citrus sinensis
  Intron number 1 from transcript orange1.1g014657m (locus o range1.1g014635m.g) derived from phytozome v7.0 (chr-ID sc affold00006; pos 2312777 to 2313162 reverse strand)
aagtctccatacactcagtccttggtgagttctatttcgtccaagtttttatggagttctatgattctgttttttggttttttttttaaagaggaagaaaagaccaaattttctttctcgtttgtgaaaatttatttaagctttgcgtttattttcctggtttcagtatatgatttgatctatgtttagatatggaggaggtaggaggaaaagttactttctttttctttttttcttctttcttttagtgcagttggaaaaatctaaatcttttgtttaggaaactttgtgctattatttttctgccactttggtgtgtaattaatttatttggagtgttttacatttcaggtgaccggctatcaattacggtttgagctccgcgc

SEQ ID NO: 81649 - DNA, 815 bp, Citrus sinensis
  Intron number 1 from transcript orange1.1g009811m (locus o range1.1g009811m.g) derived from phytozome v7.0 (chr-ID sc affold00487; pos 19129 to 19943 reverse strand)
ctccaagcttaattgcactcagcagtgtattgaaagtatccttttcatgttgttattatttgcctaagttttatctagaataatcaatacattttattggcaaattaacattttttagtttgttatattagagcttaagtgtttgttatgtcgtactaaccactattcaatctgacaggatcgatgaattaccattttgatatgtcgaaattttgacacttcaaatgaatgtgcttgcatattttgttgtaattgcattggtagtgatctttttcaattgatttttctgatacaggcaaattcttgtgttttctttttcccatttcttgaaattagattattggaagcaaggttatctagaaatgattgatggacttgtggacagaagtatatttgagattgaaacttttcttttagatgccagttaaacatattggccaatggctacccctcgaggtcttcacttgtgttgaaatttaggcccggcatttactgcatttgtatgtgaaatttagttgattgattatgaattatttttctataatgtgctagataattttggttggatccaactttgaaacatttgctctgctatgcttttgctcaatgtagttccaagatttgaataatacctttgcatgatgtgtctgtgtgagtaatatatctttgagtctacttatttatttgtttaattttttttttaatgtgctctttttggcgttaaagcaatcatattgttcatatatccatgcgatatgttcccttaacttatgtgcatagctttgtcacattggtgtatatttcaccgcagcaaa

SEQ ID NO: 81650 - DNA, 665 bp, Citrus sinensis
  Intron number 1 from transcript orange1.1g032772m (locus o range1.1g032772m.g) derived from phytozome v7.0 (chr-ID sc affold00680; pos 81156 to 81820)
atctcgccgccgtccttgaatatctcgccgctgaggtatcgcctttctctttctttctctcctctttcttcgctgttagagcataatcgatttccttgtttcagattcttatgcttgtttgttgggttttaaaagatgtttatttatccattttttttaattgtagatctagggtttctgaatttgatatttttatgtgaaaattggctcttatcgtcgtaacatattaaacttgcatcttaactttttaatttttgtgtagagttcagtttttattgtaacgtctggaaattgttaatatttgtgaaattagggtttctgcggatctgcatatatgattttattttattttaactctaattttgcctaattctttttaaaattttgcttttttatggataagtcattattgtattttagttatcgctctctgaagtcagaatattgtgctataatcaaattcctctgcttttattgtgaaattagggtgtctattttgatctgtgttatacataatgtgatagcagaagatgcatattggtgtccttttatttggcatttgatcttgctttaattgttcttggtttgagcattttgttgatgaaaaaaaaattctcaaattttaatcttgtctgattttgtacaggttttggaattagctggaa

SEQ ID NO: 81651 - DNA, 966 bp, Citrus sinensis
  Intron number 1 from transcript orange1.1g028898m (locus o range1.1g023369m.g) derived from phytozome v7.0 (chr-ID sc affold00013; pos 1568908 to 1569873 reverse strand)
tagcctcgggatatcaagcaacattgaagctagtaaagtgttcaattatatatttgtttggctgctgagaaagtcaaaaagaaatttaaattcattcttgtcatcatatatatgttcttctgggttgccttcttatttgggagaaaaaccaattacgctttttctttacttgggattaaaatcctagcttaagctctaatacggattacctcgacgcttagatctgtttatgtaaatgattgtaatcccgtttgtgaattatagcatgtgctttttataatttgtaattcttatcttgtctttggaatctccccactcccagatccaaactaatctcatctcattttctgtaattgacatattcttcctgtttaaccattcaacggtcaatagaacatgttccctatttcctcggactcccctcaaactactccaattttattttttttttcatttttaaaatttcccttaattcaagagacagacggcagccccatgtgctcaagggctgttccatacttctgttctattcatttattttatgaacaataataaaaaatcagtttatagaatctctatttttggggataacaacccggtcctcgatctggttcccttttcaaatttacccacgtgagcttttagtttcattataaggcaacaaacatgctgctcgaatgtataatttgtgttggagggaagattgagacaaaatgatgcgagtgatttatcgaaattttgcaggggtacccgagatcccgcggcggccagcagctacaactatgaatttgtttccagtaagtgacaactctggacaagatgtttcagctcgaaacatggcagctcctcgaaactgggaatcaatgaatttgttccctcagcaagctggttttgctcctaagaatgatacccctaacatgatagattcaaggtgaggatttaatagtagattagttattagcgcac

SEQ ID NO: 81652 - DNA, 663 bp, Citrus sinensis
  Intron number 2 from transcript orange1.1g047515m (locus o range1.1g047515m.g) derived from phytozome v7.0 (chr-ID sc affold02882; pos 6070 to 6732)
gaatcaggagcgtttcaagctagaggccacaagtggtccatatatttattttcttaattgccgtaaattaaatagcttattatgccacaatctttatttcgttattattattatttcgatttgcattataaaccaatcaaacaagttctcagcctgtttgttgattttcaaatagaaaattggattgccgttaggttttaatgaccaaaaaaaaaagtactaatactataactcttcaactctcatgcaaccctaacgtgatcaggatttgaaccctaactcttgaaccacagtctttgttttacccattgttattgaataaaataagtaaggttattatcgaagtggataatattaattaaagatagtcgctggacaggtgtaataaatatcgctatagatggttgacacctgtattggttgacacctcctattagattcactataaaaggctaaggatgaagggccaagacggaggtaacaagaagcggtaagtgcaaacacaaggaacagcagcaacagcaaataacatagaagagcagcaacaacgaaaataaagaaaagatgaagcatagaagaagagcagcaacaacgaaaataaagaaaagatgaagcatagaagttaaaggcgccaagggggaattcaattcatagaagccaagg

SEQ ID NO: 81653 - DNA, 970 bp, Citrus sinensis
  Intron number 1 from transcript orange1.1g010051m (locus o range1.1g010051m.g) derived from phytozome v7.0 (chr-ID sc affold00078; pos 291586 to 292555)
tgctcgccaccggcggcgccgactacgacatcaaggtttccgcttttgcatttcagtttttttcttttcgttgtcaaattcgtcggtgcaattttgatctgaagtagattttgttgaatcatttgtatcaactcatgtcattatttagtgcttcattgataggttgtttgataagtcgatccaagccatttaaagtgattggcagctatctctgattgtgtttgatgagaatttaaaatatgggttaattttttttttgaattaattagagccatttactaagattagtagacagatattttctaatttcttttgttagaataatgcatatgatgttgtgtttggtatacggtgttctgttggtctgggcggaagagaaggagggaagagaaagctcaaaaaagatcaaaaagagatagaaaggaagaaaagggttgtcattgttaattatttggtaggagagaaggaaagaaaagactttctgtgttaatttttatatatttataatttataccaaaagttaagattaactgtagaaagggttattttcatcaaacagctttatgcttctcgtcactcttccaccatttagagaaagattcagttatgtgggttcagagagatgggaagcctaccacacagcgaaatgataaaaactattgtgccactgagatcaagttggaacaagtaaaatttaatttaatttttttttccccttgtagtttcttaactaaacattagggatgaaaacaatgaattaattctggggtgaaactaattagcgtatttggttctgttgaatttctgttatcattccaaattttcatctcatatctctggttttgcgtctcacattttatttatagcagtcagattttcttttgagttgtgaagtcttactcgggctggactaactctaaacgttaaactttcagatttggctaataaattcaggcgaaaaacagaagaa

SEQ ID NO: 81654 - DNA, 271 bp, Citrus sinensis
  Intron number 2 from transcript orange1.1g023105m (locus o range1.1g023105m.g) derived from phytozome v7.0 (chr-ID sc affold00140; pos 246641 to 246911)
tctacttgtacagccaataagtcatcctcggctttgttttattctagtgcaaagcatcaagaaagtttcaacttaactcatttggttttggactctggttctggttctggttctggttcccagagcaatactgatttgaggtagtttctggggactttttgcctttttcttttccaatcaggtcacatttaatcaaataaaatcttgttgatgagttctctctctctctctatgttttttgccccttgttgtcaacaaaatagaagcaggt

SEQ ID NO: 81655 - DNA, 978 bp, Citrus sinensis
  Intron number 1 from transcript orange1.1g036396m (locus o range1.1g036396m.g) derived from phytozome v7.0 (chr-ID sc affold00687; pos 3979 to 4956)
ataatcgaatcagtttcctccttagaactatcaaagtgaggagttcatggttgcaccgttaaatagcggcctaaaattgtccaaggaccaagagtcaaagcaaactcggcatcatcgtttgatttaaagcggacaacataaaaatcattctcaaggtcaatgatagagaaaccaaaggtcgagctccaagttgcttccaagcgattgcagagagctcaataccctatgtgacgtcacaatagcttgacaacaaccgtatgctgcgaaagcttgataagttggtcgtgaagcttttgggagaaagagatggagtgtaaattaccacatcgtgttcttaaaaaatcaattcatcatcatggccaatcaaatctgcttcaacttccctttgtgattccatgagtatatccttaaaagagatatgctcagggttgtctctatcctcacgttgaggcctaaattttgcttctttggtagatcgatcatcatttattggtgaactgaagatttttactacttgtatcatagtttttcaaaataaatgtactcatattatagcatcattttcttattatataatcaaaaatagaatccatttattcattatattaagttgtaaatatatctttctatatgtattcctaaattacagtagacttggattgcatagcttaattatagggatcctagcttaactataggaactggtggtcgtgtatagcaagtcagtcgtatgtatatatatactcaatcaaatgtcaataaaattaactctgcccattctacttttcgctcatatttacatgctatcagagcaaggactcgctgcactttaatctctcgtgtagcatctctctttcaaccatcataacccttgaggatattcctaaaaccagccattctgatccacaaaaatcagagatttttgcagattcctccaaggcagatctctccaatccttttgcactcaccatttggata

SEQ ID NO: 81656 - DNA, 387 bp, Citrus sinensis
  Intron number 1 from transcript orange1.1g014969m (locus o range1.1g014969m.g) derived from phytozome v7.0 (chr-ID sc affold00006; pos 1653170 to 1653556 reverse strand)
cttggcaagtgacgactcttctccaagctctcaaggtctatcggactcttactcatcttctttcttggttgttcatctgagtttctttttagagtattgtcttacagtttagtgccctggattctagcatatgaatgaatgaatatattggattttagttgtttcgcgacatcctgcctgttgattaaatgtcttcccttttatcttgttcttgtgggaaaagttataatgatacataaaccaagaggctacatttgaaattgttccaaatcttctctcataatgcaagatggttaagagtaattatgctatgtacatttatttgcttgcttcctcttgcttcagttttttgatgtttaagtttccaatattgaatcaaacatacag

SEQ ID NO: 81657 - DNA, 789 bp, Citrus sinensis
  Intron number 1 from transcript orange1.1g006461m (locus o range1.1g006461m.g) derived from phytozome v7.0 (chr-ID sc affold00019; pos 1276523 to 1277311 reverse strand)
taaggttttgcgttccgttcagatctcggaacccggtgagtaaattgatgttccattagattatattaaagttgttcaaactaagatgttaataagttcaattaaatttgttttattatttaagcgttttatttctttcttcttttaaccgtcgtgccgttactagtgatcgtggaagtttcttgaatgagtagcaataatgttttaatgctgaagaaaatgttgtaaaaagattctttgaatgttgaatagtgcataaaatctagatccaagccctcacatgagttttgttttatttatttattttttctctcttttgaaatttacttaattagtaaggaaccaatggatttattaattgtagcttctgataagtaaccatcttataccataataattttttgcataatactcatttgggagcctgcgttttttgtataaccattgttgagtacataggccatattatcagctattcagtgtttgtatcaagttttttttttttattcaatttgttttctttctatttcagattcttgactcctgatagcccctggctttttatcatggcgtggttaatgtagtatcagtgttaagtttgtttctttgcttccatttgtgggttgggattggtttctgagtagttcgattgatgattgtttggggattgttaaagtataaattagtatctggtttggagcttggcgtcttcttgggagggaaggaggaaactctcttccatagccttgttgccggccaagacatcagtttggttccttgttccgtttc

SEQ ID NO: 81658 - DNA, 598 bp, Citrus sinensis
  Intron number 3 from transcript orange1.1g032612m (locus o range1.1g032612m.g) derived from phytozome v7.0 (chr-ID sc affold11842; pos 496 to 1093)
tctgaggtaaaaatccattctctttccaccaagggtttcgtcccagttaaagacatcaagttggaggacatcaagtacaagtaagaactaacaatctgttatcaaaatttgttgattaaatagaatcaaagagcctcgtagtttgcattgacaattgacatggaagtcatcatagaggaagaaaccccatattcgatatgtgaatgtcttaaatgctttcacttcacaagcagtcttctttttcatttagcaagatattgacttctttcaatatttttaaaagataaatttattttttcaaccaagttcagacagaccattgttcaaaaccttttttgtttccaaggaaaacacgccgcacaattagctgaatttcttttgcctcttttttcagtattgaaaggaaaatgatgggaaaccttatgatttttgtataagaatcatccaacatcacattcctcttatcatttatgctttttcacatatgcagcattgatggaattatttatttttttaagatctgtgtaagcctgtgatcatagctgataactatattaaatcagggtaaatcacgtgagaaacaaaggaagaagaattt

SEQ ID NO: 81659 - DNA, 850 bp, Citrus sinensis
  Intron number 1 from transcript orange1.1g041208m (locus o range1.1g041208m.g) derived from phytozome v7.0 (chr-ID sc affold00013; pos 2094963 to 2095812 reverse strand)
tgattatcggaaatattgatacaggtaggttttgcattctcttaacattctagatacattctaatcaaatcctaccgaaaaatttttcatgtgtgaatccgttagatgtgtgcatattttatatggctatcagcttttgacgtcctccatttgttattattatattattttattttactttatttttgtttgctatatattaatggagggtgtttggcctgaatcaaaaagctttagcgatgaacggatgggtcaggtgccaccaaaatggcaaggaatttgtcaaaatgacacccattttggagttaaatgcaataggaactttgctggatcttacttgctgccatctttgttttccatttttcttttcattttgggaaatgggcagcacacataatctgctgatatgattgaccggtatgttaggttatttgaaataattgataatttgcgaaataagttggggtaatttctgcatcattaagttctctgccacttcagaacacttatatatgattttgcataattaattctgatagctagatcagacatattgtcctttgaaaaaaccccattaggctgatttaatggcaatggattagattgtttcaagaattcatgaaaaaagtctggattcatttttttcttttttttacagaaatgctaactaattatctttatcttggactagacgattagcactcatggtttccttcctgagtgctttgtataaacaggaagctgataggaatgaggttcttcagccaaggtctacttttacttgctcgaaagcaagattccaacttcactctcacccctgacttatccactggcccagactttcacggcc

SEQ ID NO: 81660 - DNA, 791 bp, Citrus sinensis
  Intron number 1 from transcript orange1.1g039868m (locus o range1.1g039868m.g) derived from phytozome v7.0 (chr-ID sc affold00396; pos 42041 to 42831)
attcccaagtaaatatatatcctttacatacgagtcattctccaaatggaacgcttttcataaaatatagatttaatattataaaacatttcataactatgatacaatgttaaactacaagccacactatagagagctattagtcattctctaatacggatgcccacacttaatgtatcatatgatgtaaaaatgaatccatattttaaaaaaatatgggtacctcatagttatatatacttttttctgatgtatccaatcaccatattctatctcgctagacattaaatgtgtttcctaagatttgaactgtgatcctttgtttttattatgcaagtcaaatcaactgaactatcatttggagatgattcaatccccagtgccacatagatatatgagagcttttggtaattgaaaaaccacaaaatccaaccatgcaaacttgacctaaaatagaaactgacaagctctgattagaaatagtaaatatattatgtatgagagatataaaacgcacgatatagaatgaaacatgagacacggataagtgaaacaagaattaaaatgacaacatcgaattaatactcactttcgaaagaagagaaaaagaaaaaatcagtaatcaatagaagaactagagtctagagattaattacagctagtttgcctttctcatcaatttaaaatatcaaagctctttagtttctgttcttcttaattttttttttccttgtgttagtattttacggtaacttctgtgatttaattcatttctaggcttttattaaagc

SEQ ID NO: 81661 - DNA, 768 bp, Citrus sinensis
  Intron number 1 from transcript orange1.1g030552m (locus o range1.1g030552m.g) derived from phytozome v7.0 (chr-ID sc affold00068; pos 476185 to 476952)
gttatattgtcatcaaaaatcgtccttgcaaggtcttttctctttttaaataaaaattctctttttttttcttctgatttttttggggtgtcaagttttggtttttcttttgtttgtaatgaatttgaatctgggtattcgttggtcagatctttgatgggttgttttttggtttgatcacaattgaatgtatatgtatgtcaatggggttttattttattcattttatatgctatttagtgaatttattggcgcttgtgaaattttgagtagtgaattttattggcgcttgcgaaatattgagtttcaattgtggatgttgatggaatcctcatatttgctttgtcggttagattttggagttttttttttttaattcagtttgattttggagattagattttataaaacatgtagattacgattgtagtttggtagcttatatgggtgaatttgaagcttaatggtgacacgtagtgtttttaaatcacaaatgttcatgatctgattgtagtatacgagggtgcttgagggaaacgtgtcaaaagaaatgcggtaaaatgaccttgtatctttgagagaagggttgctatgcaatcattttattagtacagtatagtaattgtctaacatataaaaggagattttatgtaaaattgttcctctttgccttttgcctgactgtgttggattatatcgtctctaatagtacagttttacaattccctgacagccacaagtattcaagtttccatctttttcccttca

SEQ ID NO: 81662 - DNA, 698 bp, Citrus sinensis; identical to SEQ ID NO: 80573
  Intron number 2 from transcript orange1.1g014692m (locus o range1.1g013795m.g) derived from phytozome v7.0 (chr-ID sc affold00009; pos 1548800 to 1549497)

SEQ ID NO: 81663 - DNA, 1039 bp, Citrus sinensis
  Intron number 3 from transcript orange1.1g010963m (locus o range1.1g010963m.g) derived from phytozome v7.0 (chr-ID sc affold00068; pos 348810 to 349848 reverse strand)
agaggactaagtattgtctcacttcaaaggtactaaattgagatggtaaaattaaatattgatagtcatttccttgtgcggttgtctgcatttagtttttataaacatgacttaacaaaaacatttacattacaagaaacggttaagataccgaatctacatctatgtcgaatgtgagataaagggatctatagtggcatatttacgactgtataataaattgtgaacttgttataagagttgacgtttcaatattacagcttattttcatcgcaaactgatttcctattaacaatactcatgtattggattcatgtatggttcatcgaagtcggttgagtaaaaatataaaattatgaagtacaacttgatttgatgattcaaccccataaacaactctagctaaagttcattcatttgtttgatattgtgatatgttaaagataagagatgggttactaaatgccgaaacttttgaaaccgtttttgtttccaaaatttttattcttcctcattctccattagtttgtcttgattctctcaactgttgctataaatttttttcagtttcctttcttttgtcattttatggccatttctacaggcttagcattaatattatcatcgactcttcctgcttttcacttctcaatatgtccgccaaattgcttcaatttattgtagatttatatatctacgaaagttattgtgatcatgtgatatcccagaagagagatgtaaaagaaattaaaattttaacatataaatataagaacattcatcatatgaaagtggccatgtatattcagagtcatgtgtatccagtgctctttcaatgatcttgagtgttcagaagtagaatatgaaaagcttaggttaatcttttatatgaatccagacttgatctctaatctgagagaaagaaaaaagggaagatcctgacttaaatcaacaacaagagatttatggtggtttctgataactgagacattcaaaaactgcagattccacttggtgtggttttggccattccaccgtt

SEQ ID NO: 81664 - DNA, 937 bp, Citrus sinensis
  Intron number 1 from transcript orange1.1g036232m (locus o range1.1g036232m.g) derived from phytozome v7.0 (chr-ID sc affold00018; pos 64007 to 64943)
gggggaaatacaaaagacaagagtgagattgagaagtgagtcggttatgggtaaataacgatttttgttttaacacccttcagtatcctgatgaaagcacttttcctcttaaattacatttaaaaataaattaagtctaattgtacaatcttttcttctctattcatataattacttctaagatttgaattgccaataattaataagtcttcatatgttataataatttaatttgcaaggaggaaggaaaatagaatattataagtttgtgcaactcaattaaattgactgttgatttaaaaaaaaaattgcattgttgatgactgtagaatttacagaaaaataaaactatagaatttgaataggaaaatatagatagtttaattaaactttaaatataattacattagtagatcagtcttatcaaaatattaaagggtgctaaaagcaacacatgttgtcaattatttcaagacacttttttattttcgagaatgaaaacccgtttctgaaaacaaaaccgaacagacactacacgaggggtgtaaaacagcacgtgcgaaagcttatagcacgtgactagggttttgttgacgcttcccgttttatcccttggtggttaagtttgcccgctctccctccctcggctgccttcttcgtaactccccgttgcaggttcactctttcttccgctcgctcgtgagccgtggcctttgaaaaactatttcattctcattgcatttaatatcctttttattgtattttatattttacagcaacggcagattctaattaagtagcagcgaccataaggtgctcattcctttttgcactgcatttttatttttatatttaccattttatttgtgactatgcgtgacaaatgtaatttgaattagcagtagtaaactatcgagtgaggtgctgagagaggcgg

SEQ ID NO: 81665 - DNA, 355 bp, Citrus sinensis
  Intron number 2 from transcript orange1.1g045488m (locus o range1.1g045488m.g) derived from phytozome v7.0 (chr-ID sc affold00096; pos 148826 to 149180)
caaaatcatcaatagcactatcaagatgtgagtgaaataaacccttgtgtgagaatggttttagctctcatttgtaaattcattttgatttaatttcggatcaccccctcatcaattaactatattcaaatcacccctttacttataaaaatttcagtttatccccatttttgttaagaagacaaaaaaaaattatcatcaatccccagcatgtttcccttatcttttgaaaaaaaaaatgagagtaacttaggattttcgaaaagtaatggaagtaatttgaaaatagtcaatttaagaggggtgatctaaaattacccattctttttttttttttttctgtatctgagcaggt

SEQ ID NO: 81666 - DNA, 560 bp, Citrus sinensis
  Intron number 1 from transcript orange1.1g019807m (locus o range1.1g019846m.g) derived from phytozome v7.0 (chr-ID sc affold00040; pos 843143 to 843702)
gtattcttgccgtctctcgattactttcaggcaaagtctctctctttaacgcattcggttttttttttttttttgggggggtccttgagtcttatgttgtgattgtttgaataagtggttcaaaattatgattgttttccacttaaaaagtatgatattgaagaggttttttctttgatttttcgtttgtatgccttttggatcatgttattgttagttttgtgtcttgctgtggtggcattagggtttctggtgtagggtttgggagcttaacgagaataattaattgtgaattgtggtattattgtagacgtttgtttgtttctggtaaatgtttatgtttcttttagtaaggatcacgtagatgtgggcttgtttcttttggtatgtttctcatgagtaggcatgtcagattttaccgtttctggctattgtgtttctattgatccatgttatgctgatttttagtagatttatacatttttgtgaatgatcttcatggtgtgctgatcctagttttgtggggttttgttagtttctagggttttagctttggccag

SEQ ID NO: 81667 - DNA, 655 bp, Citrus sinensis
  Intron number 2 from transcript orange1.1g030576m (locus o range1.1g030576m.g) derived from phytozome v7.0 (chr-ID sc affold00097; pos 87645 to 88299 reverse strand)
atatttgtctactccccgcttttggtggtaccgtaaagttaatccctaaatcatattagtgaatatttattttttgttatttgcatgcattggatatttagttcacttatatgatggattttatgtgcttaatttatgttcatatttaatctaacttcatattttgtgctgattgttgggttgtagtgtctttgatcatatgatcatgtttcagtggatcgttcttgttgttttgcattccatgttatagaatgacgttaaactgatgatcataagttgaggattagtagccttgtggaaatgttttgcctttatttttgttggaccaattataatcttccccttaggtgttaggtgattgtctgtgtcaaatcctccagcagtttgccgaagttttttttttcactatgtaagtcgtataatcatattcattatcttctatgaggtgggggttcattctttatgttaccttttacttgttcttttggtcttttagttgcaacctaagtctgccagttgttttagaagatattcttgagtggaggttaaagttagaggaagttcagattaaatggacttcatggaagatttcatctcttacatgatatatctgaggcatctaataattttgaattgcatgttgattatatgcagg

SEQ ID NO: 81668 - DNA, 648 bp, Citrus sinensis
  Intron number 2 from transcript orange1.1g014689m (locus o range1.1g014689m.g) derived from phytozome v7.0 (chr-ID sc affold00042; pos 37555 to 38202)
ccctctcattaaccaggtttgtttcttttgcgtgtagatgatgtttcactcacatatacttcaattatgttctcatatatgttacttatttattaatcatcttatgaacaatagttataatgtgtatcagatgtctgctaaacttcaagtttatgctatcgtaaaaagtaaaacacataagggcttataatacttgttttacctagtgtgtgcttgagagtggatgtagtcgcaacaatagaaaatttaacaagttgagaaaatttggtatgggagctgagaaatatattttgtacaagacctgcaatattgttctctgtggagccagagcttctcaaatttacttgtattaaaagaagcacagtttctattcttgtctttgtagcggtgattatgaaatctctattcacgtttagacatcagagttaatcaatgtacatattacaggggtgaaatgatgtgtccttgtaatggcacttattttgctaacattagacatgcttagttttgatcttctacctttcagctttgaaatatttgacatctggtcttgtaccttgtcttcaaagcgttttaactccctttttaaccctttttactattttgggcttattatccaggatacagtattttgcaagtccattttga

SEQ ID NO: 81669 - DNA, 999 bp, Citrus sinensis
  Intron number 1 from transcript orange1.1g040693m (locus o range1.1g040693m.g) derived from phytozome v7.0 (chr-ID sc affold00015; pos 955361 to 956359 reverse strand)
tccggaacttattacaaagggttagttttgccattttcgcttactcttaatttttgtcctttaattttcagcatagagatacctcattaacaattagaagcttcagcttaactatgaaagcccagaaactgaactaacttttacttagtgatttgattccgcagttgcagttagaagtcattgcatgcatacagctactcaacctatactctattctagaaaagcaaactttctttgtgaaaatattcaggaaaattttctgtctcaagttaagtggttcatttgtctaagagtagtgctaggtgtagagaagcacgagagaaagacgagagaatgttattctctctctctacccactcactctctctctactattttcttctttatttccctctgtctttctctcgtgcttctcttcaccgagcattttgctttgtctaaaagattgttaaccttttaagaagttcataacttctacttttaagtaaaatcatgtggctcacagatagcacacccaagaaattttgttatatttaacttgtgccaattacataatgtcagtctttgtttgtctcaagatttattagctaaattctttttattaatagaaattgtcaggcctgtggacaacttgacttttaatatgtaatatttatatgattattagatctggacattatcggtcttcaaattgtgttttgtcttacatgttgtcttgccaatgcaaagataacttcaactatacagaattgttcctgatttccatgtccagctgtatccaaaatacaaaattaatgtttaaagatacgaattttagatatattttaatattaaattatagctagttcccaccacatagtccaaatctacattttaaaatgtgtagacattcacgtgaatgtacaaattattgattcaagacaaaaatagaaattcaatgaagtacaagattttggttttaattatttcgcatttactggctttgcctcagggcttact

SEQ ID NO: 81670 - DNA, 395 bp, Citrus sinensis
  Intron number 2 from transcript orange1.1g023494m (locus o range1.1g023503m.g) derived from phytozome v7.0 (chr-ID sc affold00111; pos 150621 to 151015 reverse strand)
ttctctctgctaatttcgcgaagttaggcgagcaggttaacttttgccttttgatcactgccaccataattctaattcataatttaatgtgatgatgctgcacaactaattgtctcagatattatcatgccttatggccgaaagggttaacatgttaattttgaacttccagtacaggccatgatccttattattgcacaagttattgacattttattattttcatctcagtttatggcaacttctttagttggtcaatcaattctgggtttacaaaaataagcagtttttgattgatctcttttgcatattgctgtcaacttttattgcttttagaatttgactttcatcttctcttaggtaaaagcagtggaattggctggttgtgattggat

SEQ ID NO: 81671 - DNA, 806 bp, Citrus sinensis
  Intron number 1 from transcript orange1.1g017642m (locus o range1.1g014007m.g) derived from phytozome v7.0 (chr-ID sc affold00001; pos 5362157 to 5362962 reverse strand)
gtaccttgctgcaagaggtatgcgtttcgtcttgtgacataatttttgttatctttgggttattgctgactgttttgaagttttgttatgtgcgctaataagaattagtgctctcaagtctactggttcttggtgttttgctttcttttagtgtttggtttttcattctctgaaatgagttatcgatgcttttgtggtaagctcgaagccctgccaagcagaatgaaccattgtagaaaaagtgaggccttcattgttatgcatttgcggcatgaaaatcttgagatggtgatcggccttactttatatctgttgagctgctctagatactggctttttgaatattcttttttgtttttaatttcagcatgtcctaacaataatgaaatgcacagtagcatagttaaagatctggaaactgcgaaatgtcgttgcttaaacacgatttcaaccttttattttgtttctatcatgctttttattgcttgctgattccaatgctgtatgctattgcagatttgttcttttcaggcctgttcttggcttgttgtgtctttgctctttgcctgtaactgattttaagttgaaccattaatcgttgccttcctatttgtgcccgcaaaatataaagtatcacatcttctttggtttcatcatgtccctttggacactgagacttttcattatgaattcgttcaatgtatatctttatgttttcttatggtacaaaattttccagaaaggttggtactaaacaaataccaaatataggtgagaaggggtgctgatagagcagagatctacag

SEQ ID NO: 81672 - DNA, 500 bp, Citrus sinensis
  Intron number 2 from transcript orange1.1g031938m (locus o range1.1g027393m.g) derived from phytozome v7.0 (chr-ID sc affold00204; pos 60316 to 60815 reverse strand)
gttagcatttatacgaaagctcgaagactcgtacggtaattgattgatctttcgtattcgataaactctaaaataagtgagctaaacgaatcagtggagtccaatcaattctttctgttctgccgttaaagtttacattttgctaatattatttgtttttcttggaatatttctatcaggcatctgtaaatccagaattgtagattttgtactcgaataaagtcatcaatatagtgttattgtattgctgctttgtcgatattaatttgaattgttagcttttttgcttctctaaaatgtggacggtactaaaagaccaaaaacattcatacttcaatacattttttttttttcagtgcattgaagtttgtggtttttagtcttttagctctgtttggatgttgaaaagatgcagacatttgctcatatatgctcttctttcatattagatggattacttaagaaacatgtccattacaggcaccgattttccatcattt

SEQ ID NO: 81673 - DNA, 724 bp, Citrus sinensis
  Intron number 2 from transcript orange1.1g024974m (locus o range1.1g024974m.g) derived from phytozome v7.0 (chr-ID sc affold00015; pos 1401565 to 1402288)
aggtttctaattttggttttgtgtttgatttcactgtttacgcttctggaattttagaccagttttgtttacaattatgtgcctacaatgagttttgtagcattattccaagctaatattttggaattgttggtaattgatatgattatctgggcttaattatgagacttgatctccttgttttcttgtcatttggatggaatttagtaatgattctcttctaagaatgggagtccatctgactaaaagaatcgcttgctttagaatttgtcaataaacgatatagtagtactggcaatggtgattgtgaatcgtcatgattgaaagatcgcataatcatacctaaccatgtagttctagtcgaaagagagtgagattgattcttctagctttatctgttgagaatatattaatgccaagttaagctatcagaggatctcttcatggtgtatgatacctagatatacttgcttgattttaaggcctttacatagatccgtcgcatagcctgaacaaaaatttgccaaaagatcttctttgcatttagacctgtctagtcttttcaaaaacagaagttatatatcacccccaaatgatcgttggtagaagtcagaatatagccatcagcttaaatgctttttaagcttgcgcattctttttatatgtaagagaaggttccctaaatctgagatatgtaatttggatgtataatataatttgcagg

SEQ ID NO: 81674 - DNA, 612 bp, Citrus sinensis
  Intron number 4 from transcript orange1.1g021621m (locus o range1.1g021621m.g) derived from phytozome v7.0 (chr-ID sc affold00030; pos 396654 to 397265)
tgctggaattgattggaatttcaacagttggggaggtaagctttagacagtccaaacttcatggctattaagaattatatagtctttgaaattgacatttcacttcctttctctaatggggataccaatggataatcatacaaggccatacttgtgcaacaacagaagctaatatttacaaatctattttgagtttggaccttttcttatctctcatatccttttacgaagatcattggagtcagtttttcgtgtttccaaattatgataatatatccccaaaactgtccaagtgtggtttaataaagggtatgaatctgcaactagataccagctggtgtgtcttgttcatatgtgttgcttatatcatcatccttaaataagactgtttgcatatcagtacatcagagtaacctggatgaatattcttgcctgtagctttatcaatgttggaagaacaaacacccaatcccactggtatcacatttataaagaaatatttcctggactacttacagttgcagtgattataatctatgtttgattggattacagttctgttcactgagtgccttctttaaaaggcattattcttggaactttcaggggttg

SEQ ID NO: 81675 - DNA, 1015 bp, Citrus sinensis
  Intron number 1 from transcript orange1.1g029292m (locus o range1.1g023046m.g) derived from phytozome v7.0 (chr-ID sc affold00001; pos 280835 to 281849 reverse strand)
ctctggttagttttttgtttcactttagtcagctgattttctgtgtttgtctgtttgaaaaatgttggcgtttccttttgcgggttaatttttgatgtgggatcttgcattatttaggatgcaaagctgtaacttttcagctaattttcttgataagttttgttgttttcgttttctcgaggtagctgaatgtagttatttgttggcgctggaagagtttcgcttctgaactttgttttcattaccgaagtgaggttgatacaggtttatgggatctgcatttattgaactttgttattttagtaattggtgattcttttttttccttttttctctcttgtgttatattagcaagaagatatttgtactgaaatttgttttctgaacattgctgttttctgtctttattatgcttgagaaagcatttgatatttgaattcattagtatgctgatgggacagaaaagtcttataataaggttttttttttgggtatagtatttataagctccttgattttgttttcaaggtatatttcataaatgagttattatgttatttatagctaatgttgagataaaggttttttgaccacttaatttgtgatgcatataccatgttagtgtatagctatgttttcttgtgggggcaaaggtgatattttgatgctattgattattgatttggcaaaagatgacatttttattacttccatatgtaaaacatggtgtggtatcagctaattatgatatttttggtcatttaaggaatgaaaatgtttaatattttcttggtttcgaagtagagtaccctggattttaagctgtttattcatggtacgaatgataagttaatatctttgaaattgactgtcatgtgggacacattcaaaaacataattctgttatttgtaactgactcaattgcaaagtttgcttctccttacttatctgttgattatgaacatgtgtttgcattaactgcagaggaatctgaaacagacagtgaagaatctg

SEQ ID NO: 81676 - DNA, 925 bp, Citrus sinensis
  Intron number 1 from transcript orange1.1g014209m (locus o range1.1g009109m.g) derived from phytozome v7.0 (chr-ID sc affold00166; pos 266767 to 267691)
agaaacccctccgttcgagcttttcaagatttcaggtacatgatatataactacttattcttcttcactcacgagctaattttacttagtgaagttctttcttttgggggtaaaaaagaaaaaggatttcatgcactggaaagagcagaagactttgatccttatttatattttttttttcctacaataaaataattgtcttttattttcagaaaattcccatttatatataattgtctaaagttaagtcaattggataataatatgaacattagcatgttgatgagctgtaggattaaagatagggaacctggtctgctttaccaaaccaatagcatgttgtgttaacctccaattttatttcatttatttataaaatttagacgtccataattatatattttaaacaatttaaggccgtttcaattttaagcttggtagaaaatcggtataggaggcggcgaaatccatgtacaataggaggcacaagggtaaaataaattgaaaatttttgtttttagcccgtttttattttgtattggattaagatttttttaatattttatttatcattctcgtttcgactatttttttttaagtttaataacagaatttgagtttatttgtggattttaaaattgtaaactataggtatttcatctgtaatatttaagtttttatttgcttggatgtacttttgcagtgaattttacattatactcttaagaaagttatctttttctcatgaattcgaaacataaactgacttattatcagttcaactttgtcaagcaaagcgtttgaaaataattcatcttgtaatattacaaaggatcaaatgattttattcctctgatatatattttcttcttgtaatattaatgtaacagcacaggtgcagcttgcttgaacaaatcttttatat

SEQ ID NO: 81677 - DNA, 654 bp, Citrus sinensis
  Intron number 1 from transcript orange1.1g015339m (locus o range1.1g015339m.g) derived from phytozome v7.0 (chr-ID sc affold00001; pos 5830781 to 5831434 reverse strand)
gataagaatttgttagccattcgctctacagcatccactatttgcttttgttttttattttctaataatatttcactttcacgttttttaaattatgaagctaaaatcttttcttcttttaaaaaaacaaaaaaacatctgaacaccagtttactaacatggcataaaattgagaaaccagtttgtcttttaagcggttgagtaactccgactcggtatccgtccaccgctcctctctcctctgctttctatttcttgtgttcttgtttctctgttttctgccatctggggaatattttagtttcttttttgactggtatgtctcaaattgtgtatcttaattgcatatattctttttccatattttgtcaatttattgtgtttcaaatcatgggtataaattgttttcctgttttctgtatcacaaaagtttgagtcctatttctgtttcttgttcttctttttctgcaacctccatcaattcaatatctttgcactcacgttagcgttagtttttattatcttccccatgtttttgctctatcaattattttctgtagtgttaaatttcgtttgatttatcatgcttactctctatgtctgctgatcaaatttgcagagataagaggacgggacaaagaaacagaatttaga

SEQ ID NO: 81678 - DNA, 1023 bp, Citrus sinensis
  Intron number 1 from transcript orange1.1g019844m (locus o range1.1g014595m.g) derived from phytozome v7.0 (chr-ID sc affold01482; pos 2142 to 3164)
gaatttgcttccacttctcgttcaagcgcttccaggtgaggcttctaaaaacgatccgtttcaatatctgaatttccgataataaatttttggtttgaagtgatttcatagcttagaatttgtttatttatttattttttttctggttattttttttcatatttatacgggtgaaaaagttggagtggtttagttctagatctgatcataattgtttattctaattattccttttgattattttttaaaatttttttacagctttattatgctaggaaaagaaaaagaaaaggaagcttttaggaacttttttatttattaatctaatttttggtaattgtaaatcgctaattttaggaaatggaatctaaataaaatagtttggagttggctaacaagtaattaatatatatttttttaattttggttattgtgtaaatatttggaataatgatactgcacatataaattatcctgtacatcttttctttgaactaatttttttatttcacctttaaatatttttttgtggcaacaaagagtttgaaccagtagtatgattgaaatatttaatgcaatctactggaatttatgtttttccggttaaaatttattgcaatatgtgagtactgccacttcatttatggaaaattactatttttgggattttacgtaaatttttagttctagttctcaatcttggaacaaacatatatgaatttgcacttatgtatgcatcagaactttggttcaacctttgatggtatgtttgggattgcgttttaatccaaaaggaactaccagttctcaagtattaaagtgtaccaatggtggtaaatactatctaaccaataaaagtgggtgattagctaacattttagttgctgtgctttcaaagttagacggaagcatagaagttctaaatgtcccatgagtgttggaaacacaaaatatgtttctgatgtatgaattttgttattcatattaggaagataggtgtttgggtggtacagaaggcacgac

SEQ ID NO: 81679 - DNA, 765 bp, Citrus sinensis
  Intron number 1 from transcript orange1.1g015086m (locus o range1.1g008916m.g) derived from phytozome v7.0 (chr-ID sc affold00001; pos 2490883 to 2491647)
taagaggcgaagagaagatatcaagaaggacaacggtcagttttttttttaatttcttgaaatttttttccaattttcctgtatggttactgtttgtttggctagatatttgtggataaagatagaaaggagggtggttttggccaattgaaagtttgcatctttgttttgcagctgtgagaaacctgaggaaagtgaatattgagatttgagatttgagctgtaatttgtttatcaaaatttgattttgttgtgcctgaaaaatgaggaggacgtaatgcagtctaaattttgagttttgttgtttggtctcgtaaaagctggtataattcatggaagcatataacccccagtgtccaatcaatgtcattttgaatgaagaattctagttgaagctttgatttgattttcttttgttctaaaatattgttggggcgggggatttgtgctgttcatcatataaagctgagttaatgtagcaaatactttgtggatgattggctgcaaaaaatgagttctcatatgttatattagcctattttctgttgtgggaaaaagatttaatctgcctacgagtctttttagggcttggaaaatgtgtaagaataaagattgtattacttttttattagtgaatgtttgagcctattcataagcatgggggcctttccttgcttccctggcatatgatatggtttgatgttgattggcatttacaactaattttcaggtttggatctctctgcttgccctgaggagcagatt

SEQ ID NO: 81680 - DNA, 429 bp, Citrus sinensis
  Intron number 1 from transcript orange1.1g001563m (locus o range1.1g001397m.g) derived from phytozome v7.0 (chr-ID sc affold00292; pos 69179 to 69607 reverse strand)
gattaagcatcgttctctagatctcagattcatcggtactctcttctcaactctatatcgcttgatcatacctgtgctaatattatcttgtagaatacgattttattttttgtttttgttttatttcatttgattgatgaagcgaccgatttcaagttaattaaagtatgatcaatgtctgtttgttttcatttctatgaattttctgcacaaattcactatttacgatgttggtaaacataacacatgcaggaaatctacattgcgttgaatttgtatttcgaaattttggaataaaattcatctttgattctgatattttttttcctgtttttaatctgcgagcaagttattctttgcaggagtcctcgtacaattcttagttaggtttctaaggtatttgcaacttattttcaggattaggtttcg

SEQ ID NO: 81681 - DNA, 720 bp, Citrus sinensis
  Intron number 2 from transcript orange1.1g011422m (locus o range1.1g011424m.g) derived from phytozome v7.0 (chr-ID sc affold00292; pos 6863 to 7582 reverse strand)
gattattgtgctttgcactggtaaattctcgctttttgctttaaagggctgttttctttttctttttttcccctgtttatcttgcaaatttatcaagttttaatgatttttttggtcaaacaggggatcggtgatttttattttctgcattacatgtttcttggagtgtagtgcttttggcattattattgtggttagtttagaggttgtgagtgaattgggctcattgaaggagattaattgagtaataaagcgaattaaaacgatttccttcgagtttgagttcgcatttctacctcaatttgatagtttctacccattaggttcttataaaacttaacggaggtagttggtattactcctctgggtttggcataacaaaagctaagcagaaaggtggtggttcctagtcaccgtgatgacaattttttagcttgctaagttaattgagtgattgttgtgtacactgcataaagtgttggaaacaagttctgttgttgatttaatgtagtgtctctttttgtttatggttgttacttcatcattgcaagagctcaatgccctgttgcagcacttggttggtttgctgcatcacttgtttgagtagctgttaaacttttcttacattgtgcgattaatcttgtatatagtatcccttatgcccttcttctattcaatttttcagcgctgccgatatcgtcactcttcccgttcctttac

SEQ ID NO: 81682 - DNA, 634 bp, Citrus sinensis
  Intron number 1 from transcript orange1.1g019591m (locus o range1.1g019591m.g) derived from phytozome v7.0 (chr-ID sc affold00021; pos 704425 to 705058 reverse strand)
tgaagcctcccaaaaaatcgctagacttgccaaatgtaagccctttctctctctcttttttttttaattagttattttatttttcacaatggaatttttaaattttaaaagtttaatttttttattttgaatattaatgcatagatttaggcaatgcttggtatctgagaaggaaattgattatcgaactaggagtaaattagagaagctcattttgagaaagcacccgttgaatcaaccagctgaagcatcttgtgctcatctaatgaattggcttcttgtttagttgttacttaattgtattataaatattgattggtagaatgaatacaagattattaggcataaagaaaataaaagttcgcgttcactctttaatagtgtgctgtttgttaacattctaatggcaaggacacaatggattattaaatgcttgtaagtgatccgaatggttaaaaaaagtttcttctagggagcatgtatcaaaattttaatttaaaagaagcttctttgatctcaaactttgcttcttcttttttttaagtttcgatcaaacactggaaatgtaatttctttttagtgatgctatgttgaccttaggttttgatttaatgtagtggcaaaaaggtcatcg

SEQ ID NO: 81683 - DNA, 729 bp, Citrus sinensis
  Intron number 1 from transcript orange1.1g024705m (locus o range1.1g016151m.g) derived from phytozome v7.0 (chr-ID sc affold00921; pos 50219 to 50947 reverse strand)
gtcgtttcttctctctctttccttctttctctcaggtctgtctctttcttaatctcttttcgtttttttgttcttgtgttagttcttacaccagctgattttcatttttaatttacttaccttatgcgtatgtagatatgtatgtgtgccagtgtatgtgcacatgtatgcttatgtaaactccagctagtgcttctgtctcgatgcctttaatgatgctgtgagcagtgggctggagatttttgtggtattattaggattaaaagaattttaaggtcgattcactgttattaggatttgtcggtaattatcgtgtgaaatgcaactaatgtggatgagcacatggtttgacaagaagatagttttgtagtcatatgaaggggcatttaacaaaatttgacaaaaatatgagtgacgtgtctgatgaatttctggttggtttcttgcaaatttcgaagctgcatggatatacttgtatttaagtctaaacacagagggaggtcaatgatattggccgtaattagtttaagttgcaatgtaggacatgcctttactgctttgagttttggcttcatgaagcttttgaaagaacctgaaagaatcttaacttccttcctcatttttctctgcaaataatgatctttaaataacgttgtaccttgaaatgtgacatgtgacggatttctatataccttatttgacttgtggtcattgctgctttctttcaga

SEQ ID NO: 81684 - DNA, 797 bp, Citrus sinensis
  Intron number 1 from transcript orange1.1g011763m (locus o range1.1g005119m.g) derived from phytozome v7.0 (chr-ID sc affold00111; pos 9815 to 10611)
cttttgagaaactagaaaaggttgctctttttttttttggcttatattaaaaaattactcatttaatgtttagtttattgacattgtaattctttgtagcgaaaaaacaaaatattaatgtatttattatttttgttgcttttgttgggtaaatgatatttttgagaacaaatgtgaaaagtaatttttttcttttttggttgggggggggggggggggggagttttcaagttcttacaatttttagtactgagaaaatttgattcacagttgcttcagtgtgcaatgtgatagctgtactgatttgtataaagagtaaaggagctaaaaaaaaaaaaattgtttgcttttgctccaattttaagaaaattgctggttgttgaagggacaatgtactgtttatcttcttgtctaattttttctgtttgattggtagccttcgtctcattcgatcagctgctctgtttgtttcattcagaaaaagacttgaaacaacttatttgctttgttttttctgctgtaaaacttcaccgtctttgcttggaattaaaataattcaggaatgcactgtgagctgatagattctaaatcttttactaaccagtctcaagtttcgtggaatggtgctttttgatttgatttattcattatggtttgctttctgattttagttatcaattcagtggatgttatgaaatttaacattgctcttgcaacgttaacaagacgacagatggtattgattttgaattgctttaacagattggacaaggtacatatagtagtgtgtttcgagc

SEQ ID NO: 81685 - DNA, 1001 bp, Citrus sinensis
  Intron number 1 from transcript orange1.1g026067m (locus o range1.1g026067m.g) derived from phytozome v7.0 (chr-ID sc affold00105; pos 18481 to 19481)
gaccagtaaaaatctaaccctcttctcaattcaagaaactgaagggaaaaaatttgtaatttttttttttgtgggtttttgttcttaggaagtaaagataaatcaaaacccttgttttgttttgtatgatttcattattgcttggaaaaggtaatgaattgagaatttttgaactactttattttgaacccattattaagcaaacgatagttgctcaatatcactaaattttgagcagtttcatggttaggctttaggctgatgagcaatttgatcacccgattagagcagatattgtaggtaaaaatatggacctttgagtactgtatgtgggttattatgtttaagggtgtgttttttactattgtgtttctgtctgcttaactttaaaagcacaccaacggaagtgtttggtttggtaagcttcctgttaggatcagacaacggctaagtatgggatttgttggtgttttattaactccaaggcatccgccccttacatgtcggtttttatgggtgagttctactttgtgggcgcacaatacaaccacttttatgtgatagctaatctgtataatctacctgcaaacttatactgggaaactagtgatttcaagtgttacaattagtaggactcaaaaacttacaatataaccattataagtggtatgtttcaatcattgcataacccaaaacacgccgtaaacttgtccatccaaaaactacttttgaaaaacttcacccaaatgtgtctttgaaaacaaagaatttcatcctagtttcttttatttgtttctagtactgagcatcgtttgaagtttcactttactaattttgataatgttaagactgtatgataatgtggcatatgaaatactgttccaagattgtgctaaactatgaaattgacaatgtgttacttgcccctcaattattaatttaagtatgtttgaattttcttttcttattctttacgttacgtaggacatttggaacaatac

SEQ ID NO: 81686 - DNA, 509 bp, Citrus sinensis
  Intron number 1 from transcript orange1.1g036882m (locus o range1.1g036882m.g) derived from phytozome v7.0 (chr-ID sc affold00178; pos 253574 to 254082)
ctggggaattttctagttgtgtcccatattgtctagtaaaggggaattactttggtttatgagtaggatgggtcactccatccattaggctagtcgtttgggttagatacctaaaaatcctaggcaaatctccccttaacattagtagaagtaaaatttaaaaacttctgttggcaagaggaaatttgttaatccagatggtggatttcttcatttttattttctaaatttttttaagaaatgttgcttaacagttaccacttttatttttgtttcactttttctataagaagctgcttatatatgaaggcaagagtactcattgttgccgatctgttctttcgcattgcataaagaacgttaagattgagctctctaatgacaatagaaaagaatttgttactgaaggaagttattttttggaggatggtgagataatcgagaagattgatgatttctggagtgcttttgaaggatctgccgatagctgaaggaagttattttttgga

SEQ ID NO: 81687 - DNA, 555 bp, Citrus sinensis
  Intron number 2 from transcript orange1.1g002089m (locus o range1.1g002089m.g) derived from phytozome v7.0 (chr-ID sc affold00421; pos 106325 to 106879)
gagaggatctcaaagaaacggtgtgtcattttctcttttgaccttttgtcaatttattcttttgattaatggttgactttcattgttgcccatgtgaccaaaagtttatatttttaatgattgttgattgattcacggtttggagtgtgaaaagtgtgagactgacgtgatttatgactttttaaaaaaaaaaaaaaaaaagggtttggtagctgaggttttaattgatcccagattgcagttttgttcagattgaaaggatcagtaagaatcacagtctatgatgataagtcaatgtgtttgttgttggtatggattgaatgttttaatgttcgggtttaaaatgcgagctcttgtttgcaaacttggagctgtttgaattgatttagagccacatttggagtgttcaaggggctctatggacctgtggtcaaatggtcctcggatctctcttttgatatggaagatttatgcaataattttacagaagatatggtttgtctgattgaattactcagactaatgatgttaaggttgtgtaggttcaagagtgtt

SEQ ID NO: 81688 - DNA, 824 bp, Citrus sinensis
  Intron number 4 from transcript orange1.1g004287m (locus o range1.1g002232m.g) derived from phytozome v7.0 (chr-ID sc affold00358; pos 138137 to 138960 reverse strand)
aagggaggagaacttcacaaaaggtaacttagatcaacaagcaatagcactcaaatctgcaagatttattgtacataatttagacatagattttctgttttataccttcatataaggatttttggaagaaaatttcttcttcttttgtcaattcccccccccccccctctcgcaacttgcaagaatatatgtttgtatgctttcattgatgtgtctctgataggcgttagaggctggctatcttcttgtttttgggactggttgactatttccagtaattgcaaaagcatagtttgggtaggatttgatgttgttttatctcattcatttatttattttggatttggtgttgttttatctcattcatttatttattttaatgtgttacgcatatttcttcttttaactagtatcactggctgggtttaatgtgtgcaaactaaggacagatttactttcttgattttcatacttaaaatatgttaaactttgttctggatgtgtcagatgttattgcccaaataatatctctggtgaaatgcatctgggcatagtttcttgtcacaatgatatctctttttccttgttagtgtctttgcttgtcattagaccccaacattttttgtatttatgcttatttcctggatctcttatgtcacgaaaagaggaattatcatgccctgtattgatgagcttaaaacttattcggttattgttttcatggctcctttataagtttgttctggcttcttgtttctctgggaattatatatctctcatttgattgtgattgatcttataaatttccatgagtctcaggaact

SEQ ID NO: 81689 - DNA, 484 bp, Citrus sinensis
  Intron number 1 from transcript orange1.1g004287m (locus o range1.1g002232m.g) derived from phytozome v7.0 (chr-ID sc affold00358; pos 141488 to 141971 reverse strand)
ctgatttagtgggccagagttagagttaatttcaggtattactttttgttctgtgcctttttattttagggtttattttcttattttttcgctaattcgagttcttaattacgttctttttcattgtcttctttatctgggggataattggttttgggtctgtattgtgttaattcaaatggtttaattcttttcagttgcattgttggatgttgaagattgttttttcgttttactgaaatttggcctggatatgtggcttatttattttctttttcattaaaaatagcttagtaaaatttatactttggagtcgtgaactaatttggtgattgttgaatattgttgttgcttccttgaactcttgtgtttattttgttttttcagtatcacttctattatctggtgattcattggcttaagttaatgggttcttattccattgaagtaattgtatgtggttattggtggtttgtagtttcgt

SEQ ID NO: 81690 - DNA, 550 bp, Citrus sinensis
  Intron number 1 from transcript orange1.1g009034m (locus o range1.1g009040m.g) derived from phytozome v7.0 (chr-ID sc affold00015; pos 1325312 to 1325861)
ctctcttctgccgtcaccggcatctatcaaacgacgtacagtatctgtccttatatttacaatttcttgattcaatttatttgttgctattttaattttttttgggaaatagcgtttgactttaccgttcattgatcagatctacgttgcatgtttcatttttacatatcatgtgtaaatttcttaactctatgatgaaattatctatgagttgaactggaagatgccgtttctctatcagcaacaatttattggaggattttgtccttttttttttttggtaaatgctattgaatcttgggtttgaatttttttttaattacgggtgagtctgtaaaagtagaagcttgctttgggtaattggctgcattgcctgtttatgttcagattgatgcattaagatcgcttagcagtttgatttgcctcccaagtgatggaacggttaatttatagtttgtgtaaacaatttagaagataaattttggttacatgataagcattttcatgtattggtctttgattttgcacagacataaacaccaatattgtc

SEQ ID NO: 81691 - DNA, 397 bp, Citrus sinensis
  Intron number 3 from transcript orange1.1g009542m (locus o range1.1g009542m.g) derived from phytozome v7.0 (chr-ID sc affold00021; pos 671413 to 671809 reverse strand)
ttgctgatacaaaaggtggcgtccaggtatttattttaagtaattaaagttatgcaaatgtgaactgcggtcactagatagcttgtttatcagattatcatcatatgattgaggttagtcagtgtgatctgatgaattcactttctactcttggccacttgattagattttcctttcttgttgtgtccatattgttcgtaagaaaattaaatttgaaagtagagatctaatagcatatgaacgcctgagcagaatgactttgtctatttaaagttttggctctcattttgagtttcataactcttggatatcaagaaaacagttcgctttcatttgtagagaatggacttttcttttcctctcatagttattgcattaagtttgtgtttaaagcagg

SEQ ID NO: 81692 - DNA, 979 bp, Citrus sinensis
  Intron number 1 from transcript orange1.1g022457m (locus o range1.1g022457m.g) derived from phytozome v7.0 (chr-ID sc affold00103; pos 13158 to 14136 reverse strand)
cctctttttcaatctgctaatcaccttttctcgtaaatcgcctttctctttcgcttttagtttcttgccgtttttaacaatttttcgttttggccactttatatcgttcctacatcgattttgaatcaaaccctttttggggttatatgcaaaatcattgcttggctcatatgtatgtgttttggggtggggggggggggggttagtgtttaatttgtttatcaattctttgttttggtgttagagaaaatgaaataaaaaatgagaattaatatatgttaattactagtttctttgtgttttggtatcacttgaactgaataagatggttgctttaacagctcatctgagtgaattctatttacctgttctacatcctcaatgtgctgaaagacgaaagactaatcggttattcttgttaaactttcaaaggcaccagacagcttctggttaacatgttagaccgggacaattgtctggtgatgcggtaattgtttctggtcttgcatcgtaatactttgatgttgattgtatcccgttgacattaaactttagtagcttgtgtacgtgggagtggatatttttctctgggaagaagcccgaaggtagatatttagatacgcatacctccactcagaatgaaagttgtgaaagttaatcttcgcagctttcaggagtataaatttctgttttattatggaatagtactatcgtaggtttaaaactcaggcacaagcatacaccatgctccagttgaactgtgttgaagccttagaaagccagcacataactagggcctttgtctctatttggttggcatttctcagtcattagtcaatctggatgctgtgctggtatatatatgggattaaatttatgatagcttcaatcattggttgctaaagatttcgttgtgctttatttgtttgtatatgctgcttttgaattccttaattatatgtctgtgtaggaaaactta

SEQ ID NO: 81693 - DNA, 714 bp, Citrus sinensis
  Intron number 1 from transcript orange1.1g001748m (locus o range1.1g001748m.g) derived from phytozome v7.0 (chr-ID sc affold00020; pos 253178 to 253891 reverse strand)
tcgaagtctgcagttagcattatttttatttgcaggtttgaatgtttaaaactttgtcgtttttacattcttcgtttctttctcgcttgtattctaagttaaaagttttgaatttttttttttcccttgattctctctagaatgtaacagttggttttctatctgataggcaagccttgtttagttagctctctgactttgagctgtgtgaacaaatacgggcattgtttaatactgtttatgtgtgttttgtcttcttcgcgagtgtttgttactgtaatggctctttgggattctgtgacgaacgtttctttgctttattttattttattattttttgaaggtatgcttttgtcatgaaaaacgctacattgtaagttaaatgaagaaagatgctcatttatcatattttgtgatcaaaacattgaatttggtgaaactaagaatttttatgtgattttatttttatttgttccatttcctgaaatgtaagaagttgcaacctaagcttctaaggactgaatggcaaatgtagcaaaacttttttaaatttctgtgactactaataatagaaatttggctcttttgttttccttctttccttttgattgtcagtttcgctatttgattatactgtcatatacttttttttcctcagaatttttactgatgggttgatgactctatctatttatttcttctttcaggttaaag

SEQ ID NO: 81694 - DNA, 698 bp, Citrus sinensis
  Intron number 2 from transcript orange1.1g005372m (locus o range1.1g005372m.g) derived from phytozome v7.0 (chr-ID sc affold00454; pos 92298 to 92995)
caggtacgctactattaagagacgggtaccatttgtatttgctgaaattctgtttggttagaaggaaaattgaatgattcagagtggctggaaattcgaggaatttacctacctaagtgagtcaaatggctggactaatatcactgtggttaattttgtatacactgtaagagaaaattgaagtgtcagttgatagtttcatctattatagaacaaatttgataagttcgatggttgaattgtgaaaaaatcaactcttcttgagagtcttatactcttattattgatttcttttggccataagttacaaattttattcccaagtagtggaaaactcaaagagatcatcgtctccgggttcatttggcttggctacttcaagtagactggagtaagtttgggattaatacacagatgctatgagataatcattaactgtcaagtacaaatgtgccggtccgggtggtaatcattagattccaagcaaaaatgagtgcttatcaaacacttaagttgaatcacaacaatccaaaaaatacctgtaaatggattaatttatctagtgtagtatctgctattcacatttaaataacaaacataactttaatgtttcatagaattcattgtttctagtatcatgtaaactaactttatgacagtgattggtgttacagggtagtgaagagaggccaggccta

SEQ ID NO: 81695 - DNA, 485 bp, Citrus sinensis
  Intron number 3 from transcript orange1.1g017003m (locus o range1.1g010372m.g) derived from phytozome v7.0 (chr-ID sc affold00001; pos 1427917 to 1428401)
aacaggttggtgaaatttcagttgatcaattgatgttttatcttttggtttgtcctgtatggttcttatgttaacctttctttctttgcgctacatagaatccttttttccaatattatgcaataatcttcagttgtatgacactatgactattgtttccaaaaggtcactttgctagtttgctaatgtttttgtcaatgttaagaaatggtatatgacctaaagatttattagattcgtgaacaattcaatttgcatcacaatgaatttataaaaattgtatctaagacaattcaatttgcatcacaactaattaataaaaattgtatctaagctctaattcttatttatttatgttgctttctgtttcatgtttcatgaaagtatgcctttttctctttttttggaattattttgattgttagaatttgctttagtgtcaagtgtagctcatagcaccttacttgtgggctctttcaggtgaa

SEQ ID NO: 81696 - DNA, 543 bp, Citrus sinensis
  Intron number 1 from transcript orange1.1g031796m (locus o range1.1g030191m.g) derived from phytozome v7.0 (chr-ID sc affold00001; pos 4105853 to 4106395)
atctgcaccaaggcaaaaaccgctctcttcctcaggcaagtcgttttactctctagttggtctcgcttaatcgtacggtctctagatcctgatctctccattttcttatttgattgatatctctagtctttcttgatctctatgtctgatctggccttgttattcttcgatctgcatgttaattgtgagccgttgctcgaattggaaacatttttgtctgtgatctcctcatttctcatcttatacaactttgaattatcgaaattacgtattgatgattaagatttaggtgtgttttatgtctttattgtatgatctaacgtaattgaggtttatttcgttcttaaattatttctaaatgatatttggttattttttcaattagatctaataattgcatttttgttaaccgaatcttgtggtgttatgtagatatggttggggctttcttttgtttgttagattttaatgctattgtaatgttggagatgtgtgaacatgtcatctgatctctgcattggttggtgcttgcagttgtgaaaa

SEQ ID NO: 81697 - DNA, 921 bp, Citrus sinensis
  Intron number 1 from transcript orange1.1g024524m (locus o range1.1g022579m.g) derived from phytozome v7.0 (chr-ID sc affold01066; pos 19940 to 20860)
ggaagtgtgtaacttttgactcctaggtgcgtctttgtacccttgagtgaatttgtgattaatgcaactatgggtcctttcaggtttgatgttttatcagtgggatttcccattcatactactactaaaaagagtgtacacagaaagagaatggtggagattagggatgactgcctcaattttgttaatttgtagtttctgtagcagttgccgattattagacttaatgcacaatacttggtgatgacagattttaaaactttgaaatgctaagtttgtgttgggccacaacgtcaatcgtacttgtcattcccagtgatgtcagtatgatagtgactattcttttaaggtctgttgattgtggaagcggagttgtatttgcacatctttacaatggaaacacctgcttaaatattcacttttgttgctgaagaagaaaattggattgaattaaattaatcacctgcttaagttgcttaaactctatgtaagttctcgtaggcattttttgatttctggcaatgattttttctttgagttcatttggttttgtctttacattttttctcagttattgaattggtttcaataactggcaattggtaagttgtgtagttgcaatctagagtttttgactttgtgtaatattcagtggattttttctgagttagtgttagttagttatatgtcagtgcaatggggtggatcactatgcttttcttgtcttcatttatatttttaaattgttctcaatttaaacatattaatttcttttggatagtttgaacttcagtatgggaactgtaatgttgtcacataatcatgatatataatgggatgaagtatgatcatgattgtaatgtgttgtatggtattgcatttgcaggaatttgatcctttttcattgagcattgacgggga

SEQ ID NO: 81698 - DNA, 995 bp, Citrus sinensis
  Intron number 1 from transcript orange1.1g000340m (locus o range1.1g000340m.g) derived from phytozome v7.0 (chr-ID sc affold00020; pos 817189 to 818183)
tcaccataaaaaactcttgtattattccgtctcaggcaagtccgtctcttcagaaatttatttccataataacttacagtgtcagtactttttctttgtttctttaacacccccccccctttttctttccaaggcagaacgtaattatatctcctatggaaccttagcaactatccactatcaattatgccacgaaatgtttttgggcttgttactttttttatgatgagatttggggatttttattttcatgcgagaaattaatcctggaggattaatttgtttggtaatttaattggattggttagtgtgtggattttcttgagtttgtagatgataaaaaaaaattgtgcaaaatccagcataaattttgattaagtttatcatgcacaatgatgtctattgccttttaagtgaaggatagaattgcctttcaattttagttaaattaggtattttctttatttattttatgttatttatgctattactgaaaaagaagaggatatggactgtttatgcaatccacgaggttttatgagttgaatttcaaccttagtttttatactagttgtcaaactagttttacatggattttagcatgccaaaacataaatgacatggtagttgtttgtgcggttactttccatgcttaatttaatcaatgcataacacatgtttgtgggtattgtaattggtgctgaatatgacgaacaacaatttgatggtgatcatttgctcttcatatatgtacatttgcatgttaaaatgtctatatttagaaggctgagtgaacgtggagtattttgagattctttaatatgtggtacctttattttaccttggaaatgggggatgctgcttctcaaggagtttacatttttttacggtggactgattcatattttccccaaaactgtattttctaattgcattatgtttagtgattgatttaatctgccatccttttcccagattgcttcagatttgattga

SEQ ID NO: 81699 - DNA, 370 bp, Citrus sinensis
  Intron number 3 from transcript orange1.1g005526m (locus o range1.1g005526m.g) derived from phytozome v7.0 (chr-ID sc affold00001; pos 3466551 to 3466920 reverse strand)
aaaagcatcttattcacagggatttgaagccacaggtactgtgtcttgctctcttttagatgtttatggttagattctctattgagtgtatttatgctatactttatggtcaaatgtagaccgcttactagagcagcttgttaatgaaccatgcaaactttgagtacatcatgcaaacctggaaaattttggggtgttttgattctccttttcagggaagaaaagatttattcttacatgaactttatgtagtggccaactagaatctcttgtatacttgttcgtaataataaatcagacacttattatatgtgttatgtcttcatgattgtttctgctaatgcttgccagaacttactcgtgtcaacta

SEQ ID NO: 81700 - DNA, 1039 bp, Citrus sinensis
  Intron number 1 from transcript orange1.1g003133m (locus o range1.1g000899m.g) derived from phytozome v7.0 (chr-ID sc affold00032; pos 76242 to 77280 reverse strand)
gttcaaaggaaaactctcaaaataaaaaacgggaggtaaaattttgaaactgaataagtctttctgatttctataatgacaattttaggaaaagaaattgcgctgaaaagaaatgatgggtgttattcttttaatcttcttgtttttgattcaatataggaaaacgattcacttatacatcctgttatctgcatgtatgtgtatgtactttaagccataaatgacctaatgaacttttttccccaatatttcccccccaaccccccgtttttatgtattgatacacgggtttgtggaagtaaaagctttcgtatttagctcgatttaaagtatctggctcaagtgattttgagttttagcttttgaaacttaattagttgaaattttttatccagaactttgtttaatgttttcccttgcttatttttaattcatggttgtgaaattctgaatttggattttcttttcagtaggttaatgcatgttgtcattttagatagttttattcttttggtgcaaagattgatattttttgaatagttagattatgtgattttaaaataatttctgctgctctatctggagatgttagctggtggtattcaatcgtgtgatgaactgctgtttaaagcattcatatcgtttcattagtgatatgttgattatgcttcatctggttcataaattggagaattcaaaaaatgaggactttgaatcttgcaattcgtgtatttggcatttaaggaaccaaaagctgctgcttatggtcaatcttaacaaactgcaacaagtttgctcttctggaagatttcctttttagggactagataaactgagaacacaatattagaagatcaattattaatttattttgcatgttcttctgagagattatatatctcttatattttctgctgcataggaaacggtttagactttggttttttaaaattattagaggtcatttcgttatttgatgtggaactttgatatctatgttctcacctattttgatgtggagctttgatataggttgagg

SEQ ID NO: 81701 - DNA, 765 bp, Citrus sinensis
  Intron number 1 from transcript orange1.1g029404m (locus o range1.1g024382m.g) derived from phytozome v7.0 (chr-ID sc affold00021; pos 1340132 to 1340896)
agcaatttttcttcccactccgcacaacaggaaaggtaagaaaaacttttacaatttttgatcgattatttattatttttacatgtttttcaaaagcttcggattatatctttagatcactgaattgaagaatattcattatttatgatcttaattattcacttgtgctgacatctctcatcctgagtatttgatcgatctctgcaatctgttgttattgttcgtaataccttcattcgtatttgatacttgaagcgctgtcgttttaatgaaaagtttgccttttatagtcacctagatgtttcaaacacaacttcttttggctgagaaatgcttcaactgatccagattttaacttaataatgatttttgttttcgtatgtgaagcaacttgagctttgaattccttcttgttgcaaccattaatttacctgatcagcgctttgtttccatcaaaatcaagctgttcctatttcaattttggctttgtgtaattggcgttgattgacaattttcatgataagaggcttgatcattgtgattgtaaatgcaactggaatttttttttttttggagtgaatgaaattcagtgtttaagctgttgataaggttgtagtaaattcacgaaatgataattccatggaattattcaatattgagaaacatggaattgtaatctttattgaatttcagtccgatttcttattgtttgtatctaatacctgaataggcaggaagacttgctggcaaagctgacaagtgcat

SEQ ID NO: 81702 - DNA, 599 bp, Citrus sinensis
  Intron number 4 from transcript orange1.1g029404m (locus o range1.1g024382m.g) derived from phytozome v7.0 (chr-ID sc affold00021; pos 1342180 to 1342778)
tccagaaggcaagaagtgctggaattaaaatagaggtatgaaccagtcatctgaatgtgctttcatgtgatccagacatctttatgcactttcatatgatctagacatctgaatgcactttcatgtgatccagtcatctgaatgcactatcatctgcaacataaaatgtttttcttttctgcaaaattggcggaaacaaaagatggtctccctagtgtttatttgtattttggtctgtttgagcgtcaaaatgtttgactggtaaaacaataacagtaatgataaatattccaaaattttatcccaaatttcatcccaagtgacgtggcatgtgacttttcattcattaagtggttgatgatttctcataaattgtaagtgaattattacattatctcaccaacgggtgaatgaataactcattatttgagatgcaattttggaatgcgtcgcaatactcaaaaaataaaagctatgactggaacaaaaatcttaccttttctttattcatttgggatttaactatttattgggatgagcctatgaacctcctcctttctacagtgcggatcaatcagtggagtagaaatctctctcat

SEQ ID NO: 81703 - DNA, 801 bp, Citrus sinensis
  Intron number 1 from transcript orange1.1g021609m (locus o range1.1g021578m.g) derived from phytozome v7.0 (chr-ID sc affold00098; pos 45866 to 46666)
acaaggttgagaggttcgccagtcgctccgaataaatgaaagagatgaggtcccgaagccctttattaatcattatctgtaagctttttcctttttctttaaatcttatgtagtaagcgggattcaaacttcaaaccgcagtagttgtcgtaatgttttctttgggtgttagttaaatttacacaacttgtcttatctttagcaattgaaaactctgttcttctttaccaatatgaatattttacgctcggaatgtttgttgcggaggttaatgatatgcctggctttttttcaataatgaaaatatatgcagcaaagatcttttttttttttttttttaaattatgatctaaagaccatgatgtatctcatgctatgtgtttgctttatgccgttgattcattgactgggagttatgactaaattttctgcagttcgaactttttggtaattgtcgcatctgcaatgtaggcagcagtattaagatttgcatggtcagtgttgttgggcgattgtttaataatgcagatgtgtaacaatgttctttcaaagggatgctgttgtattaagttgtttgtccattctttttctgttcccgtgtatgcaatatccttttcctatgtctataacgcgactgagtaatgtaatgctgctgctccttatacttttgttgttgttcatttcaacatttctttctatatcttcgcccttttgtgtgaattggttgttggtataatatgtttggacctccaaagttaaaagacagattactggtggacagatttttcagtgtgggggagc

SEQ ID NO: 81704 - DNA, 727 bp, Citrus sinensis
  Intron number 1 from transcript orange1.1g032079m (locus o range1.1g032079m.g) derived from phytozome v7.0 (chr-ID sc affold00372; pos 135930 to 136656)
aaggtaccgatctaagaattgagggtttcaatgcaatcgtgtattatctggttcgagttctctttttttttttttttttttttgttctctctccctttttttgttaatttcttatgatgaagggcattgacagctcagtttaacgggacacttgtcatttctagcagcttccagccttccacccttgcatagtgcattgaaaatggaaatcgatatagtttttaattagggtaaattatcaagtaggtccatattttttgatgttttatcagaaaaagaaacaatttgtctattcctacaaaacagtccttgactttctgggaaataactaaatattgaatagacacgctactttctagttttaaagttgaataataagttgagtagtgcttcgtgaagtgatagtacaacctccatcatttaatttgagtagtgtttgttgaaaatctaattggcattgttaagtacttctcttctctagaaaaatctggtgataattgactttaactgctgataagaaagtttgatgaaaccggtttccagaactgcattttagagacaccctgttcagttatagtttttaagcagtcattggaagtcaactttcccatcaagttgcttatgataaaaactgtgcaaatctgatgaattggcactcattaagttctatttttccttttctactcttctaggtgctccaaataaggtatcggcgaaatcaaaattg

SEQ ID NO: 81705 - DNA, 567 bp, Citrus sinensis
  Intron number 2 from transcript orange1.1g006656m (locus o range1.1g006510m.g) derived from phytozome v7.0 (chr-ID sc affold00021; pos 590082 to 590648 reverse strand)
actaccaaggtttgtcagtataattggtttaaaatgaaagtctttttttttctttttttttttagatcatttgcttggccaaaaattgttggttgtgttacttgcaagcattgttcaatatataatggttgtaatatgtatatgtattacaatctacttattcttttttttttttttgaaagtatgtatacgtgttacaatctacttattcaataggctttttttttttttaataatttgttgataaaagtgaataacctccttctataggtgatttatcattaaactgatattgtgataatatcttagaatgattccccttacatgcatttaatttaatatgagagatttagcttgctacaaaaaagatacaagagggaagagtgctggtatttgattattattgtataaaagtgaaattattttctatcacttctataactgtgatagaggttttatcttattttagtttgtatccttacaatagcattatcacctttcttggtataatttcatttcagtgccattcttatttgaagctcttttgacagatcttcttgaccgggg

SEQ ID NO: 81706 - DNA, 731 bp, Citrus sinensis
  Intron number 1 from transcript orange1.1g029757m (locus o range1.1g029757m.g) derived from phytozome v7.0 (chr-ID sc affold00001; pos 5174678 to 5175408 reverse strand)
gcccattgattctggtagcgatctcgaagaagacggtcagttttcccctctctctcaaatgaaatttcaatcttagatttaattacctttattctgtctgcggttgtaatcaattaaacctttgtgttgctgttgagttattgtgtttttacaccaataaatgtttaattccctagttattgaaaatcttgcatatccttctctgttagctgctcaaatgactcaagattgctcgtcttagtgtttggtattaggtgttcactattttgatatgatgatgaattaatttcttttttaaattttacaagtttagtttaattggaaatgcaacgttgttgctggtatgtttgacttgtttgcttgcttgataaatatgatcgtaatttacttgatatttgctaagtcctaattaaatggcattctaagatttgtagcaattccaactgggtattttagaagatgctgagcgcaccagttgttctggtcagttattgaagctgtgtttttggtctatggtaaatcaagtttggttgcttatgcaaatatgtcgaagtgaatatatttattgccttgtttttgtcagcatgagattgagttcttctgttcagttattgagtttctgccggcattgtaaattattggaaccttcttatcattcagagttatatgaaattggacttccaaggttcttctgtgcccgacttcaatgctgtttcttttgttaaaaatag

SEQ ID NO: 81707 - DNA, 975 bp, Citrus sinensis
  Intron number 1 from transcript orange1.1g019782m (locus o range1.1g019782m.g) derived from phytozome v7.0 (chr-ID sc affold00032; pos 547317 to 548291)
gtgttatttctgtttgctttaccaatcttttaaaggtctggcctttttcttccttcctttctttctttctttcttgcttgcttctcttggattttctttcttctgggtttgttgattttcttctaattcctggttcttagcttgctgttgaatgttttgggtgtggaaagtttgtttctttgttggttgagaatcttgatattgtagcattttgggcttaagacatatgtttgagttgatcttgctgataaaaaaattatataaaaaaaaaactgatgaggtttttcttgttttgtggttatgtaattattgtgttggttttttttttgttttaatcatttttttttaaaatctttctaatatttggctcttgggttttgcatgtatctgttgctctcaaatgtgagcttgggatttggtgattataacgtctggttcttgagagaataagtttaatcaagtttgctttttctacctcctctatttctgttcttggattcttgtttactattatagttatactctgattatcttctgaatgatcgatttgcatgttggaaaattcaacgaattgtgatttttctttgatttgataatgatatgccccagaatgttatttcagttttagtatcctgtgttgatttttgcatttctggacttgctgggtctcttttgtgttgattttaattagttttgttcttttttgttgctggaaatggaattctttgtctaagtttatctaggttgactttattagctttcgtttcaagagatttgccttctatacatgtcccttccttgccaatttgtgtgtccttagctcaagggtgtgagcctttaagtgtttactaaatgttgctgatgtttgatctttgcttgttaattgatagatgttgatgtctgtggttgttgacacttggctttggctgctgatttgcaggttggctgaatacttgagcaaaggtttttctcttt

SEQ ID NO: 81708 - DNA, 204 bp, Citrus sinensis
  Intron number 1 from transcript orange1.1g018595m (locus o range1.1g018578m.g) derived from phytozome v7.0 (chr-ID sc affold00217; pos 116432 to 116635)
ccaatctaatctcaatctccttcacagtctctccggtaactctaaacccagatcagttttcttctaattcattcaaaataacctaaaagatttaatttttagctaattttagggttcttttttgtttttgattaattaaaaaaggaaggaagtttgagctaattttcgatttttttttttagattcagcagctgtttagttcgc

SEQ ID NO: 81709 - DNA, 933 bp, Citrus sinensis
  Intron number 1 from transcript orange1.1g004869m (locus o range1.1g004869m.g) derived from phytozome v7.0 (chr-ID sc affold00001; pos 4377870 to 4378802)
tcggtgctcacagtttcggataccaccggtaatcttatatcttcatacgttttaccattttttttttataagagctttaccattttgttatttcgcctaaattgagctattgcactgttttgtaatgttggtttggaagctaagaaattgcaggagacaaaaaagtgattagaatcggtagctaaaaaaactggaatttgaggtttgctaaattatggtagttactattagaatataaaattttgaattcttagtttgtagaatttcagagttaggaacataacttattgcgctttctaataatttctcagcaattaggatttcttgatttaattgtttgagctgcggagcatttgctgggtatgtctgagtgtcttcctcgcagaagttttagaatcttttaccttgctttcttggttctgtttttattttgatatttaatcataggtgtgttgaggctgtcgatctactgagttttgatagtaattaaggtttatattacctattgtctctcaatttgtttgtttgcagagaaatgtcagtagaataaatgaaattaaaacttcaggtagcatgtttcatccctattattttagaaagcaaattaattttagttcagatgattaatgcaagctcttatactttttttttttttcattttctaggccccgtaaactgatacatgcacacacatgaaaacttgtggcaaaacaattaatgtgatggttcactcttgttgggttaaaagacgtatgcatgcatacctggacttgaactgtgtttgtttaattattgtaacatgttcttgataatataaaaagtctgattaatgttgctctattttcgcgaaattctatttgtgttggtcaattgaatattttccaaatattgattgcaggattattgaaaaaggcccaatatttgttgccagaa

SEQ ID NO: 81710 - DNA, 767 bp, Citrus sinensis
  Intron number 2 from transcript orange1.1g028194m (locus o range1.1g023180m.g) derived from phytozome v7.0 (chr-ID sc affold00084; pos 178362 to 179128)
gagaggtttgatttgttataaaaaatttcatttgttttctatggggtgcagtcaatcattaaagctgggagtcgaagtccaagggaataatgtagatactgtgcatataggtttaaatgttactttcagtttgcttcaatgatctttttctacttagattttatttggtatatagaaacgaggaattattatgttcatggatttcatggcagttggtgacctttgaaacatgcaagtgccgttacttcatccctgctgactgataaattggtaggatgggtgggctttgtcttagtgataggggttagagaaaatcctagtcaatcaccctataggattgaacgcttgttcaaaatttgctgacttgatctgtttttcttctgtttcattggtgcttttaccttagtcacgggctgtagttgatcagatctttagattgcattgcattcattccaattgagatatgtatatttgtgtaataatattattagttaattggtttgaaaccccaattttatgataggatgtatattactactctccaagctgtacctcaagtgttttaacaactagttccgcactgctgatataacagttcaattgccacattacttgagtagtaaaattttggtgtaacatgtagtttctactcttgatatgcatctcttttatttccctatttcctcattttatggtttcacttgttttgttcctgccaatttctatcaattatgtatctgttttaattcctccaatgcaggcgttca

SEQ ID NO: 81711 - DNA, 601 bp, Citrus sinensis
  Intron number 1 from transcript orange1.1g012828m (locus o range1.1g009437m.g) derived from phytozome v7.0 (chr-ID sc affold00001; pos 2007692 to 2008292)
caaagaggcctggttgcgataacaatttcgtcttggtgagtaggcttagtttctgtaatctttcaattttctgcttttctcttttttcttgagtcggttatgtttcagattttgttgttaccgtttggctaacgataaaactggatagtgactagagagggggaaattagtagttcaaatttttattgtgaactgagtagagtgcagaagtggctgtttaggcttacttgagttcgaggtttcttgttcaatttgggataattttcggtttttaactcttgatgccgttttgcaactagatttcaagaatatgaacatgttttaacggcattcctgttggtctctgagaaaattggggtacgagaaaaagaaaatcaagattctgttgtaaatacttaatgctgttaacagaaaaatgcggtgagaatttggttgaaatttcagtgaaaagtttgaatattggagcgataattattttacttttggccttgttggaagatggtttcttcttcaatttaaagttaatgattagagtcagttaatgatagatttgatcaattgattagattttgtttataggttaaagttccaacttgggttg

SEQ ID NO: 81712 - DNA, 613 bp, Citrus sinensis
  Intron number 2 from transcript orange1.1g024100m (locus o range1.1g018970m.g) derived from phytozome v7.0 (chr-ID sc affold00008; pos 2375225 to 2375837)
caacgctagaaataatcaacatcttgttgctcttggtacctttacctttctttctatgcttgtatggcttttattatttttgtgaagtagatttaacttgttagaattgctcggaagtagatgaactttggcgctttttgggggtgattttgtagaaagcactttctgcaaaagttcatgttaagtgcctctatttaaaatttgatttttgttaaagcaatgatcaagagttgtttgatatggtaggtgttatctcatgttcagtttatgataaggctttgcgtttggtttgtatagcacttgtatagttacatgttttatttcatttcattttttgatggaaacgttaatattaggcagaaaagcacatctcagtgattatatatgtctgatgacagattgttactttgatgcattctgttcattctttcttcactttctaacttctgatcgacattatatagcttagaataccagatttctagtgcagctgtattttatactgtctgatatacatgtatcattccacctgcttatgaattggcaacgagttttctctgatatctgaaccgctgcagattgtggatctggcattggaagaatcaccaagaac

SEQ ID NO: 81713 - DNA, 851 bp, Citrus sinensis
  Intron number 2 from transcript orange1.1g009802m (locus o range1.1g006512m.g) derived from phytozome v7.0 (chr-ID sc affold00015; pos 891601 to 892451 reverse strand)
ggttgtactacaagttcacaggatttcgtgaccaggtattttaacattctctctctctctctctctctctctattctattttgtttttttctccgattctgaaagctggaattgaaggttttcaaagtatttgttggcttagtcactttatagagttattatgatgtatatttttttaaaatcctatgtagagctgttatgaatttaatgtaaatgaatgtaattaacatacctattcttatgattcctttttcattcttcttggtcacttggtcacacctagtctattttgacattgatgatcattttccagtttgttgcaaagttgctttatagtttgcattttacaaaattcatagtagttttagttttgtcttccacatcccttgtggttgtcagtgactgttatggagagctttgatatgggtttataaaattcatagtagtttagtttcatattccatctagtctcactgttttctgtcttgtccttgtaggatgttgctactttgaccaattttttccagtccaattttggaatatcacctgaagagaagcaactttctgtcagtggtcgtaattggggagaagttgatttaaatggtcagtggctttgtttattttttcaagttgatggttctaatgggtttcttttatttctttttatgcttcttaatatcttttatcttattgtgtgcttttggtcaaattttgcacaatatttcccaaagttgtaacatttttgtggttacatgttacgtttatgttttgagagttggtctctttggttgtatggtctgtgccattgtactcataagtcagtttccaatctcgggctatcttcagggaac

SEQ ID NO: 81714 - DNA, 922 bp, Citrus sinensis
  Intron number 3 from transcript orange1.1g016504m (locus o range1.1g016504m.g) derived from phytozome v7.0 (chr-ID sc affold00042; pos 137219 to 138140)
aagaggaacgcttggtcaaagtatcagaagaggaggtttgtttatgtaattaatacatactatgtaaaatgagttttgcctaaggattgcctatccaatagagcgaaattgttaacatcaagccccataaaatctttaaagcttgtgtcatactagatgtaattgtcctgagcttcactctgccacaattaagtggcaagagtccaattctaataggcaagtgcaaaaccttcaccgttctatgactcttcatggttttcaaattttgtttgcagggattagatatgcaatgaaaaaactttaggttcggttataacattaatgatgggagaatactaatctccttgagttaattttcttcatgtactatctagttgaggcacttttgagaattaagtgacgtgacctcaatttggcagacaagttttgttcccacttgttgttttactcatatttcttaagacagacgggagtcttagtcaacctggaattgtctctaaataacataagttgtaattattcatattgacatttttgtctcttgttatattttgaaatgtgatttagcttaaggtagggtattatggataaatgacatgcttcaagacttaaaggagagctgtaatacttttatcagttgagctaaggtcagctgaaactgaaacaaagtgatatcacatttttataatttggcttgtcttggctctagcttcttattggcttggaatacgttcagggaaattaatcactaatctatcacatcattagtcagatcttggtccaattcccatccagtgttcatagatgttgttcatatatcctatgttaattgttttttaattttgattatttgttccataattcaattttgtttctgtgttcttttcataaactttaaggaagcaagatatactcaagcagt

SEQ ID NO: 81715 - DNA, 299 bp, Citrus sinensis
  Intron number 1 from transcript orange1.1g006692m (locus o range1.1g006692m.g) derived from phytozome v7.0 (chr-ID sc affold00001; pos 3923914 to 3924212 reverse strand)
cagtactggcattgctctcaatcacgtccctgctggtatatcatttttcaccctttttttgtgttgagaatttatttatttattcttttatgaatatgacttcgatgatgaatcttcactttgacggtagaatttcataccaaaaaagatcggttttatttgttgattgattgatccctgatatttgattttgttttagaattaatcgattcaaagttttgtttttttgaattttttagtttgtgttgtatggtgttaacttacgtgttaaagaacggaaaaaaatataggtgttaaag

SEQ ID NO: 81716 - DNA, 891 bp, Citrus sinensis
  Intron number 1 from transcript orange1.1g022085m (locus o range1.1g022085m.g) derived from phytozome v7.0 (chr-ID sc affold00008; pos 749125 to 750015 reverse strand)
ttttagaagacgagcttcagctcctctgcgaatacgtatgtttacaaaacaatacatattgctttttacttttattgagtataaagagttagggtttcgccttttcgtttttgccttttacttgccgttatctctgaataattgaaagatttttgtatctgttgtcgatgtttacttgttaaccaaaacaattcatttattagtgatcagtgaaaaataatcatctctttttaatctgtcttgataaattgttgggcattgtaatttgtggcatgagtagaattttttgaatgcataatttgtgttcctatttttgtactctgaagtggcatgtaatatgcacattagggtcggtcccacattcggcactgtgtgccaatatttggcatcttaatcatagtattgcttttgttttagcatgtcttttaattcttagtctggtggttttgcttttgtttcatgttcttaattcataatgtagttgaattgggacgttattcattatggtgtagaagttgtactagtccggcatattcagctgaacaaattcttgaagctgggtggtaatagatctgttgattcattgttttggtaatagattccgtatatgaatgtagatatactacaatcgttgactaaatactttggttatactattttattggattattttttatttgttagttattcttttccttttgggaaacttttacatgtttgaattaaccatgtgttttcacgcgatgaaactgctgactttgataaaatgtatctaatttttggagaaaagatagtttatatgttttctgatttttgtttacctgatgtctcctaactagctgttgtgtacaaaaatatcgcaggtgaaagaaatccttattgaagagtcca

SEQ ID NO: 81717 - DNA, 708 bp, Citrus sinensis
  Intron number 1 from transcript orange1.1g048481m (locus o range1.1g048481m.g) derived from phytozome v7.0 (chr-ID sc affold00052; pos 424406 to 425113)
gcagctactttcatccctcgttgcggtaagtaagctatatttagcgcgcgtgttattatttttatagaagaatttctacatatgtgttaccacgcattgcattttttgttaaaagaattactcatatgatactaagactgcaaattagttcatatatgatcattctgcaatattcactgagagtgccttgtgttgatgattcttgagattgatgggttttttttttaggggggggaggaggaggaaaagttagggttccaatcaactttaattttatggtggagtctttgtcaagcgacataaagtttatttagtggggatatacctgattattgttcacgtacattattgcattataagtatgcaatgactaaactatcttcaaaagcaagattgctttttttttttcactaaatttatgtggtctaaatgctttttatatccgaagcttcatgtctaagaaaaaaataaagttaataataattgagctatttaaaaaattaaaacaaacaatgcaaacttgacaagtgtatctggacaaattttttaatttgaatctatttttattaaaattcaaacaaactaaatgcgtattaatttataaagaaaaaattctttattgatatttcagttataataattagtaagattgagtgaggaaatgtgtgaatgattagttgacatttttttgttttgtgcgatgggcag

SEQ ID NO: 81718 - DNA, 529 bp, Citrus sinensis
  Intron number 3 from transcript orange1.1g028031m (locus o range1.1g028031m.g) derived from phytozome v7.0 (chr-ID sc affold00001; pos 166020 to 166548 reverse strand)
aactgtgaagaagcccactgttgtttttgttttgggtaagcattttgtattagctcttagtagtgtatttgtagtaattttgtctggtaatgtcttttgctttttgcaaatgtataagatatccaaatctcaattttaaataaactgagattcgattgttccattgcattagagttctgttatcgttgttgcaatttttatatcatgtttctattctgcttatctgttacaaagactaggcctcaactcaaatatttactgtttatcccaaatatatttaatatattttgttcaatggtgatacgaagcggaacataatgacacttttgttgttttctcacgtttgaggtgtatcgcatatccatctctgatctgctattgttttccttttaatttttccaagcttgtgatttctgactttcctcttcatttctattctcttaattcttttgatgcttctatgagttgatacatcaatactattaattgaccaggtggaccaggcagtggaaaaggaacccagtgcgca

SEQ ID NO: 81719 - DNA, 574 bp, Citrus sinensis
  Intron number 1 from transcript orange1.1g028031m (locus o range1.1g028031m.g) derived from phytozome v7.0 (chr-ID sc affold00001; pos 166960 to 167533 reverse strand)
ctctccaaacaaaacaacgctcgcaattcgctaaggtaaacctaagcctctccctttccctctggatctgataaatctcttttctattcagagacattaacgtcttcttatttttgttcatttgacctctcttatttcttcatgcttttagctcccgcatttctccccaatctgatctcaccgtttttgcgcgcttggatctaacaattcagattctttttgcctcttttctttttcaattcgagcaactgaaatgttctttctctttcttttcgcacgatctcattcctgtgtaatttgatcgcatccaaatatttggagaaatttagagatctaatcacgttaacctcttgttctagtagtattactgaattgccggtcattcacccactattagtcttaaattgacgtgtttgattgcattatattcttacaatttcgaattcattatgtctgtcatttgatgctttttggataatggatttgatcctaaaagcaattgcctcatacattgtgttttttttttctttcttttttggcagatcggttattcagactgagttagttggcgctg

SEQ ID NO: 81720 - DNA, 593 bp, Citrus sinensis
  Intron number 1 from transcript orange1.1g030222m (locus o range1.1g029866m.g) derived from phytozome v7.0 (chr-ID sc affold00012; pos 47488 to 48080)
aatcgtgtgcgaggctcaagaaactgccgttgaaggtccgaatcgttaatttagcctctgtttagattatgctaattttgtttaaataattggaaaattaatgatttgaattgttgtgtttatgttatacttgagctgttgtgaaattgaaattaaaaaaaaaggttttgttttctttgaaattttgaaaataattaaattgtttatttatggggattttatagaaatcaataaatgttttaagagcaatttgaaatggtgacgaaataatgaacaatctgttttgtgggatgacaacgtatgactggctatattagggtgcgtttcgaagtgctttgttctttctaagaaagtacttcggaagaagcacttcgggtgcatcatttgcctctccagagtattcgaagtgtatttttatattcataagcaattctgcacttttctatttcaaccaaacatagcttcttgggttgtttgaaatatctttgatgctgataaagtctcttccgaacatattaataatgcacaattacatcatattatgaacataagtcatctgtttttcttgaaatttgcagtgcctgctgtgacag

SEQ ID NO: 81721 - DNA, 599 bp, Citrus sinensis
  Intron number 1 from transcript orange1.1g032522m (locus o range1.1g032533m.g) derived from phytozome v7.0 (chr-ID sc affold00246; pos 54412 to 55010)
ataataacactcaaaaggtgctcgaagcttctatgctatctctttttcttttttctttttaattgcttttgaactttctgtttctgttgaaattagttgttattttacaagaactcttagtttttcttatacccttttgccttttgagttttcttggttttgtttttgtctggttagcttacaatggtaggaaaaagattataaagaagtaaaatttgacttgtagattttaaacggaattcaggaatagaatgcatttggcattttggcttatttgaattagtttactgtaacgctgcatttggtgtaatgatttttctgggttcaatagtataattgatattaatggttgttatttgacaataagaaggcaaaaatttgaaagaatgcagaggatatgggcataatttggttgctcaaatagcgagtactttttcttttttttttttggggggggcggggggaaggcaaattgtgtgtactcaactaagtgttttttgacatatttgtttggcataattttatattgagttcagcttttggaagagattaaaacattaatctagtgtacactctgtcatgaatgattccaggagaaa

SEQ ID NO: 81722 - DNA, 914 bp, Citrus sinensis
  Intron number 1 from transcript orange1.1g001767m (locus o range1.1g001767m.g) derived from phytozome v7.0 (chr-ID sc affold00612; pos 29570 to 30483)
tgacgtaagtccgtattttagcaaaatggtttaaaaaaatatctctacttttaaaaaataaattattaatataaaactaatacttttaaataatatcgctactttcaaaataatatttatttcgaaaaaatttaccatataaatggttgaaaaactataacacttagatgacatcttaaatatgtaacgatagaattgaatataattttatatatgttaatatgttcaaagatgtgacgtaaaggattaataaaaaagtggtaacaatttttttttagttatataaatttataataattttatacaattaatttctgaattcgtatatatttattgatataaagtgattgtagctctaccattattctttttcccaatatgaaatgaagtttgggacaccattatttatcaaataataggtgtcattgtcgctttcaatattgcctccttttcttgacgctgaccctttcatatttcgtccccgttcatacactgtactcctaatttttcttttcaaaaaaattaactttaacacaacaatcaatcgaaccaatcaaattttactgtttcagtttctgtctttgtttttgttttaaatattgtcgggacttcgaccacgtgcataaaagaacaatagaaaactggcaaaagccttcgcataattttcatttcattactgagaacgaaaagcaaataaatcaatcttttgcttttttctgttaattaatgtctacctcctctgcataacaactccatgcattctttctctaagtgatcacacggaactctctctctctctctctctctctgtgtcgctaaacgacccgtcgttttgttgtcatatttgagcattacttaatttgtctgaaactcaaactactcctttactcatcaggaagtgtgggggagtggaa

SEQ ID NO: 81723 - DNA, 664 bp, Citrus sinensis
  Intron number 1 from transcript orange1.1g008213m (locus o range1.1g008230m.g) derived from phytozome v7.0 (chr-ID sc affold00015; pos 1604262 to 1604925 reverse strand)
cttttattgtttttttttttaatatatacattcaggtttggtttctttatctccctctctttttttttttcctcggtgatatgttttccgttgttggtgtgttcactgtgttcttcttttctgggcttggcttcacattgtctgtcataaattataatgattaataatactgcctgcgtaatgcatgtttcaccttataagtttttttttatccctttcataggcagctctttgttcgcaaaatcgtgtttcttgctttcgtcttcttttatctcatccatcggggacccttttggcagtgttttgattttctcttcaaattttccaaaattttcaaagtcaatatgtaattgtcaaaacagcagcttctatgaactttaacacaaacattttctcattttcctcttcttgacttactttttgtaattttctaaacaatacttgccaagggacgttgattggtccagtttcttacctcaactaattgaatgatcttttcatccaagcctgcaagtttaaatttcaattgatttgcatgtttctctctgtttatgatacctacatttgtactctttcttactggtacgtttgtaaggtttaaatagcttctctaacgcagaaatatttagttatttaattttaacaggtttcagttaataaaagt

SEQ ID NO: 81724 - DNA, 524 bp, Citrus sinensis
  Intron number 1 from transcript orange1.1g002398m (locus o range1.1g001017m.g) derived from phytozome v7.0 (chr-ID sc affold00030; pos 193449 to 193972)
aggaggttcttgaagattggcggcgaaaaaagcaggtatcctttttttgagattgttgtcagcttagatgcggcttcctttctaatttacaagcttaaaattgtgtttttaatggtcgattatatgccaagtttgtgactgaataaactgaactctgtttgaaagatgataaaatatgaaaatttagggaatttttagtttaaaggaacacattgttggagaaatgcctttgggttgtttatgatgtttgtcaagcctgttatgatgcagtgaacttggcgcaccatgatcaattttgaacattttcagtttacattaaggtcaaaattttgataagtattgatgtacatttctaattgtttttttgcgtgttgtgctttctcgtcttcagtttaggacgtggagttgacatcagtaaatttcttcttttcaattttacttttctttttttttttcactgttaattactgtcttttatctgttttccaggatatagaagtgaacaacagaaaagtgaaagtaca

SEQ ID NO: 81725 - DNA, 702 bp, Citrus sinensis
  Intron number 2 from transcript orange1.1g026769m (locus o range1.1g023127m.g) derived from phytozome v7.0 (chr-ID sc affold00020; pos 914531 to 915232 reverse strand)
aagctttgggtgtcgttattgacttggacccagaggtaggcgcaatatgaattaagtaatttattactatatgtgccatttcgtgcgagtagttgttcctgaatgtggctgtggcattctggctatttttggagagggacatatgtgttaaatgctacaagaagtcaattacgacatgaatatcggttttttttttttcttttttgggcttgtgaatgcaagctgaactgtgctcattctaatagctattagttggtggaattcaaaggatacaaagtggtcaaggtcccaacttaccatgttttatgccttctaaattaacaggagctataatgatgaggcaattataagcgcatcatttttggatttattaatctcctctgtttgttaacatgaggccattgtgggcatacttggatcaaaaccttaccgagaataatttatttgctttgtcttcttcatgcagctaatctggtttttttcttcaagtggattgttccctacatggttcatatttcataaactaaaagataggttgaaaatatgtgcattaagttcgaggtctgctcgacctactgaacgtaaaaatagataacaaactggtacaataatgatatgcattatttgacattcttatgttggtggaatttttttttttttaattttttggttcttgaaaacagggtgtaagaaggtgtgtgg

SEQ ID NO: 81726 - DNA, 512 bp, Citrus sinensis
  Intron number 3 from transcript orange1.1g004903m (locus o range1.1g001425m.g) derived from phytozome v7.0 (chr-ID sc affold00001; pos 5430136 to 5430647 reverse strand)
tggaaggaagaacatccttggtgtatcttcatcatgtatccttttagaacttttaacatttatatggatggacggctgaaaagaaattctactatctggaaattaactctattatgaatatcaattttaggaactctttgccttgatgtgggtatatatgttcagcagtatttgttggttggcttttaatggaaatgtgaaaagatcagtaaatgtattttccacaattttgagttacaatctgcttgttttggaagatctaatatggatttctaacaaacttcgattacgtttcctgtgattaagttaaaatgcaaattttcttgaataaggtactgtaggtgtagccatagggcattagttagcaatcaattggaaagtgtgttgaatgatttaagcactattcttaattttttgtttatttatttttgcgtataaatatgtatggatgaacttagttgccttaaccagtaacagataacagagaacgccgaaaaactcagtttgtggaa

SEQ ID NO: 81727 - DNA, 733 bp, Citrus sinensis
  Intron number 3 from transcript orange1.1g003510m (locus o range1.1g001263m.g) derived from phytozome v7.0 (chr-ID sc affold00204; pos 102435 to 103167)
cgagcctggggatattatttgggcaaaacttactggtgtgctccaaatctatttatgtctttttattctcattcatgtgttgtttcttcacaaaaactgaagttaatacaagaatgaatcatttaaatattagttgaaagaatttaacacgaaaaggcttttatatcttaagatatgaattgtatgctcagttttccatatggttagtggcttatgcacttaggatatctgaaaactaaaatctgtggccatcaatagtgcaagggcaccaaaaagtatttaatattatttggcctgaagtttacatatttattgtaacctttggtacagaatcttttaaattaatgtgttttccacttgtatgtttcgtctatgcattagtaatctgattttcagttgaaaatgcatagtttgaattatgcttatcctcatgcttggaaaatttcttgcctttggctgcatatatatgaagtattgctgtcaaaactcaaacttgatgtgccactgaaaagaaattagtattcctataggaatatttgaatcctagctcatgcagacattacttggggaagaaaatgttgtttaattgttggtccttatttggtgatggcttcatttgcaatttttctttttttcctatctgtgtattatgtatcatgtgaatatgattttattaatttacttatattttttggtgcaccaactatatctcttaattgctatagtgcaggtc

SEQ ID NO: 81728 - DNA, 1007 bp, Citrus sinensis
  Intron number 1 from transcript orange1.1g023670m (locus o range1.1g023670m.g) derived from phytozome v7.0 (chr-ID sc affold00368; pos 162705 to 163711)
ctaataggtatttaatggccgcttgaatttctttttttttaagtttttatttgcttccaagtttttgtggatattattgggtttgaaagttattcgttgattgatacatgggatgctctaatttcctattattctagctacatatggaaaggtgattagtctttggaatatgcaaagatatacttgataactatgaaatctaattgttttggaacatttactaatgctctgtttgcgaaaagctttaaatactggattttgacgtcattttttcccaaagtaattagggtcttactttcctaataggaacctctgattctagctattgaacagaggtagcatgttttgattagtgcttgtggcttcagtacctaggatggtcaatatagtttttcaattaggtctcctatgtcctttaactttaagtttaagctacttttcgtgtagattattatgtttactttcaagtttctacttgaattctcagtatcggactgtcgaacttgctttaactagcttggatgccagacaatggggaagaatatgctgctaaaatgaatcttgtttgtagaatcttctcagctgtggtaaaggtgttaaaaaatttcatggattttgaaattcttgttcaaacttcatgaatatatctctctacatatatgattgttcttttgggtggactaagatttgtacatgtaagagcgcatggtttctttcagcattgatgtgtgccatggccttctgatgattctctgccacaactacgtaagttgaggaagtaattaacctgtacttatacatcactaacgtcaccactgagccagggtgatgttccattttctcttttctgtttggaaaatttgctggggcctatgtttcttgtatgcgaggagcatttttttttcattctttgaagaaaactcttatgtgctgtggctatcttttacctgtatttagagacctttgtaactatgttggttcatgcaggtggataagtgatagccgtg

SEQ ID NO: 81729 - DNA, 835 bp, Citrus sinensis
  Intron number 1 from transcript orange1.1g007942m (locus o range1.1g007942m.g) derived from phytozome v7.0 (chr-ID sc affold00020; pos 22143 to 22977 reverse strand)
tctcggcggttcggtatcagattagcgattctgaggtgagcttttcatgccctttttttaaagtcgtctaaagatttcattttttactgtttgattagttcgatttatagttatttttctgttgattaattatgttccagaggtggctaagttgttgaagttctttcaatgctcttagcttttcaattagagaagtttttagttcttttaatatgcattcgaatttttggtgattatattaagcgattttttgtttcaagtgcgtcaatgtggaccggaagatgttcatgtaacaaataacgtttatgtataatatgagtttgaacatgtttgttttctatgtatagagagggctacatcgaatcaattcaatgtattgttttaggtcctacccggaaaaagaaagacagtatcttgggcactttaattacagtgggtcacaaatagtaaaagcaaatgatgagatagcggccagtttatgaatttgcactacttatatgtgtatgtgaatgttttaagtaaaattatcaaattttgactggaaggagactctaggttcttctctattttatcatttaatggttgtgcatgtgaaatcataaatttttgttgttatcatctttttcttttttctgttgaaggatttctagttgcatccatgtgttatgatcagcttgagtgtaaatccaataagtctttgacgatgcagtaacatggctctttcttgctggctaaagtgaattggagattatattttgtttgttttaatctttatatgtctgttattcttgtaatggcagagtgagttagatcattctcagaattcaggcaatcg

SEQ ID NO: 81730 - DNA, 951 bp, Citrus sinensis
  Intron number 1 from transcript orange1.1g038938m (locus o range1.1g038938m.g) derived from phytozome v7.0 (chr-ID sc affold00144; pos 81401 to 82351)
ggccttcttgatcacccatcgaccccgtccaggtatgtaattttgcaccagatgcctttcattgtatttatattctagtgcccacatcgcttgtctatactttctcaatgtgggataaaattaccagcactgctgcttgtactagcagaagctattttcacttctcaaactagagtacagtgcaagattatcattatctatattttagtttttataacgatttattcaggatgaatttggaagtgtttcttctgaaatgcgcgagcttaattgcgggtgaaggaaatttctggtaatgcatcgtagggtattttataattgctttcaaaaagtgtaatcgaaagtgcttcgtggagaacaatctatagatactttttctatagctcatcgtacttccaaaatgttctgtttatatgaaaagatgaattttctattcactcaaatattagttggaaagtgtttttgatgatgaaaaaagcacttcctacatgtattcttaagtcttaaccaataaataaaggtatatcttcttgaagaaagtcaacacaaattcacaaatcagcattttgtttaaagttcaggctgaggacagaaagataagcctgaggttttacgcctttagcaacacagattcaaactaaaaatatctcttgtacaagtacttttggacatggctttcgataatttaattggatactgaatggggtggtgattaggagactacgggactagatattttaagtacattgactttcaaatgcgaggccaactaagtaagccccctcgacaattacaagaaaactatagtcagtgtatgcacaatgtaatcttgtctgctcggagtatgtataggttgcaaagtacaacaatgtgatacacaagtcatcacagaaattttaatctgggaattttactcattatgtttttcattttttgacactctaggattgc

SEQ ID NO: 81731 - DNA, 586 bp, Citrus sinensis
  Intron number 3 from transcript orange1.1g021776m (locus o range1.1g021243m.g) derived from phytozome v7.0 (chr-ID sc affold00257; pos 8799 to 9384 reverse strand)
gataaggtactttttcttagtttcttaagtctataatgcaagcttgcttgtagctttatgctgttttttacttataaatttgttatacatcttgttttccttacatgaagatcgatcaattaaagaacttattggagtgattatagcatctgtggattggttagaataatctgaaatccttttcatgataagcatctagtaaagatagaatggatcttttgacttttgggcatgaaactataaacttctttttttctttctagtttttttgtagtttgcgttgtcgatttgttaatattctctcatttctggactcactagtttgcttaaaattattcggattcatcttgtcctttcttaagtttatgatttttttattaagcatctgttcttgcctttgatctgacaatatctattatcttttactgtgctttgaggaagaatattaagacagaatttgtaattgaccattatactctatattctttgtgccccttttcactatgaaagatgctgattccatagatactttattggttctttactttcagattacaggattggctcgaagatatcccgggttgat

SEQ ID NO: 81732 - DNA, 754 bp, Citrus sinensis
  Intron number 1 from transcript orange1.1g023026m (locus o range1.1g019273m.g) derived from phytozome v7.0 (chr-ID sc affold00530; pos 52341 to 53094 reverse strand)
tgtctgttctctgtcccttgctcaagctcttctctgtaagtatgaatgaattctctgtcgaatataaacggtgaaaattagaacttttatcactggtcttctgaattcttctatttattcttgtttactcgtttaagtattgaaaattgaactgattctagttgttgacatgcttgaacatttgacagaaagttagcaaggttcttaattttacgtctatcttatctaagagttcaggtcgtagggttgattgaagtgaatacgttagaacttgtatgtgtgcaagtgctgatgattctgcttaattttgaaagcacaacagcgttgggtaagtgcgtaaatttacttggtagctaatgcttaccaactatccgcccacttgtattcggtagcttatgatatcaggggcttcattgtgcatacacttaatatgcctcttaatacgaataaactgtatgacaataactagtcatgaatgaacaatactaaagctgtttctattttcatatgattttgtttctcatttgatattctcaagaaggatactcttattcgtccaaagttggtcgatcaattgtgttaataagttttatgcttatattttccaattacacattttcaagaatattagtaaacattagtagttttggatgacatattagggtatgatattagtagtttgatgatttttttccttcacttcactagtgtgttcatgttacattgcagggaggagatccttctcgtgagcgaa

SEQ ID NO: 81733 - DNA, 903 bp, Citrus sinensis
  Intron number 3 from transcript orange1.1g024660m (locus o range1.1g020832m.g) derived from phytozome v7.0 (chr-ID sc affold00423; pos 65197 to 66099 reverse strand)
cctccagttgaaaaacaaccaggtttctctcttttttgtcatttgcaaaatctttgataagtgtaaattcaatgtttggggaagataattaatagaatttagtagtgttgcattattatcgaagcttggggcatggagtttgtcttaaaaacaaacaacttggataaaggctagttattggtaataatgatcagtctcttctagctggtatttggttcggtttgttcctgaaaggtgcagattagatgtgactattgatgtgggattcagatagtaattagattgtgaggagggtgtggttaatctggtatgttagttgggttaaaatgtctgttatgggtgattgaaaggtctatttggctcttttttagcagatttatatagtttattgagttaaatgaatcttattatgttgtgcatttttttttccagttagataattttgtggtcttctttaaatatacatgtctatgtaacacacacataggcccattttcattgtcagagttgtaaagggctttgcttaattagaaatggtgatgcaagttatttgatttgatctcgggtattaatttaatttaatacgatcctgccataaagcccaattttgtacaatttaatggcaggccgtgtttggtcctttcaacacccctgattatattgttatagatatcagtaaaaatgtttgtgttgtcatagagagccaatgctttacctttataaatttgagctttgttcattaatgtaatattttaccagaaaaatactgaaactttgtgttgcatgaatataatatgaaaattctcaatgttatcactgtttaatctgaattgatttcattgatgttgtggttttgaaaatttttcagcttacgtgtggggcagagctagctgtgtctttcgt

SEQ ID NO: 81734 - DNA, 886 bp, Citrus sinensis
  Intron number 1 from transcript orange1.1g046616m (locus o range1.1g046616m.g) derived from phytozome v7.0 (chr-ID sc affold00481; pos 54251 to 55136)
tcctgtggcgaatcggctcaagtatacggtataaatgctaattttcatgattgtatggcttttttggtattcttttattttattattctacttgctgatttgaatttgggagttatgcatatgatggttacgtaaaatggtctgacttaaatttatatgtagataatttttctctttttttcccctaaaggtaaagggggtggccaaagctttttttttttcttttcttacgtccccgaagatatcaatttggatggacaatcaaataaagctgcttgaaaactacttggccacacccctaggggcttgtatgtagataattctatatgttaaaagttacaaatatggcaggctgcctgaatttagtctgcttacagtaatcttgtcttatcagtatttaattttagattcttgacttttaggttttaccgttgagtcttttgaaatagaacattttattggtctattttctgtttgtaagtagttccaatcaaatagtcccccccccggtgccgggacgatcactgatttgttttgtgagcttgctattggtgatttcgtagctgaataacttaagcaaactagggtaaagggatttagtaggaaagactggcagaaccacttccaatcagtatataaaattctttatctcatgaatttatcatgtgttgcaaatagcattcatgaaagacaattcttgtttactctgatgtcattttcccttgctcaaaattactgttgaattgtcagcagattttgatatttttaggcttgattaagtacccacatgcaatatttttattcatatagacttcaaactatattttaatatctggattttgaatatggaaactcattgatttatatattagcataataggcttca

SEQ ID NO: 81735 - DNA, 461 bp, Citrus sinensis
  Intron number 1 from transcript orange1.1g002068m (locus o range1.1g002068m.g) derived from phytozome v7.0 (chr-ID sc affold00015; pos 1479157 to 1479617)
tgaagctactagtggaagagtgagctcattttcctttttcttccatttgggtttgtttaattatcttctgggctgattttattttaattgataattgatttttttaatttctaaatatttaattttatgtgcttatttccttttgaatttgctaattattttgcaagtataagcttcaaatatgtttgatgtttaatacggtggtaatgttattttgtgtataatttatgagataaatcgattttgatgagattatgaagtcacacggttgagatttatttcaatttgtgatgctttcagagcttgattttcattgcttgctgtaaatcagcttaattggacaatgttttcaagttatgtgatatttgttgggtttgagattgtgaacaattgaagcttgagtaatggatgagatggcttttgtaatgtaatgacagattacgcagcaggactttacagat

SEQ ID NO: 81736 - DNA, 572 bp, Citrus sinensis
  Intron number 2 from transcript orange1.1g002068m (locus o range1.1g002068m.g) derived from phytozome v7.0 (chr-ID sc affold00015; pos 1479778 to 1480349)
aagccactgagaagttcatccaacgtcaaccaaaggtaatcattatgcatagctgttttatccccatttatatgttttgatgtctctgtatgtgaactgcatggaacaagtagttaagtcaagtttttcttagtaatgctgtaaatttggatctttaatagcaaaaggatgttttaacctggatgtttgttggtccgcaaatttcactctttatgtatgaataggaaactgagatggagttttgttcaatatgatgggttctaaaatgctgaaatagagagagctggaaactctgatcaaatttggagaccacttatgaattgatgttgtgactcttacttgtttagacctctggacattctcatgtgtatgacttggagtgaaatgtgaagatgcattaggttgagctgaattttttatctttgattttagggaatgggcacatacagtttacctgccttgcagttcttaagctgacagcattctctgtccagtaagcttgtgctgattccccaattgtttttcctctttctgatcaattatactaggtgcttggcgaaacagctggttct

SEQ ID NO: 81737 - DNA, 552 bp, Citrus sinensis
  Intron number 1 from transcript orange1.1g022335m (locus o range1.1g022335m.g) derived from phytozome v7.0 (chr-ID sc affold00052; pos 289428 to 289979 reverse strand)
ctgctgtttctgctcttcggtctcttggaatcaaggtatccttccaaagaatatatatatatatatatattttcatctgggtttgtttttttcaccatgattattgctcattttgtgcctgcatgtatgtttgccttatttttcttcttagtcctcgcttttcatttgctctatggttcgtttgatttgctttgtcaatttattttcctgctactgaattgcttgggaagtgattatacgatattttttttctcaatatttagagtttatttaccgatgttgttgtgggagcttatggttggttcaacagctgggaaaattttgttgggtggtacaattggtatgaggtttgaacctgggtcacatgagtaggaagaggatttagtttccgtgtgatgcttaagaaacatttgttgatgtttctcagtcttgcttgattgatcatttgatgtcctgcaattgtacatgatttttggggttttcggttggttgtaagagctcatggtggtatttcttttgctgttgttttcaaggctgttggctttgaaggag

SEQ ID NO: 81738 - DNA, 943 bp, Citrus sinensis
  Intron number 1 from transcript orange1.1g000336m (locus o range1.1g000335m.g) derived from phytozome v7.0 (chr-ID sc affold00020; pos 1303120 to 1304062 reverse strand)
cctcttctcccaattcagttactttcttttctcaggtaattgttcgaatactgatttttttcggcctgtttgattttttcgttttgatggatcaataagtgagggattgaattggttttccttttttcttcattattattattattattatttgggtgggggaatggaattctgttggggtttgattgatttgtgtggaaacgtgtgaaattgatctaatctttgtagacatgctaaaattagggtagttctgaaattttttagcaatttttaatgttttgatcatttggggcttttatagcgtggagtttttaagcgtatgcaatggttatttttcttcaaagttcttgttaaatttaaaagatttctattctcaaaactgttattttacttgttctcaacgaagaaagaaggaggtcttgaagatcgctctttttaggggggaaaaattaattgaatggttttctcattccaattctgagttggtggctgattatctgtctacacggttttcatgtgtgagattatgaacattaatgatacacttgcaatctctaaattgggcatgttgtaggagggacatttaattgcatattgaaacatttgattacctgaacaagatgatgttgtttatctgatagccaattgttactagcatattattttgttagtagatgtatttttcttggatgacagtgatgatgatgatgattaatggaaagaattgtcagtggtagtgtcgtttaatgtttaaacttaggtttctgcaactaaagtttttgaatgcctttacaccaggcttcgtagtttattaccatgttaatggattgagtatttattacagcattttcctttttattgtgtggagccattttttgtttgaccaaattttgtcaatttctccataggacggacggaaaattagtgttggtgattgcgcact

SEQ ID NO: 81739 - DNA, 354 bp, Citrus sinensis
  Intron number 1 from transcript orange1.1g026317m (locus o range1.1g013626m.g) derived from phytozome v7.0 (chr-ID sc affold00098; pos 200922 to 201275)
actattcactcatccaaacatcaaggttcgagttgttaatttttcttttttgtaattttatttcgtgtttatttcttcgatttttgattcgaaatttcatttccattagctgcctttatatcttgattctcgatgagatatgattgaatcgtaggtgaaaattaaacgatgattacgacattagaacgaagaaaaattatacgcgattgagagaatgattagcgttagttgtttgttcagcttatcaactttcttagcaattttttttccctctaattgtcattaactctttattaggtgtataattacttagcttttgatttgatcaagtactcgactccaatgtgtttgcag

SEQ ID NO: 81740 - DNA, 1035 bp, Citrus sinensis
  Intron number 1 from transcript orange1.1g031279m (locus o range1.1g031279m.g) derived from phytozome v7.0 (chr-ID sc affold00029; pos 222526 to 223560)
tgttgtctacgctgctcaatccaatttcttgaaaggttaacttcactcattttcttaactttgttttttaaataattttgtgctttttttttgtctttttatttctttttcttgaattgggtatggataaattttggaatttaatgtaatgatagcaatttgaactgattttgtcttgtgtatgatgcatgttagtttgtcatatggttatggttctttgttagtttatgatatgtgattgcttcatacatatggtgaaaccaggaaactgaggctttgggacttctgatgaaaacttgattatttttaggaagacttaatatattgagagaatttgctgcctgtaagtaccaaacaattaagaattgaagtctttgattgtagaccataatgcaatgtgactcctctccattgatgattctaattaaagagtactttgaatcatctttttattcttcggctgcttaacctgttcggtggttaattagttgtatgaatttaagtgagactgtgagactagccgagtttttcaattttgttttcaagctgtttttgaagatatttctggatattgtggagttcgagatgatgtggacgtctctgttttgttttatacgagtttagtgaagtgcatattaagaagattaggttctccaattcatgaacttttatcagccaatattcattttttgtaacctgccaacagctcatctccttgaattgttttagggtagactgtagggcaagatctaattgtcaaattatttaaatcctcggtgatcatattctgagagtaaacttgtgctgtatttttctcgtagtcattaaatgatgagatacttttgtttcttctagaaagttgtgacctcatatttaattcctggttggtcccttttatacaagtgcacaggctctggtcctgctaatttaagtaaacaacagagtacatgtgaatttctttgctcatattctctgctaactctcattaagaattctgttaaatagctgttcaaaccgtctggaaggttgcgaagg

SEQ ID NO: 81741 - DNA, 619 bp, Citrus sinensis
  Intron number 4 from transcript orange1.1g039388m (locus o range1.1g039388m.g) derived from phytozome v7.0 (chr-ID sc affold04114; pos 4532 to 5150)
cggggcattatattcctgcttttgcttccccggttcacaaataaaacaaagcaaaacaggaaattcacatcaaccttaagctgtatatctatcaaaacttaacaataatatcatttaattatttttctcacctttaattttagaagttaggtttaactctaattggtggagcatggttttgcaattggtaatgtcttaactgatccagccatagaacgaagcataccccgaatgtgcttggaacatgagattaattaaacaatctgactatgagagtatcaacaataagttgatgccaaagtgggaacatgcaataaaaacttgtagcaaaaattttctgtctctcaaagttcaagtctcatttcttcgtttcctgaacttgccatattttctctcattaattagaaaatcattttgaactactatgtcagagtttgatggaagacaagcttgtttgtttgttttttttttccgacagcatatttcaaaagatcatggggattgcaagaacgaaatatatatgtcatgttttgtagcgcaattagcttagttaaaaaaaaaaagacttcaacgaaatctttaatatcattgatgcagcattacagtaccagaaagaaat

SEQ ID NO: 81742 - DNA, 252 bp, Citrus sinensis
  Intron number 2 from transcript orange1.1g032222m (locus o range1.1g024415m.g) derived from phytozome v7.0 (chr-ID sc affold00001; pos 2060779 to 2061030)
catatagtaagctcttcgttttttatctcatttcaattttcttttctcatatgcctctgcctgaaaacggaaatgctgttctattacgcctggactttgtttatttagttgatattttaattttatgcataagaatggatgtttgattggggccaaaaaaataataataataataaataaataaataggctctgttgaagctaattagtacttcattttttttgtagctgcgacctgtggtggaaacaggat

SEQ ID NO: 81743 - DNA, 475 bp, Citrus sinensis
  Intron number 4 from transcript orange1.1g027620m (locus o range1.1g021714m.g) derived from phytozome v7.0 (chr-ID sc affold00042; pos 129714 to 130188)
caataatctattgtactatactcatttattaacaggtatgctgtattagctgtgtacgttagttttgtgattctttagaaattagtgtacgtctgtgatgtcctcctttggcattttggtttttccatttgcttgcacactattgttgtctgcaaaatccatttcgtgtccgttgcttttgaatgatgctggctgtttccccgattcaagtataaaacaatgtacttaagcatatatttatctcttctatctcatactgcttcaaatattgagtctcatggcaatttttacatcagaaacgcaccattttcagctatcgctgaagtgttcttttcagtactatgctttctggcaatctgacttcttttactgccacctcaacggtttcatttctagtctatttggaaccttcatgttctgttttgactggtgcattgcaggttatattggttctgtttcttttctgaacacgata

SEQ ID NO: 81744 - DNA, 645 bp, Citrus sinensis
  Intron number 4 from transcript orange1.1g031054m (locus o range1.1g031054m.g) derived from phytozome v7.0 (chr-ID sc affold00274; pos 158011 to 158655 reverse strand)
gcagtatcacatccttcatctaagttgcaaaaagagtaagcgttcacatgttttcttctctattagaatagacgggctactatgttttggttcaaaggaaagatgtattcatgtatattcccttttttacttttattctttataaattctcaaaaacgtagtggaaaataggttttggtagtatatccttggaagttggaacttaattggttttatgttcctagaagtggcatatgaatgccagtgggctgagatgttttggttccttactgtgaacttttgatgttattttcttatttgcccaagggtttggttgagtaattaagacttacggtttacaatgaaagagataatagttacacctcctgggggctacgtaatcaggataatatatcttgcaagtttcttgaataccaagttgtagccttgtatgaatatagaacttggtgaagtcatgatagagattgggggatttctaggtatgaaatgaaaaaagaaaaaaaaaaaactaaaattgttaccgtactataccgtcatttcgttaacttattttcatttttgaggttaagggattgtcgtgaatatgtttattctgatgggaataatcttcacattttgtcaactatagatacattgcaaccatag

SEQ ID NO: 81745 - DNA, 648 bp, Citrus sinensis
  Intron number 1 from transcript orange1.1g025666m (locus o range1.1g020353m.g) derived from phytozome v7.0 (chr-ID sc affold00001; pos 1259571 to 1260218 reverse strand)
gtgaaaaaggtctgagacagacagtttcagttgaggtaagagcttttttggagtgtcagaatcacgcttacaggtcgtgatctttaaactatgaacagagttctttatttttttttcccaaatttctcgtttattttttttttaagtttttgttttgttagaagttattgttactttgagtagaagattatgaattccaaaatgattttttttttctttgaacttgggctttgtttatgaacgcttaatgaattttcataatttttttaaatatctgtttacatattgtgctctgtttttttttttaaagaaaaaaaatccttaatttcgatttgacgaagtctgatctttaagtatgtttagaaagatgttaagtttgatgttatttagtactttagcctacaagtttaccgatgataatgcttaaagaaaatgttcagctagatgcattttaagtaaagtttttttcttttttgatgattcattttctaatttttgtgtgatacagaaagaaacctagcttaagtcccacgtttgatagatggaagagaatgctacttgcaatttttattttttgacataattttgtaaattaggagttcaattcatttttctttttttattttatgcaggtgaggtctggccgtt

SEQ ID NO: 81746 - DNA, 523 bp, Citrus sinensis
  Intron number 1 from transcript orange1.1g021190m (locus o range1.1g021190m.g) derived from phytozome v7.0 (chr-ID sc affold00012; pos 2089653 to 2090175)
cgttggataagtatgtgactcaagattttgatcttttttgttgcgtgtgtaaattttcaatccgtctaaaacgtgtgatcttcttgtttggatttgatttgattatattttattttttcagtttgtttttggacaacgatcggtttgatcgcgacggagtgtttttgtaataagtacttttaaacagaagcacttcccctaaaaccaaatcaaactgcttttttgaaaagtattgttaagtgtcgaccaattttttaagaagaaagcactccaagtgtttttcactctgagaaatacgtcccagtgttttgtttgtctggaagtgcttttaatattatcacaagaacttataaattcacctgaattgctattgcatatgctagaaatgctaaatggtgctagtaattaatatggaaattcagacccttgtttttttaatctcccatattattattttccaatgttttaattagaaattatttcttcagggtttatctgtcgtcttcaaactccaacacatctg

SEQ ID NO: 81747 - DNA, 568 bp, Citrus sinensis
  Intron number 3 from transcript orange1.1g027617m (locus o range1.1g027617m.g) derived from phytozome v7.0 (chr-ID sc affold00015; pos 1405902 to 1406469 reverse strand)
gccgacgctttgacggtttgtttgattcatctggctttcttttattagtttcgctaagatgtttctattttcatatatatatatatattatatatatatatagagagagagagagagagagatttgtcagaattggatctagggaaaatggtttaagactggaatggaataaaagttgaacccagttgcaaattcaagttcatttgcgtgaactattgtttgcctgaatgcattccttgttaattttcttgtatatgcacctaggaagcaattcaaggatgtaaattatcatgtaataagtttaattttttatcttttcctatatgctttgttgcaaatatgggttttacaaatttgtgactaatggtgtgaaagtgttattctttttgcttctaatttgtaaattgtaatcatagtatttcggtgatggtagcttactaaaaactttatactgtttgatcgctatcttattagttttaggtttaactgctagtcttcagtcatatccttactcgaggaatgtttgatccacgtgcaataggcatcagctgatcaaaggtcaaggtta

SEQ ID NO: 81748 - DNA, 526 bp, Citrus sinensis
  Intron number 1 from transcript orange1.1g014245m (locus o range1.1g014245m.g) derived from phytozome v7.0 (chr-ID sc affold00283; pos 102630 to 103155)
tttctgcataaaaccagctgacaaaattgataaaggcgagttcatttatttctgtatttatttatttttttattattattattttcggaaaggaaaaaaaagcaagattgtgtgacagaagaaaaaaataaagaacaacattttagtttaattgtttcatttgcttgacctttgattggaaaaagcaattttttgaactgggtttgtttgctgaaaaaaaatataaaactattttggaagatgaaataaaatactgtgaatttgtgtacaattattaatggattattgattatagttatgatttttgttgccttattgaaatattttattgaatctgatcattctgattgaatgtatttttatcttgattgcacatatttattgtttttgtcagtttctgcagttcttcaatttgcctgtgtagatacttggttttgactgcttttgatcgagtctctctgctttttttttcatttggatctgatctgcagtaaggaaatttttgtgtgttgatttgttgggagcc

SEQ ID NO: 81749 - DNA, 536 bp, Citrus sinensis
  Intron number 2 from transcript orange1.1g010672m (locus o range1.1g010649m.g) derived from phytozome v7.0 (chr-ID sc affold00032; pos 930081 to 930616)
tcggttttccaggtactccttgttgggttttcagaaatttttaatgctttctgtttcggtaattgcttttttttttggtccacgtttacttgtgagttaggagaaccagtccgagtgatttttgtctttatttgtgtcagtaacttgttactgcaatcactggttcattagaaccagttggatcgtttatctttgttgcactagctaatatactcttaaaggcagtgagttggagttcatgttaggctctcacactttttatgctattttacttattcaataactgataagatttcagtgctagtctcttccttgtaactaaatgctctaaaattaggtaaatatgaataatttgtttttttccttctaaacactatgatgtatgtcatgtgtttacaacataccatcagaaattgctatggatctgcttatgaaactagttatccagcagtcctttgagatatttctttgtcgcttaaaagaattgttttcttagagacttcattctttggaatgcatttatttgtctgcagatt

SEQ ID NO: 81750 - DNA, 241 bp, Citrus sinensis
  Intron number 2 from transcript orange1.1g031881m (locus o range1.1g029354m.g) derived from phytozome v7.0 (chr-ID sc affold00001; pos 4340722 to 4340962)
gttaaagagctctcaagaggtgtgtgtatgctttccatctttaactttgatttttttagtatcccaatttttgttatttcttcatgtatttatttttcttttatatgaactcatttagttaaaccgtaaaaataactttttgaattttttttcttgctttcttcaaaattagaagcaaagtgaacaacagacttctagttaatctgtttcattctcaatttttttccttcctggcaggtgg

SEQ ID NO: 81751 - DNA, 857 bp, Citrus sinensis
  Intron number 2 from transcript orange1.1g000437m (locus o range1.1g000438m.g) derived from phytozome v7.0 (chr-ID sc affold00001; pos 5187202 to 5188058 reverse strand)
agcttctgtttctggttcgggcttcattcatttaggtaaggtaattcgtaaatttgagagatgcctgcacttttggcttttggcttccacttttccaagctggtattcagtcaaaagtttttctcttttgctccccttttctgcgaggcttgttttatgtcgtcttttgtttttgctgatttgatttgcatgattcaacttttctcttttcaaaaaaaaggaaataaaagggcagcatgattgaactcgtgatctctgattttcttttcaatatgcacatggtcaggattttttatttacatattattattattattttaattattatttgcttctatattttgaggaggattcctgcttctttgaagttgaacaatcttttattatttaaacaaataaaaggaaaaaaaaactagtaataatatcagtgaaaagtttggcagtagcttttctggctgcactttcacgtgattttaaacaagaccgtaaaaatgccaaagggtcaaggtcaatagtcaaaactcagaaggtactccggcatcccagtgcaagttagttgcagctggcagtgcagaaggagatttgatatctcctttgctctcgccattactttgcttatgatattttctttttttaaaaaaaaaatcattatcactttcctttttattataattattagttgttcgaatttaatgctcgtaacttgcaatcatattggcgcactgtgcttttctggttcttgattgattttcgtttcctttctgctagaatcttttgcttgtttctctaaaagctctttttcttttgctaatatattttcagggagtgagatatatatataagcacatagaaggatt

SEQ ID NO: 81752 - DNA, 533 bp, Citrus sinensis
  Intron number 1 from transcript orange1.1g036574m (locus o range1.1g036574m.g) derived from phytozome v7.0 (chr-ID sc affold00042; pos 578393 to 578925)
aacaagcacgccaagtggttttcagactcttgcaggtttttaatatccctaactactatatttgcctttcctgtgattggtttcttttcatttaactgattcagtttcatgttatttcattttgattggcaagcagatcggtttagtaacaggaattagtttagctactttattattccttggatttggaccattctctcacttgtttagcacagattctgaagttctggcaattgcctggtctggcttattggtgagtgacttgcactgtaaacagttttctagttcaagacttttctactgttgaataggctttttgtctagtccttttttatattaccaatacattttcctttataaatcctgtggtatgtattgcattaaatgcttcatctgggaggttattagtgaagtcattttcatgtccctcgcatcatgtgattcacggtcgcagctttgtgatggtagacgtaaatctctgaggcttacctgacattaactctattgtgcagtttgttgctggatcccaacca

SEQ ID NO: 81753 - DNA, 834 bp, Citrus sinensis
  Intron number 2 from transcript orange1.1g036574m (locus o range1.1g036574m.g) derived from phytozome v7.0 (chr-ID sc affold00042; pos 578990 to 579823)
ctgcctactctgttccctctctttcctatcatacaatagcatagtgtaatacttcaatttcttttctcagtcgcttatatgtgattgataggtactagttggacttacctcttcagcattcatttttgtgactgctcccatctttggtcttgctggagtctgggcagggctatttctcttcatgaccttgcgagtattatttggtatctggaggtaagctgagttcaggtttcagaatgttaggttaatgtttgattaccatatttaactggtgataggttgtctattagtgaaataataagcagtcatgcattttgtggttaaaattgggtgacgttaagtaacacttaaaatgattattcactgcaggttgggcacaaaaagtggaccatggaaaatggtgtggtctgagatggagaagttagatgaatgaatgttgcagagttattggcatagaatttgtacccatgtgctcatactgtttaatgccacaccagcgaatggcacaaccaagtgcttcaagtatttaagagtttaaacgccaatagagcaacctccacaagtgctctaggcacagattttgtgccgccataattgaagatacatcctatcaagggtatttggattactggtgacaggctttttcgttgacagaagcagcctacagaagttgtcgtctatctgctaaaatatgaggttagaatgattattgaatatagcatttggcggtgagtttagtagtgcttcaccaacttcttccgtctgtcgcattctacagatacattgttgatgttttttcgcggtcgtagctgagagtggatcctgcatttggcc

SEQ ID NO: 81754 - DNA, 528 bp, Citrus sinensis
  Intron number 1 from transcript orange1.1g014658m (locus o range1.1g009329m.g) derived from phytozome v7.0 (chr-ID sc affold00008; pos 478914 to 479441 reverse strand)
acaaggtgagaatctccattctatagaatatgctggatgattgtgtattgtggttttaaaccgaaattttacttgtggcgattgcatggtttgttctttgttaattgtaaagaatgattccagtaggtggtttacatagattgtgacttgaataaattttgtttatttgtttgcattattatggaagaaggatacaatgttacatgtgaaatatcaattatgttgtaaatgttagaaatcaaagaagataatgtgcatttgatgcattaattaccatgaatatactgagaagcatttgtgagacacttgaatagttggatcttgcgatgcattgaccatgcattaccattttccaatttaaacaattcacggaatccacttttgtgatgcatataggtgctgtgctaataggcacttttacattttggctaggttaatgttcctgagacactcctccactatcctttttcttgattcttttgtacagattgctaatatctgtaactatgcagataattcgaagggcaa

SEQ ID NO: 81755 - DNA, 505 bp, Citrus sinensis
  Intron number 1 from transcript orange1.1g030077m (locus o range1.1g030077m.g) derived from phytozome v7.0 (chr-ID sc affold00015; pos 579002 to 579506 reverse strand)
tacttccaggtacttatgttgggtgtttttgttttttgttttcttgcaaattatgattataattatgtgcccgaaatttttgttaataacatcttatcttcttgttatgggagtttgattactaatactgaaattattccaattttttttttcgtttaatccattttaaagtgaagtatttcccctgctataacaaaatgaaaatctttaaacttatattcgctgtaatgttgcaatatcgtaaggttattgatgcttttgactaaataattgtcatgcttattgaggtttttctttgccctgcggcccaaacttaataattgtgtaagttaaagtttattgattgatatgcctgaacttttcttacatgtttgaattttcttgttgacaaatgtggttttgaaggtgccctgatattgttatgtcagcttgttttccttttggtttgtgtttatcttttgtttaatagatttcttatgcttggttgttttttgtatgaaggctg

SEQ ID NO: 81756 - DNA, 728 bp, Citrus sinensis
  Intron number 2 from transcript orange1.1g023685m (locus o range1.1g023271m.g) derived from phytozome v7.0 (chr-ID sc affold00084; pos 214781 to 215508 reverse strand)
atttgagcctaataaaggtgagattatcattcataaatacctatattcgtttgttggcagctgaagtttgttgttgcttctcttattaatttcacccatacagccatattgttgcagtatcagccacatttcatagatgaaaaatgctcatttattaatcttattgagttgtttgattgtctgggtctttttatttttctagttatttttctcatgtgtgtgcatttttcatttattggaatgcaattttcgttatttctcttgatgtgtctaaaagctcaaataaagtagacacgaaaatgggattgtttgaagagctgttatgtgatttaaaagataggccttggaagtagaggagaaaagggtctaatgcagtaatgctggatgctaataacttagtactagttggttttaaacctgatacagtaataatcatcagttaatggtgaaatcagatttaatgtttttgtttttgcagagttcttaattgcttgcttcttaaaaatgctagtatcatattcaattattcatttttaaattttgtgttcttatattttagttatctcccgatcaactttgattatgagaatggtgaaatgaaatagtacttttaattttattttgaaattccctgtttgtctttctatttagtttttcacatcacacttttcttacaatgacatttatatctcgcaaagttctctggttggaacaggtaacataacaag

SEQ ID NO: 81757 - DNA, 687 bp, Citrus sinensis
  Intron number 3 from transcript orange1.1g000139m (locus o range1.1g000138m.g) derived from phytozome v7.0 (chr-ID sc affold00217; pos 14519 to 15205 reverse strand)
agacaagagctaggcgccaaaaggttagtctgcaaaattttattgcttgaatgctttattttagttatcattgcctgtgcacagagaaactagcatttttgcattaggttagttgatcctatatatatccttgctttctgccatgcgtatatttaatcatgatcacgattctatgttaaaaaaatgttctgctatatatttttatattttacatgggtgtgctagttgattcaaaagaagaaacctttggatgtagtacaagaggtctgagttttgattcctggttatatcagggtggtgtaggagttaaggttatattgtaaaaagaaaaattattggaaaaggttgtatatactggcatgatgaaggaggctttttgaggaacctgttgcatatgtgatggatacgtttctctcataattgctaggcatccaaatttttatgtacaacatgaactttcttcatgaaatgagtccacaaaaaaattgcaaatgtcctttcagatgctatgttgttttcaaataacaggtacaattcagttatgcccctatgtgattgtgaaatcatattaagtctaagaagtttattatagtggtacgtggagttttttaccttaaaaattattgaatctttgatggtatcttggttttaggcacttgaagcacccagggaaccacgtcgtcctaa

SEQ ID NO: 81758 - DNA, 884 bp, Citrus sinensis
  Intron number 1 from transcript orange1.1g032788m (locus o range1.1g032711m.g) derived from phytozome v7.0 (chr-ID sc affold00352; pos 14321 to 15204)
gaacagtctaacagatcaagtaaatatgcactgatccaagcctctaaatattgtgtattggtcaacaatgggcaagtagattctttgaataattatatggggaaactttcagaaattcaaaccataatataatcattttctgtatatttggatcttacaattccattatttctatactatatcaatatagtagaatatttcatctaatttcagtgcatacgtaggtcaatgaagcaattaaaaaatcaatagcaaagtcagaagatgagttagtggatagaatttttaatatgcttgcacagggaaataccatgaaaagctataactcttataaccaagcattgttataagcaaacttaactaatagaagtaaaaggcgtcaactacctgagttcacatatcttgcaatccaaagtgggatctttgattgtgctaaaaccttatttaaccttctgtaacctcgatagaaaaacttatgctcgagctagtccgtaatgaccttatcctaaaatgagattatgagtttattaattgatttcttgttatgaaagatacatcatatacttacaaaattgagtgacagttatgtttaagaattcatttattctgttattatccatgtttttgaatttatagattattccactattttgagagttgtaacaaatttttgactttttgtcttatttcactccccccccacccaaaaaaaagaaaaaagggttttgtctgcaatcatttttgtttatttggattttgcttcttgaatgtaaacttctctttccatatattgtgttgacacataccaaaaattgcttctattaggtgtttggggataacaaattaattgtgcttttaggttgtgaattcaaagaacggcggct

SEQ ID NO: 81759 - DNA, 469 bp, Citrus sinensis
  Intron number 4 from transcript orange1.1g003681m (locus o range1.1g001570m.g) derived from phytozome v7.0 (chr-ID sc affold00165; pos 246450 to 246918)
ttgcttccatcaaattgctccggtctacctatattgtaagaaactttatgtttgttatcttataccttgagaaaaattattaatgtaccatgttgtgatttgtatattaattattaattttccttaagttttatgcatcgggttttcagtagtggtgacctcacaataaacactaggagcatgtccagtatgtttgtattggactggataagaatattaaattatttagaggtatacaggaaatggaatgcttctagtttcactttgcctggttctaggccagctaagagattctaagttgagtagataatttgatactttcaactttgttttgatcctaattcctgtgaaactttagtaatttaataccagattggtaagcatagtaaagcaggttactgatattaacttctgcggctgtaggaataatattttcctgatgaggttgtttatattttatttcttaggt

SEQ ID NO: 81760 - DNA, 359 bp, Citrus sinensis
  Intron number 1 from transcript orange1.1g028647m (locus o range1.1g028647m.g) derived from phytozome v7.0 (chr-ID sc affold00250; pos 195033 to 195391)
actctcctcaaggtcatcatcctcggcgacagcgggtcagttgttcgattacatggcttcgttatttatttatctaatttttagtatttttctacctaggtttaccgtttccgtacagattagtttgatccttttgggatcttagttcaacgatatatgatccgatgaattatttgaatttttttagcattattcgatatctcttcacgttcttgcaattctttagttgttaatacaagggatctttgttgtataattcgatttaattgaggagttggatttgtttgtttgttacaattcggttacttcgtgttaattctttttgatctctgatgtgcagggtgggcaagacctctttg

SEQ ID NO: 81761 - DNA, 398 bp, Citrus sinensis
  Intron number 3 from transcript orange1.1g028647m (locus o range1.1g028647m.g) derived from phytozome v7.0 (chr-ID sc affold00250; pos 195581 to 195978)
aagtgcagtttgaagataggctcttcaccttacaggtgattggcaccgtgatagcactgagatgcttgttttaattatctcaattttgattttttttcttcttattcaaagcttgtagattgttcatctgtttatgtcttgggagtagattttctccttatattggttttatgagcagttaaatgctttcattgtcgcattgtcaatacttctctgttatgattgaactgcatttcttcactggagcgcctgctattatattcaattagacaattgatgttatacttgtttagatgtaggtgtaaatatccgattggtcctctttgtacaattagtgttttcaacatgcttctgttttcatagatctgggatacagctggtcaggaaagattccaaag

SEQ ID NO: 81762 - DNA, 588 bp, Citrus sinensis
  Intron number 1 from transcript orange1.1g015124m (locus o range1.1g015012m.g) derived from phytozome v7.0 (chr-ID sc affold00333; pos 84255 to 84842 reverse strand)
gacggtcagattttttttggatctcttcttcttcattttcacagatctctgttaatcttaatttttgatatactgtattcatcagattatttcatttttcatttttttttgtttttgattttttttattaaaaaaagacaataatctttataatcagcttatgcaaccgaacactccgtgctcgttcgatctatttaatcttgattatcttgtttttgtaatatactccgataataatcatactgatttatattagcgaaaaacactatttattaattttattaatttcacgtaattatttacataataaatgttaaaaagcgatcgtataaattgtattattctaatatttttggtatttatgttaatttgatttaataaatgagtgttattatttgatctattattgtaatttttgttatcgtgttaataggcatagaggtacaggtgattgttttaataagtaattttttttcataatcaccgagttagaattggagtattgatattttatggaatctctattatctcggagacaaaattactgacatgtgtttttctcatgtcatcgttaccatggttcaggag

SEQ ID NO: 81763 - DNA, 740 bp, Citrus sinensis
  Intron number 1 from transcript orange1.1g022034m (locus o range1.1g022034m.g) derived from phytozome v7.0 (chr-ID sc affold00020; pos 96366 to 97105)
taacaatccgatagatattgtctcttcaactcctggtaaatcgcttcttttttgtgtgctttaatttattcttccttgaattgtctctcttttgtttggtcgctgagaaaacgcgggagaaaatatggaaagttttgaatttaataatgtagattggtctagacagtcgatagtgttgtttatgagggtcggttggttttcatttggttacgatatgtgaatttttgtttgtttacttcaataattttggacaatcttaggtgataatgatagaaacagatgcatttcccaatttgtttttaatcctagaaaataaaaataaaatctttctttattttgctttgcaagatgaaattgggatcctggaccagttttagagttaattattatacttcacagaacttgatagaacttcgatggctcatggcttcatatagtttctttagcctatcgttttgaatgattaagctaactgcttcattccaacttattaatatgtttatagtagtacagcccaagtgaagtttcctaaaattgtccgaagagtcacgccattgtcttatgttgagttcgactgtattgcaaattctgaacaacaagtagagcaacttaattcattttatgcatgcatatatatttgaattgtttagaaattatattaggtaattgataaagaagattaatgggttaatgttcaatgttgttgcagaggatcctggtcatttgtcaaagcatcggac

SEQ ID NO: 81764 - DNA, 784 bp, Citrus sinensis
  Intron number 3 from transcript orange1.1g032470m (locus o range1.1g032470m.g) derived from phytozome v7.0 (chr-ID sc affold00029; pos 165554 to 166337 reverse strand)
ttgcgccaaaccagaacctacagaggaaaaaccaagtaagtggtttgttaactaaatcaattacctgattcaagagttttaattgctgaatatattatatatgtgtatgttaagaattcctgtgatcattattcattaatctttagttctgtattaatgaattctctatataatggttgtttgatggtttgtatttattttgatggtaaggacacgttatcttttctcttctgttgctcatgtacgaatgggcttgctgatggttcccagttgctagataaatcgaagaaccccatgttttctcaatccacacattcttgattcttgtagtaatatacgccttcatgtatatatgggcaccaatatttgacaattaccttagtttttcaaattattcatttaaaaaatgaggcatctgacaatttgacacttttttgagaaactagtattcatcagctgacatttaatggtaaactttgtcatctgaggaaacagtatgcaaaaggaaaaaagttccttcgtggttcttgacataggcaaagtgacattttgtagtcttgattttcaagacattgaataattgtccaatgcctgattatcctatttctagcaatcaccaggattcaagaaccattatttttatcagatttaacttgttcatgtatgctgatgattttcatgtttatgatgcaagcataattccctgagcattcacatagttttaatttcttggctttcatgcttgtcagtttttccagaatcgcctgtagaaaggtcattgaat

SEQ ID NO: 81765 - DNA, 872 bp, Citrus sinensis
  Intron number 2 from transcript orange1.1g015530m (locus o range1.1g014161m.g) derived from phytozome v7.0 (chr-ID sc affold00358; pos 128254 to 129125 reverse strand)
atcaccacgaccatcttccagactttgctgataaggtattccgctaagtttagcactgaaggttttgagttgtatgaaattccttttgtgatgtggttgtctgcttgggaatatactgttgattgagggaagaccacagctctaaggtgtttggtaaacatatgcaattgtagtttggaagttaagtaattttaccccacagttttttggtgaaaaatctatttttcctttagtaatttcgtcaaaattatgatttataagtcgtattttccaaatactatcaacttttatttcatggctatagcttttatttgtagcaactgtggtttaaagccacaacaccacaaaacccaatggagcctaaatttgtatgatacttttgagtttggagttgcttccttaaagattttaaattggctatactaggttaattttacacgtccgtaaaatgtttatactaggtttattttgcatatgtccttaaaatgtgttccccacgcatgcataatatgttaaagtagtgttgtctgcattatttaaatttcttaaatatacttttgttctcaacctcgctgtctgattatgcttagaatgtatgcttcattggattaagcatgaagatttaaagtagggataaatttgatgttttctttgacaagatatcacagtccacttgtcaacatcaaagaagttcaacagttgggagatcctgtattttagggatttctttatattcagttccttcatttcttcaaaaattgaacaagcatcgacgttgaaaattaatgtgacaattaataacttggttctgaactttggtctaaacgatagacttgaagaaagctgaattgtactgtggttttatctgtagt

SEQ ID NO: 81766 - DNA, 436 bp, Citrus sinensis
  Intron number 1 from transcript orange1.1g013285m (locus o range1.1g011553m.g) derived from phytozome v7.0 (chr-ID sc affold00029; pos 174388 to 174823 reverse strand)
cacaataaggtatatttttcgatcttaatttttgggttttttttcccaattgcgactcgtatttgctggtgaggtgatagattaaattggaaaaaagttagggtttgaagattaaatttgaacctagggcttgtggattttgaatacaaagaaggggaattaaaacttctttatgttagttactgtcacaattaaatagtaggtaagattattgaggagattaggatgtctggattgaatcttttgaaatttacatatttaatgacatgacacttatatacacacttttttttttcatttttgtgaagtctatggtattacattctgctttgttgccaatgactgattaatgctataaatgagttggaaatatgttggttctaacattattttctggcctttgatcaggtcctttcggtggttgggcttctgcaag

SEQ ID NO: 81767 - DNA, 517 bp, Citrus sinensis
  Intron number 4 from transcript orange1.1g025140m (locus o range1.1g018213m.g) derived from phytozome v7.0 (chr-ID sc affold00032; pos 883534 to 884050 reverse strand)
ggtcctggaaaagggtacatcttccttattttgttctcttatgaatataatgtttacaatttttgctattagtactcttaagaccataccgcaggcttctaacttttctaggagaaattgctttcactttgcatatctatttattacctataattagcttcttctttcttttttttttcactcttttcagctaaaactgactaccatttttcaaaagcatgtcaatcagaacatcctccaatccattaagaaactctatcagccgcttctgctacttgacatactttactgacggttaccatcttactgcagcatagaattaacacttattgttattttttgggtactcttttgttgtggttcaaattcatgtttatgagtatacttctcaaaacaatattgatatattagattactatgaactaaaagtaaatcatttattttccaaaattttaaacttggccttggtaagtttgatctgaagaagcaatgtgaccatatatgagcattgacaggt

SEQ ID NO: 81768 - DNA, 308 bp, Citrus sinensis
  Intron number 1 from transcript orange1.1g025140m (locus o range1.1g018213m.g) derived from phytozome v7.0 (chr-ID sc affold00032; pos 884866 to 885173 reverse strand)
tttctcttctcaggcaaccggtgtttctgctgaaggttatctttaatatcaatgatgatatatgtatttcttaattcacgataattatttttgtaatctgtactgttaattctctgatgggcaattttagtttctttctttctttcttatctttatatttcttcatgtcatgcaccttataccattttgaattgagtattgaggttggaacaagaatctcaaggaatgaaaacatgaactttgtttaaatgaatttgtgggctgtaataattctcactaagctgagtctcaatttgaatttgcagcag

SEQ ID NO: 81769 - DNA, 586 bp, Citrus sinensis
  Intron number 1 from transcript orange1.1g022032m (locus o range1.1g022032m.g) derived from phytozome v7.0 (chr-ID sc affold00032; pos 741126 to 741711 reverse strand)
tccacgtttgcgctcctcaatcgtgggttttgtttcctttttattgtttattgccacttttttaaaccaaagttttagttttggcaaatgggttttgttaaagtttttattttggtatctgtgtattgttaaagttttgatattttagtgggtttgttcgtttctctgtctgtgttctctgtgatttttgtaatttgtatgttgtcgtttgtttctcttgatttattatttgggctcttgatttattatttgggtttgtgggtgttatttaaataatgattttttccgtctttctgtgtttagttggctattctttgaattttcttatctgaggcaatcttttgtattcagaatttctcgtgtatggccattcgagttgtctttagcagtttagctgattatttatgtatttttgttgtttttttctcgctatattttgattgacttttcttatctgggtatattgtgtttctgaattgactttgatttgtaggttatttgaattttgggagtcttttctgatttgctactttgtgaatgaactgctttagggacaaatcagtgtcaggtcattctgtgacactcc

SEQ ID NO: 81770 - DNA, 586 bp, Citrus sinensis
  Intron number 1 from transcript orange1.1g017138m (locus o range1.1g017137m.g) derived from phytozome v7.0 (chr-ID sc affold01369; pos 8851 to 9436 reverse strand)
ccagcgattgattgaaaaccaattttaaattttcggtcggtattgcttccctcatcttatggattttccttcaatttattatacattcacttcaattgtgtttctgggtgctcgttatgtgtttctcttttatggttttgattggcttttttctcttcttttttttgaagctcttattttactgcttccaatggttagttttgctactctctcctgacataaaattatttgcttggataacttaatcttttgctattttgttatgttcattttatatagagcgaattcattgtatcaaatgttatcataaatgatgcttgggtaatttgatttagcttttttttttccttctttcataatttgcctgtaggttatctttatttttttttcttttttcaaatttatttgagtctacagaatgttgattctggtttgatcttgtgttactgaactgtttcattcattttgcctagctatttatgtttctagtttattgggcaatagtgattttatttcacaaaattctgtgaataatacttattattcttggtgtggtttaaggtagtgagaagttaacattatcata

SEQ ID NO: 81771 - DNA, 312 bp, Citrus sinensis
  Intron number 2 from transcript orange1.1g010208m (locus o range1.1g010208m.g) derived from phytozome v7.0 (chr-ID sc affold00015; pos 1441784 to 1442095 reverse strand)
gaagagaaaggtatgatccaagtttgtggacgatgatattttctatcttcgtgattattttcatatctgttaatttggattcaatttaatggtagtgagttgaggcttatagattcatgtattgagccctaataattgtgcttttcgtgattatattctcttagtttggcagtaaagaaatatttgatttgtttttcatggggtcataatttcatttttacattgtcatttgatctatgagtatatcaatcctttctcttacatttaatatttcttccagtgagacgagagattaaaatcttgagattgttt

SEQ ID NO: 81772 - DNA, 633 bp, Citrus sinensis
  Intron number 1 from transcript orange1.1g022002m (locus o range1.1g019992m.g) derived from phytozome v7.0 (chr-ID sc affold00001; pos 953015 to 953647)
gacaccaagatttcataaggagttttctcgacgaggtaagctttgtgtttcattggattttcattctttatatcagttaatcttttacgaaatagcctcgaattaatattttctggccctttgatttgacctcgctgcttttatactgtcgtttctgaagacaaatcgaactttgaaatgaaaaaatttctaggcttctcctggagaccctgctgtcaaaatgctttttaattttttctaaattccgtgttctttagtattcttttgatttgtgaatttgttgtgaaaattgttcttgggtcggtagcccttctcagcttgcagccaggggatttttcattttttctataaagataattcagttattattggcatgtgaccgagtgccatagtttgtttcatttttgtcgggatatttttttgccaaaggaaccaaactttagtacagctaatggggcaatatttatcttgtaataggttatttgagtatattaactgttagtttgatataatctatagtggagcttgtatatgaactaaatgtctttgtggtttcttagcatgaggaatgccattcttcttcattttttctgttatctaatgctttttatttacttatctcatgaagttcat

SEQ ID NO: 81773 - DNA, 1024 bp, Citrus sinensis
  Intron number 1 from transcript orange1.1g046708m (locus o range1.1g046708m.g) derived from phytozome v7.0 (chr-ID sc affold00015; pos 365242 to 366265)
gagaggaaaatgtatgtatgcgtgtgtgtgtgtctatatatatatatagtatgtatgtatatatgtatgttaaactatttgctatgtcatttgctactttatcacataggtggaagtcttactttttaattgtataaaatattcaaataaaactaatttaagtttattattttacattagtaagtactaatatattgatttgaataatactaaagaatttaaataatccattattaaattttttaactattgaagtataattataagcaaaataattatttattaataaacttaacaaattaatattgtttatactatcaattaaatgtaaatgttattatttaatattaaaattattatctaaacaaaaataattagttatacaaactttgatttaaatatcatatcatataatattacttttcagttactcatataaaaccatgtgttggcgaaataattaatcacgtttagcattatattacttgttcaacattagtgcttctagaggcataactcagaaaatttcagtgtgatggtatgaattgaatccccttttgaaaccgcatataatatgtaatcctaaaatgctgtacatgttcacacacaaaaatggtgggctaaagggggcaaaatataaaaatatattagaaaagttaattaaagctttgatccaggtgataatactcttaaattaaaaaaaaaaaaaaaaaaaactgttggtggcctacgttgattagttttcgtcaaagggcttaacaaaccttatcactattattaattcaataaaataaatcatgtgtcatcaccctcaatttccgtgtgagtagcccttcatttaagaccctttttctccacaattcacaaagaacatcaaacagctagcgctattaattctttcttcattctttctgcaaactctccaatattgaaaatatgatcagcaacagttactctataatattttcagtcttttttcttcgatttatcagcagcagtgcaactcagcttgcgccggcactgt

SEQ ID NO: 81774 - DNA, 837 bp, Citrus sinensis
  Intron number 2 from transcript orange1.1g033457m (locus o range1.1g033457m.g) derived from phytozome v7.0 (chr-ID sc affold00001; pos 5535469 to 5536305)
gtactccaaacaaaccttttgtcagattcacgcaggttttgctttgatgcatttcgaatcaagttcctctttcttttcggtgctttttgaatttagtttctgtttaaatttcgttcaatggctgtcagaatgttagagaactattctgttcttttttgtatttttggctatttagtcgcagatgattggaaacgtccactttgttttgtaatttaggttacaagaaaattgaagataaatttttcatttccagtttggttttatgagtgcaatgagattatgtctgtaaaaacttctttcgaatggaaaaggcttttgttaagataaaatgactatgctatgtggaagagcacttatcaaatgcttctgtgaaaagtgtgtcaattgcctttctcatcttcagaacacttttagaagaagcgcttttctcatcttcagaacatttttcagaagaagtgcttgtctagaaaacacttcagccttttttttccttcatgagaagtgttttcgtttatttagccaaacactacaaaataaatgcagaaattattgtatctagattgaggcagctttagtgacatcaaaagcactcatcaaatgtgtgcgaatagatagcatttacaagcgagttgagttgagtggaattgatagtccacattttctttgagcataagatatacaaggtgcaagggtccttttttcatccttctccgcttgttttttattttccccacatttctaggaagctggacatatagcaattaaaaaaacttggatttaagtagtatatgtgggttcttagcaggtaagtagggtgagacagaattctggaactgg

SEQ ID NO: 81775 - DNA, 594 bp, Citrus sinensis
  Intron number 2 from transcript orange1.1g008782m (locus o range1.1g008447m.g) derived from phytozome v7.0 (chr-ID sc affold00122; pos 316804 to 317397)
taccactgcgcccgccgccagctgatccaactaaggtgttttatgttacttctacacgctgctctaatgatatctgaaataactacttctcttgtcttatgagatgtacaactggacaaacagaacttttgtttgtattccaggttatcaaatcattactattttttaaagtcatatccctcattgtgttgaaattgatttaaatgatatcgtttcatgtattactatgagatcaattgcatgtcttattttgattacaattcggtaaggctaggttgcgcttgctgaagtgagcaaagcaactttgggtacctgttttgaaaaaccttgcttcagctgagcatctgtttatgctaggggaattatacttttgcgtgtgttaatctaaaacaatgtttgttttgaaagactttatcacgtccatatgtattccagcttattatcttgaaatttatcattttcatatgcatgctaattcgatgattagtgtattcttctagtgccctaagactctgcgctacttcagaaagtagatgaatttcaatgtgtttacctcagggagaattgtaatgcattacatatatttttttgcag

SEQ ID NO: 81776 - DNA, 809 bp, Citrus sinensis
  Intron number 1 from transcript orange1.1g018748m (locus o range1.1g014854m.g) derived from phytozome v7.0 (chr-ID sc affold00001; pos 2219355 to 2220163 reverse strand)
ataatcagtttttcgatccacgatctattgttaaggtaagatatttaccatatttaatttattttctttattatgtgcatgattaaggtctagggtttgacttttgattgagaaaagaggcatgaattgaaacaagaaactttatattctgcatgattatgtcctagggtttttaagatctgaagttaattcctaatagtgatgccatgtttcttgtggaaagatctgaattttttttttgatctttttgttggattttttttttctaaattgatgcatgtagtttaaggtggagaaatggaaattatgcagtgcgttgacttcacgtttacagtcttttgatttgctatgacagtgtatgtgaaataaacaatttttttacctttatgtttcctgaatttgtatttattagaagcctaatgttcccctaaattgccaaaatattgtaagagtttagaaagaattttttttatttaatgtccccttattatgcatctaatttcttcgacttttactcagctaccaactggatggtcggggataaaacttttgccaaattgattttggccttcgtttccatatgataaagctcagaatgataaattaagttttatgtttgactagagctgtttaaatacctgctaacaaatatgtgtaatagtaattttcttattatattatattgtgtaacgatcccccgcctctacccccccccccccctttcccccaaaaaaaacaaaagattatgttgcgatatgatgtctgattgattttctttctttttacttctttgcagcaaatccatcaaa

SEQ ID NO: 81777 - DNA, 477 bp, Citrus sinensis
  Intron number 1 from transcript orange1.1g015781m (locus o range1.1g015731m.g) derived from phytozome v7.0 (chr-ID sc affold00021; pos 1559053 to 1559529 reverse strand)
cttcagcgctgaaactgacagtcctcttcccagtatcaatacgatcatctctctcctctctcttaatttaatgcttatttgagcttgttatgcgcttgttaccctttctttaatgtgtaatatatatacacacacacacatatatatattttagctacttttgattgttgattttgtcttctttagctttctttctttcaacgggaacttgtgactttgattgatgctatgttatgttggttgccaagaaaaaggaggaattagtttaaatgaacatttgggattttgatttttggattatggtcatggatcattattgaacccagaaaaaattatgtctggaacatttaatcagcttaagtgcaatatgaatctaatttacaaaattggctttgtttttttaaaaaaaacttcaattgactattttgtttataaatagctatatatggctttgatatctataggggcaaattcaaa

SEQ ID NO: 81778 - DNA, 491 bp, Citrus sinensis
  Intron number 1 from transcript orange1.1g015073m (locus o range1.1g015109m.g) derived from phytozome v7.0 (chr-ID sc affold00008; pos 2304214 to 2304704 reverse strand)
agttgtccactcgttttatcgcttaggatcacaaggttttccgagatgcgattttgttgatcggtggttttgaatcttaattccgttgatttgggtttgttctttcaaaaaaattattcactttttagttttgttttcgaagtattgatttgggaaacgacccttttcttggcttagtttgtaaatctatattttttaattttctgggcagacatgctctgacataattatagtctatgtattttttaaaattcttgttcaatttcgatcctttttttttcccctttttgatgtgttcttttggttggtttgttctctggatctcgactgttttttcatctctgagtatcaaaattttaatccttttctttcacatgtaaaaaatttcatattttgttaactgaactgatattgcttgcggatttactcacaattgcttgcttttttgttttgcagctcacaagggggtgtattatacttgatttctgaca

SEQ ID NO: 81779 - DNA, 507 bp, Citrus sinensis
  Intron number 1 from transcript orange1.1g029480m (locus o range1.1g029480m.g) derived from phytozome v7.0 (chr-ID sc affold00021; pos 529883 to 530389 reverse strand)
ggagctaatcaaacaaaaagaagaaaaaatttcaggtaataattctctattcatttatattttgaatttatttcataatttcgagcgtcagttcgtatttaatttacttttagtctcattcatctttaatctctatctgtcatggctgctatttatagttcgtcggtctagggtttcttgattcaattacatagtgtaagctgttcctttaccatttgttatgtaattcatgacgattaaacttaatttcgagctttttaactgtaattagaatcaagtttcagtacatgacttaaacgattttctgtttcttttgttgcgaaaatagtggtttcagggatgaatttagatctaattcttgcttgaagctgagatctggatgttgcgagtgttttcagtttctctgtgtgtgtgtgtgtattattgttgcttggatcatttttttcttcatcttgaggtactaaaattcgatctacccattgtcatacaggttttgaaactgaaaca

SEQ ID NO: 81780 - DNA, 986 bp, Citrus sinensis
  Intron number 1 from transcript orange1.1g029724m (locus o range1.1g027418m.g) derived from phytozome v7.0 (chr-ID sc affold05925; pos 430 to 1415)
atcctctcccgcgattactccaaaatcattaaactgtacgcgcgccttcatcagatatttctttcgttcgttttattaatttcatctcgtgttcgtgtgttgtatgctttgagtcttattagtgattttaggaggggtttgctaaaatttcggtttcaagtttcagttgttagggttttactgatgcttgccttggtccgattttttggattttatatgtaaaagatgtgggaaattattgaaacatgctgcttaattttgataattatatattcaatttcatcaaagaatcatatagtggataaataactaggcacagtatctcgggcatgtgattcttaatttgctgagctagttttagattcaatatattgagctataagatggactgcattctataaattcaaatattacaggctgtgagtttagaggttatggcttctggcagacattggatgtctgttccagtttgacctaatctagcagtttgatgacctggtgaagaatggatgtgttcactttgacttgtgttttggcttatagagtaattgcaaagcagagttcccataattccttggcttgtcttatgagtatactgccggacagtgatcttaggctttcagttatgcgaggaaaactgcaattggacaacattattttctaggcactcttgagtcaaaacacaagtcaaagtgaacacatcaattcttcccaaggtcatcaaattgctagttacttcaaaattcatatgggtgctaaaagaaggaaatttatttatttcatgtactcaacttttattttgtttatgatgttcggttcttgtgctgcactgtgtttgttgacttaggatggtcatcccttattcttttgtttctcatattgttggacactttacggttggcaaatggttgttggcaaaacattttcatctgagtctgaataatgggttctttcttttatattttaaccttatgcagggcagacaa

SEQ ID NO: 81781 - DNA, 893 bp, Citrus sinensis
  Intron number 1 from transcript orange1.1g019265m (locus o range1.1g011689m.g) derived from phytozome v7.0 (chr-ID sc affold00246; pos 78874 to 79766 reverse strand)
tcttaggcctgggccaggctgtaattttgcttcttttttttttttttatgaagtttgaatcttgtttcttgtcaaatgaaaagcttggattttcgtttgaattcgtgtaggagaaattgtactacataacagataaaaattttgaacttttgtgctggattgttagttctgtataataatcaaattgtttgtgaaaaatattatatgctctagctatttagaatatttataaagtttacaaattacaaatcttggttcttcttatattcgcgcctttggtaagctttctatttttttttttccccatgtggtatgggcgaagggttgctgatttcgcattacaattgttctttggagtcatcatttgaattgagttgctacattgagcattttggatattaagtggtatagtttgggtatgattcatttgtgagtaactttgtgtagagtacggatatcaaaccggggtgttctaagtttaagataatgatggggttcacgagaaggttttattattagaatcttatgcatggaatgtgcttgtttacattaaaatggttgaattttgtagtagtacctccattcatgtgaaggaattgtcatttttttctttggggttgtaactgtttgattctcaggtgtttaattggtccagaaattcatgttatttttatttgatgctgatgtaaatgccgcatgagataaaaatgttgcagttcaccagaaggctctgtgccaatatttcttatacccgttgaatagttcccacatttattggagaattatctccaactttgatacatatacatgtgatgttatagtattatacataataatcattttatcttggcattccgtgtctgtactggtatttttaggtagatttttctggc

SEQ ID NO: 81782 - DNA, 521 bp, Citrus sinensis
  Intron number 2 from transcript orange1.1g028875m (locus o range1.1g028875m.g) derived from phytozome v7.0 (chr-ID sc affold00039; pos 724134 to 724654 reverse strand)
ttccaatcacgcttgtaagatttttatttaattttattttaattagcagtttatcattaattttattttaattaatattttttttcaaatgatattcatagaatatacagtaatgctgaaaatttcaataattaattttctgttgtggtagtaagaatacaagaattgaataatacccaattcatttccatgagttttttaaatttgttttctcttttttaagaaaagcatgactggaattaaattatataacttcagactccttgaatcatcccagaagattaaacctgataaactaacttagttaggcatctgagttagaaggcagtcaaagaactaatagcttcaatgattcacaattaactctgtcaactgaatgaattaatacatggaaaggaaaattaacataactctcttatttgttttatccctttccttttcatcttagttgatgtccgtgggtcacagatctggtagtcgtattttttattttattgtttctgtgtgatttcagaccgtct

SEQ ID NO: 81783 - DNA, 725 bp, Citrus sinensis
  Intron number 2 from transcript orange1.1g006094m (locus o range1.1g006094m.g) derived from phytozome v7.0 (chr-ID sc affold00030; pos 379481 to 380205 reverse strand)
gcaacttcggtaattatgatattcttttatgttgcctggataccattttaatattcatcttttaatgattccaaaatgagctttttgaatatagaggataaacatgtttgttttcggttcaaatcagagcctctattttcattgcacagactgtttataatattctttttgtagatgatagaataaagaagctcaatcgtgtactctaagcctattgtgggtcttcatatgaacccatgattaatagtagccaaggcattgttgaaatgatctggatctcttgtcttcattgactagattttgtagataggccattatatttgccacccaccatggatttaagactatcaagaacttctttaaatgttgattgtgcacaaaatgggtttgctattcattttattgtgttgattatttatctggaaattaaagtttatttgagtttaaaatattcttcaaaccatccatatgcctaggctagcttagtttattcttttatctgtttgcttcattcgagatactaatagatttgttctttttttttttttgcaattatcgtaaacttcttatgattgtagttttatttgaaattttatttaagtttgtttagctcctttgtattttccagatagatttttgagtatcatgattgaagatgagcgaaggatgcatggtagacctctaattgctgtagtgttttgaaacagacccgcgcttgacagatt

SEQ ID NO: 81784 - DNA, 561 bp, Citrus sinensis
  Intron number 1 from transcript orange1.1g034980m (locus o range1.1g034980m.g) derived from phytozome v7.0 (chr-ID sc affold00012; pos 684372 to 684932 reverse strand)
ttagcttcgttcggaagaaacagttcctgtaaccagtaagtctctctctttgcttttttgtgttcttaatttatttttatttggctaaagaagacaaacaaaaacccaagtcataattgagatttgattctatggccagtcttgttttattgccataatctttttaagtatcgaagaaaagaaaaaaaaaatttcttcttttttgctttctttgttggtgcattgaattcattcattgtgtttgattatattcaattgcccatacccattaatcattagaactgaatcgaagtatagatagtgacgaagaggatttatggtttctaatttgaataaactagaaaaaaaaaatagaattttgagaaaactgagtagtaacttgtaaaattaaaactaattttatgaactactaataaaatttactcgttctttgttaattttctagcacaaagaattgtttcggaattgtagatcattcatataatttgcatgttcccaaatggtgctttgattttcttttttagactaatattgccattgtatggttattttgaacagatt

SEQ ID NO: 81785 - DNA, 809 bp, Citrus sinensis
  Intron number 1 from transcript orange1.1g020648m (locus o range1.1g019182m.g) derived from phytozome v7.0 (chr-ID sc affold00012; pos 104431 to 105239)
tggtaagtcattgttagagcttttgaaaagaattatttttgcttcaattgatgaaaaattacttttttgttatcgttattgttgttgctaatactatttgttttgctgttggggaaatttagaaggcaaaatttgaagagtgaaagaatatatacatttatatatacttcagctatatccgtaattgttgtgcttctgtatgcttttgaaagtgcaacagctaaaatgtttagtgtaagctaatgtttatttactcgacagctaatcatttcagttccctacaattggtacttctatccaacatgtacacctaacgtttcgaaagccattttttacgttgtttttgtggtcctaaattggaattcttattgaaatggagccaaactgttccttcgatttcgagtaatgtaaattccattcttgtcagcatgtggccttttggagtttgaacataaatgtatgcatttatctatctcatttttgtttctgtagttgttaacgagaaaacaaaagtacctttttttgaaaattgggatattacgttctttaagcatcactatactgctttcctgtttgattgggtgaaattacagaaagccacttctcaatagtaaataatcaatcaggcttcttgttttacgttatgctgccaagtaatgatatgatctgtatttgtattcttgaaaggaaagagaaggttacttgattcatgtttcttttgtctcatttagtgattcggtgttagtgctgttttttacacctaatccctttctgtgttttgttaggaataagagacctgagttcactgc

SEQ ID NO: 81786 - DNA, 526 bp, Citrus sinensis
  Intron number 2 from transcript orange1.1g015233m (locus o range1.1g012387m.g) derived from phytozome v7.0 (chr-ID sc affold00001; pos 869982 to 870507)
gcagagctgctgctattcacaaccagtctgaaagagtatgtcaagtttctgccttttcttcttattccttcttttcttttttaacagaaaattttaaaaaggttcattctgctgttattagtagcaagttcaattttgtcaagttttataatatccatgaaaatgaatatacaaatttaaaaatataacggttaaagaggtgattggactataatactatatatatatattatatattatatattatatttgatgcttccttctactttctagttggggacggacagtcaaataagaaaggggacaacgtacgtaacttcttttattaattttttgaatcataaaattagtatatttcttattattttcgatgatatctctcttgtttgatctgaagaaaggtaccattaattaagatttcatgtttcattagtttcactctgttattattttataacatttattttactaaatcaatctgcactattattacttccagaaaagaagggataagatcaatcaaagg

SEQ ID NO: 81787 - DNA, 611 bp, Citrus sinensis
  Intron number 1 from transcript orange1.1g010802m (locus o range1.1g010802m.g) derived from phytozome v7.0 (chr-ID sc affold00015; pos 1591637 to 1592247)
ggttgcttaattcacctggcttcttttcacctcaggtaatcatttgataagtttttgtgttgcttttttgtttttgccttctcgggttcttttgtttgctgtcttttaagctgaaaatggagttattatgatttagatggttctggatttcgttagagatagaggctaatattttgtgaggaaacatcatagtggcttgaaaaactacgttgtttggttcattttagagtcaatgatttgtctaaagattgggttgcttgaattcctattctatgatgattatgtattgctttgaagttgcttgcttgatggtttggaaaattagatgtgtgaatgatggaatttggaaaccatcttgaatcacaatgccttaattctaataagcaagtactttgatattggctccccaggatttgaagcataaatttgtagatttgttaatgagattagatacacaaagagcaatatgaccgcaatggctaatgtgtgtatagtgggtgctaatggaccattctttcttcatgtatcaatactgatacacagcggctgcttgtctttgtatcggtcattcatgtgtttgtatcttcaaatccatacagagcccatttgga

SEQ ID NO: 81788 - DNA, 658 bp, Citrus sinensis
  Intron number 3 from transcript orange1.1g016588m (locus o range1.1g016626m.g) derived from phytozome v7.0 (chr-ID sc affold00358; pos 87316 to 87973)
aggtaattattactttcctcactcatatctaaagaaggctggatgagatgctttggaagtcaaaagtttacattgagtgcaaatcttcccttttcttccaagtaatcataattacaacgttggtaacaacaaccatatatggccttaaaatggatgctgtcaattttccatggcttcttatttttccttcaagttacctaattttattttcaaaatacctatgcaatgtgatagagatcacattgcggtctaaacaaatttttagaatgacctttaatttaagatagtttaattcaaactgtatctcacttctttgtttcaaatataatgtggatgagcttgcactgatcatactgtggacatgttttcttatttttgttttttgatcattgaagttattatgatggttgtttcttaactttagcttatgactcaagcagaataagcgtcatctaagttattagctttcagaatgttggttaatcctctgttattcgcaatcgtgtcctttatacttgttataaatatgctttagaaaccatgggatggtttggattattttcctttgttttcctagtagtgtcttccaccatgtaagcatatttgctttggcattcatcattgtttgctctcatgggacagatttttactctcaggt

SEQ ID NO: 81789 - DNA, 918 bp, Citrus sinensis
  Intron number 1 from transcript orange1.1g000365m (locus o range1.1g000364m.g) derived from phytozome v7.0 (chr-ID sc affold00032; pos 417267 to 418184 reverse strand)
caacgccgcgtgcttgagcggcttgccattactaggtgacgaaggattttttaaattttacttcttttatcttttaatattaaggcgttcgtggtaatgagagtgttagttttttttatagtaaaataaaataaaacagaattgaaatttataagtgatctcgcatctcagaattgttttctttgttagatttgtggatagttcgttttgttagtaagtaaaacaaaaatattggaaattattagtgaaacttgtgagtaattgagttgttttttttttttttggctttttgatttgttaacttgattattatttcttagcgagagtagtgtgataagatacagcttgtgaactttaatgttatagggagtttttcttgacaagtcatggggaaactagtttttcttgtcctatgtgcacatagatattgggaatggtaaatttaacaagaatttctttgtttgaatatagactttttatttgcaaatgttgctgaagatggcaaggtttgaaattcatggttttcacattttaattcaatcatgtatggcttatccaaagatgaaacatgtcaatgattacagatggaacatggaagttgttagttcaactgtaatttttctgctaaaaagagaagacaaagttggtgcaatgatttggttagaaattggtaatagttattttgtttgttaatgatagttgaatgtttgctctggactttgagatcttgatcaaaaaaatagatttctttatattggattaaaaaaaaaaggttattctgggctaattgcgatgattaagttttaaaattaaaacctattagcttgttccaaagctatcaattacagattgcgatggcttttaacttgttgggtaattacagatcgagtggaataacacaaagtcagcttgctaagg

SEQ ID NO: 81790 - DNA, 650 bp, Citrus sinensis
  Intron number 2 from transcript orange1.1g015873m (locus o range1.1g015873m.g) derived from phytozome v7.0 (chr-ID sc affold00001; pos 3946805 to 3947454 reverse strand)
gatctggtgcttgtcgttattttgagcatgtgatttgtaaaatgcttaattactggatgcttatgtcattttcattgcatcgactgctggacctcttcgcgtaattgaagtctagcaggtgctcgaacgtgttaaagagagtttgtgggatcttaaatgaactaggtggaggaggagttatataccgtacacttttctaatttttcttgtttgagtagtttaactttttaataccagtagaattttcttcctcatcatctagaaagtgattgatgataagaggctattgtggttgacattgttttaaataaaaatcaatctgttccttgattccttcttctttgcaactttatgtcattgagtgcttaaggaatctggtgtgagtgcgttattcctttaattatatatttgcccttgaaagtaaatgacagtgcttgttagtcggtttgctttgtttgtaaaatattccatgtttgaggaatttcatccaatcttgactatacttctttctattctttattctgtattctaagatatcaagacctatcatctaccgcaccaatgatgttcttttcacttggaacctgttattaattatacgatgtgttctgatatgctttttttttattattattctgtagcttgataag

SEQ ID NO: 81791 - DNA, 987 bp, Citrus sinensis
  Intron number 1 from transcript orange1.1g031725m (locus o range1.1g031725m.g) derived from phytozome v7.0 (chr-ID sc affold00129; pos 85609 to 86595 reverse strand)
tcctttcgccccgggtcttcaacctattgttgcgcgtaattctcttgttctttttctcattttattttacaataattatgcttttatattttaatttattagttttcttgtgtatgcaacagtggcatgttccttagaatgtgtacaaaacatgaatgaagaactaataattaaaaaaaaaaagattttgcaatctggggattaaaattaaccctgtgttagagcattttactttgtcatattagtactttacaatttatattaatgaaacagctgttgagattaacccaagtgtttggacttgggtttggttgaaatgatgttcgtgttaggggagataagtttgtcatttatcagtttctgctaatcaaacaatgtagggaacctatagaacccaatagctgaggtattgttcacatgggtttcttgattactcaaggttgtcgattccaacaacagccccctgtttaagacccaatagggatttttggatccaaaaaaagtgggctcgtcgaatgtgcgtgtatgggtaaattagaggctaaggggttatcgtgaagctcagaatgagctctggtctacatgatggttaactggtgcagtgtaatgtaagattgatattaacacgctgagtgatgatgtgcgtttactgggtgtcttaacatttgctttcactgttctttcattgtacttttttgctgaaaatttgatttgtgtaaaagaattcttttgtatttgtcatttagaaatgggctttcgttatcgtccttgggtaaaaataatttttaagaaattttcatggtgcctaccgaaaatgatatttataagataagcatgagttcatttagatctcttaataaccattcacatccattttacttgaatttatcagaccaaaaccgaaatatggctatctacatattttcactcataatttaatatattttttcaggtagagtgtgccccttcactggaaagaaatcaaac

SEQ ID NO: 81792 - DNA, 664 bp, Citrus sinensis
  Intron number 1 from transcript orange1.1g030888m (locus o range1.1g028664m.g) derived from phytozome v7.0 (chr-ID sc affold00144; pos 208445 to 209108 reverse strand)
cggcagcgtcagctctgaatcattcactctccttcgtaagttcccgtcagtataaatctctctctctctctctttcgattcaatgttaacggaagcctttaatagttggacaagggtgtatctggtgaaaaacgttagacgtgtttttgtaaaaatgcttttttgaataagaagtgcactagaagtgcttttgaggagtgaggcctttttatcactgctaaatctgaatactatacagcgtttttgtgactattgcacggttgtttggatgaaatagccgaaattgattttagggatagaagagcatttagactttagagttccttaaggatagaagagcatttagacattagagttctttgaagtgcttaattggtgcttttgacactgctataggtgtttctgaaagacaaactatttcgtgactattatatggcatttaaagtattcttggtggaaaacttgataggtattattctaagatggcttctgaatgagagatgtactagttaatgcctttggagaagcacctgatgagtgcatttttctgaaagcttccaaggcaaaagtgcattctatgaaagttatctaaatggtactagaaaatggacaatttttgatattcttatagtatattttttaatgattgttgcagggtttgctg

SEQ ID NO: 81793 - DNA, 616 bp, Citrus sinensis
  Intron number 1 from transcript orange1.1g000110m (locus o range1.1g000110m.g) derived from phytozome v7.0 (chr-ID sc affold00832; pos 59200 to 59815 reverse strand)
cttggcttgttccaagaggctaagtgttggttcaggtgattttcttatctatttctaaatgaaattatgtttttgcgtgacgtgaaatgttggctgttgattgttgtgcttttgctcaactttgaaagcgcagttactaaactatttgataaacacgacagtagatgtagatcaaaagccccgacacctcattccaaaatgtagctttaagaaaattgagattgtggttatatatacttttaattattattatggctttctggcttgcatgtgatagttctttgtttgtttgtttgtttgtacatcaaacatgcagaaaatagagtagttgaacctcgctattttctagggtattgttgtactgaaaattttgatgcaaccttccgtgacttttacgagcgaactgaaaaattcattggcttaaggtcttaagagaattgattttagtttcagggtgctatcagagtggtgtctatgtgcttcttaatatgcaaaagtatgtaacgactttggattttaattttgctagaaggtttaagcttgctgtttagacttcagatattggtgtgtagttgatcgattaatttatctgagtttgaatatttcagggtattag

SEQ ID NO: 81794 - DNA, 408 bp, Citrus sinensis
  Intron number 2 from transcript orange1.1g030502m (locus o range1.1g030502m.g) derived from phytozome v7.0 (chr-ID sc affold00758; pos 9286 to 9693)
aattctacgggaaaagggttaccttcctatacaaggtttgtgattaatacagttattattgtttaagttgagggtagaagatagggtaaacatatcattaattgggaataaaattatggctataccataataaaatttatttaagttgattcattaaatctatgatcgtaaaaaatacaactcaggttgtaaacttattttattaaaaaaagtataagttcattctttttatttcattttaataaataccaaatgctattgtgattttcatttgtgtttccctcagatttccaattggaagcacctgtgatagagtttccaccactgagagtcaaagatattccacttttaaaaacacaagattcaaacaatgctgataaatttttatcaattagggataatcagata

SEQ ID NO: 81795 - DNA, 872 bp, Citrus sinensis
  Intron number 2 from transcript orange1.1g044014m (locus o range1.1g044014m.g) derived from phytozome v7.0 (chr-ID sc affold04286; pos 3635 to 4506)
taattattattgctcgtagtgatacaatgctgctaccgttgctctctctctctcagtataaatttatagtcttaagattttgcattaagaaaatgcacgtttttgtaattacagtggcaaaatgttaaaataggcttcgctattggggaaaaaaagaaaacaaaagaaaattttcagttttacattccattattaccctggatccaggagtggcaaaggttcaagttttgtacagcaatgcagggaaaccctctgtaaatccaaatccctatgagagggatcccacttcatgaaaaatcttgagggttttgaattggaatactctggcaggttagaagttgtgtcaattaattatctataaaatatatgttacattatatgactatatagtgattcattgtgcgatactaggacatcgcaaagagctaaaaatttcagacaggtttctcccctagatttggtgaaaaagtgatggatagattacagttaagctttatagcaatttgtaactgtaaacatctagaaggctgggactaaatgccatttgattaggttagaataatatgagatgagctttcaatctatgtcattcattcaattgctttttcagatgtccacaattcatcatgttgataatatcctattggtgcctagtaaatttccttcatgactatgatataaggtgttatggaagaattgaaaacatccgatataaatgagtagctagaataggctctggattaaaagaaaaaaagcaagtttatgcctatttcctttctgtttcattagttgattatagaccattaattacccgtctttttttgtttcggttttgttttgcggtgatagtgcccagatgtaatgataggaaa

SEQ ID NO: 81796 - DNA, 653 bp, Citrus sinensis
  Intron number 1 from transcript orange1.1g014319m (locus o range1.1g014089m.g) derived from phytozome v7.0 (chr-ID sc affold00105; pos 35713 to 36365)
ccgttaaaaaatcattttttttttcaaatttggtaagaatttatttagaatcatcatacccatttcatcatctcttaatctctccatcaaattttgctcagttgttgtacgatcagatttgttaactttttttaatcttttctttaatttgtagaaaaagttatctggggtgatttcaaaatttgaaatttgtgtagtcacttgaaattcagcttgctttgcttggtgggtttgcttgcttagagattctttactcacaaacttcgccaattttgaattctatgcattaatattaatacagtgatgagctcttgtgatctgtttgccacctaccattttcatgattctaagttgcttcatagttttgattatcgggtccgggttgagttcaaatttctttactctcacatttttctttcgaaaaatttctcctttaatgctaaaacatacaagtttttgttacatttttattttttatttttattttttatgtttactgacgaagaaagtaaaaattgtcatgctttacttgtgatgcattcttcttcttctccttctttgttttttttttttttttttttttttaatttctaatgtattcatctttcttatgtgcagaagttgctacaacttttgagttttgaccaatagtc

SEQ ID NO: 81797 - DNA, 642 bp, Citrus sinensis
  Intron number 1 from transcript orange1.1g021888m (locus o range1.1g021888m.g) derived from phytozome v7.0 (chr-ID sc affold00021; pos 1586808 to 1587449)
tctccgatctggctcacctcgccgacaaaatttcggtaatttcatttttaaatcgccacgacttagccatttttggcagtaggcaattttagttatgaacaagaaatatatttttattataaaattgaaaattttcttctgctctcacggattcatcaacaacatacatttcatttttttatcttatagatttagttgattttgaactgtaattgagaggtaaaaaaaaaaaaaaacgctggtgttgctttatatatatataatcattctccagtagcaagtcacattgtttttctacaattcaacaccaaattgttaacaactatataaaagtccagattttattgaatatgaatatccatatggaagaaaaattatgtatatattatgatgatagcagctggtatgtcaatctgattgtgccggtgtaccgtctgtttatgctaagaaatagtgtgcaatctaataatggtgggcgtcattgttttacataatagtgtgtaactattcggatgatgttgtgcagttgattttttgggaaaaccacaattttagtctttgatttctgcttgggagaattttgttgatgttgaagtagttttttcatgatattacagttttacaagcgttctgtgcctcagt

SEQ ID NO: 81798 - DNA, 403 bp, Citrus sinensis
  Intron number 1 from transcript orange1.1g016102m (locus o range1.1g014082m.g) derived from phytozome v7.0 (chr-ID sc affold00217; pos 191372 to 191774)
gtcccattccttttttcgctgccggtatcagctcggtaataattagtaattgataaaattgattaagttctctcttgtgctttcaaaatttattaaaaaaaaaattgttgcttcgttcatgattatgatcttaaactgtatctgtgctctagttggtcaactgcttctataggaaagtttggattttgattacatgaggattcagcttcatataatttcttcttcagtgctgtggcacttccatttcatgtgactcaaatatttttttcactagtctgttttttcgactattattgggtgcttgcttattggtttaagctttttgggtggagatgtcggttgacaatctttctctctcgatttttcaggttttacacccgaagaacccttttgcaccgacctt

SEQ ID NO: 81799 - DNA, 600 bp, Citrus sinensis
  Intron number 4 from transcript orange1.1g018223m (locus o range1.1g018223m.g) derived from phytozome v7.0 (chr-ID sc affold00172; pos 62301 to 62900 reverse strand)
ataaggaataccagcagaacaaacctacggatattgtaagtgttcactccttaatattgcttttgtgcaatgcgtcagtttattcatacctaatcaattccaatttcgcaatgcatgtatgtaaatgtgaagaataggatcgtagctcagggaagagactgcgagtttagcatttggaaatgaccttattgactctattttaacttattctattgttatattctggttggaggtgatgaggtttgatttgtcttactgatccaaaacaattattacatattcactagtttgtacaaccatagaggatacttgtaaccaatttcatttgttccggtagctaccattctaattttattattgttgggtgctgcatctaattacagtcttagctgtggtactcaaattttttgaatcacttttctcttgtttttgttctggaaatgaagggtatcattgtttttgttgattaaggattacagctgtaagtaatttaaaacacttcagcaatgttcatgggttctgattgaagatgactgttgttttaccgatctacatgtatttgcaggtttgtaaatactttttagaagctgtggagaagaa

SEQ ID NO: 81800 - DNA, 816 bp, Citrus sinensis
  Intron number 3 from transcript orange1.1g038307m (locus o range1.1g038307m.g) derived from phytozome v7.0 (chr-ID sc affold00507; pos 43311 to 44126 reverse strand)
tggatacagagcatcgagtatcttgcatcgaacaggtatgcttgtatgctggaatagatttagaaaaattgtaatcgtattgattccactgagaatataaagaaattatggtctacacttagaaaaaagaaaatgggtaataatatctacacttaattttcaattgacttgaatgttgctggaatcattggttaagaaatttgaaggacgagtacgtgtcaatctttttggattggttgcactgttgtatgtttctctaatatgcaatattttccttgcataagctaaactgccgtggtaaaagggcaattgcttatgagggctatccctggaaattttacgttcatcgcattagttaggaactattagatgatcacgccatatttttaataacgtaaatcatagaatctgaagacataaaaatgaaactcacatggatcaaatgaacacatttaatatactgacattcacatttaaaagctctgccgtttgatcttggtgaacgtgagagagaacatgctttcaattcactgatgtggagtgtgatgataagtgataacccttttaatggggttaaagcaaatccggatccttaaattttgaacttcagttgtgacaatgacctcattattgcattttaattaaaaatggcagagtaacagtctttctacaaaatattcaattttctaatatagataggtatctctctgattttgtcattcacggaaagcaaaattaacattgaatattgtcattttatttttgaacttattgtgatacgttagagactacggacttgccaagagtatattgatc

SEQ ID NO: 81801 - DNA, 488 bp, Citrus sinensis
  Intron number 1 from transcript orange1.1g038307m (locus o range1.1g038307m.g) derived from phytozome v7.0 (chr-ID sc affold00507; pos 44363 to 44850 reverse strand)
tgcagcagagcttgctgttctctgatagtctcaaggtactactgtttctctacttagtttttatgttggattgtatgtctataccagtttccctatatagagcatacagtatttgtttcatgctactaatagctattactaaaagttccacccaccttatcattgttggaatttgaagccaaatcacttttaagaaaaggaaaatgaaaaaaataattttgacaaataggggcatatgtcttcaaagccaattcttgtttaatcatgctatacttgtttatttgatttaaacggtggatagtgtgtcattttcaaaattttactcagttttcaacaagccttgtagtagatagccgtttatggaagtacaaaagcaccaatttgtgatagatttgagttgttttgggaatatttagtatggtcttttttaactcaagcaactttgcttttcaggatttgaaaaacctgcgaacgcagttgtactcagc

SEQ ID NO: 81802 - DNA, 949 bp, Citrus sinensis
  Intron number 1 from transcript orange1.1g010675m (locus o range1.1g006788m.g) derived from phytozome v7.0 (chr-ID sc affold00008; pos 1199112 to 1200060)
tccaagacccactgtccttcttcttgatagaggaggtattttcactgttactgtctctctctctctctctctcttaaaacattttctaattaatattgttttcttttctgtttctcaagtctttgaatctagaaaaaaatgggttgccacagtataattcttttttgttgggttgacttgaaattttttttctaagttgacttgtttgttgagagtttaattgattactcactgaattaacttttttatgtagtcatgtttattttgattcagtttcatgaacatttagttattttggtaaggaggtgtttgatggttcatgaaaaaagaattgtttaagcgattgctttcagaagattgatcagttttagaatgggtagatgtcagtttgcttttgttattgaataacaatgacaagttttctttaactgcaacagatctttcttatagaataaataaaattcttggttttgtttccggatgtttttaatcacattttgaggtgggtgctctggctttcccctgtttttccactttagtttcttttaatatcctcataatcatgataaagacaacagatgggaaacaaatattggtcagaaagcctatgctccttcactttgttgcactatttaagtgtgattttggaatgattctttcattgattaaatcagatacatattttattctttcttttgaagttcctgtatatgccgtttggggcacataatttgaatcttcattgaaaatctcatttttcctttataatggatttgtttgattttatgaatcacaagacacataatcctggttattatttttcttccatgttctacaagtagttcaatttttgtccaatgaaagtttgtctgaatttctattttgacgattgtaaacaactgaagtaatgcaatattgcactcttagagtgctactttgccttgaaggt

SEQ ID NO: 81803 - DNA, 811 bp, Citrus sinensis
  Intron number 3 from transcript orange1.1g004986m (locus o range1.1g002146m.g) derived from phytozome v7.0 (chr-ID sc affold00144; pos 158797 to 159607)
ttggcctttcccgacatcgtgctttgcttttcaaggtcggctgtttactgacttgttatatttaatttaatcaagcttcttgagccatcctcattgagccaagattgttatgatctacataaaatagtatgtgtattcttttaaatcatttcattttccaatgcatataacactcagagctattgaaccatttttacttaagtaatgcatgtcttggttgcttgtggcaaggcgtttcagttgcttggtgtgagcatttaaattgtgttatttatttattttattattattgtttgaaggggtggggggtttatgacgagcctctaaggagctcgaaattttaaactttgagtgttgaactagccattgtccctcgtcttgatttggggatttcttgcatggtgtggcactctcaaatgtcccttcactatctgaaaacacgatgttgtgtatgtttagggataatttacaagttttaaggttgaaaatatttggaagatcttaaaatattggtttgatatattatgtggctctgatatcttatgtaaatatccgtttcattcctctagtatttgtcattctatgtatggaactgtttagaatgaagatattaaaactatccactgaaagcatatattttgtctaagttctgttttatgaacttctggagtggtagttttgcttaggttatttggtaatcttattattttatgagactatatttatgtgtgtaccgtatctttggatatttaacttatttgtttacttggatgtaggtattggctgacagtataaggttaccttgcagact

SEQ ID NO: 81804 - DNA, 647 bp, Citrus sinensis
  Intron number 2 from transcript orange1.1g019983m (locus o range1.1g012127m.g) derived from phytozome v7.0 (chr-ID sc affold00103; pos 71990 to 72636 reverse strand)
tttgaaacttctcttttggggtatcctgttacaaggtcagttttatttaattttgactactctgccttcattttgttgtttgatgaacttaaaagtaaaatccaatctagtgctaacatgtttaggctttaagccagtgtacatctatggcacgtataataaaacatttcatcaatttaaagagcattcttgtttctttgtaggcaatgaccagttgttcgatgaaatcatggtttcactttcccattttttcaaaaaattttgaattggaaatggtgattggttgagaattgctgtatatgtagtgaaatgtgaattaggaggtgggagtctatttgcatctctttattttggttaaggttgtggcctttgcattggaagtatcaatcaccattagtaatgatttgatcagctacatgtagatagaatctagttgctattgtgagtaagtgatcgctgctttacaatatctgacaatcacatgaacatagggatgtaatttctttctttccaggaaagtccaggtggtctatcacaacctatcaaatagatagattatcaatcttttctttttcaacctgaaaaagattcatgaagaaatattttgatattaatttgcttcttatcttatcaaggtggcttctctc

SEQ ID NO: 81805 - DNA, 645 bp, Citrus sinensis
  Intron number 1 from transcript orange1.1g001098m (locus o range1.1g001098m.g) derived from phytozome v7.0 (chr-ID sc affold00251; pos 200903 to 201547 reverse strand)
ggcgccattgccggttctctgttcagacacgtgaggtacacaatacatgtttattactcagtaaaaagtaaacagtttaaaatattttatgtggtacagtttaaaacagtgaaaaaaaaataaattcggaagttatggaattttatcatacacaaaaattagttacacattacttagaatgaaatccattgagatatctcttagaagtgtattggtagaaataatatggtagtttggtgatgaatcacttgacttagtgtcactagctttactcataggatatttagctttcgagtaattatgcaggggcttagtttgctaaaatcaaaatcacggtctgctactttttggatatagagttgctaaaaaaatcatgcaactctccgtacaaaagatgagcttttttttttcttttttctgtttaaacgcaattatttgtactgaagaccttttaatttgcagtaggaggagctgaggaactaataattttcccaatcacatgtttatagtataaatacaatgagtaaagcaccaaaatacaatgagtggtggttctttaatttttgcttcagtttgtctatcttgctaatgcagtttaagtcatctgcagttgtgattgggaaaagaggaagtccgtgcttcttg

SEQ ID NO: 81806 - DNA, 312 bp, Citrus sinensis
  Intron number 4 from transcript orange1.1g030541m (locus o range1.1g023298m.g) derived from phytozome v7.0 (chr-ID sc affold00521; pos 60388 to 60699 reverse strand)
gagtatcctttctgtttgtgttattccccacagtgaaatcaatctcctccctttcttagttgctattgctacatgtttgttcttgcaattattatttatgattaatggcttaaaaagattggatttttgtgacttatctgttttactaatccttgttagttgcttttgattcaatgcatgtgatcatcccttgaagcctgaagagagggataaattttacttaaatatttggacaatgtttattctatattttttttttcatggatatgaatgaccttaatccccttattagacatttagaagataatctgg

SEQ ID NO: 81807 - DNA, 201 bp, Citrus sinensis
  Intron number 2 from transcript orange1.1g010409m (locus o range1.1g008242m.g) derived from phytozome v7.0 (chr-ID sc affold00032; pos 848814 to 849014)
cagatcccagtaagtaaattagtttcctgataatcattcttctacttgtcataattatctttatttttttctttttgagaaataattgatcttatatacacaaacggacgttcattttttagctagatatatcttttcttaattcaaagttggcttatgaaaactccattgttgtaatgggtgtacatacctttaggtgtt

SEQ ID NO: 81808 - DNA, 629 bp, Citrus sinensis
  Intron number 1 from transcript orange1.1g034244m (locus o range1.1g034246m.g) derived from phytozome v7.0 (chr-ID sc affold00015; pos 1737243 to 1737871 reverse strand)
ccagctactcggcaatagagttgagagttttgactgtaagcacactctattaatacccttttctctttgttgccattccattggtgccttttcttttcttcatttttttttttggcatatattataaactgatgaagaacttgagattgagctaaaggttcattattttgttttccatgaaatgatagtaatcaagttgagattagatatttgctgcataatttttgagttttctggttagtatatagcgtcggataaatgacatgattgagaataattgcattaatgaatgctgaatcgagtaatattaatgttagaattttgtacaattaatggttattgacgtacacaatgaagccctttgtatccattaattattagccacttgagaaaccattttacaggactactgaatcagtttaattataattgtaaagatatcttcagctatgaaaattgaaacgtaatgcataacctagcttaattctcttgaagaacataaataaattatattttaattcattggatttgtttaaacaatatttataatccaagaatcccatttagaccattgtcaagattttgataagtatgaatgctgcaatcacttcatcgatttgcaggtaaaa

SEQ ID NO: 81809 - DNA, 815 bp, Citrus sinensis
  Intron number 1 from transcript orange1.1g005138m (locus o range1.1g003528m.g) derived from phytozome v7.0 (chr-ID sc affold00032; pos 757463 to 758277)
ggtgcgttttacgtcctcctaaattttaatttatctttatctctgatcttaatcctatttatgccgcatcttaattcgctaatgcagaattttctgtctcgaaattgccgttttcaagctgatccgttgttgcattagttattaatctcgttttcatcaaatttcaagagttacaacttacaatacgttacatgcgttttgttttttcatttatgaatggccttattatttttttttgtcccgtaatttgagtaaatttaatctgatgtgatgtgattgattgatttgcaatgatttgatgttgattttagagttttgagctgtgatttagtctttaaataatgaatttgaagatttttagctgtttggatcaggaatgaggtgtgttaaggaatttttgtttgttcggttcctgaaaaagaagataaggagatggaaagaaaatataaggttaaaatttgtgtatctgatttgagcctacttttacggagtatgttctgggagtgtcagagtgattagtcatttcatacttaaatattgaaagagttgacatccaaaaacttatatatcctaatgtgatcggtttctgaatattctacattggaattgatatggaaaaggtacgtgttatcaacaatttttttgacagaaaaaattattgtcattttgtttaaatttaatagagttaatgtctagtgcttctttttttctgttgatttgtcttctatgtgagcatgttgaagtcatagaaactgtaaatttcattttagttactaacatgtgtacatgtttggttttccagcaaagggcgaaga

SEQ ID NO: 81810 - DNA, 602 bp, Citrus sinensis
  Intron number 1 from transcript orange1.1g035369m (locus o range1.1g034548m.g) derived from phytozome v7.0 (chr-ID sc affold09061; pos 214 to 815 reverse strand)
gaggtatatgttcttttccattttgtaaagttaatcctcctgggttgaacgaaatatccagttttattacattgtttaaaataattggaatagtgtaggagtatagcttgaggaactgattgtgaggcatagcttctaacaccacttgaaacactagaaaatacctttgtccgatgattgattggacgaaaaatatggttatcttgcctgcctcattgtctcattcccttgcacataaaggtgtttttgtttaatgttagatatagaataagtggatatggtgagtagattaataatcttgttctacagttgtttttgaatcctggacctctagttttagattcccaacagctttttgcaagaactaatctttgtgctattcttatagacagtttacaaatttggctttcttttcttttttctacattttaaggattatttgggcttgtgaatcatgaactggtagctgattgacatctttcttttgcagtttattttttgattgtgaatgagtcaattattactgttttttctgttagtaaatgatgccttgaaattatttttcagacatatcctcctcaagactggctagtgggtgaatc

SEQ ID NO: 81811 - DNA, 416 bp, Citrus sinensis
  Intron number 1 from transcript orange1.1g009364m (locus o range1.1g005936m.g) derived from phytozome v7.0 (chr-ID sc affold00103; pos 447551 to 447966 reverse strand)
atcttgattccggcgagcttttagcggtgaagcaggtcctgttattttttaattttgatttttttttgctattgttttttcttgtcgatgaataaagtttgatttttggatatagagtttggtttttgatgttgcttcttgtcaattctttagtgggcactctttgtgtttcttcactcttttgcgcttgggttcttattctccaagaataaagtttgatatttgggttcaagcttggtttgttgagttgcttcctgtgaattctttcgttggtgttcttaattatatggttgcaatttgtatttaaaatataagtcatgtaattttggtttattttgtactagggtttgatagagtttgtttttcgttgttctttttcaggtcttaattgcggcaaattttgcttcaaaggaaaa

SEQ ID NO: 81812 - DNA, 507 bp, Citrus sinensis
  Intron number 2 from transcript orange1.1g007123m (locus o range1.1g007123m.g) derived from phytozome v7.0 (chr-ID sc affold00029; pos 444373 to 444879)
taaacggagggacgtttgcattacataaggtgagttattttgctgtgatttattctgaatttgttcaacaggtgatgtatatagttatgaatcttgcatcttgcagtgcatggaacttttcttctttttttttcttttccaaatgagctcacattttatttcacttcttgatgtaatcttaccaatcaaagcttaagaatgagtagaatatgcactagtgttaaagccatctaaatattcttttttccttttattggttattcttgagaagcagtgctacctgtcaaaattttgtgtctgaccagattggaattaattttcaaatcactcctagttccaacccaaccagactaaccagatctgattagatgagtttctttacttctgtattttgtaccactctctgtgaagcatatttctcattattaaatacttaagagtgatcttaattgttgatgaatggtgaatgcagttcccacttgtctctcgaagtgggcgtatccggaa

SEQ ID NO: 81813 - DNA, 602 bp, Citrus sinensis
  Intron number 2 from transcript orange1.1g007898m (locus o range1.1g007898m.g) derived from phytozome v7.0 (chr-ID sc affold00032; pos 829944 to 830545 reverse strand)
cgactgtggaacccttttctcaaggtaactaataatcaatcccaaaaataatgtttattacatagattccatttgaacatttcagtcctgtttatggaagggagtcggaaatcttcattgattgagacttgcgcgaaagagagaatgtctctttagtctgtccaaaaatcccatgtataatctttgattattcacactaatgagttttttacaacacataattcatctatgtttcagctacaagtactactcctatttaatttgataccctagactctagactctagagagagagagagagagagaatgcttagaatggataaatgaaattcaagagtagcttatgtggacaatttgtccttagctaattcagcgaaaaaataataataataatggatgcaaaaagagagagagtggggaaaaagatgatgaagagtgaaagaaagtcaaatatttctggcattgtcatgttaagcactttatgacggctttgcttttgtttgcttgtgtttgagattgttttcttttgctgggttttgatttttttttttttttttttgggtccaggagagatagtttcatcacgcacagagctttctgtg

SEQ ID NO: 81814 - DNA, 622 bp, Citrus sinensis
  Intron number 1 from transcript orange1.1g004811m (locus o range1.1g004812m.g) derived from phytozome v7.0 (chr-ID sc affold00020; pos 1120103 to 1120724 reverse strand)
gctggtttgtgaggtaattacttttttttctatctctctctctttctatagctttcttgttattctttttatcaatttcttcttctttaagttgaacccagtaatctttttattctgttggaagatttgtttttgctattggatcagcttgggaggtcagctgcatgtattttttaattcatttgttatgatattgagttattgtttatgaggttctgttttgatttgtttgattattatgccatttgtttgttgatgagttaacaacatctgggtttgtttcatttttgaagatctaattgtgaaatgatgattcatgtttgcttctttcataagttgtcaatcgttaaaaagtttcattagcatttcagttatcaagttaaaattgaacttttgatggtgtaactgcattattatgttttttttttgggggttgacttttctaacatgttgaaattatgttaatcattgtagttggtatgtaattggatgttaattgcaaattaaatacacttgcttctcttgtttggattggatgttgcagtagtttgatggattttgtattgtaatttgaatgtttattgcaggtaagttattggttttagagttttcgttgatttgg

SEQ ID NO: 81815 - DNA, 922 bp, Citrus sinensis
  Intron number 1 from transcript orange1.1g001874m (locus o range1.1g001859m.g) derived from phytozome v7.0 (chr-ID sc affold00055; pos 408764 to 409685)
ttctggccggagatctcgactagcgtccccatcatgtaattaaattttctttctttgtcgcttcgctatttgtctgtaatttgtgttcaatatttatttttgttgagtttttctctgtggaaaacgagaatgtgagtggtaaggagtgtagatttgaattaaagcgagtaattgtacttgttatttgggtaaaattcaggaatttattattttagcttggcagtttaactagtgggctttgttttttttttccttttaggtttgggtcgagggttttatttagttaattgggaaattgatttggattttggaagctcaggaaaagctttctatgattatgatgatgatgatcttgtaatgccaatttcgatactaatgtgtgtagacgaatcttagtttggagaaaagaaaaaaaaacatagcgtttctgagtttctagatggtccaaaaatttacctatcataggtttaagaccttcagctagagggtctggggtcttaagtgggtggtggaagtagctttacttaatggaaatgatttttattagttggttgctgttagggttctagttctgtctgagtaactttataatcaatggattaaaatatgctagtgcttatccctagtcaaagcttcagctgaatcaggagccccaactaggagtttagtgaaattgccgctgatcatgttgttattgcctgtacctgttttttgaattcttaaacgtttatttatagtgagtactcagaagataacttttctgagctactctgtcttgattccgaggatattgaattttaaactatctccaaatctaatattcctttactgatcttgtttatctttataaatcatgactatggattattcatttttttttaatcttctttcttttttctgccttgattcagagaaagtttgt

SEQ ID NO: 81816 - DNA, 518 bp, Citrus sinensis
  Intron number 1 from transcript orange1.1g045897m (locus o range1.1g045897m.g) derived from phytozome v7.0 (chr-ID sc affold00001; pos 3472503 to 3473020)
cataaaatgtacgtatttctttattattattattatttttttttaaatgcgtacaaaattttgttttgactatcatgatcttgatcatgttgtagttgacttcaagtgaggcatcaaatgaatactgtgttgaggcgagtggtatgcatgaagatattagtttgttgtgtgattaataaaatgccctgattcactgaattaatgattaatgcgtctaattacatgtcattaaggtagcccttgcccttgccattatcttttgaagatagaattatcatgacagtggcaacaattacgtaaactattattagaaaaataaagttcctacatttttccttgggtaattaatttgatatttacgcgactggaacatttttctttaacattgttggggcggctgatcgctattgggccgatatttttatacaattatgttttgttttatcacacttgctttttaattttaaaacgataacttctaatttgtggtgggtattgcatatgtttttggcgacagc

SEQ ID NO: 81817 - DNA, 687 bp, Citrus sinensis
  Intron number 2 from transcript orange1.1g018004m (locus o range1.1g011402m.g) derived from phytozome v7.0 (chr-ID sc affold00204; pos 95475 to 96161 reverse strand)
gaagcctcatttttgggtgtgttgtctgtctacacttttgaatgctctctaattctattgcatatttatatgtttggtatttctgcaatagctatttacataaatattttgattttttttcttttttgaggattctttccagttatcaaagtgctctaggcttaatctcttgaccattgcaacttattagcgtaaccatttttaaagttttatgatcaattatggtagtttctttgtttaggtcgagccgttgaggctttccagttgcaatctgcatcaaataatgacctattacgcacatttgaacttatattttaatttttcatattcttctctttttgtttcactttctccttttccacaaatcttttgcatcgtattttgattcttagattcttctttgcatgtcttaaattttaattttcttaaattcttggagttttttctttaagaaaaaggctcgtggtgcggtagagaaggtactataaatgattgtctcggagatttggttaactttaaattttatcgattctgtaactatgtttttttctatgggagattgtgagatttcacatcttatatttaatcattcatgtgctcatattaatgccataatattaattatttattgatttattattcttttttgaagttgtggtgctagacaatctgggaatctagattcaa

SEQ ID NO: 81818 - DNA, 622 bp, Citrus sinensis
  Intron number 1 from transcript orange1.1g006217m (locus o range1.1g006217m.g) derived from phytozome v7.0 (chr-ID sc affold00001; pos 1937590 to 1938211)
gcaattttctggtcattatcagctgcacaacaagggtatataatctttattttcttttttttttttcctttttcaagtatttcatttctactgtccaatatcttttggtgcaattttgttcttctttcaacttctatatacaattttggtttctggagtcaacgaatgccatctttttggttaaatttgctatatttgatacctataattcactgatatataccgctattttagaagaaagagctcacatttttacctttgtattgccaaatttttagaccgcataacccaatatctggtaccacattctgtttctttatgaaacttgaggaaatgaggttgttaatcaatttacttacctttaaagtgatgttgccagagatgggaatcaacattatattaccttacagagacttttttgtagcaatgggaaaatgaatagtgaagctttattttgttttatctttttgaagtgtaaacggcctctaaaagttttccttttttgcctaaccaactcttaatggcctacaattggtctatgtaccggctttctattaccgttctttgtacttaccttgagataataaaaaaacaatggttcctagggttctagagtggggtg

SEQ ID NO: 81819 - DNA, 333 bp, Citrus sinensis
  Intron number 4 from transcript orange1.1g023797m (locus o range1.1g015229m.g) derived from phytozome v7.0 (chr-ID sc affold00001; pos 1833977 to 1834309)
ggatttgtgaggcttcaaatttaaataatggttatcatggaatttaattttttttctccagatcattcttatgttagttgattgttgtcttctgagtaacttatgttctatctgctccacttattttttttttttttatgcttgccaatgttttaaattgtatcacttaaatctttatggctaattttattttctttcttatgatgtttgaatatgttttttatgatagagctttggctagttttttttttttgggtgtctacgttttattgtaataagattgacatgagaggctgatttactcaaagaatttacgagagtatatacttgcag

SEQ ID NO: 81820 - DNA, 698 bp, Citrus sinensis
  Intron number 1 from transcript orange1.1g004068m (locus o range1.1g001276m.g) derived from phytozome v7.0 (chr-ID sc affold00042; pos 84241 to 84938)
gtggcgcagtgatacaccctctatcttatcaacaggtaggctaaatgttgcagtttttgtcttataagaatgtcaagcttttctttttctattttttttttttaatttctgtatgttgggaaaatagaactttttagcctcagaatctcaagaaatcattttctcagcggaagcattagcttgggtacaatttggtagtcattatctgtttagcatgctgtgtagaagctcataggagcagtacagttgtttatttgtcttccatgttaacaaataaagttatttgaaattcctatggttgggaaaagaccatcttaggcttctcattttgtgatttatattgctcccaattcgtggttctttttggcacaaatgatggttggcttgtggcttttggaccgttgtatggtggttcctttcaatttcatcacaatgttcaactgtttgagagtgctatgccgttttgtagtttatgctgaacattctatgtgatttggaccttttgtttagcgttctgccgactttatagattgtgtggtcaagtatttcagaatttgacatgattgtcgtcaagtggaatactttgtttctgctaacatggttatcttttggtttgacttgaacacaatgtctcattattcttatatctgtttgcttgaacaggctagaaatttccgttttccttgtggtcttgtata

SEQ ID NO: 81821 - DNA, 546 bp, Citrus sinensis
  Intron number 1 from transcript orange1.1g016763m (locus o range1.1g016763m.g) derived from phytozome v7.0 (chr-ID sc affold00103; pos 441674 to 442219)
ttaatcccgtgcttctcagagaaactgtaaagaaggtacaataatactgttatataaaaaaattgctggggtctttgattttgattttccctttttaaggtgtttaaattgctggggttgcattaggcttatctgagtcacaagttcaaacgcgtttcttttttttttgttctcttagttcttttggtttttttcatattatcagcagatgggtttgtaataatttctacttgtggtaacaatttcaagatctttgaattcttttgtttccattgtcttctcagtaaccaagcagagaatgttcttctcaatgggattttaattgttttctttgtttctctaaacttaagaatgatcataaacagtttctgctctaggcctagctaagtataattcatatcagagtttttattcttttttggtttccttagttttctcagcagccacgtagacaattttctgccaatggggatttgaatttcttctttaattttctttaacctgtgggtttgtgttatttgttggttggcttatgaaggtggacaa

SEQ ID NO: 81822 - DNA, 866 bp, Citrus sinensis
  Intron number 1 from transcript orange1.1g015508m (locus o range1.1g015547m.g) derived from phytozome v7.0 (chr-ID sc affold00001; pos 2466402 to 2467267)
tgtaataacctgagtttatacagttgtgatctcaggtattgttgcttacttgttcccatatgatggtattttctccttgctttgcatgtaagctaagaatcattttaagatatgtcttctctgattttgatttatgggattttcttatttagttctttttttttgggggggggggggggttgattattctgattttgttgttatttctgttgatttcaaattaattattttaaaaatcatagcaatggggattagatgttctcatttttgaggaattataggtctcataatgtggagataaacctttgtgcctgtacgtaatttgcattagaaattattttaatcatgaaaactttgagtcaaattattttagtattcctgtagtttggcccttatttccagtttgattgtagaatcttgatgttctaattgcagtttattgtgtatttttcttatatctgcttctggcggtaaaaagtataaatctgaaaactgatttatgtttatataatgcactggatgagctttctgtaatttttgctgctgtcctacaaaattgagaggtgtaaggtgttagcagggtttcaggattcttacataatttattttactactgttcttttttcctttgaattttaatatgccaagcatgacacttttctcctgtctgatgttatgtgatatgttgtcaagggatttgacttactttgacttgggatatattctttggtgatgattatctgatgctttcttaattggtgatgagaagttctcatctgttttcatgtagaactcgattttcttgttcttttttaatttgttaattttgtctgttgaagtcttttttaatgtactttctctagatt

SEQ ID NO: 81823 - DNA, 243 bp, Citrus sinensis
  Intron number 2 from transcript orange1.1g010862m (locus o range1.1g010868m.g) derived from phytozome v7.0 (chr-ID sc affold00192; pos 208846 to 209088)
taggttactatagacgagcacggtttctgttagaggtaaggactttatggttgaaaacttagttccttgctggcacagtcatagtaattgtttaatttttgatatggttggagctggaaggttgataagtgtgtacctaaagagctttgaggcaaaggattcggatttaagaagattcagatgagagtatgtttgtcttgattgagaatatgtgttttgatgttccataattagggagcaaag

SEQ ID NO: 81824 - DNA, 823 bp, Citrus sinensis
  Intron number 1 from transcript orange1.1g012781m (locus o range1.1g012781m.g) derived from phytozome v7.0 (chr-ID sc affold00235; pos 83629 to 84451 reverse strand)
cccggtatgcactagcttctcgttggttctaattagccctatctgtttgtcttctttatgtagttctggctgattatttgaggtcgccatgttgtaagacgctgcatacttggttgtccttatttgatattgattgatattgattatagaaaaatatttgaggaatatttcttttgctatatgtacatcgcagataagaactggcctgtggttccaaatttcgaatgtagttttcttcattaaaactttcaaaaaatgaatctgatgctagtgagtctgaaatagttgagaatttgttgaatttgatactagtttttggaatattggattattgttttccaaaatacattccagatgtgttgtcttttccttttcttggctttgtaagtagaaaacaactttttgaaatcttactgaaggacactaatttccatatgaacttcaaacttggttgttatttctttggaaaagatgagtggaagttggattttataggcacttgtaagggattaatgaagaaatgtattctccagtgttttaattcttctcctgaaaccactgaaacttgtttggaattatggttggtctccactcactctcttgttttcttccgcttctttaatactcattgttcaaatctccttcaatctcaagttttgatgtaaatggagttaaaataccagaaattgcttccattacttcgtagatcaaccattgtttttcctagcatttttatttcaagatattttgttaaattttataatgttaaaggcttgatttaaaattttcctgttcgaatctgccaggaggttttgctccagga

SEQ ID NO: 81825 - DNA, 815 bp, Citrus sinensis
  Intron number 1 from transcript orange1.1g016685m (locus o range1.1g013032m.g) derived from phytozome v7.0 (chr-ID sc affold00367; pos 102347 to 103161)
gaggaaggtctggtcgctctacaatcccaaaacaggtgtgtgcttggtagttcagtgttagccgaagcgctgatggatagcttaaaaatatatatttttaacttttttaagttgatgaaaatgtttcatgagattagaaaatagattagtgtttttataggaagccttctttagatttaaaaaatctactcaagaagtatcttatagtgtgtgtcataggttttagaaagcattttttagataaaaagcgctttcgggagtaaattttttatctttcttctgaagtaggtgaaagtgctttataaattaagaagattactgacggaagctttctgggattactcttgatcaattcttcttcttctttttttaaaagccattgattaaatcagcatttggaagtactgtaaatattacttattatttatttatttgagacattggtttttagtggtttctagaaagcgcttctttgtaaaagtaccccttcgaaagcagtctaacctagtttcttaaaatttgtctttatttggctagaacctaataaagagaaaccagaaatgggttaaattttaaaattgagaatttgtgaaaaaattattaatttttgtcttctgaagctgaaagaaatttagcaaactaagatgattttacatgtttgattatactctgtaacattttctttacaaacggaattagttttaatttgataaagttggcttcttattcattatttaatttttggtgtgtttgtgaacttgtatctttcttttggaacagataaactgctttttggaatcacaagttgtttttac

SEQ ID NO: 81826 - DNA, 890 bp, Citrus sinensis
  Intron number 2 from transcript orange1.1g000120m (locus o range1.1g000120m.g) derived from phytozome v7.0 (chr-ID sc affold00015; pos 412886 to 413775)
ttgcacgacgccgtattgaaacggcgcaggctcaggttacattttgtttatttagtccatacatgttcgcttttctaaaataactcattgctgaattgaaattttgaagattttgggttcagtgaaactgctttattagtttaaagctgaatgtagcttatttaaatgcaaattatataagtttaattagggaatgtaaattatatgatttgttggttctcaggtggtgggttttttagtttctgcaggagaacctttgaggtgctgatttttttttttttttcctatctgaatggggttagtgctgctagaataaattctacttaggtctgggagttgggagtttcttcactcaataaaaaaaaaaaaagaaatctttcatcatggcaatttgaggctttaatcaataaagggtagaagtttcaaaggatgattcttggtatccctttctggctcttcttgtaagagagtgaaaattgagcactttaaagggatttgggtcacattggtggttgagagggtagattaagtggtgagttacgattatttcttatgttaggtaattgagaagtttcttatcatgtgctcttgttggttgataggacttttctggacttcttatgactaaccatactcactcgagcctttgatagtttcatgaaattttgattcttgtctttatgatttgttgattatacggtcaagaaaatcctgttcttcatagctatggattcatgtgtaaatcgttccagcttactatcaccaacacatctcttggaacattttacatgcacaattggttgtttgctaactattatgtggtcatattttaatttaggttgatgctcatcccatgttttttaatcttctttatatggttaatttgcagg

SEQ ID NO: 81827 - DNA, 746 bp, Citrus sinensis
  Intron number 3 from transcript orange1.1g023025m (locus o range1.1g023025m.g) derived from phytozome v7.0 (chr-ID sc affold00012; pos 592421 to 593166)
actctttttcaggtgagttcttctcaaggccgttagaaggggacataaacatttgagaagctatagaattcaaacattatattggattacctccttgcattaaatgtctcattgaaaataaactttcaattgttttataatgaatacagttgtttttgctctaaaagtacttaatatttgttggacattgttgaaacctagggtttccccttttctttgtttttgcctggacttgaacccatatgcttgaattgagaagattgggattattgaagtgttccccaaggaattaaggcattgaatgttttttgactttacttcaaaatggtttctttcttgaatgccattagcatacctaatgaagttgataagtagatgcttatgcgtaaactttctactttctagtatttccttttattatgagagggcaaaagtaccaacaatacattgattgatttggttcttagactctgtcaaaccattggctatcatttccgacctgatattttagaattgccaccatttttgagccaaatctctttcccccctacccccccccccaaaaaaaattgcaggttgtcaggagatgcatctatttgactattttttgcttgcatcttgcagagaataaagttcctgtagcatctttgttatattgcatatattatggtctatgttgctgtatttactcattatttcgatcaattacagcctcggacagctcgtttgaaccatcatacactaaa

SEQ ID NO: 81828 - DNA, 621 bp, Citrus sinensis
  Intron number 3 from transcript orange1.1g010107m (locus o range1.1g007843m.g) derived from phytozome v7.0 (chr-ID sc affold00187; pos 84370 to 84990 reverse strand)
ttgacgtgaaggtaacttttttttttatactgccacgtctgtttttcattaattttagttctttttaaggaagtactatacttggttgctgcctttaattgaataaggtctgatttttaatcttccaatgcatgctaactctatctgtgagtttcagtttgtagaaaatcaaaatctgcccaaaaataccatgtttttcttattttacatgtcatattgtggctgtatattttcagctattggttattgttcaataaatatcaacggtaaatttattagggtaactaacgccagggagtctcaatgatggttttctgaacttttttgcacctgctatttatatttgacgaatctcaaggggtgccagtggaattctttcctccaaaatggtaattcggtatctgtgggtttttcttaaaatctttttgatctgaaatggtaaagaatgctttttacgttatgtttattttatgcttattcatatgctaatatcatctggaatatgtacaataaatagtgtaaagaatctgctccaattcattttcattgcgattaagttcaataatagatgatttaactttttcagacgcttaagctagttgagcagcaatttctcggtga

SEQ ID NO: 81829 - DNA, 610 bp, Citrus sinensis
  Intron number 1 from transcript orange1.1g009905m (locus o range1.1g006062m.g) derived from phytozome v7.0 (chr-ID sc affold00032; pos 457170 to 457779)
tgggtgctgacccagttgtctacaagcttgttcgggtatattttatttacgcgtggaattgtaatttcctcattggtcaatgatttttttttttatgcatatgaagttagttgatgattttatttcaggttgctcaacatggtcattatcactccgaatttacttaaagttggacctagaactgtgaagagtcaatatctgtatttggtgcaaatagtgcttgttcaattgcatgaaatgggaagatcttaatactttttgttgtccacttggcttacatacaagtagtagttcttgagttggtctaaaatttcaataaaaactttgttagttgtaagaattttcattgtttaggttgtgagattggtctcttattgtggccactacttttgtaagataaatgcaattgcgctgttctttgctttgacattcagtgaataaacagttagaagtcaaatttaatgatttgggtattttgagtgaatcgtacggtgaaatagtcaattgatgggtctcaaaatatttctattttggtcccattatgtttcgtaaagtgactacttgcaagtgagatattagattctgaagtttctctatgattttcaggtgg

SEQ ID NO: 81830 - DNA, 960 bp, Citrus sinensis
  Intron number 1 from transcript orange1.1g000296m (locus o range1.1g000296m.g) derived from phytozome v7.0 (chr-ID sc affold00001; pos 5453870 to 5454829 reverse strand)
caagcatcgaccctgatatcgctctctcttatattgtaagatatttctcttttttttttttatttcagatattgtccgttgctattttgctcatgaatttttggtttagaaagtgttaattgtttttgggttgactttgttgtggtgcatattcagatccaagtctttatttcaattctttgcaattttaattttagtgactggtacaattgaatgatattgtagtgtttttgaatgtgtttaatttcctaaattaagagaacaaagtttgaggttaggaggtattgtgtttaatttcatttttgctgttgttggctatgggagtataagcattgctttcagattttagtttggtaggtaatgtgtagggtggaacattttttagtcagcagattagggaagcttgaaactgttttttaggaatgttaaattaatgcaaaattttgcatgatacttgatagtaatgaatgatgcagttgcgcttgtaaatccaataaatgaatgatagggttgagcttgtaaagccattagtcgtggttctaggattaagcttttgtggggagtgtcttaatgactttagagttcctatccatcaattgcaaattgcgttgtgggaactgtgctgtctcatgtaattagtgcaacttgaagtttgcttattcaattttttttagtgtaataatagtaactttttgaatttaaaatcggagagttgtgagttgtgaatacttgttcccgatcatgacgctgtactgcttcatgggaacaacagtggctataattacggttttgtaacttaaatgcatctgaaagtcttatatttcgttgttctctaatttactgattttcatttttccctctactagtctaccatcactttatgtctctctaactatgttctgcacttttcgtttatcacgtataactgttaaatattcttaaaggacgagaaacttcaac

SEQ ID NO: 81831 - DNA, 786 bp, Citrus sinensis
  Intron number 2 from transcript orange1.1g026677m (locus o range1.1g023046m.g) derived from phytozome v7.0 (chr-ID sc affold00001; pos 280835 to 281620 reverse strand)
actttgttttcattaccgaagtgaggttgatacaggtttatgggatctgcatttattgaactttgttattttagtaattggtgattcttttttttccttttttctctcttgtgttatattagcaagaagatatttgtactgaaatttgttttctgaacattgctgttttctgtctttattatgcttgagaaagcatttgatatttgaattcattagtatgctgatgggacagaaaagtcttataataaggttttttttttgggtatagtatttataagctccttgattttgttttcaaggtatatttcataaatgagttattatgttatttatagctaatgttgagataaaggttttttgaccacttaatttgtgatgcatataccatgttagtgtatagctatgttttcttgtgggggcaaaggtgatattttgatgctattgattattgatttggcaaaagatgacatttttattacttccatatgtaaaacatggtgtggtatcagctaattatgatatttttggtcatttaaggaatgaaaatgtttaatattttcttggtttcgaagtagagtaccctggattttaagctgtttattcatggtacgaatgataagttaatatctttgaaattgactgtcatgtgggacacattcaaaaacataattctgttatttgtaactgactcaattgcaaagtttgcttctccttacttatctgttgattatgaacatgtgtttgcattaactgcagaggaatctgaaacagacagtgaagaatctg

SEQ ID NO: 81832 - DNA, 861 bp, Citrus sinensis
  Intron number 2 from transcript orange1.1g009329m (locus o range1.1g009329m.g) derived from phytozome v7.0 (chr-ID sc affold00008; pos 479469 to 480329 reverse strand)
gctcgcgccgccgtttcatttgaccttctttacaggcattcttcttttcagattaataagcgcactttttttcttttcagctgaattgaattttaatcgaattatgatattcatttatatgttaactcttttgttgattcaacacatatagtgaattattaataaaagctaatgttattgaatttatggtactttagccattcaaaaacaaaacaaaaaattgaaacttgatatactagataagaatgtaaaagaaattaaattctaaccctaccatgttataatgacacatgaaacaagatcaggcgaactcagatagggagctgatacaatgttactgaatggttaatcatctttttatgtttcaaatgatataaatgttaagctagaaacaatcaggattatgttgtgtcaaattatgaatagtgtgtaagtggacattaaatggtatgattttggtagattatttctgcatggaaatgtatgcacaattttggagttgtagattgctgtgagtttggtctttggtgacaacttttattctctacttttgtcaacctaaaaatgttcttaacttaggttgaaagaagagcttttttggatgatttcttgttggaaagatgtggaccctgaggctttgagttcaattcaatactgaatttagtttcattccttttttgggtcattatctgttagtggatttgttaattgagtcacaattgttttatcttactctttttttcttttccatgcactggcaatagtttcaaagggtttggtgttgatacgtgaaacttcatccttgcttaatgtgaactgaattctgcagatacttagaacatctaaagtgtgaagtcactt

SEQ ID NO: 81833 - DNA, 425 bp, Citrus sinensis
  Intron number 1 from transcript orange1.1g009329m (locus o range1.1g009329m.g) derived from phytozome v7.0 (chr-ID sc affold00008; pos 480501 to 480925 reverse strand)
cgcgctagcggaagaaactgtgataaataaactttgtgagaactgatatttttactttatatttggcttattttttttttttctttgtttgcgataaattttaatttcggtaattgtttaattatggtttggctttggacaaagaattaaatttcaaaacatttattttccggcatcggtttttttttttttcaaaagtctgttataacggacggacttactccacggccttccccacctccccacctcaaatatgagggtaaaatgggtaatatatgaaataacagggaaaagggtaggcttctaccctagacccggcagcagtagattgtatactctcttctcagcacaagtgtaacgttgagtcttttcggtgcgtttctgcgtaatcaggtttttagggttagggtctctctaaattcaca

SEQ ID NO: 81834 - DNA, 444 bp, Citrus sinensis
  Intron number 1 from transcript orange1.1g017667m (locus o range1.1g013880m.g) derived from phytozome v7.0 (chr-ID sc affold00029; pos 962706 to 963149 reverse strand)
tggtcagtagtcacaacattaattttttcccttcttttttttcccgtcttttctttagattttgtctgcttttcttcaagtgaaaaaaaaaaaattcataatacgatgaccaaagtctttctcttttaatacaacttatgtgttgacttaataatgtatgtgccaccacgggacattttgaagaaatttggattctgtatgtataatcttctttacatgtttttttttttctttcttgttttgaaatttaggagataggtgtaacctaacattgggaatttttcagttttgatctggctttgtataagtagtacacgctgcagtttctttttttactttattgaggattgttttgtgtggatttagtgaactaagttggtattcttttcttttttcttttttctttttttggttaggggctacaagcgtttttttaggcgggct

SEQ ID NO: 81835 - DNA, 442 bp, Citrus sinensis
  Intron number 2 from transcript orange1.1g014155m (locus o range1.1g010070m.g) derived from phytozome v7.0 (chr-ID sc affold00001; pos 1159674 to 1160115)
actgctgcagtaactgctgcgggtggcaacttgaggtctgtccaatacatattgatttgaatctttccccttagaatcacatgctgcaaatggatatttgacatcttatttaagtataatcatgctaatggcataggagtttcggacaatttgattttatttgtagagctaatcatatagtagaatattctggactactaatgatgccattcagctggaatagatccttagtttttgattctggcattgtatgtttccttagcttgtgaaatggaacacttacccatgctttttctcctgccattggtcatttgttagtggcgtacaatcaaccagcactctagcctttaatgtaatccctgcaagagctatcttttcttcaaagtattatagcagaaactaaaacctattcctttcctgactcgtgtcagctatatccttg

SEQ ID NO: 81836 - DNA, 508 bp, Citrus sinensis
  Intron number 1 from transcript orange1.1g016116m (locus o range1.1g015200m.g) derived from phytozome v7.0 (chr-ID sc affold00008; pos 1056172 to 1056679 reverse strand)
gattcttctgctatcactctgttgttgctggtaaggtaactgaagaaaagggtttagggttcatctatttttttctaattatttggtgtcacacttttgcattattattttttgtttgttctaatagatacaatttcaattttgtagcaattttttttttcagttttcatcaaaatagaagaaagggaactttaatttttcaagactatttctgaaataaatgcattttgggacttgatttgatgctaactgaaaaattcgtttaaaaggtggaatctttaactggcactggttgtgaaattctgagttcttatttgaatgtgttgaagaaaaactcttaggtcaatggtctccttactgtttttgctgacttatttcacgtttatggagtctcatttatgctccgcaattcttttatttttggtctttatttcttgctttcattgttgcattccgctttaatgactatgattcttggtgattattaaacccttttttctcatatcag

SEQ ID NO: 81837 - DNA, 721 bp, Citrus sinensis
  Intron number 1 from transcript orange1.1g025670m (locus o range1.1g025670m.g) derived from phytozome v7.0 (chr-ID sc affold00157; pos 172868 to 173588 reverse strand)
gtacctcaactcccccggcggccaggtcaccgcaggttctccattttgggttctttttgtcattctatcaattcgctgaattttaatttatcgatatataagcttttatatcatgtccttaattcatttctataactcattttaggcaactatatttgtgactgaagtgctgatagttcttaattgtgtagacatcaagattacaattgctttctcccaaaaaaaataaaaaattttaagtgctttttttttttaacagcagcttaaggctctgtttaatatagcttttcaaatagagcttttattagtggagtttttaaagtttaaatttgagtttttgctagtagagacaaaatagcttatttaatcttcaaaagctctatagaaaaataaccaaacaatgaccaaaaaaaattgaaaagagcttatggaattaaataagtacttgtggccagcagataagccatacctaagtgtttttctgacctaaaaattgcttcttagagataagagtagtttcttaattcctaaaagtgttttgtttatgcttgttttggcaaaatgctatgactgaagaggctaaaacattttgatttgtttgaaaacatgctaatgattagacacattgtaatgatatttatggctgtgagttgacttcatgattatgatgattctaatgcctgtgtttttactatgtacaggtcttgctatttacgatacg

SEQ ID NO: 81838 - DNA, 535 bp, Citrus sinensis
  Intron number 1 from transcript orange1.1g047148m (locus o range1.1g047148m.g) derived from phytozome v7.0 (chr-ID sc affold00166; pos 99215 to 99749 reverse strand)
gtaagctcaaatgtgttgtttgttatgcttaatcaccatgatctgctctgatttgaatgtaaattactgattctcgtgtttttttttcaattacctgagttttattgatctgtatctgaatccttcatccctagatcacattatctttttaatctttccctatctctctatgccttaaatgaattggctaatccatgtggtttatgttgctcttttcttccctttattaaacctgttgcttttattaaaaaatcttaaaactactaatgagtcttacaaagccaaaagtttatcttaaaataccacttacgaatctacttttcgatgtcatcaaaatgcatgattctttacaaaaatgcccagtcagtttgatttcttttctctcctgtggtggtggtgatctttggcctataatggatactctctcctccctctatatacccaaatctgttagtagtgtggctgagtctccagaaaaccttaattttggtgctcgttatgattgctcttgtgtttctgctcgatgattcaggta

SEQ ID NO: 81839 - DNA, 665 bp, Citrus sinensis
  Intron number 2 from transcript orange1.1g015350m (locus o range1.1g008218m.g) derived from phytozome v7.0 (chr-ID sc affold00204; pos 252406 to 253070 reverse strand)
cggcaagcttcagtttctcttttcttttcgtttgagtaagttattcatactaatgcattcttttattgatctcttcattggcagtgaattatctctctgtgtcctttttgtcttagacgagtagctctatgtgtaagtttggtattagtggatgtggatcacttggtcttgcttacatattcgtgatatgtggtggttatgtgtagtaaatttgattaatatgatacattttagctgatacccagccacttcactgctcagtcatggttaatgtttcacgttactgttacttaacagaatagaggttgggaaatgcctacttgtgtttttatcattatccagattcatgagagtgaaatcattcatctgattttcttgaaacagattccagttttgtggttttgtagtcctaaataatttgagtgtactggatattgggacttatcctaaataagcctggttttgatcctttattggaacccctttgatgattcaacttgtcaatggaattattacttcgtaaaagcttcttttatttttgtgatactgttgttctgatcttcaaattctttcatctggacttaacttaatggattagattagaaggcatacatttgggattttttttgatagtgctaatggcatgaactttgtttctcaggtac

SEQ ID NO: 81840 - DNA, 905 bp, Citrus sinensis
  Intron number 2 from transcript orange1.1g032076m (locus o range1.1g031465m.g) derived from phytozome v7.0 (chr-ID sc affold00015; pos 525679 to 526583)
gtgttgacaaaagtgtcacttctgttgttattaaggtagcttttttttttccctctcttaatcctgtttttgaaatttatgcaaggggtttgttgttttttgagattgtgaatatgggttatcttttttgttcggaatgattttagtaataagaaatttagattatgcatatggggattgtttctagtattttgcgtttagttagagaattcggtttaaggccacgtttggattgaagtaaggaggcttagagagttttggtttcttgcaaagttctataattttttttactagttttataattgagttaggaggttttaactgcttgctgcttttagttgcatttgttttccttatgtcttgttattaactttgcgtgttctatatctgcatctgagcaaaatacctctaaatatttgttaaagtatggggtttgtaacttattgtccatgaagtaactatctaaatcgaagaacattttgcattagctggtttggatgctttacattggtataaatgttatatgcttcctagtgatgtatgcttctgcattatttgttatgaatcatctatgctttagcttaattgatcaccttgagttgtgtacattaatacactggtttccattatatttctaaatggtgaaaaatcttgatggaggttttgatttctgttggacgagaatgctaagagactcattacagaatatgatattaccatatgagatcattctttggaatttaatttgtttatctatatttatatttccaaaacctgaatttaccatgatttttattcattgaattgaataaagaggatttttatatttggtgaaaaagaatagaactgatgttaggaaattttgaacagggattggcagatcataaagattcattgggtgcacc

SEQ ID NO: 81841 - DNA, 816 bp, Citrus sinensis
  Intron number 1 from transcript orange1.1g022806m (locus o range1.1g022806m.g) derived from phytozome v7.0 (chr-ID sc affold01024; pos 18350 to 19165)
ggcaaaaccctaaagagccgtttacaacaccccaagtaagttttctctctctctctttctttatcttcctctctttctctctcatccgccctctttctataatttgaatatatgggtccttttgtactgttaaaacttccatttttatacctatttttttcttttatttgtttgtgttcttatttacatgcttacatatttggaatgctattttctgacatgaacatgctaagatctatgattttgagtctcagattcgggggaaaaatgtctaatttgtagaaacttttcaattttggaggctatatattgcagatctgccgatgggttttcattggggttctgtttggttacggggaaaatgtgggaaaataggaagtggtttgaatctgaaagataccgtttttctaaccggagtctatttgtttgccatttttgttcatttgggatcattgaagtttccattttgttgtggatccaagaaaatggaaactatattgacatttttggatctccattttggctttcttaaggaaatgcaactttcatgtgggtgaaaactgtttcctttggctgatttttgtagctatggtttttttaaatgctaatgttatgttggatccgagtttgataaatattttcttcttggatttcacttcacattttagaactttatttgatgtcttggctttcaagcctctgttttcttttgcattttattaatatgaggctgacatcttcaatgctagatctgttaagattgtgagaaaatctaatttcttgcaccatattgttgctgtaaatttgtagcttttc

SEQ ID NO: 81842 - DNA, 830 bp, Citrus sinensis
  Intron number 2 from transcript orange1.1g014678m (locus o range1.1g007958m.g) derived from phytozome v7.0 (chr-ID sc affold00368; pos 146199 to 147028)
cttcattgggcttctgcttctgggcatcattaaaggtaatttttttttcaattgtcaattttgttcctggtttggttctatcttgttctggtagttgacccttcttccatttttttactcaatttgcttttagttgcttagattagcttctttatttgtttatttattttgtaatttcctgcatcaaggaaaatgatattttaagaacatgaatttgtttatatgttgattgattaattttgtaacataagcgtttttttttttaaatttttgcgtgtatatagctataatgcttttgtgagtaggtcattcctataaataaaactgatgtacacttgaggttgcccctactgtagcatgtcttttgttagactttccttagttggcatttgattgagggagcttgttgccttacataattatgttaggtatataactctttcacaaccgtttgatgaaaatctaacggctgtggaaatataagataacaaaatcctattatttgctcagctgttggattttcatcaaacggttgtggaagagttaagtaccttaactaaacccttgattgagattatacaataatttccgtgcttagcatgcaataaaatccacacattgatgatgatgttttacggtttgagttttaattggagagagtagaataatctccgagtatttagttaatatatgtctacatttggtaactgttcaagaaccatttagtataatgcattgagctgccaattaagagatgttcccttactgtggttaatgtgccaatccttaatctacaatgtattttcaggaatcattttctgccctgtgat

SEQ ID NO: 81843 - DNA, 792 bp, Citrus sinensis
  Intron number 2 from transcript orange1.1g000492m (locus o range1.1g000172m.g) derived from phytozome v7.0 (chr-ID sc affold00020; pos 1038321 to 1039112)
acatcgcaaactcttcgggtgagtcataagcttgaaaaaaattagattttgttaatccgatctgatcaaggtcaaatctcatctattttttgtttaagacttagcgatgtttgatatccttttaggtccccaaaaaaaaacaaaaatttccgctaggtttctgacttggtaaaacacgaagtcatcgttctctttggtctgcaaaccaaaactattgcgaagggctatagtattgtccctaggatttattagtcgaactgggtgataatatatcgttgagcatttttctcggaaagatacagtaccccttgtatcttaacagcaaacacgaacattcttttaggaagaaatcgagctgttcttcggtttgcttatctcatcaagcttgatagtgtttgaacctggttggtgatttgtttatgctcatggttccctgtaaaatggcaaactaaaaatacagacatatatcccttaatttggagatgattcccttccaataggaaataaattctgcagtcttaactcatttgaaatagttgaatgatcgaaatgccccccccccccccaccaaacacacacacagacagagtttgagttttgcattctgggaaatatttgctccccattttccctatattgtctactttcgcgacaacaaataggaataattttttttcttccctgacttcaccctcccatgatacttttgaacctctttaagagtagcagtatttttttgattctccccctcttccagggaattctttcaactgaaaagggtcaaagagctgt

SEQ ID NO: 81844 - DNA, 906 bp, Citrus sinensis
  Intron number 1 from transcript orange1.1g022301m (locus o range1.1g022301m.g) derived from phytozome v7.0 (chr-ID sc affold00001; pos 5127750 to 5128655)
ctttgtgcacaactatcgtttaatcatcattacaggtaagctctcatctctgctttcaatttaaataaaaatatttccacaggaatatttagtttcacttaaaaatcatgtttttcctttacaaattccaaacacaatcagataatctgattgttcgcaaatcaagattttagcaaactgcaatatctgttcttgttgaaccctaattatcttaaaatccttccctcttaaaaaaaaatagaaagaaactagagcctcttcaattaagaaaccctaggaatcaagagacgataaaaccaagaaatcaagaaccgataaaaatttacctagattttgacagctcttcctctctcgtggtacacaatttcctacaccaaggcctcggatttgctagtgtaggataaacattttttcactatctcctgtactaaggtatcggtattttgcataaaataaacgttattggctaattctgtcttttggatatatttactgtgacgcctctgtgtgtgctcgattataccgttgataattcgatgtggcatccaaatttaggggaatgatttgttgttattgatgcattggctttatttcgtggttcttttgccatatttcctcaaatgaattgagagcagagtggttactgttagaaggagaaatggttttaaaaaacattaccagataggccctaagtgccctctgcttttcttgctctgagtaaatggagcaggtgaacagcatctgattttgaattgactgtttccttatttttttcctgtttgattctgatgggtaaggttttctttttaaattttaaatttttattttttgatattgcataatttgtttacacatggaaggttacagacttttggttttgaattgtgttgtttgtcgtaggaaaaa

SEQ ID NO: 81845 - DNA, 344 bp, Citrus sinensis
  Intron number 2 from transcript orange1.1g041616m (locus o range1.1g041616m.g) derived from phytozome v7.0 (chr-ID sc affold00105; pos 125696 to 126039)
ccaaggtatatgtcttgctacactctcatctctcataccgatgtagagctcttacatattaatttttttttaagtcaagcagttttttaacatggtatcaaaaccaatgccccaagtttgattcgtattatgcacaaactctttcgaatttgtttatttctttattttttagttcaaacattttttacccatctatgatcttctggctcaattcttaattcatgtttcaaataggaagacttatgaaaatttgttttaatactactattggactattacttatcaatttaaacttttaggtcaaaaagtttttctaacaaattgaaaaccctacagggttcgcc

SEQ ID NO: 81846 - DNA, 689 bp, Citrus sinensis
  Intron number 1 from transcript orange1.1g008307m (locus o range1.1g008307m.g) derived from phytozome v7.0 (chr-ID sc affold00421; pos 114647 to 115335)
ctctataaatctggcttccagacttgggagtacaggtagctgcttttacgtatcaccttttattttttttgctcgtttaggaatttaatcaaacaccttatagaccaatcatcaaattcggctgttttatgtctttctattgtgtatgtattaattttacgtgaaatgataagaacccatgtatagaactcactcttagatgtaagggaaaggtacccatgagctaataatctttgcatttagatgattattatagttagcacatgtgtggatcaaggattctaacatgtaagatgttatctttgtgtaactacaattacaacctcattcgtgcaaattgatttggtatgatatgattggaagagtgaaagtaaaaatagtcaagctgatgtatgaggatagaacgttcatttacattcattcaattatcatgtcatttcagtttgtaaagatgtttgcttgctgaagaatgtaatatacacgattcccattttctattctcatttattaccttgacatagatagttcgtacgtgtagtatcatccatgtaaatttatgatgatagcattctaatggtttctagagaatgagacagtgaattcttttgaaggaattgtttgcgacattgaacatgtttatatatccatttgcagttcagagtttgcacttcggtcatatttgtacattc

SEQ ID NO: 81847 - DNA, 548 bp, Citrus sinensis
  Intron number 1 from transcript orange1.1g019541m (locus o range1.1g017855m.g) derived from phytozome v7.0 (chr-ID sc affold00307; pos 64137 to 64684)
caggtcctttcaattacagatctgtctcttttgacgtcgttttgaccttattttgatcgttttagtgtttagagttggtctgagattagatctgtgtaaattgcagtatttacgtgttatatagatttgttttgctaaacttctccttagattggatcggcgatttttttttttcaattttcttttacaatcatgatcattttttttatggttggatctacaactttttgcttcttttttttttttgaaatatttattatgttaatagtagaagtgtttcttttctgctttgtaaaatcctctgcatagttgatactttgcttcttagtataaccaagaaatgaacaaacatctaacgccatagctcatgtacctatgctcctgtttgatgtaacagtgttcatttcttggttttctggttattgcatattatgtctctggacaattatgtgtcctattaattataatgtgcaggaggatataaactaacattgagattgttgtttatttcagattgatcctgttaagtataaaagcatatcatctgg

SEQ ID NO: 81848 - DNA, 447 bp, Citrus sinensis
  Intron number 2 from transcript orange1.1g009090m (locus o range1.1g005867m.g) derived from phytozome v7.0 (chr-ID sc affold00001; pos 4188330 to 4188776)
ataagcaccaacctctttatactgctggtttcaaggtaatgagtttcttgcattcttataattttttaaaattattaacgactttctcatctgcttttagttttgcatttgcttctctaatatttcaagatcattttagacttcccttgcctgtccagcaccgctaagctattgtcattagactttcttttagccatcgtaactggcgctttattctccatcgtattaatacttgagttgacattaaagaggtttgcatttttcctttttgtttcaagcagcacatgctccataggatggaatttcttctttcctctaatttgaatttttcaagttagaaatttcttctttcatttttgtttgcatgtacactaaagaactggaactcttgtgttgttatacaaatgtccagtttgcggagtctttgagctgttctagtttctctcg

SEQ ID NO: 81849 - DNA, 696 bp, Citrus sinensis
  Intron number 1 from transcript orange1.1g011998m (locus o range1.1g008089m.g) derived from phytozome v7.0 (chr-ID sc affold00030; pos 882203 to 882898)
ctgccaaactaaccaagttcacgtttttgatactggtaccttctttttattttcccagattcttgttcttccccccccccccccccctttcttttaaaatttataataagtgcctgttcttaaagtttgcattttggtttatattttgtttagtgcagttgcaaaaattggattttttttttctaaatgggtgtattgtttgattgattcttgtttaaaaaagttggtaattttagggtttatgctgggtttattttgatggatagttataagtttttgttgttgggagttaatgttgtgattacttattggtttgcagatattattggcattagtggttttgtgggtctgatatagaaatgattttttaggttttctttttaactatgtatgtagggttttctattgtagcatgaatactgttcttttttgttatgtcttttaattcttgtggcttgtgagtttagcgtcagtgccacatttggaatccatttccatttgggttgttgcaaatttttgagtcgtgccaacatatgaatgttagtgcatagcattttctgctattctcttgctgggacttcatcttatttttcctttcgaaagctgcacttcttgtatttgacagcttttttgttgttgcatgttcttacattctaaatagctgctttgcagttaatcagacgtggagccagccag

SEQ ID NO: 81850 - DNA, 893 bp, Citrus sinensis
  Intron number 1 from transcript orange1.1g025488m (locus o range1.1g023067m.g) derived from phytozome v7.0 (chr-ID sc affold00029; pos 320899 to 321791)
gaaactacatcacttacgccaccactcttcttcaggtactcctcttttctttttttcttttttttcccccttggttcaaatagctatagtctctattattgatgggtttttgataaaaatgttgtgaccattcgatatgagatgttttctaattgctgcagtttagtcattttactttgatggtctctgattgatttttgtaatggttcagtttctttggctgattggtgttttagatttttcttatcatttgctgacccattttgggtgttatataagtgtgttattttgaacggtttttgtggattgttgtgacaacactctgctgaagttaagatgctcctttttttttttaaatgtattgaagggttaatctaattctgcttcatttttggaatggatgcatgatattgtacttgggaactggccttttaagtccgtcagtttgcggatgcatgtgaattgcttgccatttgtttaatatccttcactttgctgcctgcttccttcattgaacttttcctctgtattagtcgcttacacttgttgttgtgtgtcttcagcatcttaggtccttgctttgatatagtcattgctctgcctaagttttcctgttggtttagattcttttgctcaattcatactctggaacctaacacatcaggtggttttttgctttccaaaaaatcattttattagacctgctatatttgatcatgtctgtgctatatgacgaagattgagtgtcgatgcatgcccacagattagttttgtggcctgcattttttttttctatgatgtgagattgtcattgatttcttctccttttaattagaaactgtcatcttttgcatagtgttaactactttttatgatatttaattaggagaagc

SEQ ID NO: 81851 - DNA, 769 bp, Citrus sinensis
  Intron number 1 from transcript orange1.1g013983m (locus o range1.1g004521m.g) derived from phytozome v7.0 (chr-ID sc affold00012; pos 1725834 to 1726602)
agggtaagacttgttttaggtatctcaaatgtgtaaatatcctgtgattgaagaaacctattctattttcgaaactttacaataaatactctttgattttaatgttctaggtataaatttattgtcttaacaacacatcattgctttgctacaaacgacaaaatggaagatcaaatccaactcaactctctcaattatctcaatggaattccaatccagacgaatttctaagtctactgaaaatgaattgcaatgccacacggctggactaagactaagtcattaaatcccagatcatttaatattgcccccatgatttcattattcatagtatacatgggactggtttattggtctaccatagagatgttgaattttcagctaacagtcacttcttttcaaggttctatcactttccaacattaaataattgcattctctgaagggaacatgagtacatgtatcattagccacggtgcttatatttgtcagagaaagctctaagcctgtacacccaatggatgttctttcatttttgttcatctgttgcaagttagtgcttttcttgtctgaatcctcttttgcatctgacaccataacttcatctcagtctcttaatgacggtagaaccttagtttcaaaagatggaagctttgagcttggtttctttagtcctggcagttccaagaatcgttatgtaggaatttggtacaaaaatatcccagttaaaacagtggtttgggttgcaaaccgactcaaccccatcaat

SEQ ID NO: 81852 - DNA, 714 bp, Citrus sinensis
  Intron number 1 from transcript orange1.1g032309m (locus o range1.1g032309m.g) derived from phytozome v7.0 (chr-ID sc affold00015; pos 1641992 to 1642705 reverse strand)
aggcttactctgctcatctcaagcgatctggcaaggtaaatttacacaaagcttctcacaaacgtatacgtatgtgtatctgggtcatgtttttcttttctctctgtagtatatattatgggtcatttgggccttttgattgattatttgtagaaaaaggtgtaagctcttggcatagtatactgtctgttattgacggctgatctggtttctagttgtattatgttatttacttctaggtttatggttttaacttgtttttgattgtttgatttttgaatttaagtggaaaaggagttggattttcattccagttcatttgttattgaggtggttgtggatagaaatttaactgtttggttcatacaatgttattcgaccttgactttaatggagattgtactagtgtttaaacaatttaatgtagttgttggtgggtgtgtaaagcaaactgatgatcgtttgtataatgctgtacgagtgtcctgttattaagatacaaaactgccagaattggtggacttattactgttcatgcttacttttatttaggagtgtgtaagaataatgtataactagtttgtacattccttggtagattgtcaattgaagagaaattttagatttgttcagttttgcttttaatgtgatatttgtgcttcaatagtcttgatttttttttattcttttcctctttatcttgtctgtaaatag

SEQ ID NO: 81853 - DNA, 865 bp, Citrus sinensis
  Intron number 1 from transcript orange1.1g033658m (locus o range1.1g033658m.g) derived from phytozome v7.0 (chr-ID sc affold00008; pos 990944 to 991808 reverse strand)
tcttgttcatccacttttcctgctgcccttccaaggtgagtgatcaagaaaaggccaagaatccctctagagattttctttttctttttctttctattgctatggtttcatagtctgatgggcatgtcttagttttggaattaaaattttgattatgctaagttcagtgaattgttcatgtttgtttatgtactttgattcttcttaccttataattcttattttttttgcgtgtgtttgggcttttatagttgtttcttggaaaatctttgatacttttggaaaagacttgcttttggttttccattttgaggcatagcatagatctttctcactgatgtatcgattcgcagcacattgttttctgcaacagaaaagtgttttcctttcacttattttctggtcctcggaaatttggggactttttgagaacatcaaatgaaaaaaaaaaaaaaagtatcttttttggggaaaagtgtctgcttttttgtacacagaacaatcccatttcattgtctcttatgcacttctgctgattctctgtttgtttgctgagaaaaaaaatatatatatagtagggaaagcatataaaatagagtcatcaattcatggaagtgaagttcttggattaggctcaatctggtggaggttttcaaatttaatcactatggtcccataataatgctgaattgatgtccaaatgatgagcttttgcattttgagtttttttaattgtaagaagaatgatgggctcccataaattttttttcttttttaaccctcagttggctagaatcaatgctgactttgagtctttgatgcaggaacaggactgctggaaactgttaaggaagtgaaaactgaa

SEQ ID NO: 81854 - DNA, 597 bp, Citrus sinensis
  Intron number 5 from transcript orange1.1g005601m (locus o range1.1g002652m.g) derived from phytozome v7.0 (chr-ID sc affold00001; pos 1347559 to 1348155 reverse strand)
aaaaagtaatcatgtggtgaattatgatgtcgattttccttttctttgaccttgcatatgtctgagtacaatcatccaactcttgattactgtttgaaaattatgaaaaagcttagttggttcttatatatcaaataaacagtgcaagttaagtttccttttgtaagctgtttgcatttttcatctacttacttcaaagcgtgagaagaagattagctatactaacaattgggagtaggctaaggtgacttaaaatggtaccttgtttcattctgctgtttccgcctacagcgctattagcaatctgttatgtaccaaattgatctagtttaagcatgagtggaagtttgttatgatgtgctgatgaagcaacatccgactgttctcatacattacagttcttttggttgttcgatgtgcttctttcaattatattttgcttaaaactccaataaattatgtagtgattgctagatctgaagggacctctgttttctggtgaattgaatttatgctaatcactcgttctttgttttcacctactaaatattagtatttctgatcactcagccttgacttttaattgatctgcaggaa

SEQ ID NO: 81855 - DNA, 567 bp, Citrus sinensis
  Intron number 4 from transcript orange1.1g027534m (locus o range1.1g027492m.g) derived from phytozome v7.0 (chr-ID sc affold00008; pos 166239 to 166805 reverse strand)
cagctcgttgaggattcagccataaaggagttgaggtatatttgaatgagtggttttgtttttgctattcacctgacataaagtctttgttttagacttctcgaattttggaatgaaatatgtttaatactaaattgttcatagaatttatgtttcctatagctagagaaatggattgcaaatgattatgaaatgaaaaggggtgtaggtcattttctttaagttctatttcttattcacgagtatttggaatgatgcaaaggaaggaaactaattgaatcatccgtaatgacatatgaccccaaagaacaacaataatactaattatatcaataaaagaatatcattttctaatgtttggccgaacaaatattatgctgaatttcaagaggcaatgtgcttttgttttgtatatattagaataatacttaattttcctggtttcttaggttcttgttttccaattgactttttggtcttcatatccacttctttgctcttacttttttcaattaacataccatacatgtaggctaaagaagcaagagttggtgtcgtttgcgaaat

SEQ ID NO: 81856 - DNA, 443 bp, Citrus sinensis
  Intron number 4 from transcript orange1.1g021226m (locus o range1.1g013999m.g) derived from phytozome v7.0 (chr-ID sc affold00001; pos 3769925 to 3770367)
agtttacagaggtattgcatattgaggttttacgttttatgttttgtgttttgaaagaaaaaaaattatttgtactcttgaaagccaagttggttttattgaattgtgagatcagaatgaactgggaaacagctatagataatgaattatctagctcttttagtcatgtcaatgggaaaacttaagataatattttatggacatgtcaaaggaaaagcttaagataatattttatggaccacaaaagatgtccaagatcaaaaaagaagatattgcaaatatttcgctattccctggggtaaacatgcctgtagatactgtaataaatgcatatattgttatcttattatgcaataagcatatctgtgtttattcatctaaagttgtgtaaatagataatgtttacagggtgtaaaagtgtccctttctccagctgctgtttc

SEQ ID NO: 81857 - DNA, 420 bp, Citrus sinensis
  Intron number 1 from transcript orange1.1g000502m (locus o range1.1g000501m.g) derived from phytozome v7.0 (chr-ID sc affold00103; pos 350676 to 351095 reverse strand)
ccctggctacgatatttgctacagtagcttacagggtacgatttcagaacgacttcgtttcagttcttttgaatatccctcactcactctcctcttcataaattttcacaatgttctgttgaagtaatgaattcaaaagtccttttaaaaagataaaattcatgagtaatgttgtttaaacgatatcgtattattagattctgtaacagaagttggtttctaatccttttgggagagaaatttaaactaaaataaaaatccagcattcaactctacttataccaagaattgtttacatcatttagttacaatttttttttttggtcggttgttcttcagagtttgtttatttacatgttcaacatgtgaatggattataaatttaataattttttttgaattatgaaggtgggaaggtga

SEQ ID NO: 81858 - DNA, 771 bp, Citrus sinensis
  Intron number 1 from transcript orange1.1g023362m (locus o range1.1g023374m.g) derived from phytozome v7.0 (chr-ID sc affold00111; pos 413221 to 413991 reverse strand)
ctcagatcaagcgtgtcatagaccggctgctggaggttttaacctaatctttgtttttagtttcttcatgatataaatacttaaacttatagcatgtgtgcaatgtttccaatagcataaaactgaaaattcatatattatgatttgaataattggctggtctacacagtctgaaacttaattatgtttgcttcaatttgttgctggagattttaacactatttagagggaaaacattttagtacagtcacatggctagaggaggaggaaggggttgatacaattcatatatcttttgtcaggtgaatttgaggcaaatttggatgatgcgtgtctttatttgatgtgattgggccttttaagagcagcgtaagcaatcaatagacatttggaatcataaaataatttagggtgatggctgatgttgtatgactgtagtaacgctagtttatcaagattgcagattattgatctttcacttgagtaatgctgcttcttgatgatatagagcattgctttatatcttcaattacttaatttaggttcaaaagtctgctgaaactgtggttgagtactgtattcaacgcaccctcctctattttcttaatatttcgccttttcatcctgttcttatgggatttttgttttcaaggaaaatgtgcgaactttatcatggcagtaaagaagcaacagtcattaataacaacctcatgagttattgtgtgtgtttttgcagacaaggcaagcctttacaccggaagaaataaatag

SEQ ID NO: 81859 - DNA, 755 bp, Citrus sinensis
  Intron number 1 from transcript orange1.1g033917m (locus o range1.1g028801m.g) derived from phytozome v7.0 (chr-ID sc affold00001; pos 394118 to 394872)
aatcctgaatagtaagctcctctaattttttaatatctattttttttttaagtagtatatgtagtattatattttgtattgttatgcgccgtcgttttagggtgttgattatgatctgagaatcccgtcctcttatgttgaattgttagttagtattgattgtcaatttaatgttcttagatccgttgatttctgttgagatgatgattctgttgaattaattacccgtacctctgtggatcaatgattccgttttgaacaagtttgttgtctacatctctgttgactcttttgagcttatttggaaattacgacgtccttttaattttattaactgttttgttattcagtgtctatttgggatcaattgattcgttgtgttcaatcttaatgtatgagaatgttttgttttctaatcactatagcacttttaaaattaaatgattggtgaaagcgtcctctgtttgctgaggtgaggtggatgataaattgtgaggaatttgcagcgtgatgtggagctagatcaggtttaagaaatctccagtaataacatttctcggaacaacatataaagaattacatattttgcaatgataagcaactagttttgttttctcatctatcattttcttttcttcaaatttcctttaatgtttcagtctattccaatgaagcataagcctgacacaggaagttggattttctcttgtgcttttgcagtgactatctgtttaagcttctgcttattggagatt

SEQ ID NO: 81860 - DNA, 908 bp, Citrus sinensis
  Intron number 2 from transcript orange1.1g012769m (locus o range1.1g011218m.g) derived from phytozome v7.0 (chr-ID sc affold00130; pos 236932 to 237839 reverse strand)
attgtttgggaggttagctccttctcatgttcatgtgtaatagttcaattttcaacatgatttttgtcctgctcttaacattagatttacatttgaatatatatatattttttgtgaaaagcttcttgtccatttgtttatctcttgttactttcttagacagtggaagagtagtctatttgattaacagaataacaagtaatacttattgtggaattcagtgagcaactgttcaattcttatcatatcctcattttactttttatttttaattttccttcttcagagatgtgttcagtttaagaactctgtactttctggttcatcaaacaaacattccctctatcaatgggctgctgtttcttcactcttttctttttttgaacttattttacggatataatccatttcttctgttgcttcatcaaaatatacttctattgtgcaaattgaactctacttttgattttagtgtacattggtacatcaaaatatgcttcataatgagtccctgttcgagcatcaaaagatttggtttaccctcattatcatctttttccaacttcccctgagacaagctattttggccctttcttatttctgcaatgtggcttctgtgttttatgaataacttggatgattatattagattgctttcaattttgtatgcatcttgcatcctaccagttcatttgttccataaagtgttgcttatgttttctcaaatttatgtgaccttatttatcttagctttttatttatgtgatatcggagctagttaatttgaattgcatacaattttttttttgttttagatttttttaatcgcactctaaaacattcctggctcaccctctgtgtgggaatttacagaactttgcatcaagggcagatacaatattttgtgg

SEQ ID NO: 81861 - DNA, 434 bp, Citrus sinensis
  Intron number 1 from transcript orange1.1g012769m (locus o range1.1g011218m.g) derived from phytozome v7.0 (chr-ID sc affold00130; pos 238158 to 238591 reverse strand)
atctttatctccaaaaagtcacctttcttttcctggtaagctgctcaaagctattgaatcatatttcgttttggctctctggttgattctgttttcagctttttgattttgtgattcgttagaacttatatgaggttttgtgaagttatctgataattaggctgttagctcaaaagggtacgtggcaaatcaaagagatttgatatcaataagatttagtcttattgttaaactgtgtattcttcacaagggtatgtgcaattaagtagttgaggatgtgtaaggataaatttcagattgatctgttattttggttgtcaattgtaaagaattcttggagatttggttaatgattgtcatttgaggagatttcagtaagcggattaatctgtttttcaggccaggaaggttttcaccaacaagttctgacggat

SEQ ID NO: 81862 - DNA, 706 bp, Citrus sinensis
  Intron number 2 from transcript orange1.1g034348m (locus o range1.1g034130m.g) derived from phytozome v7.0 (chr-ID sc affold00012; pos 650152 to 650857 reverse strand)
gaaagaagaacatgtaagaaggtttttgtaagctaggtcttgtatgttatgaaatggttatcatatggttgatgatgagatagccatctttcaccgtttacattgtgaaataattttcattaagattcccatatttatgttgtgtacttcattttgtcaatcatagcttagtaatttcttaattgtgtaagttgagacgaacttattatgatctattgtggtgtattttgagttcatcttcatggttcaatatttaaagaagttgaggtagccagagattgaatatgattttatcattgtaggattatctgtttgtatttgtgggtttatgctggccagcatctgccactcattgcaaagaaaaattatgaaaattaggcaggtctgtgaaaaagggggttaaaaaaatcgtaaatgagccattttcattattggtacaagttggacattttcagtttcatatataaaataaaataaaaataaaaataaatatataattgaattgttatatttttatgtctaatgcagttagtttcacatgtgatgacgtagaaatagttagcttttttgcatttttgatatggcatgatcaggcatgatcaagaagtaacccataatttaaattgctagatgatatgatcaagggtgtttataatttttgtcgtttgcagttcgtgatcatctctgcaactggctggggtttact

SEQ ID NO: 81863 - DNA, 370 bp, Citrus sinensis
  Intron number 1 from transcript orange1.1g034348m (locus o range1.1g034130m.g) derived from phytozome v7.0 (chr-ID sc affold00012; pos 650910 to 651279 reverse strand)
tctcatccatcggcgcggtcttgccggcggcggcggtaatgatttgcaccttttttttgtttttgggaatcaatgccaaattctacttcgtatttaatattttcattattatgttctaaaaaggcgtatttttattgagcttgattcatataataacaaaaatattatattgcttcaaaagcatttctttttcttttctggaatctggaattattagtttttgatatttaaagatctagtggaagatatgcccttcatttagaaaacaaaaaaaattgctattgacaatgtaatatcgtttcggtagaaaatgaatcattttcactgatagttgtttgctttggatgctttggttgaattgcagaccatc

SEQ ID NO: 81864 - DNA, 855 bp, Citrus sinensis
  Intron number 2 from transcript orange1.1g002239m (locus o range1.1g001219m.g) derived from phytozome v7.0 (chr-ID sc affold00144; pos 49269 to 50123 reverse strand)
gtcagctcagccggtaagctttaaaaattcatgtttcttttctttggacttctaaaataaagttatggttgttgaattacagatcatgttgtggtaaggctgtcttacctaagcgatatgtagctatgtaagtttgctgacgtcaattgctgttagtttttctgttctttaatttaaaatgagtattctgaacttctaattgatttttgaaaaaatattaagataaaatttatagtgtaagaaaattgagttagaatatttgcattatgtttggtattttttcagaattagtttgtagtctttatgcatggtcacattaaatggtgacacaagaaggcaagtgatattctttgaaagacgggaaaaaattcaatcaatgacacataaattagaagatgtcatagataattattttcttctacagaaaatagggaattttcttacaagaaatagttacagaaggaaggagagtgcttgcatctggttacaacctattgctctatatccagagatctttgtcctagtggttccctgcattaaaatttttctcattgttttactcaaacccaaacttgcttctggactctatttggattttgagaatttatgtgttatgatcagtttccctcatgatgatttgcatttatgtttgctctgtcatactagttagggttgtttacctgtttaacatatataacattttggcaaaactacatgagcatttgttgcatataactaagtacaaaatgtatgagactctgcatttgtttcttttctctttgatcaatgatctggatttagaacttttgagttgctttaggttggcccatcatcatcaattcctggttcagccca

SEQ ID NO: 81865 - DNA, 374 bp, Citrus sinensis
  Intron number 1 from transcript orange1.1g002239m (locus o range1.1g001219m.g) derived from phytozome v7.0 (chr-ID sc affold00144; pos 51079 to 51452 reverse strand)
cgcagattagcagatccaagctcaacccatcaaaggtttttctctcttctacatctctctcctaaaagtttttattttttaattgttttgagttttagattaatgaaagcattaagaattctgttttgtgcatgtgaatttcgattaattcgagtggtatgtttatttcgctgatcggttgatttttgtttggatataaagtttgttgctttattgattattcttgggatattctgcttgtgatatatgcgtttctgtaaaattttgagaaaaaaaaattaaattgttaggtgtgattgattactgatgatggtgggtttggattctcgttgttggtaggttgataaagtggtttttattagttaaacaaggag

SEQ ID NO: 81866 - DNA, 849 bp, Citrus sinensis
  Intron number 1 from transcript orange1.1g029872m (locus o range1.1g027784m.g) derived from phytozome v7.0 (chr-ID sc affold00001; pos 1247452 to 1248300)
tccttatatctctgcttggcattctcagttaccaggtcatttctctattctcttctatttctccactaaacaattttgttttcgcatatatattacaaggacaatactagctcaagctcctacttctagaactcaagttacaaaaacctagatgcttgcaccaactaattttaccaaaatggccatcgatcgtcaccaactgctaatttaccgctcttctttctttcttttttctccagaatatcagccactaattttctgtaattcgaactttatatttgtcgatgatttgctaccgcgtgtacataaccagcatcgtcgttccggcatgcaatagaaactttgttgttttactgaagtcaaattcctagaatttaataagctttgtaaattccttaaattagagagaatttgttgaaatatgcaatttaatttgtacaagctggttttcaaaaatgaaaaataaatataaatatgaattcggtaatctctgacgattttttatctttgtttttatttgtttcctttatacctggcctgctgctaatcaccagcatcgtgttctggcgtgcggcagatactttgttgttttactgaattttttttaaatttaataagactttgtaaattcattaaattcgagggacttgattgaaatatgccatatagtttatataatcttttctttcttaatttttattttattttattcggtaatctatgataatatatatgggagccgtttaatgtattaatttaattttgacctagtacaaaccagaaggcatatttattcagagcagttattaatggcagtgatctcacattctgatggtttagttgcagttg

SEQ ID NO: 81867 - DNA, 595 bp, Citrus sinensis
  Intron number 1 from transcript orange1.1g017725m (locus o range1.1g017725m.g) derived from phytozome v7.0 (chr-ID sc affold00030; pos 934077 to 934671 reverse strand)
ctgcaaattgccggtagctagcttttctgacttatgtaagttcatatcctatatatacaagatccaaattcttggtttacttagggcaatggggagtcatatgcgcacgtatgttaaccatttctcactagtcttcggttttatgcaatatgattttctctgagtttaattatttcctaaattaagtcaaaattaaattgatatatatatatattttttggcataagaatttcgggaaagatttcacttcttttagtacttctttgaatcttttgtgaaagcttttgagaatttaatttcctgcatgtatttggtgtttttttcgcttttttttttatgagcctcggctttcttagtgagggaattttactgaaattaaatctctactccatacacgcacaccaaaattcaacaacggagaaatacttttaatgagcttttgatttgtttactagataattttttgttaaaaagaattattaatttccttctttaattagaagtacctatttttaataaaataatgcttgagttagtacgattttgtaaaatctattaaaattttcttgttgtttcagagatatagagctcctgg

SEQ ID NO: 81868 - DNA, 344 bp, Citrus sinensis
  Intron number 1 from transcript orange1.1g026874m (locus o range1.1g026912m.g) derived from phytozome v7.0 (chr-ID sc affold00001; pos 2888457 to 2888800 reverse strand)
gtggaggaattacaatttacacaggtcctcgagtctcaagccttcatcaaccttcagcctcattgatcgtttcttttatcgtaaaacattttttataatcgcaatcgaataacgttgttttttgctttctcgctgttcttgtaatttcgtaggttgagctcctcgtttctgactcaatgaccttaaggtgttcgcgaaaacgcctaaatgaaagcagagtttaaaatgaaaatctaattaatacagcagcgattcatctctttctttcttcaaagttcgcagttgataacagaactttcttcgagagtaatgatgtttttctcaaattgcttgcagttgccatc

SEQ ID NO: 81869 - DNA, 499 bp, Citrus sinensis
  Intron number 1 from transcript orange1.1g008698m (locus o range1.1g008216m.g) derived from phytozome v7.0 (chr-ID sc affold00008; pos 1328472 to 1328970)
ataggaacttgggttaaagcccatttcatttgacggtataatcgtatttcccatttgctcaatttttcatttttttattttattaatatctttgtggttacagagaaactatgagaactggaatgaaaattaaacatttttatggcactttttggtacccagatggacaactaaggtttctttttttatttctcttctgagtatctggggtcagtgtttttagggttttgagttactgctagctaattgaagtcgttttattattattgcttctttaattagcataggttgccttgcagttttcaaatttcaaatgcaatctgcataaattttaataactcaaataatctggtttatgtctttttgggtttaaaacaagcacaactccagttcaattatgtaatacagtgatttttgggttaattgcttgtctggacgaattctttcaagctaatgatctcaccatcaatttctcatttttcctccttcagagtactgt

SEQ ID NO: 81870 - DNA, 397 bp, Citrus sinensis; identical to SEQ ID NO: 81691
  Intron number 3 from transcript orange1.1g015798m (locus o range1.1g009542m.g) derived from phytozome v7.0 (chr-ID sc affold00021; pos 671413 to 671809 reverse strand)

SEQ ID NO: 81871 - DNA, 707 bp, Citrus sinensis
  Intron number 3 from transcript orange1.1g023946m (locus o range1.1g023946m.g) derived from phytozome v7.0 (chr-ID sc affold00001; pos 676099 to 676805 reverse strand)
atacccttttgaggacttgttgctggtgacccgtaaccttctatctgattaacttagtaaaaaaaaaaaaaaaatgattcgtatatgaacttgatgtttaaaatatgagtccggttatgttagaactgctctaaggtagagtaccctttcataatgacacaatcaaagttataatgagtgttttactatttatcactttgcatgtgtggctgtgattcgtgctctaccttagagcagctccgaggtagctatatgtatttgtcttctgaaccacacaggatatcccagcataagacaaaaataatatggtttcactttcatgtgatatattaactcttgagttctgtgttattgttgctgctaccatctgcaatgatcagtaacctgagatttgtacccctagcacttataaatggtttgcgctctgggtttacacttcccaagcatttgaaatgatcaataccctggtgtcgggacgttttcgttttctttgaactgaaatgatctccacccagaaaccaagaagaagagagagtaaaaataaatgacatctctctgtttttttgttttatttgctgttataaaagccatagaatctgataggattctttcatgttgcttccgtatgtgatagttgaagttgttggttgtaattctctaatgcaaatgcaggggaaggcgttggggtttcggtttcagcattcttg

SEQ ID NO: 81872 - DNA, 883 bp, Citrus sinensis
  Intron number 2 from transcript orange1.1g013825m (locus o range1.1g010297m.g) derived from phytozome v7.0 (chr-ID sc affold00111; pos 118510 to 119392 reverse strand)
aaagtaaatatctgttagctttggattactatgatgttatgttcaagtgtttgtgggtgccaacgattttagcgtttgtgtttttttcaatgttttgcttgtgtgcttttctgttattattaagtgctatcatttttaatgctgcctgatgaaatcactggctgtctggtaaaagtggattgaagcactttagctgctttgcttttaaagttttgttgaagcacggcagttacctatgtttggatggagggaaggagaagagaaaaagaaagtagggaagtttctttgggagggacagaagaagaactaagttaaagctttcaactgtatggtttcactgcaattgaagtgaggagaaattcatttattgtcaattagatcttatgactatgtgttaatttgtaagtttggccttgttctttctgcctataccgtgaaaggattgggcttggaatgatggcacatgcacaacattgcccttctttcgttgatttttcgagccaaaccggagaaattcctccctatctccttccctctcattattattttttagccaatcactgttttttgctttttccaaaacaatatttggacccttttatggcttaagacatgtcaaagaggtggagctttctttatttaatctatttaagtttgaaccttattggataaattttgagaaactcgtgaacattgaaggtgccaacacagcgttttagcctgtaaagaatcgtgcaattgggtttctgttctgtcacatttgttaataaaacaagagttgatgaattttgtgtgcaatttacagttatggcattatggttttatacttttcatatatgataactatttacttcttgatgctgatatgttaatatctgtgcag

SEQ ID NO: 81873 - DNA, 690 bp, Citrus sinensis
  Intron number 1 from transcript orange1.1g023657m (locus o range1.1g018568m.g) derived from phytozome v7.0 (chr-ID sc affold00001; pos 3639653 to 3640342)
tttgttaattcttggcgttatctcctcccaggtacgtgtgctagctttcttttcttttttttcacgttgaattgaatcctttacttagttgtttatgcatctatctttctctttttcttcgccttttgacctgtttaagtatggagagaatctggatcagatttcgattttatgcgaaacttgttcatctgatttgattgtatcctctatgttgtgggaatccgaaagttattattattattattgttgtggttgttttattattattattattattattattattgctttaattgctataaacacacggagagtgtatgccaagttcagacataatacagggaaaggtttgaataaaaagatgaggttgctgatgagtacacttaaagcagatcggatgatttagttgtatgttatagtatagtcaattagattacagatgaaatttcaacaactaacactagttttttttttttttactaatgggaactgtgtagcatgctggtggagtttatcataagttatggaaccaaccaaactgattatggatccaattttgtgtttgacttgctttgcggttctgtttattactatgttttgaatttaaatggttatatatatcatccgaagtaattggatgtggtgttgtttgcagacttttgcagagggagtggtttccaagctcaagct

SEQ ID NO: 81874 - DNA, 888 bp, Citrus sinensis
  Intron number 1 from transcript orange1.1g000683m (locus o range1.1g000072m.g) derived from phytozome v7.0 (chr-ID sc affold00001; pos 842516 to 843403)
ccaacgccgattccgtcttcagagagctctgtcaggttatcgtctattcatctttcaattatcaagtagtacttttgttgcattaatcatcaatgttgcattaatcatcaacatgttctctttacatctttcaaaaccctaatttttcctgaactgtaattttttcttgagtggtgcaatcatatgttttattggctttgtttgtttattgcttatcaatttcttgcaagattttcaataaacacttaaaattttgccttgttttttaaagagttttcttcaacattttaaaaaaaccctaaaaacgtgccagttttttgctaattaagaaacatattcactgcaagatatccaagaaacgctggatattgcgcctaatgaatatggaagcaattgaattgatgctttttttttttttaagatcaacattgaattgttctcaatttggtaacgttaaagttttcttgacttttatattttagtaaatttatgccagcaagtttggtagaaagtggtgttgatgcttaactattccttggaatactattacgtcctttccgttttccgtttatataagaatatcatactgtgttcattgcacttgcttaactaagtggtgattatatgttcttggttttcgtttgttttgagttattgcaagattttcagggaacctgaatatgtgagtttgaatatcgaagctattgcattagggattaatgattttctcaaattatttcgttgatcactaagcttcatttcaaaacgtggatgatgaatcaggatggaatggctgtctcttagatgtataacctgcctatgtagtgctttaaaacttaattgtttctgacatttactttcttttttcttgttggtagttcattgaat

SEQ ID NO: 81875 - DNA, 691 bp, Citrus sinensis
  Intron number 2 from transcript orange1.1g023092m (locus o range1.1g019197m.g) derived from phytozome v7.0 (chr-ID sc affold00021; pos 1236274 to 1236964 reverse strand)
cggctcctcttgcaaggcttaccattctctttcaggtttgtttttagaagaattatcaatttggtattttgtgggtaccagttgtttcgtgggttaccttttgtttgttgagtttcgataatgttcactgatgttaatgaggcataacattgtagtacgtgggtttaggggggataatgctgggggcaagagcaagaatgagaatgggattgttcggtattgtagtgtggggcaataggatgtgaaaatattataatttgttaagagtggcaagtacttgtagtgaggggcaataaaaaatatgtttatgtttgcggttatggaggctatgagttgaattaatgtgagaaataaagctgctacattggagggaataaggggttttcaggtgttttgaattgattcttaagactagcatttggatagcaaattacctaactaggcttcggtcagctggtatagcagtagtggagttagcgagattgattgcaaatggctttgagtaatgatttgtttcacatgtcataatccttataatgttttcagttttttgaaaacaaaatgcaaatatatgggggtgaatgcgtattcatgctttcttatatgttatgtgtttaagattttcttgctggcttacaccatcaagcctgcctttttgatgtcgttatattttcttctacaggtgcaaggc

SEQ ID NO: 81876 - DNA, 797 bp, Citrus sinensis
  Intron number 3 from transcript orange1.1g033030m (locus o range1.1g033030m.g) derived from phytozome v7.0 (chr-ID sc affold00001; pos 4585653 to 4586449)
atcctaatgtaagtaacagagcccatttgccaattttttcttgttctgtcaatggcatattggtttgcatggattgaaagtattttactatgacgatttggttgttttatgcataagctttccaatgtgataacttgttttgtttctttggtagttgatgattttattacagtcattaactcttcgagatctgtattcttttattcataatttattctgaatcttttccgagattcttttggtatatgcatactctttctccatttaattgaagttggcttgaattcggaagaagtattatgtatggtatgatttgagatatttcagagtcaattgtatagatttaggtttatacatttggaaacataagaatgtgaggacggttgtgacgtttacttacctcttcgatgaggcctgtagcaagacgtttttccttcttttgagccaattgggtatatgttctccactgttcaaactgctgcatgcatgcatatgcacttctttagcagactgggtacatttcttctaaaattcagagcacttctaaatgagttgatggagagattatagcattgcctttagaatgtctttagtgcaggtctttactctcttttcactatatagtacttccttgttgcactaacagaagaagtttcattttttaagtttatccatggttgtggtggaactttatgattatgtttttgaaaattatttaccatttgagattgtatttatgaatttcttgggtggcattatcagccacttccagaaaccgtggcccttgtggaggacat

SEQ ID NO: 81877 - DNA, 772 bp, Citrus sinensis
  Intron number 2 from transcript orange1.1g034921m (locus o range1.1g034921m.g) derived from phytozome v7.0 (chr-ID sc affold11658; pos 303 to 1074 reverse strand)
tcaaccaagttcatgtaagcttcttgtcatttcatccattctatatcagtttgttactttttagataacactccttgtaagactcgtgtactgaactatgaatttttgtcgccactcattttgatttctctttactatcctagattctaaaatgtttatttttctgacatgagtagttctctataaaaggggactacaatgaatctatataaattgcgttatcaatgctactgttctgttatcatcatttccttatctgtgctttgtttcctcacttttcctcttaagttggtcctttttacttttctgttactttttttaggccaaagtgggttcgtttgataaaatcagggatttaatcttggctcatttcagccagattagacattaaatgggatgtttcattattaagttcatcttgttgaaagctttggtcgatttgtcatctttgaatgaagaaaagaaaagattttaggattgctgatatgatgttaattttacgattactgttgtgatgttaattttgatgcattagctgttgggctactgcgctgactatgagatagttaatttatttgcttcgtgtatctatgttgtgtgaagtgcttcttttagtaaaatggagctctctgtttccttctagtgctgtattgccttatacgctaccgaacatagtggcaccaaatcgagcaaaatttgtgttgttatatcttcattctgtttgggaaattttttcctttatagaatgcgtgtttgcaggacattattaaat

SEQ ID NO: 81878 - DNA, 818 bp, Citrus sinensis
  Intron number 3 from transcript orange1.1g000331m (locus o range1.1g000329m.g) derived from phytozome v7.0 (chr-ID sc affold00144; pos 120676 to 121493)
aggtgccaattcattttagaagcttatattcctattatttgcttgcaagcaatggccattggtttcaggatgtattatcaatgcagagagcccaatatacatattggattccagtttctaacctagaatatttttactgaaaaacacaagttcaaaatattctgtcaaaaatttcttggttcacctaggcaaacactggttccattctgctttttgatagtcatattcatgaaattagttatcaggtttaccagttgggagtgcatataaattctcctgattagaagcagagttacttccctcacaaatatttccctgaaatttttatttatttcaataacaactgaaaactctggggatttactaatttattttgaatctagatcatacatatctatcttagtcttttccataggatttgcttgggtttaaataattgtttgatatatttgaggaaaagtaatcaggagcctgcttatttatgatacctttgtaattcatttcattgctcagacaactaatcatagattagcgttgctagataatgatacgtcccctgattttacatcgcattgccatcttaatgaatttattcttcaccatgttattgacatcttgggagaagtgattaaacatgcttaattaacatttaaaagttcccattttgtttgtgcacctgatggtatgaatgagagctactttttgattagatatctgccctggattattaaagcacacattccattcattgcatcccttttgtacaatttacatttcttgctttgagttttgttactttttattaatttcaggacaat

SEQ ID NO: 81879 - DNA, 584 bp, Citrus sinensis
  Intron number 1 from transcript orange1.1g045796m (locus o range1.1g045796m.g) derived from phytozome v7.0 (chr-ID sc affold00698; pos 29276 to 29859)
cacttaacaggaccgagcttattgctttgctcttggtatgcctagcctcaaatcgatatatgaaattaatatattcctgtacatacttttgctaagaactaatgttaagccctggcctattagtttaaccttttaaatcaagtggtttctctaatatagtatcaaattaagatctcgggttcgaatcctcttagttacaaaccgttggattaattttttcttcatttcgtgactcactttcgaactctaatcttaaggcttatctacgaatcttgtcttaaggtccacgtttcactttaggatctgctaaaactctaatttttttattgaagtcttagttcacgtgaaagcgttgtaaagatttgtactgaaactcttggccattactaaggtttgtctaaaatgtttatttcttcaattttttgagtcgttttcgggctcttgtcttttgggttagtttaagcttttggttcaaacacagttcctgtgacataactaataaaataactaattcggattgctgtttatttgttattttgaaacttacaggatataattttgggtggcacagacaccaccacaac

SEQ ID NO: 81880 - DNA, 501 bp, Citrus sinensis
  Intron number 1 from transcript orange1.1g023336m (locus o range1.1g023278m.g) derived from phytozome v7.0 (chr-ID sc affold00266; pos 25782 to 26282)
caaccccatccgtgtcaagtacacttggtatgagtccttaaacttctctacaatttaaatatttaaattttgagtttctcttgttgcaaattgctcttggcgattttgctagtgagtagaccatctgtattggttcaattttgtacaacaaagcaaaaagttgtcgatgattttaatgtcccatgttacatcagagtttgctgtggtgagcgaatagtacttgataccgctatttgaaaatgatgatacataatgaattgtttcctactatgatttcaaaggaggcttttagaaaatgccgggactaaaagtagtggcgtaatttttcttccattccacagctactgagaatggggacctaagaaagtctatgtttgagtacagatcataattaacaagtccctactagctattgaatatcttacttttctgtgtcactttgaatcacatgatttctgtgaagcaggtagtagctttaagggtgcttcgttgccgaggagc

SEQ ID NO: 81881 - DNA, 178 bp, Citrus sinensis
  Intron number 1 from transcript orange1.1g032147m (locus o range1.1g032147m.g) derived from phytozome v7.0 (chr-ID sc affold00001; pos 103072 to 103249 reverse strand)
cttttaagaagccatcttgggtggttcgaaccgaggcaagctgcgctttattttattttgtttttctcaaaaagaaaagaaaaattattttattcattcatagaggctagagctatgaagaaaagaaagaattgagcgtttgttcgtttgattggttttggttttgggttgcagtcaa

SEQ ID NO: 81882 - DNA, 560 bp, Citrus sinensis
  Intron number 1 from transcript orange1.1g017796m (locus o range1.1g017634m.g) derived from phytozome v7.0 (chr-ID sc affold00012; pos 472925 to 473484 reverse strand)
ccaagttgctcactattgatcaagattactggcatgtaagtcttctttaacaatttttattttattttatttgtttttatgttttatgctctgttggaatttggcttgctattctcttcttttgatttttttatttctttgtgctgatgagaaaaagcccaggggttaaggagattaagttagtaaactgcatttgcaacctctggcatgaaggattttagagaaattcactgtagtttataatttgtatgtggtaacataatttttgtttcgtgaaaccttcttgctttgtatttcaaatctaagagatggtgtctggttaatttcagctcactattttgattagcacacataatttttgtctcctgaaaccttcttgctttgtatttcaaatttaagagatggtgtcttggtaatttcagcttactattttgattagcataacagccgtttgtatatctttattggttgcataattaatagtcattaaccattttgatcttctaatgttcatttttatttttccttttagggttggacaatttttgaaatagtaagat

SEQ ID NO: 81883 - DNA, 685 bp, Citrus sinensis
  Intron number 2 from transcript orange1.1g037502m (locus o range1.1g037502m.g) derived from phytozome v7.0 (chr-ID sc affold00810; pos 6200 to 6884)
ggtcattcttgcgattgtggccgcgttttttcaaggttggcatcgtcttgtctatatatattttattcattctatgatatatcctttttattttttatttttttgagaagatatttagttgctcctctccttcttaggttatttttgactgattggaccttaatctcgatcatttttaattaacagtacagtgttactgttcattggccgttgaacacggttcccaacccaaagatcagttttcgaatcccttttaatttgctggctgcagcccaaaacccaaaacaaaggtgtttaattttgtaatatgtaataatcaactgtgcctctatgtgtgtcttgaatgattagctctccacttacgattactaattttttttcctttctattttccctttttcctttttaactcagtcaatcctttttcaaagcgtttcttttataatcattttttcatgtttcttgatgtattaatgacttgatctcttccttctattgtattagatgctcatttttatcgataacgacacctagatgcagcccttttgaaaatttctttgttccacttttgtggtgcatggaatcataagcttttcaaattaaatgtgcgcaacgatctaattaattaattttatttattttttggttcttctctatagagttgagagtttcattgaacaccaag

SEQ ID NO: 81884 - DNA, 606 bp, Citrus sinensis
  Intron number 1 from transcript orange1.1g007906m (locus o range1.1g003631m.g) derived from phytozome v7.0 (chr-ID sc affold00105; pos 257694 to 258299 reverse strand)
gctgtctctgcctcaagtctatcctcgagaaagtatacatgggcccttcattctgtttgcttactgtaggcatacttttctaatcaatatttcaacggagaatgcttctcaagttgtggtaattcttttggattttaattggagctataagggaagtggcaagtcaaaagactttctgcttattacctcatctcttaggattcggaagcagtaatatagaagccccttagtaattgtttgtacatagatgagataatagtatttagcaatagctaaatagatcataaaagtttccaataacaaatatttaaagaattttggatcaagtacaaataattattagcaaaaagatgggtgcaggaaaaaaaaaattgaattctcgagaacatatattgcatgcatattatgcatttccaagatgtagattctggttataacatctggctttttctcttttttttttcttcgttgcgcagaaccatgtaatattattcaagaatctatttggtcataatttatccacgtcttaaaaattataaaaaatttcttcttatacacaactgttttacagggcaaaaagattccccataaaagtggaaaacaaga

SEQ ID NO: 81885 - DNA, 379 bp, Citrus sinensis
  Intron number 1 from transcript orange1.1g007121m (locus o range1.1g006692m.g) derived from phytozome v7.0 (chr-ID sc affold00001; pos 3923834 to 3924212 reverse strand)
cagtactggcattgctctcaatcacgtccctgctggtatatcatttttcaccctttttttgtgttgagaatttatttatttattcttttatgaatatgacttcgatgatgaatcttcactttgacggtagaatttcataccaaaaaagatcggttttatttgttgattgattgatccctgatatttgattttgttttagaattaatcgattcaaagttttgtttttttgaattttttagtttgtgttgtatggtgttaacttacgtgttaaagaacggaaaaaaatataggtgttaaagatgcaagtgacaagaagattttagttgacatgctattttgggcagtggacaaccctgctccctcgaattatctgctgatt

SEQ ID NO: 81886 - DNA, 389 bp, Citrus sinensis
  Intron number 1 from transcript orange1.1g021242m (locus o range1.1g021242m.g) derived from phytozome v7.0 (chr-ID sc affold00001; pos 5863627 to 5864015 reverse strand)
ggaatgtgagagattcatatttttcttctttgcttgatcaatcagagtctttatgaatgtagtttatattgtttgatctagtagtgactttaggttcaacgttgtacaatttagaaattttattgtattggtattgacaatatgatgtatcatcaaatttagtttataataattgtttggttttgtatatttgacaagaattgattttagcacgacatatttattcattcattcactggttgccttcattttcagttttttattctagttctattgtgagacggtgatgaagatctgtttatctctatctatattattgtcaaatatccatggatatttggttatgaagtcctgaaatagctgtttataagcttcattagaatattacg

SEQ ID NO: 81887 - DNA, 1045 bp, Citrus sinensis
  Intron number 1 from transcript orange1.1g043317m (locus o range1.1g043317m.g) derived from phytozome v7.0 (chr-ID sc affold00570; pos 58796 to 59840 reverse strand)
aaatttgacaatcttgcaagtgttggatttaagcggtaatcgaaatttgacaacgttaggtaagccattgaatctgagataagaagcaaattgagaattaatgttcttcaaacgcttagatcacatacaatgcctttaaatgtaacattttcattttttatcggcacatgtaggattggcagatttgccaaacttgaaagcattggatcttcgttattgtgggataactacaattcaaggtatataacaattcacttccttcaatgacaaaaattgttttagatgttaatcaagatgataatatatttccattcttttaattgcttttttcatattttcaagtttactcaaagtgcaaactaatttaagaattatgattcaaatactccaaatcttggtaatgttaaaagtgacagtagataataaaatatcaatagaaatgaaaaataactcttcctgtcatattaattattcacgaatatcatttagaaaatttatgtctcataatacagtgctaaaaaatctcattggtttggtatggaagaaatccttttttttttcttggaatggaagaaacgggtttaataataaaaataaataaaaactaaagcatggggtttacactaataagttttaataagggtacttttgtcattgaaggaggtgttaaaagaattttataataatttcaaatattttaatggggttaataaagaaaatgggtgttaagaggtatttagaggggtgccaatagttccactcttatttgaaatgctttagaaaaaaacaccataatatacgagaataatacaaattgattcctatgaataattttgcagggttttagtgttttttttttataaatcatacgggttttgactaaattcactaaaattagaaaaccataaagtcattctttctatgaattttaaactttttattttttactttcaggattatgtgagttgaagaatctttttgagttgaatcttaaaagaaataatgttgagggtcatcttctaattgtctcaaatacttatctcac

SEQ ID NO: 81888 - DNA, 538 bp, Citrus sinensis
  Intron number 3 from transcript orange1.1g032021m (locus o range1.1g030692m.g) derived from phytozome v7.0 (chr-ID sc affold00032; pos 804318 to 804855 reverse strand)
gttcaatatcagaatcactcgatacgaaggctgtaatatctatctacctccgccattttatttttctttttaataaatgagttgggcaatttcgtttcatgatcagtgcatcagttgttatcagagttgctaatttggattaattttgatttatttatgatgcattaagatttgaggcattatgcataatgtttagcttgagtacttttgacgtgtgtagttgattaaattgcaagaatatgcataattttttatattgcaatgatagaaagggtttccagagacaccacctaatgattggatttgtaggtcaaatagactaaccgtgtggatagatatgtagagacggaagtatcaaatagggaagctgtgggggattgaaatttttctttttcctctttttgcttttgttatgttcatttgtttgcattgtgatgtaattagtacttttgttcgttaaagtttcttcttatgatttgataacttttgcatatcggatatagacggttgaggggcagagacgaaagctggaagaaag

SEQ ID NO: 81889 - DNA, 204 bp, Citrus sinensis; identical to SEQ ID NO: 81708
  Intron number 1 from transcript orange1.1g023608m (locus o range1.1g018578m.g) derived from phytozome v7.0 (chr-ID sc affold00217; pos 116432 to 116635)

SEQ ID NO: 81890 - DNA, 606 bp, Citrus sinensis
  Intron number 1 from transcript orange1.1g043009m (locus o range1.1g043009m.g) derived from phytozome v7.0 (chr-ID sc affold00111; pos 407198 to 407803)
tgcctcaagtacccataggatgataagagagatccaccaattattatataaccagtaaaataatcaaaacccaaatggaaacaagaccagagatagagatctgattaatgtaaagtcaactcctacagcagttcttggaaaaaatggtttttcaagttggcactctaccaggcgcagaatgacaaaattaccctgtaaattttcatgttgtatcatgccagcaaaacctttcagtagatgaacattttcagtttccatttgatcgaattctttcaacaatcttgatgctcactaaaacatttggcaagcacgatgcttgtttgagagatatctgcacttcagaacagctgcaaacatgtagacgcacatgttgcaggttactgtatataagaagatttttaggtaggtaagtgacataactaatatatcgaaacacaagggtattagtgtcagttccacagactattcgtaagttttggctctatcttcaccacaggttgcttgatcccatattaataatatatatgacctctcaccagcctttattaatgaacaaactcaatacaattagcctcttcaactcttgttaacaatctttttaagctt

SEQ ID NO: 81891 - DNA, 739 bp, Citrus sinensis
  Intron number 1 from transcript orange1.1g012436m (locus o range1.1g012436m.g) derived from phytozome v7.0 (chr-ID sc affold00021; pos 322702 to 323440 reverse strand)
atcgcttcggtgtcgagctccttcacccacctaaggtgccgtcatttctctcatttgattgtttattacttgtttttgttttattaggctttgcgtttaaaggttttattttcgttaattgattcttatgctcaatatttgctaatctggctctatggtggcgggatgggaaattgattcatccaaacgatggaatgtattgtatgtactattgatggagatgatacgttcattacgtgaaatgaccaatttgacttccagatgctccaagggtcattttggttacctgctgaggatactgacattagttgatgagaaaatgagtgtagaaaagactcaaatatacttctgtagaaattggtgtgcttcttgagaaactgatttgtgaatttgtttgtgttaatttcagaatgtgattgattgacagttttatttagtggaattttggagggaaacaactaacttccccttgaattatgctctgtttgcttgggataggatctcttcagccattggatgaggattcgcttggatcctaattcatgatgcttaaattttcttagtttttgtcaatggctcaaactgattttaagattaaatggctatttttctatataaggacatgtggtgagggaggatttgctggtacaaatctgttcacctacaattttttatttctgtgttgttcatgtttgtttgaattttcttatgctcaggtggtgcatctttatagacggaa

SEQ ID NO: 81892 - DNA, 500 bp, Citrus sinensis
  Intron number 1 from transcript orange1.1g017589m (locus o range1.1g017597m.g) derived from phytozome v7.0 (chr-ID sc affold00008; pos 1798866 to 1799365)
aagttgttgagagtgctgctaaaactggcgctgaggtttgatttaactttctctctttctgttgattcttcatttttcagcggtacccagttcctttttttttttccttgtattttgcaatgcattttcagcttatgagctgttaatattattacaattatttatgattttgttttctttattattttcacgagttacccgtttgtttataatctgtggctttttttgttcaatgcattctcattactagttaacgaaagataggaaggcgccggttttgttgatttattgtacaagtttttgtgctttgagatgagtgttcataaaatgtattttgggttctggcaagtaaatattgactttatttatggctactgctaaatttgctataataaaatacgttctatgtaaccatatgcttattttccagggtaatgatcccctttctgctgttgccaattaaaagtgacctctgaccacttttttctttccaggttgtg

SEQ ID NO: 81893 - DNA, 684 bp, Citrus sinensis
  Intron number 1 from transcript orange1.1g005485m (locus o range1.1g005485m.g) derived from phytozome v7.0 (chr-ID sc affold00266; pos 200398 to 201081)
tttcgtctcttctttccgctgattcctcagtcatagtgagtttctctatcttttgtgtttcctgcttttgatagtttgaaattcggtgtgtttgtgattctgtgtagtttctagggtttcttggatctagtttttttgcccatttattttcatgttcttggctgttaatatttctgggtttggtcatgccaatggtacttgttgccaatttgtcgcataagatattgtgtgttcatatattagggtttttcaattatctctaggttttgtgtaagttggtttgatatttaagctcgattatccaactttggttaaaaaaaaaaagaaaagaaaactttggaaaatttcttgaaaattgatgttggattccacggcaggacttgtctcaatgatggttcttgttcttatattacatgttacatgtaatatttagctcttttataggttctttcctggtgatgctctagtagtggactgtttgcttttttgcatgtgggcttcttgttgctgcgaatggcccagatccacttggcatacataattaagtccacagagttgcttgtctattacttgcgtgaactggaataatcttagattgctttgtgactttgtgtacgtttgagttgtgttgattcttattttcccataggcagcctgtatctgcgggagtggctgttggtaaat

SEQ ID NO: 81894 - DNA, 985 bp, Citrus sinensis
  Intron number 1 from transcript orange1.1g014039m (locus o range1.1g014026m.g) derived from phytozome v7.0 (chr-ID sc affold00029; pos 749523 to 750507 reverse strand)
ggtgagtcgatctttttacttttgttgattttattttttgtgtattttagctcttcaatttagaatttttattctgattatagtttcagctgtaatccttctgcttcattgaaatgcagttggagttttcagttaatgaaactgtgtgtggttgccgagagaacggcttttgttttctgttgctttttagcttataagaaaagctttcagtgagtggaggtggtcgttaataataagtttacttcagaattttgattctttttcctccttccgcaatttctcagctaccgaaagaaacttttatagagaaaaaaaggaaaaaaatatcaattgatgatttcggttgtggttttgctttttttttttttctttcgtttaaaaccaaaaaataggaatacatattgttcaaacattgagaataactttaaaatttaaattatttactattatcctattacaattttttttcttttttctttttttaatcatcagatttgaaattctcgatttatctcttttctttctgtcctttttttttgggaaaattaagttcctgagttggtaagctggtgatgttatttatcttcatcatattttatgaaaaatatcaattaatttgtgttaatggtagtaattaatattcactgaccagtgattatcatatgaccttttgataaatttcttttaaatctctacactgtctggtatttgtaaatataaaatatattttattgttgctggaatcgacgaccggatccatagttttaagagtaaactggattaaagcaggctcatatcaagttgtgtatttcctcatatttggtaactctcagttgtgtgtttggcgcttatactgaaagatttgggccgtgtgagttttattgattgatgatctattttttgcagctatgtcctagatgctattggaaatggatttttgcattaaattgtcttctgtttgtgcaggagttctactgaaggactc

SEQ ID NO: 81895 - DNA, 694 bp, Citrus sinensis
  Intron number 1 from transcript orange1.1g020728m (locus o range1.1g014622m.g) derived from phytozome v7.0 (chr-ID sc affold00001; pos 2020023 to 2020716 reverse strand)
tccaattctcacgagtcaacatctcttctccaaaggtacacgacgtcgttcattcattctttcttctttaagctggttctcttttatttaattgtcatgtggaattttagttctgcgtgtttgttcttgcttgcaagaagatgcaggaaagtaagacgagaagctgttgtcatttgtttatttatttattattaggtttcagcgattgtgtgtaggacttgtttggctactgagaaactgtaggtgatgacggaaattgaagtaacttaaattttcacttgtcagggtgtttgacgtttaggacatgagatccggaacgttgagattagcccaaacatagggccatattactattttgtatagtctagttattaaaatagtgttttttttttaaagtcttttaggattcaaataccacccaccgggtcaaataggttctaacaaaatgttaaactaccgtcaatccagaagcttaaactcgtgggaaagaataaacaacagcagttataatcatctatactaccctctaataacattcaaagtggatttgggacttgtcttatagccttcttgttcatggaatctcccatttttttcctccgaaaattaatgcaataattttccatatacatgtgtctgaagtgatcttgctgaaatttttgacatttcttattgttttgactttaccagctcg

SEQ ID NO: 81896 - DNA, 648 bp, Citrus sinensis
  Intron number 1 from transcript orange1.1g018867m (locus o range1.1g015104m.g) derived from phytozome v7.0 (chr-ID sc affold00015; pos 1819040 to 1819687)
ctggtcctgaggtacgctttaatccttacattcccacgtcctcaatcttttgcacgtcttcctctagttttctaattcttcgttttagcagaatagcttaaaaaatagttttttccccttttttgcgggggttggtaattggtggctgtgtatgttttactgcttattagagatctgggaacttgaaattggggatgttatattgaatctgtaactgggtattggacactgcgtcggtttgattgacttgattgagtttctatttttttttttttgggtttatgcaatgattgtttaagtttccctttctaatgttctgtcgtgacatggtatgtgaacgagtagagcaattttgtcataaatataaaactttcatcggtttgaaacaaaaatgtggacagatacagagttttggagaaatttgagcctgtagaaccagccgtgtggttaaattttgggtttattttcagataatgtgcatgttggtgaattgatataagaaactaatctttcattataaacaggaataaggatagtctgatatttgtgcggaattttctatgtggtttaatttggattttgttgagtgaatcctgtgtttgtggtatctcaggctgcagaagaacaagttaataggctttgtttgga

SEQ ID NO: 81897 - DNA, 799 bp, Citrus sinensis
  Intron number 1 from transcript orange1.1g023847m (locus o range1.1g023847m.g) derived from phytozome v7.0 (chr-ID sc affold00020; pos 1613777 to 1614575 reverse strand)
acttggtacgtgtaattttattttccattaactttttagtaaatttatggggtgtttgaatttgtctggcggttaattgaaaaaaataaagtaagacaaaacattaaaaaaaaaaaaaaaaaaggagcgagatttttgagggatgtgttttgttttgattagattaaagttgagctgggacaagtattttggattgttatgtttaagctccaatgcggttttcttggaacattagaagattgatattgacttgaatcatacctaattagagagcctgctttttaagcaaatgattgagagaaaggaattctttttgtgataattgtttggtgtggattcagttttgggtctgtacaaatctgaattagtttttttttttgggtttttttgacgctcaattgacgggaggatttcctttctttcaaagttaccagatatttagatttttaagatttgagattctggttattgttcctttcttcctatttgatttattagtaaatgattgaaattaaaataaaagaaagaaaatttgatttaatattgtttagcctttttttgtgtgtgtgtgggtggtggggggtagaataagatgaatcagaaatggaaagaaacagttattaggttgactctcagaatgtgggtttttatgttggtggagctcaggtacattggccatgataatgatggttgatctgtgttctgactttagtatggagtgattcaagttgggtctttgttcatattatcatttgattccattttgattttcaagcttttattttctgtttattgcaga

SEQ ID NO: 81898 - DNA, 574 bp, Citrus sinensis
  Intron number 2 from transcript orange1.1g035098m (locus o range1.1g035094m.g) derived from phytozome v7.0 (chr-ID sc affold00020; pos 1198569 to 1199142 reverse strand)
agtttgaagagtttgaaatcaacgaaggtccgatttattgctctttacttgtagggttcaacgttgatttaattttattctattttggtgaatctaaggagaaatttattattcaattactgtcgggtttatcttgctctcaacgcaaaaatatatgaatctatcaccctaaattgatctacgctttatgtgattcggattgtagccttcgccaggacatagcttttgagttctttaatctaaaaattttgttttttttttaattctgtaaaatagatagaattttgtttactaggtaacctagtggtgggttctgatggtaattgtgaaatgctttatggtatttggttttcaaaatctatgcaccagagctttagctttacaagtactgatatagctagttgcagacttgcagtgacaggattcaggatttcgtagcactttgattgcccgttgcatggtctattctgctactaatttcatgaattgtttcgagttcttcattttgttaatttaacaattaaatattctagtctgaactgttcttgtttctaatgacaatgaatttgacaga

SEQ ID NO: 81899 - DNA, 849 bp, Citrus sinensis; identical to SEQ ID NO: 81866
  Intron number 1 from transcript orange1.1g032670m (locus o range1.1g027784m.g) derived from phytozome v7.0 (chr-ID sc affold00001; pos 1247452 to 1248300)

SEQ ID NO: 81900 - DNA, 583 bp, Citrus sinensis
  Intron number 3 from transcript orange1.1g020414m (locus o range1.1g020414m.g) derived from phytozome v7.0 (chr-ID sc affold00001; pos 5284677 to 5285259 reverse strand)
ttgagctggtgcagttgcgaggcacagttaggccggttagtacaaacatattttttcagctcatattgttgttattaaatgcttctgctctataattggaaaccttaaacgttgacactgtaaattagcatgtttgcatttttgtcatggaagcgtcacctaattacagagtttccagctattcagaatattgcttcattaaccatttacagtaagggaataatcactcgtgcaatgtgatgattacacatacatccattcttttgtttgtggatacatgctcatctatgaacaaatggacatgtgattttctgagaaaaatttctaaatgctcgtcaacaaatttaattagaatcagacttcttttaccagctgcttatattgttcctctggcaatttggaagcatttcagtaaactgctgcatatctcagaaacaaatataatttttcataacagttacctataatattctatttgttttcttttccgtctcttggttaagtttcataaaactgcatcttttatgtaactttgaggtttggactaggttatcttggcagggcgaaaggagactgtttcctt

SEQ ID NO: 81901 - DNA, 565 bp, Citrus sinensis
  Intron number 1 from transcript orange1.1g020414m (locus o range1.1g020414m.g) derived from phytozome v7.0 (chr-ID sc affold00001; pos 5286075 to 5286639 reverse strand)
cgtactggtaggaagtccaacctccaggcttttcagtttcctcttttttttttaaactttgtgtcatgatagattgccattgaattttttgtttctttttatctcaaaacaactcaattgctgcaaattgaccgataaaatctcttcatggtaaaatgagttacactggttgctctctacagacacgtgactgtcagcgtaaaggtctgtcaaaactagtgcttcctttaaatggagtgtgtttttcttagaactcaaacatagatagtttatttcaagaaaggcattcaatgagtcaaaaattacacaagtgtccgtacaaattttatctcatattcaaaataaaagaattttatgatctgatttaaagccaataaatcttccaagtttcagtagtaaattgccaatagcttagttaaattttgcttccttcactttgtttgttttacatgaatgaagcttattcagtaattttatccctactgctgtctagatgagggattttaatttcagtgttcatttttctgaagtggggaaggaaagaaagctgctgattgtctgcgta

SEQ ID NO: 81902 - DNA, 872 bp, Citrus sinensis
  Intron number 1 from transcript orange1.1g006445m (locus o range1.1g006371m.g) derived from phytozome v7.0 (chr-ID sc affold00578; pos 90046 to 90917 reverse strand)
atcaaggcgaaggtaatcttagttatttttgctgtttatggttctaattgccattgctgttgccagaatggcacacttcatttagctttccttttgaggttagagtaactcaaacttctttttggttcacaaactatccgtgactctgttacattactgcttgacctcaaggtttaagctagttggtaatcggatcaatagtattatgctttaccaagtaccgaataaacaagcttcaccaatttactccaattcttgtcataatacactgggactgagtgccattacatctataagtgtgtaaatgagacactgcttcagagtttgtcagtttggcaaatgaatagggagaggtgtcaattggctttaacctgtaactgtaattggattttattttacctgaatcttaaacaaaaatattctttttggtttagagttaacttcggaaacaattgtttgaaattgtagaagcctatggattgctggaaagtaagcttggtttttctagactttgacactttttcatatgattcaaagaaacaaaggcaataatattcttggtcttcgagtattttttctattctaaatattcttgtaattccacagaggatttacttcatatactccagttttcctattaattggaagttatttgatagagatgatatattcttattgtttttacctacatttgcaacttatttcttttctccaaaatataaatttaacttcttcagcaggcatataaagaatttcaggagccaccatgtataatttttcattcaacaccagtagttcataaacgtctcacttccaaagaaaactgattggttgcaggaggaacatttgccttgtattccttacttagtcgg

SEQ ID NO: 81903 - DNA, 529 bp, Citrus sinensis
  Intron number 1 from transcript orange1.1g005183m (locus o range1.1g005183m.g) derived from phytozome v7.0 (chr-ID sc affold00103; pos 391114 to 391642)
ctcatcaggtttaaattttggatctttttgctgtttttgatttgtctatggtaattctagataaacatactagttggtttgctttgtgtttttcaaatgatatgaaagtttgaaactttggactgtttcattggctttgttatttttaattttttggttcatgtttacgtgtttatggttctgtctcataattgttatgaaaaatctgagctttggtttaaatggttagtttttgaaccagaatttatgtgcttctcgatttaattttagtgttaatggcagttttctgcaattgctttcaaaaaatttagctttattgttggttgttggatcaatttcattttttgtaatttgtttcctctggccattgtatgagttttagaaggaagatcagccattcttttaaggtttgctgcttgtttggtcttgttggctcattcttcttggtaatgtaaatattgacatttttattttcctctatttaaatattagctttccttttggatgttcagagtgaattcattgcgga

SEQ ID NO: 81904 - DNA, 677 bp, Citrus sinensis
  Intron number 3 from transcript orange1.1g003255m (locus o range1.1g003224m.g) derived from phytozome v7.0 (chr-ID sc affold00204; pos 183325 to 184001 reverse strand)
ctgattccgtcaagtggcaaacgagtatgcaattccgttactagccattttgtttaaattttcctcagttcttgtgttctgtcattttattttaaatcacgggtggatctatttgataatgcgctttaaacaataaaataaagagtagttttggctatttaaccttattagaaagttaaaaaagagctgcttagagaagccttaaatttgagcttctcccagtgggcgtaaaaatgcatttttgactcttcataaattttttctccacttgtaaacaattgagaccaaaaaaaaaaaaaatcgaaagaatttttaacaattaaaaaaaaaaaaaaagagtttgtttagccaatggagaggccaattcagacaagcattgattgtgatatcatcttataggaaatgaaatgggagttgggttcattggagttgtttaataagaagttaattttttttttacaataaaacttttatcatgttaagtaataattagctgatatgagactcttgtatcctatgataaaagataagagacttaaactatgtaaaagaatttctatttcattgaagtgtctgcagcagaaaacttcccttgctcaaagtcacaatgagttaaaccttgctaagacagtgaaatctgctgcaggctgttgacacagtcgttgctggtattctac

SEQ ID NO: 81905 - DNA, 561 bp, Citrus sinensis
  Intron number 3 from transcript orange1.1g021688m (locus o range1.1g014430m.g) derived from phytozome v7.0 (chr-ID sc affold00001; pos 2231968 to 2232528 reverse strand)
gtcacaggtgtgtacatggcatctttgtaactcataagataaatgtctttttgtttttgacaatgaaaatccttgttcacagtctgtagtgtgtcttcagatatgataatactttttgaatagtttcaaagtagtttgacctttcttattttgattaggtgcagttatgtcatctaacagttcaatggagaaagtttcctcgatttttctctatattataaatctataaatgtgggaccatcttaaattatattggggtgcacaaatttgtgactgaatgccctaaccatacgatatttttagaaatcaaaataccatatgtcatttccgctgatacaaggcaattgctgtaaatgttgctctgtattcagttgtttcaatgttctttaaattattgcaaagaatgctttctggtttgttctagcagtagaatacggagtcatttgcttttatgctttcccctaaactaatttcattttcactccactgaactggtattgttggtttgtttggaaatgttgtgcagctcactgatttgcctttttctctatattcaacttt

SEQ ID NO: 81906 - DNA, 730 bp, Citrus sinensis
  Intron number 1 from transcript orange1.1g021688m (locus o range1.1g014430m.g) derived from phytozome v7.0 (chr-ID sc affold00001; pos 2233028 to 2233757 reverse strand)
gaagctgtcgtcggtacgagacatatcaattcattttatcgttctttatttttcttcttgtattcttctctttctttagtaaccttaagcgtattgaagttgcagtcaatttgttcttcgctttctttttctttctccctttagattctttgcgattgatatattctacaaggctttgatgttatattttctatttcattgagtttattcgccggtttttttttctttttctttttcatttatcaagtaatcgtggtatataagtaaattttagggtttttacattatgattctgttgtttcttttgtttaaaagtgggtgattaaagaatattccttctatttctaatgaggaataggagaatttatttatttgtaacccaaaatgacacagaaatagaattgggattcaagatttcatttcttgatcatttggttctttttgctgcaaccaaatggaggtaaaagaatgaataatggttaaacttagggttcttgtgtgctgtactgtaatgattgattttttttttttttaagaatgagaaagcttccatctccttgagagtaaaatgtggggaagacatttcttggcttatgattttaagggtttgagagaagttttcttttggatcttctcttcttttttgattgatacatagttgtttatttatttttcatggagccaaatatgttactgtttccatgattcttgtatttcttctacaggtttt

SEQ ID NO: 81907 - DNA, 868 bp, Citrus sinensis
  Intron number 2 from transcript orange1.1g020500m (locus o range1.1g014775m.g) derived from phytozome v7.0 (chr-ID sc affold00646; pos 41687 to 42554)
cgcccgatccccaatctctcgtttcggtcagtagtagttagtacatcactcacattttcagcaattgttttgataatttatacgtgttttgcgtttcatcttcatagccattgcctttattgcagcatttgaattagcttatatgagttactatgactaaagtaataatgttcatcaatcatctgactgatttaatatttgacaacaactagtgattcatttccaatgtaggtgtgggattaaaagggattatattttttttttcctcttttgggtttttggtaaaccgagatagcaaattcaggtgtatgttgtattgttgtatttaaaagcatgctgaatgattctagtcttgtgagactaaaggattccttgtcaaaacacgatgttctcctactgatttaattataagcaaactgggatttgggccaataagatggtgatgatgaaaatttttctttttggcataaatgtgcttggacatgacatgatatgtgagtttcatatatcgtggagaagccaagtatgggcatttctaatttttagccaataggatgattttagggaaaatttttcttctggcataaatgtgcttggacatgactagaaagttccatgttttgtggggatgggcattgtgtttgcttttaattttgagccaacaggatgattttgatgaaaatttttcttttggcataaatgtgcttggacatggcgacagagtttcatgttttggggaagccaagtatgggcatgtgtgtgttttaggtttttcttctattgcatgatttgaaagttcatggaagttacttaatatgtgtcctttttagtagttgattgaagaatttgtgaagaaggagaagatccc

SEQ ID NO: 81908 - DNA, 699 bp, Citrus sinensis
  Intron number 1 from transcript orange1.1g010780m (locus o range1.1g010780m.g) derived from phytozome v7.0 (chr-ID sc affold00001; pos 2196079 to 2196777 reverse strand)
gtgttcctctcaccaaacacccaggatttcaccaggttttttgctttccgatttctgtttagttgcttatttagaaacattattatcaaaatttatattgtctcccttcaaattcaattcatttagcaaccatgcatatacattcattcactctacacattgtttcagttgttcttacttcatttagccccgaattacttatgatatgtacgtagatctaaaagagacgaaccattaatgtgactttttctcccttggaaatagttatttttaagttgtgcgattagatatgagatttttatattcaatcgtcatgatagagatgctcactaatacaattactcctggtcagctttatcataaatcagcaagcataaccatgtgtcatcagcaatagtttgccccatcccccacgtataccttctatatatatatatgcctctactctaatgtaaacacgtttgtggcagtgccgaactttctggcttgacttgaccaaacattcaaaggcatgcatgcatataaaagtttattaatcaattgctaatcatcattattgttcttcgatctgttatgttactattgttattttctagcaattaattatacttagattatatcttctaatacggcttgtatgtgggatatattttgagggatgcagcttgatatatacggggacctctcggggatccttat

SEQ ID NO: 81909 - DNA, 507 bp, Citrus sinensis
  Intron number 3 from transcript orange1.1g015181m (locus o range1.1g015181m.g) derived from phytozome v7.0 (chr-ID sc affold00012; pos 2099293 to 2099799 reverse strand)
ctgacacagcggttgatcagtatcaccggtttaaggtgaattcaactataattcacttttgacttcaaaattgttttattagctagaatgctttgcggagaagataacaaatccaactctgggttattgacgtatatgatagaggctcatttgaacacgcatcatccccttgtaataggaaactagctagccaaattgtatggctaaagagattagcagaggaagaaaccaattaggataagaacatagaagtacgtaacacgattaattttttgataactacagcactaatatatccatatacaataatgagaagagtatagacgataatgacgatgatgcaccaccaacattgaataataaaaaataataaaaaggttttcgaagaagacaatatggaaaaagtcaaaaaagaaaaaatatgacaaatcatccaaaaagtatgatctgtctcttactaactattcaaaggtgaaaacacaatctttacagagtgatatagatttg

SEQ ID NO: 81910 - DNA, 804 bp, Citrus sinensis
  Intron number 1 from transcript orange1.1g026388m (locus o range1.1g026388m.g) derived from phytozome v7.0 (chr-ID sc affold00001; pos 1069288 to 1070091 reverse strand)
ttacgctaagcttggcgccaggttcactcaaggaggtttgtagatttctcgtattctcggactttaaaatgaattacttttaagttcgttcgtcatttgtagtgcgtttggatctcaagttgaagactataaataattggcagtgttgaagaacagaaataatgtatctgtattttattttaccgttagtatagattttgttaaggttttttttttaacatatgaatgtgaactcattttttcgcctttagatttgtgcattgttgttgcaatagtcatgaaactaattataaatgaagtgaaaacgagttgcctatttcggttttggatcagtgattgtttgtgctttctcatttggcaaagatagcagtgtcatttttagtgtggatctgtctagttttgttagattttatccgtgggggactgccgttgcattttgcatttgaacatttttgcctttacttcttgactgcattggactgcattttgaaaacagtgtgcttttattactagctcacattctgaatcctacatgcagaattatactagtctacttgttcacattatgaatgcctacagaaaaattcatgtgttttgctgagtgataatttcgttaagagtaattacaccaaatggaatgctttcggcagtggtgaagttcctattgttttgcttgctttgactgaagtatgcagcaatagatacggcgcattgctttgcgaaaaactataagttgattctttttttagcagggggcttctataatttgactgtcctttctgctgatatttgttttctcaggtt

SEQ ID NO: 81911 - DNA, 402 bp, Citrus sinensis
  Intron number 5 from transcript orange1.1g021604m (locus o range1.1g014922m.g) derived from phytozome v7.0 (chr-ID sc affold00001; pos 3792405 to 3792806)
tcgctagtagtctactacgtccactttctgtatgtttcttttgctcacattggcagataggaacttccttacttttatactgcatgaatgtctgcatccagcctattctatacaccccgaactaatagtgatatttatcttaggatgtaaatttacgtaggatttcaatatattaattttacatgaattgtctcttgagaggttgatatggcatttaattgagtgatatctttgggtgacaaggatcatttcattaggtccaaagagcctttgctttacgtatagacatgcacaaccatataattttgatcaactcaaattttgacctcactctgacaatcttatactgtatgttagcttatagactttctttccacatctctacattttctttgcaggtag

SEQ ID NO: 81912 - DNA, 822 bp, Citrus sinensis
  Intron number 2 from transcript orange1.1g013319m (locus o range1.1g013319m.g) derived from phytozome v7.0 (chr-ID sc affold00098; pos 322917 to 323738)
gcgagccagcgtgagattcaaaaagctttccacaagtatgttattattatgtccctaattcattgaattatttgatgattttgcattccttgtgtctcactttctgtcatggcataagagaaacttaaaggatcctacttggtatatagagtttatgattgataacttgattagaattagcaatggatgaaattgagctatcaaattattgctttattcaaatctgggagacttgatgaagagtaggccacatgatactgaccaattgtggtactcgagaatggcttgactttctgttaatatcagggcagtgcacatggtgctgctatggtggtcgtgagcagtatgcacttcttgtgcatgcttacggttgtatatttgtaatgatatagtattgatattttttatctgtttttctatttaaacttttttgacctataattggcattgttaaactaataaatacagatttgacaatttagattgtagttggtgactttgccatattgaatgaagtgcatttgactcattttggtgctggtgaattactttaatttttcatgtttgttctatattgatttctaaataatttgtcattccggtaaaggccatataggtcgattaatgggatagtgttagattcttaacgtcgttgaattcctatgtagataaacatatctttagttgcaatcatgatataacacaatatagtaaacacatatgaaaacacctcagaaaattgctttgctatcttgttactaatggtttctttgaatctctcttgtaggctctctcttcaatatcacccggacaagaacaaaa

SEQ ID NO: 81913 - DNA, 307 bp, Citrus sinensis
  Intron number 3 from transcript orange1.1g020488m (locus o range1.1g020485m.g) derived from phytozome v7.0 (chr-ID sc affold00264; pos 27228 to 27534 reverse strand)
gaaaacttggtcagcctgaaattggaccaattgaggttagatattaatgactgtatgattcataaatatcaactgccaattaatagtgaaattaagcataaacacagcagtcgcaactcactaacatatgctaaattagcttccattcttctacttagtaggtgctttttcaatacgttgctttaattaaatagcttcattatatggaagtacttccaaacatattgtcagttatctttctgtgtttgattcgtctggttggagtatgtttaatttactttttatcatgttttttgcttgcagtttt

SEQ ID NO: 81914 - DNA, 168 bp, Citrus sinensis
  Intron number 3 from transcript orange1.1g015687m (locus o range1.1g009679m.g) derived from phytozome v7.0 (chr-ID sc affold00001; pos 4699517 to 4699684)
actttccacagcttcaggtttcaattatttcatgtgttgttttgacttgagatttgaatgcattttaattagtttatttgttgaccaattttttttccattgtttcttctcttgttgttttggtgctgttcagtttgaggctgcctgggctcttacaaatattgcttc

SEQ ID NO: 81915 - DNA, 564 bp, Citrus sinensis
  Intron number 2 from transcript orange1.1g011921m (locus o range1.1g007181m.g) derived from phytozome v7.0 (chr-ID sc affold00001; pos 3722125 to 3722688)
aatctcttgtccctgccccggttggttagtttttttttttttttaacttttattttgaatgtgtaattaatctcggggggttcactatattactaaagcaataaatattaagaaagaattctctagaatttctccttgaataatttatcttctctaaaaaggcactcctgtagcttttagaatttgtcagcagttagagctgaagcaacattaaagttatagattttactagctctgttatggcttacgtaagtatttaggaatgaaacaatgcagttaaatgtttagcatggagattaagcatattgacagcttggaatgctgccgcaaaacatattctactgggttcaggacttgtgagcacaacttattttcaacttgttcggtctttggcctggcactggagtgcagagaacacttttttatgatgtttactattattatttgtttatttatttttctctgcactctacagcacttatattatagtctcactattgttgcaacatcttttattgtcgtcttatagatcttggctgctctggatatcgtccgtcaaggtgc

SEQ ID NO: 81916 - DNA, 458 bp, Citrus sinensis
  Intron number 1 from transcript orange1.1g014854m (locus o range1.1g014854m.g) derived from phytozome v7.0 (chr-ID sc affold00001; pos 2219355 to 2219812 reverse strand)
acagtgtatgtgaaataaacaatttttttacctttatgtttcctgaatttgtatttattagaagcctaatgttcccctaaattgccaaaatattgtaagagtttagaaagaattttttttatttaatgtccccttattatgcatctaatttcttcgacttttactcagctaccaactggatggtcggggataaaacttttgccaaattgattttggccttcgtttccatatgataaagctcagaatgataaattaagttttatgtttgactagagctgtttaaatacctgctaacaaatatgtgtaatagtaattttcttattatattatattgtgtaacgatcccccgcctctacccccccccccccctttcccccaaaaaaaacaaaagattatgttgcgatatgatgtctgattgattttctttctttttacttctttgcagcaaatccatcaaa

SEQ ID NO: 81917 - DNA, 599 bp, Citrus sinensis
  Intron number 2 from transcript orange1.1g021411m (locus o range1.1g021411m.g) derived from phytozome v7.0 (chr-ID sc affold00001; pos 2522177 to 2522775)
agaaaggagaagaacttttattcactagtagtaaggtgatgttttgtcattctttttctttcaatgatggttaccctgtctagagtcagtagtgattacatttctaaggtcctgttattcaaaggaaatggtgctaattttttttttgtccttcgtcgtatgaatgattattcttaagatgtggaattttatctgaaaaataaatttggtttcatcagcttcaatctggctatattttgaggtaaattgcatagtttactgaagaattttgggagtttgtagatattagttgttttgtttgattaactgatgtcccaagagtaattgcatgtgtagcatgatatgatgctgcatccgactgctagtggaataatgtgtataccgcgagaacttgattaaaatcatattattgctgtaagactttaagcagcctattcatttagtagtcgcctctcagttggaatctggctctagactcaaaatttgatgaagatagcataaatctacaagctagaggcattagagaaattcacttgtgtttttttcttttatcatcaaaaacaggcaatatttaagccgccaaaagcaattcgtggagg

SEQ ID NO: 81918 - DNA, 594 bp, Citrus sinensis
  Intron number 1 from transcript orange1.1g031104m (locus o range1.1g029982m.g) derived from phytozome v7.0 (chr-ID sc affold00021; pos 574357 to 574950 reverse strand)
cttttgtgttcttcgcctctcttctctacgtccaggcatgtgaatattgtttttatcgtattatcaactcttattactttttagtacttaacctcggtttattatttgttcaccgtttacttgcttctgggtattatgcttttgggtttctttgattcaattctgtagagtttgaacttatgatccctaatctgtgtggttgctagaaaaatttgaaagaaaattggatctcagtttttgaaattgatgatcatttaatgggtctgcttgcatctcgatttagtttctttgaaaagaattaaaatttgctttattggtatgtgctttctcgagtttaaaattcgaaactttatttttttgccccttagcacgcgtacaaagatttaatattgcttttggctttaatgaggcatgaaaatttgcataattaatcatcctcgccgtcagctatgggcgtgcatgtcttgctttagcaaaatttttgttctttaattctttgttcaatctaacggttacctaaatggcgtgttttcttctatgaaatggttgttaactacattttgttgtttcacttcaggcatatcgcttctgaaa

SEQ ID NO: 81919 - DNA, 969 bp, Citrus sinensis
  Intron number 1 from transcript orange1.1g012078m (locus o range1.1g009702m.g) derived from phytozome v7.0 (chr-ID sc affold00012; pos 765387 to 766355)
acgtctctaaagagctaaacgctagacacaggaaggtaaccgatcattttcccttacctcatttaccctcacgctttcataaaatttcaatttcgccctattagttttgtagatgcatttcttgtcatatctgaataaggtttgctttgatcttcatcgatccgtgtcatgatttcgcgtttttcatctaatttcatagagagagctcaaaatgcttatgtttgattttcaaattgtagctgtaaattatccctatcgatttgtgtacataataaacatttccgttgagttagtttatatggtgtttggttaattttcttttttgctatccgtgattcgatctaattttgcaataaagatgtataatttgagctaatgagtaatagtctgcgctaaaacatgatcaagagctggattaattgatagttggataagtattttgaattaagtaagattcaatgcctttgaaattcttttagagcttaagaacttttaccttaaaagaggtttctattagcacgatttgattcatgatacatctctgatgtggacatttgcattttggtaaaatctggatcaacaactccctgtaaaggactttcatccatatgaaaatctgggggcaatgtttcttgtagatagttgtatatagtttgatggcttctgcattgattaatgttcataattgctgacttatatgcacttacttatttacaatgttggatgagagagtttcacataggtgttttcctgtgatcttgtcgagagtttagcataggtgtttgcctgtgatcttttcaatttctgtacatgctagattttaatggcattaagttttgagtttcataggcaaagattttgaattttgttaatcctcccctgctttatttttgttccatcagtctgctatatgaatttttatgtctttatgcagattctggaagggcttcttaagttgccagagaatag

SEQ ID NO: 81920 - DNA, 752 bp, Citrus sinensis
  Intron number 1 from transcript orange1.1g011577m (locus o range1.1g008352m.g) derived from phytozome v7.0 (chr-ID sc affold00283; pos 208612 to 209363)
gtcctcctctgcttcttcgtcttcttcttcttcaggtaacttttctacttcctgtgtttctttcttttgtttttatctcttttcatgtttcttttgctacccggttggtggtgtgaggaattatttatcgctttcacattctatgaaatttctgtagatgatgggtagctgctatgaattttcattttaagttgatgcacactttatgttcatgtaccaataaagggaaatggggaatctgaactatgtgttattgggtttgcattgtatttgtttcactatgtgtagtttgctgcataagtagatgcgtacgataaggtatataattgcaaacttcaagagagtgtggatttttaatccacagtactgtagtaccaaacatacccttagttacagtctcagttatattttatcttattgttctatttatgatgatgagtctattttaagcatgatgatgggtcgatatatttagaaatgagattttcacaggcgatcttagtgtcggatgttttgcttgctaattaattgctatagttgtcttgagtgtgtgcatgtgttatgtactttgattgtttggggatatagagatatcctctatttttgatgaagcaaatgataggatttgtttgaccattttaatttgtacatcgataaatgtcttgatcttctgtgagatacttagagatttgtagtgattctactttttagataacatcttgcatgtttatgtgcataacatagcagttttg

SEQ ID NO: 81921 - DNA, 915 bp, Citrus sinensis
  Intron number 1 from transcript orange1.1g022794m (locus o range1.1g018489m.g) derived from phytozome v7.0 (chr-ID sc affold00020; pos 1185394 to 1186308)
tcgccggttagtcatccgcctgtcgtttcacttcttaaatttcttttttcttttttcttttaattgtaatagttttgtgatttgaactccaagtccccccctttttttttttaattacttactattagttgtagttatggttcctggatttttttctccttggatttggatacccatttgcagttttttttttcccaccttgtccatctaaatttctgatttgacgagcgatttgaaacaatacccagcttgtttgcgccggtgaacgtggttgccgctatttttgcagaattattaatcttccctttagaaaaaaaaaattgcatttttactgcaaacaaggttgaaaatcccacccccccccccttcatttactggtttagattaatttggtttcgtgcacttttgttgttcaacgtgtttgctgcattttggtttgttttgttatgtacagtgtgattcatgaagctaaattctggaattttattactgtttgacagttatggagtttatgtgactggccatggtaaatgtagtcttatgaaatccgtgactcatgcacgagtttgggttgaattttgctggttacagccttaatttggatgatgttgctgtattcttcaactttcatgtgaccccagctgttacttaatatcatatcaattaaatagtagaaaaaatacaggcaagctggactggtagcttgaaattaagatcccaatttatcaaatgtcaatataataatgacaattcttctgacgatcattgtcttaatccaactaggtttagatattctcaatttttaattaactaatatttactttttgaattactgattgtaatttcactcacattactttcttgaccacttaattctcagtcaagttgctagactggggagaagaaggtcacagg

SEQ ID NO: 81922 - DNA, 574 bp, Citrus sinensis
  Intron number 3 from transcript orange1.1g017980m (locus o range1.1g007054m.g) derived from phytozome v7.0 (chr-ID sc affold00001; pos 177681 to 178254 reverse strand)
gagggtaattgcctgtcaacttcaattttttctctatctgcagttgtagttttttaagcagccaaattgtgataaattcaagtgttttcttcttcttcttcttcttctttttaattatttttattttatttctttctctggaagaggtggggggttactggtttgaccacatttaaatcatgtgctgtttgatctcatctttgctattctattctggttttaatttcattcttcgggtgggcccgttatctaactaaccttatttggattaagaatatgttgataatcattatttttactttttcttttcaattttgaatgtgatatactataatttaagaagttagcttttagctgaatagaaaggaagttgggtctagacacctaagccttactctttgcttggctttctagttgagatgtctatgccatagctgaaccgtgaatgactctgttttatagggacacatgctcctcatgtacacctgtccttagtcccagactttgactgaataagattgtttgcttctttggatttcattttatcttaggcgacctggaggtgatcgtattt

SEQ ID NO: 81923 - DNA, 926 bp, Citrus sinensis
  Intron number 1 from transcript orange1.1g012174m (locus o range1.1g010204m.g) derived from phytozome v7.0 (chr-ID sc affold00744; pos 47028 to 47953)
gccgcctccctcgacggctcccgctctttcattcggtatgtaaaatttttaaaatgtattattcgctggatctacggcgtcgttttcttgcttttttcttttaatttttttttgctttttcaaatttgtattatcaaattttggtttacttatttagatctgatagcttactcactgatcctttttcatattgaaacaaacttgagcttagcagtctcctgctgaactatccaaattgctgcattgaaaggcgattcttagttctttttttttttttttgttttcttcaatttgaagtgctaagtcaaagctgctgcttgtttctattattattattattattattattattattattattattattattacttacgttatttgaacattgttgattttgctgtgggattgttctacggatctaaattttttgtctggatgaactatgaatgaagttccagtgacacatttcatgctattattgaacttttggctgtagagtttgcttcaagtgtcttattaggtgcattgtcgctttctgttagctgggatggttttacgagaagaagaatttataaaatggcatgatataagattgaactaatctaatctaaaactttagtttagggtaagtaaacaggggcaagttgataaacatctagatctttagttgtaatttatatactatttgttggttttgcataaattttgaaggaccttatttttcagataattttctactttctgatttgtgaaacctgcaaatggatttgattatctgcttccttataaattattatcatatttttaaaagataaatgcggacatcactatattactttatacttttaatacattttgattcgttatcatttccttttcttataatatgatcttttatatatattatttgactagatttgaga

SEQ ID NO: 81924 - DNA, 676 bp, Citrus sinensis
  Intron number 1 from transcript orange1.1g015763m (locus o range1.1g011574m.g) derived from phytozome v7.0 (chr-ID sc affold00021; pos 859413 to 860088)
ctcccacttcgggtaagtgcttagctaaagccaaaagctttgcagctcctttgatttggaatctgtatttgttttgcatgcaaagtcgaagattttgtatttgatttaggtcatctgggtatttctgatgttggctttagtgttttgatgtgttttacctttttagggtttctgaatttatgtttaattatagatgtgctgttattagttttgtgggattgcttacaaatttggatttgggcatcataaaggtttgattatatctatagttattattattttattattatttttattttttcctttatttttacgattgtggtgctgcggcttttaatctatagctgctgtacagtagaatcagtagttgttaggtgtaattgtggttttgggcgatatgcattagctcctgagtaaaagtaagtatgtatagaacaccagttgttatgctttcaacagttgcaaacatgcccttgctcgagtggaattgatacttatagctgagtattcctctttgaaatgagaattcagtgtctaaggttgtggttggaagtccacttttatacactgtccaaaacagcaaaaattgagttctacttttgtccactgtttgcatttttattctaatgatcgaaagttaaaggtcattgtgatgctgttcaggtgctgttgttgg

SEQ ID NO: 81925 - DNA, 547 bp, Citrus sinensis
  Intron number 1 from transcript orange1.1g013659m (locus o range1.1g008442m.g) derived from phytozome v7.0 (chr-ID sc affold00653; pos 304 to 850)
agaagatttacgaaagaggagtttctgattatctggtttgttccctttatgcttacagaatttgaattaacactatgcatgaatttatgattctttttattttttattttttgagaaagattttatcaaattgaagcattgtagtaaagcatactagttgtaatcttgattcactttgtttttattttattaccaagaggtgctaacagttcatgatgcacaaaagatttgtgggggggggttgggggaatcttcttggtacatacataaattttagtatctgtaacattttcaaccaaaaaaataattttacagtggctgaagagcagcattttcatttatatgaaagttcaattgttatatcgtctgtttccgtctcctttgtggtaaataaagtccttgatgatggcaataagaatcacagaagaagttgttaatttcatatctggagattttcatcatagcagttcattgaaagtgaaggcagctgaaaacacttttttctgatgcagtctgtccctctttggtgtgattatttgaaatttgt

SEQ ID NO: 81926 - DNA, 639 bp, Citrus sinensis
  Intron number 5 from transcript orange1.1g013659m (locus o range1.1g008442m.g) derived from phytozome v7.0 (chr-ID sc affold00653; pos 2119 to 2757)
aacgtagccgtgcttctgaggaggagatatccactgtaggtttaattgttacccttcattctgagcttaatctatttttctgaatgtaattaattttgattgtttgaagttcaagaaataatcagcttcatcggcaaatttcttggcaagcacttgattgtgggagtaactgaggagaagcattccctagtgtttttttgttcttcctctcccctgaaattgcactatatttcccttgaagactaatttttgctttagcatttacacctgtacagaagcaaacatgaatcagagagatttagtgggcaaatacacctgtgcaagcaaattaatgcatattaaataccgtggtggttgttggaatactttaaaaaaagtgttttcttggtgctcctgctccttttatactttcatagcattttaataactgggttgtttaaacatcctgtacttattttctttacaaacgtctttgtattttttaaatttatacaagatttttctaattatattaatagcaataagttgcataaactcaaatcttaatttcattctgcccctattacatacatatgggattcacccattatttcatcaaattttccgttactaatttcaggtctttgagaagtcactact

SEQ ID NO: 81927 - DNA, 775 bp, Citrus sinensis
  Intron number 2 from transcript orange1.1g013637m (locus o range1.1g009940m.g) derived from phytozome v7.0 (chr-ID sc affold00008; pos 426923 to 427697 reverse strand)
gggtaaattgttggacgggaatcaaattttgcaaggtttgttcatgttagcgcaaattaattttataattgaattgtagaatggtgtgtctttgaatatcaaaccttttttttagatagttttcatcatgttaccttggataggcaaccgtatctaatcatacatctcaaatggttaatttttattgaactgggtgttttgcacaactcatatgccaattaattgttatattatgataaattttttgatcttcagttgacttgattgaaaagaaagtaatttgactcaattcatccaacccaaaatggagatagtcaggtttttatgaaatgtgttcattggattttacatggcacatatggaaaattttgaaactgaacaaacagctttaactacagcaaattgctctagtttgtaaagtcattggatatatatatatttttttaatgtttgtgatgattatgggtatgtttggaattgaggtgtggtggtttcgaatccacaaccactatatagctgtcaagtataagtgtgtgggtgagtggtaaaacagtagctatcaagtaaaagctggtgtttactgatcgttctatcttctttggtttcaaaattaagctgaagaaaacctgtcctgaacataccatataagaatcttattggttttggactcaatgaatagggagactagaactgatttactacttatattacttcttaaattccttcttttgctggcttgtctgatgttcgagaaccatattatgcatgcagaagg

SEQ ID NO: 81928 - DNA, 653 bp, Citrus sinensis
  Intron number 4 from transcript orange1.1g018054m (locus o range1.1g018071m.g) derived from phytozome v7.0 (chr-ID sc affold00001; pos 3928294 to 3928946 reverse strand)
atattcttcgtatgtgtaattatgcttcagattgccaagatgagaggctactatatatttgacattttgagctgcaataatagttgattctctggcaaacttcatataattatatgtttatgggaaaaaaagtaaaataaaatcaccgtatgctcaaataaggaattctcctagttccgcctcacaattcagtatctgatatagttctgttctaaggagcatagattcatttagttatacaaattgatggttgccatgttaattatatatcttcatgtttctcatttggatgcattatggtgtgaccttgcgaattttattttgatgttctgatattgaatgattggacttgcaaatccccacttggactttgtcgtgtgacttaccggtaatgcttctgaattgttatattacttgcttatttgtcaatcagttaagcagtgttgtctttgctattgtggggatagtttttactggccaagataatttatagtgcttgattgactgcagtgagaattctttcctcactgccctccctgcttggcttagttcattcaccaaaatgataaaaaagtggtaaatttaattattgatattacctatttattattaatgcagggaggaaaggtgtaaaaggagctcagcctggtcct

SEQ ID NO: 81929 - DNA, 810 bp, Citrus sinensis
  Intron number 1 from transcript orange1.1g018054m (locus o range1.1g018071m.g) derived from phytozome v7.0 (chr-ID sc affold00001; pos 3929665 to 3930474 reverse strand)
tcgttgcttttctctatatctcagctagctttcatgtacggatccatcaattgaacttctgttatgagtatttttattttttaagttttgcaatatttgagcaacattcaggccatcaatctgaaattaactagtggcggcttatgccctacgaaaattttatgctcaaaaaattaatgttattttttttttaattcacgggaggctgcaactgaattatgtgtttctactgtaattttgaatattattttatttaatatgcttttgttattggttcgatctagaattatggtggctgaattggattgattgaactgtagcttgataacgtgaactattcacaatttccattgcttagattttgaaaagtatactgccatgtcttgctttaacctggctgccactattgcgtattcttctacatagatcagcccttcttacctgtgtacatagatttcgttaagagttataagcatgcatggcatgtttggatgtcccatcaaattgttgtatatccgagaatgtggttggtaatgaacttacagctatttccaattagtttcagaattttgaaacggtgggaatactttattcacaactcaatcaaatgatttatgcactctaatcggatgatataatccattcttttggtgatagcatgattgaatatttgttgaggtcttctgttagaaaaggtttaatgatcatcatctaatcatcaacatcttcaaattgtttattcggctgcttctaactaaattaaattggaaattttggaatcagagaggggcattattgtggcagtgaatc

SEQ ID NO: 81930 - DNA, 404 bp, Citrus sinensis
  Intron number 1 from transcript orange1.1g024569m (locus o range1.1g024023m.g) derived from phytozome v7.0 (chr-ID sc affold00001; pos 3719112 to 3719515 reverse strand)
tcatcagagctgttataatcattttgtaattgaaggtagtgtgctcttggcaccacataatcttttgatgtgttttaggctgtatattattcttatagtcagtactaattatttctattataatttgtggttgataaagagtactgtgcttcattgctttcatcaatcaccataatgtatgtacatgaatctgatgaatatgctgccctttttaaaaggggaaacactaagttgatttgtccatatattgaaagctttgagtttttctcccctgcccaacaactcaaagcactttctgatgggttcattaggtcttcgttctctttagtttcatcgattttattctgatttcattaggttttgttccaatcttttgaagcttccttgcaggtccggccttgaag

SEQ ID NO: 81931 - DNA, 816 bp, Citrus sinensis
  Intron number 1 from transcript orange1.1g021575m (locus o range1.1g021578m.g) derived from phytozome v7.0 (chr-ID sc affold00098; pos 45866 to 46681)
acaaggttgagaggttcgccagtcgctccgaataaatgaaagagatgaggtcccgaagccctttattaatcattatctgtaagctttttcctttttctttaaatcttatgtagtaagcgggattcaaacttcaaaccgcagtagttgtcgtaatgttttctttgggtgttagttaaatttacacaacttgtcttatctttagcaattgaaaactctgttcttctttaccaatatgaatattttacgctcggaatgtttgttgcggaggttaatgatatgcctggctttttttcaataatgaaaatatatgcagcaaagatcttttttttttttttttttaaattatgatctaaagaccatgatgtatctcatgctatgtgtttgctttatgccgttgattcattgactgggagttatgactaaattttctgcagttcgaactttttggtaattgtcgcatctgcaatgtaggcagcagtattaagatttgcatggtcagtgttgttgggcgattgtttaataatgcagatgtgtaacaatgttctttcaaagggatgctgttgtattaagttgtttgtccattctttttctgttcccgtgtatgcaatatccttttcctatgtctataacgcgactgagtaatgtaatgctgctgctccttatacttttgttgttgttcatttcaacatttctttctatatcttcgcccttttgtgtgaattggttgttggtataatatgtttggacctccaaagttaaaagacagattactggtggacagatttttcagtgtgggggagctcatttgaagtttga

SEQ ID NO: 81932 - DNA, 143 bp, Citrus sinensis
  Intron number 1 from transcript orange1.1g033760m (locus o range1.1g033760m.g) derived from phytozome v7.0 (chr-ID sc affold00001; pos 3176842 to 3176984)
cctttttctttgtaaaggtcttccttctattccaggcaagaaaattaaagaaaactcctatctacggtttctctcttcttttgtttttgtttttgttttttgattattattattttcaataaagggaataaaaataattaaga

SEQ ID NO: 81933 - DNA, 253 bp, Citrus sinensis
  Intron number 2 from transcript orange1.1g026373m (locus o range1.1g026373m.g) derived from phytozome v7.0 (chr-ID sc affold00098; pos 69940 to 70192)
aattttacggactctgcgatccaggtaatgtgtttttgcagatcggaattcttactcttctatttaatttattacttattttttaggtcacttttaatgttcaattaggtcagtttatgaatttctttgaattttagctaaatgttaaatttgaagaaaaatgaaaacattaaacgtggcgaactctggaatttgttgcgttgcttttcgtgctttagataaggagaatctgtgcttgtacggccatcctaat

SEQ ID NO: 81934 - DNA, 697 bp, Citrus sinensis
  Intron number 2 from transcript orange1.1g028126m (locus o range1.1g028126m.g) derived from phytozome v7.0 (chr-ID sc affold00103; pos 77301 to 77997 reverse strand)
ccggcaggagcgggagatgtaagtcttttttcatcattatttttaatatttttaaagcagtaatgaataagaactttggtgtggataaggagaattagtttattgcgtccggagtttgcgttttgggattacatagtttgtggggacaaaaattaatgataggttcagatttcatagtgttttaatttacttcagctaggttaaacaatttgcaaaattcatcattagtagttggtattacttttgcagataaaaatttggatgcttgtaatgtaattaaagtttcagttttgtcttcgtttaccaagaggatagaaatattttgagaattgtatcgcaaaatagtgtcccatttctgttacatagattctacattgacttagcctcgctgtatgttgcaaatggggtgctgagtgatgaatgatgatttttgcaaactgtttgatctaactgaaataagttgaaacattatagcctgagcctttcattgattttttttttttttaaacggtagtttgtgtgtagactgccccttcttgatgttattttcagatttccagattatatacctttctgaaatatttttatcatgtttgatgcgcatacattttgaatcttatctcttttctctttctattgctgttctctttttgcgtttacaggtgttggtaacatcatttggcgagcttggtgagaa

SEQ ID NO: 81935 - DNA, 944 bp, Citrus sinensis
  Intron number 3 from transcript orange1.1g001214m (locus o range1.1g001113m.g) derived from phytozome v7.0 (chr-ID sc affold00029; pos 36672 to 37615)
gatttgagagtttcaagacaaacaggtgcttagccggtatgccttttgtttacattattggatgaacttgattttcaaaggcactgtacataaggaatgtctatgtgcctcagccctcaaggtgtagagaatctctttcatccttgcatttttggtgtaatttttccttttatttgtaaaaataaagcagtcatctcaaaaaggcatgtgcttaattggttatctgccaagtcttcattgaaggtgcattccgtacacattgactcaataagcttgcaccttgtctgtctaaataattctgtttctctttttgtttggtttagatggtgttgtaaccccttattccaatatgattcctattttgatcacttaattttattattaagatgtagaagtgatgattgaaaatattgattgtctcatcttaggtttaagattgtacttcctctgactgttttcttctgctcttctgatttatccaggactcaattgtgtttctctctttttttggtttaaatattattacttaaaattttgcttcctgaaacttaaaagagtaatattcatgaatttctagagtagttaaactattgttgcttctagtttgctattactgctttcactattattccaattctcaagctctgttgagcatttctacgagtgtaaatggctcagttgggcagaaagagaataggtcatttgccagttattctttcaaccatttgggttgtggtctagttttgagtgaagagctcaacatttttaaccatggtgctgctacttctttgtgggtatctaaaacagatgaaattgcattgtttgattgaaattagttgcactgagatagctttttgcgaatgcttgtttcttggattcttccatgggatgcttagtatcttctgccttgtgcagttttgagcagttctgcatcaatttgacaa

SEQ ID NO: 81936 - DNA, 579 bp, Citrus sinensis
  Intron number 1 from transcript orange1.1g028743m (locus o range1.1g028743m.g) derived from phytozome v7.0 (chr-ID sc affold00021; pos 579981 to 580559)
ctggaaaggtacgtatcttaaaaatctagcttaactacttggtctccatgcgcatatctgcactttataagacgtgaattcgagttctttcctactgaagctgatgattagctaagaatttatctgaggacaagggattacacactgcatcctttaaatcttgtactttgaaaaaagaacacagacaagtagtttaggttacttggactttggaacaatccaaatttttctcaaaataaaaaggtactagtgttaaaagaatagtgtcgtatatctctttggtcccaaatcaaattgtaatcttttctgtacagacatttgcaataccgacaaactatacgtcgatattttggtgccccaaaattcatatataaccagcagaaacatacgtttcctgaatcgtgtcttcttctcatccaatcattttcttttgttgaatgacaacaatggtgatatcgatagctatggccacaacacagacaaggaataggctctatacactaaacctgcaaccttttttttttttttgggttcctttattcaggtggagctggtggagggttcatcttatcttggcca

SEQ ID NO: 81937 - DNA, 377 bp, Citrus sinensis
  Intron number 2 from transcript orange1.1g044075m (locus o range1.1g044075m.g) derived from phytozome v7.0 (chr-ID sc affold00055; pos 119945 to 120321)
accgaaggaaaagtcgccccagatcctgtaggtaatgtattttccaacagaatcttaaatcttcttgacatttgatgtaaattatttagcaacatgcagctctgcaaataagaaacatatcttgcgatttttcgatgtttgaaactaaatttgagttttcaaatttattgacaattctgagaaatttggtgcagttctgttatcatcatggtgttacacttgcttcatttaaatttttatcatttccatcccattttgatctgtttgatgccccacttaagtggttcttacactatagtgtgtaattaggttggagtatgttgaaagagtgtttggaaggtttgcatgtctgaaacaatttacttttgcagcaattg

SEQ ID NO: 81938 - DNA, 711 bp, Citrus sinensis
  Intron number 2 from transcript orange1.1g023703m (locus o range1.1g019324m.g) derived from phytozome v7.0 (chr-ID sc affold00042; pos 256976 to 257686 reverse strand)
gtctgcttcttcaagaactttccaagcaggggtacacactgagattttgcctatagttctggtattttgtagtatattgatctaagaaatttatagttcaatgtagtatttcacttgcaaattcgtctccattgtttctttgtatggaaacatgatatatacatgctctgtagtttgtaagattaaagtaggagtagagttaatcagataacaggggctcagaaagtgatctaggttaaggcgggatattgacaaagcaaaagaagaactcatacgtggcattttgaaagcttacaattcctatatttcatgtggtgtgttgaatgttttgatatgtggagaggtgtgtgtggtttgtttgagtggaaaaagacctgcaatccacatatttagtaggagtgggatattgtctcagactaaatggtttaacagtaatatcgttccaacttatttactattaaagtacttgtcattggagtacttttgtgattaatgttttacaagaacgtgctacaaaatggatgttcgcaaattaaagtacagttctgaatgttgcatcaatggcttggtttgggaagaagtgtccattggaaatgtctgaaattttgatgtactgttacatattgctggaaattatattataataacaagtagattgatgtgtatttgttttcaggttctctgatttaactggagttgattatagtgaag

SEQ ID NO: 81939 - DNA, 984 bp, Citrus sinensis
  Intron number 1 from transcript orange1.1g033878m (locus o range1.1g033832m.g) derived from phytozome v7.0 (chr-ID sc affold00274; pos 40494 to 41477)
tttgagttgttgctgttgtatattgcccatagcaggtatggctccgaacatttcatttcagtttctattttctttttctatcatttcttgatttcctttttaatatgtttgtgcttgaatcttttgattctcaaataggtttggtttgtttttctgttttattgccccaaatgcattgcaatacttagagaagaacgtatttttttagggtgtaatttgagtctgagtgggtttaattttcttacttatcgattgcgctattaacaagtgttattggttttcttgttttgtggatgttgttattttaagtttaaagaaatgagtggggaaaaaaaatgaattgtcaagtttaatgtcgggtgaaaagtgtggacggaaaataggggatcttaagatctaattttgagctacgcagtgggcagttagaatttgatgtattggattctggagggcaggggattgattcttgcatttgttctttgtttatggattttcaacgaaagggtgattttggtgcaatgtccatagagaaatacttagcgtaggttataacattatgtgggtttatgtaaaatgaagaggatgtgtcaccgacgagtacgggatctagtttctttggtgttgttgaagaagtgttagtagtcggaagcttggttttactgtaagaaggtctgtctagatctaggtacaaagtgatttaggggagattatctgggtgcggggatgattttggtcttttatgtttaattttaatcaaggataataattgtttcattttttagtttgtgctgaatcgtatggttgttcacaagatggagaggaacttatgctacaatgaatctagctagattacggcatcagtgcctgtgctcataattgttattaacaagattgactaggaattgggaaaaattgtagcttacaaccttttaagttgagaggttgacaggcagttgcaaggttccaattctttagtgaagatcc

SEQ ID NO: 81940 - DNA, 649 bp, Citrus sinensis
  Intron number 2 from transcript orange1.1g033878m (locus o range1.1g033832m.g) derived from phytozome v7.0 (chr-ID sc affold00274; pos 41532 to 42180)
aacaggtcgaggggtaatagattagaggatatagataattgtatgatagagtagttttattgacattcaaggcatgtttaaattgtcatagacatgcggcttgagaatttctgttttagattaaagtttgagttacctaccagccttggtatccaaattttctttcaattgtagatgtaagaatataatttgagattattatacaagcgccgacagtttgctcatgccaaataaaactatgactaaagttagcatttacttatgaactatattactgttgtttttggtaaaatttttatgcttttggcctgaaacggggaatttttttttttttgaaaaaaagttggcaattaccagtttgaagaagccaacttttatgaacaatgttgttttgtagggcttataacatatttttggagtcttgcacttagattggggcatgatttaggagattcaaataggtcttgacaatttaccaatatggttaaggtaaaagccggctatgatataagaattgatgtgatagacaatttctcacttcttagcgagtagaactattatttttagtttatggagcaaacttggtactgattaattacttttcactggtctccatttttatctttttaccgcacagaagaattgtttt

SEQ ID NO: 81941 - DNA, 607 bp, Citrus sinensis
  Intron number 3 from transcript orange1.1g033878m (locus o range1.1g033832m.g) derived from phytozome v7.0 (chr-ID sc affold00274; pos 42475 to 43081)
cagacacttctgtgtttgttaatcgtaagtcgctcttgatattatttactgttaattcaatccaacatcttttcctgaggcaatattgagagttctcaagatttccaaatataacaactgaaagtctcagtttagccactctttccatttattgtcatttacttactggtgtttgtagctcccttgaatatagacataattgtattgaaagggtccaaaatgttgtaggtgttaactgcagccttgcagaatgtaacccaaacataaccaactgaattactttagctccattatcagaaactatcatcatgaaaattgcagtttcaagatgtctatctactaagaaatttatgtgtgcagacctatatttgttttataattatttctgaaaagttcaatgataagtaaacattctgagctcagtgggttttggcaaaaagcaaatcaagatgcaatatcgagttggatgattgtatcatatatatttttctgccttgttttgtaaccattttgaaagtacattttttggtttgtgatcttcctttgtacttattttaggatctcaattattttctttgaatgtcttgtgtagctgaacttgcttggc

SEQ ID NO: 81942 - DNA, 756 bp, Citrus sinensis
  Intron number 4 from transcript orange1.1g026085m (locus o range1.1g026085m.g) derived from phytozome v7.0 (chr-ID sc affold00030; pos 1039656 to 1040411)
gggccactgggcacattttattgctggagctgttggtaagctgttgtcgatttgcctttcctttctaactcatcccataatgcatgtttgaatttgttgcaaatatgttatggacaagagtgtactaagagaattgtcaaatgattagtatccgctgtaattctcatcctatgagattccgcatgtcattccaatgagtgacaatcatgtcgaaattagatcgcagtcaagcataaatctgcattcatttcgtgaatttgccctggaatttgcaaggttttatgttaaccatatacttatgaacttgtatatacttttattaatttctaagatgtacgcttggtgttgtgttatttgttgcaccacatttatgtgaagttgagggtgcagagtggtcttgttctgtgagacttctttctctcaattcatggcctattattattgtcttagattcttgttgctgcatctgtttctgcatatgtactgactttgcattatgaggggttgatcttttttttccaatctatttttttatatggggtcttctaatatagatcatcctagtgcatattcacattaaaataatgttactgatttatatttgttatgtgatgccaatgaggtagcccttgtagtgcattggattggcaattgagaatatatggacttgctggccactggtatgcctcagaagactcaagattttcttttcttgttctccattcttttcaggtgacactcttggttcttttgtgt

SEQ ID NO: 81943 - DNA, 340 bp, Citrus sinensis
  Intron number 3 from transcript orange1.1g000698m (locus o range1.1g000698m.g) derived from phytozome v7.0 (chr-ID sc affold00001; pos 136687 to 137026 reverse strand)
ataaggtaattatgtcttcagattcctacttgtttggcttccatcctaagaatgtagatggaaaattactttgttttaagattttgattatgcaggacctaataaagcactgttaggaaatgggaaaattttaaaattggacctttctttcaatttaagttgagctgtctttttccctattttgtggaagaggaaaacagaaattttgatagtgaaattttgagtatattatttttctttttctgattgactttataattgaaatgtagttttttgttttattttcccgccttcctacacttgtcctctcatttaagctgtattgatatgcagctagcta

SEQ ID NO: 81944 - DNA, 594 bp, Citrus sinensis
  Intron number 1 from transcript orange1.1g001987m (locus o range1.1g001703m.g) derived from phytozome v7.0 (chr-ID sc affold00020; pos 566264 to 566857 reverse strand)
tcccaagactcgcaagtttaccaataaagattgcggttagtgcgtatttctctctctgtgttcatatttatatggttgtgtttttccggttttaggaatggaatatttgtaatgtttctgttgtaaagcattgaacaactgaataattagaaagtccaaatgaaacttgaataaatttttaggaactacattctttggtgtccttagttttctcctatggtagaatgacatagttcatgtgataacaacaaaagaattgcaatggacgctacttgaaaatccatggttcactctgcggaaactgcatgcaatatgtgaactctgttgttagcaggaatagcagaaattgcgataggtgaaatctgttcccacttggattcaatttctcaattgttatctagtttcagctgcttactctggaatattctggcattgatcttctatcagagctgcttgtatattaatcaaatctgcagaagcagcgttttgaaatggcgcttgcaattttaactatcaatttagaggttatcttattgagtttacaagatcttcagccattgtgtgcaggcaaaattctcctcacaatatccctga

SEQ ID NO: 81945 - DNA, 620 bp, Citrus sinensis
  Intron number 1 from transcript orange1.1g026576m (locus o range1.1g023298m.g) derived from phytozome v7.0 (chr-ID sc affold00521; pos 61180 to 61799 reverse strand)
ggccaccgcctgtaccacgagctgtttgccaccaggtatgctgataaaccccgacccacgtgctgttgtttaagagcagtgttttattttattttattatattttattatattttggataagaaaagtacccctttattcgagttctcttgataagactttttctgacgttaaagcaaattcattcgatgtatgttagggatcgaggtgttgtgttgttatggctttcgatccatagctgctgcatgtgaaatggtatcactaactgtcaagtaaaagtgggtgtttaccaaacacttaaattaagtagaagtatggaattataaacataccctccatttggttcgatggaaatcacttgttcttttgttttctgatattttctttttgggtgtttattttgggtgaattatgtagaggtgcagtgttgttttgttataaaaccatcaaaaaattataatcctatttcatgtatccaaaggtggatgggatcattttgctgtgtataaatcattgatatcgattattctggctctccaatgtttgtctcatgcttgctatttcatttttttcagttccctctcaccattttgaattactgcagcaacttgagaagcagta

SEQ ID NO: 81946 - DNA, 703 bp, Citrus sinensis
  Intron number 1 from transcript orange1.1g014423m (locus o range1.1g014423m.g) derived from phytozome v7.0 (chr-ID sc affold00052; pos 340018 to 340720 reverse strand)
ttcccattccccatttcctctttcctccgacctacgtacgtacccgactcttctctccatttacgccgtcgttttatctttatatttgcatgcatgtacgtgggtttctgtcctttaacttttcgctttggaatttttgcagtactttgtgatattagggaatttatttttgtttcttttgtttaatatattttgacttttgtgtgcatttagtatttgaattaataaaatcagttgggttcttttttttttttttggaattatatgagagtattgcttagatgaaaactcatattatatgagacttatactgatatacttataatcacttgggttcctaatttaatatgacagaatccatgttagctggtttaaccagtaaaatttattttcgtggatgttagtttggtttagcagataaaatttctcgtggagatacatgtgatcacgtgtgattaggcttcaaatctcgctcacataggtaagaaggggattgtcaagaagaaaaataagactagtaaaatttgtgaaattagaaatgtaaatatagattcacaacatcagaatccatttaatctttttttccggtggggattgtcaccaatttgagtaaaagattctatttggttaattgtgcttgaagcaattaatgcagtgggattgaatttcatgttttttttttctctttttgattgatatgtag

SEQ ID NO: 81947 - DNA, 660 bp, Citrus sinensis
  Intron number 3 from transcript orange1.1g023889m (locus o range1.1g023916m.g) derived from phytozome v7.0 (chr-ID sc affold00008; pos 1877958 to 1878617 reverse strand)
tccggagctcctggctctctaattttggattaggggtgagtatttttagttattaagcatttagcaaagattgtgttcatagcttttgagaagtaggaaaacatacatgctcacacctttcgatgagtttctttctcatttaaaatatatttatgcctgagattcatagcttctatgttctacattatagctgtttgtggtaatatggttcagtttttcacattgcagataaaaggaaatgctgctctacgaattttctcaaaactataatttttgtgttatgattccttgtactttcttggtcgaccattgcagttaggactggctatagttataatccatcttctctttgcattagcaagacaaagccatatgatgtacatgacttttgattcgcttctacgtgattcccatcccttgttgttatcatctcgaaaataaagaaacatttctgttgattttgcttaaaccataggcatgtctttgtaaatacaggcagctcctcattgatttttgctagggctgtgaaatagttctcatggctgttattatttgtcttgttggataagtgtgggaccctctattgtaagtgttttgagttcatgatttgatatgattttgacaggtttctgttggttacttccttgcggatcttggaat

SEQ ID NO: 81948 - DNA, 452 bp, Citrus sinensis
  Intron number 2 from transcript orange1.1g031272m (locus o range1.1g030575m.g) derived from phytozome v7.0 (chr-ID sc affold00075; pos 92364 to 92815)
gctacagtacagtagtgagtttctactttcccacttctatttatgaatttgagtgtcttcagtctttttatctacatcttagttaaaattttaagattatttagtttcttgataagttgtttcctcccactcatctacataaatgtagagttcattgtggaagtcagctcttcattcaagaccagttctgtaaatatacattgcattttttatgatgaaaataagtaatgtgaacactgtcaaagattttttcgaggactgtatgatgggtggggatgctactgtaatgtggttgggaggtcctgtgattcttctcttggcttctattagagacatttaatgattgcaaattatttggttaatattcaaagtaattagtggattttgcaatggtggttttttggttaatttttctagggtgacaaggacaagaaaatcgaagaacttacttt

SEQ ID NO: 81949 - DNA, 569 bp, Citrus sinensis
  Intron number 1 from transcript orange1.1g012966m (locus o range1.1g007271m.g) derived from phytozome v7.0 (chr-ID sc affold00021; pos 501102 to 501670 reverse strand)
gggactgcccgccgtgttcagaggtgtgtgttgcagtcttttcttctagtttatataatttcttatcggtatgtaaaagtgtgttgacatgtcgagatttcagatttgtggcaagaggctgctgtgtaagaaccacaaatgcccatccccatgccatcggtatgccacctgtcatattctttttgtaccattatatgggcataaggttgactgttggccagttcataaagaaagtttaaaatgacgttgaaaataatgtagttttacaatactttataaattgcaaacattctaggaaagaatgtggttttccaaacatggatcatcctatatctgtggtctcagaaattgtttactttgaattatacatctaggaaagaaataacacaaatttcatgtgacaagtcaaagatatggattttgcttatttctgattggctaagttttttattatttatttatttattgttttggtattcaactagtttttattgcatatacttgacgaagcatatttggttaaaaatcacttttatccttatagaggtgcctgtgccccctgccctctg

SEQ ID NO: 81950 - DNA, 527 bp, Citrus sinensis
  Intron number 2 from transcript orange1.1g011268m (locus o range1.1g011268m.g) derived from phytozome v7.0 (chr-ID sc affold00012; pos 238316 to 238842)
attcatctgacattgtcgaaacctctgcaggcaatgtactatttctttgatatatttcttttgattttgattttgatttttgaatgaatgattataagctcatttgcaacgtaggttttaaaagaacaaagtagcagtttcatttttgaacatatcgcgcatctatgctgataagttttgtgattggaatcccagttaattatgatattctacttatttctttgtccaattttattggatgatggtcgcatcaaagaattaggaaaaatgaaatttcattagtaaaagacttaaaataacttggatgataacttgttttattgcattccctgagaatgttatgaagtgaaaactcaacagaatttgcagagataatgctagttcaacagaatagcatgtcattcgaatgtttcattttcttatgctattctttcctgcttgttatttatccctacccttctttcttgttcgatatacacttgcagaagagttatgtttttattaattgttatgtttttcctcagcag

SEQ ID NO: 81951 - DNA, 820 bp, Citrus sinensis
  Intron number 2 from transcript orange1.1g009596m (locus o range1.1g009081m.g) derived from phytozome v7.0 (chr-ID sc affold01282; pos 13844 to 14663)
cttgaaaggaagtttgacagaaaagtggcaaagtatgtttcgcttctttctgatgacattttgatttgaagttaaagtttgagggcatatttcagtaaatgtgagaattgtgatgttatgttactatttgtggatatttttcagtctttacactgattgcattccctaattgcatagttgacatggttagattaccaacacttacttgatttgtataatcacttgctctgggaggacaaggtagtgggagttaacatttttatggtctaggttgttttcactctgcttatcaattcatgtagagggtaagtatgtctctaacaatcttgacggaccatgggtgttgaatttattattgatagttatctttgaagttaattccggtatctcttactctttgcatagtggtaaaagattttgatgtaaccattttttttttttttgagcacgcacttttaagtgactcctagttattggttttgactttggctggcaacagaagtagtttagaactaaagccatgagtgggaagatggagaaacagtatggtataacactgcaggttaactttctaaccatgaatttttctttgttttctttggtcagcttttatcagtaagtattagaactaaaacagttgtaccgattggataaggagcgagagagctttgatggtatgtttgtcatagtttagttcatattatattttaatgatgtgtgttgagtgcttccattgttttctttcataataatcatatcatggaaccttcttctttaagtaattatagggttactttcctcacagaatcaaggcttttgg

SEQ ID NO: 81952 - DNA, 919 bp, Citrus sinensis
  Intron number 2 from transcript orange1.1g009678m (locus o range1.1g009198m.g) derived from phytozome v7.0 (chr-ID sc affold00154; pos 315207 to 316125)
ttctaagccgttgaaagttgtaattgctggtgcaggtgacttcattttcttctcctctaattgtttttaacttttacatatgtgctctgaagctttagggcccgtttgatgaaataaaacttgataattatttggtaaatatgaattttaaataataattttgataaaatttataatatgggtttttggttaaatacctatgtgataaaatcaccttaactttcaaattttacttgcaattatttactaaacaccataaaactttaagctacagctactagatagcgatatgaaatggagcctatgggtgtgtatggcattgtggatggacagttatagctttttgagctacagctctaagctatttgataaacacttgttgctaatctctgactcaaaagaaagaagcagcagctttcgctggtttgaaagctaagttaatttattcctgtacttttatgaagaaaacatgtattatctttgttatttttatcaaaattattatttaaaagtcatacactattaactttatatcacagctattacattttgttcttaacagccacaatatccaatatcaaacaccttaagtatatcaaatggataaagggaggaaaaatttggaaaaatgaaaagaaaaaggaaatagattcatgaagtgtcttgaaaaaaattgttctaagcaacgcaatagaatgaatcctagcattctttcacttctagcattgttgcttgtctccgacaaatgcaatttgatgtttttaggtgtcttgttgcaggtttggctggtttatctaccatctggtgttatatcccttaatcatgctgctaaatatttatacccttcttatgtaatattgaggtttttaggtgtcttgttgcaggtttggctggtttatcaactgcaaaatatttggca

SEQ ID NO: 81953 - DNA, 819 bp, Citrus sinensis
  Intron number 2 from transcript orange1.1g033673m (locus o range1.1g033638m.g) derived from phytozome v7.0 (chr-ID sc affold00032; pos 442607 to 443425)
ttgtatcatccacacgatcagttttgcagttttgggtatttgggcgctgttcatccttagttttcgttaagattttggttctggtcagttcaatgcattggtcgtgtttgtttatgtaatttatttatttttatttttttggaaaatcgttgatgctttttcactttgagagatgacacggatctccttcattgatatatcgattcagaactcattgtttttctgttgaaactcattgttttctgcaacagaaaaacattttcttagtttctggtcacccttaatatacttttgttgtttcccaaaaatcccaactgtgaatttaattttcaagcattaaaaaggaaaaagatttcttttctgggaaaagagtctgcttatacgagacagaacaattccgtgtttgtgttcttctgcttctttgttgtttcttatgcaattctgccaattctctgtttggttcctgaggaaatataggaaaagcataggaaatagggactcatgacttcattgaagtcaaattcttggtttacactcaattggtggagggacttaatcactatttttgcataataatgttgtataaagatctgaaagtatttttttttttaatttctttttcagcaacaaaatgcatgctgaatgatgtgtggcttgtgaagttttcattttgagttttattataagaagtgtaactacagataagataaagtcatgggaaccgaccaatttactttccccctcaattggctttgcttatactaactttgagtctttggtgcaggaataagtctgctgtttattgagaagaagtaaact

SEQ ID NO: 81954 - DNA, 256 bp, Citrus sinensis
  Intron number 1 from transcript orange1.1g001542m (locus o range1.1g000572m.g) derived from phytozome v7.0 (chr-ID sc affold00021; pos 1067825 to 1068080 reverse strand)
cacttgcttttgatttgagttacgaaattcacaaggtttccttcattcttcattctctttctccatgtattattaattttttttttatctaacacttaatgacagttcacgtctctgctgtaatttgattaattttgtagggtttctcctgttgtgctgaaacgcttttacttttctcctttaatgcgaaaatatggattacgggttggttaattctgttttttttttttttcggttttgcaggtggagtgagaga

SEQ ID NO: 81955 - DNA, 504 bp, Citrus sinensis
  Intron number 1 from transcript orange1.1g041296m (locus o range1.1g041296m.g) derived from phytozome v7.0 (chr-ID sc affold00178; pos 12089 to 12592)
attttatttcacaggtatgagcagaagttttcaacgtaatagagtcttcacaagcaaatcactgcagttaccatcactcccaggtactttcttctcctgcttgcgactttttatttctattgtaatgtgcaacagcttttaatattgctaattttagttaattatgctccccatctgagacggcattcgttgagattagaggagtcaaactaatgtttctgtataattcatgttttgaattgtcagcggttctcttaactttgcatacgatcaacaatattaaagtgtactaagactgcactgatcaaatagatgatggattctcatggacaaatatatttttggtcgctaatattgaacatttttggaaagctggctcctgattcctgaacttgggcaggtctatggtctgagtaagtcatatagaaacacaattgttctgcattgaaaaaattcgaccatttattgtttttccttgatatgtattttgtctgcaggtacttt

SEQ ID NO: 81956 - DNA, 704 bp, Citrus sinensis
  Intron number 2 from transcript orange1.1g001991m (locus o range1.1g001975m.g) derived from phytozome v7.0 (chr-ID sc affold00187; pos 128432 to 129135 reverse strand)
tggtgaattctttttgtttttgtttttgttgaaaggtgagattgctgttctctttgggttacataattttaaggtcaaacttgcggttggttctgattttgattttttttcctttgggggatcaagcgtgagttgaatgaagaaaattttgtttttttatattttttctttaaagcgcgatcgttttgtcatttttgtgaattttgcggtggaaatgctgaattttgatggaatcttgaatgttaagattgattttgttgtgatttagctcaactaagctctgaaggtgttgtgttaggtttaattattattatttttttaattttggagaaaaaatgttttgaggcattttttaataatattcattttttcaattttcattttctcacgaaccaaacaaggcatttaggtttggttgttggtaggtaagcttgtggatttcatttttatggtattatccttttcatttcactatctctcaaattttaaggaaaaagaagaaaaatctccgtttaattttttaatgttaaatatttaatctcttagaaagacatatacaaagtgaacgacttttctctgagtttttttttaaaggagtaattttttcctttttaattggatagtctgatatgagaatttaagtggtagaaaattatcatatctgaagtaaaaggaatttgaaaattttgcaggaaaaaaagatc

SEQ ID NO: 81957 - DNA, 428 bp, Citrus sinensis
  Intron number 1 from transcript orange1.1g024076m (locus o range1.1g023728m.g) derived from phytozome v7.0 (chr-ID sc affold00021; pos 979747 to 980174 reverse strand)
attacagatccgtcgtcgttttggtctaattctgtgtaagtcaattgtcttcttctctttatttttgtccatttgtacaatcttataaaaattttacgaatttgaatgcatgagttaattctataaggaatcgagtattaatcgctcgcaatttatcgtcacgagatgaactattattaatttctgtttatttgttagaagtttaattacgaaaccctaattgcatagaaagtacgaaccctatttataataaaacttaacgttgttctttttttcccccccctaagaattgcacacttgagatagaattcgtaataagcatttcatttcattatctaagtttcaacctttaagtgttctgagagaatacgtatgctttttgaacttttgcagattatcagaggctttgagaaactaggtgactaact

SEQ ID NO: 81958 - DNA, 893 bp, Citrus sinensis
  Intron number 1 from transcript orange1.1g008160m (locus o range1.1g003172m.g) derived from phytozome v7.0 (chr-ID sc affold00020; pos 534975 to 535867 reverse strand)
gttatcaaggtctgatctctttctttttcttttcttagttttgggttcctcatgtcatttgatcgtaaagttgtaatttttacagctaattttagtgcaagcttgtttctttcttaaatttttttgctcaatcgttgttgaattggcagcgaaaattgaaaaacgtgtggaatttgggaattttatttgttttccagttttaggttttcgtacagttggattgaaatgggtgttttggtttgatctattgtttgttatgatctctctattggtttggctgagtcagctgagttaaagttcatttctgatccggctagaaacattttcttctggttgttctaaagctttaaaattattcaatttctcatgcaattgaggtaatttctataaataatagtctgggaaacaaaaataactaaattttttttcacgattttttattttgtaattttttataatgcctaatgggatttcctgatacatgtttgatttcaaccaatatttagccagtgcatattaaattttccccaaagggtccatgaaagctagtttgtggaatgacatgtatttacgatgtttaaaggctgtttccttgagagctgaactagtgaactctgggattgaaaagaaatagtgtatgctcttctgagaagaacctaattaatgcatattcatctttatttactgattttaatttaaatgaactgttttgatttatctctatttgaacattatcccttttggcaaagttttaaatttatggaatatcatgttggcgtttcaattattacgtgctagatatttattctatatgtttccctttacttttacggaaatatgtagctgaaaatttctggtgattaaacttgtgatatacactctgcaggttaagt

SEQ ID NO: 81959 - DNA, 380 bp, Citrus sinensis
  Intron number 5 from transcript orange1.1g034522m (locus o range1.1g033434m.g) derived from phytozome v7.0 (chr-ID sc affold00165; pos 96317 to 96696 reverse strand)
tggtaatattttgttcaacagcttaacatatatagagacacaagaagtcaattgtcatcatgatgtctatttttttgtactggatgattgttgtgtgacacaaaagccaattcgtaatctgtgattagtgctgaatcatagatcattatacacatagatttctgaacccaatcaaataagtgtcatagctgcagtaatattgggttgttttgactgggatcacaattgtaaaatgtttgtgcatgcagtcagtgcttgtctacatttttttggataaattaactagaatgtattacttcttctctttgtgtcttcattgtttgttggattttcttgttactgcaggttgctgagtgtcttgtccctaaaatcagatcaat

SEQ ID NO: 81960 - DNA, 585 bp, Citrus sinensis
  Intron number 1 from transcript orange1.1g031301m (locus o range1.1g031301m.g) derived from phytozome v7.0 (chr-ID sc affold00029; pos 713531 to 714115 reverse strand)
actctcagtaagcctgcttcaacttgcttgcttcttttgttcattctgggattgtaattcaggggaagtaatgaacttttggttactttactctttggtgtttagcttaatttccgctcggtgaggttacaagcattaggtctagtaaactcagattccattcaatttcaatatcttacttgctaactgccaatggatggagcagtcagtttctgatattcctttggattaggcccaatttggttgatgccattatgtgcaaggagtcaaaagaaggctaattgtactgctctttcaatgcagatactttgttttatttgattttagacgatacaaaaatcatggatattagtgtcattatgattcttggagtgccatcatgcagaaacaaaatcttctttttgagttatgccatgcacttagaggtctaccttcttaaagtaatgtagtttgttacttgggaattttaatgaagcctttggtttgttgtctattacatgaatgcacttattccgatttgttattttcaatattttggggctctgtttcctttattgtatgttgtcttgcttgatgaataggaat

SEQ ID NO: 81961 - DNA, 676 bp, Citrus sinensis
  Intron number 2 from transcript orange1.1g016553m (locus o range1.1g016553m.g) derived from phytozome v7.0 (chr-ID sc affold00001; pos 5546166 to 5546841)
attttcaagctattggcgtgcctcctttgcctaaggcaagtatttttcttcttcttttttaattacttattcaaatttaattttatgtttcaaaaagttccagatttcaagtcatggaaggaatgttttcctaattgccatgatagcatctgaaagctaaaaattttggattctaattttgccttttgttttgtactgccaaccgtaatttagggttttgggtgttcctaggattatatttgtgtttttattaattcactaagaagattggtgatcgtgtttaggttcttttactgagtttgatggactttgatttgagattcatcaagttctggtacgaatttcacatcactgtatgtgtttttcactaaggaggctggtgatcatgtttaggttcttttactgggtttgatggactttgatttgagattcatcaggttctggtatgaatttcacatcactgtatatgtttttcctaggactttaaattagtgatggtaggtttagttgcagcaaattaattttatgtctcaattgtctattgtattttcatttaatggttaaggccttttatcttgtttgtaatggattactttgaagtgaatttggtgaacttgtctatgttctattatgattatgacttgcttcagggtattcttgttgaatcagaaccgta

SEQ ID NO: 81962 - DNA, 523 bp, Citrus sinensis
  Intron number 4 from transcript orange1.1g014998m (locus o range1.1g015045m.g) derived from phytozome v7.0 (chr-ID sc affold00001; pos 321830 to 322352 reverse strand)
ggggctattgttggagctattccacctcttcttgggtaatttcttctttattttttaggcttctttttttttgtctttttttttgcccccacgtttgatttggggttgacagttatgctttgattgtattagagaaaagtgcttttgcactttgtatagcaagtgctaccatctgaattgatatttaatgcacgtttcgagttcaatatgtgatgggacttcttcatcctaatttggtacgctgagcttaatggatgggatgaagaattagtatcactttagcaattaagttattaagaaatgcagtattggcagaaagtggttagttaatgtattccttacacaattttgatgaaaccatggagatcagactgattgatatagaatcagattgatatttctagaatcataattcaacctgacttcatactttgacgttaagtcaaaacatattaatcatgcatgatgcaggctcatgcttatctgtttgttctgattctcaggtggactgcagctgttggcc

SEQ ID NO: 81963 - DNA, 165 bp, Citrus sinensis
  Intron number 2 from transcript orange1.1g019757m (locus o range1.1g019757m.g) derived from phytozome v7.0 (chr-ID sc affold00029; pos 894905 to 895069 reverse strand)
aagatcaattcagacgagtcgattaaagtgataaggtgtttgtaattcttttcccttttattttctgtttttatttttctgttattcttcttttgatcattacggtaaagtaacatgtggatgatcttttcaaaatttttgtttttggcacatatgatataggga

SEQ ID NO: 81964 - DNA, 852 bp, Citrus sinensis
  Intron number 1 from transcript orange1.1g000438m (locus o range1.1g000438m.g) derived from phytozome v7.0 (chr-ID sc affold00001; pos 5187202 to 5188053 reverse strand)
ctgtttctggttcgggcttcattcatttaggtaaggtaattcgtaaatttgagagatgcctgcacttttggcttttggcttccacttttccaagctggtattcagtcaaaagtttttctcttttgctccccttttctgcgaggcttgttttatgtcgtcttttgtttttgctgatttgatttgcatgattcaacttttctcttttcaaaaaaaaggaaataaaagggcagcatgattgaactcgtgatctctgattttcttttcaatatgcacatggtcaggattttttatttacatattattattattattttaattattatttgcttctatattttgaggaggattcctgcttctttgaagttgaacaatcttttattatttaaacaaataaaaggaaaaaaaaactagtaataatatcagtgaaaagtttggcagtagcttttctggctgcactttcacgtgattttaaacaagaccgtaaaaatgccaaagggtcaaggtcaatagtcaaaactcagaaggtactccggcatcccagtgcaagttagttgcagctggcagtgcagaaggagatttgatatctcctttgctctcgccattactttgcttatgatattttctttttttaaaaaaaaaatcattatcactttcctttttattataattattagttgttcgaatttaatgctcgtaacttgcaatcatattggcgcactgtgcttttctggttcttgattgattttcgtttcctttctgctagaatcttttgcttgtttctctaaaagctctttttcttttgctaatatattttcagggagtgagatatatatataagcacatagaaggatt

SEQ ID NO: 81965 - DNA, 857 bp, Citrus sinensis
  Intron number 2 from transcript orange1.1g016646m (locus o range1.1g015272m.g) derived from phytozome v7.0 (chr-ID sc affold00001; pos 967503 to 968359)
cctatacttaccttgtaagatttttaataagtcgcacatatttagagtttccgataatacatttgaaggtttttaaataactcgcagatatttagagttttctaaaataccttgtaagatttttaaataactagaatatatttagagttcccgataatacatttgaagatagttgtatcagttgtttgaagcttctatacggagtacatatgcttttgttcaaaatcttgaatcctcctcagttcacaaaatagatttttaaatgctctatgggtgggttcaaggtcaatgtagatgacttctgggtttgatcttttcatgagtgcttagtatgctatgctttctggttcaaataaatacacttcgtgtttctgctttgtatctggtacatgaatgtagggtgagtgtatagtttcataaaggatgcaaaagataagtcctagatgaactaatcctttcaatacctttttaattgttcttaaaaaataataataataataataaaattaactgttagaatttccttattagttagagtgcattttatttttattccttggaaatcaatttcattctgaacattggcgaatttttgtcctaaagttttcaattgtattaaaatccaaatctttttgacatgtgagttcttctcaattccgcttgatctttatttaatatattctgtcagcaaaatactttgtttcatgctgctgggattgtttctgcaaaagagaatgcttttgcatgtgtgcaatgtctttgatctggaatagtgttcaatgttggttgttagttaagatagtgaatttcgttgctgactagtatttcttacatggtcaggtattttggtcaaattg

SEQ ID NO: 81966 - DNA, 667 bp, Citrus sinensis
  Intron number 1 from transcript orange1.1g022074m (locus o range1.1g010883m.g) derived from phytozome v7.0 (chr-ID sc affold00001; pos 5791513 to 5792179)
cagatacatctctttccccggatcagcgccatcttgtgagtttctgttttggggttttgtaatttacatgaaacgaatatcttgtgatttgaaaaaatgcacttgttaatctagattctgctgtctctgctgtctctgtgtgtttggttgctgagagaaatttgccaaaaactgggaatgaaaaaatatacatgcttactggtttttcgttatctaattgatttgcaataggtaaaaaccattctcctttatgtatttgcatgtacccacagattggatagaatgcaaaagaaattgaaatggtggatgacaactgctacacatacattggggtcccatcttgtattaactcaaaaatcatggcttacaacactttgaagcaggttgcaagcccaagtttaactggattccctactttcgcgatactacctgaatttgttctaatgtaatattaaaatgccagacatataaattgtcatcatgcaagtcaggtatagattgattggcaaactattcatctagtttaagtattttgtttatattctcactccatattgatttattttgtttaaggatgtgaggtgctcatgtttcttctatggttgaggacctgaacatcaatgttttccctataatttataaatatttattttgcttttgcaggttt

SEQ ID NO: 81967 - DNA, 472 bp, Citrus sinensis
  Intron number 2 from transcript orange1.1g022074m (locus o range1.1g010883m.g) derived from phytozome v7.0 (chr-ID sc affold00001; pos 5792249 to 5792720)
ttacggtatgattacaaatgttcttaaaaaattttgcatgtcatagaatgaatatacaactcagatgcttacttgaatattgtgatgccgcttttttatataagccaacagtgaggttttgagttttctattctatgaagttctattcgcaatcctattactcttttttttttcctcgctttgttaacatcactgtttgcatgaactgttttgaaattacaggagttttttcccattgtcaaattattaatcacctttctgtttgtaaaagatttgcttaagatgataactctttggtattttagaaaaaatttccgctgtaaagttcaactcagtaccttttaattgtttagcctctcaatttcaatgagcaattcgagcatattttgttttatttggtcttcttcattggaaaatttcccgtggtaaattcgttttgactttttgagtccacatcctatgcaggagatac

SEQ ID NO: 81968 - DNA, 686 bp, Citrus sinensis
  Intron number 1 from transcript orange1.1g046714m (locus o range1.1g046714m.g) derived from phytozome v7.0 (chr-ID sc affold00352; pos 25160 to 25845)
acaacatagttcaatatattggcacagagaaggtatgcgtctaacctcagtgcttgcattttcgcctttcattttctcatagtaatatttgtgaagtgagagtcagaactgtgtgcttgtaatgacatttatagacccctaacacctatgattttgctggaatttgaagcattgtgtattaatgcatgttattgactttagcactatttgagttttttttttctcctcttttaagtgaaattatactgtcgttgtccttatcattaacataatcgattggattaagtaggcatacttgacaggaaatacttcagaatcaaagttttatgctacaattaaatcgccagtattcccaactatccatatacctgcgaggaactctattattgccatctttaatttcttcctgctacatttagttgtgcaattcattattatctggcattccagtatacataaacctatcttatttgttaaagtacagaaagaacaaggaacttcccactagtcctaaatttgaagaaaaatgcagccctgttgcacactttgtgtggcatattaactaattttttaaatttctatgaaatttgtctctgttatattgaattgtccttttatatctggttgtttaggtgtgattatttcatttctggctctttaattctaagtcaccaaatgattccagg

SEQ ID NO: 81969 - DNA, 437 bp, Citrus sinensis
  Intron number 4 from transcript orange1.1g018839m (locus o range1.1g018839m.g) derived from phytozome v7.0 (chr-ID sc affold00008; pos 285826 to 286262)
ttagccagcactcatccaaaacttggagaccacaggtattattatttgaattcttcactttatacgagatgttccattacaactataaatagatagaacactttgttagatatttttagaatctagatttgagccctttgtttgtatgaacaatatacttagataatattattttttgtttcttgatttctagactgcagcaatttatgctgctggtcatatacaattgatgctggaatgtaggttgagttcatcaactatagaagatgggcatcagtatttgaaatagctttcatgcatacttcccattatgtgattggagaattttttggggttgttgaaagctgtttttcatggctatcctcagacttgttgaacatcttgtttctttggcatgcataggttccacttgtctacaagaacgtctgacagactat

SEQ ID NO: 81970 - DNA, 770 bp, Citrus sinensis
  Intron number 1 from transcript orange1.1g004867m (locus o range1.1g003056m.g) derived from phytozome v7.0 (chr-ID sc affold00188; pos 52944 to 53713 reverse strand)
tttccagaacacattaaatcccctccctttaagtcgctggtacgatagttttaaacctagaactctaagctccgagatttgagttcgaatttttttctctttctataattcttagatctgtgcctttctctctatagattcgacttgtatgtgaacaatttaatcttttgattgtggatgatagattcagcttgttgcgcagctaattcttggcttttattgttgctttctaattaccgattcactcgccttggttttttttattattgcttctttcttttttttccctctggatgtgatttgttttctggatttgaatttgatatatttttattttggctatgattgttgctgagtttttctgttttattcatgtttaggctgtgagatttaatagtgtatacttgtaaacttatttagttcatgcacattggttatttctatgatgcaatcgttttctgtgatgtgtgcatgtgattggatttgcaataattatcacgatgaatcaactcaggtttcattattgaagttcattgaattagttgattttgttcaactgttttattgtgtgcattgccttggactcaggctgaattcttataacatacataaatttcatgtttgcttggtgtttcaattattttagagtaattaggatccgttatgttttgtagataatctttctggtcaaatttattattgttaatcctgtagttgttttcttttctttttcaggagccgaccaatttaatttaataaattggttaatt

SEQ ID NO: 81971 - DNA, 684 bp, Citrus sinensis
  Intron number 1 from transcript orange1.1g005989m (locus o range1.1g005989m.g) derived from phytozome v7.0 (chr-ID sc affold00001; pos 2472554 to 2473237)
cccctacttgttcacctcatcctcaccctcgccaggtactactcttattttgacacagacacaaacacacatatataaagttagtgcttgctgggtttctttttttttttttaagttttgggtactaataagtattaatggttaacggttatttgttgacgagagattattatatactttcggtttttttgaacggaaagttttacttgctttcctatgatttacaattatgtaagtggctctagagtcttcccgttatcttactggcctcttttctctggatctttttagtaatgcatcgagttcattttggtggtttgtgttccttccttcattactcaaagactaatgtcagtttaataatcaattgtttgaatttgccaattcaatggtttttgtttgtcaaaacaaggataatggagtgatatgatggaggcttatttggccatatggtgaaaaagaagaaaactgaatctaagtaattcagaagttcgatttttttttccccttttttcccttctagctgtggtgtttagagaagcgaaaagacaagtaaataagacataaaatgtgaacttggagaggaattaccagtatctatttcagtagtttgatactgttaactaatcatgacctgcaattcttccagccagagagtgctagtggctcaaggaggcacctcag

SEQ ID NO: 81972 - DNA, 845 bp, Citrus sinensis
  Intron number 3 from transcript orange1.1g012256m (locus o range1.1g012256m.g) derived from phytozome v7.0 (chr-ID sc affold00001; pos 1728300 to 1729144 reverse strand)
caaatagctggcttgttgatatctattgccacaaggtatgctttctgagttgatgtttggtttgtatttacagtatattttgcatctttgattgttcaattaattttctttactggtccaatattttcaattttttgcctctggatgttcattattggcatttggatagaacattcattatttgtctctttggatattcaatgtttaatattgtttctataagtccaacttagcagcttttagcctttgtatactataatcaactcatactaatcaggcaagttgttaacagttgaatttgacatttatttcggggactgacacacatgatcaatgattttgaacctttccatgcaattagtttaccaagctttgttagcctttatatgcaacgattattctttgtgatcgtgactgtttgagcctgtatttgtcagataacctagttgcaactagattcccggctgggtcttcatctttttgtgcgtcttcaaaaagatttgtacagttaaaccatcacatcagtctgatgaatattaagtatttccagtctaattttatctgtgacatcagcaaaatggtatgataacacatgcatacttaattttatcaatggattttccaaatttgtagatattatacattgttaaatcctaactaaacatgtgttgactgaggtttagctaaaataaatgagccagtcatgattgttctagaagcttttagttaatgcgatttccatgtggaatttgcttgtccacactgtttggttgttgaaaattgcttctcactggacagcattatgggatttcaggtaattaggttgtctgctgccacacaggaat

SEQ ID NO: 81973 - DNA, 812 bp, Citrus sinensis
  Intron number 1 from transcript orange1.1g026931m (locus o range1.1g023811m.g) derived from phytozome v7.0 (chr-ID sc affold00021; pos 771866 to 772677)
cctacgtcgttcctcacaacgagttctccgatcaggtccttatttttgtttatttttattattttgtctttatttatttatttcttttttgcgttcgtttgatattcttagctggtaggcattgctttaagttgttttgcttttgcttatgatctgtttgaatgctaagaaaattactgaaaggaattttttttaaaagaaaaaggaaaaccatatccttcaccaattgtttgaggtaaatttatgaataaatactaaattacatagtttggtgttttgattttgtagctatgtattagggttgcatttattgattgaaaatgatttgtttatgtttatgatatgtttggaagctgagaaaattaccaaaagaattttttccccctagaaaaaggaaaattataaccttcactgattggttgggttaaattgatgaatagatacagaattacttatcatcaaggttttgagtagcaatgtatcaacgttagctaggttcagaactataaatgactactattttggtgagaggttactgaaattatttgtacattgattatttatgggatatatggttgtgctgaagtcgttctgtttgaggttactgaaattatttgtaaaatgcttatttatggatatatgattgtgcttaagtcattccgtttttgcaattatgtttgtgaatgatgttttcataaattccggtaaatagtatagtaggaattgtgtttttgtttagccagaactaggaagcttatggacccaatgtttattatttgcaggttgcattggatattgaataccatcatacc

SEQ ID NO: 81974 - DNA, 723 bp, Citrus sinensis
  Intron number 1 from transcript orange1.1g032439m (locus o range1.1g026771m.g) derived from phytozome v7.0 (chr-ID sc affold00398; pos 115711 to 116433 reverse strand)
gtccgttcgggttcgccagctccagcggcctctaagtaatgttaggaaccttttttctttttttttgttttcaatttcatttaaatataaaacaagcgtgtgtttagcaataaaagtgattctgagtattaagtattttgtaagtgaagaaggtcatttctttagcagctggaagcgtgttatatggtgcgttttaattgttttcgcattgcgaaatcgctttcttggtcaaaaagtgagtccaaattgcattttgcgtatgggttttgtagtgtttaactgaaatgtctacaagtgcaagtgctttagtgcttttgctaaatgctttttctacaaacaaaagcatttgaagtggtttctaaaagcacttgttaggtactttttctaaaaacattttcaagtgccttaatgcaaggcattttttgcggataacgcacctttagtaatagagtaacggtttaagtgttctgcagaaaagtatctacaaaaagatcccacatacgacaatcacaaactcaattgtcaatatttcatatagagagtttgaatgtatattattattctttatctaattcagctaaactctacaaattacacacaatatgcagttttggagaaactactttggtggtgtcaaaagcacttccaattacactctttaatatttatgcttgaaaatttgaatttgtgaatatatacatgtaacgtgttgcagttgaatat

SEQ ID NO: 81975 - DNA, 508 bp, Citrus sinensis
  Intron number 2 from transcript orange1.1g022689m (locus o range1.1g019658m.g) derived from phytozome v7.0 (chr-ID sc affold00001; pos 5519797 to 5520304 reverse strand)
ctttctaggcacaggtaattttgttatttctaatctacattatgagttctctctttaaaatattaaagtgcttctggcatttcctctgaatgtacactagttcacaaattttgcacagcattttggaatcttatatttatagctgaagtcaaaggcataaccatgattatcagattattaaagttgaccaaaatcttcaagtcgttgcacaaaacatttttaccagttccattaagtttgatggacatacaactatcttatgtttatagttgaattctctagatttcgtttgtttttgaaatttgttgtttgaaagctttctgccatttgtgtgtaatagtagtatctttgcccgttgtttcatgaatcataatagagtttctactttaaaaccatgtgttttcttcttggaaactttttcttaggatttttcatgctactccatggtgaatttaatgttttattgtcttcaggaaagaaatttctcagctgcagaacaaggaaactg

SEQ ID NO: 81976 - DNA, 918 bp, Citrus sinensis
  Intron number 1 from transcript orange1.1g022689m (locus o range1.1g019658m.g) derived from phytozome v7.0 (chr-ID sc affold00001; pos 5520353 to 5521270 reverse strand)
taaaagcatactctctgttgctgctttctcctcaggtcagatcttttctctctttacagtttccatcacttcgtgagtaacgtataattagtaatcacaagtaactagttctagtaatcgacattttaatctcaaatctttttagtttctgtgcattgatgtacgaaatatccgaaagagggaattttcatatgctaggtgaatacccctttgggaaactgataggcttatgtatctgtagcttgctatttgcttagatatgtataatggagcccaattgaactttatgtaatttgcttagatgggttgggatttcttttactctctcataagctaattaactcttagccgcttctttccttgatggttgattgttaaaactttgagactcgtgaagattacataattgtggtatattaattttagatataaaataatccttggttgagtctgcttgtaatatcattgtgttttcaaggttaaattctataagattgtgttgtaatttgtttatagcttgtgaaattgattctgacttgtgttatatctggaattaattcttgtgtctgaaggtttgtaattggacatgctttaaataatggtcttcatctctgtgtactgaatgaaactcatcattttgtctcattatgttagcgtataaaagaaaattaatcagtgtggccactgcaaatatggtatttcacatttcatttttgatggatatataaaatctgttccaaactacctgcattttttaccatttgaatttgatgtcgcacttcttttagtaagcatgatatggcttagtgtgttgtaaattatttttggagaatgatgttctctgtaagattgtctaccttgatcttagggactcaaatggcagacactcaagaaatagaggagacaccatctgaagcc

SEQ ID NO: 81977 - DNA, 391 bp, Citrus sinensis
  Intron number 2 from transcript orange1.1g000632m (locus o range1.1g000632m.g) derived from phytozome v7.0 (chr-ID sc affold00020; pos 1312462 to 1312852 reverse strand)
aaaagtaagtttccgggagattattgggatgtttgtagtctggctaaattggtaaaattcgtttaaatttgcttcttgtcgggctgagaggaggagacacatccttggggtttagttttccaaaccattaaatgcatcagaaatctgagcatagatttgcatctatttggtcacttaaggaaataaaacttatggtatgcatcagaaatatgggcataataagacatacccttgggtttagtacttttctttttccgctatcatttaatgctattattctttttgaatgtttctgtttaatatatcttttgagtgctgggttttaatccttttgtttagtcaactcactcttttgtctcaccaaaccagtttgcctgtttttctccacagg

SEQ ID NO: 81978 - DNA, 481 bp, Citrus sinensis
  Intron number 1 from transcript orange1.1g000632m (locus o range1.1g000632m.g) derived from phytozome v7.0 (chr-ID sc affold00020; pos 1312949 to 1313429 reverse strand)
cttcttcttccaattcagctaattcgttttataaggtattcgatttttgtgtcttagggtttgttttatttctcggcgttatgccaaaaatgttgagtactttattttatttatttttgttagatagggttttgtaaggtcttggaataatgaaggtaaaatttgggtaatgcttatggtttttggtaattatgagccaatttgaaattttctaatttctatttgataacgtggtatcaaagtttaagccttttctgggattgcattttatgtacctgaagttgaagtttattgcactgtttcactgtcctactatctactacttttaagcttggtgcttattgtaaaagtaacttcttcatttaacatttttgcatcagattgctatctgtttcttttctgttgtataatattctgcttgaaattttcatgcttctctatgaatatgtttggagttcttttttaatagagaaatataacc

SEQ ID NO: 81979 - DNA, 901 bp, Citrus sinensis
  Intron number 1 from transcript orange1.1g033638m (locus o range1.1g033638m.g) derived from phytozome v7.0 (chr-ID sc affold00032; pos 442525 to 443425)
atctttatacaataaaatctgtacttaacgcataggtggagtgattttaccaatagtcttccctcaattccacttgaaagaattgtatcatccacacgatcagttttgcagttttgggtatttgggcgctgttcatccttagttttcgttaagattttggttctggtcagttcaatgcattggtcgtgtttgtttatgtaatttatttatttttatttttttggaaaatcgttgatgctttttcactttgagagatgacacggatctccttcattgatatatcgattcagaactcattgtttttctgttgaaactcattgttttctgcaacagaaaaacattttcttagtttctggtcacccttaatatacttttgttgtttcccaaaaatcccaactgtgaatttaattttcaagcattaaaaaggaaaaagatttcttttctgggaaaagagtctgcttatacgagacagaacaattccgtgtttgtgttcttctgcttctttgttgtttcttatgcaattctgccaattctctgtttggttcctgaggaaatataggaaaagcataggaaatagggactcatgacttcattgaagtcaaattcttggtttacactcaattggtggagggacttaatcactatttttgcataataatgttgtataaagatctgaaagtatttttttttttaatttctttttcagcaacaaaatgcatgctgaatgatgtgtggcttgtgaagttttcattttgagttttattataagaagtgtaactacagataagataaagtcatgggaaccgaccaatttactttccccctcaattggctttgcttatactaactttgagtctttggtgcaggaataagtctgctgtttattgagaagaagtaaact

SEQ ID NO: 81980 - DNA, 489 bp, Citrus sinensis
  Intron number 1 from transcript orange1.1g013640m (locus o range1.1g013640m.g) derived from phytozome v7.0 (chr-ID sc affold00275; pos 122176 to 122664)
cttcacgaccgttaccaggtttccttttgcctttttttgcgatttatttgtctaaattttggttttttaaaattttaaaataaagttactattttggacagttttaaagatcaaggacattagtaattttttagatttgttacaaataagggagaataataattttgttgtttataggcttgtgctgggtaaggcattagagttcaatgcttattattagaatttgtatacaatttttttttctagagtgagtgtatcagctactgtatcttataattctgaatacatttgactgtctttcaaggttctgccatcaatttttgtattcattaaaaagaaaagggaaaatcatggatttgctttgttgttgagtggagtatcttatcattttgttctcattcttccaatttacctttgtttttttcaaatttttgaaattttgtattttaatcagattggcccggatcagatcgaggcgctttatcagta

SEQ ID NO: 81981 - DNA, 774 bp, Citrus sinensis
  Intron number 1 from transcript orange1.1g024240m (locus o range1.1g021234m.g) derived from phytozome v7.0 (chr-ID sc affold00102; pos 163219 to 163992 reverse strand)
attctttccactgttggtcgctgttaacacaaaaggtgagcacgaatttccagcaaatcaatttctgattttaaatgaattaatacgtataagcataaatgcataaatgtagtttctgatttgtagtgtttttttatttgtggattttaatggttgtgtacttaaatttagttattttttatgtttgatttatattgtgatactattatttgtgggttttatgatgatgttgtatttttttcatgttaaattggtaattgttgattataattgaattttatttgaattacagttgtcatacactaaactgaatttttttttttttaatttgaaatctgaatcgttttggatttagttgaagtctaaatgagtctgaatataaatgtttgactgacatgtttatttttttttaatatttaaatttatatccttataagtcaaaatgaataaaaagattaagttctgtagtttaaaaaatatgcgtagttaatcgacatagttttgagatataatatttacttctcataatagttttgagatataattttatcatgtttaattaatttagtggatcttttttctatttatattatcttaaatttaagttctaagtttgaaatataagtgtaccggcgattgcttaataaccccccttgtaattctcaatttttattgtatcaattgattgattagcaattctcagtttttgtaatttgtaaacttattattatggttcttcttttctttttttcccctggttgcaggttaagaaat

SEQ ID NO: 81982 - DNA, 581 bp, Citrus sinensis
  Intron number 2 from transcript orange1.1g022562m (locus o range1.1g022562m.g) derived from phytozome v7.0 (chr-ID sc affold00020; pos 1523784 to 1524364)
gccgatctagcctctttgatattactactgattcggtatcatttctttctttcgtttttctctatttctgttgctttgaatcctttgatttattaaatctcaatattagtctacttgaatcaagtcaacgaaactcttttcatttttttttggggtaaatttttaaatttgttttaaaatattagttttaagtctgaaagaatgaagatgaagttgttcttttggatcctgtaaaacaatttcttttattaggtgttcggttggttgattttttaggaaattatttaggatatagaattttgggtactaaattatttttaggttttgaagtagcacttaaaaatcatgggaaaactgttgcttgaaaccgaaacttaatccgattttcctaagatttttgatagagacttgtatttggattctaaatcaaacagggtgtttagttactcaggtcctaaaaattcatgaaagctcaaaattttaagcttttgtatctttgttttttacttttcttttagtcagcaacagtgaagaagttaatcattttttttttaaaccatttgcaggttgcagctactcca

SEQ ID NO: 81983 - DNA, 638 bp, Citrus sinensis
  Intron number 1 from transcript orange1.1g001977m (locus o range1.1g000778m.g) derived from phytozome v7.0 (chr-ID sc affold00001; pos 4509523 to 4510160)
gtctcctatcattaagcctgtgaagatttttgggagtaagtgattatgttttgtttatatttaatttctttttacagtttttgggtctgcgagatttagttttcttccctgtatcatacctagaaattagtgtgcaagatatgggcagattgtttgtataatttaagtttcttgtggacatagtgccatcatgcctgtggaaaacatggcctctataatttttcttacaaaaagataagcaggcaatctggcaatagcaattggagattcatcagactcttaagttggtgttccacatagactactttctagattatttctattctaattttgactttactatgactgttgctcctatcttaataggagtttttgtggagtatagtggtttttttattatcgctctcctttaaaactaggaactatttcagctacatttacattttaatttgtttttagatttattgtcttgctgatttcttcttaccctttgtccacaataagctaaattggtttcttttcaactttctgttattatttcactagaagccatgccattgcatctaataaagatcaagttctgatatctacaatggatattgactgagtatgctttgatgcaggtgataagttatcta

SEQ ID NO: 81984 - DNA, 903 bp, Citrus sinensis
  Intron number 1 from transcript orange1.1g015079m (locus o range1.1g015109m.g) derived from phytozome v7.0 (chr-ID sc affold00008; pos 2304214 to 2305116 reverse strand)
ttttcattcacattgctctcttcccttttcgcgctgtacgttttctctctctcaaagaaattcgaattttaatcactttctctttcttacgtttttcattgtcaattcatcgtgcgttccactctaatttcctatcacttttttctcttctgggttctgctttaaacttgtagttttgctttagatcttcacagtttcgtttgttgcacctgtacggcttctgtttctgtaaagcagagaggctctctgttatttttttctatctctggtactttcttagcatttacaactaaagtccctgttattgttgttatttttgtttttgtttttgtttttgctttaaaaggcctgttattattattatttttattcttctgctgttcttgtgctagctaccctgctctctattcccagttgtccactcgttttatcgcttaggatcacaaggttttccgagatgcgattttgttgatcggtggttttgaatcttaattccgttgatttgggtttgttctttcaaaaaaattattcactttttagttttgttttcgaagtattgatttgggaaacgacccttttcttggcttagtttgtaaatctatattttttaattttctgggcagacatgctctgacataattatagtctatgtattttttaaaattcttgttcaatttcgatcctttttttttcccctttttgatgtgttcttttggttggtttgttctctggatctcgactgttttttcatctctgagtatcaaaattttaatccttttctttcacatgtaaaaaatttcatattttgttaactgaactgatattgcttgcggatttactcacaattgcttgcttttttgttttgcagctcacaagggggtgtattatacttgatttctgaca

SEQ ID NO: 81985 - DNA, 503 bp, Citrus sinensis
  Intron number 2 from transcript orange1.1g006645m (locus o range1.1g006645m.g) derived from phytozome v7.0 (chr-ID sc affold00103; pos 181279 to 181781 reverse strand)
gaaaaggtttgtctgctttgtgcatatgtataagtagaggctactgagtgtgatttttgtgatgtctagcttgtgaagggtatgttgagagtttcactctttcgctaaatgtagaggagataatagtttgttggtggtgctgaaaagttgaaattttctaatgacatttgctgcactgttgcttactttagtccttttatccttctatggattagacagctgcaaaggatttgttggattggcatatgatttaaaatagtttagtttcttcttcgtccatcgaaatatgtattatttattgaacttttagtaattttgcttcaagtggctatgctttggaattttttgatcaatatgtttttcatttactttacctttggcctaccatttggttgagctgaacatctttgatgtttatgttattatgcatttccatgtattgtatttaattctcctttgctaaagtattttattgtctgtgcagctggcaagggcttggaaac

SEQ ID NO: 81986 - DNA, 832 bp, Citrus sinensis
  Intron number 1 from transcript orange1.1g000196m (locus o range1.1g000194m.g) derived from phytozome v7.0 (chr-ID sc affold00236; pos 47725 to 48556)
gcaatcctaaggtatatgatcttttctgtttgttttcctagaaattactgaaaatgttgaattttggtccttgttagtagcggtcctgccactggaggtttgtagaggttctcttaaaattcagtatagttgatcacggaagaagagtgaaattagttgatttggttttgtctaagttccagtttcgtagttgaaaactgctgcactaatggtaaccctaaggtgcatgatattttctgtttgtttttggagaaaattgcggaaaatgtagaagtttggttgttttggtggtactggccctggaggctagtaggtgtatcttaaagtcagttcagttgatgtgaaaaaggagaagtcaaattagttgatttatttcttcccagttttagccaggtagttgaaaattacatacttgtaggagaattttgccatacgttttaatataaccatttaggagaaggagagagaaagaaaatgtaaaattagtttatccttttcagttttttttttcctgagaaaattccggaaatgaaagaagatgttgaattaggcttcaattttcatgtctttgtactgaaattaacttctggttagtgatactgaagctagtacttgaaaaccatttcagttaacaattgcttagaaaatgaaaagaaaaagcagtaaaatttgttgattttgctatcgttggcagattcttttgttgtcttaaactttatattttgatagtaaacaacaacattttaagcagtatatcacactctgcttatagtttgttattttctatcgttttataggagggtgcttcattagctttaaggaaacatataga

SEQ ID NO: 81987 - DNA, 736 bp, Citrus sinensis
  Intron number 3 from transcript orange1.1g008822m (locus o range1.1g008822m.g) derived from phytozome v7.0 (chr-ID sc affold00157; pos 268552 to 269287 reverse strand)
cccagagagagtccaaaagagatcttactcaagtggtctgtgcatttaattttcatactttataatcatgtcggtcattttgtttgtgttacattcttttttccagtagagattgcacacagcttattcttttcttgtgaagtcatttgtattctgccttaattattaaggtaggaatacaagggatcaaaatcaaagtattaacattattttaccttcttatcaattgaaactgtccctactgaattatatttctgaccctcccctttacgagagctttaaagtaggcatacaacattctttatgtcctatgagttacagaaatagtaaatcagcaactatttctttagctcttattagcaaatgatatattaattataaccatctgattttgacactaaatgtagaagtaaatggttcttattgttcttaataagtttgaataataataataattgttttattttttaatagaaaatatcagcaatattttgcagtcaggtgttttcagctgctgaacttgtataatttctgagagcctgtcatctttctctatatttgatgtttatagagttatgattcaataatttctttttcttcttactcttcttctacccaaacagtaagctgacagctttcacgatatttggcgttttatggagttgtgattttcattatttctttttctgcttactcttcttcttcccaaacaggaagctcgtttaccattacaaat

SEQ ID NO: 81988 - DNA, 541 bp, Citrus sinensis
  Intron number 1 from transcript orange1.1g004536m (locus o range1.1g004536m.g) derived from phytozome v7.0 (chr-ID sc affold00001; pos 4579364 to 4579904 reverse strand)
tggggaccttggcttattgcattccaaaaattaaggtatgaacaacatcgcaattcttatgcttttcggtttcatatacctgctgaatcttcagaatttcaaaatttgtatatttaaattgaatggtggggattttgacgcccaagatctattggagatatccttttcatgtacattgtggggtttaaagactcgctgatgatcaggttccaaggatatgtagtatgaacacatctaggttttatatttgatcacatctagattttaaggaacggtttctaatttggtagacatctttattgtctgatattatatgtgaatggtttttgatttatatgtgttcatagagactctggtttgatgtttcatctggtcattgtttgcggttgtttcacttgaaggaatgatcctttttttgatctgcatatataaattgcatcatacaatcattattgtcaatttctttgtaaattcacctctattttgattttttttgctaagtttagccaggaaatctcctgaaatatcgtggtctgcattt

SEQ ID NO: 81989 - DNA, 637 bp, Citrus sinensis
  Intron number 1 from transcript orange1.1g023188m (locus o range1.1g023188m.g) derived from phytozome v7.0 (chr-ID sc affold00015; pos 1650612 to 1651248)
catttgcttcctctgctcccttttctgggttccaggtaatgtcgtcccggggtttattttctcttttattttttagacaattctctctttcaaacttctcattttcattgatttggccttttggttatgtactacgcggtcttttcgacataaagctatgatttttttttttaactacttaaaaagctgattaaacttacatgccaaaaaaaaatggtttattctttttttaagtgtagtgcatataaagtctgttgtataatgaactcgtttcagtttggttacggcgactgacatttgttatcttcatgataaatcttggtcctttatttcatacggaggaaagttgagggttatatcataagaactttgatagtgtgtgactatcataagaacggccagtagattgttgttgcttcaagttttgattctcatcttgtgtttgaactacttgataatcttcaggagttctagattgtgaaaggattgtagtgttatatcattttcccttcttcatcacgtgtgtgtaaacggtatagaccaccgctgcagcaaaatgatttgattgctgattttgttcattttttatttgacttttgcagtgttctatcaagaagcaatctgctgtctggaaggt

SEQ ID NO: 81990 - DNA, 383 bp, Citrus sinensis
  Intron number 3 from transcript orange1.1g004972m (locus o range1.1g004726m.g) derived from phytozome v7.0 (chr-ID sc affold00629; pos 10696 to 11078)
gagccgagacgacgttaaggctattgttctgacaggtctgttcctttcttttccttgaatatacaaatgcacttttttttagtcatttgattgaaattcccattaaaataagcatatgctcctgtaaacagtaacatttgattgaaaagtaaacatgttgacaaaaggaattgctctgtgattgtcgccggtcggccgtcggacggtgactttttgaataatattgttcaagtttttgaactttttcttttctaattgttcactttttattggaactgatgaaatgataaaagtgagaagctcgatctggttcttacggttgtgatttactgctggagaaaggtctctgataatgtgtttgtttctcttggtcattgaaggca

SEQ ID NO: 81991 - DNA, 687 bp, Citrus sinensis
  Intron number 1 from transcript orange1.1g034977m (locus o range1.1g034977m.g) derived from phytozome v7.0 (chr-ID sc affold03450; pos 7972 to 8658 reverse strand)
tttgttatatcaggtagagtttctcctctcagttcttagggtgcagtgacttggatattttattaatatttgcttttggctgttttgatatttatattaaggttcttgcacttgtgctgtatataactctcagataaatttcttaccaccttgttggtttttgaattacatgacttgaaatgttgggcatcaagcttgtttccacagaattctttgcaataaattcatgttctctttttccttgacttgctgtgaaacccactcctatccatgcaaatccaaatgcatacatatttttatctgtgatatccaaaccaaataaatcaataaaatgctgaaatagtgagtgcacccacacatgcggaagcagcctagtgtggccaagcacctctcattagttttacgtgatacgattggcttgttgcactcttgatgctaatttttctttcttggttttggaaggttctggtgatggtagtgtatacgcttggagtgtaaggagcgggaaagaggtatgataagcaaaattccttgattcttatgccttttgaatgcttagaatccaaagggatgttatttcccatttcccctacattgacccagccatagtattcattgtcttctaggcaaaccaacaatgcttttgattctacttttgagcatataccttaagcaccaatttgcata

SEQ ID NO: 81992 - DNA, 888 bp, Citrus sinensis
  Intron number 3 from transcript orange1.1g005046m (locus o range1.1g001636m.g) derived from phytozome v7.0 (chr-ID sc affold00015; pos 758581 to 759468)
ggagataaagttattcttgaagatccgatagagaagtgcgtgcgttttctcgtaatcaactgattttttttttcagtgtcagtttttttataattattataattattgttgttgaattaatcaaagcaactgttagttttctattttcaatatatatatttttaaataattgcagaaagagtaagtggtaaaagaagttgaaatccgagaagtttgtgtagacattcttttcaatacattgattgaaaggaagagtattgtgaattggagatcaagtgtgttctagaattgaggccggtttggctgacaaaagatgtttttccttgggaaatatgaaattagtggactttgatacttttagttgaaaacagtagatagtactatttttgtgaagatgaaaatttatggattttctcttcctccccccccccccccccttcttttttcttttggccttcctttatcctattgctggacttctctattgattctaaaaacagagttactctgcaatttctctttgttagacatttaactactaaagaaagcagaaccatgtgacttaagagcaaatttaatttattttaaagatatattttgaaaacgtaaatgcatcttgatgcgtggcccaatacagaaaattggagtagaaaggtcaaaattaattgattaaaaaaaattcgatagtggtgaatgggctaaatagggaaggtgagggcatggcaagtgcgcgtgcatgtgcattgcatggttcatcaacttggggaccaggcttattcattgtacacctatttttttaggtcgatattgtccttagaatttattctcgttgattgtctcaagaaattattagttgttacaataatttgcttatttcaggtggccaat

SEQ ID NO: 81993 - DNA, 1035 bp, Citrus sinensis
  Intron number 3 from transcript orange1.1g033594m (locus o range1.1g033594m.g) derived from phytozome v7.0 (chr-ID sc affold00042; pos 715663 to 716697 reverse strand)
tgaccaaattaggcttcttgctcaaacaattgaaagtgagttactgtctgttagctttttattttgtttcttgcgcctgttttttatttggtagcctgaatcctgaagctcatgaagagtttgggcatctacgcttttaggttttagctgattgtgttgcgttatagtttatgattatgttttgttgttatttaaggcaagctatgtgtgagattatggagttcactgatattttgaaatttattaaattggacaattcactttccttttaaggctattcaagctcttcttaagtcaactgactagtggaaatttgaattgctacactttctttttcagtgcacgcaccctcgtacaaattgtcattaccataatcttagaacccatttgatagatcagttaaaatacagataggatgactcttcttatgtagtgtttggtatgcttcgaaggaccagtaagattgaaaggatgcgattcatccatagtggactgaataagacgatcagttgagggcagttgggataaacatcatcgacaacttggtgaatgaccaaaaatgttatatatttcaatttcccacaattcttctgtgtttgctggacagtttttaacagaacctacagggaaaacctgttcattatttttcccaccattcttttgtagctcagggatttctagccaacacatttactcaggaaaatcaaattttctgaccatttgaaaactcaaaacagacaggaaacagaaatgaactgttggttgatggtgatagtgtttgtgctattctgagggcttttgtcttctttattgtattaggatctgtgatgcttctgatgggaagcttattaggtgttgctagccaatgtgatatgtaattaatgtttttgagtttataggatacgatgggattttagaatatctaacatggtcaaggcagcaagtaattgcatgtggtaaactagccttgtgagtattattgttccaagagattctaatttccgttatctttttaaggtgtgcgaactgactggc

SEQ ID NO: 81994 - DNA, 688 bp, Citrus sinensis
  Intron number 1 from transcript orange1.1g020155m (locus o range1.1g019998m.g) derived from phytozome v7.0 (chr-ID sc affold00042; pos 209583 to 210270 reverse strand)
aagtcatcactctcccaagttctgcactttacgatgtaagtacttatctctgtcaaatattttctgggttctgtttgtttaatgggaatattcaataaaactgagaaaatttgagttctgtgtgtaaattctgttagaattctagattgaattcaggtggcaacataccaacatagtctgctaatcatttgttttatttctcttataatataagtaaactgaggaacattgaagaatttatcatggttcaacttgtaaaacttcttgggcggtacaagagttttctgttagaatgctcccgctcactctagattttgaaggggtttgaatcacaagtatgcgatagttacagaaggaaaaaactttgaagaaaaaaagcggatacactttttaattttttttagatagtccaggacaagaagaagaaacttgaatcatatagaagatgaagtgcatttggtttttgcccagggtacgcataagaattaagaagggatttatgtctctctctctctctctttttttttttttacgttgaaattatgaagttaacttttaaggaaacaaaagaatcatgcgcattgttcatttggttgggtttgtcaatgaccagatggtcccaaattgtgcttgttttgtatgttagacggtgttgatacacttgctgtctctttccctttctgtgtag

SEQ ID NO: 81995 - DNA, 820 bp, Citrus sinensis
  Intron number 1 from transcript orange1.1g041718m (locus o range1.1g041718m.g) derived from phytozome v7.0 (chr-ID sc affold12542; pos 529 to 1348)
tctgcttcagagataggtacccgcagacttgtttatgtcactccattatgagaacttaggagtaccactccagttagactagttccacatttttattatgcaatttagtattgagttctgattgagaagctcctttcgcataaagcagtttcttggtatagcttctgtgcatagaattctgctgctatttgaatcatttgattattgacttgctctgctatatcagaatacgctgatcaaggagcaaaaagtaagcctacgacaaagatagtggtgatagtcgttcctacagctgctctgttagctgcggtgcttatagctggctacttgattcacaaaagaaggagaaatatagtaggtataatattgctccattttccttcaaaaatttatagccatttgcttgcatttttatgatagccgtttcctttcaataaaatcttcaataaaatctttcaccaagtataataagttttatatgcaacaataactgtatgtttgtttcaagatgaagagttaacagtgcatatcatttagatcaggggcagggtaattaaacttgtaaatttttggttggaatagcaggtttacttacttgcatttagtgttatatcattacacgcctctttttcacctatggttctttatttacttgcactttcatattgactggaaaatagctttaatacaaatttacagataaagaaccttctcatcaagaacacgaaaattgtagtgaccagttagtagtttgtccagtatacgtactgcatatgtgctttcagttaatattatccaatatttcagagaaaacagaaac

SEQ ID NO: 81996 - DNA, 481 bp, Citrus sinensis
  Intron number 1 from transcript orange1.1g009064m (locus o range1.1g008734m.g) derived from phytozome v7.0 (chr-ID sc affold00075; pos 370697 to 371177 reverse strand)
ggcagcaccactgaatcttcttcttttcaggttttgagctttttatttttgttttttgcttctttgggaaatgccaataacagctagagctgattaagtttgaacttttagtaatgttagaactgtaactcttgtttgttactccatttttcttttagctacataacgccggttaaaaatgcaggtttttatttattttttatcagtaatttcaattaaatagactttctttgtccttctcattaaattttatgttcaagatttgacggtatttatttggatttgacttctgcaattagctaggttggagaggaataggatagaagatactgtgataaagagtgttttacgtgaagtatgattagaatttgattgcatatgcaatgatatttacaactggtaactgtagttggtttactcaggtgatgaatttgttcattcattaggtgactgcaaatccttgggatatttctcgggtgcc

SEQ ID NO: 81997 - DNA, 466 bp, Citrus sinensis
  Intron number 2 from transcript orange1.1g016581m (locus o range1.1g016581m.g) derived from phytozome v7.0 (chr-ID sc affold00029; pos 1084573 to 1085038)
acaaggctgtgactgagtacaaggaggctaagggggtgagtgtttgttctcagttctgtctatatttacaatattttttttttcgtttgatacttgaatctacaatatgttgaaattgggttacgttcaacttgaaattggcatatgatatgctcatccatagctcagaatgtgatggaatttactatagagtcattgacatttattatagagctttgaacttatatttggctcaggaaatgcgttcagatgttgtatgatttatttgatctgtaaagggaagcaatactgtttgcaaaatagtcttaagataaattacttaaaaagggtatagtcaacatgttgtggaccctgaagatttttcattgaaatttcatcaaacatattcttaacttgcttgtaactttctatcagtcagatcaagtttgtgagatgctaatatctaccacttgtctaatgctgcagc

SEQ ID NO: 81998 - DNA, 709 bp, Citrus sinensis
  Intron number 2 from transcript orange1.1g008011m (locus o range1.1g008011m.g) derived from phytozome v7.0 (chr-ID sc affold00008; pos 780262 to 780970)
gtggaagaaaccggattccttcgcaaactttgcaggttagacttgacactgtagcgattgttgtttacttgtgatgccttgcatgccccatatccgtttcttttcttgtttgattggctatgaaatattagagcattgttatttttcttccctgttataaataaagatgatgcagaagaaaagggcatgattgttttgtcttgagattcctttttggcagcttgcttaatgcaaaggttgtgctcgatggtgaaatattttgtttgaatatgtgtgtttaggaaattattaatggaacttgggatgtttgttggtaacttagttgattaatatgaaatggttagtattttgcaaacattggcgaggaggtgagagttaaaagaaattctggagttcaagttgtgctcatgttggacaatgatatccatgaggggcacttattatagagtggaaacagtttccttatgaagatagatggtgtcttatttataacctcttaatttttttatcattgttgatattgtttttatgactatcatcgataaattagtttataatacttttttcacatattatgttacctcgtaatatttgtaccatgattggagtgcacatttattgcaatgaattggtttcgtacgacatttgcaaaggctagcatgacaatatctcattatacgaatgtaacagatactggaagcacacagtg

SEQ ID NO: 81999 - DNA, 764 bp, Citrus sinensis
  Intron number 1 from transcript orange1.1g026090m (locus o range1.1g023242m.g) derived from phytozome v7.0 (chr-ID sc affold00813; pos 49353 to 50116)
gcctcaatttcgcgattcccgccttcttttgttaggtaactcactcaatctcatgacaaatcctcttttttctttaaaaggttatcgcttttcttttcttttcattctttgttattcaaacactgaacctttttatttttataagagctaaagtgtgtatttttcacttaaatgatgctttttgtgttaatgtacttggataaggtgggatgtgtcagcgaggtttaattgtgaattttatcattattttaccaaataatttatcttattgggtttgtaaagtgaaaccaatgtcaaaagtcagcatatatggggcgtgtttgggattgaattggctactgtaaaatgtaatcactaattatcaaggattttgtttctgagaccccctcaaaaaaaaaaaaaaaaaaaatcaagtgagtggatgattcattaacggtagttgtgaagtaacaatgggtgtttactgacagaactacagctgttgtgctttcacaatttagcaggagaacaacaattacaggcatacatatagcttatgcaatatgcaactagctttttctagaactgaagatgcttttagttatatgattatttctctctcttttttttttgactcaatgatgtgatggtaagagtgtcgttgaagtttcagttcataatgtttagtttgtgagtttgctccttgggtccttcctcagccttgaattgaacacataactataacggctggtttttgaatttaacaggtttcctagagcagtttc

SEQ ID NO: 82000 - DNA, 290 bp, Citrus sinensis
  Intron number 1 from transcript orange1.1g008013m (locus o range1.1g005957m.g) derived from phytozome v7.0 (chr-ID sc affold00030; pos 137489 to 137778 reverse strand)
tttcagcctcctaaatctacaccaagctcctccaggttctcctctttgttaatctttttgtttttgtttttggttttatttttatttttcaaatttttactttgagcgtttggttcccaagaaaacacaagaagattccggaaaatgaaacacagaggggaaaaagaatggcgaagctatctaatttatgcatttgtgaaatacagagcatagtattaacaatttttctcttctaaataaatagtaatggttcaggagtggaagaattaagaagaggcacaaagcgttca

SEQ ID NO: 82001 - DNA, 365 bp, Citrus sinensis
  Intron number 1 from transcript orange1.1g030786m (locus o range1.1g030786m.g) derived from phytozome v7.0 (chr-ID sc affold00001; pos 99574 to 99938)
tggtggcactcactctgccatcagccatttttcaggtgatgattttttttttttccttcctttggcgaactgcttttgcttcgtgtgtgaattttgttgttaattcattgtttgatgcattcacatttgaagtcaaacacgaacggtatggttttattcaaatcgtctttatatgatattgattttgttaattttagtggacaccattagtttattctttctagggttttcttttcgtaaacgttgctgcttttggtctattgattagcgtcagggaggagataatgtcattattcgtaactgatatgaactcggtgaaaaacataaaagtttgtacaggaagaggaattgagtaaactaaacta

SEQ ID NO: 82002 - DNA, 597 bp, Citrus sinensis
  Intron number 4 from transcript orange1.1g030786m (locus o range1.1g030786m.g) derived from phytozome v7.0 (chr-ID sc affold00001; pos 100654 to 101250)
cttatctatcttccaacttgtgcggcctattccaggtgagagtttaatctttatcttataggtaataaatgtggtgaaacaaaaggaacataacgctttacaacctaatcattttgtgccccttttggatgttccaagtcattttttgggaatttacaggaatgtgcaaaatccacgtctcaagactgacccttgacaaaatgctactgttttcttggatatatatatatatataacattttgtattggattttatttttctcaaaacatttgactattaaagtttcagcattaatattgtctttagggggcaacaagttttactgtgcatcctatttatttttccaacatctttgagaactgagtaacatttcctttcaggcttgtctgacgaaacttatgccattgacttactaagaaacaaatgacgaataatataaccaacctcatgctttgatggtggggtgaaatcaacatgctttctagaaatcgggctgctctctgttcatttttttcttgtccctccttttgctgatcttagtttgtgtaaaatttgtttcagaaattttgatccttggctgtggaaggtacattgaa

SEQ ID NO: 82003 - DNA, 488 bp, Citrus sinensis
  Intron number 3 from transcript orange1.1g015231m (locus o range1.1g008206m.g) derived from phytozome v7.0 (chr-ID sc affold03478; pos 5346 to 5833)
gcgttacaccggatagagctaagtgagatctcaaggtgatcaaatatcaaaacctccccttgtttgttgaaatttatcatttgtcctgtactgttttaaaacctatcaacaatctctctattgttaaagggtcttttacagttcgattttaattgtatctttttctattttaccgataaaatcaaaattatgatttaaaatacttttgtttgttaaattgttagtagctaactccacagagatcggcaattttattatttttttcccctccatgaaaccttgatggatatgagcgtttagaacatgaggcagtagactattaatttactagaacaacaatggggttttgatcatatttctgcatcaaaactagtaatttattttataaatttgaaatcaatccattataagactgagaagatcgattttacattggaaaataaatttttgcaggtggtggaaagatattgattttgcaacaaagctac

SEQ ID NO: 82004 - DNA, 476 bp, Citrus sinensis
  Intron number 3 from transcript orange1.1g043015m (locus o range1.1g043015m.g) derived from phytozome v7.0 (chr-ID sc affold00001; pos 4328031 to 4328506 reverse strand)
cgtattctaaagggtgagttttgatttggaaaatggaaatattactgatagttcatattcaatagtgaacaatatttatttttttgatgtgtttgatccgtctgagctggtacttgttgccatataatccgcttttagtttgatttatttcccatgttcggtaccggtgacaaattttatctggcatatgggtacacgtttgttctctaaatggatactttcgtgacatcattgtcaagatgcatataaattttgattgggggaaattaactttatatgctctatttcgtcggcatttggtcatcaagatcatatccaaattcttatccttccttattttggttgtgtgaattttaattgccattctatgcttttggtgttgttctatggaaatgaaaaattaatttggcaactttgccaatggtttggcttttcttgaaatggatttctttttcataatgcagtgaaaacactag

SEQ ID NO: 82005 - DNA, 193 bp, Citrus sinensis
  Intron number 1 from transcript orange1.1g026292m (locus o range1.1g023837m.g) derived from phytozome v7.0 (chr-ID sc affold00788; pos 31017 to 31209)
gattcaccaaactctcttctcattcattcaaatctgtataactcttaatctaactctcaactcaaatcactctattttcttcaaaaatgtttttttttttttaatgaaaagaatattgcatagactacaattatttatttgttggtttgtttgtacaggttactctgcacgattggtggctggttagggcaga

SEQ ID NO: 82006 - DNA, 896 bp, Citrus sinensis
  Intron number 2 from transcript orange1.1g020410m (locus o range1.1g020410m.g) derived from phytozome v7.0 (chr-ID sc affold00020; pos 828203 to 829098)
gtattggtaacccatcagttgcaggtaagtgaagaggaatttgacttgtaatttagatataaacggttagggacatatgagaaaaataatttatatgatgattattcatggtaaagtaggcattttccgtgcagctgttgggtgattgtccaaattccattaatcctatgtgtatgggaaaatttttgtggattttttttttaaatatgctgatgtaaacaattgaagaatttaacttatagtttgtcttgctttaaacaatggtggattagtgactcagttttgcatggattaggatagagtcaatagatgtcactatttggctcttgggaaatcacttgaatctgttttctgtccctttaaattttaaagtgatatttattgttttgcaaaccattagtacattttatgttttggtgatgttgtatattttctgcttttttcatttgaaagatatattagtttaagttgaacatgttgtagtgaccaagacttgatattcttttagatgtacatcacctttctaaacatctgggatgttcgctctgctcacgacttaaggtttagttatcactcagggaaatatgcagacttttgagtgtttttgttttatctgtgtgtgtctgagtaacaactttatagttttccactttagtgttctggttatatattggacactttttgtttatttccatccatgagctgttagttcattcctgtgagttgatgacaagttgtcttgaatgtttccacgcttgacactttctttctgtgtggcgtggattacctactgaaaatttgcattcgttcaagttacttctagaagttggatgttaagtttcttttgtatagcgaaacctgtagaactttgttgtttattgcatttcagggttcat

SEQ ID NO: 82007 - DNA, 395 bp, Citrus sinensis
  Intron number 1 from transcript orange1.1g025620m (locus o range1.1g025620m.g) derived from phytozome v7.0 (chr-ID sc affold00052; pos 360372 to 360766 reverse strand)
aaaaccaaatatcaaattcacaagctcccgaggtcagtttcgtcatcttcactcttaagtctgtttagatttgagctgaattgatgctaaaatattgtagcttggtttgtttgttagttaatgattacgtttttgtgatttaatacctggggtttttgtcaatttatggaattagctattcatattttagttcgattttttttaatttgctaaagtttcgctctttgatgcttataataactttgttatctggataggagtactttcttcttccagtgtttgtgaattgatcaggtttaatatgtaatttttgtatctgggtttataattaattcctgtttgaatttttctttgtttcagcataagctgagtagaagtaaccgggacaaactcca

SEQ ID NO: 82008 - DNA, 690 bp, Citrus sinensis
  Intron number 1 from transcript orange1.1g027799m (locus o range1.1g027319m.g) derived from phytozome v7.0 (chr-ID sc affold00001; pos 5919985 to 5920674)
ccgccccacctgcacttgacaaagatctcaaaaaggttacgttggcgcatactataatgaagacagttatatatgaatatatgatcctaatttgtgctagtatttttatatatttttttttgtcaacatggtttcatggatgttctttcaagttattgtgattctgaagctgagtaaaaatgaagttcgtttattagtaacaggattcggtttcagttggtcgcatgcatgttattctttctccttgttgagggaatgtcggagatttacattatttggtcatgtgaatttgagaagtatttatactgaactgacgttgatagtcaatcccttgagatgttttatatatacaccaagtgtttcctggcaattgcatagtttttgggagaaaggtcatgcttacactgaattacggctttgtaaatctactagtgcagttttaatcttatctgatttgtctttaacgaggcatttgaaatttgcctatcatccaaattactctggctgaagggctaatttggatgatagtgcaagggagttcatccaatatattttgattgtagaattttggaatttgataggtgactcaggacattgagagttttttcataactattttctcttaattctatattccatgtccttgctgaaacaggttgttcaaaagacagctgccacatttgcaccaag

SEQ ID NO: 82009 - DNA, 801 bp, Citrus sinensis
  Intron number 1 from transcript orange1.1g003074m (locus o range1.1g001879m.g) derived from phytozome v7.0 (chr-ID sc affold00015; pos 1610458 to 1611258)
gtcgccgaaaaccaaagatcgcgttactgaagaaggtccgatttcttttctttttttttaattttatttgtttctaaaaatcttaaatcttattatgaacaagttttttttttttttaatgtgattatagggagtgatgatcatattattgctatgtcagcattgagaaaggattgggacccactattgggtgaaatatatcgaaaagaaaaaaaaaggaaaaagttatgctttattttggtgataatagctctgtcttgctcctcaaaattgattgagattcatctaattaagctagcttttcttttctttctttttttctttttttgttatgttgagaagctaagtgcgtccggatccttttttgatactgatatggcaacgtgtgattggtcatttagaaaatagaaatgtagcttttttctatcagtagcattgtgacgccaatgctacatgatggaggagtcggtttagctccatgaagtaaacaaaaaggattaggatcctcctgagcttataaaaatatcaaataataatttataagcttgaattttgcttagtagaagcttgcatttatgattttagcacattcgaagtcaattgcagacttaaaatctgcaaggtgatatcataatgatgaaagtcttgttctctgtatcttctgaatgaggtgacatttttgttttaaaattaccgtggtcaatttgtttgatacttatcctgttgtttgggtggtactttgattttagacacttcaagttctcagaattcatctggtccagatactgcctctgttgcctc

SEQ ID NO: 82010 - DNA, 943 bp, Citrus sinensis
  Intron number 1 from transcript orange1.1g032403m (locus o range1.1g032039m.g) derived from phytozome v7.0 (chr-ID sc affold00530; pos 8750 to 9692 reverse strand)
cccagctccgttacagcttccagcgcaattatcaggtctccttttagatacccaattcatgtttttaggagatttttttttgccgggttttagaatgattaaaatttggtgacgtgagagtatttgaagtcaatgattgaaaatttatgcttattttgataagaatgtagctctagttttaatcgttatgtgttttatagtgactggttcaaattttgttgttatattttgataatttacgataccaatttcaatttccaatgctttagtgaatacggtttgtttgataactgtatgtttatttatctaattagcaatgatgaacccaccagcatagaggctaacaatgggtgattagtgtttgcttgtgcacagactaaagttgatttgttattcaagcacgagtcatgtagtatagggtgaaaaagaactttgtatttattgtatataatgaacatttttatgtggttcttgactgtatgtttgcttttactgcagtttgaagcatcttattgtgacatatatatggaaattttgactactcacttgttagatttgtggttctataatctttgacaaatatcttaagacatcttctaaatatcttaagacacctgaattctagctttgttttcggtgagttgaagttacaatgattgtgatgcaaatctaggttgcgcttgatgaggaaaggcatttattttatgcacttctgcactattgttaactggtagtcaagcaccgtgctctgttctccatgtaattgacactttaaggctatttgattgctctgtgcttaaatgttgtttttttaaggtcttgatatattctgtttcattgtacttctatttaagaaatttacgtgtacttcattgagctggagtttcattctttcatttttggtacagtttcttcaacgagtattcagcatagacactgttgt

SEQ ID NO: 82011 - DNA, 525 bp, Citrus sinensis
  Intron number 1 from transcript orange1.1g000671m (locus o range1.1g000481m.g) derived from phytozome v7.0 (chr-ID sc affold00032; pos 1030644 to 1031168)
gctttcttgggaaccttacttggtatacatcttctcatttcttgatcttcattgttcatttcatatatatatatatatatatatatatcccccttctttgaatctttgtgtgaatatttatggttctatggttggttcttgagtatgattgtacaggaatcttaacagttatgaacaaaaagggagtgtagagtttgttgaacacacagttcattctttgctgcttcattaattgtctgagttgttttcttccatactgacgaaactttgtaatcttctcttaacattaagtttcttgaatgttttaatgtagtatgaacagagaatatatattaagcagcatcgctgagtaatcttccttttgacgttgtctttttgttatcttatattttcgaccaatacgtgtaaatatgttctttgtttcttggctaatttaacttccctatggaggtttctgatcccagttcgctctgtttcaatgaatatgcagggggactttcttggacctgtgagggtgaatttgat

SEQ ID NO: 82012 - DNA, 483 bp, Citrus sinensis
  Intron number 1 from transcript orange1.1g041437m (locus o range1.1g041437m.g) derived from phytozome v7.0 (chr-ID sc affold01803; pos 7118 to 7600 reverse strand)
gcctggctgtatcatctgctggagatattttcgtgagaattaatgttcacatcgtgtcacatattcaatcactagctatatatgaccttctgaccatccaatatgattacgtaaaaacgaagaatcatgcaagaatgaaaataaaaataatttataaatcaaaatgattaatatgtgttgtttccaaactaggcaatcaatgtaaattggatagattgtcaatcaacatactcagtctcttacaaatatatcaatcattagggttaatttaagctaattatttatcctgtttttcatgttgaatcactctagcattaagcccttttggctttttgtattgatctataatttaataattacaatattcttgacaacttattacttatacagttccaaccaaggatgctcaatatgtataatgagtgatagggaagctcaatgtaattgaaaaatgatttattgttctcgtggaatgaaacacag

SEQ ID NO: 82013 - DNA, 863 bp, Citrus sinensis
  Intron number 4 from transcript orange1.1g022295m (locus o range1.1g022295m.g) derived from phytozome v7.0 (chr-ID sc affold00001; pos 5313407 to 5314269 reverse strand)
acattgttattgctgcagccggacaagcagtaactatgggcatactatagttcccgcattcctaattagaatgagattatacaaatatttttttgctgatacctttaatacctgtttgtctcatcttaaatcatctagcagttccatatatcttggcttaatttgcttactgaggtgcttcgaactgaattactgtgacaatgtaaaagaaacttcttgttggttgatggctctgtgttcttgaatatacatatgatataaactcgttcagatactctgaacattgtgaggcatcacctgtgaacctgagttgagtatctcatacaagcttattatggatctgttgacatgatgcaaattaatcaagtcaaatttcagcattctgggaaatagttgagattctactttcgcttctttgaggacttcaatttcatagatggtcaaaatcctcagccactgaatctcctatcaatcgacctctttgcatctacaccttctctaaatcttactttttctattttatttttgttttctcttaaatggtgattagctgaaggtggattcttttgtatagcttttgtgtatttagtttctgacctcatgtttcttcataaactcgtatcgtagaacagatggattaacgggtcatatgtatattcagtaactaatttaataaaattgcttaaaccttacgaaaacatatctgccaaccaaatgacattaaattttttccctctcgtacagctctttgttgattgaaagtatgttgatatgtttggtggaacgtgctaggttttgtgtttttaaacttgtttccttaacttgcagatcaagggaagttggatcaagcctggtgccgctgt

SEQ ID NO: 82014 - DNA, 930 bp, Citrus sinensis
  Intron number 5 from transcript orange1.1g031451m (locus o range1.1g027286m.g) derived from phytozome v7.0 (chr-ID sc affold00015; pos 1832193 to 1833122)
ctcgagagagagatcgaagaattcttctacgtgctgtaagctcctacactgctattcttgatctaaatatatgtgtttctttttgccaagtgaagaaaaatttcaaatgctttttcattttgtttgcaattgatctttaccaactgcttttttaaggaggcaacttgtctgaatgacacaagtcaagccacattcatacttcaatcaaaaatataaatgggccctttctcagcgatggaatatcaaaatcatgtccaaaaaagtaaattaaccatattgttgatgctaagttaaattgttgagttttactgcatttgagatttgaactactagtaaaatcaaggttaagaagggatattttggggtgttcaacttctattctcagtacttgaatttatataattgtctttctgacaatcatctgaaacaatgcaatagtaagacaagacagttttgagaatatctttctgaagttttatgttagatggactatgaagattggggcattatcttccatttcaactgctttctgtagttttgatttgcatggttgactatgaactattgattagacaccagtgtcttatcccgtcttcccttgatattagaggggtggtggcagtggagagggcatcttgtttgactgtctgactgagacatataacttgctacctcttacctagtaggccaaaatcacagtttgaatagattaagtttccgtaggcaagtcctgaaaaaattggttgaaacttcagaagttggattactatagcttcatgaaggtgtttgaatcatcatattaaccagtctgtgatcttgaacctttttaattctaggaataaattgccttttgtgctcatattgagttgtggcttttttttttttctaaagtttaatttgcttagcattgaatgctatttattctaatag

SEQ ID NO: 82015 - DNA, 651 bp, Citrus sinensis
  Intron number 1 from transcript orange1.1g027729m (locus o range1.1g027729m.g) derived from phytozome v7.0 (chr-ID sc affold00188; pos 127403 to 128053 reverse strand)
atcttgggctcttcttccttgagtttcccttggaagtaaagtgaattttactttgatatacttcttgatttttggtatcttttgctggtgaaaaagtttatattgcttaaaataagtttaaagttagtgctagctactaggcttaaggttgaattaagaagtaaatataacttaatgtatttcgagtgatggtaacacaagatatgaaacttcttagtaaagcacttcttagattaagcacttattagctaagtgacaataaccatgaggccagtgggcttatgcttctagctatgttaaagcaaagattgagagaaaacacaataacatgtgttgtaacttcattgtgctctcataaaaattataatctacaattaaaaaatataacaagtcaccgactctgacttaaaaatgacaatttgataacactcggaaggcaagaacggtaagtcttcaacaattctgccttgaccctttttttttttctgatattgagtaatcactgatgatctctgattttaaaagtgcgatatcctttgtttatagcttcattgtacttttttcattgtttcaacccatggcagtaaaaaatttatgttgtgatgatattggtttatgttcttttaaatccttttaacaggcaagagtatc

SEQ ID NO: 82016 - DNA, 574 bp, Citrus sinensis
  Intron number 2 from transcript orange1.1g037047m (locus o range1.1g037047m.g) derived from phytozome v7.0 (chr-ID sc affold00744; pos 39507 to 40080 reverse strand)
ctttcaaagttgttacagctgaagggaaacataaggtgtgcatttcattgatctcgtgattttggctttcactctcattccatgtgacctttaaatattcttttaatttgattttcccctgttctgcagtaagtaatttttgtccatttcctagatatttggcagattagaactctggaatgcactgcactcttctctgtatattttttgtgatgatgattcatgattattaaaatataccacttgtttaagaaaaaagagttcagcagttgcacgcatttatggctgtgcatctcattttgttggctcgagaaatgctctatctgcttcagtttgtttatttatgcatgtctttgttagatggtctatatctttcaaacaaaattttcaagaaatgttccagagtttcctgcaaattttactggtaatacattttattggtccaaattctggatatagtttagtttctttgtatgtgttttctttttgactgctcccaagctcctcgttactttgctttcctcaaaatgtgcataacatatgctagccattcaggaaatactaaaggaagaag

SEQ ID NO: 82017 - DNA, 738 bp, Citrus sinensis
  Intron number 1 from transcript orange1.1g020633m (locus o range1.1g020633m.g) derived from phytozome v7.0 (chr-ID sc affold05760; pos 1451 to 2188)
gcacggccgatcggacggcatacgttgctatctaggtacgtgtatctgatgattacttggtcgtgtcaagtttacggatgaaatgtgagtaacaactaacaaatgataatccacgttaattcatcgtgttaatggagacttcgatgaatttgaagtgcatattttgatattacggtcgatcaatggaaaagaaacacagtatcgttgttgaattaattatgaatttttttggttgatgaagaagaaagataggaagaaatttaactttattggcatctttggacaatcgaaaatctatttgggtttgggtttgtaatggatagcgtaaaatgtaattttagagcggtaaatatttatataaattgatgtgatataataataattgattaagagaaaatataaataatttatataaaagatgtggatcatataaagtttttagttcaaccaattataaaatatcacattaatttatgcaaattaaattttgtggttatatcattatttaaaataaaatgtttgtattcttgtatttcaatttacatcaaaataaaatatagattagattctatctaagcatgcatcggagcgaaggaaatttttagaataagttttttagtgttgtttttttttttgggggtaataataaaggggatttaaatatgaaaaaggaaaaaagaaatactcatcaaacaagtcccttaagctttacgccgtatgatggaaatcgtaggtgac

SEQ ID NO: 82018 - DNA, 477 bp, Citrus sinensis
  Intron number 3 from transcript orange1.1g007615m (locus o range1.1g007615m.g) derived from phytozome v7.0 (chr-ID sc affold00274; pos 195463 to 195939)
cactatcgttgatcgtcccgacatctacacttaaggtaattctctttagctatttgtgtcttttgtttttctgtaagctgttgatttaaatattttttaatagaatttaactgaaatgaagtaaattatgttagagatcaaagcttgaagtgctatgaagagaggcacttaattgtcattttacttgaaagaagcttttagatgattaaaatgctcttgaagttcttgtttttgctaaaattcactcagaatggcccttattgtgagcttgtatgattattgtagtactttcaatttaatttttaagaacaaggattgtgattgcatatgagatttcgtcttgaaggagtgaaaagaaagaaattcccgtgattttatgcacaaacaaactgttataattaaagtgtttttcatactagattgaattgcaaattttgtagttctaacaaagaagtgctgttaattgctaataggaat

SEQ ID NO: 82019 - DNA, 691 bp, Citrus sinensis
  Intron number 1 from transcript orange1.1g001410m (locus o range1.1g001406m.g) derived from phytozome v7.0 (chr-ID sc affold00336; pos 89284 to 89974)
ggatcgagggtcgtacgctctggctcctcgactaggtcagctttctctttacataatttcgatttgattgagagtagaatcaatcggttatttttggttcgctataaaaatgaaatcatttatatgttaaaatattttattatttttttaggaaattactgaataattaattataggcgtagatagatcagagaattattgctatagttaagatggagcaggaaattactgtatgtatctttgagttattgacttagaatttaggtttatcagttcccaaatctgtccctattagcggattcagcagttagcattgattcaattgtcaatcagaagaataaacatgaatggaacctaatagaccttagttatctgatgatttttcaaaaatggaatgtaagttttttatctttttttaattggtaaactagcagttgaaatgttcccatgtgcattcagattttgttgattttattaagatattatgaaaagaaagacaatgactcatgaaatctctctctgtcacatcacgcgtgttggtacagaattatgtacatgattcctctaattcggacatagttgatcttgtgagaatggtatccagtttcttcatgcgtaattattaatcttgattgtgggctacggccatatcttttatgtggactgacatatttatgtttggtgtgtagat

SEQ ID NO: 82020 - DNA, 601 bp, Citrus sinensis
  Intron number 1 from transcript orange1.1g039558m (locus o range1.1g039558m.g) derived from phytozome v7.0 (chr-ID sc affold00217; pos 99488 to 100088)
ttcacaggctctggcttttacggatccactaggtaatatcgtaataggccatttctatatggagtatttcctatgaaaatttgcgtattttattggtgattattattggtaaaaacgttcttttacatctgtttgagtcctgagaaaatgcaagaaaagtaaagaaactaaaatgtgattgttcaggctttgattactcacattttttttattggaaaaagaatggtatggtcaagatccggaattgtttaatcaattttcttatcggccaaacagaagcaaggaatttttttttttttgttccacaagttttgggcagaaaatttggcgggaaaataagataaccgactaaggcaatcattcagtgtgtacgcgcttacagtgaaccatttaaaagatttttagtaggtcttcagaaagcaagtgacatattgtactctaaaataacgttattgaaatatgtgattcttgaagtagatactctcaaatcttatgtttggctttctttaatcatgagtttagctaagttaataatttgatttacaccaagaatctgtaacctgaacactatttctttaatcctgtgcagtcacagctcttc

SEQ ID NO: 82021 - DNA, 1068 bp, Citrus sinensis
  Intron number 1 from transcript orange1.1g031478m (locus o range1.1g031437m.g) derived from phytozome v7.0 (chr-ID sc affold00217; pos 110671 to 111738)
ttttgttgctggggcaaccgttctgggctacaaaggtgataattctttctttaggtggtcagctttttctttttgctttgattcttactgtcaagaatttaatgaattagatacgaaaagagtagttaacctagtgtccttctggacttgcatggtttacattaatttcctcattttggtgttttggtttgatgattagctgttgtctagagagatgtacataacaaacattaaatgctttcttccagttgactagctgttcttgttacatcaatttcgttgcagtttcttgtatctttatttgtattttttttttcagtttttgtatttttcttgtgaggaacataaaatataaagtcacaactagctgttcttgttgaaatgccaatgcttgaggccaagatctggtatgcagagtctaaactaagataaaaaattgcctctgttgattaagaggtgctggttagatttagatttcaatttttcttcctggaatgatgtttaatgtcactagataacaacctttttaggtacttgttccaaaatcgtgattaatttatcacggagttggctattatcacttatctcaaacttttgctgtaatccattggtttgggaccttatcctcgtgtctttctcttagtttctgcccatattttgaatcttcaacatgtcaaaatgattcctttaattttcacatccactcaaaagcttcaaatgttgatgaactaaaggcagaatttttcaggcatattaccttgaagatgcggatctaattgcttggatgctgattagtgaacattgttccaactaggaggtgttcctacttagcttcttaacctgttttgatattactttcatggaaaggttgttttatagagttataggtcataaagattgttcatgatttttaccattccccagcacttgattgaacagcgatttcaatcactagtgcatattagctgtcaatattgtccactttttcatcaatatacatagtataatggttgatgttctctccatgttgcaggaaagagcatttcatcagcaatttctgctggtgcc

SEQ ID NO: 82022 - DNA, 562 bp, Citrus sinensis
  Intron number 1 from transcript orange1.1g014482m (locus o range1.1g014482m.g) derived from phytozome v7.0 (chr-ID sc affold00001; pos 1524389 to 1524950 reverse strand)
ccaccgaaatcggaccaagaggcaaatcaatttgggtattcattttcttctctctctctctctcagctgagtttgaaggctaattttattcattgggtatttgatgattcgtttactggattaaaatgttaatgtcttgaactctaagtggatgataaaggttaaaattaacaatttgttattggtttttctgaaatggatttaggaaagtaagatccaatttccttgctttttgatgtggaggcttatgataagtgttgatagaagtgctttgaaacaactttgatgctgtagaaagtacttaatagttctctcagataagtttcttatttggctgttgcttatgaactgcatatgcttcatctttataagagctagtgggactttttgcagttatttatccttgccaagtggtcaaaattgtatctttttgcccagactttaagaattgggtagacttctcattttagagttggttataatggacagaacatgcagattctctctttttcagttattatatccacggtcttagttgtgctttgttgttgtgtagggagag

SEQ ID NO: 82023 - DNA, 612 bp, Citrus sinensis
  Intron number 1 from transcript orange1.1g003413m (locus o range1.1g003413m.g) derived from phytozome v7.0 (chr-ID sc affold00030; pos 159187 to 159798)
aggtttattccagaacgtgagtctgtgaaaaccttgagctttgattgattctatatacttgatttaatgctatgaaactggaacagttctctgtttgaatatttttattattagatcgtttccgggaaatttaaccttacatgtgtttgtttgaatttttatgtgttaatgctattcccgctgtgtgtttcaaatatgtattgagtttccatttttgtacttgttaaatgctttgtaaagtatttacccattgtgtaagctaagataatatggaaaagaaaacattttaaactttattctatattttgaacttgccacataaaacatgctgctaatgttgtgtgaaatttgttactgcttatgtgatgagtttcttttttttcttttgttcattatctatatatttgttaccaattggaggataacaagagggaaataaaggcctgatgtcacctgaaagaggctactaatactgcctaaaactttaatttaactagtacattcaagtattattaccacttgaagtttgactttgggagattatttaacagaacagaatttctttctgacttttcagaaccgcagacctggtggaagcagttctgcagggaa

SEQ ID NO: 82024 - DNA, 487 bp, Citrus sinensis
  Intron number 3 from transcript orange1.1g019123m (locus o range1.1g019123m.g) derived from phytozome v7.0 (chr-ID sc affold00075; pos 338965 to 339451)
gctttcatccgctccactctttgtcgacatttcaggttcattttcatttgcctcttatttatttacttgttaaaatcaaaatctacgattttttcccccatattgttctggctactgttagctttaactgttgatacttttagtattcaaaataaatatggatcaccgcccagagtgtcgatattttagcttcttttaatggagttaattgccttgctattagaaaaattccttagattgttcagaagtagctttctatggcaaaattacgttttggcagaggcaagtttggtgcacggttacttgtttctgtcttaagggcctatgatgatttggatataccttctttctttgcatttattatatttttcttgtgttatcttttattataagaaatgaaatttctctctcgtccttattcttttgattctgattggttttccttgtttcaggaaagatccttactccgctaggccatttgaaggac

SEQ ID NO: 82025 - DNA, 733 bp, Citrus sinensis
  Intron number 1 from transcript orange1.1g012490m (locus o range1.1g012338m.g) derived from phytozome v7.0 (chr-ID sc affold00001; pos 5052679 to 5053411)
tctcaggtttggcatgtgagattttgaatttgttgtttgtggctgtgctagaaattctgctatagcgatgctttataattagcatgtcttgagatttgttgaattaatgcttttctcatctcgagaccaagagaaatgaaggattaaaggagaggatgggcaattttaaacagaaaacagaaaattttatgcagctagtttagtatgaattaaaacatggcagttcataataggagtgtttttccctcaagacctataggagaacacctgtacaatgaagaagtaattcctggtagtattgtggatcttttgattctttttcttctcttcttgggtaaatacgcatgctttgccccaatactacttgggcaaaagtgaaaatggtatcgttgagccagattattgcattaagagtgtgaactagccagaaaaaggaccattttccattgtaattgttaatgtgatttattaatgcttttgcaccgttatttattttgtgttctacgttcagattttgttgaaagttgctttgctttttatgttgcagttgaccaattattatgcaagacatacttggtcttgatgttagaacatttgactgtttttatcagtttcagtggtacccaataatcattcatttgaaatagactccatggaattttttactccaagctgtgctgtaactatgtcatctttgttcatcatatagggtggaaagccagctgccaattct

SEQ ID NO: 82026 - DNA, 884 bp, Citrus sinensis
  Intron number 1 from transcript orange1.1g043888m (locus o range1.1g043888m.g) derived from phytozome v7.0 (chr-ID sc affold00021; pos 515764 to 516647 reverse strand)
gccccataaagcttgaggtaacctatcatcactctctctataaattctctgtgcatatgccttcatgtacttttaaagatttgagcaagccagacgccgctatctagctattatattttaatgctgttgtgtgtattgtaaccgaacaaaactgtctctccgatctcgaatatgcattttaaaacgagcagatcatttcgatcctggagaatgacccttcatgtgtccaaagattttttgattattattattattattattaatgtttgtttgatggaaaagtatgagggtacgtgaaaatttagggtttatgcgtagcgttaggtcttcattcattagatttatatatggcctggaggctaataaaaaaagaattaatattgttttaatatgatgttcatatattgacttggcctgaaataagttttcctttctgttcttggactggaattgagctttgtttattcgttgttaagggagttgactggaattttctgattttgttagctgcaactttggatgaattctagtcatactattactagatcgaacaggatggtgaaaaaaaatatatattagtacataaataattgcttacttgaaggcaactgaacgttcatttgtgtttgaggttattatttcggagtgccttcatcgaattctcctctcctaatatttgtagataactctcgacaaaattcagggaactcgaaactattaatttttattttttattttccttggagttagggctttgtttctcaatttctactatctgtaatttttttttaattatttaataaaatatctaccttgatggctctttgacatcaaggacattgctcatgacatatttattatatgtatgtcaatccaggtacaca

SEQ ID NO: 82027 - DNA, 481 bp, Citrus sinensis
  Intron number 1 from transcript orange1.1g030793m (locus o range1.1g027879m.g) derived from phytozome v7.0 (chr-ID sc affold00015; pos 246823 to 247303)
catctctgtcacaagatccctgcttgttcatccaggtatgttctttttaacttgcaaattttaataagcctttcaatttttttttataaaatttttgggttagtttctattttgcattggaattgaaagggttaaatttaaaacatgaagcatgtataatcatcaagttgtttggctttagtttatgagaatccttcaactgatatgtgctgtagaaagataggtgattgatgaagattcttgtaaagattaattaaccacatgtttctgttcaatttttatgaattagttttttcagttattcgtgaatggtgtaaaatcactctccaattttctatttttgtgttgtttggtgaataagaattttttgggtattgatactttggggatatataatttggggaaaacgattttatatcgtttgattttgtgcttgatgttactactgacattttagaaaggtaacagatacataagaatc

SEQ ID NO: 82028 - DNA, 435 bp, Citrus sinensis
  Intron number 1 from transcript orange1.1g030041m (locus o range1.1g030041m.g) derived from phytozome v7.0 (chr-ID sc affold00012; pos 313739 to 314173 reverse strand)
gcttggctgttgcagctgaacagaggagaagcactgtgagttttcttttccataaatgcatcatcatcatcatcacatcatctaagctcatatgctttctgggtttgttcggttatgtgattcttgtttgttggtttcttctgttgtttcttttgaaatttgagtctaccactctattggtataacagagataaatttgtcagatctactgatacaaatgatatgctttagctaaattgcaatcaaaatgtcagatcttttactgttaatcacacactgatacacacacaccacaacaaattcagaaacagttttatatcttgccatcaaggagtattttttgtgtgaacaattgattcaattagttttataactaatgaagcaattaattcttgaacaggccacaattcaaactgattctgaaaagaactacaa

SEQ ID NO: 82029 - DNA, 599 bp, Citrus sinensis
  Intron number 1 from transcript orange1.1g017934m (locus o range1.1g017934m.g) derived from phytozome v7.0 (chr-ID sc affold00098; pos 81592 to 82190 reverse strand)
caggtaatttcttcttaaagtcgttttcattgcaaatttgcaatagcatgatatatacatgtttgtttgtttatttatttatttttaaacttcagtcgtccgtattttacaaaacgcaggctcgtacaaagttgttagtaattaacttttggagtctgaactctgatgcatgcaagcaaattggaaattttatacaggaagaaaggaaaagtagacactgaagaagtggtcctgcaacttttctttcgcactaaagattaacttaataactttatgcttagtcgtttaagtaataattccacctttatcctatgttataatcagatgttgtactttttgcctagtcattttaagcttgtttaggctaattcaaacaggtatcctacaaaaagtttgaacatcaagaaagtgagtattagattccatgtatcttttgtgcaatttaattgactatataaatatttgttagttaaagatttcgaaaaacaacaaagtctgttttattaaaaaaaatgttcagccacgtgacttttaattgatagaagattaatttttgacacgaatttggaaattcgtatgcagggaattagtatcggaat

SEQ ID NO: 82030 - DNA, 650 bp, Citrus sinensis
  Intron number 5 from transcript orange1.1g009102m (locus o range1.1g008834m.g) derived from phytozome v7.0 (chr-ID sc affold00122; pos 129862 to 130511)
agttaaaccaattatttaatagaacgaggtaagttgtatgacatttttgtctaatcattaaataccaaattttcttgtcgattattaaatctctgatgttaatgtaccaaggtgttttacatggtcaagtaatctcaatggagtcaaatatatctagtttgttctaacataacacgtgaaagagaactcctactaacttacagtgtagtttattttcttaatctaaaatcgcaaccgatctaataaattccttcaatttcttatattttgacagttttctccctcaagtgttttgacttcattgaagctaacttctcatctcttcttattcaagcacttctttcaagtgatctagtggtgctgggttggagtttgaatgcccgctgttgtccgaatttcttattatatgggacatatgattttgtttcaaatctttcctaaaactattttgattttgtttcaaatctttcctaaaactattatcatgtcgattgtatttttcttctctttttcttttccccccaaacattttatcctaattttgtttctgagtgttatttttcaattttgtacctatggtacatttgtcatgatgtcagcttaatcttacatttgcagggctatagtaagttttggcttgaacgcactcc

SEQ ID NO: 82031 - DNA, 439 bp, Citrus sinensis
  Intron number 3 from transcript orange1.1g010098m (locus o range1.1g008544m.g) derived from phytozome v7.0 (chr-ID sc affold00001; pos 1737245 to 1737683 reverse strand)
taaatagctggcttgctcgtgtccattgtcacaaggtaattaatgctttctgaactattgtttgatttaatttgtactaacagtacattttgtatctttggctggtttagtgtttaatgttttctttatctgtcacctggtacagtattttgtattcctacttatataagaatgtctgttcatgctggtatacataatcacaggtagagtcataggacttcacatggcagtattatcaaggatagaccaatgcattttccaaaattttttagctattatacattgttaaatcctgtctaaacatacattgatgtttagcttagcttaaaaactgaatttgctgatcctcatctgttgggtcgttgaagaattgattctcaccaaatagcattatgtaagtgcaggtaattaggctatctgctgccacacaggaatatcc

SEQ ID NO: 82032 - DNA, 571 bp, Citrus sinensis
  Intron number 2 from transcript orange1.1g009528m (locus o range1.1g007978m.g) derived from phytozome v7.0 (chr-ID sc affold00506; pos 72705 to 73275 reverse strand)
aggtgataatctgaacatgtttcatgtataaatttgcatataaattaactaataatgataatagctagctgcatgcagacaagtctatgcatgacagtcttcagttggatgtttttagcttttccttgtgaattgtgcatgttataaagttcatccatgtcacaaatcttttgattttttttgaggcatttactttgggaaccatggttgaattctactcttttgatgcatccacttattggaaataagaaggctagacctgataattttgatgctcattggtgtcagttctgctattatgtattgatctgtggtacatatgctgaagaaaataatgacgtatcattatatcatgtttttgtatccatttggtctctacagaatgacatttaattttgctttcgtatggccaaaaggagtttacaatttctgtttttatagatttggaattttctttcattttttttcttgggccatcagagttcatctctagaactgttgatcacattaatggtagtgatgcaattaattttcaggacgcaaaggagcaccttgctgcagttgctgacaa

SEQ ID NO: 82033 - DNA, 769 bp, Citrus sinensis
  Intron number 1 from transcript orange1.1g009528m (locus o range1.1g007978m.g) derived from phytozome v7.0 (chr-ID sc affold00506; pos 73381 to 74149 reverse strand)
aaggttggttgcttcatagtctagtgagttcttgatttaatgttatatttactttcatttcggggaaaaaaaaagtgtattatgttgtactgtacttgaatagtcttctatgaactattaatatacacatgaatttgtagttgcataatgaaaatagaggcggaaagactaggtttgagagtataaattaaatttgtaatgcatactgtatgaaccatcaaaatgttgtattgattactcctttaatatgcaaaatatcgtcatttgaaatatctaaatggctcctaagtgaaattatctcgttagtactgcattttagaactttcattttatgaattcatttccgtttttgctgggagtgagtgctcagagtttttgttccttttttttgttttgaaaaaagattttatggtaagaagtgctcagagtctatcaatggacatgtccaggatgcttcatcagaaagtagctcacttgtttttggtttcacttcaccaatttattgctgattagttacaaatagtctctagtacgaatgacaacataaaggttggtctccagtctaatgaatgctgtaattattatgtaacatgtgacagactgtttcttttagaaatggttttacatggaaccttttcacgattggttgagcatttgcttgttgtctatatgtactgcatttttattttcttttgacaccttaaaatgtgtttgtacacggcatgaaaatttttattctcaaatcttgtttggttgattgattttccag

SEQ ID NO: 82034 - DNA, 756 bp, Citrus sinensis
  Intron number 2 from transcript orange1.1g012214m (locus o range1.1g012214m.g) derived from phytozome v7.0 (chr-ID sc affold00399; pos 40076 to 40831 reverse strand)
gccgactcatattgataggtaaaccaaatgaatcttggcaattaccttagaaactctatgtggtaaggcaaaaaaggttcatgctgaagaaataagtaaaagtagaagagtaaaataaaagctttgagaggcaagaaatgaaattaattcatctaattcaaatgtcatatatgcattttaagtattcacttctatatttaaaaaaaatacatgtagataaaggtcatgatgccacacatgtatgttgagcaatgctacacttgcatagttgggatgcataaaatgtaccaccagcgatgtggcattgatatgtcattcgtttattagaggtataattattcacttaataatatctaatttaagccagcaccacactacacttggcaagtaatgattgctagtacatcatttaagatacaaagtgtgataaaagagcggtctaagaatacttacaaagttgggaaacaaagtttgaatccctattcatgttacatcaatacaaattcaccatttggatgaaaagtgatatgctcaataactaattatcacatgaccttacgagataatgcagtattctttgccacgtcagtttagatacggactttgaattcaatagtattacatttacaaagttcgaattcaaagttttacaaagttcgaattcaaatttttacataatgatatgcaatcgttatataatatatcccttctgtatttgtagctacaatcatcacatcgcttgtatttcttcggatc

SEQ ID NO: 82035 - DNA, 876 bp, Citrus sinensis
  Intron number 1 from transcript orange1.1g020732m (locus o range1.1g019658m.g) derived from phytozome v7.0 (chr-ID sc affold00001; pos 5520395 to 5521270 reverse strand)
taaaagcatactctctgttgctgctttctcctcaggtcagatcttttctctctttacagtttccatcacttcgtgagtaacgtataattagtaatcacaagtaactagttctagtaatcgacattttaatctcaaatctttttagtttctgtgcattgatgtacgaaatatccgaaagagggaattttcatatgctaggtgaatacccctttgggaaactgataggcttatgtatctgtagcttgctatttgcttagatatgtataatggagcccaattgaactttatgtaatttgcttagatgggttgggatttcttttactctctcataagctaattaactcttagccgcttctttccttgatggttgattgttaaaactttgagactcgtgaagattacataattgtggtatattaattttagatataaaataatccttggttgagtctgcttgtaatatcattgtgttttcaaggttaaattctataagattgtgttgtaatttgtttatagcttgtgaaattgattctgacttgtgttatatctggaattaattcttgtgtctgaaggtttgtaattggacatgctttaaataatggtcttcatctctgtgtactgaatgaaactcatcattttgtctcattatgttagcgtataaaagaaaattaatcagtgtggccactgcaaatatggtatttcacatttcatttttgatggatatataaaatctgttccaaactacctgcattttttaccatttgaatttgatgtcgcacttcttttagtaagcatgatatggcttagtgtgttgtaaattatttttggagaatgatgttctctgtaagattgtctaccttgatcttagggactcaa

SEQ ID NO: 82036 - DNA, 354 bp, Citrus sinensis
  Intron number 1 from transcript orange1.1g002288m (locus o range1.1g001820m.g) derived from phytozome v7.0 (chr-ID sc affold00001; pos 4800947 to 4801300)
tcttgatttggagtccagaaaagctgaggaagccggtacttcttttttattttattttttttgtttttaatttttgtctcgctaaacttacacatacatagatgtttctgattattttttgttttttgttttcctcaaaagacacatagagaattgtaaatcatattattatttttctgtttaatatctaaggtggtaagtcaaatttggtacacgtacatatatgtgcgcatggaaacaatgtggtacctatcttcaattttgccgtacgtgtggagtatgcagatctttgttggaacaattattgatggactttaaaaatatggatattttgtttcacagcatcaagaaggt

SEQ ID NO: 82037 - DNA, 426 bp, Citrus sinensis
  Intron number 1 from transcript orange1.1g032320m (locus o range1.1g026149m.g) derived from phytozome v7.0 (chr-ID sc affold00008; pos 1998606 to 1999031 reverse strand)
tcggcaggggtccggttcccgtcgacggcgaccaggttatctaatcaattttttaaatttttttctcaatttttattaagaaaaacaaaggcacttattactttacttcttcgtatagtagtacaataatgtttttggagcttttctatggaagccgttaataattgctgaaatgctttctagagaaggagtttttttatgtgctttcccaaaacccgattttgaaagaagctatcatttattgtctatttgaatcaatgaagatctaaacaaaaaacgatttgggttatttacacacacagccgaaacccaatattaatttttgttcatacttaatttgctgtgccttacggctttccttaactcgatatacatagacgtaattatattggcactttgaatctgaaaaggttgcaatacactact

SEQ ID NO: 82038 - DNA, 1064 bp, Citrus sinensis
  Intron number 2 from transcript orange1.1g015140m (locus o range1.1g015140m.g) derived from phytozome v7.0 (chr-ID sc affold00084; pos 62834 to 63897)
aaggtgatcagagggcacgaaattggtggagaaaggtgatgcatttgattatgttctatcttaagagagatggtagtatgtaaggttgttttattctctgtatttgcatggttgctagatttcattgaattcatgatctgcagcatttgaatactattttttcgatgttttgcttttgttactctgtgtgtaaaacagaggttaagttctcgctttgtttgtcactataaaaagttgtaacatatgattaccatggtttcatggtaaaagatgcaatgtcaaagaggatgaagaagtgcattgaacaatgcataggtgtgctttggaaagtaagtggtaatttattttgttctctcatattcttctctgtctgtctctatcagagtaacactacatctttttcatttatatgtttatttttcaacttggcaaaagttatactttttcataaatttcagtgcccttcctggattatgagttcatcttttgctcaaagcatacttgctctatttgtagataaacacaatgcttatagaccattttgtcagcatacccactctagattggagttgctgctgacaaagcataattttgatgagaaccttgggacacttagtcctgggaaactatttgaaagcttacaaggttgattctacaggtgctaaatgttggtaccctttgtattctagttgcatgcaatgttctaagtttctgatcatttttggaagcagagctcttgatgatatttctgtgcatgtatagttcttttactgggcgtagtgatgttggatacatgattcatattgtttgtattctcttctataattttagatattttcccttttggtaacacatcaagggttatcgtggactagtttgcatagtgatgttggatatatgattcgtgttgtttgcattctcttctatggttttatatagtttcccttttagtaagacattacagcttatcgcggactattttgtttttctcattacttaattgacacggtcctatttttttggtgaaagcttgaagttgtgcgtgagctaatagtcgagaatct

SEQ ID NO: 82039 - DNA, 638 bp, Citrus sinensis
  Intron number 4 from transcript orange1.1g035967m (locus o range1.1g035967m.g) derived from phytozome v7.0 (chr-ID sc affold00075; pos 250803 to 251440 reverse strand)
agaaaatagtgaccaacttctcttcagatataaaggtagataagtgaaaacgtccatcatatatataagttttaatatttcttctgtctacagtagtttcatttgagtatgcttttgctttgtagcatctttaaagcaaaagaatttgatgttttgagtttgtctttgtgaagagaagtgtcggcttttgtttgagatatgaatagtattcataaatgttggttgtttgtatagctcaaagtcacagacaaacttactcgttgacagttgaaagagaaccttgaaaaaaaaaattcttttctcatcatcttttattgcagtagtgcttttgaatcatgatttgcatcatgatcgcctcaaaattagggtgagttatgtgatccatgaaacgtagcacttgggtgcacctcttgatcgagaatgattgtccaatatgtctattaatccaattagcacacaattcatctgttatcatggtttagcttgtagaccagagttgtccatgctgatgaatgaattgagtacttcctgaatgtataagccaaaagcaaataaaattgatgatttctgtgtgaggcatgctacatcagttttcaaagatgtgtttgatattgatcattctctgtgccatctgcagg

SEQ ID NO: 82040 - DNA, 757 bp, Citrus sinensis
  Intron number 2 from transcript orange1.1g025244m (locus o range1.1g018656m.g) derived from phytozome v7.0 (chr-ID sc affold00020; pos 529508 to 530264 reverse strand)
ccaaagtatacgagggaaagtaagtctgcagccaattctcagattagttcttgttcttaacattatgttgtccgaaaagcgatcaagtagaaagcttacatacttcttatttcttggcattgccacctctatgctgtgttgtatttctccttgtacgaggaaaatgcttttgacatttgtaaaattttgctcccttttgaacaaaatccagaaatttatgtcatttttgtgtatttttaatcaataatctgggttttttgtggaaacttaatatgctttttatgtgcctaaagactaataaaagtcccatcattttggaaattgtaaaacttccactgggttacaatctggctgttggtaatgaagccggcttaggctcgtaaacagatttgagcctcttgattgacactgtggtgtctggtagtgttgtaggtatctcactatgtttgttctattcccttcagatacaaaaaccagactgttgctattaaaattgttcataaaggagaaactccagaggagatcgccaagaaagaatcacggtttgcaagagaagttgcaatgttatctagagttcaacatagaaatttagtaaaggttggatttgaatccacggttttgaggatagtcatttttcttatgtcgttgtaggagtggcaaaaattccatttaatgataatggttatattgttgtgtctaagtatgatgttgtatttctatgcgtgaacagtttattggtgcctgtaaagagcctgta

SEQ ID NO: 82041 - DNA, 784 bp, Citrus sinensis
  Intron number 2 from transcript orange1.1g016309m (locus o range1.1g016309m.g) derived from phytozome v7.0 (chr-ID sc affold00030; pos 281687 to 282470)
gtgttgatacagaaaaagttgccactgctgccaaggtctggctttctgtttcctttttccttttgtcaaaatggcagtgttaatatgttagattgtttgttgaaatgattattatgtaaccggcggtgttaatatgtaaaatggcagtgttaatatgtttgttgtaatggttattatttgcttacgttgatgctagttcttcaaatgaggctatttgtagattcagtggaaatgcttctagtaaccaccatatcaatgtagtttcagctggattgcttatctgtgaataatcggatattggattagtttcttgtgctttaggattatattatctagtaactgctatatctatgtagtttcagctggattgcatatctgtgaataatcggatattagatcagtttcttgtgctttaggattatattaatggtaagtattaaacttatttcactcgtttgaaattggcctactttaaattttagtggtttatttctgctaagttatatcctcaaaattctatgtgaaaatgcccaaatttgtccctttaaaattcctctgtatctgtttgcatgcgtgttttaatctgctaactttaatcttttgcacctattttctatttttacttttgaagctggtaatcttttatcggaaactagtgctgtcagaccctggcaatttcactagtatttttgagtgaatgctctctattgtcacaagtgaaatgtacttgggggctttttttctcaacttccttccaatattctattatcacagacagttgcag

SEQ ID NO: 82042 - DNA, 552 bp, Citrus sinensis
  Intron number 1 from transcript orange1.1g000472m (locus o range1.1g000435m.g) derived from phytozome v7.0 (chr-ID sc affold00042; pos 726977 to 727528 reverse strand)
gtcggcgtgttgcgccagctcggtgacctcgccgagtgagtttcagcttctgatttacaaattcggcttcgtctgagctcgaattctgatttttaagcttaatgccaacttgctagagtctgattttttttttcaattttactaatattaaacttgcgttttgaatttgataattagagttagattcagattttatattacattgaatagatgattttgcttctgccatcttctaggtccatgcggattcaggattctttcgatgttgatatttatttatttatttttttcaattagattaatcaatttttttttaattggtaaaattcagagaagattttggataacagaaggtctaactgacggttgaatttaatgtatgaatttttaaattgtggctcaatagcatttcattataatggattgttgtctgtgaattttcgttcacgaattgtttagcagagctagcatgagaaatttgataatttatttgtttgtttctctttgtttgtggttgccataggtttgctgctgagatattccacgacttgc

SEQ ID NO: 82043 - DNA, 464 bp, Citrus sinensis
  Intron number 1 from transcript orange1.1g011979m (locus o range1.1g011690m.g) derived from phytozome v7.0 (chr-ID sc affold00144; pos 153592 to 154055 reverse strand)
cagtatcaagctctctctctcgctcgtcaggtaattttatcacatacacagatagataccatacatacatgtacacgtgtcgaagagtctgatggttgttattgttctttcagtattttgtatgtttaattcgtttgattaaatgtaattgttgaatgaaggagttttgcttatgatattaaacctggaggaagcttcttgttctagttcggtacaacttggtcataatgcttactatttagcttatctttgatgagattcaattcagaattaagggttcaatttgtagtcacgtatgtgattcatatccaattcactttgagcttatgatttgataatactagtgaagttattttataacgatttcatgtctcctctatggcattttctatgttgttttcagtctattactcgaagattttcgtatgattgatctttgagtttttttaatttatatattgcag

SEQ ID NO: 82044 - DNA, 558 bp, Citrus sinensis
  Intron number 5 from transcript orange1.1g001289m (locus o range1.1g001289m.g) derived from phytozome v7.0 (chr-ID sc affold00052; pos 628463 to 629020 reverse strand)
cagataacaagagctcgaagccatcctttgtgattgtaagtgattagttcctttttcttgattaaataggttgttttgcttgtcatgcgttgatgagcttactactcgtgacaattgaagaatagtgaatagctaaacggtcatggttgtaatggaaaaaattatacaaggactactatcagccagtactgtaattttgtacctttcatatcaggcattttttttttttggctgtacaactaactggtattgatgctattgagtgaaaatggttgtatattttgttgaaggcaaatgaatgcattgcatttttgtattatgcatgcaccagatataaaacctagattttccagatcagctttagttatcaaatttatgcttcattatatttaaaagtgccatgggttagaatttcatatgatgtgaatatcgccattttgatgttgggtgtactagaaacattttttgttgttaggtatgcatgaggtttatagttattattttttaacttctttttttaatgtttggatgctgtcgtgcaggttctacccccaccaa

SEQ ID NO: 82045 - DNA, 695 bp, Citrus sinensis
  Intron number 1 from transcript orange1.1g040543m (locus o range1.1g040543m.g) derived from phytozome v7.0 (chr-ID sc affold00352; pos 90835 to 91529)
aaggcctcgctgagtaagtgaaatctgttcctgtgttgatatacttacaactcgtgaacaggagttttattgttttgattgtattttaatatccatttgattacataggcttattgatatgtacctgctgaaagtttttaataagttaaaaggatgtacaatgtcggattggaaggaagtttctaggaatttattgaatactttttctgctttctgaacgattctacaggaaaagtgatagacttaacgatgagacctcaacgggtttgggtgtgctacttgtaaatctactcgtcttatttctcaagataatcatgcaagacgaattcaattttgtttttgaggcagagaaagttgatgatgagctagattggatattcttttccgtattcttacttgaaacaatggtcttttgcaactattttaccatttccttgtaaatattttttatatttttaggtgtattttatttgttttgctatgcatccatcttgaaagtgggattatatttatacggtcagattaacttggccttgctttactatctttgatatgcatgttcatgtgcacgcatccatgagcatatgcttattttttagcaatttctgtcatgctttctggtttgtttgtagtgatgtattcttttttgctgtgaagtagatttctttgcaggatcaaggaactcagggaaaaca

SEQ ID NO: 82046 - DNA, 421 bp, Citrus sinensis
  Intron number 1 from transcript orange1.1g005368m (locus o range1.1g005368m.g) derived from phytozome v7.0 (chr-ID sc affold00001; pos 2933886 to 2934306)
ttcattgagctctcaaggcgggccaggtgagagtattggtttgacgatatatatatatatatatttctgtaatgtatctgtttgcttcccgagaaagttgagataatgaaaatcagagaacttgataattctaaaccttgttacgtgatttgttcctcagccccagctgagtggatcagttggtggcctgcaaaactgtgattttttgggcattaaattataaattctataatgttttggcatcgttttttgttctctaagcaactgaaagacctgcagatgatttcttttttctttctcttttttgggaaaagaagtattttctttttccttgttcgctcgtttttttattattgagttaagttttggagtttgatttggttcaggaagtggtgatctttatagagagttgtggaaggca

SEQ ID NO: 82047 - DNA, 589 bp, Citrus sinensis
  Intron number 2 from transcript orange1.1g009083m (locus o range1.1g009083m.g) derived from phytozome v7.0 (chr-ID sc affold00032; pos 636871 to 637459 reverse strand)
gaggttctcaggtataactgtcctcctagatgtttccttcacttgtttggtctttcttttcttttcttttccctttttttttaagtttaaatttcctctcctgatttaaatgttcttttgcttgtgtaatagacctcttcgagaacatttgactaaactaattgatttttttctgttttcttattattgatgatgatgatgcttgaattatgattgaatgaatccaatgggcatgttcaaattttttttttaatcttttttttaaatcatcacattgatgtggtggaccattgagcatgcttgaccaggattttttaacatggcaaagtagtttctaaatttatgtttaaactccttatctatttgaagaactctgagtggtgtgtatgcgcttctgttttacaatttatttttatgttccaaatgatcaaataatcaaatttcttaaccatacatatacacaatacattctggttctcttattttagatattctttgtgttggatgggtccaaaatttttactgctaccataatttggagaggtctcatgcaggctgctaactattgtcgtgagagaatccatttggc

SEQ ID NO: 82048 - DNA, 726 bp, Citrus sinensis
  Intron number 1 from transcript orange1.1g009083m (locus o range1.1g009083m.g) derived from phytozome v7.0 (chr-ID sc affold00032; pos 638473 to 639198 reverse strand)
ttagcaacactcaagagtctctgcagtttcaactggtaagtgttctgaaatttattttgttaactttttatttatttgtttcattgtctgcttcttctttttttttttttgggccggggggggggattaaagatcagatttttaggatactgagatggtaaaaattgaatcttttgatctgtgtggacaattattcttgttgttgattatctggggtttggttttttatcggtagaaagagaaaaaggtgaaaaggactcgtctttcaagaaaggctcatctgagttgccgtagatccaggaaaactcgagtttaacatgtgagaaaaaaataaataaataaaggttcaactttttagggtttttcttgtgattatatgtaggtgtggttttactttttcctaggttcttctcattgcttcttttgctttcccttgttgtgttttttaatctaaaagaggcttgattttgatggtgtatttaagggttgttaatcgcgataacattgggtagtcttggtttattctttctaggaaagtttggaagaatttgattagtgaagtcttagttggctttatctttggaaactcaaggctggtagtgaattagatctttagatgaattagatccattttctgacaccagatctgatgaagctttgcatcttgttcatgttaacttattccatctttaatttgatcttggtagtgtaatttttggttagtgt

SEQ ID NO: 82049 - DNA, 381 bp, Citrus sinensis
  Intron number 1 from transcript orange1.1g020718m (locus o range1.1g020718m.g) derived from phytozome v7.0 (chr-ID sc affold00030; pos 132163 to 132543)
actgtgcaggaaaatactggttctccgtatttcaggttagtttttttttttcagaaaatctcaagtgtttccttggatgtttctcattctttctcggagatctagtctggttgtcaaaattttaacctcaaagcaaaagcatgttctaatttataagagaaaccgaagctaaaacatgatctaatttataagaggaaacaatgggataattcatctttgcaaagctcaaagctaaaggttgctcagtgtctgccttttcaaaatagctttttcctttgttctaacttggctgctcatgatcttttatataatcacgaagaaaataaccatattatttggtgatcagagtggcgaaactaataggagataaaagggctgttg

SEQ ID NO: 82050 - DNA, 504 bp, Citrus sinensis
  Intron number 3 from transcript orange1.1g030058m (locus o range1.1g019796m.g) derived from phytozome v7.0 (chr-ID sc affold00001; pos 5099741 to 5100244)
cttccacacactgctctcaaccttaaggtatagtttatttggaatacctatggttttgctttatgatgatgacattatgtgaatttctaaaggtttgtcttcttttttggtcattctttgatcaactttgataaaagttgatgcagtaccaggataactgggaattacagcacatattcgagaaatctgaattagagagtctattagggtaaacaatatgttgaaagttgagtcagtggtgtggaaaattttgaagaaaaaccttgtgggatcgttaattatcttggatgcctgattcttagaacccacgacattcagttatatacttggtcagtcataggctacaagtatagaaagcagtgtcataacagtcactaattaattttcctgcatgaactctatttagttctaatctgtatgttattttttctgaataaaatgtttcttattctttgttgtatgtttgcaggagaagaaacggaataatctcaaggactttctgaa

SEQ ID NO: 82051 - DNA, 819 bp, Citrus sinensis
  Intron number 2 from transcript orange1.1g015433m (locus o range1.1g015433m.g) derived from phytozome v7.0 (chr-ID sc affold00012; pos 287543 to 288361)
gtcgaggcctgtgattctgcttcgagagattctgggtactctctctgtctctatgttctcactaacacatgaacacatgtttatgtgtggattacttgaagagggtaggttttgtttagttcaaattgaatgggaaatttgccaaatgtttttcaattgaagttgcaattgttttgtgcctaaattgcttgaatcacagctcagctcgttcagtgaactaaagttgttatttgagatgttggattgttcaaattcactggaatttttttttaacccacttgtggtctatcttttccacagtgtaaatgagtttggtacaagtaaatttgaagtgacttgtttgttagagagggaaaatgcgcaaaatgggaggaattctgaacctgagtttcagttgagtcgaatttagcaattcgaatctattggaagtgttgtgtgatatttgtgatggttgaatttgtcaaactaggttggttatagagatgaaattgattgggggtgctgatctgaaatcctcctccgtggaagtgagaatttgatgaaatgtctttttgttatgtgaaatatatgaatgtttggaaactctagactgagtgtagattcagacgcaactcccaaggctgaaaaatacttctaaaagaaacgaaaaagatagaatcaaattggaaagggttgtaacgtggtatgtgggttcgcctgcctagttggaattttgcaattgattgtatagtgagttctagctgtacaccattagaaatgattgatctgattttctggagtttattatgggatgcatggatgtaggcgtgtgacattcat

SEQ ID NO: 82052 - DNA, 672 bp, Citrus sinensis
  Intron number 1 from transcript orange1.1g002648m (locus o range1.1g000986m.g) derived from phytozome v7.0 (chr-ID sc affold00032; pos 690450 to 691121 reverse strand)
aaccagcctcctgattgcaggtaccatcttataaaaaactcctttttgttaatttttttaatattttttgtgggttgattttgttgtgttttgtctttttcgaattggtgggtatttgtagttcgaggaatctggagttgcaatgattgaagagattttttctttcattttttttcagctggcattgtgtcactatcttgtgtttttatttttatttctctggttttgtggagtgcattggatttttgaaggatatgcaactgggtttgtgatttgagctgtaaattttgaattttgtcttgcattaaaagttttggttataattgaatgtgtcgaatttattttcatttttgggtaattctgttgtaattttctactttttttccccttttttaaacacagtacagaatatagaaatctgagcacgtggaattattcaagaaagatatcaatgtcttcccttaaaatgggatgttggtgcttcttaatgtatgaacttgatttttgtctttatgatgttggctttgcatgatataatgttttgtcaatgcatctatttgacctttaatctgatttcattaagtgtagcaatttattatacatattgatctttttcattatggtcctgtgtaattaggtcttaagggaagaaattgtactcgcggggcacca

SEQ ID NO: 82053 - DNA, 512 bp, Citrus sinensis
  Intron number 4 from transcript orange1.1g027501m (locus o range1.1g027501m.g) derived from phytozome v7.0 (chr-ID sc affold00130; pos 77712 to 78223 reverse strand)
gaggtattttactttcttcaacttttttatgttatttgattcttttaattggcaaataccacataagtaaaattctgtttctgctatgatctttactgtgtttatattgtaaagtgagctagtgcactttatgcagcgtgttattgttgttatcgtctaataatttggattggcagtagaagttgatattaaactcttttaacgatttgcctgtccaatttgattgagcggtaatacatttttgtaacctgaaaataattcatgtaaagaatcctgactactaagtggatttcgagctattgctcattgtacgagggtgattaaacgattagtagtgttttctgcttcactgaaaaacccttatataatctgaaaaaggggaggaaaaaagataaaaaacacaagttccagcaattttatggattcttgaactgacgatactgattcatctaattgatgctctttgtttctttgtaggtggagtatcttcccatctcgtcaattgagaaatc

SEQ ID NO: 82054 - DNA, 839 bp, Citrus sinensis
  Intron number 2 from transcript orange1.1g001338m (locus o range1.1g001174m.g) derived from phytozome v7.0 (chr-ID sc affold00001; pos 5718512 to 5719350)
cgcctctgcgcagagtattgaactaagcttgatcggtaattgaactacaatcttacggtctctaacaatttgacttgtatatgtttatgatctccatgatgtttgatttggagattcttagttacaatcctggcaacctttgttgggagaccagtttaatttgctctgctgtgtattatatggtgatctgtttagtttgagtgtgaattatatagtctgtgaacttatgtgaagtgggaaatatgcctgtctgtacccatttcaatagaactacatattttttgtagaatatgattaattgtgatccaataatatttcacttcttattgtaatatgtgtgttatgaaatgatgatatttttcaatacattgatgcaactgcataatatcatgtaaaatgaagaaaaaaaggggaatttgaatattttagaagtttgataaacattttactgcaacatccgctgtgttgaacttgtttgaggtgttcagcttcaccagcctattgcctaagattttcaagcattaggtttatggtgtaaaatagcagagggagcatttaatgtgccataagctctatattcttcttcttctttttttcccctcctccctcttccttggctgtgcttgatgtgcaagcttttgaattttgttacctgtcaaaccttaagttgcaatgcactctgggtcgtgatatttggataccattactgattttccttaattcagttttgtcttgtgtatgtcatcaagtgcatcatcctttaatagggtttttattgagtcatgttggtaagcaggttaattttatactgtaatcttttgcagaggttattaaaggca

SEQ ID NO: 82055 - DNA, 693 bp, Citrus sinensis
  Intron number 3 from transcript orange1.1g001304m (locus o range1.1g001304m.g) derived from phytozome v7.0 (chr-ID sc affold00900; pos 21355 to 22047 reverse strand)
aagtctgggttgttaagcagggcatcaaaaaacttgtacggaaaccttttttttttccaagtcatcttacattttctggcaattggtcaaggatatcttgcttttgctctgtttgcacacctctacaaattttgttattttggcatttaattgttatcaatttatataattattgattagaagacatatgactattaaaacttgaaacactgcactgctatcaaactatttttatttttggaaaatggaaatagacatcaaagtatttgtacaaatcggtattgaattttttaattcaaaacaaacaaaatcacatgcatgcacaaatattcagctgcatgctgttggttattgaaatgctgcagttatcttctagaggaaatgtttttgttaccaagctccctatatccctaagggagcaacccaaaaggacagaattgtgagaacattcgtcattgttaaattctttgtggtttggatttcattgaaaaggagatcaagtgggtggcaggggcaggagttaggtgtaactgcaattgtcaatactagaaagcattagctgaaactaatgtacaatgataaattgttgcttctttatctttaattgttgtatactaattatctctttatgtctgtttcattggcgatttatttgcagatacaatctcaggacattcgggttggtaacatagt

SEQ ID NO: 82056 - DNA, 738 bp, Citrus sinensis
  Intron number 4 from transcript orange1.1g018705m (locus o range1.1g018474m.g) derived from phytozome v7.0 (chr-ID sc affold00448; pos 131162 to 131899)
gaagtaagttctaattgaattaataataataatatatagcatgcttctgtccacgatttaactaagaaaaagggcacctaaagctcaaaggtctggagaaatgatcaagaaaacttcaaatttttaataaaggatactatggttctcttttgagcataataaccttttgctctaataacccaagaaagttgactccaatgttttataataaatagaaacgtaatgatttatatattttaaaataatttaaatgtttaaaaatatattaaaatttcacaatctgcatattttattgtattgaagtaaattttgtaataaattaaaacataatattaaaattttattaattgtaaaatttttatttaaccgaaagatttaattaaaatctttataataaatacaaatgtattattaaaataaatataataatttacatatttaaaattattttaatattatttgtcttctagatatattatattatttatattaaatttgtatttattaaaaagattttaaagtcaattttttacttgctatattcaacggatattacagcaaaaaaaatgccttgttacctttttgttaaaacttaagttctgcacgatcattttcccaaaacttaaagatatacctgttctttttcctttaattaatgaaataattctatttcgatgcggcgggggcttagatttcgatgcagaaggtattggttgaaaggtgatcgtgctggaatat

SEQ ID NO: 82057 - DNA, 494 bp, Citrus sinensis
  Intron number 1 from transcript orange1.1g007051m (locus o range1.1g007051m.g) derived from phytozome v7.0 (chr-ID sc affold00326; pos 49764 to 50257 reverse strand)
aacgcaacaggttcttctctcgttaactcacttttttaaaaattaatttttaatttttattcactagtcttctattatttgcggctgtttagttgattagaatttcatttttgcgaattcgttttagattgatttctttttcttcagtgtttcttatcagttaaagcaataaatttcaagaaattctattattgttgctaaataaaatccgtgtataatgaaacaccaaatgccgttcacctggtgcttttgaattaatgtactaatgttgattctggagaagctatgagtttttgtttctaatcgagaagaatgcaactggataaacaatcccactgagaaaatgcacataaaatgaattgaatcgaagaagacgtgtttcaattgtattatctttggaaatactctaatagaggaagtaaaagtatacagaaagttaattaaaatgtgttgttttaggtacgatacgtacttttacaaggtattcaaggtgt

SEQ ID NO: 82058 - DNA, 795 bp, Citrus sinensis
  Intron number 4 from transcript orange1.1g016982m (locus o range1.1g016982m.g) derived from phytozome v7.0 (chr-ID sc affold00075; pos 375374 to 376168 reverse strand)
tcgggcagcactttgtgttcagtggagtcctaaaggtactggaaccctattgtttacttaagtattgtttttcattcgcttatcttgcccaaatggcatgtaagacattgattgagagagcgagctcagaactggattaagtttacatattttagacttggaaaataaagaaaataattactggaaaaggaatatgtacatttttgcatgcggttctggtggttttttaggttcgtgagaagaaagtttagaacaatctagcaatgtccttctgtcatagcatctggacgttagatgaaatttggatggaacaaccagacttgttcatatttattttgattaacccatgctggtccttgggagatggccaacccagttgtcaggatgcaggggggatcaagaaacttgattcataggggacaataccatagtaaaaaataataactcacgaaattcaccctaatatcaaattttgtttacaaaattgcccccactccggggtaatttttccagaactttataggaaattaaagggaatttatttttgagtgggttcaattgcccccaaaccctgtaatataaatccgcggctgccaggatggttgccaactcttgtttacacatttagagttagaaaattaatgttccattaaatttttatctgaatttctattataaaatttgactgtaaatttaagttttttcttaacttgacaatgatgattaattctaatgagttaccaccttttttatctctcagaaaacaagtttgctgttgggagtggtgctaaaact

SEQ ID NO: 82059 - DNA, 487 bp, Citrus sinensis
  Intron number 2 from transcript orange1.1g043925m (locus o range1.1g043925m.g) derived from phytozome v7.0 (chr-ID sc affold00008; pos 370644 to 371130 reverse strand)
cctaattaacagcaaggggtatcttcactgttcaaatggaatagtagctacagcaagttacggtaaggttctcacaacttctcaagttttacttatcatttctttacgatctatacaaaattcattcatagaaacagtcatgtcataaccattaagcttgtttaacacctaactacatcaaagtttagttcatgataggtgataaaatggtagcaacacacgtttttgccgtcaaatatattcccataaagagatgaaaacatgcaaataaagatgaggaattgagattcactaaattcaagatgtcccgctcctaggttttgcgatgtctcctactttttctttgaaatcccttgttggaacccccaactctctcttattctcttatttttctttttctcttcgttgcttctatgtgtcggccccctccctcttgtttctttcacgtgtgctttttttatatcttagaattagggcaatcaaaagc

SEQ ID NO: 82060 - DNA, 379 bp, Citrus sinensis
  Intron number 1 from transcript orange1.1g033314m (locus o range1.1g030450m.g) derived from phytozome v7.0 (chr-ID sc affold01481; pos 15951 to 16329 reverse strand)
gctcttgctcaattcctcaagatcttcaccacttggtccgtcggtttaattttcttcatttttcgttgtaattttattttatttttttcgcagcatttctcttcatttggttggttacgtgttgcaaattttgttgatttgatattttgtctgtataaaaaaatcgactttttttgtataaaaaagtagattgaccttttcattagggcttggagctccaagatgctccctttgattgtggttgatctccaattcaaagaataatggatgtacgatataataaatgttaattgaattgaaaattagtttaagcaaatgtaattaaaaagttgttattttgaaataaaaatgtctcagttattctgtatgtttttgctag

SEQ ID NO: 82061 - DNA, 471 bp, Citrus sinensis
  Intron number 1 from transcript orange1.1g033555m (locus o range1.1g033465m.g) derived from phytozome v7.0 (chr-ID sc affold00015; pos 1475701 to 1476171)
gaaaaaggagtgatccggatcagtttttgaggcaagtaagataacccatcaaggtttttggattcttttgagcgtttgttttggttttttttattggttttgaggtgagaaagttgtttggatgatataaagcgtgtcctctggatgaacgtttgatgttattattgatgattggttgattgattgctgtcacagacattttgctgctttattcgtgcaactttatttatggatttggtctggctttttgttctatttagggattattgaaaatcgaggatattgatgcgaattttgattgctagaaatcctaattgatgcctctataattatctttccttttctttcatttttttttccagtttagattttttattctttttaagatgtatccaaactctcaaagttcttcttttgcttgtttctggattttcagcgcaccaaagtgagaatattgatcaatctgcaact

SEQ ID NO: 82062 - DNA, 578 bp, Citrus sinensis
  Intron number 3 from transcript orange1.1g033555m (locus o range1.1g033465m.g) derived from phytozome v7.0 (chr-ID sc affold00015; pos 1477287 to 1477864)
ttgttgttcaacctccttctacagaaaaaggtaaaatatctttattttggaaaaataggggcaacgaatgttgtctgataatccaggcacatattttgctcctcctcctctcatgctgttttgggttaggaacactggaaccatgtacgaagttgacagaatattatatatcaagattaatgcgattcctttcttcattgttactttttttttttaagtttttggggaaaaaaattgcggagaaatgcgtaatcaatatttcgcctttgtttcacgtttgaggtttccaaactctttatttcaaaatattttttattttttaacaaaatatttttattttttaacaaaatatttttattttttaagttacataaaattccatccttgattacctctcaagtggaaaaggcaccaactacagccaaccactcagatatgattacctaataccttcagcattttccccaactggcaaaatttatttcgttatgtttcacatgctttgtgttaaagtgtttactgtttctgtttgtaatgtagcagaaaagaaagcagctagtcaaccaaagcagaacaaa

SEQ ID NO: 82063 - DNA, 526 bp, Citrus sinensis
  Intron number 2 from transcript orange1.1g014836m (locus o range1.1g014836m.g) derived from phytozome v7.0 (chr-ID sc affold00021; pos 95910 to 96435 reverse strand)
gcaacctcacggctgtgatcttccaaggtaaataatatttcttattatcaaaataataattttatttatgaattatgactggatattttaacttgtttattaagattaagccttaaagaagagacttcagtttcaagaatctaatttttatatatattctttttctgaactgctttttgatttattgtctcgttgaaattgggcgccggccaatgccatgcatggcacgtacgtggccaattgccgggaatttttttgcttttatttcgttttttttttttttttctctcatgtcattaggtaatgggacccatattatcaaataaatgtgaattcatacagacgggacgttcatttcatggtgtcaatgcatatcaatccgtcaaaaaaacttgccacgtatatatagattcatcataaaatggacagattgattacaaagtgatattggtcatgatactggatattcaattttaacttttaaagaagatttgtacactaattgacgtgaaattatgcagtttta

SEQ ID NO: 82064 - DNA, 1006 bp, Citrus sinensis
  Intron number 3 from transcript orange1.1g040474m (locus o range1.1g040474m.g) derived from phytozome v7.0 (chr-ID sc affold00398; pos 11143 to 12148)
acattcaacacattcgtgctgaaataaggtcagtcattacaaatgaatagttcttttaccaatataaacttttgctacaagtagtgtgattttgtcataactcgaataattttaattgcttcatataattagacttgtttgcttcttggttgagcatgtacatcaaattatggaatgctatctacattggtttcgatgatggtatccgactgtttctctgcaatttagctgctttattatgtgatataccttgaatgatgatatttgattgcataacccatacatattgtcaattattagctcctctacgaaacaatattagagcttacttctattttttgggtccttgcctaccggcttaagcttttaggtctagccgtaagttagcacggtgttagagctagtttgaccaagaggtcctgtgttcaaatcacccgacgtgattgcatttgtctctacttttgtcttctgtctctgtttgggtttggtttctgtcttctatatgtttggtatcagtcttgcacgtggggggaagctgttagagcataatcctattggtaggacgcctacctgctagttcaagcttttaggccaattacctacactatccctcgagtatgtttctccattaaatagtgaacagaaagaagtagtaattctgaaaacaaattgcaattcacctttcatttgcccaaaaatgtttcaccactagtctgtccatgaaacgatgctattctgtggtaactagcatgaagtgctcccctggtgttgatgccatgtgtctagttatgttacgttgaatcattttgctggctctggttcagtttctatgctcaagttatttcaactacgtaaaaagaacacagaagttcgtatacattatacaagtacttgcatacatagttgtgtttaaaagcaaatgtagacacatatatagctatgcatgtatgcatagtgcaggcttttcttggtataaaagctaatgtttaacatatcagggactttg

SEQ ID NO: 82065 - DNA, 696 bp, Citrus sinensis
  Intron number 1 from transcript orange1.1g027078m (locus o range1.1g027078m.g) derived from phytozome v7.0 (chr-ID sc affold00546; pos 20837 to 21532)
taattcaaccgacgccacggatctctttcgctccggtaccgttcctctccctcctcctcattttcctttcattttttattttaatttattatgcttcaattatgatatgaataatcaatcgatcgatcggtcaaatctcgttccttttttttttcctgattttatctaattaatgtttgttttattttagttgccaaacagtcgaagatgtatgagctaccgtgcgaaaccgattaaggatatatgatgattttattttgaattatttttagctcttatcataaaattctctaagcaaaacagcttaattgaaattctggcttgtggaagattagatgctttccttttctaattagctgtgtgttaagtatttacttgagtaataaatactacatgtatgtaatctatctggaggaactcattcatttaaactgacgtggtatgatatgaataaatgatgggaattaaattttctgttctcatttaattgcttagtttttttttttaactataccaaatttccaatcatatgatgccatgtcagtttagcatatacttcggaattgtattgattgcttgtatgtgtaatatttattatttgttttatttagtaaggttttgtagaatttctgccaaatagttacatttctgttgaatttcgttgcttcagcctcaagtaaagcatcttcgaaagag

SEQ ID NO: 82066 - DNA, 718 bp, Citrus sinensis
  Intron number 2 from transcript orange1.1g027078m (locus o range1.1g027078m.g) derived from phytozome v7.0 (chr-ID sc affold00546; pos 21587 to 22304)
attgagtaagcttgctttatttagtaaaattcagtttatgaatccggtacttgatttataagtttttacaattctagtattattgtagatttaatataaattgcgtgatcggagttgactgaatgtaagatgttatttgatcatgaattgcactattattggcttaagtgattttaaggttgaaaatgggagtccagctgaaaggggcttgtttttccatagcttttgtctgtttaaaaactatggaatttttttattggtttctttcctcagctttggtttctgtccgtaggtatgcattctagcttcagaaaaaagtttgtgttttgaattgtaagcaatcaacggagatgaatttaagctatcttcgtggaaagatggataaagtctgtccctttgaagtttggagaaaatatggggtgtttgcagccgtgatggatctataggaatggttactttaaaaaaaataaaaataaaaataaaggaagagtaccactgttttactgtaacttagacatgtctaactgatgcatttgttattacatttcagtcactgaagcagaatacgtattaaagtcacggtgatttgtgtgattcaaagtgtgccaaattttctttctttgaagtaaattaaggaaggatttttatgtaatttctgatattataatatattatttgaacagcccagaaggaattgaaagtctgtgttcagatatcg

SEQ ID NO: 82067 - DNA, 874 bp, Citrus sinensis
  Intron number 1 from transcript orange1.1g000040m (locus o range1.1g000034m.g) derived from phytozome v7.0 (chr-ID sc affold00001; pos 1420608 to 1421481 reverse strand)
ttctctctcgctcgtcgctgtcacaatctccaaaggtacttaaacgtctatccttttctcttgtcacattgtatttaatcctttttctttaaattaccaagacgaattcgccggtttttttttttcaaattaaatctttgcagtttcttcaatagtttattaattaggtcggatcagtgttcgtcgaccggtttctcgcagtatgtatgctgtagatacgtacttgtacattccgcattcttattcactctgtcgatctaatgcattgatctattattctgcttatcaataaataatcgtatacaccatttgaaatatgtgcatttatatactggtctctctttcgtgtttccttggatctgtgatattttgattttgagtttatggcaatcctgtaccataattgttcttggtttccaaacagatgcgtgataaagtaacctaataagtaacttctcggtcagtttagttgtgaacgttatatttcttttgttacatgtactttaaatttagctagatcaaacttgctgtatttcttacttcataagtttttgtaaggataagaagcaaggtaaatagcaggctaactggaccaattactctttttttttttttctttttgaatgctttgatatgtgtagattttgattggttgtgtttgaattaatcatgatgtatccctgctggtgcttgaagtataaacatatttcttaaaattgagctgcattgtgtttctttctgtttgtttttacttaattgtgttatagttattgtagcatttcaactgtcatcgatcatgtatctctagttaattaaactggtattcagttctcagttattgtaatttttataggtgcgttggtgtgtatattat

SEQ ID NO: 82068 - DNA, 455 bp, Citrus sinensis
  Intron number 1 from transcript orange1.1g030003m (locus o range1.1g028554m.g) derived from phytozome v7.0 (chr-ID sc affold00001; pos 2133258 to 2133712 reverse strand)
tcttcttcttcttctctctctgtgttccccaagaggtgaagcttttttcagcttatcgtatcttcaatggaatctctctagattaattatttacttattaattaatttcacgtcatagtctctccaattttgtctgattagagcctagggtttatttttattgttgcatgaattgtggttctctcgctcttgttttggcgttgctggactatatgatgaattctgttttgttgtttttttattttaattttaatttttgtttattatttatggtttagctgtggattccattaattttgctgtttgaattgttcccactcatgttctcgatcagtacgcgtaaagtttagcatgtctagggtataaattgagtgactttgctttgttcatgtttggcaaagaatgatttttttttttttttttttttgccccttgatgtcaaataacaggaaata

SEQ ID NO: 82069 - DNA, 541 bp, Citrus sinensis
  Intron number 1 from transcript orange1.1g006376m (locus o range1.1g006376m.g) derived from phytozome v7.0 (chr-ID sc affold00015; pos 1722405 to 1722945 reverse strand)
ggctctaagatcttctaaaagctccaataaaacaggtcagttttgctttgtactgtccgtacacgttagattttttttttgaagatttaaatcaaagtttttttttttttaatcatcacttgtatgcttttcttagcttctcttttagaaacccatttgtgttttatgcattttgttcacgttcgtgattataaaggcctgccaagtgccaaagattggaacttgagttatgtctttctgttgctcttgtcttgttgttattactagatcaaaaagtggattttttctattaaatgttcgttttaatcaactatgttggtcttattcaattgtttaaccaattctttgatccttctagcattttgtttgaggattcttcgtttggtatcttccttagtgatcatttcatttgatagaaagttatgagttctggtttgcagaaaattgatttttctgtttgttgaaaattcagggatttagagggcattacgtgttggagcagtgctgtgactgttgaaaattccttgcgtcctgtcataca

SEQ ID NO: 82070 - DNA, 236 bp, Citrus sinensis
  Intron number 3 from transcript orange1.1g004577m (locus o range1.1g001730m.g) derived from phytozome v7.0 (chr-ID sc affold00231; pos 73080 to 73315)
aggtctgtttgtttatgtttttccgctccaacacccccttcatattttgccaaacaaagtagaagaaatttaatcagtttcatgaaaacagttggttcatatggcactatgatgacactgaaatgataatcaaaacttatactcgttatgtactgtaaatttgaggttgatattgatttatgtgtcataaaatgattgtaattgggcctaccaatttgactctattctttgctagt

SEQ ID NO: 82071 - DNA, 821 bp, Citrus sinensis
  Intron number 1 from transcript orange1.1g027193m (locus o range1.1g025569m.g) derived from phytozome v7.0 (chr-ID sc affold00021; pos 319280 to 320100 reverse strand)
caacggtaccgtttctcttcttcatttatttatttttgcttttaaaaaaaatgttttccctttaattttctaatcgcttttcaagcaagttctggtttttctagtttctcttgaattgaaggaaaaacaattttaacttcaaggcctgtgttatttatgcgtagagtgtatgtatatggcttctgttgctgtattttgcatattagataaggtcattgttaattttagttataggtagacacgctccagactggaactatataccactgattgaatgaagcatggggaaatgccttctaggttgctgtaggaatagttcaggagcctacaagtcgtactttgagtttattttagtgatcaatccggtacccatgagtggtttagaaaatagttgtcatctagtctctgttgtatggtgattaatttgcctgtaaatttgggttgggctacatctgctatgacgccaaaaccgaatgtgtttcgtcatgtgtctgacaatgtgtattttcatcttgctttcgctaccctgctgtgtcagttgcttattgatcgtaaatggttcttgaatatgtttctaaccgtcatgaggatgtaagggttcaaaatgaaatttgagtgttctctttggagtttatcttgtatgtatgttttttaaatgtcattgagcagcagcaatgtgtgtttttagaaactaaaagagcaattttgtttatgatatttcctgtctaattgtgttctagacgtatcttggtgacttttattccctttgattatttacaataatttacttcttcattaaaagttgtttgcccattatcagc

SEQ ID NO: 82072 - DNA, 834 bp, Citrus sinensis
  Intron number 3 from transcript orange1.1g020774m (locus o range1.1g019485m.g) derived from phytozome v7.0 (chr-ID sc affold00015; pos 317234 to 318067 reverse strand)
agaggtacaagttttgatttttttctttccccgtttgttgagtgatttgttcttaattgtttgttcagcgtctgagataagttaaaggaatgtatttgaagtgtgagttatggtgagattatgagcgtgtttagtgtgttttgattcattaataatgattgaagtgctttttgaaagagcacttgacaggtacttctgcttttcaggagcttgacgctactttctctgcaaatggactgagttttccaaatggttgaattaagcttttgaaaattttatctattttcctattctagaacgtaatttttctgtgtgttttggttagacttaaaaaatgaatgtttcagaagtcaaaaaatgtattttctaaatcataccctaatgtcttttagtgctggttgtcaataatgactggaggtggacggctatgcaagagaagaaattagagtgctgattgattgcaaccaatttaagattttgatggctgggagctgagttattttttgaatttcaagcacatttattttcaagattgacactttcttttccagccaaatttactctttactacttggatatgttactggggtgcaaaatgttagataattttgctgtcagtttattactgctttgcttgctttggtttaattttaacgctgtcattatatttgtcgggttttagcactcggagagatcagaatattggttttcgcagttattacacatatatttgctcctttcagatgccactccagtcttcatgtatgattaatatgttgacagtgatttgcttctacctgaagaaacaagtatgttttgtatgacagatttcaa

SEQ ID NO: 82073 - DNA, 781 bp, Citrus sinensis
  Intron number 2 from transcript orange1.1g000002m (locus o range1.1g000001m.g) derived from phytozome v7.0 (chr-ID sc affold00032; pos 592011 to 592791 reverse strand)
tctgtcgggtgcttgatttggccccttttgttggagtaatatttccatctccttataatctactgcatctgcatctgttaattgcggagaaatgaaagtaacacaaaacatagcgagtggatctattaaatgcgtttcttttgaatgaatttcctttttgtttgtaatatttaatataaaaaaaaagaagaagaagaaaagaaaagagaaatcttcttgcgtgtttggagaagcatgggtgagttttccttcgtagtagtttaacacaaaccaggtgagaagtgtttgtaaatcatgagctgaaccagaccaaattttgatttataggcatcacattttgtttcactagttaaagcatcttaaatatgagataattcttggtagaaataattagtcctacccatgcaccaacttaatctttaagcccaatatatctgtggtcgtctttttctcatgacgtagccatttttggactcaggggtctcattatgtttgatactatttttcatctttaatacaagtatttctctttttttttggggggggaaaggctcagagttctcattatgttcacgccttactgaagaagcattgaagttctaatttgattattaatttcctgtaaagtgtggatcccatttttggcatggctgactaaattgtgtaaacactgttgtctttgtttggcttttataaccaagtcaaagacttactgaactctttatattagatcgctccactggtaggttgggattcttgatccttttcatttggtttcata

SEQ ID NO: 82074 - DNA, 1057 bp, Citrus sinensis
  Intron number 2 from transcript orange1.1g019440m (locus o range1.1g019453m.g) derived from phytozome v7.0 (chr-ID sc affold00001; pos 1865753 to 1866809 reverse strand)
aggaactggaaggaaacaacaagtatcttctcttggtaagaattcttggcatattttgtttctgctgaggtcacactgactgtgatgaatgtaggacttatagctcgttaacctgtttgagccagattctgattcacctcagataaggactgataaactagcaattaagcaatccagtgaagagggaaaacaggttaatttgacaatataaaagatgccttataattttcccattggtctagttaaagaatatcacaagccatttatagttttggtaaagatattattctatttggtaaagataatgcatcaacatttaaatgacagagaatggatgaaacaaataatttgtcttcttatttttgtcatgtatattgaatttataacagtgtacatttaaggtatggttaagttttaaacttgctatttgtccctgatgtttgaaagttcaatatgttgggattcaaatgtatctgtcttgacttcgaaaacctcagaagtgaaaaatcgtttgttggcagacagctgtttatgggagatttagtcagaaaggaacaagagtgggtgtctttttttttggggggggggggggaggggattgatgtactagttttgagattgttttcttgctggaaaatgcagggcatataaagtgaaacttcttgaactcgctagttaattgtttgcttctaaaatctctgttaagaaacaataatagcatccacaagaaccaaaattctcaggtttatgaccttcttcatcatactgtatgaagccaccagcaaaaatcatatttattagatttgttgctaaaatatattatccacggatgtataccaaagcattattttactgcaattaaaccttcacaagcttgttatttgatttctttagctacttaaattctaattatgagcagccccatcaatgagagaattactctgccttttggagcaaggttgggtgttatgtttgtgcataggattataatttgtttcgatgattttgctgattttaaattgttttgctaggtgaatcgctctctggttcagctggg

SEQ ID NO: 82075 - DNA, 975 bp, Citrus sinensis
  Intron number 1 from transcript orange1.1g019440m (locus o range1.1g019453m.g) derived from phytozome v7.0 (chr-ID sc affold00001; pos 1867206 to 1868180 reverse strand)
ggaaacgcgttcgaccgttgactcacttcactaatgtgagtaaattctctatcttttactttctaaacttgttgcccacttggttttggagagaccatttaaaggaaaaaataaataataaaaatgttatctttgctgtctgttgttgggtttctttgatgttatctgtgagaactgggtttgtgctattgtatggcgtttacttgggtttttgttgccaaggaacatgcttggtgtttaaggctttatcaattatcgtgagttggtgagagagtggaccagtttcaacctttctggtctttgtcttcaagattaagcctttttccttgtttcttctagttggtaagctgtaaaatagccctgcattttgtcttttcttttaggttcttggctttagatttgaattcttttcctctctttctttgttaatgttcagggatcttttcttattttctgttatctaatcatgttttgcttccttttcctttgggttgtttagttctttcttgtttggaactttgaagaggctttgaatctgggcttgctttccttcttgattctagcgatttcacgtataactttgactgcattcttatgggtactgttctgtttctttgtcaaagtaatgtgcctgctttgagctttcttgtccggagtggtatcacaatgagttttttacatgtgtgaacattggcggtgttggatcataattatttgtaatgtcatgcatgtcttgcatgtgaccctttttcatgttggttttaagaatctaagattcataccctctgtggtaagccttgttttcgttggtcacaaatttgaagtccaatagaattttcattgttctgacttcttcaatttttgaagtatttttcttattttgaacactggagccagtaaagaagtaccttagttttgcaattaattgtgtgtgagttgattcagagtaatttaagtttaggtttttcaaagtaa

SEQ ID NO: 82076 - DNA, 432 bp, Citrus sinensis
  Intron number 1 from transcript orange1.1g022478m (locus o range1.1g015109m.g) derived from phytozome v7.0 (chr-ID sc affold00008; pos 2304214 to 2304645 reverse strand)
atcggtggttttgaatcttaattccgttgatttgggtttgttctttcaaaaaaattattcactttttagttttgttttcgaagtattgatttgggaaacgacccttttcttggcttagtttgtaaatctatattttttaattttctgggcagacatgctctgacataattatagtctatgtattttttaaaattcttgttcaatttcgatcctttttttttcccctttttgatgtgttcttttggttggtttgttctctggatctcgactgttttttcatctctgagtatcaaaattttaatccttttctttcacatgtaaaaaatttcatattttgttaactgaactgatattgcttgcggatttactcacaattgcttgcttttttgttttgcagctcacaagggggtgtattatacttgatttctgaca

SEQ ID NO: 82077 - DNA, 1035 bp, Citrus sinensis
  Intron number 1 from transcript orange1.1g044744m (locus o range1.1g044744m.g) derived from phytozome v7.0 (chr-ID sc affold00030; pos 436187 to 437221 reverse strand)
tgtatttgaggtatcatttattttatttgtgtttctggattttcttttttaaatttcataatttatgaacttgaatgttaatttttttttttaaaaaaaaagctaattgtattattgttaaactggtcctggcattttgatcctttaagcactatttttttcttgcaggcaagatctagaatagattttcatttattatatatagaatcgtagaaatcagattaaatttgaaaacatatatattcttaatccatacacacaagtatatttattctattatccgtacaaataaattttcacatccttgcgacaagtgtaatattgtgtggatgaatgtttgaaatttcaaaaccatgttactttggatataaatttataagactgtgaagataaatttgaaatgtgcatgtgtaatgtatttggcacagatttaagattaaaagcaggagaggaatgggtgtagaagttaatgtacaagcttttatttaaaacttgctataattgaaaatggagcatgttctgatgaaagtattagtgcacatagtagaacaatataattaactgaaggatcgagctaaacactcatgctcacggactcgtgctcatgcacattgctaccatgaccaagttgcaatgtcagacagccaagggtctggaaaatctttcagcaggaatatcacctcactgtcttacttggactggataataacttctaagtttgtttctgtttcaaccttagggatctatactcatgagtgcactgaaacttttacataagactctatttttctgaatttgaacattgcttgtatttgatcttttttatggcttcaaaatatgttagtttgcttctgtttaatgttctagtttccatgtctttttcttctagttgcaatttgttctgtgtccattgttcgacatgttatcttcttttttgcaacttctctttttctcaaaatcctcttgtttgataggaagtatctgttcatgtttgttgcagaatttagcaagaagactgattattgggaaggggca

SEQ ID NO: 82078 - DNA, 666 bp, Citrus sinensis
  Intron number 1 from transcript orange1.1g041069m (locus o range1.1g041069m.g) derived from phytozome v7.0 (chr-ID sc affold00192; pos 46237 to 46902)
gtgattgagaggtgtttcaaaagaaagtcaattatgcacgacttataaagaaggacagtggtggttcaaaacaagacaaatttgagctttgatttatcatatcttctaacaaatcctagtttacaacatccaatttcaaattatcatccttgttttcaatattaagttcaaaaagagtacttacataaaggttcatgtcaacctgaactctatgatttttagaaaagaaattttggaaaacatccctgaagatctacttctacctgatttaagaaaaatgaaacttgcctagattatattatagcaaaggatgttgcattttgccttcgttgttatctttttagtccaagtagtggtgaataaaggggtagtgatgtttttaaattaaacggatttattggaagaaactagagaaaattcaggagcacattggaggcccaacagtgttcataacaaagcttggaaaacttttgtagcattaatgaattagagacaacatattcaaacatcctttgaaaagtcttttgatcaagattaaagtgattatcaaacttgcttgaatgcaatattgatcgtattagatttggttttagataaggccatgcatgtcgtggcaatgctaaatctgaagattcaataatcaaggtaactttcttgaacttctca

SEQ ID NO: 82079 - DNA, 407 bp, Citrus sinensis
  Intron number 1 from transcript orange1.1g047110m (locus o range1.1g047110m.g) derived from phytozome v7.0 (chr-ID sc affold00030; pos 1025764 to 1026170)
ggtgatcaagtggtcggattttagtttttgcataggtgagactagcctaacattctttcttcacaatatatatatatatatatacacacacatttgaatttaatctagtgagtactattgtacacattatggtacgtgactgcacacgtgacaagttcttattgaaaaattagagctctattgtaaagttcacaacctctgagtggtcgataaatacatgataacatgcgcaattgcacctactggatcatatttctaaaataaataatgaaacacaagttgtaacaatacagccctattaagcaccacctaatgacatgcccagcttattttttatgataatttgctgtaagcaaattaaaaaaactatagcaaaactcaaattgttgttatacataattgttttt

SEQ ID NO: 82080 - DNA, 1028 bp, Citrus sinensis
  Intron number 2 from transcript orange1.1g000569m (locus o range1.1g000254m.g) derived from phytozome v7.0 (chr-ID sc affold00001; pos 1304314 to 1305341)
gctgattgcccttactacaaggtgtcacttacctgcaattatctgaggtctaaatttgcactttgtttggttgatcccatttggatcgtatttgtagtaatattttaatttcaggtcccaaaatcaatattttttggtcaggctttatatgctggctgtcagagaataatcttaaagtgtaatgatatactcttgggagcataatgcagaagtttctagctccttttgttagcattttgtttgagaaggccagaagattacctctgatttattagtttgctgctcagagcattttgagatttaacataaatttagaaaaaaaatgttgttctttatcatccgtgtatctcattctcatttgaggagatttttcttagtaaatctcctctagaattgtacgttttaccattaaaccagcttatataggttgagggaatcagtagataggccagagaaatatttggaaataatgaaatcatatgctattagcttcaacttattggtctttatatcatggatcttagtgtttggcaagggatgcttatttctgtgcttggagggtcagagagattgtttctttgatgggaactgatcttttgttgagaaactctcttctactgactagaacccaaacggtttcttaaattgatggtttgcctgactaaaatagcattgttcttggcattgcttatctctagaggatgagtagctttataggactttatcttgattctcatatgatgttgcatttcttccaaagatctatcagattatggagtggatggtttgatcactgaatattataacttcttttacttgggatcgattgagtcaataggaaatattcccgaggctgtttacatttcattttcatactttaaccgtcctttttggatgaaaattttgccattgtcttttcttcttataaattttgatttaaaatactgagagttggaatctgccttctgttaaatttgctgtgtggtgaaacaggtttttaggtgccatcaagcaatacttgtgtcttt

SEQ ID NO: 82081 - DNA, 498 bp, Citrus sinensis
  Intron number 1 from transcript orange1.1g018707m (locus o range1.1g018568m.g) derived from phytozome v7.0 (chr-ID sc affold00001; pos 3639653 to 3640150)
tttgttaattcttggcgttatctcctcccaggtacgtgtgctagctttcttttcttttttttcacgttgaattgaatcctttacttagttgtttatgcatctatctttctctttttcttcgccttttgacctgtttaagtatggagagaatctggatcagatttcgattttatgcgaaacttgttcatctgatttgattgtatcctctatgttgtgggaatccgaaagttattattattattattgttgtggttgttttattattattattattattattattattgctttaattgctataaacacacggagagtgtatgccaagttcagacataatacagggaaaggtttgaataaaaagatgaggttgctgatgagtacacttaaagcagatcggatgatttagttgtatgttatagtatagtcaattagattacagatgaaatttcaacaactaacactagttttttttttttttactaatgggaactgtgtagc

SEQ ID NO: 82082 - DNA, 311 bp, Citrus sinensis
  Intron number 1 from transcript orange1.1g015759m (locus o range1.1g013727m.g) derived from phytozome v7.0 (chr-ID sc affold00052; pos 474391 to 474701 reverse strand)
gccgttcttcgttcgctgttttgtgttatttctctgtacgtctcaaaaaccattaactttacatcttatttgtccttttttctttttcttcttttggtttcttacgttttcaatttttgctgagaagacgtaaaagttaagtttttaaattccccgaattctaattaattgagcattgagctttaattaagtaaaaatttgattttttttctcctcaagtaattgaacacttagttgactttgcatatttttctcataagaaatattttatcttgtttatggatttgtttcgggaaggttctgttttgaaa

SEQ ID NO: 82083 - DNA, 479 bp, Citrus sinensis
  Intron number 1 from transcript orange1.1g040116m (locus o range1.1g040116m.g) derived from phytozome v7.0 (chr-ID sc affold00030; pos 1033938 to 1034416 reverse strand)
ccaatcgccgcaatcagatcccctttcctttccgagtatgaattatttcctttgaatcaaaactcaccttctgatctcgccttatttatcgattggtttacttttttacttacttctcttatgtgcttacaaatattagtgagaaaaaaaacttttttttttctttgctgtgaagataattttgtggtacattgtcaaatggttgtattattagacaccgcttaatttttaattttattcctttggtttttgcttgtgcttgttttttatgaacatgttccaatgatgctgagaagcctagttgtttatatatctggcttgaaccaaactttttgttctgtcattgaattttttggacaagtttacgtgttatgattgaagaaatgagttctcattcttcgataggttttattctgaagtcttattgctgctgttttgctacggattactgagtaaatttgcttgaatgcgcagggagg

SEQ ID NO: 82084 - DNA, 687 bp, Citrus sinensis
  Intron number 2 from transcript orange1.1g032646m (locus o range1.1g032651m.g) derived from phytozome v7.0 (chr-ID sc affold00326; pos 168865 to 169551 reverse strand)
acctttcagcaggttggtaaatctttccttaccaaaacaagtagttggtatgtatagtagttcaatcttacccatggtaccatacaaatgagactttcttgtaatcttctttaacgttgttagattccttagttgtgatctgtctgtctgcatgcatgtcaacctaggtgttggaaaagctttggttacattattagagattttagatgccttttagagtttggtacttgccactgttgtatttcctaaatgttactgtaatatggatggattgacttctaaaacgttgttaatataggtcagctgcttcctttagcataaggttcacataatgatgacatctgattcttgtatcaatgtggcttatgttcactttgtaatgttcaattattgtgtttagtcacttacttgtgttctctttgctgtggttataagaccttcttttggtaaaattggtagatggtcatacaatcataatatctactactggtgcgtagacactttctgttctggttagattgatttgtgtagtagaaacatacatttgctgctgaaagtgggtatcgttgacatttgttggtgcagcataatatcatgttgctattgtagctcactatgactattttatgaaccccgtttgattgttcttcgctgcaggtggaagcacagaagtattagctgatcctg

SEQ ID NO: 82085 - DNA, 954 bp, Citrus sinensis
  Intron number 1 from transcript orange1.1g032646m (locus o range1.1g032651m.g) derived from phytozome v7.0 (chr-ID sc affold00326; pos 169688 to 170641 reverse strand)
ttcgtaatcgtaagcgaagctcttcgttgtttcaggtacaaagcaaaattttttatgttcataaatatatgcattcgcttatctgttttaacttttagggttttggctcttttacccggaagcaaaaccctctaaaattttgttaattggcttttgtattttgctttgtttgcctaattatgagtatttaaatatgggttgttttagttatttcaaaatatattatattgaagctcaagacgtttgtattttattaagtattgtaaatcttataattctatgaaaaacgaaaatttgactttcttttagtacttaggtttgaagatgtaagggtgtgttggggattgagttgctgtggcatttaatccacataggctgttgaatggaatcattaattttatgggtacatgtgtgtgcaacattagctattattgaatccttttagttaatatgctttcgaggttaagttgcagcattgtctcagaagctgagggaaagcagcctggtactctctgtggtggtttattctgtcccttgcacgcactgagtagcactacttgcccggaagtcagactatggtttggttcaccgcctaatctaatcatacgaaaactatgaacatacctgaagggttagaaataaaattgggaggtttactgaaaatttggttcccgataggaaaatggattttgaaaagctaggatactgttgtagtctttgctatgatttgggtataatcagataggaatgtaggagaatcagccttttcatttcttgtttttaaaacggtcttaaaattgtatcccttttttcttttcttttcttttttttgggtgaaaattactgactgaaagcatttgtatatatattttgttttcaaaattgaatcattggatctggattgcttgtcaaataggccctgaagtattcctatgtttgttcttcataggcaag

SEQ ID NO: 82086 - DNA, 842 bp, Citrus sinensis
  Intron number 1 from transcript orange1.1g010441m (locus o range1.1g010441m.g) derived from phytozome v7.0 (chr-ID sc affold00001; pos 1082930 to 1083771 reverse strand)
aggtggcgctacaaccttcaaatcagctactgttggtgagttttatcaatctcttcattacctgctaacgacgttttaaccatattaattccatatattcattttgattggtcaaaacaaaaaataacaactttgggctaataaaatcaattaaagaacatatatagtaaacggaagcgctataattgcctgacctagtccagttcagatgaatgcatggactccatccaacattgttttatttattacgaaacattattattgtaaacgtactaaaaacagggacacatcaaaatgaagagctttaaaaaagaggggggaaaaaagagatgctaagtaaaagttatagtaattgagatgtacatagattttgataagtcaaaaactgatcacgaagtagacgtgtttaattttgcatgttacctaattgaatatgtctatcacactgggaccatgcattatagtttcagagaaatggcgatcaatttgcttaggtatagtttgctttaaaagcaagtaagtacatcaattatccaattaaaaattgtatcaagtcttggggcaaggtcgattattatgattgttgctattatttttttaaacttaatttcgttgacaataaataacaataatatgattttacgcaaaatcaaaggttatttcaagactcagccattaagtcaaaaccattttaacttatgcaaaatctggaatttgataagagccccatggagatggtgtaagtttgaatgaaatgcagcagttactttaaactaaaataattacatgaggaatttcatttgacagctgttgttggagataacttcattgctcgtgacata

SEQ ID NO: 82087 - DNA, 993 bp, Citrus sinensis
  Intron number 2 from transcript orange1.1g031502m (locus o range1.1g031502m.g) derived from phytozome v7.0 (chr-ID sc affold07080; pos 808 to 1800)
gaaaggcttggggaattgttcataaagacggttagtctatgtgatttgtgatttcttttaactgattttatctagcattttggaattaaaattgccacttgaaattggaaaaaaaaaagtatttgttagcataatcatttgtttttcgtgtctcattgttatggattttgtatatttctttgggtgaagaagggtgatctactggacaaatattttctttgagcatttttaacatctttgagcgaactgattagtttgggaagctctcacaatacaaaaacgctcagtgggttagggacagtttttctaaattgatttctgtgcgaaataaatgaacttattttgctgttgagaattcggtttagtttcatgcatcggagttgtttcttccttcacatcctaatttgtggttgttgggggactattttgtgactaatcatttgaaaatttagtggcaaagaaattcaaggaatttttgttgctttaagaaattgaaattgtgagaacttaagctgcctaagatttatttatgttggactgcctttgatgattgcttttgtgaggggtgaattgccagttgagggtatgaaacagaataggttctagtgggaatcactgacgcaaaataggtggttactaataagaatttgtcagagttgcatttccgtaagtagattaagtagctagaacagagttttcatacaatatgcctttaatacacgtactcacttctcatagaacatatctaatgttcgaggtcatagttgattttttcgatctgcaattaacggccagtgggagctgcttcttaagattggaccattttccctcattttagtcattcttgaaattgtatgcactgctaaaattctgtattatagttactgtgtatttagtttctaaatggtgatgttattttcatataaatgaagattgatgttgctggtgataaatgcaggcctaccagccactgacgctcccaggaaaataagt

SEQ ID NO: 82088 - DNA, 633 bp, Citrus sinensis
  Intron number 1 from transcript orange1.1g046929m (locus o range1.1g046929m.g) derived from phytozome v7.0 (chr-ID sc affold00330; pos 125854 to 126486 reverse strand)
gggtatgcttttagtttttcaggcactggaacccttggccagttttttatctttattatccttgtggaaattttttcattggtttgatctccttacattttgtattgatgctgatgactatcatcacttgatgaatgggttaaaaactcagggctcatatgatatgagtgacagttaggcaccagagtcttcattgctgatgtttggcctagcgaatattataccattgatcagtttgaaactttatcaaaatttgcaaattttttctttgtcagctatgcaatagaatcgacatatgttctgttctgattgtagtgtcctttgatacctttgaattttaaaatcaatttctgggttaaaggaaaaccctgaaggagaatttaattatgacaagaaaagctccttagatgtcctgttacctgtagaaaggaatgttgctttgttttacttgtaatgccatagattaaactcagccttttagcttgtgttgtatttgtacttctgcattgtgatcaagacaggatgtatgggagattagtgtaaattattagatttttcattgattgtgaccgccgtactatctgatacaatgttatccattctttgtttgctgtctccctatgcttgtgcagt

SEQ ID NO: 82089 - DNA, 870 bp, Citrus sinensis
  Intron number 2 from transcript orange1.1g027611m (locus o range1.1g027625m.g) derived from phytozome v7.0 (chr-ID sc affold00111; pos 59916 to 60785 reverse strand)
gaggtgaaatatcacataattaataacaatcttatatagatcaactgtttttgcatgtgtgtgtgtgtgtgtgttactgatgaaaatgttgcatcaaagtctttaatagaattggtttacatatttaataattttgtattgcatgatttgattctggtgatcaaatccgcatgtgtctttcggctgtatttgcttttttaattgaacggtctaagtaatcatagtacttgttgttaattggtttacattctcataagagtgattgtaaattacagatcaggtcagatgatttatatgttatagagagcggtataattgttagatgagggcctgccaaaactaagatatataatgtcctgcagtcctttctacacctttttccccccttgaagcgccttttttttgtttttaatgcacataaagtttagaagaaagcaatcgtatggtccattttaccgttccattcatccaatactatcattttgcttttgatatagaaaaagtagattgtcaacttcaaatgccaaacaagcattctcaagaatctaaattgagtatctatctttattgcaattgctaggtgtgtttcttttcttttacgatcttttcattgtgtcgtggactggtttacacttcaaaactatctccgtatattctcatttgcaatagctatctatttcttcttactgctttggacatttatttattagatgatttattctctcatgacaatcaacttagcttttgtatattctcttcccctgtgtttaattgttgaatctgttgtttggatcattttttttttcttacaatttcatgcattcttgatttgcagagctgaaaaagcagaaactttctgaaattaaaact

SEQ ID NO: 82090 - DNA, 397 bp, Citrus sinensis
  Intron number 1 from transcript orange1.1g028495m (locus o range1.1g028495m.g) derived from phytozome v7.0 (chr-ID sc affold00075; pos 365693 to 366089 reverse strand)
gataatcgattcccgtctccgtcttcgatcacttggtcagctctcatcaccacttcccggttctgcttatatttcaatattttcttagatccatctttttttttaattatcaaatttttaattttattattgaattttctggaggtaattattagatatttactacgtctgctggatttcaattcatgatactcatcttcactggaattttctttatttctttgttttgttttttttttgggtcttaaattaatataaatcttgaagctctgtttctgaagatccttaaatcctttgatatgagtttggtgcaaacatgatggacattgtgagaattgattgtatattttattttgttttaggctcacatataaataataatactacacgtcgtgga

SEQ ID NO: 82091 - DNA, 693 bp, Citrus sinensis
  Intron number 2 from transcript orange1.1g019769m (locus o range1.1g012298m.g) derived from phytozome v7.0 (chr-ID sc affold00001; pos 4220147 to 4220839 reverse strand)
tggagaatcaggtcactttactcaggtattgttccttttttttcctgcaaatatagtgttatatgttagaaaatgttatgaattgccttcacacgaagctatgagcgtagatacattcatgtatgagtaattgattcagtaactagtcaatggttatcgttttgctgcatgatacgctaccgtaatttctaggctcttacgatttgcacaatactaggtctacaggcctattgacctgagtttagaatttgagattggtgcctgaccagctgtttaattacttcattttaatgagcctgttttgatataaggatgccattgaggtcctgcgtgtattagtttctttctgtactaatctgatttaagacttatttgattttaatctaataatcatttgtggacattgataagatccttccatacggcccctctcctctccactgcatcacaatctcaatatcaaaccccatatatcaaataacgacagtggcacacatgtgcaaaccaacatttgcagtctcaaggaggttggtgaggggtcagagggaagaggttttcattcttttaaccacgatatttttctaagatattattttatttatttatttatttatttttaatgggattatgcattccttgctacctggtacttatataggggtgcccctcgactctcggagcaaatcgcaagtc

SEQ ID NO: 82092 - DNA, 585 bp, Citrus sinensis
  Intron number 1 from transcript orange1.1g019769m (locus o range1.1g012298m.g) derived from phytozome v7.0 (chr-ID sc affold00001; pos 4221118 to 4221702 reverse strand)
cctctgctccccgctgcctgttcggccatcttcaggtatgaaattctttttttacttccttctccgtttgtttacgaatccctacttactctgatttgaatttttatttgctgttggttggatttaaatttagtcattgtcgaacatgtaagctaacgacttcattttttgaaattagtctcacttttgagtttgatggcataattatgatatttcgccccaaagttcttcgcttttactgtcagttttcttttgcagttacgcagacaaacttagattaaccggatatgttttttactcgtcaacctgcaagtcaagagttcgtcaatttgcatttatttatttatttaattttaaaaaaaaattattgactaaggaaaaattttctgcggaggtctgcatttaaaaccgtttctagtagcaagtttagctcgatgttttaaggatttacacaaaattttaaccatgatttcatatgccttttggttgaactttgtttgtactttcgtttccttcttcaatttcactcattgtagtgatttatgttggtactgcaggtctaatttatagttaactttctttcac

SEQ ID NO: 82093 - DNA, 654 bp, Citrus sinensis
  Intron number 1 from transcript orange1.1g023374m (locus o range1.1g023374m.g) derived from phytozome v7.0 (chr-ID sc affold00111; pos 414218 to 414871 reverse strand)
gtcaccacctgcggcggcaggaattgcaattacaggtgcccccgccagccaaaacattcatcaagatttcattgttttttttttcaagtacgggcggtttgtttatcaaatcaattgaatccggaaaattgctttctgctagattttgaggatcgattaagcttcatttctggacgtgtattggttgtatgtatgaatcttcatgagcaattttcaattagttttctgtattgaccttggttgcgagaattaatttaattagggtttttacattttttttttttgtctcttttagcagtatatatgttcgacgaattcctcgtggtgattgtgcattagtgacttgaacaatatgacgatgggcaatttgtagtttgtccctttggtggaactcgtagtgtttctttacccaccattgcgttttcttataccttgtatgtgcgttatcttctatcttgttggttttgattgttaagtttatccactttggcatgattggtgagtttgataagcagcgtgccgtattttgcttcctgttgactgattgagattttgatcaagtgttcagaactttcttctgtatttattggttgatagaatggtagattcaccttttgaagtcattccgttgtcactaaacatatttatgtgcag

SEQ ID NO: 82094 - DNA, 232 bp, Citrus sinensis
  Intron number 1 from transcript orange1.1g003116m (locus o range1.1g001116m.g) derived from phytozome v7.0 (chr-ID sc affold00578; pos 75642 to 75873)
acaaaatctttcagaatcgtaatatctcccttaaaatgtatttactttgaatgtccataatataagatattcttttgtatattatattctgattttttgatcttgtgaaaagcaatgccttgcttactaagataagaaagttttataattctgacactctatgagtttttttgctcactattctgagctcttcaattttgtaatccattattggttttattacagggaattc

SEQ ID NO: 82095 - DNA, 602 bp, Citrus sinensis
  Intron number 2 from transcript orange1.1g013027m (locus o range1.1g013027m.g) derived from phytozome v7.0 (chr-ID sc affold00001; pos 3546558 to 3547159 reverse strand)
aatatcactccctcaacgcttcttcttatccggtattctttttttctttttttttcttctccctctctatcttttctctttaattattattattttctttttgtttttggagttttggcatatgataggtagaatcccctgaattttcgttgtctgttgagtgtaagttgtggtggtctcctgagcccaacccaactttgatctacatattccatcgaatcaatcgattgtctgtgttgcttacctgttcttgattgattgtgtatataactggttgaagtttgagagtgattagaataatcttgcctttattggagacataattgtttgattgatgacgcaggcagcagattactagttcatttcctttgtgtgtttttcttcacttagcacattttgtggacaagtatgcttttggggaaacagctctgttctgcttgaatttagtataggaattagattatgcgtgcatgttttgtattccactagtaaactggagcattctgatgaaaatttgcaatataatgacttttttcccccctttttcctctaatctgacttgtatagaaggaatttgtcctcttccgtttgaagaaaaaatc

SEQ ID NO: 82096 - DNA, 810 bp, Citrus sinensis
  Intron number 1 from transcript orange1.1g005574m (locus o range1.1g005574m.g) derived from phytozome v7.0 (chr-ID sc affold00030; pos 481233 to 482042)
aaattgcgtggccaggtttagttcttgttcttttacactttataaaatctaagggatgatctttgtttaattcctgtggttttttttttttcctttgttgatgctgtcatgttgctcaaatactgaaatgtcattggtgaattcatggaatggtgaacagaattactctagtatattattatatgttgtgatatctgaagaatcgcactttatgctttgtggctgagataagcaaattttttttttagaattttgtcattagtatttaattatgagaatgcatctttaagaaatcacgtttagttcattttgtgataatatgcactgtacttccagttaatttgggagtgattttgctgctgccaagaaagctattgagtaataaaatttcttgatggcatttggccggaaaagtaatgcattttggagaagcactccatagatgagtgctttgtaacatacacctctattgaaaatgctttatgtgaaagcaagccataaagatatgctgcttgtctcatctgtaccaggctccctaatgtttgtggattagtgaagaaaaaacatgtttaccacaagataaaatgagaggtagccgcctgatagtctaatcttttatgtttcacaactaagattgaattgttgccaggatcactcaaatgcaagtcttaaatttttatttactgatgacttttcattctgtaacctttggcatgattatttgttttggggtttgatattttttctacttctttgttgtttctttaatgttcagatagctgatcagctaaagagccgtttctcctcagg

SEQ ID NO: 82097 - DNA, 1014 bp, Citrus sinensis
  Intron number 1 from transcript orange1.1g030189m (locus o range1.1g030189m.g) derived from phytozome v7.0 (chr-ID sc affold00177; pos 147391 to 148404)
agcctctccccgtcgttgctgttgcgccggtgaaggtgagaactgagttgagttcaatttttgtgttttgtattttgtattttttaatagcaaaatacaagcttcttgattggatttagccaaattttctgcactcattgatttaacaaaaacagaatttgatgatctgtcgtcactattattgtgagaagacggaggactaccgttggttggaacttcaagtgactttgaattattaatttgatatctgcttgtgctgaatttgtggtattggtctcttcattttcggttagcaaaagtggagtttgcatgacacaagttttttttgggctcatttgaggttctctactagtaatgcaattttcattagagatgcaacaaggccgtgaggaatgtttatttgatcatttaatgcaccaactctggcttgtctgtctttaacacttataggtactgtttcaaaatgagacctactcataagcaacattgttaccttttttaacaaaagaaaagcacgcttcatcaaaaattacatgtctcgtaatgaatatactgaacagaatcagatcagctgatgtatttgcttaatttaattgagaagattgcttgtgtgttatggtggagtttgtcaattgtcaatgcaatattgcaaacttgttggttttttttttttgttttgatggatttgtaatttgtgatagattttaaaattatgtgcaagttttttgtgtagttagtagttcatacatgtcaaaactgtaaaatccagtaaaagcaggtgaaaattgtaaaattgctgtaaccgaaccaaaatgaaccaaaataaacaacttgtggcatcaagacacatcatttgctatttacatttgacgaagcacagcaaattgtctctcattctctgccatttttgttttgctttctcatattgaaactaatatttgcagaaagttatagagattttttttttttttttgagcagtgtgttcattcaattcattgctttttattctgaac

SEQ ID NO: 82098 - DNA, 884 bp, Citrus sinensis
  Intron number 3 from transcript orange1.1g030189m (locus o range1.1g030189m.g) derived from phytozome v7.0 (chr-ID sc affold00177; pos 148754 to 149637)
ttatacaaagaactcttgctttatactcgtgagtattttcttgcttgtttctttcttttattgtgaattttgcagttttatgttttcattgtgaaatgggttctgagtattttggtcaaagtagatttgataacacattcagttacttgtaagtttgcgtaaagagtatcaaattctgaatattgtgttttacttgttttcattttatgaaaattaattgtagcttgcacacatctgtgtttctttgtaaattgatcatgtctttgctggggttacctttgatgattctcatctggattcaagtttttgtcagtttgtgtagctttttggtatttgctatcttgatcttctctgtgcattgattggataatagagaacctgttataatggtgtcatttcatttttgcacctgtgtatcacttggaaattgattgaacaatacgtttttttttttttggaatctattgaacaatacgttatttggtcatgctttgtacaaacttgggttgttcattttgaagtttggatttctttgatctacacagtaggtatcactcacaggttaagggaaacaaacttgtttttttcctagttgctttaggaggttgctgttggttttagaatagacttgggtggaagccttcatagtccttgcattgatcacaatgaaatatttaagtctgagcttgcttcacaatgactatcttttcgttctgcaagcatatattgatcaattatatcggtatcgcattacacctcaaggaaatgaatgtgaatcttaagcgctctaaactgttatttatccactggtaacaaggatgctgatgcttgaaagtactgaatttgatatctcaacagcattgaagaggttgcctttagtttca

SEQ ID NO: 82099 - DNA, 798 bp, Citrus sinensis
  Intron number 2 from transcript orange1.1g028854m (locus o range1.1g028854m.g) derived from phytozome v7.0 (chr-ID sc affold00055; pos 178497 to 179294 reverse strand)
cctctggtacgcgatgcttagctgctgccgtgcttttattctgttgcctatatataattgtgttgtgtttgctaaaattcttgtgagtcaaacaaagttgtttcgatggtcatttgagtttgccgcaagaaatactgtttagcgctcttcatatgttccaaatggtattaaagtaagattggatgagatactagttatttgtgtcgaagaagatatatttcttaggacctactttgcaagggaagttgcactaggctccaattagtattgtgatatggtggcttctaagctctaagtctaaccagcaagtgaaagtcgatggatttttggttaataattaatttcaattgagaaagttagttttgaccaattagtaatgcttatacagattttttatcgaacatctgtaagggaatatcacattagcttctaagccacagttgttaagtgttaaccaaacactcttaaaaacttggccttggaagcacggtactagacagcaataccaaaatgtagcccttgcttgctgatgctctgcagcttcagtttctcatgtgtagctttgtggcattttgatcccactttgggcattgttgggtaccacaagtgatcttaagctttctacctgttgctaggcggtgtttttgaaatgcttgaaatgcttggcttgagacattggtactctttaattttccatttgggttataatgtggtgttatttttgggatgtgatttagtttctgtcctatctgataagtcactgatctgtaagttgatttatctcacagctctacatcc

SEQ ID NO: 82100 - DNA, 1037 bp, Citrus sinensis
  Intron number 1 from transcript orange1.1g001124m (locus o range1.1g001092m.g) derived from phytozome v7.0 (chr-ID sc affold00333; pos 113556 to 114592 reverse strand)
catcgcaccggctgctagagacagtgagctatagagttcgttttttatttattttttgttaatttttgtccttaattgaattattcaaattaattacttagttgagttgtgattaatactttaatagtttaatttaatagattttgtagtagatagtttaatttgtttcttccattcggcattcatactatttatttgatttgatttctgtcatgctgttgttgctaatgaaattggacgcagataattgatgcactgattagaatatattttatgagatggtaacagggttgatgcatttttttcactctgttaatataaagaataatatagaagtgtgtgttgttgtggagttttggcgaatgtcaatggcaatggaactttggtgttgtttttttttgggataatgtgatattgtgaacttttggtgttttattgttttattgttttgttattatggatttataatttgtagtgggtatttacctagtgttacactgtagtttgtgcagtgaaaagcaaaaactatatggttcaattaatacagatgaagagcaaaaattcagttcttacaggtgaaagatgcccaaactgaatctacagaaccaaacagaaatttagagccaaaccaagccaaaatatttcggtttggttcggttcggctctgccctaaattttggttccgcttgagctcatattatttggaaccaattggttttggtttgattcggtttgggaccagaaccgaatctaaactgcgcactcctatgtccattgctgtttcattttaagtaaatgaatggaatcatgaaagaaatagcattagtaaaaatccctaagatattgctagttctgtgtgtcatccagcttagggccatagagttggattgcatgtttaattcatcaatggaatgtgaaaatttgtagttttagatatgaaaatgcattattattattgttattaagttatcttatttgattttgatgcttgtttggtgacagaagctaagaagagtaaaagctctagcaaatcagtt

SEQ ID NO: 82101 - DNA, 775 bp, Citrus sinensis
  Intron number 1 from transcript orange1.1g008075m (locus o range1.1g008077m.g) derived from phytozome v7.0 (chr-ID sc affold00008; pos 958789 to 959563)
atttgatccatcttttggggtttacgctttaaaaggtatgtgatataagacgagatattataaaacagaaaaaaaatcttttcaattatgtttctgtttctttttattttaaatttcgcattgactataaactctttaatctaaatgactaattcaatgcgtttgtttcttttattgtggcatttgtgtattggggggatttaatataggttttgatgtttagatgacggctctggtttcttattaatttttgtttagaggaaaaacgtatgtttagcagaaagtttcacaattccatcaaatccaatttactgattcaaaaaaaaataaaaggagagagaaaggtagcaagcttattcatagtccttttccatcagtgactgaatggagagtagctaattgtggtgaatcttgagatgccattgaatataattacttataatacgtaggcctccttaaatagtcagtgatgagggttataccattgctgcagactggcaaaaacaggtggctgtatgagttacgttacagcttttgtctgcaaagaggctgataattttgataatgacttcgagagcaatcttgcggaggaagaatttcctctgcaattatctaaatcgacctacttacttgactcggggattgcctagttttgagtatgggcacactactgcgtctaattactttgaacgatcaagcttggttggattttcaattcattcatctgaagatactgatggtggacaggaaggaggtttatctcgagtcaccaagg

SEQ ID NO: 82102 - DNA, 706 bp, Citrus sinensis
  Intron number 1 from transcript orange1.1g015118m (locus o range1.1g007464m.g) derived from phytozome v7.0 (chr-ID sc affold00001; pos 2596499 to 2597204)
tgttagactatttctctcactctctgcgactgcaggtattttgtttatttttcatttccatgaaagcgacgttgttcttgttgatcagctttccaagttcttgaaatgaaatttttcctcttccgtattctttttaagaaatcagctttctgtttgttgtaaatttgtaataaacagtcatttgttgtatgcaccgagtatatttattcgctgttattttattatatgatctttgctgaaagttttttaaaattcgagtgtaatctccaagctctggagttcagtttgatttcgagctttcagcggccttttttttttttttttataaattttccagcaactgcgtccatttttaattgttcaaattcaattacctttcataagaataattttcgtacaaagttaaagagagttgacagagttgactatagctcaataaatactaaaacttcaaagcttcatttcctcttcgtcgtcggttttgaaaacaatcggctatgcgattgactcttggctcggtgaggctttttattttttttccccttttttcctctcaaaatttcaacctcatccatccatttatagcaaatttggcaatcaatctctttttcagcacgaggagcttatatatatgtatatatatatatatttttttaaaatatgtaattaatctctctgattggtattttgtttgctgcagctgaaa

SEQ ID NO: 82103 - DNA, 525 bp, Citrus sinensis
  Intron number 4 from transcript orange1.1g006814m (locus o range1.1g004713m.g) derived from phytozome v7.0 (chr-ID sc affold00012; pos 850759 to 851283 reverse strand)
gttgttagcgaccaggctgtaaattttcaaaataagtaatgacctattgtgcatttaagcttactaccgtttatattagatctttaattctggcttctctctctctctgtccactcacacacacagagagacagagaacagaggtattctgagtgtatttcctggtgtacttactcatgacttgatcaataaacttgaattttgattgtgctaataatttgaggttatttataaaactatctaccttgggataatattctaattctgagtttgtatgtttttcttcttccatctatgttaaattggttaattagcctgagttttcctttaaatattttggtattaaaatttttctttgcttacaaaaccatataattaagcttattatagttgcatcatgtctattcatggactgagagatgaacactcacatgtacacgtatgcatctacttattacaaaatcatatgtatattggaaaatattattcagttcgtggtacatgctattcttgacagatttggtc

SEQ ID NO: 82104 - DNA, 452 bp, Citrus sinensis
  Intron number 4 from transcript orange1.1g006876m (locus o range1.1g006876m.g) derived from phytozome v7.0 (chr-ID sc affold00021; pos 1467515 to 1467966)
ggtcagaggtaaaataaccaattctcaatttctttcattttaagaacttttgtagttgtgcatgtgttttgatgtttgcaccctaaacggcttcagtttttagtatgttattctaattgttgtctatggcatgcactgtagtttactcggttggttgtttcttataatcattttaaatttatgctgaggtgaccttttcattatggttgttgattcttttcttgatgcatgtgccatttagttgtttttatgttgagtacaaatagttgcatggatgatacgttgctctgtgttcttttttttttcatgcaatgtttttctagtggcatgatttttactagttactttgtcatgcacggctaaggtttagcttggttcattcgcttgaccttttcctgatttaatgttcatttgaggacagagcagattgatcatcctgtcctgatcacaga

SEQ ID NO: 82105 - DNA, 513 bp, Citrus sinensis
  Intron number 1 from transcript orange1.1g014787m (locus o range1.1g013099m.g) derived from phytozome v7.0 (chr-ID sc affold00788; pos 36142 to 36654 reverse strand)
ggagtatcaaagagaagctaacagattaattagaggtgagtggttatcttttcagtagttgtcaggacctatatgatacaaatggacgaaatatgcccttatttgagaaaacttgaaaagttcaagggtgcaaatgttattttattggagcacttgttacttaattccgtgccattctgattgaatttggaatttgcaaaagtctcagcttctgcctctgtcgtaattcaatagaataattaagcaccgtaaatttaggtttgccctaaattataaaaaagataatgaattcttggtcttgttagttgcacaaacagacttcttttacagttccaattgcaattgcaattgcaatatgttatgtcagataattatttatcttaattttcttgcaagtgaaatgtgacctttttcatattctttactttttctgttcatgttttcttctttgagtgcaacttatcaatttgatttccagcgatcattgatcaaagaacccgtggacaggacatt

SEQ ID NO: 82106 - DNA, 536 bp, Citrus sinensis
  Intron number 1 from transcript orange1.1g004490m (locus o range1.1g004488m.g) derived from phytozome v7.0 (chr-ID sc affold00021; pos 1480536 to 1481071 reverse strand)
tccactaccctctctctctctcctcagtccatcaggtactaactacttcttcatctttaaaattatctttaaagctagaggtctcttttttatgtgacttacgattcgcgggttgcaaatttcttgtttctgtattaatagtgactgttgtttttggattcgtctcatttttcctgttcaatttgtacttcttccaagttcgttttgcttttcaaagattctttttttttttctttttttccttttgttctttgtttggtttaggtttctgatttgatgtttgaggaagctagaacttgagaagctatttcatgttgagaagctataaaagaagtgtggaggatcagaaagttggattttttgagtttttggtttctgggttgctgtaaatttgtgattcatataagtgcttttcgatatagagtggtgctgttcctggaagttctagtttttgctttttgtgcttatcattattgaagttttttgttttgggggggttttggctattgtttaagtggattgtttttatagcatag

SEQ ID NO: 82107 - DNA, 490 bp, Citrus sinensis
  Intron number 3 from transcript orange1.1g038745m (locus o range1.1g038745m.g) derived from phytozome v7.0 (chr-ID sc affold00187; pos 265115 to 265604 reverse strand)
aattgaataaagcccttgaggtatgtggtcaatttgaacccaattgtctggaacaacacctatcttaatcaaatctactttatggttctgagagttgaggaggaagattgctaatacaaaggttacatgcagtttcatgtagagttttctttcaattgcataattcgggttccatcttgatttcaaatgcttaaacttcaccatatatgtcgcttctgaatgtaaatcgggccctttttagaggcctttgtcctagtggaaatactaaccagcatgaaaatccgaattgcttatttttttgtaattttagctgccctattttgtgtgcatgtgtcattcttgatacagaaatgtgactgattcctgtctcatggaattgatccgagaagaaaataagtaatctttgtttatgttctcatttgctgcctcaaattttcttcagtatgtgcatgtaggttactgtaaattctggtggagttgttttctttgc

SEQ ID NO: 82108 - DNA, 436 bp, Citrus sinensis
  Intron number 2 from transcript orange1.1g014802m (locus o range1.1g009713m.g) derived from phytozome v7.0 (chr-ID sc affold00583; pos 37830 to 38265)
tttcgatacgattctatcaagaaacacttttatcagtacgtttatgcttatgcagtttttcctatttattatcacctgctatgtattgcatttttaaaatttttgtaaagcgagcctatgtgcatgtttgatttgcaattcagatacacttctttagctctgaaagcaaatgatgaagaagaaaaatttttaaaataaaaaatgattatttttgctgattctgttcgagactctatgtaagattggatactaatttttgaagagttttctaaatcagagaccaaatgtgtgtaatgattcagattctagttcaggttgcaaaattgtgtaattgtaaatttggaaattgaggagaagagaaggaagatgatataatggaatttaaattgtattagtgatttatggcattgaagttagtgttgttttgattttaggc

SEQ ID NO: 82109 - DNA, 911 bp, Citrus sinensis
  Intron number 2 from transcript orange1.1g016522m (locus o range1.1g016458m.g) derived from phytozome v7.0 (chr-ID sc affold00250; pos 165844 to 166754)
tttgttgtaggaccttgcaaggccacgctggcaaggtctcttttcttcccccttcaaaaaagaaaatcacatgtgtatttttatttatttagattttattttgactaatttaaataaaatttataagaattgaagaaattgtaggtgatcatcagtagatgtattttgtaactaatggagtagagatacgaaattctcagagtaaagagtaaaaatgtggtgaggatttagaacttaaatattaaaaatagaaggaatatttgtagcttgacatgataagagatgcaataatggcttttgattgtgtttgttgagttttcaattttggctattgggttgaacagaatggaacaactgagggtactttgatggcaaggagtaggtgaaaagaaggaaatactgcaattgttatgattacttttcagggtgaatgctttatcagcttccttgcatgttgatattaagatgtgtcaattgtgatcagctttaacagatcttatagtttaatgatagttgagagatgaaaaaaaaagggttcttctgttctggtgtgtatgattctttaggaatggaagtgaattcagctttgtattgctgaaacctttgttttactaacctttccacttacaaatttgtgagaaaagaagtgtagctttagagataatgacgatagttaagtgaatggggctctatagcctctttaagcagaatatattatggactttattggtgggaggtcgagacaaattatgttaaccaatgagcaatttgaggctgtagctgacaaagttactaaatatccggatagttttcaattacttgtatttttcttctatatggcggggtgaagtaaaattttcgttttttgaatctcaggtatattcattggactggacttctgaaaggaatcg

SEQ ID NO: 82110 - DNA, 736 bp, Citrus sinensis
  Intron number 3 from transcript orange1.1g017314m (locus o range1.1g010470m.g) derived from phytozome v7.0 (chr-ID sc affold00020; pos 294714 to 295449 reverse strand)
aggtatttggtactcttgtatttgttgaactgcggacttggaattttgtaatggctctgctaaggagattagataccttagatttggtggggaaaaatgtcatgtaattggtctcttagctgatatctataagttgctttagtttggtgtatggttggtcatatttgtgcataaaagacctagacaatatgtagcatgcatgctattttcactaccaaacttgcgagcaagatttatactgaacagtcttgagttggatgttacagaggagatggctgtctttactagtggctgtcgtcttggcctcctttttattttacttgacatgattctgaggccatcttctttaatttaatgaatacaagttattagtagccaatagaattgcaaagtagtttatgaatatttgagaagcacaaaatatagttggtgaaaaaattcaaatgagcaataatgtcacttaaaatgttgatgcatcctttagtggctgaattttgtaccttgttttgaaagtgataggattttctattagcttctatcagtcttcatgttaaattttgatgcctatgaaagaattgcgaaagcattgctgttttagaattggagttcagagtttaatgagagtggatttttcccatttattctgaaagtgtgtagattcaaattcattatttcctttttttgcttaatgtgtttttcttaatttaacatgaattcctgtcacttctttaggcaa

SEQ ID NO: 82111 - DNA, 747 bp, Citrus sinensis
  Intron number 3 from transcript orange1.1g043977m (locus o range1.1g043977m.g) derived from phytozome v7.0 (chr-ID sc affold00001; pos 1216736 to 1217482)
cagtatattttatccagccatcaaaagagaagtactttcattttttttctttttttctcctttttttcatgtttttggtcttttcattgttttagtgtcatttccttaattttcttttgggccaatttaagcttcaactaaatcaaaagtctaaaattcttttgtcacaatctttcttgtgcaaaattgctaattttcagccttgatctatggttaattgaagtgactaagaggctcaacagttttatattacatggttatttgtgaaatttggaaatgatttagtttctttaggtacgtggtgtatgtaactttgaagctgcaaactaggaatctgttgaatatattttttggaactaaagagagttcccatgtgtttgtcacatttaccaagatgatttcttttcttgtttagggcagtgttagtggaaagcttatgtcaatctcaaataaataaatatggtttatggctttaggtatcatgtacattggaataatatataaaaccaactggtgtcatgttggtagctgcttcacaaatgtcatttataatggtggaggatatattttcgtcccctgtctatacatttacagtattgtagttttttttttcctgcaaatctcctattttactagaattcattctccgcaccatcttgccttgcaagctctgtcggatattttttccactccttagaaaacctagaaccattttaaccatatctgttgctagcatgcagtgtggta

SEQ ID NO: 82112 - DNA, 738 bp, Citrus sinensis
  Intron number 1 from transcript orange1.1g020630m (locus o range1.1g020630m.g) derived from phytozome v7.0 (chr-ID sc affold06135; pos 1593 to 2330 reverse strand)
acacggccgatcggacggcatacgttgctatctaggtacgtgtatatgctgatcgcttggtcgtgtcaagtttacggatgaaatgtgagtaacaactaaaaaatgataatacacattaattcatcgtgttaatggagacttcgatgaatttgaattgcatattttgatattacggtcgatcaatggaaaagaaacacagtatcgttgttgaattaattatgattttttttggttgatgaagaagaaagataggaagaaatttcactttattgccatctttggacaatcgaaaaactatttggatttgggtttgtaatggatagcgtaaaatgtaattttagagcggtaaatatttatataaactgatgtgatataataataattgattgagagaaaatataaataatttatataaaagatgtggatcatataaagtttttagttcaaccaattataaaatatcgcattaatttatgcaaattaaattttgtggttatatcattatttaaaataaaatgtttgtattcttgtatttcaatttacatcaaaataaaatatagattagattctatctaagcatacataggagcgaaggaaatttttagaagaagttttttagagttgattttttttttgggggtaataataaagggaatttaaatatgaaaaaggaaaaaagaaatactcatcaaacaagtcccttaagctgtacgccgtatgatggaaatcgtaggtgac

SEQ ID NO: 82113 - DNA, 939 bp, Citrus sinensis
  Intron number 1 from transcript orange1.1g002508m (locus o range1.1g002109m.g) derived from phytozome v7.0 (chr-ID sc affold00192; pos 167737 to 168675)
ggttttggtcgcagtaggtctcctagtagtaacaggtatgttcttttatctgcattttgatttaatcttttaatttgatgtgaaatattatattttgatgtgtttgcaaatatagctctatacaccctagaaatatgagctgtactattggagtgtaattggtggcaatgtttgaaaatctaattctggaatgtggtgttacgaaacaaaaaccatgtcattgtatattgtaagtaaaatgttgctagtctgcaatatatttacataaaggtggcatttgcaattttttcgtagtgttttactcttggaatgtgcttgctgcgacaagattagtgttattttgttcaatgtagtaaaatgtgtcctagcaagtcgtaaaagcccctgcagacctaggaagccatattgacgccaaattatgttgtttttctgtaagacattgcagaggcattctatctttgggcagtgagccagcaactttgttttgtaggagaattgagtgtttttagggctaagttgtcacctcaatttgttttttctacagcaaaattcagtaattggaatgatatgagatttatgtaaatcctgattggaaatctaacagaggatgttctaatcgaagaaaataagatttcagctggacaagagacagaaattcagctgagggttttgacaagtcagtgttgtagtttcactttcatgtatagatgtgggaaatgcaattaacataaaaatgtgacagaatttgtttttggttttttcccgcttttctttttcatattcaactttataccacccttataatagaaagtatatgtgattcagtatgacatgatgccctttgtgttatagtttctgcctacgaattaatatatgcagctcctatctattttcccttgcacaggtcaacatcagagtccagtcagtctcaaaaaccac

SEQ ID NO: 82114 - DNA, 510 bp, Citrus sinensis
  Intron number 3 from transcript orange1.1g021951m (locus o range1.1g015972m.g) derived from phytozome v7.0 (chr-ID sc affold00166; pos 308922 to 309431)
ctgccaaaggcatcaaatttatttgtgcatgtacggtataaaatgtattaattttaaaacaatgtttataagttgcagatataatcgaatttcccttttacttgattttaattatttgtttatattactactatttattaaatatgttttttttataggatattaatatgttattatggttgaaataaactaaaaagttagaaaacaagatgttcttattaaaatgccttaataaaccataaagcgccaaacccatctttgattcattgagatattttatcaaacacagtatatagtaactaaaaagatgggaaaagggaaggtgggtttggtgatggcattggtattggtgtcttttgtcatttccacatcttctagtgatgaagagcagccacaatggagaaaatctctgttttccaactgtaaggatgtcgtcctcatcctcttcctcttcctcttcatcgttgttcaatcatgtaggctcttcccttttgttccaggtccacggaa

SEQ ID NO: 82115 - DNA, 888 bp, Citrus sinensis
  Intron number 1 from transcript orange1.1g038044m (locus o range1.1g038044m.g) derived from phytozome v7.0 (chr-ID sc affold00367; pos 163148 to 164035 reverse strand)
atcggttcaaagtctgcttgttttctcggaaagaggtaattttgaactttatcagaattttaattgtatagtgtcttctattttcccatggaaccctgatcatgagctagtcttattagagtgaactcaaaattctcttcacagatctcaaacatcagcatatgaactaaactattgttctgtttctctctttagtatgcacaataatgtgatatagctcttttcttttaattttattgtggtaaagtatcttcctttgtgaatagcctggactactcatgcactttccaatttatgttcagttcccatcctttctgtgctggaatgtattgccatatttctctcaagctctttcttaggttcatatatatattgttcttgtttttatccagaagctttgatcttggagaatgttgtggactcaatactaattttgaattttctgctatattatgtggagctctttctatgtatgctcaactggcagtgatattagaaatttagaatgttagattcctatctgacacaagatctgttttgatcatttggaactagttcagtctgtttcaaagtcttaattggcattcaggagtcctccgaaatacagatccgattgtgttacttcagcttagatttttgtatgtgatttttcaattgcattttaatgagtcttgaacacttctccaaataaatgaggataatttcaattagggacctcatttctattctattgtggtaacttgcaatggtttgtgtagttatgcgcccattctgagatggaattgattgaaatggtccaagatattttaaatctttacgtgttagcttgttgatgttgattgcctctgaacttggcatttgtgttctttttgctaacatagttttctg

SEQ ID NO: 82116 - DNA, 708 bp, Citrus sinensis
  Intron number 4 from transcript orange1.1g010597m (locus o range1.1g006146m.g) derived from phytozome v7.0 (chr-ID sc affold00020; pos 1145720 to 1146427 reverse strand)
caggtgaagtactgtttgtttggattgtagcaaatttacgatactgtttatgtcaaattcacatgttgtagacaagccactggttagatttcctgctggtttaattgacggagccattttgtgcgtgtgcctagtttaacatgaattaatatagagaaacgagacttgagatggttctttcttcatttatgttcatttgcttctgtcattcaccatttgacaagttcaaaaacccacatcatgcattacatactgtatacgctataccgataggatgccaggtgttcctacttaaaaactgatctttattatgttttaaatgttttcttattatcaaattcctgtagaatatatcattagcatagctacaatatggaagactgtaaaaacttagcagatgtagaatagttgtaaggagttgcaataattcactgggccacatcacgaaagccttaatttgtgtattgtgcatacatttggctgtcatttagcatccatgatgcggtctgatgtacacttgggtcctgaatattgggcttcagcaatttgactctttgggatttgacctggataattttttctgggatatttaagcacagctctagagttaatagatgtttagtagtttttcaatgtgaaaaattcatatttgacatttggacaccaatgtcaggtagtacatttgaagcaagccaaggggacttcaac

SEQ ID NO: 82117 - DNA, 733 bp, Citrus sinensis
  Intron number 1 from transcript orange1.1g006420m (locus o range1.1g006420m.g) derived from phytozome v7.0 (chr-ID sc affold00098; pos 298250 to 298982 reverse strand)
tcctcagctcttctgctgccaccgcacaatcagaggttttttttctttttcggtttttatgcataatttcgagtctgttcataattattatttattctatagtctgcttgtacaatagcttccatcttttgatttggttcacagatatatatatatatttttttcagtaacataaaaccttgaccctaattgattcttaagctacgtgcaatcattaatcaataattcgtgttttattcttttagtagtttaatttcattgtgataaattgcctgtagatgtatgaaatcgaggatcatttgtttttagtagctgaattaaatgaatgctaaggttttaattttctttctatttcaaattcttttcggtgtgtgtttgacacgtgcaagtttttactggttcaattcatcattttgtggtatatagtagtttaatagtgtatatatagtcggaaaatgaagttctaatgtatttcgtcatgaatttgggatatatatattatgaacatttattgagattatatattcttgtctttgacgtgtttgtttgagtgtaaattgattctcttgttattgaaaattcctttttgattttaaaaccgttaaattttggcattttttgtattattttgacgtggcttgctgattaaagtttggtaataattgcagattggaagactgaagggttcatacatatagaggtaattgattgtagtttgtcgtttctaagcatc

SEQ ID NO: 82118 - DNA, 790 bp, Citrus sinensis
  Intron number 1 from transcript orange1.1g032098m (locus o range1.1g030706m.g) derived from phytozome v7.0 (chr-ID sc affold00165; pos 105430 to 106219 reverse strand)
tcttgattactggttctaccaaaggtttccctcttttattaataattttgagttcttaatattccttttcgaatcctagcttgctttaactttagttgattgctgagtcaattttactccattcttgtataaattaaatgttgctttcgactgtggaatatgaatttcgaaatggattcttgactgtttttatgcttatgttggttgtatttgttataatttatcaataaactaataatggggtattaattaattaggaaataactgaagtggagcagaaatcatgttaaaattgcaggcacgtataccaatctagacttctatagattgtagattttgtatgtgcttggtgaaaaaggaaaatcttgaattaaatgattctttcagtgtggatatatgatatttatgtttctgtcgttctttattttagaaatttggcgtttcagtttgattttttgttttatcaatttggaatgttctatgtcaatttgcacaaccatctttttctctgtacagggttaaggctctgtgccacaaaagtttgcccatatctagtagtagtattgttttactactagaaagtggtatttctacttagaatatcaagctcattgcagtcatgttctattttttcattaactttggccatgactaggaacaaagtatcaattgtcccgaagcacctttggaattttgttgctgaagaaatttagtttttttctttttaatatctgattctctttatgaaacccatttttcccttttacttttgtaatttcaggaattggat

SEQ ID NO: 82119 - DNA, 583 bp, Citrus sinensis
  Intron number 1 from transcript orange1.1g023737m (locus o range1.1g023737m.g) derived from phytozome v7.0 (chr-ID sc affold00122; pos 73484 to 74066)
ttggcaattacttcccctcttctcttcctgtaactgtaagtatcttttttttaaattttttattattggataattgttgaatttcagctgtgttatgtagttcatgtataacaacaatacccttttgaatttttcttttgctcgttataaatttataatttttgggatttcttttttttttttcatttttcacgaatttgtggtaatttttttgtaattgcatgttttaattagatagatatccactcttaagagcttcattgcattttggcataatttatcttgggacttatgatacacttacagagttggatacagattaccttgtgttgataatgtcacatcaattgcccaagattattgtttgtttagggtgtatattcatttatgattaatttgggatattaatgatcaaccttattgcttactttttggcaggttgtatccaatgtgatgggtggttttgattaagaagagtttactgcaaatatatctttgttgattttttccaagtcaactttttactcatttacaatgtggaattttgcttccaaggctatttctggagccattcggttgaaga

SEQ ID NO: 82120 - DNA, 351 bp, Citrus sinensis
  Intron number 2 from transcript orange1.1g017505m (locus o range1.1g012181m.g) derived from phytozome v7.0 (chr-ID sc affold00001; pos 5148059 to 5148409)
ccggtcagttctgttctttcagattaaatatggggtgtgcttacggttttgccaaacaccttagtttgccacttatagtttgacttttgagtaataatttttttcttttattttcttctattttattttttgtttttttatccttttatgcaagaactcaatctaccttagtgcatctgaatcatcgctccttgttatgatcatgatttatatatgctgagggtaaatgcccagaggttggcacctaaattaaagagagttcatggaagagatgcttgtttatgagataatattagatatcatagcttcatccctaataatttttctcttcaaaattttcagggaacgtac

SEQ ID NO: 82121 - DNA, 779 bp, Citrus sinensis
  Intron number 1 from transcript orange1.1g040814m (locus o range1.1g040814m.g) derived from phytozome v7.0 (chr-ID sc affold00188; pos 269599 to 270377)
ctggagtgggaggaatccgcactcttcactcccaagtaaacacaacataagttagttccataaattagtaattgtagttagctcaacaaactccaattatcttttagtttcatttgacacagacaatgtacatagccaaaatttcatatcaacatatatccagtaatttttattttattttaaagaagtttcttgggaaaattacacattcttttaattaacaaatattttagccatattaatgtacggactaaatcaagatgacctattctcattgtttttcttcttttttaagataaaagtcaaaattcacaatcttgaatgcgctgacattgtttagaaaattgaaaaaaatttgtttcaatgcaaacatacaccctataagcactctcgtgttgatattataaagaatttatttcttgcatcgctctctggtaaaatattgagcgcagaaaaaattatcggagaacgagtcataactcggtctctgattggaatttggaatgagaaatatataaataaataaaacacacttatcaccaacgttaaattaatgagtcatagctaaatttgttgaatttattcaccaaacactcataaaaatcattagtaatagttggtttgatcctgaaatcatccattactcgtccattcgcacaattgatctgaaaaaaaatggagagaaaagaaagaaatcgccaccttttgatcatgtattcatgcctcgtgctgttgacattgcagactagtttttcagagacggacaaattactgcaaaa

SEQ ID NO: 82122 - DNA, 605 bp, Citrus sinensis
  Intron number 2 from transcript orange1.1g013077m (locus o range1.1g013027m.g) derived from phytozome v7.0 (chr-ID sc affold00001; pos 3546555 to 3547159 reverse strand)
aatatcactccctcaacgcttcttcttatccggtattctttttttctttttttttcttctccctctctatcttttctctttaattattattattttctttttgtttttggagttttggcatatgataggtagaatcccctgaattttcgttgtctgttgagtgtaagttgtggtggtctcctgagcccaacccaactttgatctacatattccatcgaatcaatcgattgtctgtgttgcttacctgttcttgattgattgtgtatataactggttgaagtttgagagtgattagaataatcttgcctttattggagacataattgtttgattgatgacgcaggcagcagattactagttcatttcctttgtgtgtttttcttcacttagcacattttgtggacaagtatgcttttggggaaacagctctgttctgcttgaatttagtataggaattagattatgcgtgcatgttttgtattccactagtaaactggagcattctgatgaaaatttgcaatataatgacttttttcccccctttttcctctaatctgacttgtatagaaggaatttgtcctcttccgtttgaagaaaaaatcagg

SEQ ID NO: 82123 - DNA, 633 bp, Citrus sinensis
  Intron number 2 from transcript orange1.1g035443m (locus o range1.1g035443m.g) derived from phytozome v7.0 (chr-ID sc affold00001; pos 2946983 to 2947615 reverse strand)
catccaaacaagtgcctcaacctgcgttaagcgatgtgagtattgaattttgatttatgattcactttctgattcactgacaaaattatggttgcttgagtagtttgcaatataaatttaagcaagtgccttttctggctttagttttttcttttcaattttaatgccatttactttatgctttgtaatgtaacaccctgataacataattcctagacttgcttctgttgttgaaataggtcttcttgaattaggtttaattttctcctctggctgttatcacgtgaaatcctaatatgaatttcattcttatttgactttttaactcatttttttggaaggaaaagaaaatttcctgaaatgtatatggctaaaattgtcatgtctgaatgactaaatgaattggctgcctacctaattccttttagcaatctgatgcagttagatcagagagtaacagtaatatgaaatttcgcttataacactgaagatgcaaattctgttactgtaaatgtgtttcacaggaatttcttcaccttcatgtcatgtatcagcttacattctagtaattttattactttgtcttgcatcattgcaggtggttgcaggtgtgactgggaaaaaacagcagtg

SEQ ID NO: 82124 - DNA, 754 bp, Citrus sinensis
  Intron number 1 from transcript orange1.1g035443m (locus o range1.1g035443m.g) derived from phytozome v7.0 (chr-ID sc affold00001; pos 2947635 to 2948388 reverse strand)
ggtgcttttggtatccaatccctgaatgcacttctcaatttttgttccattaattgttatctatctgttaatcgattgatacgttgggcaaatatcagttaaattggggcgaggcgaatatgctagtttttcttctggttacgttacggttattatttgtggccttctcaagtaaaattcccatgttattattcataggtttttgattcctgttgtttattcaatcctgtaagatagtctttttaggtttctacttaatttttttttttttcaccgagtatgcacttcaatttttgatatcttttcatttaccagaaatgctatctttaactagtatgatatagttaagacgaattatgtggaaatgttctacgaaactgtattgttcttctcgtttgagccctatattcaaaagtctagatggagattacattattattatgtatctttcacggctttttatgttgattattaagtaatttcacttatgtttacacctatcgattgaaatttttatgagcagaagatacgttacgtggtgaatgcgttattctttgtctttacagaaaataaaccatgagtgctttctgcagcgcaatgagttggtttttttttttttttccttttgaggaaacaattattcatcttcctggtgagtgattttgaggaaacaattattcatcttcctggtgagtgacaattaactttttttgtgaaaatcccaggcctcttccttccagctgttgtaaggccc

SEQ ID NO: 82125 - DNA, 440 bp, Citrus sinensis
  Intron number 2 from transcript orange1.1g046871m (locus o range1.1g046871m.g) derived from phytozome v7.0 (chr-ID sc affold00144; pos 228217 to 228656)
ttgactgggtacattcttttttcatgtggttttttattgttcatcaagtatgactaccaacaggccttagctaagttggtatttataaaatttttgtcacatacttagtttaagattgcattggagcaaatttgagttgaatcttcatccactggaattttttttaaagtaattattttgaatctattattaaaaattaacacgtcctcaaacacgcacctgcaagaaagaaaaggagtattagacatgaacaccagaatttttatttgttaaatacacatctaagattgaggtagagagccttctagatcttcgtatggaactagaaaatggacctatcttctatcatggtatattaatacaatacaattgtatatttgaatgcataaatatctagctgcccttgcatataaggggaatgtctgtggttctgcaggtaa

SEQ ID NO: 82126 - DNA, 634 bp, Citrus sinensis
  Intron number 2 from transcript orange1.1g025036m (locus o range1.1g025036m.g) derived from phytozome v7.0 (chr-ID sc affold00192; pos 176758 to 177391 reverse strand)
tgaggttgcctgctgctcaatctttaaaccacaaggtttaatttgttacttcacatcactcgtttcttgtacctgtttcgattttattttttttttggtatacgattgattatcttatgcatttagcatgctgtttcaaataatcttgcattggaacctcgaaattccgttacgaaagcaaattgtgaatttaaaatgctgaacatgtaaaatggccatctgtggtttcttgcttttcattcgtatttgtatgtgaagcactgtggaatattaagaccgtgaagaactgatgattagttaaaacatttttctggttctatattagctcccatcagctttcatagtcggagaaactcagggtttctagacaccttcttatgaagacatccaattgtcatctttctttttgttgcaaagtatgcatttctttatatttgtgtcagaatatttgaatccaattaattgttttgacgtacggtagtgactgactttgttctggcatgcccttagttctcttctctaccttgtggagattctttgtagaattagtttccctgtataatccctagatgttcacttttttttttccttggttccaggacttcatcaaatctgcttttcaagacatagtttc

SEQ ID NO: 82127 - DNA, 246 bp, Citrus sinensis
  Intron number 1 from transcript orange1.1g024844m (locus o range1.1g023956m.g) derived from phytozome v7.0 (chr-ID sc affold00042; pos 509760 to 510005 reverse strand)
gacgagtgtgaggccgctatcaacgagcagatcaagtcagtttctttccatttacatcttctgcatctacttttttattttattttcttctttttctttataaaggttaaaacgagcgacgttgctcgtgatattatcacgtggggttcatattattaatccagtgaattatttattattgtttaactgtccatttgatttttaacttattatgaatgtgggtttgtgtttacagtgtggaatata

SEQ ID NO: 82128 - DNA, 324 bp, Citrus sinensis
  Intron number 1 from transcript orange1.1g013245m (locus o range1.1g013245m.g) derived from phytozome v7.0 (chr-ID sc affold00001; pos 2620196 to 2620519)
aaacccacatatcatcaaatcaaggtaagtttttttcccccccttcttttggacgtaaaagaaaattgcaaatcaaaagttacgaactgggcatgtacttttgctctaaatgaaaggaaatttttgcactttcttccatttttttctgtttctttattgcaatttcatttgttattagctttttcttttctttatttttagtttctaaatttagagtaatgatttgtattgtgcctggatttttttttagttcttaaatgtgtaaaagtttcccatattctggttctgatttaattaagatatataaaatgtggtttcagaaaa

SEQ ID NO: 82129 - DNA, 412 bp, Citrus sinensis
  Intron number 2 from transcript orange1.1g032500m (locus o range1.1g032500m.g) derived from phytozome v7.0 (chr-ID sc affold00546; pos 27106 to 27517 reverse strand)
aatccccagttgggtcaatcgccttgccagaattggtaagggcaaatttcatggctaaattttttgttctggcaattatatcatttgattgaatttcccagttttgagtagcagaagaaaagataatcgtaacttaaattcgtttttaacattattgcaatattgtcgtgattattctgttagtaagatggacttggatcaagaattaggcctagaaattttgtcaatgaaactttttttcctgcattttctttgaaatttatggcgcttagtgatgtgtttgactgagacaaaactagtatatgttttctcatatatttcaatttctgggtttgtttatgattctcattttgacaatatgcttatttcttttacaggttttttctgcaattgtgttcttccggctacttta

SEQ ID NO: 82130 - DNA, 620 bp, Citrus sinensis
  Intron number 2 from transcript orange1.1g029313m (locus o range1.1g029313m.g) derived from phytozome v7.0 (chr-ID sc affold00042; pos 688566 to 689185)
gaacctctgcattaattgacttctttggagatcaggtttgagtttttgctttacagttcaattctattgccttgtcatgttgcttttacttgaagaaaaaaaaataaaaattaatggttttgatgcgttaatctcaaagttaacacactttttgtagtcaagaagaataatatgatcttaaattttattaagcttcttttttttttttcatatttgctgggttgatttgatagaatagggagtatagttttttctcagggaaaaatgattgagatatggaaacatttcagataattacaaatgttaatcagttagtttaaaaccaactttaggataaggtgggcgaattggtaaaagggcaattgccatctccttcatttttgcctttatattttgtgtttggtcaaataggcctaccctaaattgaaggggggtcctggtagcatctggaacatccgtaacaacttggaatctttagcaatactatattttatgtcacagttgcagcttcgaatacaagcttttattctctaagctatattgaatttaaagacttgtctttgggtttttttgtgtgtcacgcagattatatcttatctgttgatatcatcagcatcttc

SEQ ID NO: 82131 - DNA, 214 bp, Citrus sinensis
  Intron number 5 from transcript orange1.1g040957m (locus o range1.1g040957m.g) derived from phytozome v7.0 (chr-ID sc affold00001; pos 1908362 to 1908575 reverse strand)
taattgctttgacagaggtaattatggttttcttttctttcttcttctttttttcaattttttaattttttgttttttatgatttttccccttaaaatcatcatgctaactactcaaacttatgaaattgacctcaaatggggcttatttagatatcattagtgaactgttatctgttgtctgtcccggcagctgacctgcttagtgctgccgc

SEQ ID NO: 82132 - DNA, 576 bp, Citrus sinensis
  Intron number 4 from transcript orange1.1g005694m (locus o range1.1g005544m.g) derived from phytozome v7.0 (chr-ID sc affold00001; pos 1238991 to 1239566 reverse strand)
aaaacatctgcctcaaggaacttgtgctggggattgtatccactcttttcataggctgttttctattttgaaaattcatgccctgcttactacacgaaatcattgttgctgtgattgtcatcttggcatacgttttctttccaatattttgatcccaaggttccttgatgtcaaacatagacttaccttttagaaatttattggcctctggaaactgtattttttgttactgttttgggccatgtttatagatgattatatgctcacctttttttatactctcttgtgtaaatatatagctatctacaaatattcttatatgttatgtaaacaaatttgatccccatgctcaaaaaaagcataggaccttttctatggagtatattttcttctttaaatttacatttttaacattgatgaagatcacatgttacattatgatattctctctattttgtttatatgtttcatttgagtctgttgaggaatgatattgctagatcagatgctgcttattctcacttgtgcagtgccttaactttagtagttctcgatgcaattgttgtcggggtagat

SEQ ID NO: 82133 - DNA, 785 bp, Citrus sinensis
  Intron number 1 from transcript orange1.1g032991m (locus o range1.1g027915m.g) derived from phytozome v7.0 (chr-ID sc affold00008; pos 1058661 to 1059445 reverse strand)
tctgcttgctgcaccaagccaccaactcaactcaggtttctctctttttaattatttcaatttttattaatttgatttggtccccacaaattttatttagctgtttgcttgttgattagatttttctttcagagggactcatttgattggaaaaaagaagaaagatggggtactggaaatccaaggtcctcccaaggatcaagaaagttttcgagaaaaacggaaccaagaaagctgctgctgctgaggcttgcaagtcctttgatgattcaaaggttgtctttatgtatatgtacatatgtgtcctttttatttatttattttgcttgttgtttaattaacaattatgttgagcttgctatatatgcgcgtttgtaggaagaaatcaataaagagtttgaagagaagaagcctgagctccaacctaaagtggtcgaaatctatgaagcttcttcagctgaaatcaaggtctctacatgaatgaacataccaaatctgttatagctacaaaagtcagagagaattaaaaagatccaattcatgcaagtttttatttattaatttaaccttcttttttttggctttggctttggcgtttaaatgaaaatacagaccctggtcaaggatcgcaaggaggatggacttaagaagcactccactgctgtgcacaagttacttgaagaactcgttaaaatcggtaaaataattctatcacatatggtattaattaaagttaacgtcatgtgttaaaatcacaagagatttttattaatatatatgtctgt

SEQ ID NO: 82134 - DNA, 862 bp, Citrus sinensis
  Intron number 1 from transcript orange1.1g016107m (locus o range1.1g008373m.g) derived from phytozome v7.0 (chr-ID sc affold00012; pos 196705 to 197566 reverse strand)
tgattgtagaacgctcaattcaccacctaagcaatgtaagcagcagcgtttaataatatattgcttatattgactttatgctttacggttatgtattttttgttgtagatattgcttattaatagaattgtgaagtgggtttgctttgttttgtggtttactcagactgtttaggattggagtgaacttgaagtctcgattcaccgtcttcatataaagttgaattgttttttaaattgatattatggattttactttttggctttacatttagttttactagcctgagtacccgaagtagtattcggctgcaacttttagttccgttttatgttttctttgtgctttgttgtcctgattgtcattgctaagaatttgatatcaaatgggtttctttctttcatggtatgcttcatcatatataggcttgaagagtgtgcaaatgatgttgactattctcaaaacagatatgaaccacagtcgtagaattttctgtatgctgattatggtatgatgtatttgttgctcaatggtatcattttggctgtttaattaaaacacaatactgttttatagccttgcgccacttggattggaatggctattggtaatttttttcgagtttgttatagctctggtcatagacaaagactctttttgttgtttccagttgcatgttgattcttctggttaaggattgcattggagaattttctgtcatgtcacagctcaaatttgttttgatttgttcaactacaatattggcaataatactaaatagatgtattttctgccattcttacgtgaatcaatttcatttgttgtagtggttgcggaaaactaatcgaaaacctttgcttgc

SEQ ID NO: 82135 - DNA, 861 bp, Citrus sinensis
  Intron number 2 from transcript orange1.1g013413m (locus o range1.1g008348m.g) derived from phytozome v7.0 (chr-ID sc affold00105; pos 160003 to 160863)
taagaggaaggcttcacatttcacaggtaaccagtttccaattaactctttttttcccttaaaataaatattattttcatttccagggctaatgcttctttgtgctgattcctgtctctgttaatttgttgagtatatatgatttttataagttttctttaatgggtttcgatagaactattgtttaaataacattcttttaaatgaaattcttttttttggggggggtttctatttattgtattttgactccaatcaagattgaatcttgatcgaacaagttgctgatgataggaaaaaacgaagaagtagaaatcactaaaacaatcctaaccgaagtgaagaacatagtttatacaaagagagaagacacttggatttacaaggttcggttcacagagtacctacatccatggctgaaaacagcttttagcttgacctttaattattggtgattaatacagaatgaattaacatgttccagtgaacaaagcattcctacacaagtttccttaataatgaccagatttacaagaaaatccacacataagatacactggtgaccagcttaaaattgtaactaactttaacagctctggtggcccccttcatttgcttaatcaccaaatgccacataggcttaaataaccatcaataacagaattttaagccaaacttgatcttcgcactcctttaccaagtggattcaccatcttcgtttgtgttttggttcttttttcttataggtgttctggagttgaatttttagttctgagaaatggtttgtggtaaaatggctaataattttgctttatgtttaactcaggcaacacttgggatcggtactgcccccaagaaaag

SEQ ID NO: 82136 - DNA, 889 bp, Citrus sinensis
  Intron number 1 from transcript orange1.1g020919m (locus o range1.1g020919m.g) derived from phytozome v7.0 (chr-ID sc affold00021; pos 1212921 to 1213809 reverse strand)
aaaatttgtggtacttttaataaataaataaattcattaattttattttgtgggtatattcagattgttcactgaatcaataaaaagaacaaattgagttttatgatttattgtgctaaaatttatgtctttttgagggttttttttttggggttgatatggcatagtagcaacatggatgggttttttttttttggggggggggggggtgttacttagaaaattgaaaagaatcattggctctataagtatgcaaattttcacacaggtcttgtagcctacgtccttttataatgtacgacatgtttaggtttggaatgtgaacttaataatcagtctgttgatgggcattgatcctgaatcctcgtgtgtgcattgtttgattgctaagaagccataagaattggaacttaaaatttttcaagtgtaaaatctctagtacccctgttcatttcatttagaaaattattctgtacaaagttaaaaatttcaggtggggttgagatgtttgatggctgaataggttcagacaaagcttaaaggctgttgacaaacagtcctaacgtgagctgtttgtagcaatattcctttggataaaatgcaaggtcttcaatgagtacagagtgcaatgcaatctctgcctcaagtccagaagtgatatggtatgagaaattagaatacagtctaaagcattgaacctctgtagatattccaagtaatcacagatcatattccaagtagagtcctgctttccagctcttttcacattagaagaagtggcttatttgctctcttctaattattcttttgaatttttttgttgctataatgaattatcctaagtttcttcttttcaacttcacaaaacctttatttgtgtttgcaggtg

SEQ ID NO: 82137 - DNA, 511 bp, Citrus sinensis
  Intron number 1 from transcript orange1.1g029206m (locus o range1.1g029206m.g) derived from phytozome v7.0 (chr-ID sc affold00547; pos 65388 to 65898 reverse strand)
caatcagaaatatttcccaataatttcagaacctggtaaggcttatttctccatttttttgcatttgatactgttacctaagtgataatgatgatgccttttgtggaggtctttatctagttggaatcacgacagatgttgccataactcaaaggcagggcaactacaagcccgcactttgatgtccccactccatctcttcatttatcaatcacaagtgaaactccgcctttaagttcctcaagcaacaaccagctagctatcagactttcacagatcgatcgtagaagctcaatatcaaaacgaaagtgaagctaacaagtaaaggcttcgctcaatacatgagtgtcatgaatttccttctttcagtatcatttgtggttcgattcataattaagggaaaagcttggaactatagaaacgcaagcctgtttgcataagctcatcaaatagtctttaagttgcaaaagggtacaaagcttttgcactctctgatcatttagttcaagca

SEQ ID NO: 82138 - DNA, 1028 bp, Citrus sinensis
  Intron number 4 from transcript orange1.1g023522m (locus o range1.1g023498m.g) derived from phytozome v7.0 (chr-ID sc affold00105; pos 403707 to 404734)
ggtatttattttcactctctgtagttagacaacctgtttttcttctaagtagttgggatttttttttttttttaaagaccatacttcaagcatgattttctttgaagtcttggacaattcatttagttccttctgtcaattttgataaatgtttggattatgttccctgttttaagatgcattgaaatgtttctaagagtacagattgggaaaatttacagttccaaggttttgaaattgctaggtttgatgtgattagatcgtgagaatatgctttagttttgtggtgattgtgatttgagttcttgaaattcatttgttcctccctttttcctttgtctttcttcttgattggtgactcagcagaatgagttgcttatagggttatgtagaatgtgtggcactgacctctgtctcctttacggtctcaatgatgcctggaagatccgaggcttattttcaaatacgagaaatgagaatagtgcgataacatgatgccaaacttaataatttaaataatttctctttcaatatcctattcccctgttgatttaagttgccatgcctgatccagtcaaattaggctcttgttatataatttgccaacatgccaattcgattctgggccatgaccagtctggttattgttgagctgtggttggtccttaggttccctgattgtaaatgtagtttcaatccacacagagctcaatcaatgtgaccatgcaaggaactgaaatgtggaaattaaaggttggtgtttgtttttgagattaatcagtaacttgtgaagaaatggactggtgccttactgattaaactgtattgcaggaacctcacaattgtttaaggctcacagtttcaattaataggcacagtgcaatggctgttggagagttttaataacttatttgattgtgatgttagcagattactaatgttttcagaatacattttttgttgtagttctgagtttttctttttcctccgcagctacacacatttcctgaaggaaaagtatcacaaga

SEQ ID NO: 82139 - DNA, 489 bp, Citrus sinensis
  Intron number 1 from transcript orange1.1g008705m (locus o range1.1g008705m.g) derived from phytozome v7.0 (chr-ID sc affold00020; pos 1457539 to 1458027)
cctttactctgccgccaagtactaaaaccctagacccccagttacttcattttcttattataataatttttttttatgctttaatttttgtttttaagtactaaaattggttttgtatcttcagtaattaacaattagcttcatctatttgattctccttttccgagcgtgactgtgatgtttaataaacgataaagctgcagccttggtgatccattggtcactgaggatgttgagcaagaatgggggtaaaatcaaattttgaccttattgttggcttaaattttgaagggaagaacattttagctaaatgattgattcatgatcatttaagaccagatagattttgttggaataagcaaccaaaatgtaagattttgaatgaaaatttactagtttaattttattttttattttaataccaacgagtttttgtgtgccattatatgtacagggcagcagagcagttggtgggaatcgaacaagacc

SEQ ID NO: 82140 - DNA, 338 bp, Citrus sinensis
  Intron number 1 from transcript orange1.1g030259m (locus o range1.1g026478m.g) derived from phytozome v7.0 (chr-ID sc affold00001; pos 1035650 to 1035987 reverse strand)
tgtcaatattcagccttctgagcttaaattcccatgtaagttctgtttgtttctcaagaaattttggaagaaaagttcctatcatggtgatcgatgttgcttttcactttttctgtcacgtgaggttcacatgaatgaaaccacgctctaacctctgtgtttgaaatcgaaagtttaactaataattttgaatgttccattttgatcaataatttgattgatacgaacaattggttacacggatataatgtgctgattccttgaatttctatttgttgtctgcatgttttatggcacctgatgaaatagttgaattgaagaagcagagttcttgttca

SEQ ID NO: 82141 - DNA, 257 bp, Citrus sinensis
  Intron number 3 from transcript orange1.1g002792m (locus o range1.1g001730m.g) derived from phytozome v7.0 (chr-ID sc affold00231; pos 73080 to 73336)
aggtctgtttgtttatgtttttccgctccaacacccccttcatattttgccaaacaaagtagaagaaatttaatcagtttcatgaaaacagttggttcatatggcactatgatgacactgaaatgataatcaaaacttatactcgttatgtactgtaaatttgaggttgatattgatttatgtgtcataaaatgattgtaattgggcctaccaatttgactctattctttgctagtatgatagttacttatccaagc

SEQ ID NO: 82142 - DNA, 614 bp, Citrus sinensis
  Intron number 2 from transcript orange1.1g013239m (locus o range1.1g013239m.g) derived from phytozome v7.0 (chr-ID sc affold00029; pos 245246 to 245859 reverse strand)
ccggagaggttagtgttgatgcttaacacgagttcaacaatttctcctcctgtactttctaacaaatcttaatcttccacttggtgacggcgtaagaactgtagttagataaacaattttagttccgtgttttttttttttgactgtttgaccgtctaagccgtgcgatcggatctgattttcatatagaaaatctgaatcgttaattcgctcacgttactctcactgttctctcaaccttggacaaaaataattgaccgtaaaatcaactaatcacgacttgacctccgcagccttcgaaaatatccctaaaacaccctcggtctgtacctattcccactcaattagaattagcgatattgcccgatacgtattttggaaatctagaggttagattcgtaaatttagtagactacaaaagtccaaatgcccgcattttggcggatggtcaccgactccagcaaacaaaattgagaattccattgggatgaaaacgacgtcgtgttcactctcatttttttttttcttttccaaaactctctgtcgcttcatttgagtaaaattgcttaatttgaggtttgcggatgtcttgtatacttgcaggattgaattcg

SEQ ID NO: 82143 - DNA, 782 bp, Citrus sinensis
  Intron number 1 from transcript orange1.1g031665m (locus o range1.1g025953m.g) derived from phytozome v7.0 (chr-ID sc affold00217; pos 113331 to 114112)
attggcgcttcttgttcatttcttccttcacggaggtaacaaaaaattttctttccatttcaaaagccgagaaagtgtcacagcattgctgaattaatttttttttcccctgctttgcatattggagaaactataaaatgtttagtgcaagcattagaaactcaattgccttgttttcttctcagttactaagtgtcaagaacaggtttcatgaagtaagcacaaaatgtaaaatttagattaaaatctaagcgggattgcaatttctatgagttgataatgattggtctctttgaatatttgtgtatgctgtttgctcatcaacgttgaacaaatatttttggaaatttaattttttcaggcctaccttattatgctttatgcaactctgattctgtgactgtgcttaatttgttgctctttcaatgagttgatattattttctattgaaattgtttttgacctttcatttggttgcttagaaaatggggagaaagagagtatatgaaaatctatcttgtactttgtttaagttagcctctaaaaaatggaagttcaagctcaaaaaatatatgtttatcttttcaaaagttacattttgtgttcagtttctaaaatatggtcatttgactaagatagacagtctgctgtgatgatgttggtaacatatttatatatattgcttagagactttataactcatctgctgggaaactaaagttgaatggattaagaatgtgtttacagcaaattgcggacaacttggttgcaatttgaaactc

SEQ ID NO: 82144 - DNA, 775 bp, Citrus sinensis
  Intron number 1 from transcript orange1.1g001361m (locus o range1.1g001361m.g) derived from phytozome v7.0 (chr-ID sc affold00251; pos 101128 to 101902)
cggcggcggcgccggtggagagagacattgagttggtaaactaagtttttaatttttttatttagttttaattttatttatttttgtgttgctctgaagttgaatttatatttgattttttttattaaaaaaagttgaatttatatttgatgaaaaaaaagtgagagagagagagagagagagagagagagagagagagagaattgatgtttactatttaaagcttaattttatctgtgcgattgtaagtgtacaatgttggtttgaaatattaattaagttcactctttagctgattggttggtaattaacaatgtgggctcagctagtaactatcaagcaagtagcgtttggtattattaattgattcatttatggtagataatattttcaaattctctaatagttgataaaggatttgaagtcatcatgttaggtggaacttagtactagtgtctgcctttgtccacgaaacatttttccactgcttgtttcattagcagacttgtccagataagaaatgtttgatattaactccgtttttcatttttttcccctgtaattttctagtgtcgtactttcagattaagttcttcttatcgtatatatgactttagttgctgttccttttatctaaaattctgcttgctgcattcttagcttctgttaattcaaattattggcctcctctctctctctctctctctctttttattttttatttttttcccatatcataggccatcactgcacttaaaaaaggagcacacttgct

SEQ ID NO: 82145 - DNA, 975 bp, Citrus sinensis
  Intron number 2 from transcript orange1.1g004023m (locus o range1.1g004023m.g) derived from phytozome v7.0 (chr-ID sc affold00001; pos 5382733 to 5383707)
gctgatcgtcttacgtgccaacgacaacggtgacggtaatatttattttttctttaattatgtgtgtatatactactgttaactaaattcggcttcggccaaaacctatttttatccaatttagggtgcgtttggatgcatttgataaacactaatcgttatatcttgaaagttatattgatatgattttttacttgtataatgaaaaatcgattatatctttaatgatcttatcaaaattatcatttaaaatttatattttactatatattattaacttatattttataattatatttttttttcagatgcagtttaaaaattacagtacctcaatcttaaaaataaaatgaccttaattaatgattctttttattttggagatagtcgctggggtttcttccggtggtgtgccaaactccaaattgtggggcatgtatgacgtataataatattaaactagtatatggtgcaatgaactgaaaatcatctcgggaagaaagaagaaattaacttcatttagtcagcaggtctttatttgtttattggaaattactaggtatcagttttaggacaaaataattaaacaattttgttttttttttgtttttataaaaatgcttgtaatattatgtatattaagtccaaaaagaaaaaaaaaaatacccttgcgttcatgcatcgactaaattcccgaatgatcccgatggtggtgacgaaaagggatcaatatttcttgtgagttgtgaaagaaaagtaaaagactaaagagtagtgggtcatcttatcccaagactttaccgtaaactaatttatttacatatgtgcggtcaagcaagtgtgcggtcatctaagtcaaattaattttaatttatttgtggcttcaatcaatggggatagcgtctgtctagccaatagtgaataaaataacatgtataaaatttcaggaggaacgtttgctctttattcattgat

SEQ ID NO: 82146 - DNA, 372 bp, Citrus sinensis
  Intron number 1 from transcript orange1.1g033341m (locus o range1.1g030887m.g) derived from phytozome v7.0 (chr-ID sc affold00042; pos 521823 to 522194 reverse strand)
atatcaacgtacgtgcggtttctatcttaaagtttgttttttcccccattgatctgttcattgagttgctttctttattatcaagtcttgatttttgaatgtgggtattgattaattttgtttaattagtagatttggttaaaattttgtttcaattttggagttttgtaacggtttatttgattaattatgatttgtagtgtccataaaagcgtatattaagatacagaagattatgtaatttatttgcaatgtgaaattggatgacgggtttttgtttttaattgtgccatcaccatgttttagactgaattaaatttatagatggggtaacaataatggacacatttgtatagggacgaaggaacacac

SEQ ID NO: 82147 - DNA, 649 bp, Citrus sinensis
  Intron number 4 from transcript orange1.1g019933m (locus o range1.1g014424m.g) derived from phytozome v7.0 (chr-ID sc affold00052; pos 346781 to 347429)
gaaacacaaaggtcggaatcagtgagttttcttgtgtctgaagttgtgcccattttgttcgtgtattaattatgcttgtcttcgaatattttgatcttaatggaaatgctttctgttgattcttcatctttaatatatttttgagtttcttattccaaaaaaaaaaaaaagaggaaatggatatgctttctgtttggtacgtaatactggactaaataacaataagcttgcaaaattagtaatgtatggtatttgtctatgactattactttactttgattcatgtgtcaccatagtttatgtgtcaccatctgttactaaaggattgaatttataagcaatgatgcaccttgagatgtatcccagtgaaaactatcagctatctgaatttttgttttcctaactgtttctaatgcgcgcgcgtgtgtgtgtttacacacgataattgaatattagatgatttagacaagtatgactttctgtgagaaatcaatgcatgagctggacagtagaaagaagtgaaggattgagtggcttcacatttcaaaattttattgctgttgctcgttaggaaatggaagaaatcgatatatgtggttgctaaactcatgcaggttttggtcggattggaaggttggttttgcgagta

SEQ ID NO: 82148 - DNA, 796 bp, Citrus sinensis
  Intron number 1 from transcript orange1.1g027919m (locus o range1.1g027919m.g) derived from phytozome v7.0 (chr-ID sc affold00102; pos 152651 to 153446 reverse strand)
tttgtgtggcagacctcacttcccgtattcctctatctctcttacttctttgcatttctttttctttcttttttcttttctttcttttttaatgtttaattatatgttcatcattatttcattcaccagaccaagctattttaaattaatgccacaagtactctttcatctacccattactccctttttttttctgcatcctcataataataatgattcagcagttgacctacttcttcttccattcagtttcttccttttcactactaatcatttggctctaaagttcagctcctattgttaatttttgggttcaaggttgtttcagtaatttcccaataatctgctagttatagtttgccacctgctcatttttatttgatggctaattatttttatttgacattaattctttacaaatccctttctgcctgtgccaaattgccaattgctggtggctattactatgttgttaggttctttctgtttctgatttggctcacatatatatttagacacatttgatttcatacacggtcacacagatgttttactagacaattatgttcaaataaagtttagttaggtcattataattctgcgtgaccattttttgaaggcaaagggatttatgcctacatttaaccaaacctgaaggtcttggtggtagctatttattatcattagtttgtttctataatgttagctttttttctgtaatgatgaacttcttttcatgttccaagaactgattcaatcatggatttattatgatcaataacagctattaaagtca

SEQ ID NO: 82149 - DNA, 1011 bp, Citrus sinensis
  Intron number 2 from transcript orange1.1g028782m (locus o range1.1g028761m.g) derived from phytozome v7.0 (chr-ID sc affold00292; pos 127733 to 128743 reverse strand)
aagccggttagttaaactgcatgcaaaacagttggaagatcaattgttgccttttttccttctgctctaaattcattttagtgtatcggttttgatgttagtaacattactgagttgcaagaaaacacataaagatgttctcatagttgtttgtgaatactttgatagtttcttaagctttggggataaattcggagattgtagaagtatgacatgagctagtagaatgggtggaatatgaaggatgtgtgtccatacacatgcttctgcggaccttcatatggctgtatttagcagtggcaaaggaattcttaatacagataattgtgccaaattgcaaattgattgttattttgataaatagttttgctgagagtgtccattttgttagtttaacttcatgtaatttagaaaattttatttaaaaaataattttggtagcagatgcatgctaaatgggatatttccatttcacagctgtaatgcaaaaagggagacaaaaataaagttgcttgtgtgtgtatatatgtcttaaatttggatgtaagatgttgattctgaactgttttgtaaatctataaaactccttttagacctgggatttgtttttgatgcatttgattatctgttggtcactactaagtttctatattcatattgtgacggccaattttcatgcattaggcctctaccatgctcttgttacataagtaagaattgcacattcttgtggtaccagtgatttcattcaaattgatatgaaataagaacaaatgacctagttgattcaaggaagtaacatcaaagaatactcaaacgggggaaaaaaaattataataagaaagagaaatagtgaaagtcttatttaatttcttcctagttgaattcatccctttccagatattaagaaggttgcaataatgatggaagccagctgatctatgatttgccgctttcatataattgccgtctaatagtttcctcctgttattgtattagaggggcaccgag

SEQ ID NO: 82150 - DNA, 818 bp, Citrus sinensis
  Intron number 1 from transcript orange1.1g012903m (locus o range1.1g012903m.g) derived from phytozome v7.0 (chr-ID sc affold00015; pos 1505247 to 1506064 reverse strand)
gcccttttctcaataggcgcactattagaactgaggtttgcttctttatctccagctttggctttaatcagattttaatggtcattagatttgatgtgggttcacgaattaagtgaaaacaaatgttctaagaattaataaatatgtgaaatacatattctcgtatcaatgtcaatggtgagactcttacctcccaattaagcttcttattggtctacatgtttatcgaacataatactactactagagctaaggtttcatgtctcatgttcgatttcttctacgtgtaaacagtatttcaattattttaatattttggttgactttcgggctctcgtccgtatccacgttttactttagaggccaattgagtcttgtatttaatatttgtgttgaaactcttacctatgagttaagattttgggtctagaggtttctttagtagtcaatttgcttctttgtttctatacttggacttaggacagagccatggagttgctctaacagtcaatttgcctgttgttgctacacttttgacttgtgaagatttgcttgatagttgaggagtcttggaaggagacaacaaatcattgacctttgtgatgtatagatcctttgatcataaagatgccaagcagcttgctgaagttgattcttaatttgatataaaaggattctattgtacagatgtagcaaattgtttcatgcatttggatggataatgatcatttgttgatgtacattgtagcctcaattctgcttgtcttatactaaaaatcttgactttggtttctactttaggttgtaaaaggccggat

SEQ ID NO: 82151 - DNA, 729 bp, Citrus sinensis
  Intron number 4 from transcript orange1.1g009391m (locus o range1.1g009402m.g) derived from phytozome v7.0 (chr-ID sc affold00454; pos 81356 to 82084 reverse strand)
gtcaacttttaaggggaagagttggaagaaaattggtttgtttcttttgtagaaattattctgatatttattgttaattggctgctttatttggtcaggttctattctaaatatgttaggtctcaaatttcattatttcgaacctctagaggccatgtctcaccttagaagaaattatattgaaagggataaagtataaaaagaacctttcttttggtagaacaaaaaagaaaaatcaaaatagatcgagattaagaaaaaatttcttttgggtttaacaagatagaagacaataggacctcaatcttttgatgctctttcatctctcgaaaattagagggggaacccaatgcttgtggtgcatacagatagttgattatacgaactcttcctcttaggtgtattctggagtgtggggggtagatctgtagcatcaaatttactatagttggtgatattctaaaagtgaaactgaagttggatggagattgaaactaccaaataatttaggaagactaatacagataaatagagtaatgatttgctgtttttgtttgaaatatattgatgctgtttacagtgtttaatataagttctaagtctattattttaacaaaaaaaatgagtggatgctcaatttggattttgcatcattgattaaggaaagttgtcttacattgaatacaatgtccatgcagctgagttttttcctgatagatcagaagtgca

SEQ ID NO: 82152 - DNA, 444 bp, Citrus sinensis
  Intron number 5 from transcript orange1.1g013196m (locus o range1.1g011110m.g) derived from phytozome v7.0 (chr-ID sc affold00015; pos 405454 to 405897 reverse strand)
tctgggctttcatctcagttaggtggggaatttttgcttatgaagaaaacctctcgatgcatatagtggctttgattttttctctttttttttaattattttttttttatctgaaagtatttgccctgccttcttgttgcataggactgtctgttattgttcttatgcaattgctctaggataagttggcaaagcagtaggggtattatgataagtgccctttttcttctacaaataaccattatatatattacttatatatttaccaactaattctgtactattttctcatctcttacttctacaacatgctgcacatcttttcaaactacaacattttcattttttcatattttatttattactcttttggaattatgattgaattatcttacctaactattttgtcattatctgtgtttgttcttagtgcttgataaaacc

SEQ ID NO: 82153 - DNA, 667 bp, Citrus sinensis
  Intron number 1 from transcript orange1.1g013196m (locus o range1.1g011110m.g) derived from phytozome v7.0 (chr-ID sc affold00015; pos 407009 to 407675 reverse strand)
ctattgaagaagctgaggtttgtgtggctttgaaattttaattgacgttggatggaaatgttggtacacagttttttgtagaatatacattttagttttcaaggggtttgcgcaacatatttggaaggctgcatgtatgcttttttgttgttttacgggcttcttctcattcatttttttcccctaggtttgaaaatgcagggattcttttttcttttttttcttccattattacgtacttatttgatactttgataaggagatattcaaattattgtgcatgagtagaataatccaatgtatacttatatccttatacccgtctctttgccagcaatctgattgagaaaaattatttttttaattgccttcaagaactttggttctcattagatttccacagcccttcaaagtgccttcatataagggcttttttttttttggggtggtttgtagattcctgatttgcgttgtaatttttccttctctttctcaataattattttcatgtttttaatcaaaaatttaatttatgaattctagtctgaatattaggaattcttactccaattgcattgtgtacaaattcaaatgttttttttttatgcaaaagaaaataatttacttgcttttgttccgtacttatatgtccttttggatttttagg

SEQ ID NO: 82154 - DNA, 998 bp, Citrus sinensis
  Intron number 1 from transcript orange1.1g015354m (locus o range1.1g015354m.g) derived from phytozome v7.0 (chr-ID sc affold00380; pos 41657 to 42654 reverse strand)
ggttatttgctcatgtatgtttctttatttcttggatttttcccccttttttttttctttcctaacgttatgagtataattttaagtacagtttgagtttaaatgaactgctgaatgttttagattttgttgtttctatgagttgttattagagctttatataagaaaaaaattatttggaagttcttttttaatgcaaatgttcatacattttaaaataattaaacaatgttatttttatttaacgtcaaatctgtattttaaaatgtttaaatgtatgtaagagcggagttatttttatttagtgtttagaagtgttttcggtatttgataaaaatgtcaatagcggaaagcatctcttttattgttctctttggaatattttgaccgaaacttttaaaaaatattacattttttttcccaaaaagaatgcttgaaatatttacataaaacaactaaatgtttttgtcggagatattgtacgagtacaacgctttctacgaagtgcttattttaaaaaaataaacaaataaaaaatcttgctctcaatctcattattatatttctcatgtgggtcgagtattctgaggtcaaaagtttccttaaatctcaaaaagattaaccaaaagtaaagaataaagtaaactatcctttcctcaccatattcattatttgaagcactattccatcttcttttctttttttttttaatattatcaaatgtgaaaatataatttttagattcaaggtatttccttgtttaattaaatacaatattattatccagataatgaatatggagtccatccttgcctcaaaatatcatcaagcaccatagttacttgaaataatatttagtttcccaaaaacagaatgtctttctttccaattttcttgtagaaatgttttatttggtgttattataataactttatgttcaattttcacttatttgttcatttaattttttgttcaggttgatttaactggaggttact

SEQ ID NO: 82155 - DNA, 760 bp, Citrus sinensis
  Intron number 1 from transcript orange1.1g029681m (locus o range1.1g028236m.g) derived from phytozome v7.0 (chr-ID sc affold00614; pos 62156 to 62915 reverse strand)
gcgagcttatcaatgtgagtcttcaataactttcttcgtttcttttagatttttctctttcattttttctgggttgattgaattatctttgatttttttgtccgcacgttttaaaatgggaatttgaagctagactgcctcttctaataactaataatttaagactgtattgtagctagacaatatagtcccaggatgagcattttaaaacatgccaatgtgacataaaatattcaaatgatgatattagtgcggagtggctttcttgttttgcatttgtgggtgacatattacattagatttcagaatttggatagttattgatgaaaatactttcactatgaccagttacaaaagaaatatgttgaaaatttggtttttgatattaacaactagaactttaaaagccttttttctgcaatcagctgctgaacatatatatgcacgaacaagttttggaacttgcagtgcaatttgatttctatcccaattcatagtgagcacattcttctgccaattgtcccaaacttttaaaaaatgtttgatagtcattgggaatgccagtgagataaataggtttcttgtgaatattcttttgatagaatttttagcacatcatgaatcatgagtaatacagaatgatctttgaaaccaagtgataaaaactatgagaatacctgttaccgaatattccacaaattttactgatttgtgttcttctttttgcaaatataggttcactacactgcaagatttgctg

SEQ ID NO: 82156 - DNA, 491 bp, Citrus sinensis
  Intron number 2 from transcript orange1.1g006114m (locus o range1.1g006114m.g) derived from phytozome v7.0 (chr-ID sc affold00274; pos 142365 to 142855 reverse strand)
ttgtacagctagagataagtttgaaaaatagcaaggtacttcccttctttcacaaagtctcgactatctagcaactcatcttcttttccgctttaagcaatgctctattttgtttgatacattctcttaatcaacttaacttagtaatatcatactagtggatatatcatgcataataactatttccttaattttacaatcgagaaacaaaagctgacttgggctttgtatcagtcactgggtcagtggtagttacaattagtgtgcaagttcacacaaagtttgatagatatttctgtgtatggaagtgctagacgtgtgaaaagtttgattgttgttcttaagttactgttgtataattctagaatcagtttatttgttaatgaaaaaagttaaactacattttttttttcttggttaaactacattttttttttcttggttctctgttagtagcaacaacaacttgataattcttcataccagaaagt

SEQ ID NO: 82157 - DNA, 733 bp, Citrus sinensis
  Intron number 2 from transcript orange1.1g017608m (locus o range1.1g017608m.g) derived from phytozome v7.0 (chr-ID sc affold00103; pos 138085 to 138817)
tttgtaaagaactcaggaacttgaaagtggccagcagtccaaatcctctggctccattcagatagattagattgcaaatgcttctgcgtgtgcttatgtttgccaaacagagtgtaactttaaactatcgtgagaaaattttgtgtagagtttagcttttgtcatgttttgtgttagattcataatgtggcacaatggatttgtattaatcataagtgaccgccaatgtttttgcaagaaaagaagcaatatcatctgttaccatacagtggtgcaactactattagatgagacccaatatctaaatttgaacccccccccaaaaaaaatcaacgttctttgtttttcattgttgcaaattacataacctgtaagtgatgctgaattttttttaaatttattttgaatagtacaataaaaatttactctcttacaattggtgctacatgtctaataaaagctttgttgtaatattaacttctattatcttcacataacaatatgtacgtgtcgcatggatttgattgagcgcgtagcaacttctcaggggactataatatgaagcccagagttccagagctccatatcagcgcctcgtgtatccaaatcagagtcgatttaacgacaaatgttcttcttcccgaaagggccccaaccattttttcacaatacccaaaagacccctgaactgtttccctcccaacgtttcaagaactatcgcgacctcgcggga

SEQ ID NO: 82158 - DNA, 500 bp, Citrus sinensis
  Intron number 2 from transcript orange1.1g005204m (locus o range1.1g005204m.g) derived from phytozome v7.0 (chr-ID sc affold00008; pos 2391730 to 2392229)
ctctgcccaaaagtattttctttgctttcttctttttagttgaattcctagagtttatttgatttaattcacagatgtttatcctttagaactaaagtaagtgtattatgcacccgttaatgtgatattcacatttttattattacctgtgcatgtggttgagggtaattcataagagaagagtgttttatagatgatcactacaagcttgcttaaagtctcgtgctgtggatgttacggggctttttgctatatgtttctcaaatgaaaatgattttaaaaaatttttaaaaaatcttgtgaagaatcttaaatgatttctactttacttgctttagttttcttccttaaaatgtctatacaagttttggtattttgtttgaatgcatctcttgtaggatactagttcattgaaggtatgctttcgatgctttcatttgatttataaattaatgcaaatgttagctatcatattagtaattattcttttcatcagtgta

SEQ ID NO: 82159 - DNA, 769 bp, Citrus sinensis
  Intron number 1 from transcript orange1.1g024382m (locus o range1.1g024382m.g) derived from phytozome v7.0 (chr-ID sc affold00021; pos 1340132 to 1340900)
agcaatttttcttcccactccgcacaacaggaaaggtaagaaaaacttttacaatttttgatcgattatttattatttttacatgtttttcaaaagcttcggattatatctttagatcactgaattgaagaatattcattatttatgatcttaattattcacttgtgctgacatctctcatcctgagtatttgatcgatctctgcaatctgttgttattgttcgtaataccttcattcgtatttgatacttgaagcgctgtcgttttaatgaaaagtttgccttttatagtcacctagatgtttcaaacacaacttcttttggctgagaaatgcttcaactgatccagattttaacttaataatgatttttgttttcgtatgtgaagcaacttgagctttgaattccttcttgttgcaaccattaatttacctgatcagcgctttgtttccatcaaaatcaagctgttcctatttcaattttggctttgtgtaattggcgttgattgacaattttcatgataagaggcttgatcattgtgattgtaaatgcaactggaatttttttttttttggagtgaatgaaattcagtgtttaagctgttgataaggttgtagtaaattcacgaaatgataattccatggaattattcaatattgagaaacatggaattgtaatctttattgaatttcagtccgatttcttattgtttgtatctaatacctgaataggcaggaagacttgctggcaaagctgacaagtgcattact

SEQ ID NO: 82160 - DNA, 782 bp, Citrus sinensis
  Intron number 1 from transcript orange1.1g030696m (locus o range1.1g030696m.g) derived from phytozome v7.0 (chr-ID sc affold00029; pos 877536 to 878317 reverse strand)
ccaacggctctgtttcgccctctgcttgtggtggagtctgtcacttctcttttatttacttttaatgttccattttttttttcaaattcaatttactcatttataaactgcaaatctattgtttactagccgtttatttattattctaaaaacaaatttattgattttatgaaatgcggtgtactctgatcttgaagttcttgttctgctaattttatgttttgagttccattaacattaatacattgatgatatactaattctgtgttgtttaggataaaagcacattgtgaaaatttaatttagagccacattaatgtgattagcaattcatctattacctttataaaggcaagccggttgagttctttattaatactgtactaatgataggcagatgttttattgatatgtttgtttctttttattgtttcctctttccccttgtatgggttggatggaggggtccatgtgaaagtattaattactttttttttaatcttccaattggaaagttttgtgaacaaaatatgagaggctttcttaagtatgaatctcccagctgcctgatttatttgctcgggatgtaattgcttgctcattcttgtgactgcatttgtttctcattgttgtggtggtcttagttttgcatgattgaatagattgaagtagtttatgccttttctttagcttgagattatattcttctttaaaataatttggttgcagtaacacatcttaaaacatacttttattgcagtctgagtcaagttcaactggaa

SEQ ID NO: 82161 - DNA, 782 bp, Citrus sinensis
  Intron number 3 from transcript orange1.1g020513m (locus o range1.1g015871m.g) derived from phytozome v7.0 (chr-ID sc affold00122; pos 148301 to 149082 reverse strand)
aactgttctcaagaaataggtgctcattcttattttttgtttcacttacctgtttactcagtttgttgataggtgtttggcttcaatttattccattttataaagatgctgctttttggagttgactcatttgatactcctcttttctcttattatatattgcagtcattgacatacatgtgtaatcatgtcaattatcaaagtaaccatcattgtggtcatgctggctgtcttaaactactattttgacctgcaaaaaattatgaagactcttaggagttgaatgtcctttgcgtctcaagctgcctttaacaaaagttactacaatatctcaattatgccctattgtggattgttttaacttcttatgtttaccatgataaattgatgctcaagcagttactgagagggaaagtgtaggaggtctctctgttggaacttttttgatgtactagattatcatagtgtttctggacaattatgagcaatgatgaacgtacaaattgcatgtgttttggcggttctttatcaggtagcgggtggaccagtggcagagaacatattctcttttgtgaatgatatgatgttataaatatgtttgtattaaattattattattattattttcagtttccttttgaccattcaattaatgcataggaggtatctatttcatttgaactgaaaaagaaaaaacatatttatacttttatcaatgattgcaatcatgcagcctttatattcatgaatgtttgttacagattaccttcaggatcaactaa

SEQ ID NO: 82162 - DNA, 758 bp, Citrus sinensis
  Intron number 2 from transcript orange1.1g020513m (locus o range1.1g015871m.g) derived from phytozome v7.0 (chr-ID sc affold00122; pos 149154 to 149911 reverse strand)
gagaatcacaatctcaaagttttgacttaatcaaagtaagttttgcttcatggatttgtagtcattagagccaaagcaatatgattcatatcattctcatgtctcatgtcctcgctgttgttttaagataaattaagtagtcaaaggctcaggaaacaaattctcttttccgataactttcctatttgtgaggcaagttgcagtttagaagatggcttttattttttcttgtatctagtgtttttatattctccttgcaaaaaggaggttaatagaggaagatgtgagaagaaattttatctactgcttaatttggttttcttgaactaaatattccatgttcttgtttgcataaactggattatcaaatcacttggctactacacagccgggcattctggatctcctcgtcttcgctacattttctgttttggagtataagtttaaccacctgcatgtatactcaggctcagcatgtctttgtcgagatatatcagaaggttccctagttagtccttcctcatcaagtggcaattctggagaaatataacagcaaacttttaatagtataacagagttgaagtccccttccacctaacggctaacgcacacacacacacatctataaagagtttaccagtcttttgttagaataaatgcactgggagaaaatgtgacataattgaggcttcaagaagtcatttacttcaataagttacctgttttcatacttgttttggctcagagactagaactcc

SEQ ID NO: 82163 - DNA, 482 bp, Citrus sinensis
  Intron number 1 from transcript orange1.1g034061m (locus o range1.1g034061m.g) derived from phytozome v7.0 (chr-ID sc affold00029; pos 16568 to 17049)
gtaaacaagaaagggttcctgtaaagaagttaactagtaaaaaaaggagtgataaaattataaaatacgcaatgtttgcatgtggtcgcagtggtaagtcagaaagtaaatctactgatgtgctgaaacctattgtgaaaactggttgagtccgtaacattagggcaagaaagcatattgaaatgaatgattgtgcggaaattaacattgcttgaaattttaattctattattgttgaagctgatgaatataaaaatgtctcagttctagaaaaagattgtagaaggagatgctatgacaattctaaagtacttccagaaaaagcaagtagaatacaatgatttttttttttcaacatgggtaatacatatattatccggtatttttcaccaaataattaccaacaaaataactaccaaataattaccaacatatatcaaacggtagaagagaaacggcagcgacttactttagagagggag

SEQ ID NO: 82164 - DNA, 815 bp, Citrus sinensis
  Intron number 1 from transcript orange1.1g008652m (locus o range1.1g008352m.g) derived from phytozome v7.0 (chr-ID sc affold00283; pos 208612 to 209426)
gtcctcctctgcttcttcgtcttcttcttcttcaggtaacttttctacttcctgtgtttctttcttttgtttttatctcttttcatgtttcttttgctacccggttggtggtgtgaggaattatttatcgctttcacattctatgaaatttctgtagatgatgggtagctgctatgaattttcattttaagttgatgcacactttatgttcatgtaccaataaagggaaatggggaatctgaactatgtgttattgggtttgcattgtatttgtttcactatgtgtagtttgctgcataagtagatgcgtacgataaggtatataattgcaaacttcaagagagtgtggatttttaatccacagtactgtagtaccaaacatacccttagttacagtctcagttatattttatcttattgttctatttatgatgatgagtctattttaagcatgatgatgggtcgatatatttagaaatgagattttcacaggcgatcttagtgtcggatgttttgcttgctaattaattgctatagttgtcttgagtgtgtgcatgtgttatgtactttgattgtttggggatatagagatatcctctatttttgatgaagcaaatgataggatttgtttgaccattttaatttgtacatcgataaatgtcttgatcttctgtgagatacttagagatttgtagtgattctactttttagataacatcttgcatgtttatgtgcataacatagcagttttgatgcataatgagcaatcagcccctgcagttgcttctgttccaacttcttctgtagctcgacat

SEQ ID NO: 82165 - DNA, 876 bp, Citrus sinensis
  Intron number 3 from transcript orange1.1g033973m (locus o range1.1g033778m.g) derived from phytozome v7.0 (chr-ID sc affold00506; pos 16816 to 17691 reverse strand)
tacattccagattggcaaaggctctgttataaaaggtaactctatggttttgcttttcggctactttttgaagtccatgattttacattgtttttgttctgttaacaacgagaggaatgaacacatttaagtttttagataagttatcattttatcagagtttgaatgttacgcttggaactcaagtttgtttctttatatttttgtagcaaaggcattttgaatatggcaaattaaatgtactatatcaaagaagtgactggtggtagtgcttgtttttgttgcgtccttgactggcgcttttgcttacaagttgctctgtgaccatttttgagatgtgtttataacccttttagttgtttgtttaagcaagaaactaatgtcttattttaaatttttaacctgagagttttatcttcctgtgtgtcaattatgcattttgttgctactgaagattgtgtttgttgtgcattgaagatgttttatgtaactcctctcctaatgcctatatttctttggtcatgtttgcaactctgtagtgctgttttaaaatcatctccaaacagcctcttaatatctgaattgataatttctagtgtcctagctaatttactggttattatttatgtatcataaattatattgaacacataatcattataatcataattttttttttgtcagaaagcatttcctttttaactctatgtcaagttaaggacatttcagctctgagatgaccacgatttttatattatctttgttcttttccttctcattttgatactttgggcatgatattgaatactaagaagataaactttaaatttataatgtataatgtgtataatcctatatgtttgatttatatgtagg

SEQ ID NO: 82166 - DNA, 538 bp, Citrus sinensis
  Intron number 1 from transcript orange1.1g033973m (locus o range1.1g033778m.g) derived from phytozome v7.0 (chr-ID sc affold00506; pos 17869 to 18406 reverse strand)
tggtcagaaggttaccgtccactgcactggctacggttagttttttttttttttttggttgtcaacttaatgcatttttttgtaaatacatcgaaagtttggtaatgggtatttgctaatattagtgataatcatattattttttttttagtgaatttttcaatggagaggacattatgtctgatctttatattttgagtgtgtgtgcatatgtataaaccgaaacctcttatgattctgtgagtttaggcacaagtaagggatgataatcgctgacttttctaagtgtgtcacacatatttaacttatagctttcagtttgtagagttggtatccgttattttcgtatataggtctcggtgaatcaatgttctgtgtttaatacatatactggcatacagtttaacctggcagggtcgtgctggaaaaatttgagtgtgtcaaagtaaactaattgtgaaatgagtggaagctttgttcatatatagttttcttctctttttacacctttaaatatttctttttaatgcagggaaaa

SEQ ID NO: 82167 - DNA, 960 bp, Citrus sinensis
  Intron number 3 from transcript orange1.1g035563m (locus o range1.1g035563m.g) derived from phytozome v7.0 (chr-ID sc affold00021; pos 1540948 to 1541907 reverse strand)
acttccttggtgaagccacgtaagtccatgttactatcagtcttaaaatcactatatatatattttttttggaacaaaaaatgaataaataagtccaaagttttgagcttgggtatgttcttttctttctttgtacataatttcactacccaaagagaatgttcaacttacagtcactgcaaaatttcatttgtgttaatctacttgctttattcacctcctggatatataacatggaggtttcctatatggtgttgatactgatatctgtcttgggttttgatgaaatggcatctttcccgtggacatgtgcactaaatcccttttttcaacaaatatgtctgctaactaattccaataacaagaagaaccaactatttagctgagtaatgccaagcaaaaggtaaaatatagctgaacagaaactgatttgagaggatcacatagctctgtttgacctctagatgtttttgcgtgtcacaactgaaggcaaactctttgtgttggattacatagttatccatctatcatttggtcctttaggattacctaaatttgctttacatatgtcaacttaatagtttatccaaaaatcattctaaatccttcccgaagatgagatagataactaagtatcacgccacttgaatgatctatacactactcattggtgaggataactacttttaactaaactattggtaaggttcatcagacctcaccaatatgtctttgtcaatatatttgaagtaaaattgattttcgtgaaaccacactaataaaagccaccataatgttcaatgaaaggcttcttcacagtcctatttatgagacttcctgtcacaaaaacaatcatagtacttatattgttgagaatatatacattgccaaacaatccaatatctctcttatgatgtgactaaatagtagtggtacattgattttccgcttctagaatct

SEQ ID NO: 82168 - DNA, 664 bp, Citrus sinensis
  Intron number 1 from transcript orange1.1g044965m (locus o range1.1g044965m.g) derived from phytozome v7.0 (chr-ID sc affold00188; pos 26460 to 27123 reverse strand)
attgcgagagattcctataccacgttacagatcaagtaagaacattttccagtatatgctctaagtgattacgtaaacgaatattatttcatttatttatgtctatttcatgttattttttatttttcctattaacatgcttcataattcatatcaaaatattggcttcagacttgttttctttcctagcttgaaggtttttgtcctggtgtgactcttattttagggaagcatagaagcttttttattttgtgtcagggtgtgtgtttattttctacgctctgtggggtaatggttttgccatctaaaatgttcttgttatctgctgtttatgctgaaatgttggtgttattgatctggatgaaaattttcatttggatgggattcctgtgatataaaaacagtttctagaaaaatgaatctgcattacagttaatagaagagtttagttattgataggccgagatttttattggattactttttcattggattgctgtttgtgtttatattcataggtgatctattgcatgctaaacagtcatttcactacattagaatttataccatactaattacttacagattttcttttcttgttttccttatttaaattgaatattgctgtgatgtcatctaaattaattggaccttggccatgcag

SEQ ID NO: 82169 - DNA, 516 bp, Citrus sinensis
  Intron number 1 from transcript orange1.1g040222m (locus o range1.1g040222m.g) derived from phytozome v7.0 (chr-ID sc affold08701; pos 673 to 1188 reverse strand)
agcggcgattcctttgatcgttacagagaatacaggttttaatttaattctttcattcactcataattctgtatttttgatacttctgttcttttctaatttagtagagtattaactggttacctgtcaattcaatttttatatatggggcgtatttaactatttgttccttcccactaacttgaattcaattttgtgtttttttttttaatactgaaaatagcataaatacactacattgcatgtttgtcagttctcttaaaatggacatcaaggactagacaaagatgaataattaactctcaacagtttgtagcagcttatgtatgtttttctgtaaaatttgaactttatggagtcagtagggacccctgcagataccattactattcagaaatgcaatcctgttcttcttgtcatttttatactcatgtaattacttctcaaaggatgtttgattggagatggaacttgatggcaggtactgtttatctgtgaacgttattgcatttgtat

SEQ ID NO: 82170 - DNA, 881 bp, Citrus sinensis
  Intron number 2 from transcript orange1.1g008318m (locus o range1.1g007659m.g) derived from phytozome v7.0 (chr-ID sc affold00015; pos 1712117 to 1712997)
tgctccaggggcctctgccacccaagttcaatcaagtgagatatgtgacttaaaaatggttctctcttcttactgccataattttgctgctaatttttggcatattttcgtcgtatatttctttcgttcttcctaaattcgtggtttaaaaattaggctttcagtcctatgtgtttctgtatttacaatgatagtatgggtgttgtcaaaattttccttgcagttttataagtgcatgataaaatcaatgtgtaataacttctttacattaggtgtggacacatgggatagtacaagttgtgcggacaggtgaaaacatttgtctactgctttgcaatggaaatgtttttaattttgttttcttttttaaacattgagttcaaggttgttagtgtttctggttaaaactgtgaattgttaaaatttgggtgtttcattcattgcaagtggcctattaactgggtcatctaccttaatgtctggataggaaatttcttctatgacaaatagtgtttactcacctgcttattttggctaaaaataatgatatttatggtgtcttagaatgtgtgtcctttgcatattctaatatggtggttggtgacctctattctgctaaatgctattgctttttaattattttgcaaaatgggaatattttccaatttatcagtggctaacttataaattgtggaggtttctccctcgcgttgatgcatttttacaaatttagttcttgtatcctatattttctttggatttgtcatcaggtgtttgaaattttatatcccttttaggctgaagtctatttcacatttcttctttggcttttaaatcaataatgattttgtaaattgtttctttttagcctaaggtccaag

SEQ ID NO: 82171 - DNA, 702 bp, Citrus sinensis
  Intron number 5 from transcript orange1.1g007152m (locus o range1.1g006489m.g) derived from phytozome v7.0 (chr-ID sc affold00030; pos 861408 to 862109)
accatcctcagtatctttctgattgttatagtcgggtatgatactttctagataaattcgaagttttgcttgattttcaaagaaaagattatttcattcagttgtttcctagttggctatgattttactacatttctcatattgaaaatttgtttgaaaaaacgacactcatgtcaattgtgctccacacttgtatttatggaagattatcggacaatgcttatttttcaaaattatgtacaactttttgagaatgacattcaaatttgttatacaactcttacacacttgcaagcttgataattggtttactttttgctgttcttttacgagtagtggcatgccattagatcttaatattcatatttgattaaatgtgtagaaacatacacatgcattaccatgcttttgtttattgatttttgagaattgtcatgtcttcttctctgtgtcattgttgaaacagaaacacttgtgtagtactagagagctcatggcaaacaatgaattagttaatatggcatatcctatttaacaatataactgactcggaacagtcagatgtatttgttccaaagttgctaacaaaaacgtataaatgaattacattggtcctgttctctttgatgagcatctcatgggcatttatttatcttttgggatttttttcctcttcagttcagtttgtaccgcactacgagc

SEQ ID NO: 82172 - DNA, 564 bp, Citrus sinensis
  Intron number 2 from transcript orange1.1g000875m (locus o range1.1g000792m.g) derived from phytozome v7.0 (chr-ID sc affold00506; pos 115882 to 116445 reverse strand)
aggtgataatctgaacatgtttcatgtataaattcgcatataaaataactaataatgataacacctagccgcatgcagacatgtctacccatgacagtcttcacttggatgtttttagcttttccttgtgaattgtgcatgttataaggtttatccatgttacaaatcttttgatttttttgaggcatttactttggggatcatggttaaattctactcttttgatgcatccacttattggaaataagaaggctagacctgacaattttgatgcttattggtgtcagttctgctattatgtattgatctgtggtacatatgctgaagaaaatagtgacgtgtcattatatcatgtttttgtatacatttggtctctacagaactacatttagttttgctttcgtatggccaaaaggggtttacaatttctgtttttctagatttggaattttctttcatttttttcccctcagagttcatctctagaactgttgatcacattaatggtagtgatgcaattaattttcaggacgcaaaggagcaccttgctgcagttgccgacaa

SEQ ID NO: 82173 - DNA, 830 bp, Citrus sinensis
  Intron number 4 from transcript orange1.1g016860m (locus o range1.1g014705m.g) derived from phytozome v7.0 (chr-ID sc affold00130; pos 284655 to 285484 reverse strand)
cttctcaagatacggtgacaccttttttgaggcaagtttttttttttttaattttcagttttgaggaaataaatgaaaatttgatatttttctgttagaattaaattgttgggatcattagcatgatattaagaatagtgagctttgactattttgtactaaattattgagatctcagcaaataataatggatacttgatctcgtatgggttttgctaatattaagaacagtgagctttgactagtttggactagattcttgagatctcaccgagcaacaatggatatttgatctcatatgagttttgctttatggcacagttgactcgtttagaattcagaattttaagtttctttaattttatattaacagggggtatggttgcaactaaggaaactgcttatacttttatcttgaaaatgcacttgtaactatgatgtttccaaaaccagtgttatactcctctttctactcttgattccttgtctatactttctattttcacttgcatcatttgcataaagtgtatcctttagacggagggtccgaaggtttatgttacttgtgaaccatctcaaacgatgtttcactggattgcatcagtgtcttcttatgaatgtattaatttcttgctattttctcccattaaccttctccgacacatttatgcccttgaagtttggtggcttttgacattattgatatctattagtggtctaagtcaatttctcataaatcctttttcttgataggcataaatcttttgacattagaattttgctatttaaatgcaggttgttttcacaggaggccgtacgcaacctggaac

SEQ ID NO: 82174 - DNA, 292 bp, Citrus sinensis
  Intron number 1 from transcript orange1.1g031335m (locus o range1.1g031335m.g) derived from phytozome v7.0 (chr-ID sc affold00177; pos 152709 to 153000)
gttgcaaaggcttttggggttcgcctggtgagttatgcttgtttgcagtgcatttttttattatgattattatgctcattttgatgttttgtcaaatgtttctagttttctgggtttgttgcacaaatcttactgtattccttgatattctggtgttcttgatgaagaaatttcaaactacccaaaccttcttaactgattttctggtttggagtgaggagctaaaagacgtttgctatgtgctgactaactgtattttgcttggttaatcatctttaattgaaggctccgg

SEQ ID NO: 82175 - DNA, 580 bp, Citrus sinensis
  Intron number 2 from transcript orange1.1g031335m (locus o range1.1g031335m.g) derived from phytozome v7.0 (chr-ID sc affold00177; pos 153223 to 153802)
gtagtcaggagacttttgggatacaaatatcccaggtaggtggctttaaggggttttgaaccattcctcttgtatgatttggaaacttggcatgctccctctcttcacccacccctgccttcctttcttttcttttggttcatcttttattattattattattattactactactactactctcacacaatgatggttcaaactgtcaaactcctcgacttcaacatctgagtcttgcccacaccttatatctgtagtttgttgaatgaaatgattaggttcgcgtgtaaactgatgccttcctttgtgcttaatacatttgatgatgatgttaattccttggttttgttttgggatagttttttgtttggacatactatatggtcattagtagggagtacattctttccactgcttttagttgcttttcgttttcatctatcttttgttttcttcagcatatacctatgcatgcaagtccatcaacgttgatttttttttttttgggggggggtaaaaaatggaggtatttgagtttttgtgtcttcaatttgatctcattcttggatttccttttcag

SEQ ID NO: 82176 - DNA, 717 bp, Citrus sinensis
  Intron number 2 from transcript orange1.1g024106m (locus o range1.1g024106m.g) derived from phytozome v7.0 (chr-ID sc affold00001; pos 372177 to 372893 reverse strand)
actggacagagggaatacttgccattcaacttctggtaactttcactctctcagtttctctattaacacaataattgttctaattcacactgaagtgatttttctttttcttctatttgaattgattgaattttggatctggaggttaactcagtgtatgcttagcttcgaaagcttcttcttcatgttttcggagattcaaatttgttgtggtgggtgagcttgttgtaaaatactaatttctatttttgaattattgtttttttgttgttaggttaatatgtaattccgaagatggtgaaatttggcaactgcaaatttcttattgaaatatttgattacaaacatgtcacctgtgtttctactcattaaactctgttcagtatttcttaatttgataagcattacttttcatgctgcttcaatttgcttttaaatttttatgaacgtttaagtttgtgtggatcttcttcattatgatttctgcttgttgatttctttggaaattctgaaaatccttatgcttgaaaaacatactctgtggatactattttgcgacatggaaattctataaatatcattgtaaataaatgatgaacttgaggagagatgatagctcgcactttgcagttgaaggtctaagtggtccattttcatgagcagatggttttatttgttacagctgaggttgtcgcaggatcagctgcgtggctgggt

SEQ ID NO: 82177 - DNA, 860 bp, Citrus sinensis
  Intron number 3 from transcript orange1.1g002232m (locus o range1.1g002232m.g) derived from phytozome v7.0 (chr-ID sc affold00358; pos 140038 to 140897 reverse strand)
gaaaattttcactttggaagtccatttctcaagcaagtatttacttaagaaacaattgtgcacaaattatgtaactatagacaaaatacacacacatctcatacatgcatctcataaattatccaaactcacactcagacataagcatgcattaatgattcacataatatgcatgttcacttttcttcttgttcacttttcttcttgtggttatattagtaagaacggttaaaggcttatgtggaaagcagtattctattccttcgtggtaacttctgctagtctgattttcgatatacagatatgttttatgccactggtatatgtcaagatttaagaatacttttaagctgatttgcaagcacaagcagtcagacgagggtagtgagaaggattagtgattttggattaagttataggttggatgattagaaagagagagagatatgaaagaatgacgtgcctcttgtcttgagatgactgttttatttcattctcatgatagtgtattgcagttatgcttgttttgggtcatgccagggtaacaagggaatctggaaaatttaacctgcgaatcaaagtgagaaaagaaatagtcaggttatcacttggttcacattatttggtatcatttgggtctactgtgtccaagcttgtatgaaacaaactttatcacaactgcagctttatttataagctatttgtatgcttcagcatgatatagaatgtgaaagatggacgtataatgtactttatggtccttgaaagacttatccctagtccaagatccgggttagtttatgtaatggaaaaaaattgctgcaggggtgcttcactttgttcaggcaattttcatcctg

SEQ ID NO: 82178 - DNA, 422 bp, Citrus sinensis
  Intron number 1 from transcript orange1.1g002232m (locus o range1.1g002232m.g) derived from phytozome v7.0 (chr-ID sc affold00358; pos 141550 to 141971 reverse strand)
ctgatttagtgggccagagttagagttaatttcaggtattactttttgttctgtgcctttttattttagggtttattttcttattttttcgctaattcgagttcttaattacgttctttttcattgtcttctttatctgggggataattggttttgggtctgtattgtgttaattcaaatggtttaattcttttcagttgcattgttggatgttgaagattgttttttcgttttactgaaatttggcctggatatgtggcttatttattttctttttcattaaaaatagcttagtaaaatttatactttggagtcgtgaactaatttggtgattgttgaatattgttgttgcttccttgaactcttgtgtttattttgttttttcagtatcacttctattatctggtgattcattggcttaa

SEQ ID NO: 82179 - DNA, 302 bp, Citrus sinensis
  Intron number 1 from transcript orange1.1g014634m (locus o range1.1g014634m.g) derived from phytozome v7.0 (chr-ID sc affold00015; pos 1233639 to 1233940)
ctttgtcaggttctacttctaagcttcttcttaaaacaatcaaaatcagttgaatatattgattgaactgtcagacaaatctgttgtagcattctattatctgtttagttcactgattgaaattgttttttgaattattttttttctcgagtaccaaagaagaacaatgagcatatatattagctaggagttcaattagcatcattccatatgcttattcttcacatttaagcaagcactgtggttcactaactaattttcaattattttggtaccaggagttgggatcctgtcaaccccat

SEQ ID NO: 82180 - DNA, 595 bp, Citrus sinensis
  Intron number 2 from transcript orange1.1g014034m (locus o range1.1g013790m.g) derived from phytozome v7.0 (chr-ID sc affold00001; pos 252267 to 252861 reverse strand)
ttgctatcaaaaagcttaacagggacggcttgcaggtatgaaattaaattaattattatctcaatattcttcttctttttttaattttttgatttgtttggcgatccattttctaataaaaatattatatttgaatgcttggagtatgtatgtatgtatttggtcaaaactccgatgtgattgtagtttctgttcaaatttttgcttatgaatgccttttttcttgcttctgatttcttacttcacacgaacctagtcttgcatttcaatcattatcttcggcactcatttgtactcagattgctaacctttggctttagctatacattttgaaccaaacatatgctcataggccatatgcaaatgcaaatcaaagatgcccaagccatatatatatatattgtggttagcgtattaaatccctatgtattagctcattcagggcttttctttaaccccgaaagatcaccaattgggttctttgttgttagatttgtattttccagtacatgatatttacttgccctaatactttgcaactcaaatagggtcacaaacagtgggtagcagaggtccaatttcttggtgttctgga

SEQ ID NO: 82181 - DNA, 921 bp, Citrus sinensis
  Intron number 2 from transcript orange1.1g022958m (locus o range1.1g022958m.g) derived from phytozome v7.0 (chr-ID sc affold00235; pos 79168 to 80088 reverse strand)
ttcaaccgtataactggtgtgaaggacaaggttattacttcacctgaaattcctggtgtttgtggctgacttggattttcactattatgaagaatttggatttattcgcctgtgtacaactctttatcccttctttagtattgcatctaaaatttatttatacactaatcccttagttttgacatagtcttagcattgtggtgattattttttgagaatgagtcatccttctaaaagggttttcctttactcatgggaaattaaatttttttgtgtatcatttttttttcgtctgataatttggatcttcaactgatgtttgattggatctttgtttttttgaggctttttctcatggcatcatgtcattgtgcttacaaaaatggttcattggtggttcaactaaaactcttatcatttacttcttggaaaaaaaaaattgaatatttctgcaataataaaacctctttttcaaattctccattaagtatgttggtgaaagtgtttgtcatgcagaccatcattagatttattttatgctccaatatatatatgtgtatatattcccgctttgcctttcctggttcatgttatttcagattactgggcatcatcttctgtctgaacattttttaatgtttttgaacactcgtacagttgcctttacaatactatccttagcattagagtcaacttctctgaaaaagtgaaggatacatcatcatcatgattttctttgctttaaatcagcattgccttctctctctctctcatatattatgtgcatcagtgaatctttattcttgttgatgctgatttctgagagatttcttactttgttcggtaatttctgcactgtaacagattccattatggtgattcatgttgaatatgcaggtttatcctgaggggactcatcta

SEQ ID NO: 82182 - DNA, 322 bp, Citrus sinensis
  Intron number 1 from transcript orange1.1g011916m (locus o range1.1g011916m.g) derived from phytozome v7.0 (chr-ID sc affold00021; pos 1472547 to 1472868)
agctcccacggaaagtgcccaagactccacataaggtcagtgagcctgatttgattctgtggccgcaatttctttttccccttttcttaggttgcattgaagatacgagatagagcaggaaacaatttttatgtttatttcaatggtcaatatttaagcatcattcatgtaggcagtggcattttggtcctttgctacacattgtgtagaaatgcagtcattcttttgacaaattgatttgagcattgcgtaggagttatagagatatctagacagctttgtgctgatgggtaaaagttttaatgatggctgcaggttctgg

SEQ ID NO: 82183 - DNA, 707 bp, Citrus sinensis
  Intron number 2 from transcript orange1.1g025520m (locus o range1.1g018199m.g) derived from phytozome v7.0 (chr-ID sc affold00001; pos 2248611 to 2249317 reverse strand)
cataccttaggtctcgtcttagtgtcgattgtaatgtgagtttttttttaaaattatttttggagctaatttcaatgtttgattatgtgtttactgtctatgtgaatatatgtgataattagtgaaatatttgattctcctctcttttctactttccatttatctttatgagtaatgcaatttatgtcaatttaagcttttcttgcctgtgatttttgaattatgttttcttgtagatgtgaattttgggtccatttgttttggtgatgaattctagtatatgtatttagtttttagatgtctcatgaatatttagttagatttgttgaaggattttatgtcttatcatgtcctttttatgattattcagtaatttggttttaacatctgccaatttttttaatacacacaagcataagcttcaaaataattgcaaggtgcttttgttaaaagatgtaaaataaataatagtaataataattgcaagatgtcttaagtttagcttggatgtatttatttcatattccatatgaaacgcaaatttatggaaacttttatcgttggtggaacatgttgatgtctacatgtttgtttccccttggtgactgttgttatgcatgctatatctataatatatctgtgtctatacatctgtttgaggtttgggtttgttcgctaagtatatatcttctaaattgttgccagat

SEQ ID NO: 82184 - DNA, 908 bp, Citrus sinensis
  Intron number 2 from transcript orange1.1g003210m (locus o range1.1g001126m.g) derived from phytozome v7.0 (chr-ID sc affold00507; pos 17173 to 18080)
accctacttcgaggagtattttgggttataaagtaagcaacacatcttatttttccattggagttctgcatagcttatgggattatggttactatgtagacagtatactgtatgtatgattcacttgctttactctcagttaaattttaacatttcaagtatgattttacagttctgaattacaaaatttcttgtgaagggaaagataatagctgccaattgtgtaaagttttttacaagtgactgaacactggcgccttttttttggggggcggggggtaaaacttccatatgtatgtttggtgtcttgttggattgatgtttgtggtgacgatggtaaaagaactaaaaggaagcctagtattcatggctttgtgaggggattatacctgggctgatgagcaatgaaatgaaatgtcaatcatcctagtttgtttgatttaatatgtaaagggtccttttcaaaaaatgataatttgattaatgcaatttagattacacttacgtgacattttgaagtgtctgtcgtaaaagtgacattttgaagtgtctgtcgtaaaattgtactgtatcaagtttggacatatgatttacttttacaaaaaaagaatatgtccctaagcctggtcggaaatagatgtttaatatactaaagtaaacagtgatgcatacttttttttttaaagtgtgtgtgagtgtgaaagttaggtgcttgtacggttagtccagctgatgctcaattagctttatatgttcaactttatccatgattgctgagatttcggtgccgtgctcctcttagcatttcttgaatttctcttacgtattacatgccatgatcattattttctatagatcttccttggagatggttttcaagcacaccccttttcgttatctcatgcagg

SEQ ID NO: 82185 - DNA, 802 bp, Citrus sinensis
  Intron number 4 from transcript orange1.1g003155m (locus o range1.1g002041m.g) derived from phytozome v7.0 (chr-ID sc affold00020; pos 1543966 to 1544767 reverse strand)
aactcaaggagcaggtaaaaacatttcttcggatgatgcggtttgcaactgagttcatatggttattattaaagaaagtttcgcttcttaatttttgtgtttgattagtgtgctgttgaaaatatttagatgggttctgtttattgaagtggtggaaagtatgaaaagggagtcattcattttaaaagtcaagtccactgatagtatgcctccattattttgtttttttaattgggtactcttcaaatgagggcccaatgttgcctaagtttcactaaaattaactagtttttattagacgtcatcggggaatatctagattatgtaaaattcatatatgaattcaaaatgcaaatccttcaactgaatatgtcatcttttttgtttttagagttctttcttagccttaaaattttatatctgaatagcaaaagtgatatggtgcagaaaaggcagcaccattgagacaataatcatggttctattgtagcagttggtaactatcggtggcatggcatagattgtcttctaaaactgtaaaaatcgtatttactagctctttagctatccttttcagtggttcacttctggaaattttaattttcaaccaggacttataaaactttggcattatcattcccaatgtaatagatatatgcatcattatataaaataaaatagaaagaacaaaaaaaattgaaggttcctcttttaagtttttcatcaggtggctttttgatcatttcatcttttgattggtttcccaggttcttgaggcatttgcatcttggcttcgtttgaa

SEQ ID NO: 82186 - DNA, 740 bp, Citrus sinensis
  Intron number 3 from transcript orange1.1g001351m (locus o range1.1g001301m.g) derived from phytozome v7.0 (chr-ID sc affold00042; pos 466479 to 467218 reverse strand)
ctgaattgactaaggagaaactctctgatttccaggtaatgctttcatatgctttgtaaaagctgatgcatcatttttgaattacagaattgtttgttgatggttatttatttttcctttttttttggggtgacattatgtgttaaagtagagtcagtgtgcttattgtcatctttggaatgttttgaaattaattttagctatgattttgtaagcttttgtgttataatgatttttagtattttggcttctcatcaacaaaatcaatatgaaaatttactgatctactatggtagcgttggtaattctgtagatgaagacattaggtgctagaacctttaaaccagaggaccataacttatgtgctaaatggtgtccaccatgcatttcagtgctgcctgttttcattgttctttgagtagcggctggaattataagttgcaagggtaagaaaggattttatgttcttccttcagtaatcttatatgattaatagctggacttctgttgtatatccagttaaggatttttcgttccttcagtaattttactttcttcaatggttctgcattctgtacttttcattttgatcctgtctaactatagtgaaaaatgttcatgtctttttatgcttttattctataatcttgctttatttattagtatttgagtttatgaaattttcatttgaattgtattcttcaggctgtagtctttactgatatcagcttagagaaagc

SEQ ID NO: 82187 - DNA, 909 bp, Citrus sinensis
  Intron number 1 from transcript orange1.1g029387m (locus o range1.1g029387m.g) derived from phytozome v7.0 (chr-ID sc affold00012; pos 678490 to 679398)
tttcgccgtcaacgagggacttaagctcgttcctggtttgcatgcaaccttttattttatgatactattactactcgctatttgttttcatatttttttaaaaatatttatttgcttttgttttctttctatatgctagatgattaattgatgtctgaaaatagtttaaggataagtgatttcttttttgatattgttacgacttacgaggatgtttcgtccgtactataaggatcaatgtgaccaagttgttcacttgggatttttcaatctcacaaactgcggtatgtgatctcattatgaattggtttacatcgtaattggttggttcataatgctggatatctagcaatagttagttattcaggctgtttctaggaaagacaagacgaacctcttggctttggcataggtcttgtcacttccatttgtaaggggactttgtgcctgcctttcaccagagaagtgaaatatgcatgatagagggattagttgctactatttcagttacatttcttcgttagcaaaatatttcatgcagttctggctgttgtttttagatgattctatgttagtttgccattgcaatgcccccaaacgggccccagtgccactcgataagtctttagagatcttttggacttggattggtggggttctcatcataccctgcaccagaacgccaatggcatcagagtttataagttctgtaaattagtttgtgttttcacttgtagcaaatgctgtcttaattacttgtaacttcaaaatgccttgcttatggcgcacacgctctctgactctctgtaaagatagaaagtgttggcatgatgtgacttgttagtttcccttctaaatggataattattttcaggtggatccgcagttgccaacattgtatatcgatcc

SEQ ID NO: 82188 - DNA, 359 bp, Citrus sinensis
  Intron number 2 from transcript orange1.1g001534m (locus o range1.1g001159m.g) derived from phytozome v7.0 (chr-ID sc affold00204; pos 160950 to 161308 reverse strand)
atcaggaagcagaagtatttggaagctcttgataggtgagtttttgagtatctgcattcaatcacttctttgtcaatgattaagttttaaaatcattaatctttcaccactaatgcttgtgccaaaatccaataaaaattgatgtgataaggacattttaagaatgaatggggagattattttagcttttgtcctatttagaaaggctgttgtggttattgtttctctgcaggcatttgagtttttggtttgtgatctgaaatttttgtttatgcttaaacggttttatacataatgatgttcttttcctgctttcctgctcaggcaagatcgagcaaaggctgttgagattcttgtca

SEQ ID NO: 82189 - DNA, 494 bp, Citrus sinensis
  Intron number 1 from transcript orange1.1g001534m (locus o range1.1g001159m.g) derived from phytozome v7.0 (chr-ID sc affold00204; pos 161423 to 161916 reverse strand)
aggaaaagttcaaggaaacagttcataagtaagtttagttttcattttgattgttttctttcattttaagattcttttttgctgccgggacaactcaggaaatcaaagaaacatttacaatttaagcttacagttaagtaaagcttgttgacattattctgacggaatactgttgtgggcttaattataatgggggttttcaagttgttaagttatgaaaattttttgagttgcttactgtttttgaagtactttgctcacttttcaaagtcgtaagttgcttgcttttagctcttcatgatgagacaattactttcacagtgcttgcaaagtaatttcttagttgtttcatcattttctgtattgtctggttgcgggtggagtttaagacagttgagatgtggatagctggctaatcctctgtttttgtctgtgtacatgttaattggaaactaaatattaggttggagcaagagtctggttttttcttcaat

SEQ ID NO: 82190 - DNA, 646 bp, Citrus sinensis
  Intron number 1 from transcript orange1.1g028822m (locus o range1.1g027729m.g) derived from phytozome v7.0 (chr-ID sc affold00188; pos 127403 to 128048 reverse strand)
gggctcttcttccttgagtttcccttggaagtaaagtgaattttactttgatatacttcttgatttttggtatcttttgctggtgaaaaagtttatattgcttaaaataagtttaaagttagtgctagctactaggcttaaggttgaattaagaagtaaatataacttaatgtatttcgagtgatggtaacacaagatatgaaacttcttagtaaagcacttcttagattaagcacttattagctaagtgacaataaccatgaggccagtgggcttatgcttctagctatgttaaagcaaagattgagagaaaacacaataacatgtgttgtaacttcattgtgctctcataaaaattataatctacaattaaaaaatataacaagtcaccgactctgacttaaaaatgacaatttgataacactcggaaggcaagaacggtaagtcttcaacaattctgccttgaccctttttttttttctgatattgagtaatcactgatgatctctgattttaaaagtgcgatatcctttgtttatagcttcattgtacttttttcattgtttcaacccatggcagtaaaaaatttatgttgtgatgatattggtttatgttcttttaaatccttttaacaggcaagagtatc

SEQ ID NO: 82191 - DNA, 263 bp, Citrus sinensis
  Intron number 2 from transcript orange1.1g002148m (locus o range1.1g002041m.g) derived from phytozome v7.0 (chr-ID sc affold00020; pos 1546149 to 1546411 reverse strand)
cattgatcttttgttctcagacgcttagaagcaaggtaactgcatttattattttttgtttttaatttattctcgtctcatgattatatgtacacttgggtgctttacaattcttcagttctattctctttggaagatgttaacgctgacgtaggactaaagcaacaaaaccttttctggcatgtcatcttatttatcattatatttgctgttaatagtgaagattttgatgcctttcagatttgattcataggtacaacgag

SEQ ID NO: 82192 - DNA, 543 bp, Citrus sinensis
  Intron number 1 from transcript orange1.1g002148m (locus o range1.1g002041m.g) derived from phytozome v7.0 (chr-ID sc affold00020; pos 1546436 to 1546978 reverse strand)
cttggcaggtaccttatacctttcacaatctttctcatttctttcttcgcaacaaattcaaatttacgttgattgatagcgcttactactttaagctctcttcaacttcagttcaattatatattatcgtttatttgattattatatttttttataattttgtcatttgcgtttctatttctggcaagatttgatcagtcagttgtatttggatattgaagagtcttaagttccaattgcatggctattgaagaatttttagggttttgtatgaattttgagtgtgctaaaaatagtatgcttaccttttgtctttatcatagcggaagtacttaaattcgttggttattagaattagttgtgaattgagctttgcattgtttctccttctctccctgttgctcttgctgtaaattttagtacacattttatggtctgctttttgtttttgtttttgtttttgttttttttcccatcatgagatggcaaatacattcatctgttttaattttatgcaactttaggttgctgataatttgcttc

SEQ ID NO: 82193 - DNA, 704 bp, Citrus sinensis
  Intron number 1 from transcript orange1.1g042625m (locus o range1.1g042625m.g) derived from phytozome v7.0 (chr-ID sc affold00266; pos 69773 to 70476 reverse strand)
cctccggagcacgtgaggaagattattcggtgagtaacctcttttttattttttagttactttttatttattttttgctttagggtttagctggagcttaggatttagaggactacttggtaaaatttcgttttgagcttaatttggtgaaattagtatctgtttctacttgcttctggttattgggttttgtttgttatgaaatggattctttttctttttctcttttgtggcggtgttttattgttgttgcctttttggtctgggtaatgtcaataaaatacaataatattatttaggtgttttttccctttatatatggctctaaattatttttggtgttgggtgttgattggtatccagagttttaaaccggtattggtgtctgttaagaagatggtaattaatattagaagttaaaaataacttgataaatcagttggattgcccatgaatttgtgcgcgcgtttgagaaacttctgaccacacgactttttgaatgatcaagctaatatgggtaccagactttgattatgcaggaacattaatcccatgacctattttcttataatggaatttatcccgcaaaaaagttagtattagaagcgtggttactctttatatgcattgaccttttagaaaattgtttttgctattggaaaatgtattcagtttgtcttgttttgttttctttaacagagacc

SEQ ID NO: 82194 - DNA, 921 bp, Citrus sinensis
  Intron number 5 from transcript orange1.1g001019m (locus o range1.1g000785m.g) derived from phytozome v7.0 (chr-ID sc affold00008; pos 119707 to 120627)
ggggcagacctaacaactctccacaacagcagcaggtgataatgttgtttgcccattgcatttgactatatatttctgtgaaatagcttcaggataaaagagtcttatacgttatatgtatattactttcatatcgtgtaagttattctccctacactgtttactagatcataaaaaagccaatggctggattaaacttacaatcagttttaacaaccattttgttaaagttctttttttcactttttcaaaatttcactgtttatatagtcttatttttctcagaatcagggaaatcttttatgtatcctcattaaaagattagcagtatatccgctatagatatcttactcatttatgtctcacaactctaaattttaaaaaacttctctctctttggcagggcttcccagcccttgacttcattcttaccactggcatatctacatgtacctgacacccctattttgttgcttgatagcaatgcattagtctgcgattgtacaagtgggtgagaatatcatccttacccgtgtttatgtttcttttagaaaactgttacttgtggatgtctgcctcctattcttatagtctattaaactcatagtgaatttgttttctctgtataggtaagggcgagaatatcacccttacctgtgtttatgtttcttttagaaggctgttacgtgtggatatatgccttctattcttagagagtcgatcaaactcacgtgagttagttttctttgatacattcttagagaaatgccagttaatttgcacagacttctgcttcatctggacttattgtagaagatactaataatgctttgagagtgctccagtgtctcttttgaaggactttcttaatttgatatttatacttctcttcatcctgtaatttgttgcagaaagattata

SEQ ID NO: 82195 - DNA, 849 bp, Citrus sinensis
  Intron number 1 from transcript orange1.1g033906m (locus o range1.1g033906m.g) derived from phytozome v7.0 (chr-ID sc affold00032; pos 437843 to 438691)
tcatccgcgcctcacgtagttgctgccattttaaggtgagtggtcaagaaaaggccaataaactcagcctaagttcaataaataattgtgattgtttaattgtacaggcaccgtcaatttttcttttggttttggcgtttttggtttgttcttttatagttgttctctggtaatctctgatgcttttgaaaaaaaaaggctggcttttgtttttccactttgagatatattataacattagcatagtacatagatctctgtcatgccattgatgtatcaatttagtactcgttatttctgcaacacaaaaagtgttttcagtgatttcacttattttaatggtcacctgtaatacacactccactgtttcccagaaactcaacagggcctttgggattttttttgtttttgaagaacacaaaagaataaaaagttctctttttatgggaaaggtgtctgcttttatgacacagaacactaccatatttgtgtttttctgcttcattcgctgtctcctttgcacttctggtaattctctctgtttggttcatgagaaaattataggaaagtaggactcatgaattaggctcaatttgttggagggtcttaatcgctattgtgttagatatatatatataataatgcttgattaaggtgtaaaagtgtttttttctttcagcaaccaattatgctagctgaatgatttgtgggctttgaagtatgcatttgagtttctttattgtaatgagtatgtttagagatgagataaaattataggcacccaccaaaataggcatactaacttggggtgattgatgcaggaaacaggagaatattgtgataattgaa

SEQ ID NO: 82196 - DNA, 696 bp, Citrus sinensis
  Intron number 1 from transcript orange1.1g022530m (locus o range1.1g022530m.g) derived from phytozome v7.0 (chr-ID sc affold00001; pos 1196594 to 1197289 reverse strand)
tctcgcatattgattttataatcgcatcggatcgggtaattctttctggcgctttctcattttctgttattttatgtacagccaagcattcctaacaacatatatagtgtgtggagctactaattagaatcctaaaacgtagcatgcagatagtatacattatagctaaatcagtttttagtgatagtttgttccagagttatgtccatggcgattttctcacaggaataaggaattaacgcgtaaaaagatgttattaatatatacggaaactgaaatttgatcattgcgttttccactttcttctccatatacagtattctcaccatcattcagaccgagcatcattattgaagttagatttcctgaacatttacttgatccttttccagtatctaccatggcagtttgatggttttttttttttcccggttcgagtgttcgcttaagttttataatactgagtaattcagcatgtacatttaagttgtagctgcagtatatattgattttaactctatctattatttgtgtaattcattttaatttgcttccctcgttagttctgaacatgctgatttccttgatatcctttttatatttaaagcttaagttgttggttttattactctccttaataggtttttttttcccccttttttgacctttttattataggaaatagcttataaaaca

SEQ ID NO: 82197 - DNA, 488 bp, Citrus sinensis
  Intron number 1 from transcript orange1.1g020467m (locus o range1.1g020467m.g) derived from phytozome v7.0 (chr-ID sc affold00629; pos 54337 to 54824 reverse strand)
gggttctaaagttggccgattttggccaggtaatttgcttcaaaattcattttttttttaatttaatgcctcaattattttatgccattgagaaaacgacatgcattatgatagacaccaatgtttgtgaatttatagtttataatatgtatgcttatgacaattgtggaaccttgatttagttgaaaccaatcatctgacagatacaggtctgatttttattaaggattaatcattcctctctaaatttgaagaatctgagtcctttcgctgcaagtttgtggtttaattactactcatcttgtggcggccaattgtttaggagtgaatctcagaaacgatgacgtatataacacacaatcatgtgtcattttctctgtatcatttgtgctttctataagcatttagagtagtttatgctgttttctgaatgaatgtgaattgttcttctgtttgattttgtttacaggcaaggatactcctgggta

SEQ ID NO: 82198 - DNA, 797 bp, Citrus sinensis
  Intron number 1 from transcript orange1.1g029978m (locus o range1.1g029978m.g) derived from phytozome v7.0 (chr-ID sc affold00084; pos 401841 to 402637)
ggaagcttttctcaactggcttcgaaggtgagctctctgtttggatgctgagaaaatgaatgattttttttttctttttcaaaagctaaggtggaatgttatagttgatttaattttgagatttcgaatcgttagattgtaaaaatttaaccttataaaatattattagatttattacccttaatatgactgtttggttttgttgaatttcaaattgaagattgagaaaatgaagttattttgtatgctttttagatcatttatatgtgacgtgtcttttaaaatgtgtttattttttgtgttctagttctgttttaaggatgatgaattctggcagcgatcagctagttaaatgcaattgttttggcctgtgtaaatgaaactgtgcaccgcttttgtaaattaaaatgccaattttaatgccaactttgcaaatctagcatctatagaatgatgtctttgagtaacatcctctgtgcagacatgtaccttattgtttcttggtggcagcttctatcttttgtatggattttgaagcgtctatggagaacattaaataatttattaaatttactgttgtttgctttggtcttttataatattctgttgatattctcatgccttccagacaattagctactttaatcatattgtatctctctgcttcacttgctttaaaattcttgcattgattctcacagttgtggatatttttgctactctgagtcggctggcttatgctttttcattgctatttattctacttttgttattgtagtctcttctttaaacaagaa

SEQ ID NO: 82199 - DNA, 578 bp, Citrus sinensis
  Intron number 1 from transcript orange1.1g008325m (locus o range1.1g008325m.g) derived from phytozome v7.0 (chr-ID sc affold00307; pos 145938 to 146515)
gattggctgctattgctgccaattgtaggtaagaatctttatttatcattgttattattattgtttttgattttttgttgttactatttgtttttgatgagttctattagttgattggtggtgagttttggagagttcactgataggcttgtttcactttagcctatttgaaagttagcttgtgatagacttgtgctaagttatctaatgaatgcttagtctgatggttcttccatttttgatgttgtactgctaatgtatatcaatcctgaaatttgtaaggagatacagaaatgttgccgatatagtttttattactgagcatgcttggctacttaatttaattgttgcagtgtcttttataattaaaaaacgatatcaatggctaagtggacaactttcgttctgtcaatcaattttctatactgtctgtttagatggtctattgtgatgtaattttcctcagtatgttggctggaggtgaatacttggcaattggcatggactatgttcctaacttttctttgtttttgctgttcttaggtatcttagggagcttgacttgcaagaaattgaag

SEQ ID NO: 82200 - DNA, 353 bp, Citrus sinensis
  Intron number 2 from transcript orange1.1g006285m (locus o range1.1g003697m.g) derived from phytozome v7.0 (chr-ID sc affold00712; pos 78562 to 78914 reverse strand)
gctcaggtacaatttttcctctgtgtttagctcatttgttttattaaattcttcatgtggacattgatttttgttgtatgatactggattatgcatgagtaacatgcggcagcaaaaacttaagaagagggaataatgtgatgtctctctgtgtctttcttttactttcttaagcttgcaggcaaattgagttgaattcatactaaaattttgtgcttttcgttctctctttagtttatgcataacagttgtcctttatcttgtgctttgaattttttaaatgatctttttccacctatcaaaacaatttttattcttatcctgagcttattattttgttttctagatatcag

SEQ ID NO: 82201 - DNA, 590 bp, Citrus sinensis
  Intron number 1 from transcript orange1.1g006285m (locus o range1.1g003697m.g) derived from phytozome v7.0 (chr-ID sc affold00712; pos 79098 to 79687 reverse strand)
ttcctgtaagtaggcagcagtatagcatttacatatttgtcaagtcttgtagaaatttctttcattggatcatctattgttgccatcaatcatgcccagaatagctataggaactgtctatgggatactccaccctttaagaatagccaaacagggagagatggttaattgtgaaaattttataaaatttgaattgaagatctagtgtactgttttataacctgggggactttggggcactattcaagagcaaggatttatttggatgagccgatgacagaacatgtgctatatactcctaggattctcaccatttaaagagatatatatttaatggtgcagttgaaaagtataatttatctgtgagtataaaataattttagttgattttgagatcctagtcaattttggtttagtttctgtcagtggtttttttgtgttcagtaattaagtctatggcaattgaatgtctttttgggtattttgtgttgtttgttcattgctaatttcctgtttgcatcatttttttgtttgttagctttctcctatggactttattgaattcctgtttgcagattttccggatcctt

SEQ ID NO: 82202 - DNA, 707 bp, Citrus sinensis
  Intron number 2 from transcript orange1.1g002862m (locus o range1.1g001687m.g) derived from phytozome v7.0 (chr-ID sc affold00236; pos 141184 to 141890)
ctccttattctggtgcacaggtactgtatgaaagctgattttcatagttgttgcaagttcgtctgctaacatttgcaacttaagaatatctagtgtgttctctgttagtttttagcccaagaactatgagatgaaggctttatgtctcctccattagggcttgctttgttccgtagatagttcctaaaagagtgtcaggtggctgatttttttattccaaaaaaattccattttacacctttagttttcatcatagttaaggtttttatcgttaaaactctgatcgtatacagcaatcgttacaagaattacaaacacaagaattttatatgttctttttgccccctggaggattggattggtggatattttgcatctggtttcttggcacctagagttgacagtttatccaaatttcctcgcctcctgcattttaggaataatattttgaattactaggtttgcaaatttttcacgaaaatatttgtcaaaatagttgaagacaatttactgtgacaattagtttaacaaagtttgtcttttttctcaatttatctattcagatgatcactgacgctgtgaaatcgttaccaattttattattagctatatttttattttgttaacataatcaataatcttttagctaattttctttaattttttttttcaaattttttaccctgaaggtgcctcatcagcctcca

SEQ ID NO: 82203 - DNA, 554 bp, Citrus sinensis
  Intron number 3 from transcript orange1.1g032489m (locus o range1.1g032469m.g) derived from phytozome v7.0 (chr-ID sc affold00012; pos 233365 to 233918 reverse strand)
atcccgtattggttatcgacaacaaaataaagctggtgagttgaatgtttgtaaagtcctgtattttacctgttattgactacatctatgcttaaaccaaatatgaggtcacaaaacatgtatcagtgaaaattttaaatattatgtacaatattttatataattatggaaaatgagagaactctttatttaagtatggtgatactagtttatccatgcaatagagtcaattttctcgggatgactgtttggtctacagagttgttcctggtggctaagggattttctggctccattttccttctttctctccttaaattcgttgttgtttaaactctaccactacctattgaacatatgtcttcttgtattttgaattaggaccagagaacttgataagaatgagtgaagttgaacgttttgattttaattagagtcagtttgttctgcttttgctattggatgaccgcaccaagcattggggattgtttaaattttttttattttaatgaaattaagtttgtctgattcacactcttttcagattggcgaat

SEQ ID NO: 82204 - DNA, 439 bp, Citrus sinensis
  Intron number 2 from transcript orange1.1g032489m (locus o range1.1g032469m.g) derived from phytozome v7.0 (chr-ID sc affold00012; pos 233900 to 234338 reverse strand)
ttctttctgtatgtggtaattttttttttcaaacacttattgtgcgctcatagattaataatttttgctctttctttgagtttgttacattacgtttggcctataaagggtttatcttttgaaattaggtattatgctaaacagattgaaacagtttgcatgcatgcatttgacttgtagtttcattgcttgaggtgttattttggtgatgatcctattcaattactagcttttagtattttttgctacatgtatgctttcctacacatttgcactgtttactttaatgtagatgataacggcttcttaattcttctatgggtgcaatattctgtatgctttatatacttttcctatgattattctgctgcctgtcatatattaatttttctcctgcattgcagggtctagacactttgaatcccgtattggttatcga

SEQ ID NO: 82205 - DNA, 835 bp, Citrus sinensis
  Intron number 1 from transcript orange1.1g032489m (locus o range1.1g032469m.g) derived from phytozome v7.0 (chr-ID sc affold00012; pos 234457 to 235291 reverse strand)
tggcttgaacacaacatacccacgcgatctttgaggtagaaatcatccccattttcgattttttcatttcttgtagaaaaaaaaaaattgtattaaatttgaatctatatatacatacatattaatgtgaatatgtgattataaagttacaatattggttaatttgattgtatacctattaatttctgtattaattttgcaataaatattaatgtgattatagtttataaagttgcagtttggttaatttgattatataaatattaatttctgtattaattttgcaataatcaatcttcacaataaagttactatttgattaggaagcatcaatgtcgatttttaaattgcattacatgtttatgcatttagattttcaacaaatttgaaattgtaatatttataatttaacagaataaagaaactttgctggtatattgggttagtttgttttttgtattagtatttatagtttattatgttgtgttgctagtgttttgtgcatggataaccatctataatttaagtcttttttttttaatgtttatagctttattaaaaatttataataaaatataataaaagcccaggccctctcaagattacgggctttcagagggattgggcttgtttctgcatacatgggcttggggctgggcctgtaaaagccgggcccaagcccgcaaattgcccaccctatttgactcctcgttcttgtataagtttttttaacttttctttaatgggtagcttactatttgggtgttgatttttgttcttttttttaattcttaaaaagtcttgaaaagtacttgtttgttcctgtgtgtaggcg

SEQ ID NO: 82206 - DNA, 784 bp, Citrus sinensis
  Intron number 1 from transcript orange1.1g017124m (locus o range1.1g017124m.g) derived from phytozome v7.0 (chr-ID sc affold00590; pos 25844 to 26627 reverse strand)
agaagattaaacgcttttcctttgcttaatcaaaggtacgttcctttttattatctgtcctccaattttccaaaatctttcatatgaagccgctgtttgttatttctgtttgtttgaataaaggtagaaactaccccccctcccccccgtttttttactgatgcagatctgctgctatacatgcatatttctttgtatggattaatctctgctttcagttaatattttggttttgaatcagcctgactcacaggttggtttctgtgaaatctgtcggactagagaatttttggcaatcaaatggcctttttactttttgtttttgcagtcatatgagcctctaaaaatcatttgtttgatctcgaacatcttttttaaaaattattggcattgttcagcttttaataaaatgtgatagtaggatctgtgataagtgtcgttgatctgaaattgctattgccccaatagttacagtgattattatatggatttaaacatgcttaacaagattcaaatggtaaatgatcagtctttggcatgtttggttaattatcagaagaagtaacaatcaagaaatggattgtttacctatttatatcatgtgacgaatggattgttgattttaattttttctggggtgttcatatttatctgtgaatttcatactgagttaagcatgtcctacttgaaaagattttgttttatctgtatttcttttgattgttttaagtattttttccttctcatctcctactatgatttctcttttctagaatcataaaag

SEQ ID NO: 82207 - DNA, 639 bp, Citrus sinensis
  Intron number 1 from transcript orange1.1g007808m (locus o range1.1g007808m.g) derived from phytozome v7.0 (chr-ID sc affold00008; pos 612056 to 612694 reverse strand)
aaagacacgactggcgcccactctgagcaacttgagttaatgattccgttctgccatgcactatacatcctctgctgctgctaaaacaacgtggtccatgtgcattaatttttttcgattgacccagaaaataactttaacatttgctaaaagttttttggcagcctccttttgttgttgactgactgccatataagtcgtattccacctaatcgttcttacgcgattatctgaacctttgacaaaattattcgtttattgtgaattaaataactatttattgcttaaattttttttaataaaaattcttgtgttaattgtgatggtcaaagtcactgcaaaaacgttattctcgctctctttagtctttaataaacaacgtgcctattgcaagaaaataaatcaaaatgttggcgattgacgtgttcatatctagtactcttatctagtaaggaataagatttcgaaagaaaactttgtttttttctttttttctttttccctctttaaatttcaaaatagcaaaaatcacagcagctttgtttgtgaaaacccctcatagacttgtggaagaaaagctcatttatcttttacaatcatgtaggaccacaaagcatctccaccagatccaaacccaag

SEQ ID NO: 82208 - DNA, 873 bp, Citrus sinensis
  Intron number 2 from transcript orange1.1g029473m (locus o range1.1g029473m.g) derived from phytozome v7.0 (chr-ID sc affold07951; pos 927 to 1799 reverse strand)
gtggtggaggtatgggcttttgcaacatttatttgtacacgttcacacaccttcacaaatacatacgcagtaggtagatatgagtgcttgtttgtttcagatgttactgacttgcactttcatcacctttgtggtgatctcagactttttttgacagctatgagatagtgttagtctattactgaatgtgtaattcttaattgattcagttgaagcttaagctttttaggaagaaggttaaatacaaaatgtgaacatttctacatccttaatggttatagttgaggaatgaatgtattgtccatgatttacaatgcaaatgggcagatattaaactgaagtgttttaaaatttcgtcaggcctgtgtttgttcttgaagtttttcctctaatgatgtaaatggacaacatgattatctactatataggaagcagctgcatgggtgtgtaaaggcacaattttgtttttccattcactgtgggtaacaggaaaatgccattaaaattttcaacgaagtctctaatataaaaactagtacaaacagatcagaaattggccatgattcttgtgtcattgtgactctattgtctctatggtatgttattgaactatttatattgtcgaatcagaaattgagcgtacccagtctatatcaatatcattctggaattgttcaactttagaacaggactgaaagatccgaacaaacagatcttttgatgggttaagtgatatgagattaatgattttccttcagtgagaaacagatgtgcaggacctctccctctttccttgcattgctgcatattaataaattcttttgtctctttggtgcagatctgtctttcgggggggctcaacagccattttta

SEQ ID NO: 82209 - DNA, 443 bp, Citrus sinensis
  Intron number 1 from transcript orange1.1g009424m (locus o range1.1g009424m.g) derived from phytozome v7.0 (chr-ID sc affold00001; pos 339190 to 339632 reverse strand)
ctcttgaggttgtcttggattgctctgttacttgttctttactaaatgaaattgattgaaatctttttattttttgggttcttcgggtgggtttatggttcccttctcttcaaacgcacacagctttgtatatgcctttgaaaacctagtcttcaatttcttagtgtgtttgattgaaaaaattgtttagagctgaatgattaagcttgtcagctagaactttaaccttgtaccacaaagatgtggtggtgatgccgatgcactgtgcgtacagatattaatgaactggtgatttgattgatgccatgcgtcatagtgctatgattggatttggctcctcaccatcatttttgctgttctagtcaagtgttacagagtttgataaatgatataccttatatcatggacatgtttattgaaatttctaacattcttgcaggtat

SEQ ID NO: 82210 - DNA, 762 bp, Citrus sinensis
  Intron number 2 from transcript orange1.1g017873m (locus o range1.1g017873m.g) derived from phytozome v7.0 (chr-ID sc affold00001; pos 1546570 to 1547331 reverse strand)
ctcaagtaagattcttcaaacaactatatgcatttttcaagtggatttgcaatttcactgatcttaatctttatacagggacacacttggtgtgatatgcttgttgttcggttttaattgccattcaccttgcttctattgcacatcttcctacattagcattaatggaccaaacaaatcaacagactattagtttcttgtgcatttttgagttatgtatgtatctaatgacaaattaaaatgcaatgctgtaggtttgaagatttcttgtttaatcttaagtttgatagtatttagatatccactgcatttaaagcacgcattatcatgaactaaattttgcttccagtgtgtactttgactttaattcatctcaaaattttgctttcttgatgacctattatgatctgtagaggctttattcaaatattatactttgctctatttgacggcatcgttttaggtggtatttgaatgtttaatcaaacagtcaagcatgtcgatggtgcaagttttctgccttattcagttggattttacttttcttcacacacaacatggagctccgaatgattgctttatgatttggatgaaaaatgctcttttatttgctcttgcatatgtgtcttgttttgtaaacagacgactgagaaagacatgatgtatactctctctgcagtctttgtttcatatattgtataatttgcttgccatctactaattcttttgcacaaataactttgccccagattggtgcaaaca

SEQ ID NO: 82211 - DNA, 949 bp, Citrus sinensis
  Intron number 2 from transcript orange1.1g034054m (locus o range1.1g034057m.g) derived from phytozome v7.0 (chr-ID sc affold00325; pos 117191 to 118139)
cagtgtgctgctgtagattatttagcttttcctgggtaatgcacattatcgtagttatttgatgcattggtatgctacaagcttacctttctgccacaaagagtgaggatttcatgttgatggattcaaatttactgagaggttttgaaaggttttcagttggggtttagtatcttatctgaggatctaaccactgtgagaatagaaagcaaagcttcattgtaagcagttgaattttttttagttgtaaggtcgttatttgcttcattttgaatttttggttaacaaaatctcgttgaacatccacactagacataaggagaaaacaattgattattcttccctttaatttcatgttatagttttgttttccgttgaaatgtttattgtttaatacaatgcaaaatctgttcaaagtgtggttaaaaggctgggttagttgttatagctgctgctataagatccttgtgggctccatttaccagaataagaaaccagttaggttatgttagtaagtagtgacatcccctgttatcagcttgcaaggctgatgaataagcctagaaaagcattcgatttctccctttattgttatttaaatcaactgaggttgagtgctattgaatatctgtaagggagagactccattgtaacaggatcttagcaaagttctattgctgcttttcacccatgcatgttgccatttacgcaattgaatggatcacaatatacactggtggcattttcttcattgttttctctttttttttttttggttcttaatcaaatcttgtgttgagaattgggtattcttgagaaaattaattcagtctttatatattggttcgatttcaatcattgttagtgattgaatcaatttcaaagactgaaatttactatatgtgtcatcagattcaaattgatatagttgtgttataattgcagtcag

SEQ ID NO: 82212 - DNA, 757 bp, Citrus sinensis
  Intron number 2 from transcript orange1.1g036113m (locus o range1.1g036113m.g) derived from phytozome v7.0 (chr-ID sc affold00001; pos 5667351 to 5668107)
tgttgcagttgcctctgctgtcactcatcctctaggttcttctaaacttaagtttttaaattttcataaaatttaagttttacctttgctattttaattggcaagaagttctggacgtgtttgttactacggttcgaatggtagaggagttgctacataccaggtgtattttgtcagaaaatgtgaacccaaagaaaggattttggtttaatagtgaccaacgtcggagtagaatattatcacttacattggaattcatgcactgctatgggatgtaaacccattgctaagtactagtagctttgttgtgaggcttttgtaagcaaaaagagtaggaaatgtagatggcagtttcattagatccaatttggctatgctttcaggggctgaggacatgtaattctacaggagtataggtgtctgaagcaaagtcaatctcgctttctgagcgtcagccagacaagagtatttgggacttgggaaagaatttaggtttccattcctgcaagctgcaactagttaattacttaatgaacttttgtgcataagaaaggaagtaaatagatggttcaccatcagattttttatcaagtgcttattgattaaacatctagttaattgttcttgagagtttgagtgcttgtcatatagaaccctttatttttatttatttatttgtttgataaggcttgttatatagaacttaaaaaagaactggagacttttgatatttaattaatctcagctcggaatgcag

SEQ ID NO: 82213 - DNA, 1001 bp, Citrus sinensis
  Intron number 1 from transcript orange1.1g010199m (locus o range1.1g007460m.g) derived from phytozome v7.0 (chr-ID sc affold00098; pos 253151 to 254151 reverse strand)
cgccgggcttcccaggcttcatacgttgcctgaaggtatggatttgacgaacttctcgccggagtgattacctcggcttaattgatagtgattattgcatgactgtttgagcttatagtgttatgtctcggtgaaatgtggttagagtaaagggatagtgtccgttatgtagtgttttacatgtgtgattgctgattgtattaatgaaaataatgtatttttatgcatttttatactgtagctctgcaatttttatttattggcttgagactcgtgtggacttatgagtttgagaacggatggttaaagttctagatgataatctaactgaaaggcaaatgacttctgcatttgcaattttgtcctgtttagaatttttgttcttccagaaaaagaaaatggaggtataaatggaaagtgggaagacattatgacctggaagtgaaaagagtggggaatttaaattgaactgagtgtaaacaggaggaaaaaataagaaattttaaagtttaaagagaggggaaccataaggcggcgtattattgtttatcagtatttcaaggtataatcagttagtttcctttagaatttgtttccaaatgatccgaagtaaaggtattgatttccatcaataaattggaaagatttcttttcttttcttttctttttcttcttttatggtcttgcaccattcgtaatcctcttaattagcttaatgtttgtcaacacatttacttggattacattgtctgctgcttaaacatatctctgctgactgaaacatgctgcttgttgctcataaccaactagaaggtttttatccccccccaccaacaacaaccaaaaaaagggggaaaaaaaaagccaacgagaaggcaagaagggaactgattccactcttataacgaaagtgactctaaaatgtccagttgtgcctgcccttttctgtgttctttttgtttaaacacatcattgttttgtttcagggaaatctgctgggc

SEQ ID NO: 82214 - DNA, 295 bp, Citrus sinensis
  Intron number 1 from transcript orange1.1g008219m (locus o range1.1g008223m.g) derived from phytozome v7.0 (chr-ID sc affold00103; pos 465105 to 465399)
ttccatccctttcgttctgccccgttaaaactctggtaatttacgcttttgccactgcactagcagccttaactttttaacttattcataatcgttaaaaacaaaatttcatttttttgtctactgttatcagtattattattttcatgtgactgagcttcaatttcttcgtagaatcttaaccttagctcaaaagttcagctttatttgttattgttaacaattttttttttttacaatttattttcattcataccgatgccttttctttgattatgtatacagtgtttgttaa

SEQ ID NO: 82215 - DNA, 889 bp, Citrus sinensis
  Intron number 1 from transcript orange1.1g033247m (locus o range1.1g033277m.g) derived from phytozome v7.0 (chr-ID sc affold00030; pos 890979 to 891867 reverse strand)
agcagcacacagcactcacgcagggcaagaatcgggtgagtgagcgagcgagcaagcgagctaattcttttcttttaatttttcgttatattttcccgtcctttctcggctaccaaacagaattttaggttttcagatttgtttattttacattttttttccaagtttatctgatttgatctgttctctggctgttttaaaaccacatttcatcattaggcatacttctgtgaggataaaaaccttagatgtccatatcaaaaaatagcatgcttaatttaatgttttgatgttgatttttaaggcttggttttgcttagattatctgataatgacatttattattattattattattattattattattattattattattattattattattattattattattattattattattatttgctataattttatgttgattttaggtttacgttgctctttaaggcttagattacttctgttttcttaaataaaaattcattaaattaatgcctcatgtagatttttatttgatactttggttgtttgtggggaaaccttacaaattcttatttgatctggctcttttgtatcttccgatgcggcaggaaaattttggatgtcatttgcttttcataattttgttgtttttcttgatcttttttggatctagtttttgtaaaattttacatcagggctaatgattagaggaactatcttaagtttgagccaggctgggttagtctttaaagacttgtttatgccctaatttcatgttacatcaactctggaatgttggttgaaatttgtagtggctaacacttgcgttgcatttgcttctgttgcaaaattagtgcaggatctaggatttgttagataaaagttcaag

SEQ ID NO: 82216 - DNA, 354 bp, Citrus sinensis
  Intron number 1 from transcript orange1.1g028464m (locus o range1.1g027222m.g) derived from phytozome v7.0 (chr-ID sc affold00021; pos 520418 to 520771)
ctctggttctttttctaaccctagctttcattcaggtattttttttgggggggggggggggttcatttcatcggttaaatttatatgcataggaaattaagtttaattactgttaatgggatttattgtttctttgtttttagaatcgtttaagcgatgttgggatctcatcacagaagaaaattcataacagtgaggtggatttgcctttcatttatttagggtgatatgagattcgtaattcataggagtgtgtttattttgtatgtattttgtaattaatttatgattttgatctcattgtgtgtattttttgcaggaaggcaactcaagagaggaattggaaaaagtgac

SEQ ID NO: 82217 - DNA, 1015 bp, Citrus sinensis
  Intron number 1 from transcript orange1.1g018714m (locus o range1.1g014854m.g) derived from phytozome v7.0 (chr-ID sc affold00001; pos 2219355 to 2220369 reverse strand)
gcgaaatttcctaagattttcgagtactgatttcggtacgatttatatcatctttttttggttgttcttttctttaatctttgtgaaaagagaggctattttatttttctctgattttttttttatttatcaaagacgtagaaattaggtttagttttagttacggtctgccattaattctttgttaagtatttcgatttaaccgaataatcagtttttcgatccacgatctattgttaaggtaagatatttaccatatttaatttattttctttattatgtgcatgattaaggtctagggtttgacttttgattgagaaaagaggcatgaattgaaacaagaaactttatattctgcatgattatgtcctagggtttttaagatctgaagttaattcctaatagtgatgccatgtttcttgtggaaagatctgaattttttttttgatctttttgttggattttttttttctaaattgatgcatgtagtttaaggtggagaaatggaaattatgcagtgcgttgacttcacgtttacagtcttttgatttgctatgacagtgtatgtgaaataaacaatttttttacctttatgtttcctgaatttgtatttattagaagcctaatgttcccctaaattgccaaaatattgtaagagtttagaaagaattttttttatttaatgtccccttattatgcatctaatttcttcgacttttactcagctaccaactggatggtcggggataaaacttttgccaaattgattttggccttcgtttccatatgataaagctcagaatgataaattaagttttatgtttgactagagctgtttaaatacctgctaacaaatatgtgtaatagtaattttcttattatattatattgtgtaacgatcccccgcctctacccccccccccccctttcccccaaaaaaaacaaaagattatgttgcgatatgatgtctgattgattttctttctttttacttctttgcagcaaatccatcaaa

SEQ ID NO: 82218 - DNA, 402 bp, Citrus sinensis
  Intron number 2 from transcript orange1.1g001086m (locus o range1.1g001088m.g) derived from phytozome v7.0 (chr-ID sc affold00192; pos 178575 to 178976)
gttgcaggctaaggccctcctgaaattctactcgggtatgtgggaattgccttttaatgaggttttgtttatttgatattgaagattttgtaacttcataattactgggtgttagataagagtgttgtgttttcaggtttactgttcatccattacgtttgagttgagcagtcttatttcttctttttaataggattagttttgagtttaactttatggaagttcttttctggctttaagtactggggatatggttttttcaaacttattttgtttattgctgtagttcttgagatcatgtattttgctgtgttgatattaccaccgtattcttcattttagtgatttgttaacttgatgctattgcgtaatgcagaagagaagtatcctacaaaaagtgaa

SEQ ID NO: 82219 - DNA, 551 bp, Citrus sinensis
  Intron number 3 from transcript orange1.1g001086m (locus o range1.1g001088m.g) derived from phytozome v7.0 (chr-ID sc affold00192; pos 179321 to 179871)
ctctcttccttctcaagcatttttccgtagtaaaggtatactcaaggatcttctgcttgtttgttgctttagtagacggtatatatgtaattatacgtgtggatgttagtgcattgtattccactgggttgttgtgtgggacactttattttatcgccaagctcaatcaaggtcaaaatattatttgagagcataatggtagtgtatgtctcatggatatttggttctgttagttggagcttgatagttcctgccgttcattttttttaactggggcatggaggttttagttaccttataatgactactacatcaatggcacaattattattatgagcgcatgaatgtgtatagcaactgactgccattgtttctttttctctttcatcatcaattcagaagatagaagttatgtacatttgattagattcataactcaatattttctttagttctatgttgacttagttaatatctcaagtataaattttacttatactctgttttcatgtttagattctataaattcttgtcctcctttgcaagagaac

SEQ ID NO: 82220 - DNA, 972 bp, Citrus sinensis
  Intron number 1 from transcript orange1.1g014756m (locus o range1.1g011218m.g) derived from phytozome v7.0 (chr-ID sc affold00130; pos 236932 to 237903 reverse strand)
ttcaagtgagattgcttcactctttacccaacaaggcaagaaaggaacaaaccaagatgccatgattgtttgggaggttagctccttctcatgttcatgtgtaatagttcaattttcaacatgatttttgtcctgctcttaacattagatttacatttgaatatatatatattttttgtgaaaagcttcttgtccatttgtttatctcttgttactttcttagacagtggaagagtagtctatttgattaacagaataacaagtaatacttattgtggaattcagtgagcaactgttcaattcttatcatatcctcattttactttttatttttaattttccttcttcagagatgtgttcagtttaagaactctgtactttctggttcatcaaacaaacattccctctatcaatgggctgctgtttcttcactcttttctttttttgaacttattttacggatataatccatttcttctgttgcttcatcaaaatatacttctattgtgcaaattgaactctacttttgattttagtgtacattggtacatcaaaatatgcttcataatgagtccctgttcgagcatcaaaagatttggtttaccctcattatcatctttttccaacttcccctgagacaagctattttggccctttcttatttctgcaatgtggcttctgtgttttatgaataacttggatgattatattagattgctttcaattttgtatgcatcttgcatcctaccagttcatttgttccataaagtgttgcttatgttttctcaaatttatgtgaccttatttatcttagctttttatttatgtgatatcggagctagttaatttgaattgcatacaattttttttttgttttagatttttttaatcgcactctaaaacattcctggctcaccctctgtgtgggaatttacagaactttgcatcaagggcagatacaatattttgtgg

SEQ ID NO: 82221 - DNA, 616 bp, Citrus sinensis
  Intron number 1 from transcript orange1.1g014138m (locus o range1.1g011623m.g) derived from phytozome v7.0 (chr-ID sc affold00015; pos 1625015 to 1625630 reverse strand)
taatatccctgcgagcccgagggaagattttgtaggtaagaaatggctcctgtagctttgtgtgtgtatgtatatatatttaattttttaccattatgaatttgtttatatgtgtttgttgtgataagttgtcgcttctagttgtcggcgcattgaattgcatatttggatgctttaatagttacatatcatgcattttgcaatttgcattgctatatgggtagtttatcaagtaatattggggtttatgtctgcactaagagctaatttcttttacaagagtagaaatggcattaaggtcaatagaactggaattagagagcttataggatgttcctgccttttctttaactaagctcaaaggatgagtgctgattaatgttatgaaatgagtatttactggttcataatggggcatatgtatttaattaggtactttatcattcataaaggtggatagaataacatgctttgtgctgaaactagatattacattgaaaacttgttatcttccatagttggaaactacaaggtcgtatttttcaaattacagatatataaagctttggatttgatttctgaatcttctgaaaacaattgtgactttcagggagaa

SEQ ID NO: 82222 - DNA, 535 bp, Citrus sinensis
  Intron number 1 from transcript orange1.1g024252m (locus o range1.1g020528m.g) derived from phytozome v7.0 (chr-ID sc affold00144; pos 76864 to 77398)
cgattcttcccagagaaagctttcacgttcgcttggtaagtagttgaagcttcagactatctctttgtcgtttcataaatcccagctattcgtttaaagtcagctttttattttcatttttttgggttctgcccagataagattttctatgtaagctattaaagtttcggtttttatctccattgcttcaagattttgtacttgaaatctcgagtttgacgtttgtgtattattttgttatctgggtgggtttatatcactcaaaaagttttaatctttcttcagttttgttgagtgttttctattgggggctaatcttagtttagttgaaaatctctaggtttttcttcaatggcaaaaagaaaaaaagaagaagttatcgtgttcattttctcggctaccaaaatggttttttcatttaagttttgaagtttgaatgaatcaactactgtttggataccgttacatgttgttgttttctctgatccattctcttttaaatgcttctgcagtaacttgaaaaaaagaaaaaaaa

SEQ ID NO: 82223 - DNA, 445 bp, Citrus sinensis
  Intron number 2 from transcript orange1.1g017844m (locus o range1.1g017844m.g) derived from phytozome v7.0 (chr-ID sc affold00029; pos 925713 to 926157)
tgctccgtcaagttttcggccctggcgctgaaaaggtttctctatctgtatttcttatttttatgcaataagaaattatgggtttgtgagatatatatatatattttttcctgggagaggtgaaaggaacaatttttttttttttcagttcaagatgactaatttactgataattgatgatttaacaagtgggtttaaatcctgtttgtttacagaaaaaacatcatgaaagaaaataaatttaatgttaaaaaagaaaatttatacatggatttgaccacaaaattacaacttatatataaaggggatttgatttcttctatttttttagtttttgtgatttttgcctgtaactacactacgtgttgttgttttatgaatttctagtgtgagaactccaagaaaattttgtattttgattgcaggtgaaagtggaaaacaagac

SEQ ID NO: 82224 - DNA, 767 bp, Citrus sinensis
  Intron number 1 from transcript orange1.1g028316m (locus o range1.1g020735m.g) derived from phytozome v7.0 (chr-ID sc affold00032; pos 105050 to 105816)
gcccgatcatttctccgacaaaacccacgtcagcggttagaacccttgtacatttacaagctttgttctctcaatactcgaaagttatgcgccttttgtcttgtaattttagctcgatagttccttaaggctccctcccaacttttatttgttaactcaaattgttcataatgtacgtgcttctcttcagtaattttcttttaatgggaaataaaagttaatactttctgattaattttctaaaaagttatatgtttttgctgctgggattagagattagatagtgctgttgttacttcagttcagtttataatatttaatgtgcaaaatgtgttatttttgcctatatcgtaaaagggcatggctaaaattgaaactttggtttagttgtagcaataaaggaggttttctaaatgtgattttcctccaccccctttttatctgaagatatgttgaaaaaaaaaaattgatactacaggtaaccattgtgatttcatgatatttcaagaactttgtgtgggaacctcaaaactaagattagaacaaaaccacataagtgagaataatcaaatgcgagatcattgagtagttgttcatatattaggatttcttagtatgggttcatataatagataaagagtactcagggagggaaaattttggataaatttgttcgccatcttgttgcattttaactgactctaattgaagcgagttcttttactgaaccagggaagttggcttctcttcttcataaattggaaaag

SEQ ID NO: 82225 - DNA, 1002 bp, Citrus sinensis
  Intron number 1 from transcript orange1.1g016843m (locus o range1.1g015873m.g) derived from phytozome v7.0 (chr-ID sc affold00001; pos 3946805 to 3947806 reverse strand)
tcttagatctgcgccgaaacacttgccagccacaggtgtttttttttttcttttttttccccggttcggttagaataatttttctccgtccctttcacgttttatttctgtttcattttgctcattaataagcgtcttgagttcctgatttttgagttcaatgctttccagatctgaactctatctaatagttgtttaacttcctactcacattcatgaattaaggatctgagattttgaagtttaattgaaattccgtgaacttgagtttaacttgttgtttttactagatttacggacgtaacacactgggaagttgtagatctgatgcaatggaacgttttgattaatggatctggtgcttgtcgttattttgagcatgtgatttgtaaaatgcttaattactggatgcttatgtcattttcattgcatcgactgctggacctcttcgcgtaattgaagtctagcaggtgctcgaacgtgttaaagagagtttgtgggatcttaaatgaactaggtggaggaggagttatataccgtacacttttctaatttttcttgtttgagtagtttaactttttaataccagtagaattttcttcctcatcatctagaaagtgattgatgataagaggctattgtggttgacattgttttaaataaaaatcaatctgttccttgattccttcttctttgcaactttatgtcattgagtgcttaaggaatctggtgtgagtgcgttattcctttaattatatatttgcccttgaaagtaaatgacagtgcttgttagtcggtttgctttgtttgtaaaatattccatgtttgaggaatttcatccaatcttgactatacttctttctattctttattctgtattctaagatatcaagacctatcatctaccgcaccaatgatgttcttttcacttggaacctgttattaattatacgatgtgttctgatatgctttttttttattattattctgtagcttgataag

SEQ ID NO: 82226 - DNA, 680 bp, Citrus sinensis
  Intron number 2 from transcript orange1.1g021205m (locus o range1.1g021205m.g) derived from phytozome v7.0 (chr-ID sc affold00358; pos 12020 to 12699 reverse strand)
taggtcgtagctactttgtttgccctatcaagaaggtatagatagcctttgtcctttaattatttgtagtggttggtagccgctttgtttttgatctgtagtctactgattttagtgcaacttaagggtattcacattctccatacagttttttgtttgactcgagtaatgccgatgctttaaactcgctcaaaggcaataattttaagctccgagccactgtttgagtttacccaaatgaaatagagggatcgagtctctttatgattcccttcgtgaatttatgtcttttatgagcatttcttctatccttgcagttggtgatgccattcttcagatggctacagatgggtttttgtctctgccctggttgtcattcttatcttttgggaatttaatgttgtagtcattagttagcattttccagttccagctgacttttgtaacttgaagtatctgtttatatttcaaattgcagtttaccttattcattttattggcataataggaaattagttttaaaggtcacatttcaatcgtcgatcgaatgctttaactgtggagtacttggtgtagataacatgtgttatagaacatgcagtgtatatatggatgtcgctggattctgatctaagtattgtgaatttgacttagggacttggagcttgtccattctttca

SEQ ID NO: 82227 - DNA, 527 bp, Citrus sinensis; identical to SEQ ID NO: 81950
  Intron number 3 from transcript orange1.1g011356m (locus o range1.1g011268m.g) derived from phytozome v7.0 (chr-ID sc affold00012; pos 238316 to 238842)

SEQ ID NO: 82228 - DNA, 537 bp, Citrus sinensis
  Intron number 1 from transcript orange1.1g016429m (locus o range1.1g015684m.g) derived from phytozome v7.0 (chr-ID sc affold00001; pos 3590953 to 3591489 reverse strand)
ttcagctgagaagcccgacctcatcgttttcactggtacccttttttccttttctccctctttttcccgtttcctttgattaaaatttaaaccaaaaaaaaaaaaaattgtttgattcgatttctataatttttgtactggttaccgttaattaggatttttggccaattgaaaaccccggtatttctcattatttttttattacaattctagctaaattataattaacttaaactgttgcatgaacttattgatacttattactcaataaaaattatgccgaagtttcccaaacaagaagaagaagtggttaaagagtaactctcgctattttgtcagtcattctatccagctgctaatgtaaatccacaaggttaactttgaagattgggatttaatgaagcaaaatccaccaatgatactgtcacaatacttaatagtgacgtcggttgcctaatattggttgtttctgtacccaatatcactttttgaagttttttttttctcatacaacaggtgataatatctttggatttg

SEQ ID NO: 82229 - DNA, 772 bp, Citrus sinensis
  Intron number 1 from transcript orange1.1g009070m (locus o range1.1g009083m.g) derived from phytozome v7.0 (chr-ID sc affold00032; pos 638427 to 639198 reverse strand)
ttagcaacactcaagagtctctgcagtttcaactggtaagtgttctgaaatttattttgttaactttttatttatttgtttcattgtctgcttcttctttttttttttttgggccggggggggggattaaagatcagatttttaggatactgagatggtaaaaattgaatcttttgatctgtgtggacaattattcttgttgttgattatctggggtttggttttttatcggtagaaagagaaaaaggtgaaaaggactcgtctttcaagaaaggctcatctgagttgccgtagatccaggaaaactcgagtttaacatgtgagaaaaaaataaataaataaaggttcaactttttagggtttttcttgtgattatatgtaggtgtggttttactttttcctaggttcttctcattgcttcttttgctttcccttgttgtgttttttaatctaaaagaggcttgattttgatggtgtatttaagggttgttaatcgcgataacattgggtagtcttggtttattctttctaggaaagtttggaagaatttgattagtgaagtcttagttggctttatctttggaaactcaaggctggtagtgaattagatctttagatgaattagatccattttctgacaccagatctgatgaagctttgcatcttgttcatgttaacttattccatctttaatttgatcttggtagtgtaatttttggttagtgtatgtggaggttttaagcagattggtggatcattgagggttattacg

SEQ ID NO: 82230 - DNA, 504 bp, Citrus sinensis
  Intron number 1 from transcript orange1.1g021571m (locus o range1.1g018655m.g) derived from phytozome v7.0 (chr-ID sc affold00681; pos 55962 to 56465 reverse strand)
tgattcgagctttttttctcgagaaaattaaagaggtaagtgggtttgcttcaagcaactcaaattacttcaaaagtttgaatttttttttagttctgttgatcttctcagtgtttttttttttttaatttttattctctctccatgaggcgtcttcacatatatttattagctgaaatggacagaccctttacgtgttgttttaattctctctcttcataataatctagtttggtccagtatggtctattttctgccataaaaaatatatttttgtttttattttttgaaataattttatttattttacacgaaccagattttcccaaacaaatgattgattatatgtgtaagttatgttaatttgacgtagtttttgaactttcaagttgaaattttgcatccccttttagtatttttaaagttattatttttttatttttttggggtttattgggagatgctttaaatttaatgcacaaccagccttcttcacatgcagat

SEQ ID NO: 82231 - DNA, 779 bp, Citrus sinensis
  Intron number 3 from transcript orange1.1g019162m (locus o range1.1g019162m.g) derived from phytozome v7.0 (chr-ID sc affold00001; pos 4590364 to 4591142 reverse strand)
ggagttaacattcaagacattttcagctcgtatgtcattttttttccccttccattcatagaatttcttgatttgatttctgtcatgatgttttttgctaatgaaattggatgtgaataattgatgctctgattggaatatcaggagttttaataaagtgtgaaggaatttctatttgctttcagtctattgagaatgtatattatgagattgtaatgagtttgatgcatttattcactctgtcaatacctttgagtttaggctgcagtttaatctccgagattgcattaactgagaaattatacatgtgccttatgaaatattttccctgcatgactctggttgaaacagggtgtggatatgtatatagcactatgtccaaatcaactgttatcttaagctattatctgttccagcttttgggtctgttattttgactaaatatgactcactattttacaagccaatgctacaaaaccatcaaattcagtttttatctaattggcgctagataagtatgctgtgcaccattgtacactatctatacctctagtaactactttgtacatataggagttgcccattagcgtttagcattgtggattaattggtatgaagaattctgaccattgattttgttctgtctttttcttgaaaataaaatggtcatcttaaagtggcagtaacattattcatatatatgttgcaaaatattgaatcaacaatctgccattgctgacaagatgttggtttttgacagtttctttggtggaggtcca

SEQ ID NO: 82232 - DNA, 292 bp, Citrus sinensis
  Intron number 3 from transcript orange1.1g007816m (locus o range1.1g007582m.g) derived from phytozome v7.0 (chr-ID sc affold00102; pos 200545 to 200836)
agcccggcgagagcccccttgttagggttgcgcaggtccctcattctcttcctgtccctcttctcccctgattaagattttctcatgatcagcaaataatcttaaaagacatgagacaaaaaaaatcttttaaattcatcgaaatcttttctcagatcaaaagaggattttaattctttcgctttggtctcctcccgtttttaaaatcttatctaagaatttgattatctgtttgttgccttgattactgctaacaggttctagtagtagcaattaaaaaccgaaagctttc

SEQ ID NO: 82233 - DNA, 447 bp, Citrus sinensis
  Intron number 1 from transcript orange1.1g015971m (locus o range1.1g006770m.g) derived from phytozome v7.0 (chr-ID sc affold00015; pos 1253676 to 1254122)
caaaaacaactacttcaacaggtcttttccttttcttccttttcgtttttattaaaatacacaaatctttttttgatggtgaaatgattaggggattcaatgaaatgagtggcttctatattctatatttataccttgcacggatcactatttagtgtacactgcaattgtcttatctataagcatgagcatggtggtggaagcttgagtctaatcatctcaaatttcgtgcttccaagtgtgctaaaaagttttaaaactttactttgcagtattcgtgatctatttatttcttcgcttcaaagaatcaaattttatcttttgtaaattatggtctcgagagatgactaaattctgtcatacatgagaattttgaagtggactaaatattgtgatatcttggtttctgtagatttctgaaagaaggaaattggtgtcatctataaa

SEQ ID NO: 82234 - DNA, 388 bp, Citrus sinensis
  Intron number 1 from transcript orange1.1g019630m (locus o range1.1g019630m.g) derived from phytozome v7.0 (chr-ID sc affold00001; pos 318093 to 318480)
gagataaacaagcctgtggctctagattcggtgaggtgtggttttcttttcaattctgttaaatcaaaactcgtctttttaattttaaatgtttcttcttcttcttctttttcgtcttcttttttttttttttttccggtgggaaagaacaatttaaaaaaaaaaagaaaaagaaaaaaccttattttcgttgtaattataggaggtggttaatggttactgggttgtggaaatttaacaggctgaaatagaatttaattaatagtgtctctgggtgtacaaattcagatttgattattacaaatatctaacgggacatcatagggtgattatgatgatgcgatctcgctctccttcttgctttagtgttggctgaagaagcagaaag

SEQ ID NO: 82235 - DNA, 481 bp, Citrus sinensis
  Intron number 1 from transcript orange1.1g039690m (locus o range1.1g039690m.g) derived from phytozome v7.0 (chr-ID sc affold00111; pos 315991 to 316471)
ttcttgtagtggcagtttgaaggtaataatctttatggtgtctcctattcaaaaaatgcaaccaggatatctctcaaagctttatcccttgcagatttgatatttttagcttaaaatatctttaaagttatttcatcgtcttcatttgaagagtatgcttgctccctagtaattcaatgtcctgtaggttccatatttattttttgactctgtgtgttcattttctattcgccttcttggggagaatatgtacatgcacatgcgtgtagcgttcacagttttcaaacttcttagctctgatttgactgtgtttgaataaactttgtggtcccatgaatttctaccattctattcgttaaaggagtaatgtgtttctccttcagtccttctctttcatatgtaatatatgtcttttgtttgttgcttaactctgtggttttatagatctatcaccagggctgacaagttttgtatatccagt

SEQ ID NO: 82236 - DNA, 752 bp, Citrus sinensis
  Intron number 2 from transcript orange1.1g027231m (locus o range1.1g027231m.g) derived from phytozome v7.0 (chr-ID sc affold00546; pos 34795 to 35546)
gaagcggtaacacagttttcttgtttgatagtacaacattatgctttaaaccaaagtcctccttgtcattctgttgttgctagatcttctcatgtctcttaactatttttgaacattctattttcaaattcatgttgatgcttattggagcgtatatcatttctgcatatttactaagatacatcttttttcggcctttcttatgcattatgttgtgattacgagtaatgcttcagtttccattgacatgttcagagactagcatgttggacacttaattcgtcaatccagtcatataatatgtcaggaaggttagatgtatctttcacatggaagaaaaagcattgttgatttacttcagtgaaagcgtgaccaaagatacctaaatttattgcaaaaaggatacacttaaaagctagtgataccataatgagcattcatgctgataaatgtaaacctatcaattgggttatgccgtctcaggttcactgggagtttgcattcatgacatctacatgtcagatgaccgtttgattacactaagtttctctcattttgtgatctggatgtctgaaagtaagcctttaaatgttagagcaaccgtttggagctaaatgtcattgccttttgttataattacaaagcttagcatttgtccctcttacatatattctcaatgttcaatgattgactttatggtctcaaaaatcttcacaggagctagagcagaagaaggcagtagaggataagaa

SEQ ID NO: 82237 - DNA, 747 bp, Citrus sinensis
  Intron number 2 from transcript orange1.1g011945m (locus o range1.1g010674m.g) derived from phytozome v7.0 (chr-ID sc affold00032; pos 683289 to 684035 reverse strand)
aggaagttgcaattaagcttgtgagtgtattgaatttgtgtattttgtaagaaattatatggtagtaattgtttgcttgaatatcagctaaaaattgacctttttttttgttatgttagtttgctagtagttattaattttgttgttgtttgggttttgagggtaaatattgttttttttttttgttgaatgatggacgaagaatgcgatagtgagtgagtgagagtgagttgatgaatgattatgtattaggaaaatttaagcttgctttaagagattgagaatgaaatttaagcttgctttaatttgttaccgcaatcctttgagggcggaaaaaggggttttttagttctgccaatgacctttgcttattttggagttttcttaagttaaaattgatgcaagattaatccaggttttgtgtaaagttaagccagcgtggtagtcacacttgtcaacaataatctgttatgtatcttatgagatttagttgagggattcacctaccatgtcctaacagtgacttcaatgattatactctctttttctttgggttcaaatgttgaaggcagtttgcgcttgcagaacttcattgttgataaataaaattttcactatctcttcttctttgttttgttatccgatttaactgtattagttttctttctgttctagtatttttccttcttgatgatattgcttgttcccaaattcattaagtctgatagtattttctttcataggaga

SEQ ID NO: 82238 - DNA, 766 bp, Citrus sinensis
  Intron number 2 from transcript orange1.1g021635m (locus o range1.1g021635m.g) derived from phytozome v7.0 (chr-ID sc affold00235; pos 123649 to 124414 reverse strand)
tggaatttgctacacacatcctgaaaaattacctggtaattaaattgagtttaattctgatgagcgaaatgtgtaaattttctttaatatcacgtgtatgtggattatttattttattttttcatatatatgacatgacaatattttattagttggttgtttatagatccattgtattgctggagaaattctaaaacacattaaaagtaacatgtcaaccatacaataagtaaatgatgcagagacatgtgtatttattttgaaaaaccacaatgcaagtggtggatatattaagttcaattacacgtatcatacatgcattaattaattcgtcagtactatgaactcttggtgaagcaaaaagcagagtgatggttcattttaatccaaccactgtggttcatatcattaggttttctattaatgttaagagttggttaatacttaatagtagtatgtcattttaatccaaccactatagtttcttaattcaaagataattgtgtaaccccattgcccgttaacacccgatgaactaattaaatcaccgtttgccaacaaaggaaaccccagctaaccctaatatgtcagctacaaaagtcaagaaaatactccatgttcatgcatgcatacatatatatacatatacatacatacaaaaacacagatatacaaatattcttttcttaattttaacatataatgtgaatcgtcaattaatgttgttatcctcatatacatatgatgcacgcaggagtttccaaag

SEQ ID NO: 82239 - DNA, 965 bp, Citrus sinensis
  Intron number 1 from transcript orange1.1g034555m (locus o range1.1g034548m.g) derived from phytozome v7.0 (chr-ID sc affold09061; pos 865 to 1829 reverse strand)
aggtatgatgacgcatcttgttaattgctactgttgcatagtattattgttagttacgtgttgcttgcattcgtgcagtcttgcttctttgtaggatgcttctgttgaagagcatagtggtaggatgattgatttgcattaaattttctaccagagaatgttggggtttggctgttagctcagtatctactttgcttcttatttctactactactattattttgttgtcagaaacaagaggttatttgactctgctaatggcattactttttagttgcaagatactattattgttcgatagtttgttcttacgatgctgttggaaaagttggtcttttggataatgactcctcattgtaattggccatgtcaatgatgtatatgtagaaatgtgaaaaggtgcaactatgatagttgctattcaaacgttacttgcatgctattgttaagtttcaggattatagttgaaacaggaagaatatgttcttgtagatgatgtatcttaacggatgcttttaagatatagttctgctgaccaccagagatttgagtatagccatccacagtatatccactgaaggtttgagaatagtttttactcggtgtaaaggaaaaaacattgcatcaaatttattgccctctagtttttcttccttttatactttcatgcaatctgaaaggaaggaaagttcatgacagcagtccaacacatcaatgagtctggctttgtattattatcatgcattttacgtctttcataatattttagaagttttgtcatgctgtagtcttgcttgaaggataatcgactctctccttgtcagtacttcaattgtttactatttattgaatttgcatccggaaggttgcctgtcttgttttcagcctatctagtcttcaacattctgacattttatttatcttatgaagctttcagctgtttgtgaggtgacatttcattatca

SEQ ID NO: 82240 - DNA, 810 bp, Citrus sinensis
  Intron number 1 from transcript orange1.1g045274m (locus o range1.1g045274m.g) derived from phytozome v7.0 (chr-ID sc affold03907; pos 6493 to 7302)
gtagcaatccgtaaacgcttgagagttttcgctaagtatgtttaatcttttttcttttgaaatattgaaataatataacttgttattattctttgttgatgttatgttgttcaactatgaatgtacaggaattttgaggacgccctgtttagtatctaatagattgtatttttgacgaaagaaattctgatcaatataagcatggttttaatattctgctcgatgttatgaagcgtctgttatgcggtttcaaaaattagagcttattaagtggattgctgatagttgatttgaagaagttcaattgagtatctctttttgcttcattttgatttgaaatgtagaaaatggcttctggttagactgttggaagaaactgttgctcctattttgcacgtggcattagtgaacctgaagtgataatttttggctgcattgctgatgaaaaaatgaacttatccccttggtggttctagacatttttcatcttttacactgtttttttctgtgtattcaaagcaacctggtttattacctctgaagactctgtaatttcgcctttcttttggaggaaatcaatggaatgcaatgtattttctgcctttcatttaagataaagaattcctgacttctacttttaagaagaggctgaagcatgagtcccaaatggcttgggggaattggaacagcaaacgcataatcgatgcactttttttttttttttcactacaagtttgcttgatacatttgacatgatagttaattggctttgcagggtgaaggtatcaagtggtgaacttcttgaagata

SEQ ID NO: 82241 - DNA, 707 bp, Citrus sinensis
  Intron number 1 from transcript orange1.1g009435m (locus o range1.1g008089m.g) derived from phytozome v7.0 (chr-ID sc affold00030; pos 882203 to 882909)
ctgccaaactaaccaagttcacgtttttgatactggtaccttctttttattttcccagattcttgttcttccccccccccccccccctttcttttaaaatttataataagtgcctgttcttaaagtttgcattttggtttatattttgtttagtgcagttgcaaaaattggattttttttttctaaatgggtgtattgtttgattgattcttgtttaaaaaagttggtaattttagggtttatgctgggtttattttgatggatagttataagtttttgttgttgggagttaatgttgtgattacttattggtttgcagatattattggcattagtggttttgtgggtctgatatagaaatgattttttaggttttctttttaactatgtatgtagggttttctattgtagcatgaatactgttcttttttgttatgtcttttaattcttgtggcttgtgagtttagcgtcagtgccacatttggaatccatttccatttgggttgttgcaaatttttgagtcgtgccaacatatgaatgttagtgcatagcattttctgctattctcttgctgggacttcatcttatttttcctttcgaaagctgcacttcttgtatttgacagcttttttgttgttgcatgttcttacattctaaatagctgctttgcagttaatcagacgtggagccagccagtgataaagggc

SEQ ID NO: 82242 - DNA, 308 bp, Citrus sinensis; identical to SEQ ID NO: 81768
  Intron number 1 from transcript orange1.1g018303m (locus o range1.1g018213m.g) derived from phytozome v7.0 (chr-ID sc affold00032; pos 884866 to 885173 reverse strand)

SEQ ID NO: 82243 - DNA, 817 bp, Citrus sinensis
  Intron number 2 from transcript orange1.1g032954m (locus o range1.1g028649m.g) derived from phytozome v7.0 (chr-ID sc affold00029; pos 455254 to 456070)
acaccatcagggtaggtttttctagctcttgtttcattactatactgtgttttctttttcctggttcacattgattcacaatgggatgagtgtttgtgatgaactcctggcatagtggcattaagatattgatatgacatgtggtaagcctattgatgggttgtctattaataatgaaattatgttcatgtttttataataaatgcaattcatgcatcatatatgtatggtgctcatcaatgcaagtcgtatcatgctcctattaatccttttgttttattcttttccattttttttattaggtgactaggaatatcatggctattttatatagtgcatcattttcttggaatgtcattttgttgttgtctgaacacggaaggacaaaaagttgtacaaaggaaattttcaaattcttaggcccctaattttttaaaatgggatgggatgacactgtgattgtttgctgtgtatcttgactactagtgttcatgattggattatattggtttggtgaacaagtgatttcgtgttagtattgttcaatgctatcattttttcacatcaatttttgaatggagttgtttattgtgaaaaatgaagtgtgctggtccctggttttttttgttggattttagttctttattaggtggatggttgtagtggtagatggcttatgtttctagtttcttttatctacatattgaggtttatgctgtagtgtaattgatgaatgaaatatgcatgtgaatattttccctaattatcccgatatcggacaggagcttgagaagaagagaaaggagaggtcacaggt

SEQ ID NO: 82244 - DNA, 282 bp, Citrus sinensis
  Intron number 3 from transcript orange1.1g009370m (locus o range1.1g009386m.g) derived from phytozome v7.0 (chr-ID sc affold00021; pos 540164 to 540445 reverse strand)
ttttcaagaaagagcttggaaaaacaccagatcaagtatgtacttttgatatagtttttcttgccttctcgaccactcctttcgtggaatgtaattcccatataatgagttttatacgatcttttttagctcgttggttttatctgacatttatatttggtgtttctcaattttctcttcaagttttgatgattattttcagctataattgatttcctctgtggaggcacattgttttgtttgcttgccactgaatcagtctatttgatgtgcaggtttttg

SEQ ID NO: 82245 - DNA, 705 bp, Citrus sinensis
  Intron number 1 from transcript orange1.1g001252m (locus o range1.1g001252m.g) derived from phytozome v7.0 (chr-ID sc affold00030; pos 919908 to 920612)
tggaaggcgcctgacccacaaaaggcttcctcctggtaatctaatatttatgtataagttaatcagatgaatctattgactctgataatgcttggctgtgataaattcatatgcaacttgtgttgaaatcaataaagtgttttctttcttctgtttaaattcatggcgaacattggcctcatctctttctgcctttgcaggatattattttcacgaattcttctaatcttatatttggtgtatttatgcctgtgtgatatgcgcatgatgtgctaacattcttggtagcatcgttttcttgtcctaaattatcgtgcagatagaattctctcaaatctagtttcaaagaaagttttggaattccaacaatgttttatctcttggtgatgatcagaatttaagttcttttacttttatgtattaacagatcagtttggagcttttatgtattaactgatcagtttgaagtaattgtttatgattgcaaacctggtttagtgttttgtgcatgtttctcttctatcccttatatcagatctttcagctgcattctattcgagatattatatagttgataagagcctaagcatcttcaatgtttttgaatgttgtaatgagttctcagacattggaaattcattgacactgctgaataattcaacatgtaattctattgtgcttttttaggtacttcccatttccaga

SEQ ID NO: 82246 - DNA, 513 bp, Citrus sinensis
  Intron number 1 from transcript orange1.1g016104m (locus o range1.1g015200m.g) derived from phytozome v7.0 (chr-ID sc affold00008; pos 1056172 to 1056684 reverse strand)
aacgtgattcttctgctatcactctgttgttgctggtaaggtaactgaagaaaagggtttagggttcatctatttttttctaattatttggtgtcacacttttgcattattattttttgtttgttctaatagatacaatttcaattttgtagcaattttttttttcagttttcatcaaaatagaagaaagggaactttaatttttcaagactatttctgaaataaatgcattttgggacttgatttgatgctaactgaaaaattcgtttaaaaggtggaatctttaactggcactggttgtgaaattctgagttcttatttgaatgtgttgaagaaaaactcttaggtcaatggtctccttactgtttttgctgacttatttcacgtttatggagtctcatttatgctccgcaattcttttatttttggtctttatttcttgctttcattgttgcattccgctttaatgactatgattcttggtgattattaaacccttttttctcatatcag

SEQ ID NO: 82247 - DNA, 607 bp, Citrus sinensis
  Intron number 3 from transcript orange1.1g013703m (locus o range1.1g011639m.g) derived from phytozome v7.0 (chr-ID sc affold00008; pos 1206891 to 1207497)
cttccaaagatattgaaccacgccgtcgtgctcgggtgagctcagttgattatttcttattggatgaccatatgattgatggcataatagctatgcttttgcagtatccattgtagtactttggattggctgtggttttggtgtttcctgttgtttgcatgaccttaattgacctctaattttgattcctatatctatatttacttacagtgtgggggttctgttcttactgtgcagttagtcatgcaaatacctctagagttgatgctaaccataagacagaaactcccatggatgttcttccctgatatagtgccattaggccatccaatatttgatataattaactctaccgaccctgaggtaacttagtttcttctaaatatcagagattagctcttgatcttattttcaattattgaatcttcaccattgcattggcatatcttttctttttttttaatttctctctttttgtgtattccattactatatattctgttgataatggaatcttaagagctgagttcaatatctttttttatatccaaatgtgtaattatgatagatttctctattggcagacagattgggaccttagattggc

SEQ ID NO: 82248 - DNA, 420 bp, Citrus sinensis
  Intron number 3 from transcript orange1.1g030558m (locus o range1.1g026036m.g) derived from phytozome v7.0 (chr-ID sc affold00098; pos 4060 to 4479 reverse strand)
gaattacacctgcccttcctcatataaagcgtgagtctccttttcacctccataatcatcagtttctttgagtgtcaagcagtgaagagaatgtgatcaacccaataattccatcagactgctttgatcatgttagtcataaagctgctgcctatttcttttatgaatgactgaaaatttgagatacatttaaggaataagacaagttattgtcattttcttttctggacaatctaatgagggtaatttagggatggcttcttacttcatgcacattgtgtgggaatggcacattccatttgcacgcttgtttcttgctattataacaaaaaaatatgtattttttttccatttcttattgtttattgaattttgtgggtttggtatattgaagtagagcatgcttgtattatcagattc

SEQ ID NO: 82249 - DNA, 640 bp, Citrus sinensis
  Intron number 1 from transcript orange1.1g013008m (locus o range1.1g012363m.g) derived from phytozome v7.0 (chr-ID sc affold00052; pos 576224 to 576863)
tattattccattcctcaggttcattacttttcttcattatgctttccattaatttatttattgaggatgcggaagcattgtgagaattgattgaagtttaatatgacattgagttccaagtaattgctgaaagacataaatttgctaggactctttctataaagagttgtttttgagcaactctttgaatagagagttgtttgtccggatttttatcgaaatgtggaagttggcacctgataagttttgcattcatgtaaattttgatgtattatggaatttttcgaggggtgattgttgatggatatgttaggtattgagtatctaggagaaatatatctcaacattgtcataatgcttttgccctttttacttgtaaatggaaacctgtagaaatgggaacattaggagctaagaggtcatgcttattgaaattgatggcaattggcagttgcgtgaagcagtagtattgcagaaataagttttatgattctcatgttgtgtatctagcttactgtatatttaaccttaacactaatgggttttgttaaattggtttagtgggtattttctcgtctaaagattggttatgttgtttcttgtagatagagcttgctaagcgtttggtggcttgttcttt

SEQ ID NO: 82250 - DNA, 814 bp, Citrus sinensis
  Intron number 1 from transcript orange1.1g017997m (locus o range1.1g011641m.g) derived from phytozome v7.0 (chr-ID sc affold00015; pos 1630142 to 1630955 reverse strand)
ttttgattttgagaaatcgaagctcactgaggtaaaaattaaaatctcaattcttcgcactctctcttgatccgaaatgtgatcttaccgtttttttcatatctgttcttttcatctctgagctctttgttgtgttaaaaacttgtgttttttagatatgaatcgaatgaattgttgttggatctgaagcaattatgtgtagatctgttatatgggtttgatccttattgtgattcgacaactggggttcagatcttattgagtttagttgatttctgagttcatttttatttgagctgaatcgggttacttgctgtctaacggaacttacttggagtacagtacattgtatgaaaaatgggttcgctttttccttttttttgttggttcgaggctacttcgcagtttgaagatcaaattgagtttgttagcgtagatcttggaaaaaaaaattgtgtataaactattctgcttgtgtagttgagctatgcatgttggacgtagtgcgtagagttgctgaaaactaaatttttccgtcgttgtggatggaaatgtatgtattttttgcctttttgattgtttgaagattctgtaatgaatgacgaatgactgacctcgtagtgatatacttattttttatacaagactagtttgcaaattgtcgattcatttgttttgtttactgtttcgtatttgaaagcgggttatgtgttatgaaatgccggaaatgggtaatgttgcttgttttctcatgcatgcaagttaacttttgttctttccattttctgcaggttatattgattagtaaaggaaa

SEQ ID NO: 82251 - DNA, 333 bp, Citrus sinensis
  Intron number 2 from transcript orange1.1g022884m (locus o range1.1g022883m.g) derived from phytozome v7.0 (chr-ID sc affold00020; pos 946828 to 947160 reverse strand)
aaagaggcagttgctgaggaaaggtttgaggtatccaatttcgaatgattaactcatataactgtatgtggttttccttatgcatgtttatgatgatcactagcaaaatctattaacgcaaagtgttaggcagccattatttagtaatgatacttgtgtagctagctactctttataatggattacaatatttttatgatattgtttggttttgagagatatgatgggtaaatcgttgtctgctacaatatggtaatgctttgacctatgttattggtttgtatttgctagcttcctgataatttgttctcttttattgaattctttgccagg

SEQ ID NO: 82252 - DNA, 726 bp, Citrus sinensis; identical to SEQ ID NO: 82048
  Intron number 1 from transcript orange1.1g009092m (locus o range1.1g009083m.g) derived from phytozome v7.0 (chr-ID sc affold00032; pos 638473 to 639198 reverse strand)

SEQ ID NO: 82253 - DNA, 461 bp, Citrus sinensis
  Intron number 1 from transcript orange1.1g003282m (locus o range1.1g001697m.g) derived from phytozome v7.0 (chr-ID sc affold00008; pos 2284591 to 2285051)
ttaatcaagctttatccacccttaaattggtaaactgaggcttcgtagttaaattgttaatagtttggtatcacttttgagcttcttttctcgcttgtttgcttgttttacttcttaggtagccttcatttagttatgcatttctaatttgtaaaattgttaagcacagtgtaaatgctaattcatgatcccttttgctagtttttttgtttctgtattagggatgaagtttccattagaaattttaggtttattctcagacatacagggtacgttatagctgttaaaaatttgaattcaattattttgccccttgattatattatcatgtaatttgattaggaccttggaaaaatgtttacgatgagattttggtacttgttttggctgtgggtaaaaatgagttgttttatgttcatctcacagcttgttgcatctggagactgtgctggagccttgga

SEQ ID NO: 82254 - DNA, 374 bp, Citrus sinensis
  Intron number 1 from transcript orange1.1g007794m (locus o range1.1g007242m.g) derived from phytozome v7.0 (chr-ID sc affold00166; pos 128927 to 129300 reverse strand)
tcaaaggtataatatacatgcatataatttgatcatcaattcatcatcatcatcagtcatcaaatgttttgctttctttttaatttttgggtcaatttgtcttcacatgcaaatgtgatatcttttagttttcttctgacacgcacagcttctgctagccgcagttatttctcgttcttttaattttccctttctgaacaacaatgattactgtactgtttattattattcttttagtaaaaaaacagcacccctacgtgtgtgtgtgtgtgcgtgcgggcataaatatatttaaaatttattaattttgaagaccccgagtcgggaataattaattaatttttttcgtttaattttataattaagctccacgc

SEQ ID NO: 82255 - DNA, 733 bp, Citrus sinensis; identical to SEQ ID NO: 82025
  Intron number 1 from transcript orange1.1g012338m (locus o range1.1g012338m.g) derived from phytozome v7.0 (chr-ID sc affold00001; pos 5052679 to 5053411)

SEQ ID NO: 82256 - DNA, 490 bp, Citrus sinensis
  Intron number 1 from transcript orange1.1g032417m (locus o range1.1g032417m.g) derived from phytozome v7.0 (chr-ID sc affold00192; pos 51311 to 51800)
ctccaactgaatttacaatccgtaagtacgagggttatgaatgaatgtgatctttgatattgcaatgtgaacaataagatgcttttactcttggagttcaaactgccacagatgattgattaaatagtattttttatatacatatcctttgaaagagttgttttttatttggtaggtgacttacaaacatagggaaatttctcaaaagtagcaaaaatgcaacaatgaaattgttcagtgtttttgagaagaatggaccaatttacaagtaaagtagaaaagttccgagaaagggatttgcttttgtaactggtcacttttgctgtcttgatacagaatcttagtatagccaatgatctattcttagatttgccttggtttctgctttagtaactgttctttttggagcaacctgacctgtgaacataaatatatttcagatattggaatgaaacatactcatctgtaaccttctatattggtattccag

SEQ ID NO: 82257 - DNA, 389 bp, Citrus sinensis
  Intron number 5 from transcript orange1.1g032417m (locus o range1.1g032417m.g) derived from phytozome v7.0 (chr-ID sc affold00192; pos 52777 to 53165)
cttttacaaggatttcaaggttagaatctgccttctgtgccagatcatcacaataatttaaatgaggccctgacttctgagcttcaaatttgattggtccaagttagagagcagtacatgctgtagccttggttgtaaagagagaaaacatgagctgatgttggggttgacatgttctcctatctattatcagcatgatccagccaatcaatttgttttactcttctttttttctggctgacaatttttttttttggtaaaatatctgggtaacctgttgtctaatttgctatttgagtttacctatcatgtggaaagttgatgtctactcttaacagtttattgttatttcagcctcgggattgtattattgaaagaagccctgaaaa

SEQ ID NO: 82258 - DNA, 906 bp, Citrus sinensis
  Intron number 1 from transcript orange1.1g022945m (locus o range1.1g022345m.g) derived from phytozome v7.0 (chr-ID sc affold05193; pos 2382 to 3287 reverse strand)
ctaacaaagactgaaggtattcttttgtcttcaggttattgcacaatgtttactctaaattatttactatttgtttgtgaagtgcaatcaattcagtggttgtcttgctaagctccttttattttccttttattctttgtcaatactttctcacagttggaaatgacttatttgatacttctctttatgctattatacgttttgtctatcaaatctagcttcccaaacatattaattgagaaagccactgtgatatctttacccatgttcttggtattgtttttgtcattatcattataaaaagatgagacattgggtgctaacgtggttgatttgtttatgctaaggtgaaaggctaggtttaaaatgaatatatattggtattatggttaaccataacaccttgagtttgtttgtggaagggtcattctttgctattattttatcttttatttttcaaagatctgagcagcttgcagtcttgttttagaggtagcaagatgcagggagagaccttttatatcccaaaggcgtacatttagtatatacaaatggattgcctaaagtggagttgtctattaactccaatgtaaccactttaacttttattgttgcatctatcaacaaacatatgaatatacctatttacaccaattaaatactatccgaaacttgtggtattaactattagccagttttcactctttttagttttgaacagattcctgatgcatgctcaattgtgtactacatgatacagactgctttgctctctgtccatgaccttttttgccaatacgtgtacattatgtacaatgaaattgatggtagaattaattttactaatgtggtaatagtctttttcaatgtgcagtaactgaggacttctcttgtccgttttgcttg

SEQ ID NO: 82259 - DNA, 948 bp, Citrus sinensis
  Intron number 1 from transcript orange1.1g043756m (locus o range1.1g043756m.g) derived from phytozome v7.0 (chr-ID sc affold00012; pos 1891666 to 1892613)
gtttagaaagagttgttttaatcggggaagaagttgtaagataaattgatgtcttaggaattgctataattgacagtgaagagctaagtgatcataatcctacaaaacaataatctataaggaatcgccaaggatgttattggcgtagatccttcgatacttaagttagatattgagggtgttatcggcataaaccattcgatacttaagttagtgatctaaagtagcacaataacaaataaataattaaagagggaaaagagagcatgaaaaaggcttggctcctccaatatacctatttctctagatactacctttgggtagtgacctctttatataagagagataattgaaaatatagttaagataggaaaatttatcttttatcttgtaggatttgagtatggagagaattacgacttgtattgtttaacctacttagattagaacatgttattagatgtgggtccttgggcttgagctcctttatgttatcaggtcaagtttggtaaaaaaatgggtataacaatattcatttgtttcctttcaattaatttttgcaaaggttttccactaatggtctttaaacaaattctttaccaaatagataattctttgtatacatcgatacatgtatatctgtcccatgatatagaattaagacaacatgtcacctagacctgggccaaggtatttgaacttgtaaattttttgtaggaagaagacttatatgtatttagtatttttttcaaaccatacttctttctcacctatgattctgcttgtacttgcaatttcatattggttggaaaatacatatttgattaattaaatagtttcaatgctattttcctgagaaaacatgatacaacaagagaactggtcaggaaaatgaagatcaaaatgaagacctagagctaccactgtttaagttagctacaattgcta

SEQ ID NO: 82260 - DNA, 642 bp, Citrus sinensis
  Intron number 2 from transcript orange1.1g003944m (locus o range1.1g003941m.g) derived from phytozome v7.0 (chr-ID sc affold00001; pos 2385148 to 2385789 reverse strand)
cggccttgttaaaggagaaagaggtactctgctgatccttttcttgttttctgtttcaacttagtagtacattacatccaagaatgttgaaaaacattaacaagtgaccaaattttttaaggctgtagttatttccttttttataatgtgtggaagtgaaagtgttcatttgataaataacactctaacaaatggctagttaaaaagcatatcatctaatcttttggatatatcagtctacatctttggcattatcttacatgaggtcatggttatgcactgtaaaccattgattaggttgaccaactattctgcttattagttttttggggagctgaattcttttaaataaagagtattcttccctactttagcttttaactatacctccactatttgttctgtctgtccgtcttgccttttctatttgaagattactaagctggttctgaaactaacatagattccatgcataaagaagaaagttcttctgcttgatttcttagtaataccttttttccccccttctgatcagtcagtagctttaatttcggggtctttgattactgaaattttgatttccctgataccattctccttcctcccataattgtcatttgcaggaacagatttccagattga

SEQ ID NO: 82261 - DNA, 509 bp, Citrus sinensis
  Intron number 1 from transcript orange1.1g034611m (locus o range1.1g034185m.g) derived from phytozome v7.0 (chr-ID sc affold00001; pos 5277605 to 5278113)
cagtagagagagatccgctagcgtagcgagcagtaatacttgcttctcttgattgaactcctgtactgatcgccgaagtcaaatattattttcttcgtatttggttagagtaatcggagtgcataattagggtttcaagaattgcttgatttaaaatgtacttatgaaatgattcagatctgttttcactctgcaatcagtgattgtttttttagaagaggggtgtatggaactcaaaattaggcttcgatattttttatttacgtcttcggatatggtgttgcgtgtaattcatattttacagtcaaaataattttgcttctcgaagtttcagccttaaagcttgtgagtttgtgttggttttcagttatttttgttaaactgtttcggttttctagttgttgtccagtttggtccgttagatttgaggaggctgtgataccatcttgatcttgttagaatgttttgtctgatatgctctaactggctactgttttggcaggacggac

SEQ ID NO: 82262 - DNA, 528 bp, Citrus sinensis
  Intron number 3 from transcript orange1.1g034611m (locus o range1.1g034185m.g) derived from phytozome v7.0 (chr-ID sc affold00001; pos 5278467 to 5278994)
tctgactccattgtgacaaagaatatccttttttttcccacttgagttttatgatactgaattctctgggatcattaaatgcaggaacaaaactctttcattgtgcattacattgaaaataactttgtttttcctaaattattgattttgtgaaatagtagtcttggcaaagcttttgtatttgtgctgcttgtgtatctttctgaaaattgatgacagtctgaacgttaaaccagttgttacactagaagatcctgtattgtttgtgttaacaaacagttcttacacttaggatctttgtagggtcacagaacattctttatgctgctgtaatatgataaaaatatgaatctgactctatttctgattttggctgataaatatttgatcaccaggttcaaagaaatctgaaagcacattcttaattcactctgttgtgtctgttcaacaaagatgtttttgcatctctttcgttgtgtttacgttaaatgtatgaggcttcttgtttacttaacttcaatgtacttg

SEQ ID NO: 82263 - DNA, 746 bp, Citrus sinensis
  Intron number 1 from transcript orange1.1g009408m (locus o range1.1g009429m.g) derived from phytozome v7.0 (chr-ID sc affold00111; pos 381207 to 381952)
tgcttggtgaagaccccaaactcacccttgccaaggttccctctttcccttttgcttgttcctttttctttttaattattatgtttacatgaatttatgtttgtatgtatgtggagggctttatacatacgtaataagtatgcatgtattcagtgttgtttttagatgctttatttggtaaattagcaaatggaaagatttctgagcttgaacggagttagtattgatctggattttagagtaacttttcattaggcaaatttggaacatttgttgcctgtttgttttttggaatgcaaattgttttaaaacaaaggaagcatagtaatatagtaacattttgctctgaatttctagtgttcaactagccgtgtgagtctctagttgtaatttcagttttgttaacaaaaatgtataattatatgcatgttagaggtatgcgtatacatttatgcttgtattgatgctgtgttttgatgttttactaccgaagatcaagaaatgggcaaataaatcttgagttggagagttgtactggtttcaccccataacaagctcattaacaagctgtgtttgatttttttttcctttttttccctttcccgttcaaataatacgaatgacatactccaaactaagcatacaaaaattttgtcatgaatttctgcattctagtattggatttgaacttgtgactgattttcatttactgaaactgacaacaatttcatttaagtaagcagatt

SEQ ID NO: 82264 - DNA, 405 bp, Citrus sinensis
  Intron number 4 from transcript orange1.1g025241m (locus o range1.1g025241m.g) derived from phytozome v7.0 (chr-ID sc affold00032; pos 976813 to 977217 reverse strand)
aaactacatctggagaaaatcttttcctggatagggtataatcttctcacttatggttatttatatctttctgttgcctgcttaattgatttcttctctctgtagtcagtacaattatttcttcatcattagaaggaggaaaagaacaactgtcaatgatatgatttatctattttctttaagtgaaatgaaattcgcagatcgccttggaaacttgttttttagatttggtgaattgggactgaatgttactctttagctctgatgattaggtaatttcaaactaattcatttctcactgaacgcttgtgattctgctttcgcaatgaggtttaaaatactctgttttccatcattttgatctgtgtgtttattaaatggctttgcaggtatttgatctttttg

SEQ ID NO: 82265 - DNA, 450 bp, Citrus sinensis
  Intron number 3 from transcript orange1.1g025241m (locus o range1.1g025241m.g) derived from phytozome v7.0 (chr-ID sc affold00032; pos 977208 to 977657 reverse strand)
ggctaattcacaaggtagcaaaaattttatttttcttgttagatctttattgccatatggttttggcaacaagaacgtgggaagtcattcctgaggttttcagccgttgaaagcattttgtatgcaattttataactaattgactagggctcatttggaattaaggtgttatgggcttttaatccacagctgttgtgaaatggaatcagtagctctcaataatgagaatcatattggtaaggtgttgtgtaaaatcatataaaggaatttgttgaccaaaaacattagctgttgtgctttcaaaattaaactaaaaggtaactattacaaatgagtcgtaaatgttactccaagacaactgcaatcttcctagaacaacaagcatttgatttgcttctttgtttttaattcataggaggagcttcgattggcactactcaaaactacatc

SEQ ID NO: 82266 - DNA, 978 bp, Citrus sinensis
  Intron number 3 from transcript orange1.1g031001m (locus o range1.1g029701m.g) derived from phytozome v7.0 (chr-ID sc affold00084; pos 292552 to 293529)
aaagggttaccgcggtttacagccaaattcttccagtatgattcactttctatatagaccttattgattgtcatgatttactgatatattttgctttatttgaagcttgtgatgatagtgttccattctttatttgtggtgaatgaattcacgatagggagaatctaactttaccagagaataacttatcaatcacccccatgacctgaactacctgtggcttccagttgaactgataagacattaattggcaggggaaaaaaaatttgtgcaacgatattggtgggactcaagggatgagtagaatgtgaatgaaaattttatattatgagagttatagtaagacgaagctcatttagagagccattaagagcggtaagaaggtcaaatgatggtgaaatggtttgtaggactgcattcattgcgtttgatgctttgggcttgctgaacgctgatgtatggcagcttccagttcttcctgaaactttagcattaaacttctaaattaacaatcactcatgagactggtagccctactttcttgtccgttcatgtaggactttagaccaattggggaccgacatcagggatttaacatgtaactcccttcaaggggaggagtataataacttttctgcatattatctgtgtcttgttgaataggacatagaacttgtcttttttttccttgcacagtaaagggttcatcagtctctaattaagaaaaagtaaatgaggaagtagtagaatcattggttaatttcaaatcaaattgtacttatattgttatatactgacctgttctaagaatggagctgttatgatatgctagctggtcatcaaactgtaaaaccacaggttctttatcacatgtagaaataaaaactgaagatcatcctctttgttcgccatggtttcttatcattttaatgttaaattgcagcaaaattatatttgcctgtcgttggtaggtcgagt

SEQ ID NO: 82267 - DNA, 721 bp, Citrus sinensis
  Intron number 1 from transcript orange1.1g028623m (locus o range1.1g028623m.g) derived from phytozome v7.0 (chr-ID sc affold00055; pos 446166 to 446886)
gctcctgctaagatcctttggcgtaccatccgtgggtatgttatgtttttgtttctgggttcttttattttttgatgtttgattctattttagtgtaaaaattggattttctgatttagtatgcaaatgcgtttgtgggtgtgttgaaattagtttagattaagcaaatttatctgtttttcttttcattgatcttaaaaaaatattaattttcatatttgaatgttatctttttgtctatggattgaaaatgtgtagatcactatctgattgttttatgcatgttggattaaaaaatttgattgagcttatcattagaaataatgtgtactttttcacgtggctgctgagagtgtatgaatacattgttttgtggctggactgtcattttcagtgtatgatgagattctttgctgctaaggttgaagccatattttttgttccagccttttaaattgggattgtgcttggctcctacaatcttcttggtacattgtatccgaaagaatgagaaaaacctgattttgtgactagttttagatgcaatacaaatataagcttaatgaggtaacctgcttttaaggtatttatttgctaattactggagtgcaaactttgtgtgcgttactttattttagtttttagttttttttcccataaaagttggttatttgttttacgtatatgtggtaatgaaagctgttcggttcttccatgtagg

SEQ ID NO: 82268 - DNA, 1060 bp, Citrus sinensis
  Intron number 1 from transcript orange1.1g020103m (locus o range1.1g020026m.g) derived from phytozome v7.0 (chr-ID sc affold00547; pos 69991 to 71050)
gacagttgatcccaaacgagccaaaaggtgggttttttttttccccaaaaatgtggtacatttacgtttattttgtggaatgtgtatcgagcttataaggaaaagagagaattggtgacccttttgcaaaattctattaaagttgaaagctttttttttccccaaaaaagaaacaaattttatttcatttgaagtgtgtggaaagagcagatttatctttaagatttgttgaaacgcatttgtcaatgtggtcaacgttatagataataaagttggaattttttttagtgggtaaaagaggaaatttgatgggctttgcattttggtagacggggttcatgattttttgcttcgctggaagatatttgcttttgttacttttttttatttgtttctatgtgaacatactcttaagtgtcagttttcagtgattagtgattcgaattagttacacgagtctgatttctcttccaggctttgatgattctctgttgctgaggtcaatagtgtttatggtccttcattacacgaaaattgggtttaggttgaatttccatctgcttgtgcaatgatactacaccttttagtatttcggtctttacatgctactgaatgacagatttatactccttaaaactgccaatttacttttttccaatgtggtgatctagctgcacactcgtacttaaagtttgggtcactatacatttgatattcaattaatagcataatattgaattcttatctcatgttcatcctttcttttaaaatcgaatgttttctaagtgatggatcattatatattagaaatttttcagttggttttcttagccaaaataccttttgttatgggatcggagttcggcatatttgtcgaaccttatagaattttgttttgacttcaaattcatttgattggcagaattatgatggtttatagtagaaatggaattataatttacttaaccctttgattgtttgtttatttattgatgtttccttttacaaattgcttttctaagcaggattcttgcaaatcggcaatctgctgctcgttcaa

SEQ ID NO: 82269 - DNA, 465 bp, Citrus sinensis
  Intron number 1 from transcript orange1.1g042930m (locus o range1.1g042930m.g) derived from phytozome v7.0 (chr-ID sc affold00021; pos 1091466 to 1091930)
tcaaataaaaacattgtcactaaagtacttgcttttatgctaagcaaaacatgcaattaatttcttctaatttccttcacctaacatgttcaatatctaatttcagaaataaaatattcaatatctattcccaaccaacccaacaaacgaccacgtaaaggtttggccagtgctgcacgtttctgaggtacgtgtcgtttttccatgcaaagactccgcaacgttgcaggcttgcagtaaaaagtaacgaaaaagacgggcaaaagcagacggaaaaagttgatacgcctattgcattgagcaggtagctggtaaacttttgttttcttttcttgtgaaactttatctcaagccacgagaagcattggcgtgtggccacgaataattctgattcaaaaaggacttctgggaaagtgcttagtgcttaaggttactaaggtaagattacttgtcacttgcaccaga

SEQ ID NO: 82270 - DNA, 648 bp, Citrus sinensis
  Intron number 1 from transcript orange1.1g008487m (locus o range1.1g008453m.g) derived from phytozome v7.0 (chr-ID sc affold00020; pos 1363701 to 1364348 reverse strand)
gaggataagcgtagaaaagggcatacttttaaaaagttagttgcctttttcttgtttgattttctcgcttattgactgtttttggtattactcttcaagtttatttttccttttctttgatagtttagatttgaatgagaaatgagttgggggaaggcttatttagctgaagattgttgaaagttttaattgcacagtggaaaattgatggaaagggaactgaatttgcttgttgagtgataattaaataattttgatcaatgtgctctgcctatgttatctgttatttgaaatcactgagccaatgttcaaagtcgagagaaaatgaactgggccaggtgacaggtccgcttgtgtactggaaaattatgaatttgtggagtataggcaaatgtatacttactgctttatgctgcaaggtgctgtaatttttatggttttgaagttgggccagaaataagtttgctccactgttctgtgtttatgtaaataataaatcaacggatcagcttctctctcacttctatttagttgatgccttgatagtgcctgttgaaacatgtttgtgcctttttcttctgggttcattttctcttatttcagtctctaatttattagttgactgtgttcagtgtggttcaggaggtt

SEQ ID NO: 82271 - DNA, 593 bp, Citrus sinensis; identical to SEQ ID NO: 81720
  Intron number 1 from transcript orange1.1g029866m (locus o range1.1g029866m.g) derived from phytozome v7.0 (chr-ID sc affold00012; pos 47488 to 48080)

SEQ ID NO: 82272 - DNA, 700 bp, Citrus sinensis
  Intron number 1 from transcript orange1.1g024863m (locus o range1.1g024863m.g) derived from phytozome v7.0 (chr-ID sc affold00084; pos 201749 to 202448 reverse strand)
cataatcggccacgacccacttcggtacgtacctattactcgatctttgttgattcttgaatcgctttctaggttacgcttctcatagaaatatctcaaaagggtttcaatcagtttgaaaatggtgccttcagcttctcgaatttgtaaactttctgttttgggtactttctctaattgtgttttttggggttttgtttgattttaccctaagtatgctaaagaatgtgtgaatttggtgtttctattgataatttatttttcgatgtgcagatgttcttgttgatttgggactagggttttaggttttgaatagaagagatgtatgttaggcttttagcatgggcaaactcaagatttgatgggtattaggtatttgaattttcagtttgctgtttgtacaaaatggtgccaaattcaagctttgctcgtatcgacactttagaactaaaagctctgattttaaagaagattgggcatcaaagaggagaaaaatactttgaacatcttggtagattgtttagttcgaagattagtaagactgaatttgataaattttgcattaggactattggcagggaaaatctcccacttcataacaagtttattagggctattatcaagaatgcatgtatagcgaaagttcctccgccgagggggattaagaaagtagggagtagccttggtgttaaaacagtaa

SEQ ID NO: 82273 - DNA, 725 bp, Citrus sinensis
  Intron number 2 from transcript orange1.1g045781m (locus o range1.1g045781m.g) derived from phytozome v7.0 (chr-ID sc affold00029; pos 537660 to 538384)
cagtcaattctgcaggagttgttactgcttgttatgtgtgtactgatacattgccactatctattaattctcttatgatgtgtttattttttggaataaggcacgagaatggaaaaatgagaatcaaagctctatttacttgacaaaattgaatttggaaatgggaataaattgtgtggatcctacataatttgggaataaagaatgagaatctcattaccatgggggggttgagaatgaaaatgtgggaatgagaatgaaacataaatttacttttctatcattctaattttttcatattttctaaattacccttgttcaaatcacaaataattttattattttaaatgtcattaataataataataattaatagtaactaaaataataaaattaacaaaatttaataataataataataataataataataataataataataacaacaacaacaacaataatgataatattgttaataatgataaattaattattaatattatgggtattttggtaaattgattctcattttcattcctcatttccatttattttgccaagtaaacacatcaatgatagctcaatggtagctaacgtcgtgaaacccgttaaatggtattttggtaatcaattcttccatttttttttaatttgcatggtgattaatcgaagtttgttttaattaactaaacggtagctaacgtcgcaaggacataatcatc

SEQ ID NO: 82274 - DNA, 443 bp, Citrus sinensis
  Intron number 1 from transcript orange1.1g012947m (locus o range1.1g012947m.g) derived from phytozome v7.0 (chr-ID sc affold00015; pos 1547417 to 1547859 reverse strand)
ggagatcccgttgccgccgcctgcgtgcactccgggtccgccttctttgtttccttctgtttattattattgttactattatttttgcaattcatttactttgttcgatcagattaagggtctgtttctgtttgaggtgttgtgcctatacctgccgtggaattgtggaattggaatcactagtacagttgtactactttcaaaattaagcagtcgcataactctgagaacaacatacccaagatatatatttattttttttttcaattgagtttgcttgtcgattaacaaattggagttccattggaacgaagagagagagagagagagagagagagagaggaatctgttacttttgtatgtttagtcagtgttgtgatttctctttatgttgattttatctaataggtgtgactacttggatataagtggggagccagagt

SEQ ID NO: 82275 - DNA, 501 bp, Citrus sinensis
  Intron number 2 from transcript orange1.1g007451m (locus o range1.1g007451m.g) derived from phytozome v7.0 (chr-ID sc affold00029; pos 477293 to 477793)
ttgaggtaaaaatttcgatttcattgttctgttctgtattgaatcaatctgattcgcgtatatataattttctgtagtaatgccgtgtatttgctgaatgtgagacagtcagattgatcaattaaaatgcactattgattttgttggatcaaagttgtttccaatgttagcatgctagcttatcgatctagagacaaattcaaaatattataataatagattttattctgttcatcctatggattattcaaattactcgcgctagtcatgctgtcatgacctcctaaaggtgtaagctatgtaaaagaacagcggcaacactctactatcagcatcgttctcaattttgctcttccaaccatcttcatgatattgaaacattcgtttatgaatgtatgcttttagaatttgcttcctttctttaattattccactaaattgcagaaactgggatttcttgctgcagatttttgaaggctaggaagtttgacattgacaaaa

SEQ ID NO: 82276 - DNA, 475 bp, Citrus sinensis
  Intron number 1 from transcript orange1.1g033531m (locus o range1.1g033465m.g) derived from phytozome v7.0 (chr-ID sc affold00015; pos 1475697 to 1476171)
tggggaaaaaggagtgatccggatcagtttttgaggcaagtaagataacccatcaaggtttttggattcttttgagcgtttgttttggttttttttattggttttgaggtgagaaagttgtttggatgatataaagcgtgtcctctggatgaacgtttgatgttattattgatgattggttgattgattgctgtcacagacattttgctgctttattcgtgcaactttatttatggatttggtctggctttttgttctatttagggattattgaaaatcgaggatattgatgcgaattttgattgctagaaatcctaattgatgcctctataattatctttccttttctttcatttttttttccagtttagattttttattctttttaagatgtatccaaactctcaaagttcttcttttgcttgtttctggattttcagcgcaccaaagtgagaatattgatcaatctgcaact

SEQ ID NO: 82277 - DNA, 269 bp, Citrus sinensis
  Intron number 1 from transcript orange1.1g022055m (locus o range1.1g022055m.g) derived from phytozome v7.0 (chr-ID sc affold00130; pos 381351 to 381619)
agagacccatctgaaaaataatctcagatttcacggttagtttaaattccttttttttattttctaacaatattttgaatgtatttatactgtgctgatgatttacattatcaaaataaaaagattgagactgaagtttagagtaaaagaaaaaaaaaagaaaaagaaaaagatgtcatatttggtagaaacaaaatgcaggtgtaactttttaatatcttttatttttaatgttttcttcgtttatttgaagatttctgttgattcta

SEQ ID NO: 82278 - DNA, 748 bp, Citrus sinensis
  Intron number 1 from transcript orange1.1g010203m (locus o range1.1g010203m.g) derived from phytozome v7.0 (chr-ID sc affold00032; pos 141225 to 141972 reverse strand)
gaaaccgctgctaacaacggagattcttacattcggtaagttaagtttcagactctttttcatatgaatcttgatttctgagtatatttaatggggctttaagtggaagaaattgtgattttgttgttgattttttttttttgggtgggtttattgatggtcatttggttatgagctgaaagttttgataagactggggaattgcaaaaggaggaaatatttgactgcttagagagtaaatcattgaatttcattgaatttttgttcaaattgattgtcgtctagttttgatgtaagcatctgttatgacaataatgtcatttaaatgcacatagagacacttgttagctctttctttttttaattcaagtgtataaatatgagttagggaactagatgtgcattttctttacacctctaataaacataattgaaaatcccttttgcattgatgaagtctgaatgctatatcttacttagtcaaaattagtggaatgtgagttaattttttataatcttagcagcacaactatataatgtaagctatgagtactgcatctgacttctggttcaaagctgttgattggctttggaattgctatctcattgttttatgtgtttaactttttcatcttttgttatttattcagtagttaacactgaacatgatttgatcttattgactctcttcttatgtggtaatatcaaaccagtttcgagaagatcacatttcgaagatccatcgaca

SEQ ID NO: 82279 - DNA, 732 bp, Citrus sinensis
  Intron number 2 from transcript orange1.1g024877m (locus o range1.1g024106m.g) derived from phytozome v7.0 (chr-ID sc affold00001; pos 372162 to 372893 reverse strand)
actggacagagggaatacttgccattcaacttctggtaactttcactctctcagtttctctattaacacaataattgttctaattcacactgaagtgatttttctttttcttctatttgaattgattgaattttggatctggaggttaactcagtgtatgcttagcttcgaaagcttcttcttcatgttttcggagattcaaatttgttgtggtgggtgagcttgttgtaaaatactaatttctatttttgaattattgtttttttgttgttaggttaatatgtaattccgaagatggtgaaatttggcaactgcaaatttcttattgaaatatttgattacaaacatgtcacctgtgtttctactcattaaactctgttcagtatttcttaatttgataagcattacttttcatgctgcttcaatttgcttttaaatttttatgaacgtttaagtttgtgtggatcttcttcattatgatttctgcttgttgatttctttggaaattctgaaaatccttatgcttgaaaaacatactctgtggatactattttgcgacatggaaattctataaatatcattgtaaataaatgatgaacttgaggagagatgatagctcgcactttgcagttgaaggtctaagtggtccattttcatgagcagatggttttatttgttacagctgaggttgtcgcaggatcagctgcgtggctgggtcgaggtctttcttgt

SEQ ID NO: 82280 - DNA, 543 bp, Citrus sinensis
  Intron number 1 from transcript orange1.1g027684m (locus o range1.1g027691m.g) derived from phytozome v7.0 (chr-ID sc affold00001; pos 1508454 to 1508996 reverse strand)
tggtttcttctttctctttggattttgcccatttggtaagactgtttacctttcttttgtttctctttttggtttctttagagcttcttacgagttagtaacaatcagcacaaaaagatttgtattgttgttcttcgtttcttttctttcatcaaactgatcccttttttgtgttttgcatagctgtttaactgatttttctttattattattattactattatttttgcatactttttcagcttcttgaaaggcaaaaaggattaaaaaaatcttttcttgagcttgagtttttgctgctctctgaaggtcctctctctcaaaaatttcggattttttatagctcctgtcacttccttagcaccaaaacttttctgggtaataagatttactcgtcatcttcaaagttcttggctttttgggcccttgatgcattaggaaaaacaaaccttggttaattaattaattagttaatttgtgtgacctacctggttgtgatttactgataataaactctagtagtttaaacaggtctgaattaag

SEQ ID NO: 82281 - DNA, 786 bp, Citrus sinensis
  Intron number 1 from transcript orange1.1g023829m (locus o range1.1g022258m.g) derived from phytozome v7.0 (chr-ID sc affold00021; pos 482918 to 483703)
acgtggtctccgaggagcgtctccaaaaacttacggtatgttattttttcctccgaaagaaaatattggattttgttttacgttgacttagactattattattattatattatcgttaaaatttctttctgtaagtttctttgaaattataatatttttctttaacatgaaataagttaattggcactgaattgagcttcgtagcagcttaaattagcttggatggaaatgtactcgaaaatgaagactaaaaatttcatcttttagttccatgtttcgctttgtttacgtgcttgtgttcttcgattaaaggtgtttttctttgtgttattattactattttttttttcttttcttctttgaaaagatgtgtttctaggacagaaggaagctacctagtggtaaacaactgcatagaattctttattgttttagtgaaatacatagaattaaaatcggaaacaggatttagttggtatgggaaatggaagcaattgttggaaatccaagttcaattgaaaaaaaataaatgaatgaataaaaaaattgtgggtatgagctttaaactgtctctcgtagcccatttttgtgtttagagcttttgtaagaaggttgaacatcatgacatcttgccggttgaagttagataagctgttttgattatttgaagctataaaaccggtcttggtgtaacatcttttatcccctagtagtcttcttgtttcgtattttgttttatattatataacctgaatggttgcattatacaggtagtacttgatttgg

SEQ ID NO: 82282 - DNA, 450 bp, Citrus sinensis
  Intron number 2 from transcript orange1.1g023143m (locus o range1.1g023143m.g) derived from phytozome v7.0 (chr-ID sc affold00032; pos 989619 to 990068)
agttgaatgtgagaacttaattattcagtaaaaatattttgtttgtacttctgcttttgctgtcatcaaattcgatatggtcgtccgaatatgtgtatgcttagctcaatatttttatatctggagaattggagattactttgaacttgggaattttgtttacaataagtagatcgctacctttaaaaatcctttcgttccttgtgataagaaaataaaagaacggtgaacatgctgctgagtgtttcccatctatatactttattgtattttagcagtgaactcaaacaggaatgagagctcagcgtccagttgtttttctaatcaatacatcttccatggaggttgcaatgctattataaggtattggaagtgggtgttgcttctgacttgtttctttgatgattatttttagggtgtgaaatttgatccacaatctggatcagtcct

SEQ ID NO: 82283 - DNA, 510 bp, Citrus sinensis
  Intron number 1 from transcript orange1.1g037240m (locus o range1.1g037240m.g) derived from phytozome v7.0 (chr-ID sc affold00012; pos 1507488 to 1507997)
aagttgcagcttctgcaagtaacagctttggcaaggtaagcttccaagaccttgcatcagcagttttttctctctcgttcaacacgcgtgtaagctttctatttgctatgttacaaacagaatctgtaacataacaaggtcctaaaaacaaatgagttttttccacccctactaatcgtgttgaacactctacaggacttcaaaatttaacatcatgaggattgagctctaaaaatagacttatttcacccttggaagaattttttcatcataataaattgaatgaatccgatctcaaaacgtttaaacactttttatttttctttcctgttttatgaatggagattctttcatgctccaacaccatttgttctctgatcttcttgttgagcatgaaggtttcattagcagctgatacagtaactccagcatcattaatccgtgacggcgggaagttagtttcatcttcctaaaggtttgagctaggcttcttctccccaggacaatcaa

SEQ ID NO: 82284 - DNA, 945 bp, Citrus sinensis
  Intron number 1 from transcript orange1.1g007297m (locus o range1.1g001765m.g) derived from phytozome v7.0 (chr-ID sc affold00122; pos 59560 to 60504)
tgattttgaggtaagatgatgttgcgaaatcacttctttaatgtgcttgattgttcttcttttagtgactgttgttgggttggtttctccagcttgatttatatgttgagctggatttttgtgtttgatgatttcagtgaaacgatttttgccttcttttttttaatgtttttgcgggtgatttactcattgcttgaaattatgttatcaatgtttctattattgtatattcattttggctttgatagattctttcaagacatatttttctctcccagctgcttgttctccttcttcttcttcttcttctttttcggctcccaaataatgggttaataaatagctttacttatctgattagtgtccccgttaagcatatgatgagtgttttctgctggcttaatgacatgtggcaaaatttggatcaaaattaataataatcattgtggttgggtatgtatttttgcactagttgttggttattatcttgaattttcttttctctttttaatatcatgctagaatgtgagaattaccatgtgaaagtcaggaagtacctgcctgccaaaatatatttagatggttctttggaattttgtcatcataatgaatagtacgtttctggaattttttttggggacctgaaatagtggaggccgctatcaatgaaaagtacatttaattaaagggaagaaagaatgtttgaatggtttagcatacaccatatttcttgcaaatattatgtaggagttttagtaatgagaaaaatataaggaattaaagaaataaaaatgattgtctttcacaatatatgctgatattctgacctatatttcacttctgttgcaggtttctctcttaattgttctttagttggatagttagatcgtattttgttcatactgacttacagcaataatggcattgctaggaatacaagcagag

SEQ ID NO: 82285 - DNA, 703 bp, Citrus sinensis
  Intron number 2 from transcript orange1.1g007297m (locus o range1.1g001765m.g) derived from phytozome v7.0 (chr-ID sc affold00122; pos 60703 to 61405)
cttaagcaggaagctattttcagggatcaggtattgttctggttcagccttgagtttttagttgttttgttgattacatctcatttttttaagcctatttttattttcaatagaaataaaaccaattctattatgcgtatcatattcaagcatgcactaatcaacatgtctcggggaaaatttgaatatataggtcttgaagtggtgttatttattgatatccttaaaggtaaacaaatatttttgatgctgtaatgcttgcgaatgtattttattaatggtcctttggcacgttaaagaactgtgacttctggttgtctttagggcatcaagtgcatttatttatttttaaaatccttttagtcaagagatcctgaggacttgtaactctacttcttcagatgatggaagtttggaagggaaaataggggacttgttaattggctataggaatctgaatcattgtggtgaaacattatgtgactattcatacatccctttctttttgtgtgtgtgtgtgtgtgtgcacgcatgctcatgtgcatgtgttggtattacaaacagcgtctcatatattcatcaattctgatgcaatacttgttactaatgaatacctatcagttgatcttagacgctcaaatgggttttaaatgtttttgactatccagatccgcgaacttcattgcatttattggagacagag

SEQ ID NO: 82286 - DNA, 1032 bp, Citrus sinensis
  Intron number 3 from transcript orange1.1g034646m (locus o range1.1g034647m.g) derived from phytozome v7.0 (chr-ID sc affold00029; pos 617782 to 618813 reverse strand)
tccacaagaagcactattgttgcagcaggtactttactttgcatgttcttgtcatgctgggatgaggctactcatgtcaagtgtcttttacaagtggatgccgagcttttgcttgatcataaagttgtttaactttcaaaacaaaatttgttcaatgggtgaagggagtcagtcataatgttgatttatttatttatttttgaattggtgtgtgtgattaaatatgcaatgggattgaacctttgactctgctaatgttactacttttatgaaacagcgatcagtattgttaaataggccataggcattctgaaattcattggttacttaaatttctcaactattagaatgaggctcaagtttagattctcttatataaataataattgattatttctgaataagaaaatggtggatgtaaaagtttgttagagatttagagtttacttgtgacaaatgttatatgcagtgaacactaatgggtggattcaatgacattggccttggtttccaaccaaaagattggatattcaaatccttgaggttgacctacttttgatattatatctgatatttttttgtaggatctgaagcattcccagttccaaacccagtgcaggcattgggaagggaattttggatgaaaaaaaaaatgttaaatgcagtaaattgtggactctttcattagaaagagtattttaagtgattttaccatattgatagaaaggctagtgaatttggagaaggtctggtattctttgatcccatttcaataaataaagcaaccagactttagttttgtttttacaataatttcaaagcctatagatctagatctagcaatagttgatattattaatttggcttttagagatttgcttgtgttctccaaaacctttagtcggaagttaatgcagtcttccgagttttataatacctatgatcaagatttgatttattcatgtgcttaatgaatttgtaaaattttgttttttaggacataaaagaggcaaaggagtacctggagcgaaa

SEQ ID NO: 82287 - DNA, 724 bp, Citrus sinensis
  Intron number 1 from transcript orange1.1g034646m (locus o range1.1g034647m.g) derived from phytozome v7.0 (chr-ID sc affold00029; pos 619156 to 619879 reverse strand)
ttgagtcctgtaactctataaaatcaaaccaacgggtctgtgaaaaaaattttaagtttacaatcccttctgatggcagagtctatatgattttatattatgcactatttgtcatattatctgtttttctccatttcacattgttttgacagcagctttagatcgatttgatgttaaattgcatttaaactgccagatgatgattgagatattgcgcaagggctttgaatttcattcctaatgaattaatgaaatattaatgatctatctcttctgatggtagattatcatttagagtggcatactgaaattcggtgttgatgtattcttcatcaatcaacttttgaagatgtttgatattctctaagtttttattttggggatataatcacagttactggcttgttcttcagaaagtctatctcattctatatgcttttatccgcataatgatgagggttgtgtaatcaaatgattcttttttgaatggtgtaactgaggtgcattggtgcacattcacatttgtggttggatgcatttgggttactgttggtgcttgagtctttgatactttccctgcttttataccacttttccaatatcgggtgcaagtattagctggtaatgttacagttttactatcaggtctcactaatgaaaatcctaaatgttagttctttgaaacataatcaggattctggaggtgtttttcatttcaaattcg

SEQ ID NO: 82288 - DNA, 737 bp, Citrus sinensis
  Intron number 2 from transcript orange1.1g029054m (locus o range1.1g027389m.g) derived from phytozome v7.0 (chr-ID sc affold00546; pos 54962 to 55698 reverse strand)
ctcgtcatcaggaaattcttcaagatcttactcaggtatcatggcttcttacttaatgtcctaaaggtttagtgagcttgattgacattttgttgtttgaattcttttcccttaagtcccaatctaaaaagtttcaggaatattgttagttgcttcagtgtaatgcgtcgttcacgtatcgcaggggctactggcctagcacttcattaccattttatcttgttcacacatggcatatgtattcaatgttcagtctttaggaacagttaagttgttttccttttttaatttagcgctgatgtgtgtttgacaaaatgatgcatttttgacatttagccttattttgctttcactttctcacatatttacttccataatttcacaatatttgtgcatagtctggtttgtagttgtgcaatctgtccattcccgttcattaactagcctacaagatctgctctttccatatgtctatttcttgttgtccatcttctttcttattgatggatttaaaactgactattgataaacaataatatcccattcggaactcactgtttactgattctgtaaagtttgtttcagacttgaggtcagctggagccttgtctaaaatgaccttctttttgatagtccatttgctttgaattattagatctctgatcagataccaacttcttgttagacatgattgaagtgcaggagttttatcgtctccgctccagccttaaagctaa

SEQ ID NO: 82289 - DNA, 903 bp, Citrus sinensis
  Intron number 1 from transcript orange1.1g045338m (locus o range1.1g045338m.g) derived from phytozome v7.0 (chr-ID sc affold00001; pos 271378 to 272280)
gtgtcacgccaggtggttttcgggtgagtaaataggtctggatcggctccgcccaggccggtggcttggacaacggcttaagattaaaaaaaaaaaaaaagtgagccaagcctggtcctctttttttttaaaataaatatataagtaataataaattaatatttttaaaaaataatggaaaaataataatgaaaacttaaatttgtgattcataaattaatactaattcaaagaaccctaaaattataatattaaattctctcttaagtataattaaattaaaaggacgtcactaataaacaaaaaatatagattttgttatctcattataattggtaataataataatctcttcaaatttaataaatttatttcttaattgaataaggatgattttatatttttttaatatttgtgaggaatatatatatatatatatatatatataattttaattataaaactaatttctaaaatcagattttgaaaaactactcttttctttcttttcgaaatatgctacgggatagatgaattttttttaaaaaaaaatgatcaaatactaaataacttttaactatttaaaattacttttaatgtcctcaaaagaaatcgccaacggtcccctagaaaacaatctttggaacaaattaaattcactgaattttagtatgtaaaagtaaaaaaaaaaacaaaaataaaatgtcgtggtgggccgacagaatactaggccgcctctgttgttaataaggtccagtaagtatacaatacgggtcaaagcgaaaatgattatagtaattaacgggtcgggcgtagggcaaaatcttttgcgtttgttatcaaaatatataaattaccactaccacagtaacgaacggacgagggcttttagctcggctactc

SEQ ID NO: 82290 - DNA, 508 bp, Citrus sinensis
  Intron number 2 from transcript orange1.1g045338m (locus o range1.1g045338m.g) derived from phytozome v7.0 (chr-ID sc affold00001; pos 272317 to 272824)
gatttttagagtttctggtctgcttctgcaaagtatccctttatctcttaatacttttttattttattttacttattctcttcttgtgaatttatgttgttgatttgggtgaaaatcaaagttttcttattatcaagttaaaatacatcgcaaatccagtaagaataattggatcgattgtactcgacttagattttgaatccagcgttggagcttttagaatttagatgtgtttagttagtacttattctcgagctgcaatgcttctttctttgatgtaacaccttccagtttgttatgttccttcgatcgatatttggttgtcaaaggctttagattctcttaactttctttaatctctgttttttcgctttccaatacttatgattttgatactgatgatttgtggttttggtcttgtttttcgctttccaatacttgtgatcatgattccattctgccgggttttgcagacaaagaggaccaagaaggcaggaattgttgggaa

SEQ ID NO: 82291 - DNA, 808 bp, Citrus sinensis
  Intron number 1 from transcript orange1.1g040599m (locus o range1.1g040599m.g) derived from phytozome v7.0 (chr-ID sc affold00001; pos 1367304 to 1368111)
tgatcccagtagtgtttataatctatatcccagccgtaagtattttactcttctgattttctttaaagatggttcattcgacatgaagaatacaaacgggatgcgtttagcctaatatgatcaattttgttgacgaacattgatatgcaatttgatttttctatgataatttcaggtctcttattattattagctaggttatgttaatagccaaactacgtgtttgcacattggttctatgaaataagttggatgatatgatgaacttcaaaatggggtatatttcccagttataatatgtttagagttgtggacacacattttgggatagttaatgtgacgagaaaaacataggtaggacaggtttaatgggaccatctgatagaacatgctacatattttaaattttttctcacaattattatataagtgaacacaaatgtggttagattctacagataattagacatacggttgacaagataaatgtatttccaccgatgacttcctatttgtcatatatatatatatatataatctgtttgtagtaagaacatctctaaagtgaaaatgtcaataaaatattaaaaaatatatttattggagatcgtaatttttgtctatcagtatattaaaatttatgtttttttattttattaacacttattttaacaaaacgagaatgtatttattagagaatgattatatattgctctgtctttgaatttaatttttgtatatttgcttcaagtttcaattgcaggccttggttgggaaagttggtcgaaaagttgatcataggatcgtg

SEQ ID NO: 82292 - DNA, 658 bp, Citrus sinensis
  Intron number 2 from transcript orange1.1g030887m (locus o range1.1g030887m.g) derived from phytozome v7.0 (chr-ID sc affold00042; pos 520676 to 521333 reverse strand)
gttggttaacaaaatcaaaggttggctcaaaaacttgaatctagctatcctactgtagtgattgttgctgctataagcatgaatcctagcatatgaagtggaagtttgtggaggaatcaagaaagtgttgctgttattgtgcagtggattatttattctgtgctataaactgcactcatgctctttagtttcttttctgaagtagatgccacacatagtgttctaagaagattaatatcacatgtttagaatgattgttctatcgtgaaagcaggcctaatatgattttccatcctgcgacttttactggcttgagttttgaaggcatcagtttcagaagttaactggagaatcatcactggagttacaaagacttgatgtcctacagttttgagtgaaagaaaatgaaattctgctgcaaggaaagaaaacagtctgctctgggacccgttttgtccggagagtttctttttaacctttttcctgcgtttttgcttatgtgtgcttgttatgtgtatttacttcaaatttgagtttcttcattgctagctcatctttcaaactgttgttttaatgtgggccactggatctgtcattgagatttgttcatttcttacactcaaaaatcagttttaacagtatcgttgtttcaggaaaa

SEQ ID NO: 82293 - DNA, 858 bp, Citrus sinensis
  Intron number 1 from transcript orange1.1g030887m (locus o range1.1g030887m.g) derived from phytozome v7.0 (chr-ID sc affold00042; pos 521337 to 522194 reverse strand)
atatcaacgtacgtgcggtttctatcttaaagtttgttttttcccccattgatctgttcattgagttgctttctttattatcaagtcttgatttttgaatgtgggtattgattaattttgtttaattagtagatttggttaaaattttgtttcaattttggagttttgtaacggtttatttgattaattatgatttgtagtgtccataaaagcgtatattaagatacagaagattatgtaatttatttgcaatgtgaaattggatgacgggtttttgtttttaattgtgccatcaccatgttttagactgaattaaatttatagatggggtaacaataatggacacatttgtatagggacgaaggaacacacatgcttgaccattttatcttgctttcggaattgaccttgttatgtgttataagtaagtcatgttccaaaaatattagtctgaatgagtgtatcctctagaaaatatcttacatttagctcacatttggacaattattttcagttatattctttagtgattgattgtagattgtactattctataatcctagactagagaaggtattttgaagttgcagaacttaatcttgtgaaatttcagaagtgaaatgttcattagttattcattttctagtaaaatatgcattatcattctggttttgggaatcacttaaaactgagagcttatcattttaagttgtgggtgtctacatatggccgtttgtggatattaccttatgttcacacttagttgatttcctctgactaattaacactttttttttttaactgatatttccttctttataatcagtcactgggaagcagtattgaaggaggaaccaa

SEQ ID NO: 82294 - DNA, 391 bp, Citrus sinensis
  Intron number 1 from transcript orange1.1g015223m (locus o range1.1g008953m.g) derived from phytozome v7.0 (chr-ID sc affold00653; pos 80719 to 81109)
ggcctcaaggaagcattttcacccccatagctcaagtaataagcaagcgcttttatttcttagcatacaatgaatatgcaatttaatttcttttgatcttgattgcatgttcccaaaaaccaaatcttgtctgtaaatttgtttgcttatggcaataaaaaattaaaaaggtaacatactaatgggtgcttgttgaataatataaggttatctagacaagaaatgaaaagctgtctgctgacttagtgtcgtaaaaaagttgtctatacaatgtattatattgtcgtagaattaataattattttatcctcaacggatcataatctgctgaataattacattttcttgtgttaattttataatttttgttttacaggtttttgtggcagcg

SEQ ID NO: 82295 - DNA, 681 bp, Citrus sinensis
  Intron number 1 from transcript orange1.1g014053m (locus o range1.1g014053m.g) derived from phytozome v7.0 (chr-ID sc affold00084; pos 528259 to 528939 reverse strand)
ggattttgtgtcactatcaagccactaaatctcaggttttttttttcgatagaagtttttttttccttttttttttcaagtacccagttcattttttatactgaggataaatggtcgtgttggattatttgtgatgataataattagtaattgaggtcgtaaatttggaatttattatatgaggaggcatcagaattgcttgttggaggtgatgttaatttcttatatagaagtttaattagagttaagtattctatagccaattttggattctatattgtgatgtggtttgattattttaataaggaagttgattagaaaagaaattgttagacttttagttgaacttcataatggggaaattaacaaaatgggcatggtagttgacattctgtaatgggaataaacgtaattctattgagccaaatgatgatgctcgttgatgtctactccgtttaatgggaatacagtagtgtgaggtcagcctttttgatctttaacctttttggtcttttcatgagcagttggccattctttaatcatgcagataatcaaagttggtagttttaatgcaggcctccaacttaaactctctcaaatcaatttatgtataatattttcttttttaacttttattcgtctgcttcctcttcttatctgtgttttttgtgtaggagatca

SEQ ID NO: 82296 - DNA, 996 bp, Citrus sinensis
  Intron number 1 from transcript orange1.1g009353m (locus o range1.1g009353m.g) derived from phytozome v7.0 (chr-ID sc affold00008; pos 1784245 to 1785240)
gaccaagctctggtctaagtttgatccttctaccggtaattttttttttcaagataatttttggttctccaaagcttgattgtgttttagttttcttcttacttaacacaattggataattttgctgaaattggtggaaaacggagagaaaaaaaaattaaattttgttgctaaataattaagtggagaagaaagattaatttcatttgagaattgttgagacatcctttttggctactttatttgtttgtagtcatagataaaatgttgttactttaatataaatgttaacagtatatatattagttgcagggatttgagagagtcggtagaaacttaattttttcactaaaaagtacatgctgaagatgtggtatttcttgttagctgttatgtatgattcatttgggacgtgatatgttacgaatttgaatttagttacttaccaggtttcgctctaagtgaagtctcttgttgcttatctttttgcattgggtaatgtatgttagtgatcatctaaacacacttgtgatagtcagtagatgctttggggttaatatgaggaacaagttcactttcatcatgcaagatactagatattatttgatgtctgtgaaaactttaatagagtgggcttatattatcttggtggataccctattttgaactttcgtgttattgggtattcatgtgtatggctcgtgcccccttcctatagcactttggggagacagtgtttatggtcagaagatggtaatcagcctgttaaactcctttgagcatgtacttccaatatctaattatgttctccaaatggaacttgataagtccgctgatgcttttctgtgttatttatttttgtgctttttgttttcaaattttttaatatttgttatgcaggttttgcagatttagatttcaataattgaagttggttaatcatgttattcttgtgaaacaggtcgaactgtgtctttagatccaaattcaagtgtt

SEQ ID NO: 82297 - DNA, 741 bp, Citrus sinensis
  Intron number 2 from transcript orange1.1g025636m (locus o range1.1g023046m.g) derived from phytozome v7.0 (chr-ID sc affold00001; pos 280835 to 281575 reverse strand)
tctgcatttattgaactttgttattttagtaattggtgattcttttttttccttttttctctcttgtgttatattagcaagaagatatttgtactgaaatttgttttctgaacattgctgttttctgtctttattatgcttgagaaagcatttgatatttgaattcattagtatgctgatgggacagaaaagtcttataataaggttttttttttgggtatagtatttataagctccttgattttgttttcaaggtatatttcataaatgagttattatgttatttatagctaatgttgagataaaggttttttgaccacttaatttgtgatgcatataccatgttagtgtatagctatgttttcttgtgggggcaaaggtgatattttgatgctattgattattgatttggcaaaagatgacatttttattacttccatatgtaaaacatggtgtggtatcagctaattatgatatttttggtcatttaaggaatgaaaatgtttaatattttcttggtttcgaagtagagtaccctggattttaagctgtttattcatggtacgaatgataagttaatatctttgaaattgactgtcatgtgggacacattcaaaaacataattctgttatttgtaactgactcaattgcaaagtttgcttctccttacttatctgttgattatgaacatgtgtttgcattaactgcagaggaatctgaaacagacagtgaagaatctg

SEQ ID NO: 82298 - DNA, 566 bp, Citrus sinensis
  Intron number 2 from transcript orange1.1g046837m (locus o range1.1g046837m.g) derived from phytozome v7.0 (chr-ID sc affold01206; pos 19950 to 20515 reverse strand)
cattgtctgatataatacacaaaatctgttgtgaggtaatttttgattacttgctacttttgaatgcattggatatacgactgttacttagacatttttaaagatgcgtttgagatttcgattagacaccgtaatttttgaattacagtactaaaataaatactagttattataacttaaaagttatattaatatgattttttacttaataaaaaatttattatatgtttaataattttgttaaaattattatttaaaatttatatttaccacatattattaaattaggtttcataactatagtttttttttccataacaactgtaacttaaaagataaacaccttaatcccaaacaggagttaagtcttctatatctcagagtgcagtttctcactttctttcttttttgctttagcttctactacttttttgtaacttaagcaagaaaagaaaaagatgtctacaagtctaatattaattctgcttttaattatgaacgttgaccttgaaatgtgttgaaaaatgccctgacattaaatttgcatacatgtaccttcagatatc

SEQ ID NO: 82299 - DNA, 997 bp, Citrus sinensis
  Intron number 3 from transcript orange1.1g001699m (locus o range1.1g001450m.g) derived from phytozome v7.0 (chr-ID sc affold00001; pos 2257029 to 2258025)
caggtaaggtttaatacaaatttatactccaatagatatcttgaagtataaacatttctctcttcatgtgaattgatttgtatatcattctcccttagtaaggtttcttgtaaactatttctttttctccttcagcaatgaatgcatggtgcttatttatgatatgcatttccaccaggactattcagcctattctggtggtgtttgaggcctctaatcttaaataaggtttacagaatttgacattgtttatacggatagagaactgctaagtattatatattggtccttgtgagtgggttaggtcacctttaaactctattttgttcgccaatcctggaaatttctgtggtaaaagtcatataccttttctacaaggttaaatttatttaatgattcatgtattcccttgggtgagaaggaaattagatattggtaaccaatttccaatagaacttccacatcctcttcttacattcaggaatgaagaatttggttcagtacttacatgatggatcacttggatgcacatgcactattcacttctgtcatgttttctgtttatgattgaatgaattgtggtagccataattaatgcagtgcacctctcatagttgtcgcattctcatatcttcatagatgaaagggacaaaaacagtgagtgcttttttgtcactctatagacttttggatatttcttttgttggatttatcactttaaagtgtcatctgcgtggaacttccatgtgtattggaagcactccagattattcgttccaactgagaagtgatctagttgtttgctgttccatggattttcaagtgatgctgtgccttcatgatattacatatactgttttgtcattggctgcaagtttctgctgtttgattgcaccaggattttgctgggttttggccttcaatcctcagttttaaaggctgtatgttctgatctgctaaattgtcaatatttattatgcagattctgggaggcgtt

SEQ ID NO: 82300 - DNA, 670 bp, Citrus sinensis
  Intron number 1 from transcript orange1.1g021019m (locus o range1.1g021055m.g) derived from phytozome v7.0 (chr-ID sc affold00015; pos 582908 to 583577 reverse strand)
ctctaagcgattgccaactccaagctggattttctgtaattcttttttcactatttattttatgtagttgttttctgctgctacgtgtatattaatttttatcgtttttaatattatgaatcatatttcaagtacccatatgattgtttctctgatctgctctgctttgttcgaaaattaaccgctttttgttttgaagttcttgaacatctatgagagtaatccctgactgtaagggaacgttcctgctactatatttgactgtgcttttgtattgtggtgaacatggatgctgtttttgtgttaagctacattttctcattatgtgactttgtgattagagtgccaaggtttgattatgtttgtgtttctatgaaatggaaggtcatatagctagtcatgcattgctctccttgtttttgaaagactctcatttaagttcaaaccttgttaagccctaggaaatgtggatcattttggtcattctctgtttctttcaattctaacaaagcgctataataccttcttgttgcaaaagtatctgtagattcttttttgttgtgtgaatttagctaagaatatgtcatgccttcatcatttactcatggaattaatgaggtttcatttattcgtaggttcgtgacccttccttaactgtgtataagggtta

SEQ ID NO: 82301 - DNA, 941 bp, Citrus sinensis
  Intron number 2 from transcript orange1.1g032302m (locus o range1.1g032302m.g) derived from phytozome v7.0 (chr-ID sc affold00020; pos 1319265 to 1320205 reverse strand)
accagaaacctgtctgtaccagcctttattctttggttggatcaatttttcctttattgttgctgttcttgttttgaattgaaaagtatatcataatatcagatacaagaaacctagagcataaaacaggaaaaggaggttggcagtttgaaggatttatgacttatagcagacaaactacgtgttgcatagattaatgtagaatgtttggttctgtctgaaactgcaaatatggagtagtgtgtaccctaagcttcttgctgaaccattcgtaataactttcttcttttttcctgctttcctaaaaattgaggataggctgttcagtttgaccgaattgatgccgtttcagctataatcttgtgtctaaaacatgtgcaattctagtaatagaatctagagaccatgtttttttcttgaatcctcattgaaatccaaaaaccaaatgctcagctgcctctttttttatcccagggattggtggacagaggccttcagtgtgcaactccagtaaaaaattggggccctacttttagtagctagtatgcaagaatataaaataatcatatttgattgcctggaggttcatattatgctctgattttcaatttgagttgtttacaagaaatcaagatggataaacttgtaaaccatagttttatgatatctcaacatcttgtcggaacgatctcctgggttttaagttttgttcctgatatcatgccaactggtttacgcttagtgtggatcagtgttttcttttcctatttatgtaataagaaacctgcaactcaattccatatgtatatgaaaccttgaaaccatcttattttccaaatagagaatgaaaatttccaatttagggtgttcataggaaatcttttctcaaactcttactgctgtcaggtcgaagttggaaagcttctgaactgcgcctgaag

SEQ ID NO: 82302 - DNA, 417 bp, Citrus sinensis
  Intron number 1 from transcript orange1.1g032302m (locus o range1.1g032302m.g) derived from phytozome v7.0 (chr-ID sc affold00020; pos 1320357 to 1320773 reverse strand)
tcttctcttgatcgattccatatactctttctcaggtccgttttaattcacatccattttctttcactaacttgagtgttaaatattcttttttgcttttgtttagattcattcatgttttagtgtctgaaatgatattcacataattgttgatccttttacgtttattcttcaaatgggtgttaagtaattcgaccaagttgcaatttttttttttttaccttgtgttgggccttttgagttatataactctagttcctgtaatgtttgtgacaacatttaatgactataaaaaagatttacttttttttttcctgctgtgtgtgaacttgttggggttagtattttgtgtttttttttttttactaatattgttatcccttggtgttatgtgcagcaactgataatatagtagtc

SEQ ID NO: 82303 - DNA, 499 bp, Citrus sinensis
  Intron number 3 from transcript orange1.1g011331m (locus o range1.1g011331m.g) derived from phytozome v7.0 (chr-ID sc affold00001; pos 5368598 to 5369096)
gctaaataccgtcaaaagcaaaaagcttcggcagggtaatagcagttacttgagttaattgggtgatgtagtgggaagggcactttgcacactattgagaatgatgcagcttgttaggagaggataattgttagaatcatagaaactgtatgaatgattaatcatgctaaataaagattgtttgattggtgctatgtgtatttaccaattcatgactatattgttgatttaattgtactcttttcttcttcttttttaaaaaaaattttagaaattgcataagagtataaatttccctcagtagttatggggtataacagtaacagtagttgtagattcttaaattattgtcatttcatttatgtacatctccgaacacgtaatagttttatccaaattttgcatctcatgcatttactgcttgtgcttcacactttataatgcttgtatgtactttttttttttccctcttgcaactgaatattcattcctttttcag

SEQ ID NO: 82304 - DNA, 980 bp, Citrus sinensis
  Intron number 1 from transcript orange1.1g006583m (locus o range1.1g006592m.g) derived from phytozome v7.0 (chr-ID sc affold00015; pos 329570 to 330549)
gcccgccttccggttcctgatctcattattctccagtgagttctcttatttcgcgccttttcagtgatcctgttaactttacgtttgtttcccgatggaattcgcaacatttatcgcatttcatagtttcagtatttgaaaaaccgttataacggttttgatcctatctgataatatcatttggagcgtaaatttgtaaaaatcgtgcttttaggtgtgtttgctgacacaacatgatttatttgaaggtgaaaatcatgttgaatgccgttttggtctgcattttcgatggtactatggatatatttataaaaaaactgtttttttttgtttgattaattgtttgaactggataatcggttattaattatctttttaatattttttaagagccgggataattcttttttaatgcctgtcagttgcaattaattaataaatcgttttagtaaaaaataggtcgcttattacggaagttgttttatttaggagaaaaagggaacttggttctctaatacgggaatctagccgttcacaaaagacggctttcaagttgtcaagataaagattgccataatgccatatgcttgctgatatgagtatttatttacttgtttgtccacttgtttatttaacttccaacgttccatgtgaatccttgtattttcgctcaccaaaagagcagcagatttttggagggtaagtgttgtttgatcaacagaagcttttcttgtcgcccatttcaagttaatgggggcacaaaatgttttttttgcccttcctttttaattgggtgtctggcgattcttttacccatcaattagccggcattttcaggttgctcctccgatgtagctgaatcgcttagtttctacacaagagaaatctgtttcaatgtgacaatcatggaagcagattgaaatttactattatgactgtttacagcacaaacattgccctccaatcattgccagcatttg

SEQ ID NO: 82305 - DNA, 357 bp, Citrus sinensis
  Intron number 1 from transcript orange1.1g044586m (locus o range1.1g044586m.g) derived from phytozome v7.0 (chr-ID sc affold00122; pos 28228 to 28584 reverse strand)
aagaagaactctcccacattacccaagatctctcggtatgtgccatttataaaatacaatacattatgttttatttaaaaaaattgcattatttatatcacatttcaaatctcgttttcttggctgtttttcctgttgattagttgctcaaagttcagttgtttgatcagtgaatgcatcattgttttgagactttcgtcaataaattcatttcttcttaatttgcttgaattattggtttgcatataaacttaataagcattatatattcttcatgcctattgtttttttttttaatcctaattgttgcttgcaaatccagtctttatcaaacactgttgaggaaaaggcaaaact

SEQ ID NO: 82306 - DNA, 419 bp, Citrus sinensis
  Intron number 1 from transcript orange1.1g012310m (locus o range1.1g012310m.g) derived from phytozome v7.0 (chr-ID sc affold00001; pos 2781277 to 2781695)
aagatttggtaagactttactttcttattattagtttttttacggtttaaatgatttgttttcattgatgattgaatttgtgaaaccctaagtttcttggaatttgagttgctctactgttgatttctatgggatttttttttaatccttaaatctaaataccaggaaatctgaaatagagaagtactttgttatgctgatttctttgctttgatgagaaatttagggaaagttacaggactgtatttcaaggttgttatgcttccttctggtttatgtgaaactgaagtgaaaggattgggaaatacatcattttagttgtacaattaaataacaaatatagtgctgttggtgttatttagatcttgagaagttgttcttattgtttgttgatgcttaattctgttcattttcatagg

SEQ ID NO: 82307 - DNA, 500 bp, Citrus sinensis
  Intron number 3 from transcript orange1.1g026491m (locus o range1.1g020588m.g) derived from phytozome v7.0 (chr-ID sc affold00021; pos 1436093 to 1436592)
cattgttatagcaatttggctgtcagttcgcggtaggtgccaaattataatcatcagtgcaagtctttgattcttgtaacctacactttgggaattttctaatttcttgggctgtcatgtaagcaacaatccagtacactgcttaaccttgacttctagaactatgaactcgggattatgggtcatccctcacctggttccaataattgaactacatactgggattgaaaattgaagaatttaatttattgggctctttcatattcataggccttgcgtatgagttgtcagccaatcactaaatattcacaagagtttctgttgttaaaattcctctggattttctttttccttcgctctttgctggcaccactcatgtaccatttccttgttttgcttatactgcttgctcttgttaataattccggcatcaaaacaggattaactatttccttactgtcataggactaaaaaatccagcacgagattacagcatccct

SEQ ID NO: 82308 - DNA, 246 bp, Citrus sinensis
  Intron number 2 from transcript orange1.1g040921m (locus o range1.1g040921m.g) derived from phytozome v7.0 (chr-ID sc affold00032; pos 474942 to 475187 reverse strand)
ctggctcaggctgccttgacattcatcctggagtggtatgtatgttcttattttaatttttcgttttggaatgtgaaaagggaaaatgattaatgtgaaattcaaggggccaattttgctttcatgtgctgcaacaaagttgcctttacccaccacaatcacaaacaacaaatggccatttgattcaatgcaaatcttgtttatttttcttcctaataataagttatttatcctttgctctttcag

SEQ ID NO: 82309 - DNA, 894 bp, Citrus sinensis
  Intron number 3 from transcript orange1.1g024346m (locus o range1.1g024346m.g) derived from phytozome v7.0 (chr-ID sc affold00021; pos 1190479 to 1191372 reverse strand)
caggccgggttatcaatctcttgggagttcaagtggtatgctcatttcttgttgattttaatgtgtttgtgcttttatgagaaaacatggctaactttagtcatgtgaattattagaacctttcttgttgcttttggttaaaaatatgtttccctattgatacagcgacaacagataggtggtaaagactagaaacacgagatgaaatgattcagaaacacaagattaaatttactaataagtctcagttgttagatctgaagttgcttggggcttaataccaaacgtagcaatatggccgactggtgtcaaaagtttatatttttgtaacgtagtgagaaggaaactagcaacagactggtaaaaccttcttttgcttgttttgaatggcaatggatttcgtctgatttgaattttttccttgaaatatgctctacttttctactagtctttgttttagtaggcatgtagctgcatataaaaaatgccatatgaatatgcaattcatattaacctcttgtaaataaaaataaaataattgaaaaatattatatcttgtggcagtcgtggctggctaagatcttcagcttttggctgatcgaataggaacatgagaggtctgttcagtagtgcattatcttctatgttgggccagggaggggatgagaagatggtggcaatggggctctcttacttttagaattgagtctcacaaatgtataattttcaattaggagttactgaaagtatagtcaggggcaaattagtgatgatatgtattgccatggatttgttcttgcgaacagatactgccattatgttaacctttaacaatatgtctgactttgcctccgtgcagaaggatttgaacaacaaccagcaaacaattggaag

SEQ ID NO: 82310 - DNA, 1037 bp, Citrus sinensis
  Intron number 1 from transcript orange1.1g043695m (locus o range1.1g043695m.g) derived from phytozome v7.0 (chr-ID sc affold00030; pos 301191 to 302227 reverse strand)
agacggctgctcacttgactttgtctccgatccaggtaaattaattaattaaactggcttcctcatatattgttattttacttaatgacattaggatacatgaaacgggaaattaatgtagggtttaggattttttctttttttccccttaaatgatcattttgcattgaagtttgaaaagctaaccaagttgacagtctttccatggtggttgaatgtgaatataacaaataggaatcaatatattttccttgtatggttacttcattattggcaatgcaggaaaacatgacactgacatttattagctcttttacgagttagcaatcaaatactattatggggtgatatcactagatgctatagatcactctgatacaatccgtatcaatgaaaagagtgattcaagagacataaattctttgtacaaactgatcatgctagcacacattgttatctgagtgacaattgataaaatcttgtgatgtgtatatttattttgaaaatattagactagttgttgtttgtaataaatcgatgaatatgttatacaatttacccaaactcaaggtttgtcatactatgtaaatatatatcttcaatgttcaagctatgcatttacttgtgttgcctgcttgcataaatgtatccatatataattctccaaggggcaaatacaaacttggtctgttacacttaattgcaggatataactaatgcttctgcattcttggtcattacttttcgtaaaaagattcaaacaattattcgtatttgacaagttgaaaactaaacagatcgggattctcaacccagaaactaaaatttagatgatataccatagagaattataagatgttgcaggtctttcattctttgttttgaagtttacatttaatgttatctataactcagtgtctcatggtacaacttcatttaatctcacccctctccagtctacatttatgtgatacatccagtataaacaacactattgtttctcattttcagtccagttgctgcaagccaccgtctga

SEQ ID NO: 82311 - DNA, 929 bp, Citrus sinensis
  Intron number 1 from transcript orange1.1g007492m (locus o range1.1g007492m.g) derived from phytozome v7.0 (chr-ID sc affold00122; pos 409418 to 410346 reverse strand)
aaatcgattctccagaatcttcagaagccgcgcaagtagaattcagaaactcctccctaatgtttactttcacatttaattcaatttaatttttcaaataattttttttttcccttgctgtttggtgacgtgataacggaattacataagttcgacgtcaagaaaataattaaatggattctcttacataattgaatttttttttttacatttaacgattcttttatttattggttgctgagaaaatgcaagaaaaggaaaagatatagtatttcgatgtcaagaaaatgaaatttgtcaatcaaatggcttcttgtttattttgtttttccttcatttctagctttgattgtggaactggtataggtacgttttaattgttttttaatctaaagattcatttagttactgtttgattccaaggaaatgttagaaaacaaagaaaccccaagaatattaaatttattagttaaatggcttcttgtaggtttttctttcttttgctctagctttcaccgtggaactgctaaatgtattttagcgttctacttctttaatttaatgattctcttactatggtttggttgcctggggaagataggaaaataaagaaatctgacatcaagaaatgaaatttgttatttaaatggcttattgtttgtttttccttttgttatatagctttgatgatagaactgctatttacgttttttttttaatttacaacaaagatttatttggttactgtttggttgccaaggaaatgcaagaaaatttgagaaatatagaatttcaacttcaagaaaatgagatttactagttaaatggttttgttctggccttaagtttaaaactgctgtgtcagtgatattatagaaatactttctaaaagctcctaattatttgatttagtaccacaaactcgcttg

SEQ ID NO: 82312 - DNA, 837 bp, Citrus sinensis
  Intron number 1 from transcript orange1.1g024192m (locus o range1.1g024192m.g) derived from phytozome v7.0 (chr-ID sc affold00001; pos 2944911 to 2945747)
tctctgttgccactgctaggcctcgcttctgggtaaggtttttttcgcttattatctttgttattattattaactttttttcttttaaactcatttggtggtaaaattttcctattctgaagtttttgagcatccaaaattaatcattttctttcctcactgatttctaaaatcttttgtttttaatatgggattactttgattagtaatcttgctattgtaatttgcactggcccatgacttcttttatgcagtgcaactgtttaactagtgacttcttgtaatagcaatagaaagaaattttaaatggacgtcaactgctactgcaaaaaatagttttatttgttggccggaagtttggattcaagttttattgcagaggtccccagttataccaaaatgggcagtggatatggatttcactggcacatgacaggttaggttaggtgacacagttagccagccgatgctttaagtactagtcactagcgacaagttaaggtggtgctgttctttttagccttgttgaaagtaagaaataaagtctataatttgaaacaaaaatgattataaaatttgttatcatacaagatggatcaaatctacttaattttaaattaagtcataacataattaggcctgcctgccgtacgttcatcgtctttcaacattttgatttgctttatcattccatcttaatattcttttcctctcctgcttttggatattttttgcatgtatgcggtaatggtcatcccccaatttgcggcaaatcttataaactttgtgtgttgggagtaaaagtttctgttgttttgacaatgcaggcgactatat

SEQ ID NO: 82313 - DNA, 893 bp, Citrus sinensis
  Intron number 1 from transcript orange1.1g004706m (locus o range1.1g002147m.g) derived from phytozome v7.0 (chr-ID sc affold00144; pos 71300 to 72192 reverse strand)
gcaaggtattagcttcttacgatagtttttatcgcttgaattttcataattctttaatatatgcatttgtttatttatctttcttggctctgaattgatgaaaattgctggattttttttttttggcctgtaatacattttcgagaattgctgttaattttagtcaatttttttttcttggtatatttatgggatgttggttttagggtttaattattaggaaattgttaaatgctattaggtatttatttggtagtacctctttaacatgaagagactgagagacatgcctagagacatttgaactattgtgctagagttttcaaggtgattttctgttactgttctagagttttaatctagtgctggaatttgaagttttttttatggtgacgagtgttttgttggcctctgtaaccttaactgcatttgtattagccaatacctgtcttaaattgttggattttttttggaattgttattgatcttggttaaaatgtactgttgttttactggcttgttgctttgaggtttaattattgggaattgttaaatggttgggctattctaactcaaaaattttcaagtaagatttttacataaattttgagtcatggatctaatgcaattcaatgtttggtatccaaagtcaaaagttgtatttaccgatgtcaattcatcctccatctcgaccattcaattgaattagatcaatggcttataatttgtgtcaaaattttaagttaaaatagccccacgcattgttaaatgtcatttggttttatgttcagtagtatttattcatgttccttatgctcttgacttttgatcttctgcttgtgaactgtaccctgatgataattttctatttctgtagcctgcccctacctcgt

SEQ ID NO: 82314 - DNA, 667 bp, Citrus sinensis
  Intron number 1 from transcript orange1.1g025697m (locus o range1.1g025697m.g) derived from phytozome v7.0 (chr-ID sc affold00583; pos 49501 to 50167)
gaacgccatagctgaaaagctccaagggagatcaggtacctacccagctctacttaaattatatattttgcataaaaaaatatatagtgcgacaaacataaataatatttttatatttctagggttttgattcattgttctgaatgtgtaactctaaaagtttattaatgattataacgaaataaaactttatatttagaacaatgatagagccacaaacattttgtacaattaagtatgtacaaattgatgtggtatgagcaaattggataaataaaaccattacagacccatataattaattagttaaaaaataacgattaacattttttagccaaccacttcatgccacatcaatttgtccacactagtttgtgaaaaaaattttttgtagctctattactcttgcaatacttatgattaaggttctcatgtatcaaaatttattcagctccaaacaccggtatttcataaatttgaactacgattagctttctgcgcctcatcattttttaaatccataattttcaaagatacggatgtaaatgaagaaatgatgatatatatgtatatatataaaataataaaagtgtagctatacgaaggtaactattataaactgatgagttttgcaaatatgatcatcagggaaaagttgtaggttaag

SEQ ID NO: 82315 - DNA, 367 bp, Citrus sinensis
  Intron number 2 from transcript orange1.1g042523m (locus o range1.1g042523m.g) derived from phytozome v7.0 (chr-ID sc affold00266; pos 14914 to 15280 reverse strand)
tcagagaagcttttgaggaatctcagatcgctactgtaatctcctcctccagttttgctcataactaagctttttactcgagtcaattttcatttcatgttacaatttatccttattaaacattatgctctttcagtctgctaaatgaaacaaacatattatcagaaattcttcggtacctcctggataattttgtaatggtgcaatctggataatgtgccaataaaagaaaacattcttcctttgatatttaatctacaaaccaccattgtctctctccctctcaattcatttgaattttgagtagtagtaaaatgcagttaatattattaaatgaaaaataaatgtgggggtgtgatgggacagg

SEQ ID NO: 82316 - DNA, 304 bp, Citrus sinensis
  Intron number 1 from transcript orange1.1g008728m (locus o range1.1g008728m.g) derived from phytozome v7.0 (chr-ID sc affold00250; pos 97370 to 97673)
ttgtgccgcttataaggtttgtttttgtttttccttttgagttaattttggatttgcttattgggttttaggctatagcatcggtaaacatttaagtaaaagtgcttttaagattaagcagaatcaatgcaattacaaacatgcccttagcttttgaagaacaagaaatacgagatgatgaaatgtttaatggaacatttctagacagaagtcaattacattgtttgcttcttaaattgagaaaaggggttctttattccatggatatttgataactgagttatatataggtggttgaaacaca

SEQ ID NO: 82317 - DNA, 568 bp, Citrus sinensis
  Intron number 1 from transcript orange1.1g016126m (locus o range1.1g016126m.g) derived from phytozome v7.0 (chr-ID sc affold00008; pos 316797 to 317364 reverse strand)
tcacgccgtcggtgccggcgcaatatctatccaaggtttgatgctgattttttttttttttggctcttccttcagttgcattaatggatttattaagaagaatgaagtaatcgatcgaatttaatttttaattttgtaatcaaaatacattgtttaattttcagtccgttacaactttctttcagtatttttgaatatttctttcatttatagtttgttatgataaaaagtaagtttctgtttattgggaaattttactttggtcttttggtaaaaataaatctttttaaatgattattttatattgtaatttttttttttaatttttcgatttttcatgctgaattgctggttttgaattttgttttagataagaagagaaaatgaagtaatgaattgattgtacttttgtttgttattgaaatatttcttttaacttttactctgttacgttttcctgtaattttatagtttgttatgataaatgatgcagctttcttttaattcgaaaattttactttgttttctaaattaaaaaatacaaatttttgaatttgggcagactaca

SEQ ID NO: 82318 - DNA, 739 bp, Citrus sinensis
  Intron number 2 from transcript orange1.1g034763m (locus o range1.1g031335m.g) derived from phytozome v7.0 (chr-ID sc affold00177; pos 153064 to 153802)
aggtaatctgaatctgatgtcaagaattgataattccaaactggtatattttctagtttagtgcatctctttgtctcttttttcatactcaaaaatcccttgatcattctatgttcattgagttctgtaatggaaactaccagcagccctacaaccttggtagtcaggagacttttgggatacaaatatcccaggtaggtggctttaaggggttttgaaccattcctcttgtatgatttggaaacttggcatgctccctctcttcacccacccctgccttcctttcttttcttttggttcatcttttattattattattattattactactactactactctcacacaatgatggttcaaactgtcaaactcctcgacttcaacatctgagtcttgcccacaccttatatctgtagtttgttgaatgaaatgattaggttcgcgtgtaaactgatgccttcctttgtgcttaatacatttgatgatgatgttaattccttggttttgttttgggatagttttttgtttggacatactatatggtcattagtagggagtacattctttccactgcttttagttgcttttcgttttcatctatcttttgttttcttcagcatatacctatgcatgcaagtccatcaacgttgatttttttttttttgggggggggtaaaaaatggaggtatttgagtttttgtgtcttcaatttgatctcattcttggatttccttttcag

SEQ ID NO: 82319 - DNA, 809 bp, Citrus sinensis
  Intron number 1 from transcript orange1.1g011574m (locus o range1.1g011574m.g) derived from phytozome v7.0 (chr-ID sc affold00021; pos 859280 to 860088)
aaagcaaaaacaacacacaaaacacaaaataattggtatgccccaaacatctcactcatcgtttactggtgttatcatcagctatatttttctgtttctgtttctatttctattctgcccccaaaaaattatgctcccacttcgggtaagtgcttagctaaagccaaaagctttgcagctcctttgatttggaatctgtatttgttttgcatgcaaagtcgaagattttgtatttgatttaggtcatctgggtatttctgatgttggctttagtgttttgatgtgttttacctttttagggtttctgaatttatgtttaattatagatgtgctgttattagttttgtgggattgcttacaaatttggatttgggcatcataaaggtttgattatatctatagttattattattttattattatttttattttttcctttatttttacgattgtggtgctgcggcttttaatctatagctgctgtacagtagaatcagtagttgttaggtgtaattgtggttttgggcgatatgcattagctcctgagtaaaagtaagtatgtatagaacaccagttgttatgctttcaacagttgcaaacatgcccttgctcgagtggaattgatacttatagctgagtattcctctttgaaatgagaattcagtgtctaaggttgtggttggaagtccacttttatacactgtccaaaacagcaaaaattgagttctacttttgtccactgtttgcatttttattctaatgatcgaaagttaaaggtcattgtgatgctgttcaggtgctgttgttgg

SEQ ID NO: 82320 - DNA, 564 bp, Citrus sinensis
  Intron number 2 from transcript orange1.1g022532m (locus o range1.1g020645m.g) derived from phytozome v7.0 (chr-ID sc affold00001; pos 2053451 to 2054014 reverse strand)
aggtatgtggattgctgtttttcccccgaaaaaaataaagtaattagtcggctcagtaaattttattgcagtgccatagaagaagtgggttttactctgttttactattattggttaatatgtttctaaaagccgtatgcatgcgaattataaaagcgtaattcaaaatattattttattggactggaaattaaaaccatgcttcaaccatgagtaattgctgatagattgtggactattagaaatttttcctttagatttgtgtttgtactatcctgctttctttgtggagcctacatcttcttgacgtgtttcttgagaatgtcacccgaactcttcacttgtagaaccacatagagttgtctcggattcaagaagtatacgtttttccaattattaggtcaggaactgaagaagcaaacctaactagccttttctatgaataagatcggaaccttgctcttgtgtttcttctttagttttgttgtcttaactagatctgaagtctgatccatctgggttatatcagaaattaaacttgaagctctgcccacacggtttacc

SEQ ID NO: 82321 - DNA, 804 bp, Citrus sinensis
  Intron number 1 from transcript orange1.1g034498m (locus o range1.1g034498m.g) derived from phytozome v7.0 (chr-ID sc affold00015; pos 662095 to 662898 reverse strand)
gacccgatcccattcacaacaggtacatatatttccttttcggttaatctatgcacatattctctcccagttgtcttgccaataaaattttaaagtaaaatgattatagggattatgagtacaattttcaatggctacaacctatagattaatgtgcttatatactgtaagaaagtggaagtagatgcatatgcatacggtgatacactgtatgtctctatttggctctgctggtcctcaaaatgttttatctgatgatcgtaagagtcttcttttcttttcttttcttttttttgggttgcggggggtggattgttataatagaaaaatgcagaggtaaatgttttgtagctaatataatatctgtcaagtcaaagaggcatcataaactcatttgaaatctatggaagcagataatggtcattactctttaactaaagcttctttaactatcaatctttctcttattttgatgaggttgaaataaagacattggggaaagatcttgaccactttaaatatgtggagggaaacaccgtgcagtttctttcttctccattggagttcaaaataatcaaataattgttataaagctaagatctaattcacattttaagtacactcttaaactaatcagcaattatcatattgaacattgaatgtctttaaatttctgaataacactccttgctaacaaaaaggcttaatgcatacaataaacgataataagctctctcatacttttattcttggtaacatttttcttcaggagagcatcaaagtctagacaaccaccaggtcgag

SEQ ID NO: 82322 - DNA, 1015 bp, Citrus sinensis; identical to SEQ ID NO: 82217
  Intron number 1 from transcript orange1.1g015248m (locus o range1.1g014854m.g) derived from phytozome v7.0 (chr-ID sc affold00001; pos 2219355 to 2220369 reverse strand)

SEQ ID NO: 82323 - DNA, 979 bp, Citrus sinensis
  Intron number 1 from transcript orange1.1g037910m (locus o range1.1g037910m.g) derived from phytozome v7.0 (chr-ID sc affold00130; pos 395583 to 396561)
agattgtggggagtacaacgtccacggattttcaagtaggctttgtgcgtaccatcaagcgccgagatttatatctcggatttggatacttttgcaaaactcaagtttcacttggaacaatctagaaaggtattttggacttttgcatggactaataacagttggtttctgaacaacatgacagcagtagaagcagaggaaattaaccaagtactcaaaaattgtaccatgtattctacccagttgacaggaatataaagaaaaaaaatactaaagacaagaaattacacttctgaagaagagataaagagtaaagagaaatcaccaaccatcaacttgttaagcaagcaaagtatattgtttaatttattggcagagtttacaactaaaacttggtgcataaattattttcaacttaggcaaggttgtctgtgaagcttaagttccgtgaagcggctatccggatgtttaatatcaccaagtcttatatctgagagttcaataaatccatgaaatccatgatctaaaaattaaaaattaccaacgttaaatccagatgcaaagatcatgtttgcgcaaaaaaaatcgaaagtattgatcttataattaaatgctggcttttttcttgtacatttgatttacagaaaaacaaaaataaaaataaaaataaatattactgactaaccgacttaactataatggtcaccaggtaagctagggtttaatgtgttgaggtttcctaattgatttaggaagctaactaccttgctgaattcctctatcataaggaaacgattttggaaacaaattgggttttggaaatcatcatcttctataaatatgtacataataatttcctaatcaaacaagtattcaaaattcactttgcttgctccgtttgtgactgtttcttattattgcaactttattcttcaaccattcagtccgtctccgaaaaatcaaaaacaaaaatcaagaa

SEQ ID NO: 82324 - DNA, 506 bp, Citrus sinensis
  Intron number 1 from transcript orange1.1g030187m (locus o range1.1g030191m.g) derived from phytozome v7.0 (chr-ID sc affold00001; pos 4105890 to 4106395)
aagtcgttttactctctagttggtctcgcttaatcgtacggtctctagatcctgatctctccattttcttatttgattgatatctctagtctttcttgatctctatgtctgatctggccttgttattcttcgatctgcatgttaattgtgagccgttgctcgaattggaaacatttttgtctgtgatctcctcatttctcatcttatacaactttgaattatcgaaattacgtattgatgattaagatttaggtgtgttttatgtctttattgtatgatctaacgtaattgaggtttatttcgttcttaaattatttctaaatgatatttggttattttttcaattagatctaataattgcatttttgttaaccgaatcttgtggtgttatgtagatatggttggggctttcttttgtttgttagattttaatgctattgtaatgttggagatgtgtgaacatgtcatctgatctctgcattggttggtgcttgcagttgtgaaaa

SEQ ID NO: 82325 - DNA, 666 bp, Citrus sinensis
  Intron number 1 from transcript orange1.1g038427m (locus o range1.1g038427m.g) derived from phytozome v7.0 (chr-ID sc affold00111; pos 158460 to 159125 reverse strand)
ttgaaccctttcgatcgaagtcaaatctttttaaggtaatgtggtgattttgctctgatagatctttctgttttatttatgattttattattctctctattaaagtaatccgtagaataagaaataaagaaattctcctgttttttaattcatgcattccattgactcttgtttttcttttcataaattttgatgcggaattgtgctattatgtgatcatttaccatcttaatttgcatctgggtatgttttgatttatgtaataagatgtaaaaatggtcgtgatttgaatggtaatttgcaagttcatttggttttatttgcaatttcatctacgagttatatttggggttggttggtaacttcattattggtgctttggaggggaaccttttcgggattgaaatttggtgtggctataatgagtttatatgtgtgcttttgttgatccttagtggaatttatggatgaggcggcaagattatctggagttgtaagtaaactgggaagatggaggtcaccatcatttgaagaaaatttgatatgtttgttaatcacatgcatgttttgttattactgatgttaattatagaattttgaactttgtttgattgattaatgtatgggatatggtttgccttttcctgttctgtttaggaagtataa

SEQ ID NO: 82326 - DNA, 348 bp, Citrus sinensis
  Intron number 3 from transcript orange1.1g027924m (locus o range1.1g024845m.g) derived from phytozome v7.0 (chr-ID sc affold00001; pos 836451 to 836798 reverse strand)
tggtgccattggcttaggatctttcttattgaaaagtatgttaccaattaagattgtttatcattttcctccttttcttttgaacttgttttatctacgatattgatacctaatcttccgtgtgtgtattggttttgcttacttatttcatttatgtttgtaaggtgtaatatacgtggcagttgcacatttgtaaatttatatatgtcgagatttgcatatatttaagaaaacaattcctcattagaacttctatttacgctatattttttatttttctatcaacttttgaactaattcaaataatatgcaggaccaaggcatttcttgtactacaacaccttgcgc

SEQ ID NO: 82327 - DNA, 392 bp, Citrus sinensis
  Intron number 1 from transcript orange1.1g041396m (locus o range1.1g041396m.g) derived from phytozome v7.0 (chr-ID sc affold00614; pos 43226 to 43617)
aagctgagatttcaggttcttaaatctgattttcttgcattttgctttgttggttcagttaaatagttgtagagaagcataagatcgtgctttttctttgttaaatcgttgtgttttttcccccttatttttgcaaggctgattgatttggccaattggagggacagtttggttgatggagatgaatttaaaagagcagccagactaagatgaaatctgtttcgtttgattctcttgttgggagctggaatcaaggtacatttgcagtttagattcttacaagtgctggcgatcgactgtcatttgcgtagcttatattgagaagaaggatcgtagtttttgttaatcattcttgagtgttgttgtgtggtagagtatttgtgttctgtagt

SEQ ID NO: 82328 - DNA, 419 bp, Citrus sinensis
  Intron number 1 from transcript orange1.1g010254m (locus o range1.1g008223m.g) derived from phytozome v7.0 (chr-ID sc affold00103; pos 464981 to 465399)
cctgaggtgtcacgttttcacccactctacttcaggttatttacttttacgccatcgcaatattcactaaaccctatttagggtttttcattctctctctttttgtttcctgcttttccttcgcttccatccctttcgttctgccccgttaaaactctggtaatttacgcttttgccactgcactagcagccttaactttttaacttattcataatcgttaaaaacaaaatttcatttttttgtctactgttatcagtattattattttcatgtgactgagcttcaatttcttcgtagaatcttaaccttagctcaaaagttcagctttatttgttattgttaacaattttttttttttacaatttattttcattcataccgatgccttttctttgattatgtatacagtgtttgttaa

SEQ ID NO: 82329 - DNA, 772 bp, Citrus sinensis
  Intron number 4 from transcript orange1.1g031859m (locus o range1.1g031859m.g) derived from phytozome v7.0 (chr-ID sc affold00001; pos 5806228 to 5806999 reverse strand)
cccaaaaccgtgaagggtgagttcttgcaaaagcacttgtattccttgatttgttatttacctgttgtgatttgcaattcatacaattcatccgatttacccttgaagttttatttgtcaaaatacattttgacactgcattggttggtttaaatgatggcagagttatgtgtctgaagtccaaaaagttcaataatgctaacattgtgattttttaaattctatgtaatcaacatgcttctgtggtttaattaagcgaacattaagttgttttaagttttaacatatgagggtgtggttctttaactttgagttttggcgcttgaatgtattaacttctattaggtttgagaatttccgtcgcaggtaatgtgggatttcactctagagtgaaaaaagccaaatagcttttgcccttctggactgtatctatttattctatcaaattgtttctggcgggttatctacattgagagtaaacattgaagttgctagttttggatggaagttaataagagtaaacattttggagaatttggataccaagtcaatgaagaaaacagtggttatgtgaacaaagggtctgtatgctccaagagagggtcacttgatttatcttttacctcaattaattgtaaaagcgagattgaatagctaaactgttattaattttcccatgtgatatgaagaaaaggtgggttgatgacgaaatctaactggatatggaattgtccgagtatttgattgactcagaaatgtttggtgcaggtgt

SEQ ID NO: 82330 - DNA, 1044 bp, Citrus sinensis
  Intron number 2 from transcript orange1.1g013416m (locus o range1.1g013416m.g) derived from phytozome v7.0 (chr-ID sc affold00021; pos 1389277 to 1390320 reverse strand)
gaggcccacccaggcctctcaggcgatttttacaggtagaatgcttacttttcctgaatcattcattaattctcctcatatgtagtcattgttttacaattaatttatttaagctgctgttgattaactaaacctagcattaaattcactgttaaattgattttatataatcttttgctagatatttagctttgtaattttcctacttagatgttattattaagattagcactgaattttatgatggtttttgtgcttttgtgcggtatactagtaacagtgagtcttcagcctagctgattggtaccgttaaagctgatcaaactccagtttctttttatttattttatgttcttttgacttttcctaaagttatgggccaagggactggactgaatagcttgttcgatttaacgtattgatttgccccatttcttacgccactttgagctttggcccactgacgctcatcaagtgctagattctctactctttcttgattgtttttgtatatggataggtacatatatctatatatattacgtagggttaaagatcatttcacactttaactatagtatacgattctaactgatcattggattcaaattcaaaagctttaatttaaatttcgcactttaactaaagtacagaatctctaattaaatcttaactcatgttatgcatacacaatattataaaatttaggatgttaacaggaaaagaaaaaggaaaaagaaaaaaataaaagaggtttataacatgaaaattgaaatgatgcactgtagatggacgcttacagttgaagaaataatgatttttcggtccaccatcatggaaaaagtcaacattcaacaatcttgtagtgtaaaacagagaaataaaaacatcttttcttgccttgtaaaaacaagaatgatgatgtcatgatgatgatgatgttgtttttgacatataatgctgctgcccaaactcatacttggcttaatttgctctcaacactcaacagggtcttgatccaaggtctacggcaaatttattctc

SEQ ID NO: 82331 - DNA, 273 bp, Citrus sinensis
  Intron number 1 from transcript orange1.1g000574m (locus o range1.1g000572m.g) derived from phytozome v7.0 (chr-ID sc affold00021; pos 1067825 to 1068097 reverse strand)
tggttacaaaacaaaaccacttgcttttgatttgagttacgaaattcacaaggtttccttcattcttcattctctttctccatgtattattaattttttttttatctaacacttaatgacagttcacgtctctgctgtaatttgattaattttgtagggtttctcctgttgtgctgaaacgcttttacttttctcctttaatgcgaaaatatggattacgggttggttaattctgttttttttttttttcggttttgcaggtggagtgagaga

SEQ ID NO: 82332 - DNA, 357 bp, Citrus sinensis
  Intron number 1 from transcript orange1.1g030339m (locus o range1.1g029329m.g) derived from phytozome v7.0 (chr-ID sc affold12454; pos 1433 to 1789 reverse strand)
aaagtgttctgtgctggagctgatttgaaggtactgttattaataatttttttgatttatttgtttttgctgagcaaatagaatcgaagcaacttgtgtcttaattaggatgctttaacaataggtcaaaggaaaaatggagtttagttgtgataattggaatttgcagtgtagacaagtctttattctgtcaacaattagttgttgagtggcagctcaaggctcgtgatctggtcattataattttttttttaatttcatatttttgtcttcgcttaaggattgtatgaatattatggctgacatacacatgcttaactgttgttgccttggtgggatttgcaggaacgcaggcaa

SEQ ID NO: 82333 - DNA, 849 bp, Citrus sinensis
  Intron number 1 from transcript orange1.1g037972m (locus o range1.1g037972m.g) derived from phytozome v7.0 (chr-ID sc affold00012; pos 1023838 to 1024686)
tcttgaggccaagagctataaaagtgatcctccaagtaattgcttctcagttcttggtctttactttctgtttgtttcccaagaagattgagagataagaaatgaaaatggtttttgttcagttgatttcttagtcttctgggttctgattggttggtgggaaagttatgaataatttagataaaaaaaatggatgattgtttggctattaagaaaatgaaagaaaaaagaaagctgatgaaagaacttaatcgcttcctgttttatgtctcttaaaagaatcataaaatggctgcgaacaaattggttactcagtctattcttttgattaacaagttgagatgaatttttttgattggttgctgagaaagaaaactaggcaaaaatgttgagaaaataaaatcgaggggaaagaaatgaaaatggtgtttcttggaaagtacttctttgttcagttgatttattaatcttctcggttttgtttgtttggtgcgaaaattaagaaacaagttaagtttgtttggctattaagaaaatgaaataagaaggaagttgatgaaagaacttaattgtttcccctgttttgttgtattatttcctctattttactgttttattttcctttaaagaaccatgaacagagtgtgaacgaattgattacaaagtctgttcttttgatgaataagtggaaatgaattttttgttaggttgaaagagaactagagaagtgagaaaagaaaatgggagttaatattttttttgtgcttcttaatgaatagaacttacctgatgatgtatcatttgttggatgcagaactcaaaatccaataaacgtaacgcatacatacc

SEQ ID NO: 82334 - DNA, 850 bp, Citrus sinensis
  Intron number 2 from transcript orange1.1g001492m (locus o range1.1g001492m.g) derived from phytozome v7.0 (chr-ID sc affold02200; pos 7496 to 8345 reverse strand)
ggcgcatttggcatcttacccgcaaaaagaaacaggtccttcaatttttgtcttgcaatgttacttagttttagtggttgtcttcggatgaaatgtgatatgtgtttttgttctttatatggctgttaatgctttggaatcttgaatattcgaatagtgagtgtgtttatttttaaggattggttgcaatatatttcatggttgtgctagtgattaataaatcgaactacatccgattttggtaaagcatcaatgggtgacgatctattaatcagtctcggagcctaattatcaaagaaaaattttaaatgttatcatgcggttaaatgagttgaattcattatacttcacaatctttataacatatggatatatttatggactgtgtgcttttatgttcctgttgattattttgctaatgattaataaatcaaaatgtgtatgtcctgttttggtaagcatcaaaggaaggatctattactcggttttagaacctaatcacataaggggaaaattcataattgtaaagtaatagatcttttcagtgtcagtgctgtgtgtgcatgtgtgcttgcacaagttgtttgctgatttgacaaaggttttgcaatctctccattagcattattcccaaatcagccggcaatcacattggctattgtagtttctaaaactgagagaaacctatgaacaatttttttttttttcacttgtgcacaaatggtaacattctagtcattaatccaacttctgtgctagtaaatttcagtttagataaattttactttggtttttataataacaatataattatgttgctaaactagcaaacattatctgtacagttgga

SEQ ID NO: 82335 - DNA, 214 bp, Citrus sinensis
  Intron number 4 from transcript orange1.1g043340m (locus o range1.1g043340m.g) derived from phytozome v7.0 (chr-ID sc affold00021; pos 1555343 to 1555556 reverse strand)
aaattgttgggcaggttcatttcttcttttttaagtttttaaatgttgacacatcaaaatccatataatctcattggctacattatttgacaataaagtggttttagtgtgatgagatttatcctgtctttttatccaagctagtatctgtgtctttagcatgatgcagtttgtttcaggtgttagcaattgaagagatcttcaagcatagggt

SEQ ID NO: 82336 - DNA, 481 bp, Citrus sinensis
  Intron number 2 from transcript orange1.1g045787m (locus o range1.1g045787m.g) derived from phytozome v7.0 (chr-ID sc affold00075; pos 538353 to 538833 reverse strand)
ggcacaagaacactttgaatttactcgttataaaagtaagcaagattgtttgctttattttgtctggcactcctttttgctcactgtaatactttgaatgagtgcagtttttcaatcagaaagcacattttacatggatttatgatttctttgtaaaaataaaattatagagttttttttttttaatgtgctttgtttgtggagatattatattaattagtacatgtgaatctttttataggaagaatttgatcaaaatgcattcttttttaattgcaattacaaaacatcaggaatgcatataaacttcacttattgtgttgaagattgaaatgaatggatttcaaataatatgttaaagattcaatgtccatttggctttttaatggtccatcaatatatttttgacggtaaacaaaattttctttctctctgttccttaacaggccatattaaagcaaattcttctcggtttggcata

SEQ ID NO: 82337 - DNA, 696 bp, Citrus sinensis
  Intron number 1 from transcript orange1.1g047697m (locus o range1.1g047697m.g) derived from phytozome v7.0 (chr-ID sc affold00084; pos 230228 to 230923)
ttcctcttcctcaattgctcctctactcaaggtaataatgcccaagactttcaccattgtctttgtttttactaaatgaaaagagacatacttcttcatgttttacattattttaaaacttcatgaaagaagagatagagagagtaacaacttgaagcaactactacatgcttttgaggaattagcttatctcatcttgtgtatgttgatgcaactgatataagtaggaatcaaactttctacatgtagagaactttaaatctggttcttgaagcttgattctggctttcacatggtagaacccttcactaattattgcaggataaagtgtccttgaggcaataagtatgtgtcatgttagtggtcgccaaccgtgtcatatcatgagtcattatttgtatctttacaggacattacagctaattatgcattcattagcatgatcatcagcatatcccattctccaagttcttctgggctcatttggtttagtgaggaagatttttacttagcatctaaatccataggaatcatgatttattgacacaacggcagatgatatttagtattcctcaagatggatggtgtttggcgttgtgcaatttagagccttgactatgcaatttacgacattggtttggcaatttttccattatgcatgtctctatttctgacctatttgacttgcacccagat

SEQ ID NO: 82338 - DNA, 358 bp, Citrus sinensis
  Intron number 1 from transcript orange1.1g003141m (locus o range1.1g003141m.g) derived from phytozome v7.0 (chr-ID sc affold00052; pos 526275 to 526632)
tttgtttcccgcttagacactcattctatcaccaagttcgtagctttttaactctttgcttgccttcagttaaaaattagaacacgaaatgtcgttgtattcttttttttttttttggttgcttaatgagctcaatattcatgctaatttgcagaagaggtaactgaaaataaaataaaggctaatgtttaaagagatgaatgtttaatttggaaaaaggatcaaagttgcaatttttacttgtgtttaattttgttccgagaaaaatgtttaaaaaaattgtgaattatgtgaaatttgtgtttttttttaattgtataatttgtcaaaaacatttggattttttattgctttaggc

SEQ ID NO: 82339 - DNA, 654 bp, Citrus sinensis
  Intron number 2 from transcript orange1.1g010506m (locus o range1.1g010520m.g) derived from phytozome v7.0 (chr-ID sc affold00032; pos 194668 to 195321 reverse strand)
ctactgtctcctctatcaatcctgttaacaatcaggttatattttaatctttatctatattttttttaatttgtctgtttgtatactgtttgattatctcattgtgatgatcatggctataatttgatggaaagtgacttatccattaatttaacagattggcttgatgatttcttatattctttctttctgcggttagagattctgcgaaaaaagtggatccttttttgtttaaaaaaaaaaaaaatctcatacatgcatattaatttctaactgtaatgagaattatttattgatatgtaggggtaacagataaacaagccccaggcaagaagtgataaatatactgtagcaaacaatattcccaaatttcttcatgcatactgtctaatgcatcagaagcttgcagaaaagcacattaattggtcgatgcatctgaacttaagtttgaaattcttgcatgttcttctgaaaccagctccaaataatactcagagttgtatggaacaactacaaaatagacaaaatgacaggcactcgattggtgcttatagaaattgtaacaatgtttgcatttattaatcatcaagttgacaatattttcatgttgttgattcagaaaattgctactgttgtggaggcttcacttgagga

SEQ ID NO: 82340 - DNA, 520 bp, Citrus sinensis
  Intron number 1 from transcript orange1.1g016057m (locus o range1.1g016057m.g) derived from phytozome v7.0 (chr-ID sc affold00015; pos 1126422 to 1126941)
ctatttctgattctccttctgggttttcttcactggtaagcgtctctctagatcccaacccatttagtctttttgtatacgaagctctgtttgattggaagcttcgatttttagtttctttttgatgatttattaatctgatttcgtgtttgcatgataacaagttataatcttttactttaatttgatgtcaaggattgaaatatatgattgattgttttttgtgtatcggttttgctattaggacatagtgattattatattttaaatataatcatttaaattttatttaaccatttattatttaatagataaaaataaatttgtaattttatttaataatctattgtttaccaatattatatcttctatataaaattgacttattaatacccgcacacatgcaaactatgttatttcttaatttaatggctagatttttgaaaaatattcctcaacaaatgatagtatcagtatgcattgcattttgcagatatattagaagcaagggcggaaatca

SEQ ID NO: 82341 - DNA, 718 bp, Citrus sinensis
  Intron number 2 from transcript orange1.1g016968m (locus o range1.1g016968m.g) derived from phytozome v7.0 (chr-ID sc affold00008; pos 351679 to 352396 reverse strand)
tggccttcccgaaggcactcactctggacgcagaggtacagttgatcctataaaactttgagcagtttctgctaattgtacctgttttttgttttacttaattttgaaagcgtgacagctaaaatacttgataaacacccactcttactttagatagcttaatgattaccaattatccatccacttatactactatagtgattctattcaacaacagctgtgatttaaagacacaaccaccttaatttcaaacaaacacacccttgtagggcgtaaactttgaaaaatagaaatggagggttggtgtaacttaatttacattttacagttagtttgtatgggatgttgtattttcatataagtgatttgatttgtttctcgtatcgaactatgtgaaaaatggcactccaaacgtcagtagcatgtgaactatgaactgggcaggacacactattggcataaaatcctagttatcattataaacttttatcctgataaatataccaatatatggttcctttattttctgaagaagaaatatgttttgcaagctcagagcttgtgacaacagtttgatgctactctgaataaatactcttatgcttaagtttgatggatactttttgtttctatgcctgttgattgtgataattgtttacgcttctctttttgacttcactcaggtagtatcattataataagtttacagaacatattg

SEQ ID NO: 82342 - DNA, 616 bp, Citrus sinensis
  Intron number 3 from transcript orange1.1g029890m (locus o range1.1g029890m.g) derived from phytozome v7.0 (chr-ID sc affold00144; pos 36410 to 37025)
cggaagttacagctattcgagaggttagattaaaaaatttgtttcttcttcatgttcttgttcttcttgaggagctgtctttctgcagttgtgctcatgcacttgtgagtttcctgtttcctgaactacatggcttggcataagttattttttgttttgactatttaactcttagtagctctttccttctgtttgttgggtaagttagttacgaaatttcactgcttatctgatatggccttgtgaaagtaattgtttagaagtttgagtttatggagaacttctaccagttcgtcttgtaaacccttttactacattattatttactttatcttttattcatcttcaacatcaagcatatacagtgcgtacataattgcattggtggaattctcaaatgaggtgtgagttttttattgtgtaaatctggttgtaagcacagttccttcatctctgaattgatcccgtgattcaagctgttcctgtgaagacacatctctaatgctagagtatacagcttgttttttttttaattttagagtcagcatcgcaaaacgaatattcttcaaagggcatgcatgtggttctaatggttgaaatgatctgtgtctcaggc

SEQ ID NO: 82343 - DNA, 583 bp, Citrus sinensis
  Intron number 1 from transcript orange1.1g013790m (locus o range1.1g013790m.g) derived from phytozome v7.0 (chr-ID sc affold00001; pos 252279 to 252861 reverse strand)
ttgctatcaaaaagcttaacagggacggcttgcaggtatgaaattaaattaattattatctcaatattcttcttctttttttaattttttgatttgtttggcgatccattttctaataaaaatattatatttgaatgcttggagtatgtatgtatgtatttggtcaaaactccgatgtgattgtagtttctgttcaaatttttgcttatgaatgccttttttcttgcttctgatttcttacttcacacgaacctagtcttgcatttcaatcattatcttcggcactcatttgtactcagattgctaacctttggctttagctatacattttgaaccaaacatatgctcataggccatatgcaaatgcaaatcaaagatgcccaagccatatatatatatattgtggttagcgtattaaatccctatgtattagctcattcagggcttttctttaaccccgaaagatcaccaattgggttctttgttgttagatttgtattttccagtacatgatatttacttgccctaatactttgcaactcaaatagggtcacaaacagtgggtagcagaggtccaatttct

SEQ ID NO: 82344 - DNA, 609 bp, Citrus sinensis
  Intron number 2 from transcript orange1.1g047550m (locus o range1.1g047550m.g) derived from phytozome v7.0 (chr-ID sc affold00015; pos 1297553 to 1298161 reverse strand)
atcaccacggaaaccatcatttcaagctcccattggtgggtgtaattggtcttatactaacttgatcacagctagtgaacaaggcgtgagttttggaaagatttgtttcttgggtcaacaagcagcagcagcaacaacaaattattatcttgtgaaaatcagacaccttttgatttcttttctggtttgtctttttggtctccccctatacctacattagttaatttgcattctaagtgcattttggattattgtgtttcctcctctctcactttgttaattacattattattattattattattattttgtttttctcacacatctaatgtctttccaattcaagttcaacatggtgaatgtcatctcaagttcccttattcctttgctttaaatcatttattcactttcagattctttttctttttccccaaaactgatctcctcaactctgaagtgagcgagattcaaattcaggaaatttgtgtcttcaacttcaagttgatggtggatatagtatttatttacttcttctcttttgatgaaacggtggtggcgattgttgtgttttcaggttacaaaagtgacgacagttttagccagaagagc

SEQ ID NO: 82345 - DNA, 1001 bp, Citrus sinensis
  Intron number 2 from transcript orange1.1g024726m (locus o range1.1g024726m.g) derived from phytozome v7.0 (chr-ID sc affold00266; pos 152229 to 153229)
ctttaaggaagaattgggtacaaattctgctgcaggtatgcaattacttcatgtttaaagcaattggataagacgttatattcacatatatgataatatagcataaaattaaaaaatttcgtattcaatttggcgatgcattgattaaagtcttacttgttatatcctccttattacatacttcgcatatgtagcagatgtagttcaaagtccagtcttgatatgcaatttattgttggataaatgaacttgatggtggttgcagctcatttaacccttacgttgatgtatactgctggtagtatagagtgctgtttgcattactgttcccattgctctctttgtatatggtcactagcagttgaaaaattcatgatagtttgtataatttcaagataattttagtattttactttgtgccaacattaagctcaaagttcatcatttaacaaagcatcttttgctttaacttgttaactgaccttcctatcttttgctttaatcttttagctgcatttcaagatcatgttagtttgtataatttcaagataattttacttgccgacattaacttcactatatttaacaaagtatctttcactttaaccttttatagctgcctttcttatgtcttgcgtttttttgtggcatttgttgatatgtgcagaaatattggtttttcatttcttcaaatagtttttcttatgtatttgaaactaatgtgacagatgtcttgcttctctactcaaggattctaaatgatataatgattatacttattttcaagattgtcatggcttgagaaagttgttttctaataatttttattacccgagctgtaatattgcatttccaggggggagcaggatcaaaaaagaattaggatgcaattatgttttgatcaaatttgttctgcttcaggctgcattttaaaatccttctaacagctgcatgctaaaatggcaggtgaagaaactgccgcagcttctgactcttcgtca

SEQ ID NO: 82346 - DNA, 448 bp, Citrus sinensis
  Intron number 1 from transcript orange1.1g038702m (locus o range1.1g038702m.g) derived from phytozome v7.0 (chr-ID sc affold07194; pos 167 to 614)
ttctcaccctctgggagctcccttgcaacgacaaggtatgttatgttgctttgacctcattctgcatttgcttgatttttagcttttgagttaatgttgttagagcctttccagagatatttttattagttatttgtaaaccaatatctccacttgaattagctatcgtattctgatccaatttaatcactgaatttgatttccttcttacgtaaatcctgtgttatttatcacttctcattattattctaatccaatttaatcactgattgtgattccttcttacgtaaatcctgtgttatttatcacttctcagtattaatgcttcttataacagtagaagtttatccaagtcaaagcatcttctatgttacaggcaacttgagaaaatatttgttaatgtaattcttgtatgaggaccagtttctgatttgattatgtagttttg

SEQ ID NO: 82347 - DNA, 389 bp, Citrus sinensis
  Intron number 1 from transcript orange1.1g017923m (locus o range1.1g017878m.g) derived from phytozome v7.0 (chr-ID sc affold00832; pos 36471 to 36859)
attcgcgcaaacttttgcatatcaacattttcccggtaactgactcttatctcaattgcaccactcattttagtacaatttcaattttcctgtaaattatgttttcgatttagaatctactgccagttgctgaattttaattaaaaaaatatttttttgtttaattggaataaaatattgattgtggatctgaaatggatattgagggataggtatagatccatgtgggtaaaattgaagcttcatgttcttctaatatttttatattaatggtattatctgtcttgtagcgtgaatttttgcttaaacacgttgttttgattctctttgctttatcctctttatataaatatgtaacgacttgactatgttgcgaatgtttctatcag

SEQ ID NO: 82348 - DNA, 596 bp, Citrus sinensis
  Intron number 1 from transcript orange1.1g018966m (locus o range1.1g018966m.g) derived from phytozome v7.0 (chr-ID sc affold00470; pos 88343 to 88938)
gctaccttacacacagcaagtatatatcttaatttctcgagaagttatcaaaacctctttgttgttcgtaaaaaaaattaattattttttttgcacgtttcaatttctatcaaaatcgcttctaggaacttgatcaaggggtttttaagcaattttttagctgatcctctgtgatcgaatatgattctgtagaagagatagtaaactgaaaatttgattttggaatttatccagttcctacaatttttttttttaatccatcaaaacaaacccatacttatctttcaattttctgtgttttaataatgctttacttattacacaatatttttttaaaacatggagttttaattagtgtttttaccacatcaagaaaaaaataatgaaagacataacacaagttaggatttaacataacttttttggacagaatttttgaaatataaggtgcgaaatgattacttcaccgaaacccaacgtacccatttgatcattttgcgctatccatctctctattcattaactactattttaagtttttaatttgttcattatctatgcattgcattttacaggtgctcaaataggtgtttgct

SEQ ID NO: 82349 - DNA, 245 bp, Citrus sinensis
  Intron number 1 from transcript orange1.1g035824m (locus o range1.1g035824m.g) derived from phytozome v7.0 (chr-ID sc affold10443; pos 172 to 416)
aaagtttgtttcttgtgaaggatagcttgtaatttatttcttgaaactgaaagtacttcaacatttttttcactctttctttttttgtatgttggaaaaagaggaacatatattctgatctactaattaatttattcatttagatttctttagtttgatttatttttgtgttagtacaccatataattattagttttacctttttcattcttctataaactttttcaggaaaaacgtaaggaagc

SEQ ID NO: 82350 - DNA, 628 bp, Citrus sinensis
  Intron number 1 from transcript orange1.1g024729m (locus o range1.1g024729m.g) derived from phytozome v7.0 (chr-ID sc affold00052; pos 518589 to 519216)
gttgggaaaagcgactagacttgaaggtattgcttttttttattaattttctaaactggggttgtttgtttcttgagaaagtataatagaaaatgaacagaaaatatgttttcaatttgaattgtgccaaaacacgtcaatagtcaacttctccataaatggttattcattcattttgcttattttctaatctgggttgttctattttttttatgtttttattgttgctctgtttgctatggaattctatgctttgttgtttaattgtctgtttggttgctgtgaaaccagaggaaaattctttttttttttaaaggtaattaagcacttaaggaatcaacttttttcaagtgcctcacttttcccaccaaatcaattgaagagctataaattttctttatgcaaaagttatgtaatgatcctttgttcatttaatcattctttcgtgtgatattttagaagccttggtaatttagatattgaattttccactttcatctttaatttcagtcaattgaaccaaagagatcaatcacacatagtgcattattttattaattagactaattaattgtttttttttttccaatttttggttattgcagtcaggtaaggtctatttacaaag

SEQ ID NO: 82351 - DNA, 849 bp, Citrus sinensis
  Intron number 1 from transcript orange1.1g006592m (locus o range1.1g006592m.g) derived from phytozome v7.0 (chr-ID sc affold00015; pos 329570 to 330418)
gcccgccttccggttcctgatctcattattctccagtgagttctcttatttcgcgccttttcagtgatcctgttaactttacgtttgtttcccgatggaattcgcaacatttatcgcatttcatagtttcagtatttgaaaaaccgttataacggttttgatcctatctgataatatcatttggagcgtaaatttgtaaaaatcgtgcttttaggtgtgtttgctgacacaacatgatttatttgaaggtgaaaatcatgttgaatgccgttttggtctgcattttcgatggtactatggatatatttataaaaaaactgtttttttttgtttgattaattgtttgaactggataatcggttattaattatctttttaatattttttaagagccgggataattcttttttaatgcctgtcagttgcaattaattaataaatcgttttagtaaaaaataggtcgcttattacggaagttgttttatttaggagaaaaagggaacttggttctctaatacgggaatctagccgttcacaaaagacggctttcaagttgtcaagataaagattgccataatgccatatgcttgctgatatgagtatttatttacttgtttgtccacttgtttatttaacttccaacgttccatgtgaatccttgtattttcgctcaccaaaagagcagcagatttttggagggtaagtgttgtttgatcaacagaagcttttcttgtcgcccatttcaagttaatgggggcacaaaatgttttttttgcccttcctttttaattgggtgtctggcgattcttttacccatcaattagccggcattttcaggttgctcctccg

SEQ ID NO: 82352 - DNA, 513 bp, Citrus sinensis
  Intron number 1 from transcript orange1.1g027310m (locus o range1.1g027310m.g) derived from phytozome v7.0 (chr-ID sc affold00001; pos 1125534 to 1126046)
gcacattcattcaatcaaaggattataatcatatcgtaagttgttctctgttcaatttacagtttctgttattttatcattcgatttgaggaatctaactgaagaaataactaaatattttggttgtcaagccttggatgttttttgatttgccttaatagtaaatatatacgaaattaattgaaaaaaaccccttttgttaatgggttaattccacgtgaataaaaacgattagagaatctcacccttatagaattcaaaataggtttgctttaaaggattaaataggagaagaagctattggtcaactgtgctataattgtatactcggactttagcattgcagttgcctcatacgaagtgagttcattatggctggtagatagaacgaatgctaactgagattaagggatgccttattttctggtttgattaatgatattatgcatattgttatctggatacctgctgttataatttacacattgtgaatagctacttgcaggttcctat

SEQ ID NO: 82353 - DNA, 607 bp, Citrus sinensis
  Intron number 2 from transcript orange1.1g030670m (locus o range1.1g030547m.g) derived from phytozome v7.0 (chr-ID sc affold00423; pos 30951 to 31557)
tgtgtctctgagttcatcagcttcattaccagcgagtatgtaatgcaattcaattctatttctgttaattgcttttatttattattaatactgttttctttttggtgataattggttggtcaattttataacagcgaattggtgtgtttggaaagtgtgtagctggctcgattttgatttgagaatgtgatggtgttttggaaaataaaggtcctatagtttggtggaaggtgtcagctttggaaagtggttttttttgttttttttcattttatcgactggatttttttttttcaaatgagggattttgtttttgttgaacttgataattgttttgggaagttagattttgtttggttggataacgatgtcgttgattttaataaaagggattttattttgtggactgggtgaatggtgttgttgaaagtgaaaatttgtcttgcgaattgtgtttgatgcttccaggagctggcttttgttttgtggaatgtggtttgtttgtttgcagttgttttattggaagatctgattcggtttcttgaaataggtttttcatttttgtcctgtagggcgagtgataagtgtcagaaggagaagaggaaga

SEQ ID NO: 82354 - DNA, 632 bp, Citrus sinensis
  Intron number 4 from transcript orange1.1g026562m (locus o range1.1g025867m.g) derived from phytozome v7.0 (chr-ID sc affold00021; pos 680353 to 680984 reverse strand)
ttgataacattcttgaggaagaggagcaacaaaaggtaacttttttattttttacgtactaatctcaccttcaacgaatcatgagttttagggttccgttctattttttcatctttaattttcttagaatgtaaattaaaggttgatagatggagtagaaaagagattgataatagcaagtcatctcccgaatcatattgcaattttgggatggttgcaaaagacacacttaagatcaatttgcatttatggcctttatgttcattaatggtctcaaacatgttgactgtgggtttttatttttttaggttgagtcaatttgaaaatgtcgggtatttataaggggctaaactttgccatcccatctactccaattttggttgtttatttggtttgattctgctctgttcagtttttatttctatctgttgtgattgaatatgatattttgctgctatttaaatgatatactttcttcaaaggattcacatttagttccaacttagcttctcctgcaattgtttgagcccccaaatttcttctaattcatatttactttccatctctatattaaggatgttaatatgaattgattttgttgtctgcattttcttttattcctctgttgaagg

SEQ ID NO: 82355 - DNA, 552 bp, Citrus sinensis
  Intron number 3 from transcript orange1.1g028381m (locus o range1.1g028353m.g) derived from phytozome v7.0 (chr-ID sc affold00178; pos 202074 to 202625 reverse strand)
ggggaagaaattgaaacttgcaatttgggatacaggtaacaacaaatgcatgcccgatatattatttgatgatgttaaactgcgtcgtatttgtgctatttccttatattgtgcctcattgttgtgttaggttttcacactagcggtgaaattgagttgttattaaattacattgaacttaagatttgcattattcatcttatgttttaaagcaaattgcagattctagttatacactgatttattgctgcattttgtgaacttgaagagatatttttgaaaacccaaaaatacatgattgtttgtttgtgacttttaagtgcttatgttcaatcttgttgaggacactggccatttgtaacaacataaaagcacatttccaagataagatgagtctgtttttgatttgtgggtttttatgttgctatatcttagctaaagagtttggctctctacagagaaaaggtttgttcttggccaactctaacttactagtgctgaatgtttgattgtgcagctggtcaggagagatttcggacattgactagttca

SEQ ID NO: 82356 - DNA, 382 bp, Citrus sinensis
  Intron number 1 from transcript orange1.1g015827m (locus o range1.1g015827m.g) derived from phytozome v7.0 (chr-ID sc affold00015; pos 999450 to 999831 reverse strand)
atccctgggatcttccaagtaagactgtatatctttgctgcatgactttcacactagaacttttagcagactcatttttcataaacaaacacacaatgtttgcaaaagcttaacatcattattattgtctaaacattcttctgctttcatttgtctacacatatatgctttcgcctttgcttaatcttatatctccaatactcagctagaactttgagcataaggttaaaacttgcagtcctttgttaaaactaatttcgacaactctttctggcatgcttacaataattgcttctagtactaaacttggttgttaatagctcatttttggtttttttttgtactagaagagcttgcgacagcaggagagaaagagtggtac

SEQ ID NO: 82357 - DNA, 254 bp, Citrus sinensis
  Intron number 2 from transcript orange1.1g045707m (locus o range1.1g045707m.g) derived from phytozome v7.0 (chr-ID sc affold00217; pos 74045 to 74298)
tagcttggaataccacttcggaaaccttgtgtgctgtgagtgtatttgctgattgatgattgcccattgtgctttgtgtccagtggtagatgttttgggtaactcaaattataagaaataaactgattattttgtcttgataagttgacgtcttcctttcattacttttcttaaggatttctcagagattttcaattatgcttcttttgtctgaaagtttcaagggtgtgttctctcataggcatttcgagtgc

SEQ ID NO: 82358 - DNA, 219 bp, Citrus sinensis
  Intron number 2 from transcript orange1.1g044701m (locus o range1.1g044701m.g) derived from phytozome v7.0 (chr-ID sc affold10703; pos 494 to 712)
tggaagaggttattctgaagagcaaatatttcaaggtggtgattcatttttatattactcagacacacgcacacacacacacacaaacacacacacagacatagacatatacatatacatatacatacatacaaacatatttgattgagtgtgttttttctttttaatttattgttttttcttcttaaaaggcacaaaaagctaaagagaaggaagaaa

SEQ ID NO: 82359 - DNA, 872 bp, Citrus sinensis
  Intron number 1 from transcript orange1.1g021819m (locus o range1.1g020110m.g) derived from phytozome v7.0 (chr-ID sc affold00985; pos 23267 to 24138 reverse strand)
cgtggactgatcttgaatattgcaagtctcgaaaggtaatctttttcctatcaacgttcctgttttaattttttaatttttaaatttttatttggttagtgaaatgtataattataaatgtggtttgttgagtgcttaacaatttgttttgagctgaagagaatgctgatgaaaatttgggtgattgtttgcttctgaattttgtgggtttcatttgtgaattatgagtgaaagatatgctcaataagtgcttttggtttaacaaaatcgctcttgaatgggtcaggggcttgttttgtatcactttatggtatttggttgaaacaggcaaaagcttttcttgatagaagaacacttggtgctcagtatttgaagaagccaaaaagcaaagcacttaaagtgcttttatagaaaaagctttaaagaaccattttcacttgaaaaaacttgcttttgcaaaaagtaattaaatgacaaaggagatttgccaagtttcacttgcaaaaacttggttttgcgggaagtaattaataattatatgactaatttcatcaattaaataagtggatggatgataaatttctttttgcaaaaaagaaaaatgctggtatgatgagattataagatgataggttcttccgctgttttttgatcctggaactgaaattgatgaaagaccaatctgcacacacacacacacacagagtatctcgaagtgattaaaaatacccagttgtggcagctttttctctgtcgtatacatctgattttgtttatttcaagttttaggggatttaatttgtttgtgctgcatttgtattctcttgattatggcagaagtggtatccagtgtcaaagacattggcagagaa

SEQ ID NO: 82360 - DNA, 886 bp, Citrus sinensis
  Intron number 1 from transcript orange1.1g015011m (locus o range1.1g010674m.g) derived from phytozome v7.0 (chr-ID sc affold00032; pos 683289 to 684174 reverse strand)
gatcggtagcgggtcctttggagagatctatctaggtttgtatttttcactagtttagtatttttttaccgctaattgctttttttccccttgttaattaatttttttttgggggcaggtactaatattcagactaatgaggaagttgcaattaagcttgtgagtgtattgaatttgtgtattttgtaagaaattatatggtagtaattgtttgcttgaatatcagctaaaaattgacctttttttttgttatgttagtttgctagtagttattaattttgttgttgtttgggttttgagggtaaatattgttttttttttttgttgaatgatggacgaagaatgcgatagtgagtgagtgagagtgagttgatgaatgattatgtattaggaaaatttaagcttgctttaagagattgagaatgaaatttaagcttgctttaatttgttaccgcaatcctttgagggcggaaaaaggggttttttagttctgccaatgacctttgcttattttggagttttcttaagttaaaattgatgcaagattaatccaggttttgtgtaaagttaagccagcgtggtagtcacacttgtcaacaataatctgttatgtatcttatgagatttagttgagggattcacctaccatgtcctaacagtgacttcaatgattatactctctttttctttgggttcaaatgttgaaggcagtttgcgcttgcagaacttcattgttgataaataaaattttcactatctcttcttctttgttttgttatccgatttaactgtattagttttctttctgttctagtatttttccttcttgatgatattgcttgttcccaaattcattaagtctgatagtattttctttcataggaga

SEQ ID NO: 82361 - DNA, 152 bp, Citrus sinensis
  Intron number 3 from transcript orange1.1g006826m (locus o range1.1g006540m.g) derived from phytozome v7.0 (chr-ID sc affold00144; pos 216016 to 216167 reverse strand)
acgagaagcattgaataagatattagacatcaaaggtagtttattatttttgatttaaggaagggactttatattttttctttgccctttgattaaaggattgattttgatttgcaggctgtattagagtcttttgtcgagtcagatcattt

SEQ ID NO: 82362 - DNA, 440 bp, Citrus sinensis
  Intron number 1 from transcript orange1.1g002091m (locus o range1.1g001833m.g) derived from phytozome v7.0 (chr-ID sc affold00001; pos 3071682 to 3072121 reverse strand)
gcaattgtaagtgaattttaaatttattattattatttcgtaaactgactccaagcaataatctggcttggctgagttgatttgtttttctttcggggattggattcatcagatgcacagtcttttgcttattaggaacaactcgataatgtattatcaatgtaatgattttgttgttttgtcttccaaaaaattcgcaagctcactaggcacatctattgaagttatttatacttctcaaggaatatgacttacttttgattcggcaattttatttttcttggtcctccatattctcagaaactaatttgtggcttataggacgaattcatttttagactctcgagtcgtgattattccaatcaaattgctggctgacttatttcaaattggaactgaatgtaggcatatcaagtgaaagtttagcagggtgatttagg

SEQ ID NO: 82363 - DNA, 927 bp, Citrus sinensis
  Intron number 2 from transcript orange1.1g014055m (locus o range1.1g014055m.g) derived from phytozome v7.0 (chr-ID sc affold00032; pos 720140 to 721066)
caattcggatccaaacggcctttcgaggattgttggtaattgggttcttcttctctttctgtttcatgagatttctagaactaatatttaattatgtgtgcaactgtgtcagatttttatttaatttaattttataccatctgttctggttcaggaccgtgacctttagatgtgtagaaatagtttcagttataggtatatgcattgaaaagaaaattttatacaactacaatttttggaattttgttatataaacaatcgtctaggcaagcttagctttggagtaataagctggtgagatttctaattctacatagttggtgaagatcaatttttgacaaatgagaaggaaaatagctcatgattttggtcctgtatgtatccgtatggcctccattaatttgtttgagtctgttgacccatttcgtagttgtgtggaaaaaagttggatttggatttgtaaggatattttgtgctgatatggttgtataatatcttacttatagatgaggttcatcatgttgcttcatcttaacgagaagcgtgagaggtcaaagaaaataaccagatgttttattcaggttcttctgaatatgcaagtttgttgaatgtaaaatccagaaacaatgttcgtttcctagtgtgctgtcctcttttcctctttctaaaagctgaaaaaacagaagagtcactatcttcaagtgaactaaaccatttgaaagatcggtctggaaacagccattgtggcttaatcaacgaggtgtcgaagtttatcagtctattacacaacagtgagctatgtcatagaatcttgcaatacttatttggagaagagtcatatgtgtgctttatagttttcatcttttgtgtgtgaatttcaaaatgattgcaggcaagacgggccttcagggccttgaaagctgtggt

SEQ ID NO: 82364 - DNA, 667 bp, Citrus sinensis
  Intron number 1 from transcript orange1.1g004825m (locus o range1.1g004815m.g) derived from phytozome v7.0 (chr-ID sc affold00030; pos 289712 to 290378)
tttggacccgacccgccagcttggatacccgacccgtaaatattatttaattccattcagtttatttcaactttttcttcattattgatagttttgtcatatattgaacttttgcatgtattgaatgatagcttgtcaagtaattttttgataatgctttgggaaaataattatgacttttgatggcttccggtgaaatttggagttgattcaatcagaatttattgtttggtaatagtgatagtagaacttagttcaagattttcagctgattctaagtttatttcagtgtaactgtgattcccaaagcccaattgtgtggattctcttgttttaggattgtcgcagaggagctattgaagcaagtgggttaaatattaactaagtacgagacacaaggagcaatttgattattaaaacctaagaaaacatgctgaaatgcccaattaattgagtggtaaactttttacatgctaaaaaactgaagagtttttcaacggctgaagaggacaaaaagaaatttggagtatttttatgcaaattcgtgtttctttgcttcttttcttaatttatactgtttatatgaatattaaattgctctctttatctttttgttgtttcaaattaatgccttgttgtatgggtagggaggctgcaaaggtaacaa

SEQ ID NO: 82365 - DNA, 562 bp, Citrus sinensis
  Intron number 1 from transcript orange1.1g003211m (locus o range1.1g003211m.g) derived from phytozome v7.0 (chr-ID sc affold00032; pos 97052 to 97613 reverse strand)
attcccacaagtatgtatctccttctttccttcttttttcttgataacactgcaagaaaactatggaatctacaagagtgagtcaacaggaaaagaatcggttgataatttcaatatgatttccattatttctgttggtgcaattcgcgttgtgtacctcattatttgatcattgatttggcttctctggcctaatcttgtaagttagaagaaactgttttgcagttatctactcattgaagtgttgggttagcaaaattgtttaacatgacataagattacaagaaaattttgcattgaatccttacatctcttatctaacatgaaatgtttgaatgctttcttgtctttctttccatatctccaatgttcgactgcaacagtggcatctttctattcataaagtgttttcagcactactttgagattttccctttttctttttaaattttatttttgggtgcctagccatccaaaccccttgtttttcaattctaatgtgtacgtttacatatcaaattgatcagtagttagcggtttgatatattccaagtatcagagg

SEQ ID NO: 82366 - DNA, 725 bp, Citrus sinensis
  Intron number 2 from transcript orange1.1g014829m (locus o range1.1g014829m.g) derived from phytozome v7.0 (chr-ID sc affold00001; pos 4608172 to 4608896)
catctttgggtaacaggttagtgtgtctgtgtcttagctgctcttactgaaacataacatgcatgtgaaaaatgtgatatcgagaagcacttgtctgtattgggactggggctccttggaagctggaatgtgaagccaagaaatgcatcgttgaattttctctctctctctctctctgctcttacaaattaaaacggtgatgtgtcatgcgccaaaatactttaaaattttctactttctggacagaaattttctttttcagcctgtgagttttctttttcctgccttaaattaagatcactggcaataccatccctcctttttcaaattacgtcagtttcttattacttttcaggcatcactcaatgatatttattgggagttatctttgacgtaactgtttcttttatcgttacgtgtaacttgttgtcattttaaagtacattaatttttcgctattcggccttattatccaatcatttatttttacattattttatctggatgtaaatatctttaattatctggtttcaaaactagttgaatggatactttcagtgggacaggagtaaccttgtagtttaactaaggatgttttcaaagattataacaaatcaaataaacattacatgataaaagttgatggctattaattaacactaagaaaatcaactttaacgctgaccatcgttacgtgctgcaggtggtctttaattgcaagcaat

SEQ ID NO: 82367 - DNA, 963 bp, Citrus sinensis
  Intron number 1 from transcript orange1.1g033538m (locus o range1.1g033538m.g) derived from phytozome v7.0 (chr-ID sc affold04330; pos 5138 to 6100)
agaagctcgacaagaagaggaagcccatcactaaggtataataatgtcttttttttaactaattaaaactgatcatttgaatatgactgattagttgttactgctgcctacattgtttgttttgatttgtttcttagtttttatatgttttgattttgtgttgtgtttgtgaagattttctgcttcttgttccgattgtcataatactgggaattgcctattttttattttgtctgtgtggaattcaatttattttcaaggggtaatgaaatgatatgaaaaacatcatggatgccaatttagttgttttaatctatatattgtgtcagctacgtgatcaaacatggtttgagttgtactgttgtggtctggtttctaaattgttatatggctgccatgttgctggttgaagcatttttctcaaaatatttgcctttttgtattcattctgctatttgctttctgtgactcacttatatatcatatcattatgtttcgtttgtgcttgaattagatcctagtttaagaattagagagcagcgctatatattttggcaaatgaatggctgctagttatctgtctttgcaaattatagttgtatattggttctttttactgaagtttgtctgtaaatttgtgttcctgtctgtttattggccctaatcattgcagcttatgttatttagtgttgctttgatttgtgttactttttaccttcattttggtgtgcttaaaattttatgttttctttctgttaaaaattttttaccctacaagtatgcatatgtagaaaatagattccccagttttttctgttacttactttccagttgtttttatgatgattggtcttgttatgtttaatgggaatgttatacggttatgggatgaatctaacgttttcctttccacattcaatcctgtcaggaggaggcagctgcaatcaagtctgccggcaaggc

SEQ ID NO: 82368 - DNA, 700 bp, Citrus sinensis
  Intron number 1 from transcript orange1.1g028479m (locus o range1.1g028479m.g) derived from phytozome v7.0 (chr-ID sc affold00001; pos 1080098 to 1080797)
tcgttactgggcttccggctactacgatttgacaggtgcaattcgctatttccttcaattaatttcttcatacatctacattagttacgtatggttttagtataggggttgcattaactaattaggctttgtggcacaaagatcataaagcttacaatattctatcaagctaaaacaaatttgaccactaaatgtggttcctttttttgtgaaagagggagaccattcgaaaaatttccaaggaaatggtcaataagtaatcttttttaaaagtaaagcattaaggcgcatctgcactttagttgctttcttacaggcaccaccgttctgatcctctttgttattgttttttggtttgttattaatgttacccacctttcatttagttaattagagtactttttttttttaattttcccacacttcaagaaagcaatttaggacccacttccattcaaataataagtgcaatgataatatagaaactagttctttctctgaattattctccaaattaggcttgaatatttagagtaattaaattgaaaacgacgaaagagagagctttactaaacataaggatgtggcagtggcagccttggtacacgtctcttgtcaatccataccaaatagaatacaacgctaattcccattacttttttgcttttgcttttgatgctttcagtagattcttctcacg

SEQ ID NO: 82369 - DNA, 870 bp, Citrus sinensis
  Intron number 1 from transcript orange1.1g026556m (locus o range1.1g026556m.g) derived from phytozome v7.0 (chr-ID sc affold00423; pos 115898 to 116767)
tcttcggtgctagcaatatcatcaagttcttgcaggtatgcacttcttttgtatgtgataaattcaaactaattaaatgtccaaccattttttttttaaattgggagaaaaaaaaaacttgttaattgttttattttcatcaattagttgtgtgattagactttggagtggttgattgttccactcttttttggaaacttacggacttctctaatcaaaagaaaagagagtgtgacatttcaactgatttcatgcaactttaatgtttgttttcaattcactttctttaatttaaattgagtagattattcaaatggatcctttttatttctccttataaaggaatcatcatcactcttccttgacggggcactggcgcagggtcaatctgcctcgtatacaagttttacaaagcttaaattttgcccctttctagaaaatattgtgaattttacaaagtcaaacaatgagtatgaacttagcacatgggtccacattagaaaccaattccatgccccagcagcttaatatcataaagttagcacatggcccgttaagacttaagctttgacagaatccagcgctcagagaacggtttaaaatgtttctcatttagactagacttgcaaattaaaattaaaatatttcagtcattttattttattaaaatgtaagggagggtaaatcccaaattaatttttcgcctcccatcttctcaagattcaaattctggtggtcagacaataaaattgtttgaaaacgatttgaagcagccttggggctgaaaatttcagtcatccatatttgcacacaaacaatgtctcatgccattaaaaattttccaggaactgccagaatctcaacgagcag

SEQ ID NO: 82370 - DNA, 828 bp, Citrus sinensis
  Intron number 2 from transcript orange1.1g031615m (locus o range1.1g031615m.g) derived from phytozome v7.0 (chr-ID sc affold00001; pos 1483499 to 1484326 reverse strand)
agacttgtcctctgttgcttcgagttttcactaaggtacgtcctgcgtcatgtctttatgcattaccacgggttcatctcccaaattcatattgcaagtggcatcctgtctttaattggactcatcggccaagtggttcattttcttttcctatgttcagcaatgctttttcctgcccaacaactcttgctttgcattcagcattcaatatttccatatcttttacaatgctttgaaagaatctggatctgtgtttgattaattagttcgatgctctaatttgtggtttatttcttctctagttttatcttttgtattttatgtctgatgtctatttattagattttctagctggtttgtatatcattctcaaggtagcataatagcagaaagtttgatgtttgactgctagaggttttgtagtattcaaaggaaacactaagtgtaaatgaaagaggttatgtgttgtgcttgttgctattaatagttcattgtttaaaaaggttcttggctttttataatggcttttcaagtcagccttggtgtgcttgttaaagcagtgagcattcaatggtcattgaattccacattatccatttctagaatctgtggcaccatgatcgattggagcatatgtctatgttcaccttcttgttggccgctagctacagcctatgaaacgaagaccatttttataagttttccttgtacttttaaacattatctgtgaactgaaatcatgtgtttagtgtgaaatatgtaccctatgactcacccattgaaagttctgcagattggggggcaccattctagggaggattttgcagt

SEQ ID NO: 82371 - DNA, 359 bp, Citrus sinensis
  Intron number 1 from transcript orange1.1g000931m (locus o range1.1g000931m.g) derived from phytozome v7.0 (chr-ID sc affold00012; pos 808687 to 809045)
tgtttttggaaaacaagagaaaacggaccgcaaaggttagtttcagtttccggtttcgctttcataatctgttctggtttttgtcaaacaaacttaatctctttggtcactctttatcttcgtaattttcgtaatttttttagtgaaacaagcctcgttttggcaaattttcagtttaaccgttttcattttttgattttttgattttttgcaacaagaaaagcaaaaccgttttttctgcttcctccatttttgtgtgtgcgtgttctttgttatcttattatcaaatttcaataaattagtcctaaatttttacctattctgaatcttaattagggttttgagctcagttttcggca

SEQ ID NO: 82372 - DNA, 566 bp, Citrus sinensis
  Intron number 3 from transcript orange1.1g015221m (locus o range1.1g011010m.g) derived from phytozome v7.0 (chr-ID sc affold00266; pos 167268 to 167833)
gaaggtactcttttgacaatctactggacatattgtctgcttttgagaacttagaaatcgatgaattgtatgtttacttgttgatttagattattgtatgaagatataggaaatgtaacgcatatttatagggttggattgattagaattataggttcttgtctctgacttttctaaagaggaataacaaaattccatactttgaagttcttatttaaattccagctgccaaagagactgtttagtgattttagctgtccaacacattgattggagtggctggaaaatccaagttatgatgaatttctgtgcaaaaatagttgcttaaactaggctggctatctctttgagtgtgggaaaaacatattattggcactgccaataaatattatggacttggaagtttaagtttgatcctcgtttgtgaatccatgtacttggtaatccgaaactgctgatttgggctttgatattcttatcctattatatgtactttgtcaattaaaataatattggggctttaacttacagctacacagagtctgatcctgtgagaattgcagtgg

SEQ ID NO: 82373 - DNA, 730 bp, Citrus sinensis
  Intron number 2 from transcript orange1.1g028452m (locus o range1.1g026429m.g) derived from phytozome v7.0 (chr-ID sc affold00326; pos 176440 to 177169 reverse strand)
gcagttacgttaattacctatctaagcctttggtggtgagggagttctccatctacttcttcttttctaaacattgcattgtactgcacaactgtgttttgtgatgttgtcgataggttgtagcgagcggtggttttttttttttcatttcttccttttgttgctgatgttagaactttgctgtgcactgttgctgatagatatcattttttcttttgcttcattcttgtatttttcataaatatttttgtatacactcattaatgattttcctatccttagtctggttcatgtcttctttggttattgtgtcaaagtcaaaaggctctctggttagttggtctgctaaattactgcttgatggagtacttgtttccatgctatgtaggatataaattctatctttgtatctaatttagaaacaaaatttatgaatggctatttacatgattgttcagtattttgtatccttttattttagttttcatatattttgtctagatcttaacagctgcatttgttgtttttcaatggagtttagtttctctttcccccccaacctgtagtcactggttggaagtgcatggttcctggaggaaacctcgtccaattttctaccagctatttgcttacctgttttctcgtgtattttacacactttcaataagttgaattatgctttcactttatgcattcttcaggtttggaatattcaaccccaccattgttt

SEQ ID NO: 82374 - DNA, 885 bp, Citrus sinensis
  Intron number 1 from transcript orange1.1g030952m (locus o range1.1g027242m.g) derived from phytozome v7.0 (chr-ID sc affold00001; pos 227647 to 228531)
ttcaaaagtttcgaatcttcaaagattctagttatgtaagtacctacgacttgagggaacgacaactttaatttatcacattacattacaaaaattcgagactaaaacgattccgagaagaaaaatcaagataaaatagatggcgtttcatcttcttcttgacaaattaaattggtttccattaagcaacctctgcatttgagaattggcattccgagaagctggctacatattattaaagaaataataataataatattgatgaatgaaatacaacccgtaaagggaaatggttcaaaattgacttgaattttgttttactaacagaatacaccactttgttgttggttgtttatgctattcaagaaagcatgaaactgggttgctttgtgtgtaagcgccccagtttggtactgtaatcattggagtgggtagtccataatcaggcctatgaacggacgccgggactagcatatcagtttcgcatcacaattcaacaacacaaaaagataaattgactttataaagtgattaaatgtcttgcttcctcaaaataatgaccgaaatcattggcatgcgtctaattaatattcttctctactagtatagccttcacctgcagaagctgaaaacttcatctcaattgagaatgcacatgcacattacttgtgttgtcgagtgttgagagcggtgatgctaactgtcataatgttgaatgttctgattcttgatgctcatagatttgaaaaaacaaactattgatgttctatgaaatttcttctcgtcctgaatcttaagtactctgagaaaactattgatgcattcttgataagtggtgtaagtaattgattgtttttcgacatacggatacaggaaaccccgcaa

SEQ ID NO: 82375 - DNA, 548 bp, Citrus sinensis
  Intron number 2 from transcript orange1.1g013314m (locus o range1.1g013314m.g) derived from phytozome v7.0 (chr-ID sc affold00352; pos 3139 to 3686)
ccgacaggtatgcttttattactagttgtagacactaaaaactgtacttggtatatatgaactcttgtttatttaattcactttctgttatttgatttttttattttaaacttccatgtttgaccgatgattttgagaggtttcttcatagtatcgttctcttcatttgtgttttcttcacgtctcctaactcggttttcttagaagcaatgaataatgaaaagatgctctcacaatgcaagatttaaagaaagttcttctgttggttttttggtctattgttcgagtttaaaacactttaaaaaatgtacgattagtatgtggtgtaatgaccatgttgcaagcatggcaagaaaataattagattcaacaagaagcctttggtatgtagcattgcaatcttatgttcaagggatgatgatccaaactatgatcaaatttcattatttaatgtatttactgctgatgttagaaatcttctggttatttatggttttgtaatttcttatgcaggcgtcattacagaaggtctagatcaagggaggctg

SEQ ID NO: 82376 - DNA, 869 bp, Citrus sinensis
  Intron number 1 from transcript orange1.1g033169m (locus o range1.1g033169m.g) derived from phytozome v7.0 (chr-ID sc affold00001; pos 5066437 to 5067305 reverse strand)
atcaccgtcacttctgacagcaacttctctaagaggtactttatttgttttttttatgtgctctttttaatctattatcgtgttgacgtttaaatattaggattttatttagggtttaggaaactagatcgcttaaatggtgatggtgatggtgatatgaactcagatgaatccatgtatgtagataaaccctgctttgtaaatcttgctgttgtaagaagtttttatttgatgctagtggaaccgctggtgattggaaacttgtgtactgaagttaaagtcaaccatatgcttcagtgatggcaactatgtagttaggtgacgattgatgttattttggaattcaacatttctgataagcatcttggttttgttggctttcacattgacactcctcgtactcaagtggttttgtctggacatctgtgttgcaaatgacagttttatttgaggatagttcttttctagccatttcaaggagaccttccattagcattacaatgatgttgtcatttcattaagggttccttttctcgctggtccatccaatctggatagatgtgtgattgactgattgcattgtgatgggccagctgctttatattgtagttagggcatcataacgttattttgaattttcaatgatagttacagtaatggtatagtttctcataattttatttcaatggagattttgaattgtattccttgagaagttgcatttctttttcatcttcacggtgccactccattgtcatgttcaccattcctatattctaatttcaggtatcctatgcccggtaaattttcatttttgtcattaattgttttcaggtatcttaaatatttgaccaagaagtacttgaaga

SEQ ID NO: 82377 - DNA, 860 bp, Citrus sinensis
  Intron number 1 from transcript orange1.1g046757m (locus o range1.1g046757m.g) derived from phytozome v7.0 (chr-ID sc affold00052; pos 85184 to 86043)
attacaggtttgtctgtatgcatctagttttctctttagtttgattccaagaagaaaaggatccaatgtgttttgtctgagtagcaggtaggtggagttaattaattaagtcattaattaaagcgaactcataataatatcacgagttgagtagaaatatgtatgatttgtaggtatgaattggcgtcgattaaatgagcttgagccctcctgtgtcctgtctcctctcctctgtcaatgcaaattactatctagtgcacagtacaagtagtatctggctgaatctcgagtaaaaaatataaagttaagagagaactgttatgtactgttccagatagaacagaggagttagttggggccattgtattgttacgttgtcatcaagtggactggcgtggccccttgtgataacataactactttaattatcacttgtcgcacatgaatgagaggagacatgattttatcaattgtttctttctctgtgaatcctcagcctcaattgtagttttgcctttagatgagctggaataattaagatcatccgatcgaaacctgctgctaggtctcagccatagatagatgccaatgctgctgctgcttctgcttaaggaaccccatacacatattgctttgctcttcattaattaaaagatttaaatgctggttatgttagtaggtaaagcttcacatgacccacaattttttcttctctttcttcttattgctgttgttgtatgtgactgcaacattaatgcatgcgtgccccatctaacaatagggaaaaaaaatgcgtaatgtttgaaaatactgtaaatgaaacaggtacgcagacgggtcagctgcaaaaggcatattcg

SEQ ID NO: 82378 - DNA, 543 bp, Citrus sinensis; identical to SEQ ID NO: 82280
  Intron number 1 from transcript orange1.1g030748m (locus o range1.1g027691m.g) derived from phytozome v7.0 (chr-ID sc affold00001; pos 1508454 to 1508996 reverse strand)

SEQ ID NO: 82379 - DNA, 912 bp, Citrus sinensis
  Intron number 2 from transcript orange1.1g001493m (locus o range1.1g001339m.g) derived from phytozome v7.0 (chr-ID sc affold00111; pos 418013 to 418924)
tctggtgaaagctgtcagagaagctgtgtgttttatttttcttttaactccatgtgccagtatctttggatagtggtttatttgtgtgtcgaaaatcatcttttgtttactttggggaatcgaaaatcatctttcccttttatgtgaacgaaaatgatgcgtgcttgcaactgtctataaactggaagctttgcgagctggattaagtggtcctggtgttgatgaatggcagaaagttgaataaataatatcgcaatgttttttgtttttgtatattgagatggattgatcatcgcaaattgtagacaaattagtagtcttaaattatttagcacgaaggtgaaattatctatgcgtattatatgctacataataagtgatctgtaattttcacatagtgaaatttgaaaaatacattggttattgtagctatctaaatcagtgacagttcttatggaagtcttaaagcacttgcaatagtcatagaacctttcttggacatcttgtgtggttatccgcctgattgatttatgagttttgcttccattttgggttaagagtttgtttcctagtacggatacaaagtttgtgaatgctaatgcatgtaattgccaggcaacaggagtttggctaggtgcaagcagtattttatatgccttgatattgtgacatcaattgctcttttacctaatagaagataatgaaaacttaaggttaattaacatattagtttttccattgttgctctatgtaaggaagaaacatcatcttatctgttttcttaagtttattgtcgtcttgataagttgtactcttcttttgggttgctgagaggatgtccattatgtaaattatcatgcaattaaaaagcagccaccatgcttattatttctctggcttttgtagtactac

SEQ ID NO: 82380 - DNA, 232 bp, Citrus sinensis
  Intron number 3 from transcript orange1.1g014204m (locus o range1.1g014204m.g) derived from phytozome v7.0 (chr-ID sc affold00032; pos 380206 to 380437 reverse strand)
gggcaaagaacttctcagtatcgaggtgtcactaggtattattattttttaagaaatactattttttaagattctcattttcttttcttgttcacattaaacatactgtttttttttttaagtttttaatagattcttatcgttttaatttctttaactatgaagggcatttatttattttgatagttttgagtttagtttgtgtgtatgttgtgaaacttgttaggcatag

SEQ ID NO: 82381 - DNA, 564 bp, Citrus sinensis
  Intron number 1 from transcript orange1.1g023707m (locus o range1.1g023707m.g) derived from phytozome v7.0 (chr-ID sc affold00032; pos 927968 to 928531 reverse strand)
gtcagttttcgacctcctcaagcacccaactcaaggtattcacttgaagttcttttgtttgattgaaaatgaaacgtaaagcaacggaatttatgaatgttttacattttttttaattgaaaatgaaatgataagcaagagaatttatgagagttcttttttttattaaaaatgaaatgaaaagcatgagaatttaagtaaagatggtatatatatatatttttttttgtgatattggtagtgtgaattctgttcgtttgagatgagtttagtgtactgggaagtgttctcatgttgtttatggtatcttttgtgtggttttagctctgtttggtgtttgggaaggttttagaaagtgaaaaggaaaatgggtttgagttctatggtttatgttgtcttttttataagcttgacataattcagctcatagctaagaaaataattgaaaattttgacaaagttagggtcttacttggttaatagttcagtggaacttaaagctaatgcaaaagataatgattcaattttgattggaatttgatgcaggggtggttgcaaatttgg

SEQ ID NO: 82382 - DNA, 876 bp, Citrus sinensis
  Intron number 1 from transcript orange1.1g007296m (locus o range1.1g007296m.g) derived from phytozome v7.0 (chr-ID sc affold00001; pos 2847876 to 2848751 reverse strand)
actccttaccttccatcgccgttgtcggtggccaggtaatgccgacggcttgttttcttgattttgtgttaccatcacatcaattttttcgacagaaatcgcaagtttcgagctatattgggcgactttttgtttgatctgaaacaatgcttaacttgttattggattgcattttccgtgcctaacgccttcttttctggcgcttcaattcgctttgcattctgttgcactggcattagttgcagaagatcttgtcttgttctctattatatttcattttcataattttgatttgctatcaattatcgatctttgttctcttttctctgcaaatattttgggattttgttaataaccgatgttgacaaataagtacactctatgtacaaatttaaatgtttgcttaaacgatacaagagataatggctaattgtagggtagttcatttactgtgaatgcattctatgataatttctagtacccgatccttcttgaggaagaatttaataaccaatgttgacagataagcacactgcatatgcaaatttaaatgtttgcttaaattagttcatatattattcttgactattctttgttatacaatagttaatggctaatttgtagggtagttggttgtagcacaaaaggatactttgaacttgtgtagctggatgtatgatgctaactaatatatagcttcttctcacaaaaagaaataaatagatcaataaactaatatataagttcatctactatgaatgcattctatgataaatgctattatctcatccttcttgaggaaggatctaatgaatcttcataattcttttatgatttatagagctctggaaagtcttcagtgttggaaagtgttgt

SEQ ID NO: 82383 - DNA, 779 bp, Citrus sinensis
  Intron number 1 from transcript orange1.1g020645m (locus o range1.1g020645m.g) derived from phytozome v7.0 (chr-ID sc affold00001; pos 2053236 to 2054014 reverse strand)
aggtatgtggattgctgtttttcccccgaaaaaaataaagtaattagtcggctcagtaaattttattgcagtgccatagaagaagtgggttttactctgttttactattattggttaatatgtttctaaaagccgtatgcatgcgaattataaaagcgtaattcaaaatattattttattggactggaaattaaaaccatgcttcaaccatgagtaattgctgatagattgtggactattagaaatttttcctttagatttgtgtttgtactatcctgctttctttgtggagcctacatcttcttgacgtgtttcttgagaatgtcacccgaactcttcacttgtagaaccacatagagttgtctcggattcaagaagtatacgtttttccaattattaggtcaggaactgaagaagcaaacctaactagccttttctatgaataagatcggaaccttgctcttgtgtttcttctttagttttgttgtcttaactagatctgaagtctgatccatctgggttatatcagaaattaaacttgaagctctgcccacacggtttacctccttccatgtagtttgcaagtcaggtggtatatctggttgaaaattggataggatttgcattttcttttcctgtcttctagaaactttgtgagatggaaggtctctgtattataaattgatactgatgttcttttttgcttttcttttcctgttattattatggtcatcatatttgcagaaagggagcaggttgttgggtcccatatctcgtct

SEQ ID NO: 82384 - DNA, 564 bp, Citrus sinensis
  Intron number 2 from transcript orange1.1g035076m (locus o range1.1g034179m.g) derived from phytozome v7.0 (chr-ID sc affold00699; pos 78665 to 79228)
aatcttgagggctttgagttggaatactctggcaggttagaagttgtgtcaattaattatctataaaatatatgttacattgtatgactatatagtgattcattttgggatacgaggacatcgcaaagagctaaaaatttcaaacaggtttcttccctagatttggtgaaaaggtgatggatagattactgctaatcttcatagcaattttcagctgtaaacatctagaaggctgggactaaatgccatttgattaggttagaataatatgagatgagctttcaatctatatcattcattcaattgctttttcagatgtccacaattcatcatgttgataatatcctgttggtgcctagtaaatttcctttatgactatgatataaggtgttatggaagagttgaaaacatctgatataaatgagtagctagaataggttctggatgataaaaaataaaaaaaaaattatgcctgtttctcttctttttcatcagttgattgtagaccattaattacctatgtccttttttgtttcggctttgctttgcagtaatagtgcccag

SEQ ID NO: 82385 - DNA, 792 bp, Citrus sinensis
  Intron number 1 from transcript orange1.1g041063m (locus o range1.1g041063m.g) derived from phytozome v7.0 (chr-ID sc affold00020; pos 646118 to 646909)
tccttggcattctcgagttgcttaaagttcacagggtatttattcttcttcaaccttccctgttaacttattgaaagatgatttcttctttattgactacatggatttggtgtttctttatctatctatctttctatctgtttgatggtgttagatttgtaagtcaatgtttcatatgtcagtaatgattgtaagctacagctgctgatgagattgatttctgttgaaattaacttatgcaatgaggttggttccaagatgagtgttttgcgtggaagagactaactgtttgatggtgattctatgcatacctactacattttgatatataaaaatttacttttgtcttcacaggtctacttttctctcaattttaaattattttagcatcttttgctgagttaggattgcataaatattggccattaattgatataatatttgattcagttttgcggttgcatatattgcaaaatgcaaatccgtaatgctctatcacatcccatgtgtgattgcatcatctcatagcttattttggaaatttgttttagaatttcccaccggaatttgtgatctggtggtacttctcttctttttgaaggttggaggtttgggtcctaatgtaataggatctttggaatgtgtaattatccgatcttacttattagaagataaattatgatttttaaatgaagctttgttttgctttttctcatcttggaattactgtatgatttttctgaggactttgcttctatgtcatttggcagcgtgttttgtacgttgatattg

SEQ ID NO: 82386 - DNA, 977 bp, Citrus sinensis
  Intron number 2 from transcript orange1.1g027426m (locus o range1.1g027426m.g) derived from phytozome v7.0 (chr-ID sc affold00001; pos 1243699 to 1244675 reverse strand)
atcctcactcgcgattactccaaaatctgtaaactgtaagcgcgccttcatcagtatctctttcgttcgttttattaatttcatcttgttttcgtgtcttatatgcattcagtcttattagtgattaaggtcgagtttgctaaaattttgcttcgagcttcagttattagggttttaccgatgcctgccttggcccagtttttaggattatatatgcaaaagatgtgggaaattattgaaatctgcatttttgataattatatagtcaatttcatcaaagaatcatatagtggataaataactcagaggcacattatctcaggcatatgattcttaatttgtgaggtagttttagattcaatatattgagctatgagatggactgcattctataaattcaaatattataggctgtgagtttagagggtatggcttctggcagatgttggatgtctgttccacgtttgaagtaatccagcagtttgatgacctggtgaagaattgatgtgttcactttgacttgtgttttggcttatagactaattgcaatgtggagtttccataattccttggcttgtattatgagtagactattggataccgatcctaggcttttaggtatgagaggaaaactgcaattgaacaacattttgattttctaggaagccaaagcacaagtcaaagcagacaaatcaattcttccctaggtcatcaaactgctagttgcttcaaaactcatatgggagctaaaagaaggaaatttatttatttcatgtattcaacctttattttgcttataatgtttggctctcgtgctgcactgtgtttgttgacttagggttggcatcccttattcttttgtttctcatgttgttggaaactttacggttggcgagaggttgttggcaaaacattttcatctaagtctgaataatgggttctttcttttatattttaacctcttgcagggcagacaa

SEQ ID NO: 82387 - DNA, 827 bp, Citrus sinensis
  Intron number 3 from transcript orange1.1g007509m (locus o range1.1g007413m.g) derived from phytozome v7.0 (chr-ID sc affold00187; pos 159936 to 160762)
aaggccattactgaatccaccgtcactgaagtgaggtgtgtctcatttattcgtctttttctttttggtttatgctttatttcattctcattgtaatcggcttcaacagaatcaaatgctactaatcgtatgtttataagttataaatgctatgcctctgcttaaatttgaaacgacagcagttatagtgtttgccacaaacattcatatttactcgccagataatattaacctatcatccgtcgatcatacttgatagttagcgtttccaatctcaatcccaagcatatccaaagaatgtttgttggcaatttggttgctttgatgtgtaagacataaccaaaggttgggattacataatttggttgagattggttgctctctttacttatcttgatatatgaatcggattaagtcttaaaaagataatcgtcactaaagggtcttttgttgaaatttaagtttttcctttaatttctttagacatgcaaacttgatttctttacttgtgaaacttgagatatgaatgggattaagtcaaataaaatattatcataattaatgggacgtttgttgaagttcaagtttatatttcttttcctttaattttatgaaactagcaaacttaaattaatggagcatggtgttgcttgttttattgattaaatagaaccttgttttgtggcttataatttataaaagaacatctactggagtttgaaagagagaaaaacttcaacttatttgtagtctgtttatgtttaacatttagtgttatttgattcaaattaggtttcttcatctggttctttatacggcagagagag

SEQ ID NO: 82388 - DNA, 902 bp, Citrus sinensis
  Intron number 2 from transcript orange1.1g041066m (locus o range1.1g041066m.g) derived from phytozome v7.0 (chr-ID sc affold00614; pos 911 to 1812)
ctcctacgacaaacaagtacgtatgcttgaccacgtggttattattcccagtgtccaagtactaactagaaccaggtttagcaacaaaccattgcttcatcatttatcatggcagaaaagtttgtcaaatatcagtagtctagaacaaaactccaatagtttcactcttaagttatcttaatcatcttctaacacagtgcttaatagtaaatgtccactaaaacacaacgaaaccaaacaatggtctgggtttctctttgaaggagtaaatggtgcaatggctgcagtagcattgtttcaacaaagcataacttgcaccctttttgagctgggaaactttgatcggctctaggtcatatactcatataaatgcttattggaatataaatcaccatgatcactaggtctaggataccatcaaaagttcaaaacttattttgattatttcagaacctgaagatatattactcttgagttttcaaataagtatgttgggaactggtaacattttcaataagcaatgtataacagcaagaaaatcagactaatggactgcatcaaattgtcaacaccctattacaaggacagaactatgtagccatgattcatgaattattctagttttgttttcagaaaaataagcaatcttcaattcactagacttctttgcttgactaagaagtgtcgacatttgatcataattgtcaagacttcttcatcaggtaacacatccgaggaaagatctgaatggtggttcccttacagcattatgttcttttcttttctataggaatcctgtccgaaaatcattttgatattatatatgttgttcaatgttatttcataacatttaaccattgcctatagtccaatatttgcagagatagttcctgagagatctc

SEQ ID NO: 82389 - DNA, 221 bp, Citrus sinensis
  Intron number 2 from transcript orange1.1g016337m (locus o range1.1g016181m.g) derived from phytozome v7.0 (chr-ID sc affold00093; pos 348200 to 348420 reverse strand)
ataaagaatccgtaggttgcaaggttaagatatatatatctgatgctttttctaattaacgtcctgcactttattaaattggcaggaatacttactgaagaatttctacgtatagtgtataactttgatagtttattattacgattagtaattatcttttgcatatgttttttaatttgtttttcttaagttaatgcaggcgctctgcgtggtttactttc

SEQ ID NO: 82390 - DNA, 741 bp, Citrus sinensis
  Intron number 3 from transcript orange1.1g048432m (locus o range1.1g048432m.g) derived from phytozome v7.0 (chr-ID sc affold01062; pos 17371 to 18111)
cctaacaaaagcttggacttctttcttttcggttagttattgcatctgttaatttatttttcttacatattcctctcttcaaattttatattcaaattttatgcatacatttgtttgaactactatttaatataaaattatatatcaaaaatttatttaaactagaatttagtccatgttacttatccaaattttattcattaatttatttaaaatagcatttagcatttaatttaagattaaatatcaaaattattcaatttttaatttatattgaaattgaatatctaaaagaatatttaataattaacaatataactttaagaaataatcatactttttaaatagtttttttaacttccttaaattgaatttaatatgatcctgtccaacactaaaccaaatacaagacattactataaaataatttagtctaattcaatccaattcaatcttaataactagtccaatccaatcctttattttgcaacaaacctaacctaaaagaatatttagtattttctatttcatttagctatttttaagtttaatgattaacatcatcgaattatcagatttttaaaaaaaaattaagttgctagatcaatttacatcaaattatgtggtctacatttttttgttttcatgcataatgacatttagtctttttgttgtaaattagatccaaccaagtgaatgttattagattgggtaacacgtgttcggattattgaagggata

SEQ ID NO: 82391 - DNA, 928 bp, Citrus sinensis
  Intron number 1 from transcript orange1.1g021500m (locus o range1.1g021500m.g) derived from phytozome v7.0 (chr-ID sc affold00250; pos 124448 to 125375)
attgattcttgaagatatctttttgtggtaagttttttttttgaattaatcagaaaaattcattcttgcatacacgtatacataattacgtatttagtacagaaaatgatggaggagtaagtgcttggcatggaatatgacatcttgatttgtcatctaatgccggctgttggtgtttgtggagattattatttaaacctctcatattgatttttaactctgccatagtcatattcagaaataagcagattcattttgtagactttttgcttatttctgcattgttactggtatgcttctgaataaattgaattagttatctcacatatttatcaaactgtttcgctgttgatctttttatttttggttttaattgatttttcgaatgggtatgtaaagttgtagtttgggtagtgaccatttgttcagctttggcagtattcatgtgttacttgtttttattttattttttcttttgtgggcttgaacagttggatttttggaattttctatagttcttggccatcttcttatcccccctttatcgtttgtctcttcccttttttaggttacgtaatcactgcttgtttcttatttcaattgcaatcggattcattatttcctctatagttcctattcttctgctcgagactttttggtcttcatcttcttttctttattcactctcgctggggatttatttggcctgaattttatttctattgtttctatttttaatatctattccgctcttcacatcagtagactatctggattgcatcactttcaatagaaattgacacaccagttctcttacgtgttgatcaattggacttccccggtctttttttttttggttttcaaatgttcaaatcatattgtatgaattggcatgaactcactttgttaacacggctgcagggtcttt

SEQ ID NO: 82392 - DNA, 996 bp, Citrus sinensis
  Intron number 2 from transcript orange1.1g021500m (locus o range1.1g021500m.g) derived from phytozome v7.0 (chr-ID sc affold00250; pos 126127 to 127122)
cccaaaaagatactccttctgagctgcctttgcaggtacttgttagtttatcttgaaatttaatggaaactcttttatgcatagatgtctgacttctctctgttcaaacattagtttcacccttgcttaatcgcactgatgtttgttatatcccaaactctttcctggcttgtgacacttttagcaagtatgagattttcaaccagctaaactaatcttgtcacgggttccataaagaaagttggttcagtcacatgtttttagaccatgaaataatgcaagactgccttctagttttctttgacaatgtttgagtgacttcttattttagtacgtactgatgatcaattgtgtgaactttatgcacagctgtttacttatgtggtagataagtatctactcattaaatgagttggaaaacacacaaatacttccttgagtttaatcttttttcaagggttgttgagctttcttttggattggatatattctgctctaatgtgttatctagtttcttatgggtgccttctaagacctcatgattgtatgctgctagagaattctagattcatatatcaaacacatgaccgacttgcatcgttgtagcaagtttctgtatgtatgtggaggatccaattgatcctcttctcttcttttttaaacttgctatcttgttgaacccatcctcttactgttcatgaactgaattgccgcaatgtatatttctattcatacgtgtaaattttaactttggagaattgtcgactttccaaatcatgcatgtaatttagactttattctggtgttcttaatactttatgtttggtatatcttatagaactgccaatggtcaagaatctgttttactttccagttgagtaatctgtttgtgttgatactcaatttgcattcttgttttgctccaatagttctgcttttcatatttttcacaactttgcaggtattagatttttcagatcacaaaccggaaagtga

SEQ ID NO: 82393 - DNA, 815 bp, Citrus sinensis
  Intron number 1 from transcript orange1.1g023491m (locus o range1.1g023491m.g) derived from phytozome v7.0 (chr-ID sc affold00052; pos 580436 to 581250)
ccgcctgttatttgaagctccacgatttcaaaaaggttcatcttctcgtctctttcgatgctaatttgaagatattttgttttccgctatcagtattattctttttactatttcatttgaaatttagagtggaaaatttttgaatttgaactcagattaatgtgaattatttgaatacatataaaatgtgaatttgttttgacgatatggatttttagatacaaatttgaagatagtttaaattgttaatttacatttttatgttggattttactgaaatgttttcgttgaaaacataacgcgaattcaatgaaatagtgcatataatttatgctggagggagatatgggaagtgaatgttgagaaatgtaatattttaaaaccagagaattaattaaaaatgaaaacaaaaaacaagtcagtctgattgtgaaagagtttatcgatactaaacatgtgggtttagctagtgagcttcaccttgcctccatgtggtttcgaaagagctgctcggtgctaaagtattatgaaccgtggaactcattgtgtatatgagcattccgagctccatctattatggtttattatttcgcaaggcactaaagagtttggtgtaactaatgaaatgacagtgtggtaaacatgaatttggattacaccgggaagctggttaagtgtatttttacttgtggttgtagttttagaatgtagttgcttttacaccttttcttccaaaattgatttgtccagtgtcaattgaaactgttacctgcatctcaggcggcagaagagtgtacctcggtgcttgagcttga

SEQ ID NO: 82394 - DNA, 448 bp, Citrus sinensis
  Intron number 1 from transcript orange1.1g016156m (locus o range1.1g012041m.g) derived from phytozome v7.0 (chr-ID sc affold00030; pos 341702 to 342149)
attctgggtcccaagctcgtcggagttgatatcaggtgaggtcatattcggtttggttttcaaatttgtgggcgtctttgacgaattttgaaactattgggtatccgtcttattgttacttgaaaatttaggggtggtagtgcatttatcgtaagtagctatttctagcaatcaaacttgatgaagaatgtatccttttgttcttgcagcagcatagttgatgttatgcaattaggagtcctttttgaagaatttaaaactattgtggtctgtctagttgaaactttaggaggtgctatctgtttctagtgatcaaacacgaagataaatgaatccttttgttattttgcagcatcgttgttatgagtatgaggagagttttctgcttcttggttgtatgattctgatattatttgtatctgtttattaagagatcaagctgaggtgg

SEQ ID NO: 82395 - DNA, 362 bp, Citrus sinensis
  Intron number 1 from transcript orange1.1g030277m (locus o range1.1g029329m.g) derived from phytozome v7.0 (chr-ID sc affold12454; pos 1433 to 1794 reverse strand)
ttcctaaagtgttctgtgctggagctgatttgaaggtactgttattaataatttttttgatttatttgtttttgctgagcaaatagaatcgaagcaacttgtgtcttaattaggatgctttaacaataggtcaaaggaaaaatggagtttagttgtgataattggaatttgcagtgtagacaagtctttattctgtcaacaattagttgttgagtggcagctcaaggctcgtgatctggtcattataattttttttttaatttcatatttttgtcttcgcttaaggattgtatgaatattatggctgacatacacatgcttaactgttgttgccttggtgggatttgcaggaacgcaggcaa

SEQ ID NO: 82396 - DNA, 489 bp, Citrus sinensis
  Intron number 3 from transcript orange1.1g022777m (locus o range1.1g022777m.g) derived from phytozome v7.0 (chr-ID sc affold00008; pos 2296789 to 2297277)
gaattgtgagtcagatttgacttatcttgtgcttaacattgagtagaatgttgtgtaaccatgctttagcaaatggtctttcttgtctcttgtttattgttaagagaacaatgttgtgaattttagtgtaaatacagctgttctgtagtatttgatttacattgatgttctacatccttcttttttttaaacgtaattttggtttggaatagagaaaaaaaaaatgtaatagctacttaattctatcaataaggtctcagaaatgtatggctacctttatttgagtaatctcaggaattgacaagcccaagttccactgggatctgctggaatctgtttcatcttgagcaatttagtgtttcccttttcaatcatttcctggtcactgccatttgccttgagtctgtgtgtgagtgtttggagtggatgaggcatctctcttagtttcccgactgctgaggctgatacatgctattctcttttgcagac

SEQ ID NO: 82397 - DNA, 855 bp, Citrus sinensis
  Intron number 1 from transcript orange1.1g030262m (locus o range1.1g027810m.g) derived from phytozome v7.0 (chr-ID sc affold00021; pos 975135 to 975989)
ttacggtcgataattttcatctcatcacgatacgggtcagtcccataatttatcctctaatctctgtttattttacttttcagcattcagtaaattacatatttatttgaaagtaatttatattgaagagtgaacccaaaaaaaaaaaaaaaattctcctttggcttacagatagtatatgacgcataaaatacatggaacaaaagtcaattttggtttttgaaacggctgggtttagatttattggatttggttacattattagataattttattaaattggttataacaaattgaaagttttgtaatctgaaatacattcatgcatgtaaatttttgtttctttgttaaaatttcttgattatttgatcataaattacaattgagctgaaattcagcttaataagttaaggcttggaacttgaactggggccccctttcttacagattgtgtctgagggatgagtttaatccaatttgttcccttttcttacaaactatgtcatagggatgagttctatccaatgtgttcgtaacaatttgcaaacaccccatcggaaagacctttgttatggatagaggggtggattgtaacaaccctaattgtacggcaagttaaggctcggcaagtgagcttataaacacttggttaacagtcacccaggctataatagagaggagtttagtgttcgggatttagggtgacatttcataactatttccaagttgatagtagtaatggttgggcatttatttattttgtagtgcatagtgttgtgtgtaatgagcgagggcctttgtgactaatggttggcctttttgggtctttagtagggttttaagcgttgataagtt

SEQ ID NO: 82398 - DNA, 407 bp, Citrus sinensis
  Intron number 1 from transcript orange1.1g016216m (locus o range1.1g012806m.g) derived from phytozome v7.0 (chr-ID sc affold00020; pos 1209340 to 1209746 reverse strand)
cccttctgcttctccttctctgcttcgctctcttggtattttttttcttttttttttttaaatatttacttcttagtttatgttattattttttaattttattttttcttcatgttttgattgtttggtatgtgtttatatggcttttgaaagtccatcacgataagttttttatttatgtaccctttgtttccgttcattggctgagaaatttgcgggaaaattattagaatttttttcttaatcttgtttttgttgatataaagtctgctttgagtctaccgtaataatcatataactataaaagtaatattaattttcatccttaaaattttattctgaaactcactgtttatacaatatgatatttaggtagggagtctagcagggcaagaggcatcagcagg

SEQ ID NO: 82399 - DNA, 796 bp, Citrus sinensis
  Intron number 2 from transcript orange1.1g020274m (locus o range1.1g020274m.g) derived from phytozome v7.0 (chr-ID sc affold00015; pos 587332 to 588127 reverse strand)
aagaggatctgctgaaaggtacttggtatccgattatattcttattatagttttgatggctcttgtagtttttggatttcttttgtttaattagtttagttaagtatgtgattgggattgctgtatattcatttgtgattttgctcacaattatataaagggatttgttaacatatgaagatcattcattttcctcatgttatgggataatacagatggtacttccaatgtaattacaaaagtaagtcattaattccaaatttgtctccctaaaatatacagtggtaagaaaattgtgtttctctactgttgcttttcatgtggcggtcaattgtattttactttgctgcccaatctttgattagtaatgttgaactatggttacaccttcagttgtttttgttttgtatcatcctagtcctattttctcaacctgcactggtttcaggtaaataagtcttcaatattcttacagctgggaggaagaggagatgaggaaagttggtgttgaattagattagttagtgtttcctagcaaatgaaatgatgaactacaacacgaagcacataagtcattctgtagatttcatctctgctatttatgcatacacttgtatagttgtattgagacaattagtatttccttaatacactcagaagacatccttgactttcttctatgagcacagatgatcttgttttctctttgcttttttggaattggcaaattgctaaatatgagtgttctttaatgattgcagaggttgagcagcttttggagccagaggagagagaa

SEQ ID NO: 82400 - DNA, 612 bp, Citrus sinensis
  Intron number 2 from transcript orange1.1g008805m (locus o range1.1g008805m.g) derived from phytozome v7.0 (chr-ID sc affold00030; pos 114579 to 115190 reverse strand)
ttggggcgtaaacactgcttacaaaacttacaaaggtacaaatagttcatttaaatttgattggaaaaattgaggtgttgcggcttttaattcacagacaacttacagtataatggaatcacttagctttcaagtacaattgagtgtttacgaaacgcttttcactgtcgtgctttaaaaattatgtagaagagcagctgttaaccaacttaacctatgttgttcgagcgcaaggttctcctaaaagctgtttgtttgtgtcatcttacgtaatattatgtactgctagtgtggttgaagatagtaactttattggaccatgtaatttaatccagaagaacattttgacaataggagatgtagggaggacataatgcgggtgttaaggaattgatgaaaggatccatagaactttaacggttggcttaggctggcattgctgacttgtttaatattgtgtagcaatctgaagtgttcaatgcagtttgtcttttttttttcccttttttattttttaaaagatgtggtgaagaaatgaatcatgccttaactaagaatctacaaattccttttctcttgttgattgtaggagtagaagtggagcccaaacac

SEQ ID NO: 82401 - DNA, 587 bp, Citrus sinensis
  Intron number 1 from transcript orange1.1g014081m (locus o range1.1g014044m.g) derived from phytozome v7.0 (chr-ID sc affold00030; pos 76738 to 77324)
ccgatttcgcggcttccatctcgtcggtcatcgtaattggtaactgtaacttcagctctccaattggatatcataattttatatctgatcgatatatggatgccaagttttcataagcttcaaaatccatggttctagccttcttagttctatcattcaatttatttttctttgcatatttgttgctgttactaaaatcatcatgtagatcctatttcccttttaaatcttctgcgatgaaatgttgctttcatgttttgatcccaattccattctacttgatgaagttgaagtctggacaaaagaacttgcctttccaggaaagcaaatgaatatataaaatggtattagaaaacttaataatggtggatatgtgggggtttgaattatctcgacttactttagaaacaagtaggtgatgtaagaataaaataggcttgaaaacctcatattttggacattcacttggcaaggttggattgaagatttgcattcatttttttgtgtgcttgaagctgatctgggtattattgtatttttgtatttctatagtattaaaacccaacccgaaattacaattcaaaccg

SEQ ID NO: 82402 - DNA, 1044 bp, Citrus sinensis
  Intron number 5 from transcript orange1.1g014081m (locus o range1.1g014044m.g) derived from phytozome v7.0 (chr-ID sc affold00030; pos 78337 to 79380)
tcaattcctaccagttgagtccttttatcacgaaagtgggtcatctttttgtcttctaagttttttgtattttagtaatttagtgtggaatttactgcagttcacattgatcagactctagtactaggcttgtttcaatttgtgttgatgtgtgatttgagtctaagtaaattttgttgggggcctatattagagggttttatgagcatggcaatgcttcttctgttgtttccaatatcaacattcatctaagcaaatactatgtccagttgactatcacaagatgtggccattgaaaagggctggatgctttattttggaaagagttcttgacaaaaaattaggatgtacacaataactatattgagtaaaatctcacaattttcgatcttttaatgttttagtatagccttgagattgtttattctccattttattctccttacccttgtattttctctttttttcccgaaagttttgtattttctatcattgtggatataatgataattccttttgattggccatttgcaaacatcttttttcttgcttattcttttgaataagtgtagattgttttattctatcaatgtgtattgcaaaatgtcataacatatgtgctgttacaattagttgtagccttctgcactttctatttgtaacttttttttcccatgaagtttatttggattgtgtatctgatgaatgtataaatttgcaatgagttttcactggtttgcttcttttctggatgttatcatgattgtgattttagctgttatgtaatattacattaagatgtgcaattacttggaactcggtatttgttaagattgcctgaagtaatttttaaagtgaattaaggtattaaaggtactgttattgaatgaaatttaaaaattgttggccaagaatacttatattcattttataacattgttgactttaattctttgaaattatcatgtgcaattattttttaatttttgaagatcattggagtgtcatttacatttgactttaaataattttaggtgtgtaaaa

SEQ ID NO: 82403 - DNA, 176 bp, Citrus sinensis
  Intron number 1 from transcript orange1.1g016457m (locus o range1.1g016457m.g) derived from phytozome v7.0 (chr-ID sc affold00001; pos 5209704 to 5209879)
tttttgaaatcgttcctaagtactgcttctcactttccttgtcttcttgtcaaagatcgattcttataccaaaaaaacaaaaaacaaaaaacaaaaaacaaaattgatttttttcacaaactttcatttctcaattgcttggaatttgatgtctattattgattcgtggtcaagga

SEQ ID NO: 82404 - DNA, 957 bp, Citrus sinensis
  Intron number 4 from transcript orange1.1g016457m (locus o range1.1g016457m.g) derived from phytozome v7.0 (chr-ID sc affold00001; pos 5210480 to 5211436)
tcacccaggtttcgttatgatgcccatccaacatttatttatttattttattttcatgtttatctatgtttaactttggccaaatcatatacttaaaattataaaagttattcatgtgacaacaccttgaagttttagtggattgagatgaggctgcaaatcacgtacagatgtaattaaatattggattataagttgaggtattcgcgagtaattttatgatgagggaattccttattttaataaagtaatgggtaagctaaaaggagggggaaaaaaacacacacacacactccaacgctatgtattttatttgtgtactgaaatctatgttttttcacagttttaaagtcgagaacaagctaaaagataaaaaaagaaacataaatttcaatacactacatgacaaaatatatcacattgtagtctgtatttttttttgtcttttagcttatctttggttttaatatggtaaagaacccctaattaaataatctatatatatataatactacattttaactttaaatgtttaccatcagatttagtggatccaaaattaagtcaactttttaactcaaaattttaagctaggggaaacctacgcatatatatacatgttctttcaaatgtactttatacttaactctagaagatgagtgcagcttagaaatgcagtagctttctgtgtgcaaatgaaacaaagcaatggtcatgttcttttatggtgaacaagttggtatcacatacccaagctttaagccagtgaatactgttggattttttattcagtgatgttcttaaagttttatgctgtctgtttatgaattgatatcacagcagaaatttattgcttcctttgcgtattcattatagaagcgtttttttctccttattttaataatgtcatgatttattacaggttcactttgtgcctaacaatcaaaataaggttgt

SEQ ID NO: 82405 - DNA, 588 bp, Citrus sinensis
  Intron number 1 from transcript orange1.1g047712m (locus o range1.1g047712m.g) derived from phytozome v7.0 (chr-ID sc affold00103; pos 81392 to 81979 reverse strand)
gctcccttccacttccactttttatcgcaagcgaggtcttctttctcaatctatagagctttttattatttaagaagcgcttttttgtgatgctaaaagcactttcaagtgcagtcttcataatgcaatgatacgaacggatattgtggaaaatattattaaaaacagtagagaaccttaaaaaataatattttaggttactgcttttagaagcaaagatttattatcttagatactgaccaagaattgaatttggcttgttgtttgaaagaatgaaagtacttttgattaatttggaaagtttgagaattactttgcataaattatctttggaaattgaatggtaatagattcatgggttgaatttcatgagcttggttgagtgtttaagttatatggtttgtaagtttatttattgagaagaaaactgtcaagctaataagtgcagaagaatagatgtcgaactgagtgtgctctttggtcattctgtgtcttttattctttatatagttttaaaatatttggtgctttgtgtcactgcattgtgattctctgatattcttcggtttgcagtgactaaagacttaa

SEQ ID NO: 82406 - DNA, 467 bp, Citrus sinensis
  Intron number 2 from transcript orange1.1g019175m (locus o range1.1g019175m.g) derived from phytozome v7.0 (chr-ID sc affold00020; pos 752039 to 752505 reverse strand)
aactcgtcaaagtattagcaggtaccgctttgctaatgctaaattgagttactatgatatttgtgttgcttgatgtcaccaaaatacacaagtaagatgtggataactatttaacgagtatcaaaattgatatacatatacatatatataaatagtgagtgttagagcatttaatttatagcatcacattaaaattcaaaagaagattttgtgcttttgttaagtttgttttttctttcgcaatttgatgattgtaggtgaaatatgtttgtttaaacatatttcattgcctaaagaagtgtatttattttttcattttatatgcattgacatttttaagttgtgctatgatggcattgatttaagtagttcctatacatttagatggaaactataaaaatgaaacttgaagtttgtgtcctttcttctttttctatatagtgaagacacgtaaagaggccaagcaa

SEQ ID NO: 82407 - DNA, 555 bp, Citrus sinensis
  Intron number 2 from transcript orange1.1g028942m (locus o range1.1g028942m.g) derived from phytozome v7.0 (chr-ID sc affold00122; pos 202886 to 203440 reverse strand)
tggagatcagtaaattaatcaacatacagcgcctggtgagcttagcatttcacatcagtatacatttaatggctcctttccggagacataatttaaaagaactgctaaggaagttatttaaccatatttaagaagtttcaaagcttcgtatttcctttttctgtttgttgaacagggatgaaatgctaacattgccgccaaacgctgattgtaatggaattagtactccgttttaaccaagtcaaatatatatatatatacacacacgcatgcatattttattcgctttgactttggatggacaacagatttaggtttatcttcaaaatcgattttatgttatttgcagttcttctagtagaagcattgcttttggagatcaagagaagcttatctattatatagccattttgacatatgagttacgacattataatctgtgtatacatattagtgttaattttagtaatgtattcattgaatagtggttttttaattcatgttaggggaacctggctaaagtatccattttttcccctgtttttaaggtgttag

SEQ ID NO: 82408 - DNA, 810 bp, Citrus sinensis
  Intron number 1 from transcript orange1.1g011100m (locus o range1.1g011100m.g) derived from phytozome v7.0 (chr-ID sc affold00052; pos 292020 to 292829)
accctgatatccctcctgtgttttctagaactaaggtacgtggatttctgcaatgcacaatattatgatttaagccatttcagcatattatagtgatctttgttgactggcaatgtgattcaaatgagcctgttgacgttgttaacgtgagcaagctagaaattttgcttaggtgaatagaatgtaatgtggaggtattaaaaaaaataattccagcagatggcaacttgtttttttctgcataagctccttgaattttagcatctttatatttggattctgcttggtctagtagctagtcttgataagccattgcaatcttattcgtcctgaattttggtgttcacttggttactgccatttttatgaaaataactttttgcatcaaaattgatttgtcttgctcaaaattgctggaagaaactttgattgtagttgttatgtaatctcatcattctggtggttgtatgacctgcaatcactaagagagtctggaagggtttacagaaatttaggaaatggagttaacaagtacagtagtagttctatttataatgcattaggtttttacggtttgagctttagtctaaatgtcgaggaataatgcatcaaaacctttactctcctactctcattttgcattgaagaagtatcttaggatttttacctatttgtttatcctttgattactgcttggcctttgtttggtgtgttcacttggaatagagcatcgcatgtttctaagggaattattcttcagactcctgaattctttttttctctttttttgtctttagtttttagttttgg

SEQ ID NO: 82409 - DNA, 614 bp, Citrus sinensis
  Intron number 2 from transcript orange1.1g033140m (locus o range1.1g030287m.g) derived from phytozome v7.0 (chr-ID sc affold00001; pos 5421498 to 5422111 reverse strand)
ccatccggaagtatccgaagttttcatacacataggtgtgtttcctggtctctggtctctggtctcatcatctttgtaatagttttggacaatctagaatggagctacttttagttgctattttcactgcagccatgagtttttggattgaataatgcatcagttagtatcttgtttcttgacttttaaaagtaaaatgatttcgaggtttggtgtttgcaccttcaggctctgacaaacattcttttacctcttaatagtaaaccagtggtcattaattatgatggttgaggtcactgcaagcagcatgctattcattgttgctccatatatgagatttattggtgttatcccgtcttgcttaccgccggtagaattcgactttacggatacaattttctattaggatcccatcatcttgattatccttgctcattgtaattgtagtaatgtttcttattatcactattcctgctgtcaagacttcactaatttctttgctttgatttgttctcaacatttttgcctttcatttccaatgtaacatccttttttttttttttttttgaatgccctttgtagatcctgcatattttcaattttctcctagtaca

SEQ ID NO: 82410 - DNA, 396 bp, Citrus sinensis
  Intron number 1 from transcript orange1.1g012356m (locus o range1.1g012356m.g) derived from phytozome v7.0 (chr-ID sc affold00030; pos 952315 to 952710)
tgcaaacttcttctgaattctgaaaaattttcaaagtgagattttcctgtacaaattttaaacttgacctcccactaatatactgtatagtcttctgttttgatatattcggcttttcttgggctgtgaaatgtctagtcttattggattagcattcttgttgttagagacattttttagtttatagtttgttttgtgatttgagttttctctgatggacttttttaatgggcctttttattttattttatttttcataagaaaccgtgaattgtattaaagatgattaacaggccgtactattaccatttaataattattgttaagtctctgtatccaaatgttttagtttgtagatctattttgcttatttgctggttttcaattgatatgtag

SEQ ID NO: 82411 - DNA, 775 bp, Citrus sinensis
  Intron number 1 from transcript orange1.1g009245m (locus o range1.1g009245m.g) derived from phytozome v7.0 (chr-ID sc affold00021; pos 856007 to 856781)
aagtatcacttggtgttcttggtgttatttctcaggtatgtttctcattaatgtattaatttacgcatcaaataattttttaaattttaagtaacttcatattaagagaggattttgatccttcttattgattggcctctcatgaactttttaagattttgtgctacatatttttttattacattttattttattaacaactaatcaacatcatgattttaattactctcacaaaaacttataacaggcctaatcatttactcgagatgtttttagttaccagttttatagttattgagaccaaatattgaataaacattaaaaaatcacatggattataactagtgtataattgtaatgggatcataatataaaatccttaaatttgatgtagaccgtaataaaaaaagaataaatatgatgggactaaatatgatttttttttaaatgatataaacttcagtaagatctctcttcttttcagaaatttattttcacctcagggctccccctgctccttggccccagtttggcaggattaaaattccaagcctcttatgccatccaaattgatctactaatcaaatactgacaccaattatacatatagagtataattctgcaatttgaattacatacaggtatacacactatgtgaaatattgaatgtaagtgatgcagtgttcaagcgacacataagaaataaccaaagtaaagacgaatgagtgtttgtggcataggttacgctcaagttggaaccgctcttcaagaggtc

SEQ ID NO: 82412 - DNA, 541 bp, Citrus sinensis
  Intron number 1 from transcript orange1.1g046535m (locus o range1.1g046535m.g) derived from phytozome v7.0 (chr-ID sc affold00192; pos 230004 to 230544)
tgagtgagcttgacgaaaggtattataattgctagttctcttttgcacttcgtttataaattggtggacgtttttgatttatacaaagtttttgagtttcttcatattgccttatgcagagaaaacaatactacaagtggggaaaaggtagaaaagatgtcttattggcaaaccagttcattggacaactcaccttattatagcaccaggtgcaatatttgaccatagatttggagctttatttctgtatttggtattttcacagtacttcttcaagaaatatcctttatgagttatgtagtttaaaaatatagtatatagttctataaaccacagattgtcaagttcattttgttttatttttattaatggaagaaattattcttaattaattgaataaaatttctatgggcatgcatgaagcacacagaagagaaatttgataatgtgttttctatctttacgaacttttttacatatctaaaatgctcctttttattcttcttacagaatcttcaattcaattcttgcagtgatcaat

SEQ ID NO: 82413 - DNA, 404 bp, Citrus sinensis; identical to SEQ ID NO: 81930
  Intron number 1 from transcript orange1.1g024638m (locus o range1.1g024023m.g) derived from phytozome v7.0 (chr-ID sc affold00001; pos 3719112 to 3719515 reverse strand)

SEQ ID NO: 82414 - DNA, 351 bp, Citrus sinensis
  Intron number 2 from transcript orange1.1g044707m (locus o range1.1g044707m.g) derived from phytozome v7.0 (chr-ID sc affold00001; pos 4866983 to 4867333 reverse strand)
acttacgacccgtgaatatctcaaaattaataaccaagtttcttccaaggcttaatcattcctgttcaataaccatgttttttttttttaattttttccaccccacataattaatagatctctggctttggaaaagcaacatggcttcatcatgaacatgcatcgatctccaataataggtactagtcaaaattggtttaattcaaattgatttttttttcttttttcattatattcacttcgagaaataccatccaatacaacaattttgcacaaatatattttggctgaaaaagaagtttgttttggcttataaggtggcagcttaaggatacattaaatagcgaatca

SEQ ID NO: 82415 - DNA, 841 bp, Citrus sinensis
  Intron number 1 from transcript orange1.1g038668m (locus o range1.1g038668m.g) derived from phytozome v7.0 (chr-ID sc affold00032; pos 201969 to 202809)
ttcaggttttggaaagagagatcggtttgcttcaggtttgctgtttctcaattctgagcctgttaagttgtttaacccttttcactacagttagaattgtagaacttgaagctacattgatatatgtgcaaaagcaaagtttgtttccttttccatatttgtttcttcacttcttctgtataaacaacgatctgatgaactttcatcgcccatctgggaaagagtctaatactggattctaatataattaactaattgattttaagaatggaaactgcaagaatgttcaattaatggactagaacattatatgcatggattgcacgaggactgatgtgcttgattctggatttctttgaatctaattgtaaaatgtggtaatttaccttgcatgtttcctaggctaaatggctccaaactaattcctcattttgccattggatagaggaaacagggcataaaatgaatgttaaatgatgttcctagcctttgaataacttgacacattcagttagtgtttgttgttcatgtcctctatcgtgcatacttcctgttggtgaatgcttacttataatttaaattattaaaaattggttacacatgccatacaccacgcatcatcctcttgtgggtgaaattagtttatgttggaggagtctagaagtggggaagaggctgttctattcctcagctattgttgaattacacattagcttcattttttctgatgttgtattcaccatgctacgatgaacacacactgttatgatagaagataaatacaaatgcatatacttacaaaaagatttgttcaagcaggaagagttgaaatctgttgaag

SEQ ID NO: 82416 - DNA, 317 bp, Citrus sinensis
  Intron number 3 from transcript orange1.1g046369m (locus o range1.1g046369m.g) derived from phytozome v7.0 (chr-ID sc affold00001; pos 743852 to 744168)
tacggcaatcattacagaaaaagtaccatctcaaggtgcttttttatttttcatgttcgctgatacttcgggttcaatcattaaataagaataatttcatatagaaactggagtcggtgcattatttgaaaatagctacgtttttctgctgtgaaattcagtattgtactttatgtctttgtactggtaaattgaagattgtcgctctaggtggggggagtaaatcaaaatttacctttatttgcctcatctatatatccatgtcttctctgttgtttgctgactcactactgtgttacttcttcgcagaacgcacc

SEQ ID NO: 82417 - DNA, 899 bp, Citrus sinensis
  Intron number 2 from transcript orange1.1g034649m (locus o range1.1g034649m.g) derived from phytozome v7.0 (chr-ID sc affold00020; pos 1461834 to 1462732 reverse strand)
ctcgtccgcaatatctgcatcaaccctgaagtcaggtctcccgctaactctatccagaaaattattcattttttattttaataaaatttgtacatggcgatcttaatttctaactggatataattagcggaaaaactgattgtttagactaacgtgaatggagtggattttgaggttagaaatttgggttgtcctatagtaggcttgatttaatctgtcctattagattattgtaggagacaaatcaatgttagagaaagaaaaaatgcagttctggctttcgtgtcaaagaaaaaagtggaaataaatctctttttgaaatctaggaacagtctttatttcttgaaggtatcaccaatatcataacaatataagaaaaaaatgaaacttcaaatttgtttgaaaaaccggtaagcaaaagccggcctaaatgctgtgtttgatgttacaccatggcatctgtgcttttggaagaatgtttatttgagtattaaattggaagaggacttttgtaattttttaagcatgtgaaattttttatcgcacgctatatgatttaagtggttctgtggttgctccttgtctatttgttgacaaaatgattaaaatgttgatgtagagctcacctaacttcagcggacgaattaggcttattataggttttgatattgagctctacggtgctagagaaacacttatttaaggaagacgtggcttggagatttcagtgctagtttttatttgttggagcctgttgtcttatttgcttcatatagaggggagaggagattatatgcattctggtacacagatgtgatgacttttgcttgacttacaatctttcttttggccttgttgaatcagggtgaccaagcaaaacagagctgcaggagttttgg

SEQ ID NO: 82418 - DNA, 975 bp, Citrus sinensis
  Intron number 1 from transcript orange1.1g020686m (locus o range1.1g016353m.g) derived from phytozome v7.0 (chr-ID sc affold00030; pos 978033 to 979007)
ggtataagttcaacctgtaagtgtataactcttttaaccctcttcatcaatgatgattttgcagttatggcttagataagatgtaaaggtttctgggtttgtcaccttattgtggtttggtattgatttgatcttgttatattttgatgaataatttggcctttgtttcttagccattgtttttcttagtgtgtattatattgttgtgtgatggctaattgaccgtttcattgtgtataatttatctttgagttctttgttatgataacgatgtattcttgtttgaggttctttgaaagagcaatcgtgaattttaattgtgtttgtcgctttatatcatattgtttttttagatttgtcttcaattttggacatttattgttggacaaataaagggtccttttgattacaacaaaggctaggacagttggactgaattacttgaccatatgctttctttaattcatcggtagatattgaatgtgccattatggtaagagaatgttgcattctatgatatggtaagagaatgttgcattctatgatatgtatgtgtgtgtgtattaactcttttggttggatgaggaattgcaaacgttcattgtattctgaagcataaagatttattgctaatagaaactaaatgatgtatcagtagtcctatgcaagcacggatgtacccttgcttaaaatcaactgttagtttataactccgaagcaaaaagtttctgtggcgatgccttttgatttcacaggtcaagaagaatagaacttttattaccccattggtagaataattttattaggttgtttcttcattttatatctgattaaaggggtagaattttcatattaggtttctgagctttacatatccatataatttgtttttttggtggatctaagtgattgactcattttaaacaatgacacttggcaggctttatccctcttttatttctatcacttattgct

SEQ ID NO: 82419 - DNA, 759 bp, Citrus sinensis
  Intron number 1 from transcript orange1.1g048613m (locus o range1.1g048613m.g) derived from phytozome v7.0 (chr-ID sc affold00102; pos 98037 to 98795 reverse strand)
aattggtttgcttttgccttacctcaagttgacaggtcaaatctccttctctctcgttgtataaactctctctttcttctatcctaacgaccaccataactcattaatttcaaaataaatgtgtataagccactatacagatcatgtcactatgtaactcacgcccttgagatgttaagggtatgtgttcaaatcttcatataagtttattttagtttatattccaaaaaatgcggattaggatagatttctccatgaatattattgagagttgatttttgagttaaatgtttaacagactttagaccgtaaaagtgtatgtgcgtaaaaattttgtaaatttcaaattactatatctatatatgtagattgtagcatttttaaaaacataaatgtatactttattggatgtctataaagatttataagtgattacacacttacagttacttcgcaacccaaactgtcatactagaaattcatgcataaactcataacgcgcaacagaaataaaagcaggtcagttataatcgctcccacttttaatttgtgacccaaaaaacttcggggcatgtaacaaacaaccgctgtactctaatactcagataaaattttcttgtatcgtattttcttgtatgcatatatgcttgtatttatgaaaatgatcccacgttgacccgatctgacccgatttctaattaactaatggctaaattgaatccaatgcagctgcgcagacacgacccataggtgtttgct

SEQ ID NO: 82420 - DNA, 588 bp, Citrus sinensis
  Intron number 2 from transcript orange1.1g015050m (locus o range1.1g011420m.g) derived from phytozome v7.0 (chr-ID sc affold00283; pos 77381 to 77968 reverse strand)
aatttgagtttggctttagaacaaattgtggtaatactctgatggtttcttactatccctttagttgctgctatgtttgcccacatgactttttgatctgagattacacagtgcctcggtttccatatctgtatttgtatgagtgaccctatttaagaaactttccctatttttggaaaacagggttctggtctgtttactaggtttgcattcagactcaggattaaggaagaattaacttccataaacatgcaagtgcaccccaaacactgctgatccagcacactataagtaattgatgctacttgaattcactcatcgagtgaggaagaatggttgtgttttcactcaagcatctattgtggctataattggttaatatggacaatattatttaagcatttggagtttttgaaattactgtgcaatgagtttgcaattaatgtgatcatgctttttctttgctggctataagtaacctgcagatgttcacaaatttcacaaatttggttagcctttgaatccttatgtgggtaaccactaatcagagttgagtactcaaaaacatttgaatcttatgtgcagcag

SEQ ID NO: 82421 - DNA, 996 bp, Citrus sinensis
  Intron number 3 from transcript orange1.1g046522m (locus o range1.1g046522m.g) derived from phytozome v7.0 (chr-ID sc affold00008; pos 794569 to 795564)
aactagaagctgggctgctcgctggttgcgaattggtatgttctatggtctattgtaatgctcgtgcttttactttaattacttgttgttctttgttaacacaaatagaaaaaaattgttcgtggaaactggttattcaagtagaagctgttattttgtaccgtccattgttatactcatgaagttactaaacattagtgggattcatctggttatatggcctcttgactatattgttctttcggaagtatatagaacggagtatagattattatagtggtgaatgatgataacaccaagtgaaatatctgatttatagtagagctctatgtgaaatgagtttaagcctaaacgtcaatcattatttgctgcatatgataacttgagatgatagtataagctgctacaattaagtcaaattcctttgttagttcaaggcaatgaatcaagttttagcatgaagttttctgagtaatttctggaaccctaaagcctttacgaagtgaaaaagaatttatgaatgttctccataatgcttcagggtatcaatagagtttctgtggctatttgctatatcctgcaatggattaatttttattagaagtctggtatcttttgagtgtgcttttgcaataaattatattagtttgatgaggatatgtatttggttgtgtctagatttcagcctttttttttaagtttggaaaccgtgtcaagatatgattaatgatcttccagaggctccataccttggtattctgattatggtcattcaacctggagcatctaagtgtcattttagctaattgaagtttcttatttctgtttctggatctatttagatgcctaaatgcatttcgtagcactgatttaaattgttgtagttttgaatcgtttatggtatctgttgggaagtagtttttacttctcagtttctcatattcttttatctcctttgcaggaagatttgtccctggttgttatactcttgctgtc

SEQ ID NO: 82422 - DNA, 769 bp, Citrus sinensis; identical to SEQ ID NO: 82033
  Intron number 2 from transcript orange1.1g007978m (locus o range1.1g007978m.g) derived from phytozome v7.0 (chr-ID sc affold00506; pos 73381 to 74149 reverse strand)

SEQ ID NO: 82423 - DNA, 426 bp, Citrus sinensis
  Intron number 1 from transcript orange1.1g007978m (locus o range1.1g007978m.g) derived from phytozome v7.0 (chr-ID sc affold00506; pos 74196 to 74621 reverse strand)
ataaaatctctgtaacctaagaggtttgcttttacctctcatataaataaataaataaatatgtgtgtgcatatcttatcttttttgtggcgattacctttccttgtgaatttagcttgtcttcgctttgtttccttttgaaattcagttattcaaatgaagttatagtaacctcttgttgcaattacttaagtaattttttatttttcgttctagcaattttttaattctttacaatgaattttttgtcagtatgagctttgccattttagggtttataatttataacttactggtattttcccttaaatttactgcaaagaagaaaaagtgcagaacttggaatttctattatgggtcttctgagtatttgttacctgtttctgattcaactttgattgttacttcagagctgtaactaaaaag

SEQ ID NO: 82424 - DNA, 675 bp, Citrus sinensis
  Intron number 1 from transcript orange1.1g034495m (locus o range1.1g034484m.g) derived from phytozome v7.0 (chr-ID sc affold00001; pos 4494574 to 4495248)
gttcccacatatataggactcaacgccgttaataggtcagttgttctttcactggtttttttcatttttgcttttttttttttaatattcttatactgaccataaatttgtgtaattgaaatattgattttgcatattcttttttagtaaaattgcttagctgagggagaaatgagacagtagctcgaaattaaattgtgaaactatgattagcgccttactgggtctgtttcagacatattgttttctttatatctagtttctgccgactgaaaattgaattaggttgacatatgagaggcttttgagatttctttcttattttaattgaaatctatcttttatacgagtaatatgctctcgcttaaaattgtttgccagttgtatttttcatattaatttttcttttctttcggagctgtttatgggtagtaagtagatggagcaacttttgtgcattatgagcttgtgtcagcttagacgcatcatgttccaattgcgtcaactaaagcactctaatttgaaggttgcatgttttttaatatctgtttgtgaaactaagctttgctgtcatctcttttttatcaatcctttcaaaataatttatgattcataaaattaaaagtgaaaaggttacatctttcagtgaactgattacggtgacatttgcagtga

SEQ ID NO: 82425 - DNA, 781 bp, Citrus sinensis
  Intron number 2 from transcript orange1.1g047101m (locus o range1.1g047101m.g) derived from phytozome v7.0 (chr-ID sc affold00111; pos 179110 to 179890 reverse strand)
accatcattcagcttcacgctcttttgggcaacaggtgaagattttttatttttgtataatactcgggctctacagctatctagcagctgggattttagacaaaactgttaaagtagcatttagtataacactttcagttttgcatagaaagttaagttgattttatcgaacttgttgatgaaacacttgtattacacttagtcatctctgtaagctattactactaaacaatttttcgctttcatttaacactagcactttctaattttacagaagcactccacaatcccaaacaaagcctccatcaactgcttcaaagaaaaatcaaaatgggtttttgaaacggttcacaatttgcaatattgatcaacttcctcttattgtcttcttaagttcacaagttgcccgaaattaagaactctattaggaagtaatgatatcctcaatttcttgattatctcaccagatgattattaggttatcatgtagtctaaatgattcaaatatggatcctatatagtgttgcataaaatttggatttaaatatgtgatacatagttgtttctctatataatagcgctgtatatatatatatatttgtctttgtcccaagattttgaatatctaaaaattttgttccttagcatagcatgactaaatgaagagacgtttgtcttttcactcgtattattgggtgcattgttttatgtgattttaataataaaaaagtaaaaaaaattgtcaggtggtctgctatagctgctcatttaccaaagagaa

SEQ ID NO: 82426 - DNA, 423 bp, Citrus sinensis
  Intron number 1 from transcript orange1.1g043694m (locus o range1.1g043694m.g) derived from phytozome v7.0 (chr-ID sc affold02798; pos 10271 to 10693)
aagcaaacacaaatcgaattgttggaacacaggaagtatatatatgtctattttcttcgacttgtctttaatactattgttaaccctttaccaatcaacttaatcttttaggtcaaacagttttagtgacgtttgtaattactcggtaccacaacggctacatccctcttgggtatgtagaagaggaatctactctactaaatctgatgtctacagttttgaggttttacttttgcaaattataaatggaaggagattttttatttaatatggtcataatgaaaatttaagccttgtacactattcttagtttctgcataaccccctttataatgcacaattgatcaaaactttatagtgctatttaaatgaatgtaactcaataacatatttgatgttttcagtcctacaacttgtggaagg

SEQ ID NO: 82427 - DNA, 445 bp, Citrus sinensis
  Intron number 2 from transcript orange1.1g001104m (locus o range1.1g001104m.g) derived from phytozome v7.0 (chr-ID sc affold00008; pos 1342669 to 1343113)
ttttagaggtcagtgaagtattcttcctgttcctagaatttattaattcctgtgttaatattattctgctacttaagtgtggttttttttattggtcattgttacaaaattttccattcaataagggttctacaattcctgacctatttttaagatgcttcatataatatatcttatcgaaagaaaaggataacggggggatgtttcttaagaagggggagaaaacatatcgtaattgaatttgttatcagattgttgtatagaatccactaaaaatcagccaaccagcccacatgtaaatttaaaaataataagtattaatcctttttgatagcctattcgtgttggttttggattcttaaaaattatttgttaaaaaatatctgcaacctttgatttggtttctacaggtaagagcatcattgtttgctgcaggttgcttttc

SEQ ID NO: 82428 - DNA, 746 bp, Citrus sinensis
  Intron number 1 from transcript orange1.1g001156m (locus o range1.1g001156m.g) derived from phytozome v7.0 (chr-ID sc affold00111; pos 23674 to 24419)
ggatcggcttcttgagatctccgagcgtgtctacggtaccgtttttgtcatttcaatttgatgttcaaaactttttaacttcgttgaatccagaatgtgttgttgattgcgtaattggtttacgttttgcttgaattttgaagttggctaggccgagctgttgcaatgcattggggaaattatgctaatattgtgatgtttttgttcttcgtgaatgcacattttggatttacataatttgctttgaatttagggttagcgttcatgagggtgagatatgagttgaggctgagcagttaagttgcagaggagttgaagaattgaattagagtacatacattttggttgcttaagtagtgcaattccctttagcattatcaaatgtggagtccatctgtccatgtatttaccatatgaagcagaaattgatatcagaagaattaaagttctaagcatgtgtttgaagaaaacaaattaactctcgctggggagctggaattttttatggcgttaaagttctctgtgttttttgcatgacaggcttctgttttgtatatctacaatatctgtttgttgggggaaaaagtttgttcttaccaaatgaatctaatgtctgattttggaaagtttatgtagtttttattgttgtatattttgatatttttggggcaggtttctgtcaattttaatgattcttcctactttttttgtatgatttgcagtgtttgactgttgcttctccactg

SEQ ID NO: 82429 - DNA, 711 bp, Citrus sinensis
  Intron number 2 from transcript orange1.1g031275m (locus o range1.1g031275m.g) derived from phytozome v7.0 (chr-ID sc affold00629; pos 65647 to 66357 reverse strand)
aaattctctgcataagcggtacattgcttacttttattattctaataaattatgttgcgttttctttgacatatcttctgtcgtggatctttaataactcgtgttaaagatgatcttaaatcaaaaagaagaaaaattgagaattgacatgtttaatcaacttaaatggctccttcttgaaattttatgctcaagacttggaattgtggtctttaattcagagacttattttgggtttttttaatcaaattagatttataaattgaggatctatcaatattgaaaatgagaatttgaagattgtgtttcattgatgaatttattgaatgcataggtttatttcattcaagtcagctctgttgtggcacaaaattatagcatgaaatagaggtggtggcttgtaatttcagtcatcaactgcagttcggatgaccattgaatctcatgactttgtttaaatgcctgtgaaactgattttgcataattactgcctacatttctttcattctgatgcaagctctaattttttttccccctcccaatcgctttgcagttaatgaccccacttgtgttgaacatgacttgtctaaactcctgcaaaaactaactttgcatattttgtggatcaatttcttacagtctaacctaagcattccttcttcttttttcttttttttgcccccgggggctcttgtaatcaatttgcagtta

SEQ ID NO: 82430 - DNA, 579 bp, Citrus sinensis
  Intron number 1 from transcript orange1.1g011092m (locus o range1.1g011068m.g) derived from phytozome v7.0 (chr-ID sc affold00001; pos 1877016 to 1877594)
ttttgactttacaagaagcagaagcacttttttaggtacttataaatcctcgtacgttttgttgtccagcttttattagttgttaaatcgagttctgatttaatttatgagtattgctgcttataacccagaaatttgcccaaatcgttcatttttattttcttattatttttcttttctggattgtgattaaatgatcaagtgacttcaaagtggagcattgatttattaacaccaagtttctcttcctaatatgcaagtttttgttgacttgaactcattcaatttgccttagaagttgtgatactttgattgtgttctaaactaaagtatccatctattttttttatctcagattctgctgttctgagtaaattttgtggataactggggatttaataagttctcctgagccttttaagtaattgagaagatcaggatcccaactttctactcattgcacaatcaaagtgaatgaagctgaatgaactggggatgcaactgatcccagttttgtttagagggtttcttctttgaagagggtttctttgtattgatgcttttatttctaatatttag

SEQ ID NO: 82431 - DNA, 813 bp, Citrus sinensis
  Intron number 1 from transcript orange1.1g046749m (locus o range1.1g046749m.g) derived from phytozome v7.0 (chr-ID sc affold00001; pos 2558009 to 2558821 reverse strand)
gcaaagaaggcattctcgaagacttcgctactcaggtcctttctcttctctctctctctctctcttttttcattttccattgtttgcttttcttttaaagttttcttccacgcatgcgcgcgcgcgcaagggcttgctatttagttgccgtgggaactgtcaataactaattacacgatggattctcatttaattgaaagatgtttgtttggttttacttgtttcctctgataattttcatttttcattttgacaaatttgtttttagcaaattttatgtgaaaatttgattaatgtgaattatgttagggtttttcttaggttgttattgattaatgagactgttagattaacctggaattctcattttcgcctagtaaatgcttggctgctacaaatacatatgaatgaattcaatttcgatctatgtaactttcatgttcaccgttttttagctttctattcctgttgtggtgtgataccatcatgggatctaatttcctgggatcaaggcttggttctgttgggttatagaattcttcaagaagttctttgttggcttttatctcaagtgacagcactgattacaatggccagtcatttaagaaatgtagggatacaggattgaccccatatagttttaagtcataacaaacactgagattgtggataaattgagtctgcaaatcttattcaggtttagctacagataacgatttgtcaatgtttactctttctgctatatttgacaaatggagggctggtattcatccatctcatcattattgctgtggcagggaggtgacaggaaag

SEQ ID NO: 82432 - DNA, 979 bp, Citrus sinensis
  Intron number 4 from transcript orange1.1g031856m (locus o range1.1g031856m.g) derived from phytozome v7.0 (chr-ID sc affold00029; pos 984287 to 985265)
ttgcagctatactgacctccatccaggtgaaacttcgttttgacttttcttgttcattcttgtctattggaaagagattctgtttcttgtttatcattgattgaaattggatgttttcactgtgcttaatttcttataattaatgcctgattatcgagaacttgcaagaaaattgtgcttttgcatcaaagaaagaagatactaatgatatgactggtaacttgttttgtccttttgtttcgtgtatatgtaattcctcccattttaaggaaatgaggagatagtttgaatggtatactcaactaagtcaaacatatgatattattggctaaatatatctaagagtatctgaacctaataagatcttagtgctcatgacgtccgaaagcatctgtcggcttacatttctgtaccgtgaaggcctttttccatcattatgtatattttttgttatattaaacaaacttaaaaagtgaatcttccatgtttgagacgatcatcaatatccaattttcaaaaaagtgttgttgtacgtaccatatctaatacttactaaaatgcattggaacatttccatatttgccttgtgatgacaaggattgcattgtttggttttcaggatattttatcctgttttgctatgtcgatgttagttagtacacatgttttcattaaattgaaatgttccttagtaccaggtttcattgattctgtcaccatatgttggccccctgtattatcttccccattatttcaaaactttatttttttggtgtaattggttagtcaattgctttcaaatatgttatgtatgcacttgccaacttggttttcaaatgatatttagtacaaatgatggttgatcttgaagcaaatgagcttgtgagattcgcagtggttgtatttatgattctaacatgacactacttatatgtctttaccagtcgctgctttgtgatccaaatccaaactcccctgc

SEQ ID NO: 82433 - DNA, 727 bp, Citrus sinensis
  Intron number 2 from transcript orange1.1g033904m (locus o range1.1g033904m.g) derived from phytozome v7.0 (chr-ID sc affold00001; pos 5080795 to 5081521)
aggtactcgactccattttcgcgtttctattttcttgtcggttattttgttccttttataatttaacaagttagggtttgttatgtgtgctgcttgttcgccagtgtttttgacttctaatccttgactttttgaatttcttttagtctatctttgcgaggaaagttttttgaatgtatggttattgaataactggggtatttatatgtgtggattgactcgtttttggttcaaattatgctcatgttggggattttacaaaatctgttcattagtctatttgtgggaatcaggggacaaagtaacagttggttctatcagaaattgaagtttgtgtgtgtggtgcgtgtgtgtgtgtgtgtgtattagagttggagctttggaatttcagttaagtagaaaaggagctcaaatcttcaatatatcgcaagacatgataataggtttctaattctttaactgatttacctttgcatgagcactcaatatattcctttttgttagaattttttgtttgacagcagaagtacatcttgcatgcagcactgctatgccctcactgtcctgtccctcattttttttttggttttgtcctcttagatagtttagtgtatttgtatgcttcactgatttaattgctttgtcggcttgttttgcatcattgtatattgacaatgtgccaactaacattatttctcttcctttttgattcttttgcagtagagca

SEQ ID NO: 82434 - DNA, 645 bp, Citrus sinensis
  Intron number 3 from transcript orange1.1g031373m (locus o range1.1g028797m.g) derived from phytozome v7.0 (chr-ID sc affold00105; pos 131276 to 131920)
ggcgtactgagaaacgggcttttgctgcttttaagatatcctttcttttttatatgctctatgttatatcattgttatgttgataaattagtatttggggaggccatggaggtaatagcatgtgaaaccagtgtgttttcttcgtcctgttgcatctttgatgtagttgaagcatgggcttcattgtgaactaattgtctggttcttgtggaaaccaattaaatgtgtgtaactggaactccaaattgggtctttttattccatctgctaggtatttttaatatcttcttttgcagttactgcagaatctaatgacgcgactcattgttgccctgcattttttccctatttgaaactaagagctagtatcatcttctttttctgttgtcattcaaggtttgtttgtttccatgatgataacagttgaaaaacacaaatttagagtattaatacttttactagaatctcgtaaatctgaaagttgctgactcagtcatgggcttaaacatgttgcagcatactaatagtatatttcttaatcatttccataatctggtgcttttggtttcaaagatcagcttattagttttgctccttaaccaatggatacaaagctgcaagtttagcagattcatcacctgcatt

SEQ ID NO: 82435 - DNA, 469 bp, Citrus sinensis
  Intron number 1 from transcript orange1.1g024056m (locus o range1.1g023728m.g) derived from phytozome v7.0 (chr-ID sc affold00021; pos 979706 to 980174 reverse strand)
attacagatccgtcgtcgttttggtctaattctgtgtaagtcaattgtcttcttctctttatttttgtccatttgtacaatcttataaaaattttacgaatttgaatgcatgagttaattctataaggaatcgagtattaatcgctcgcaatttatcgtcacgagatgaactattattaatttctgtttatttgttagaagtttaattacgaaaccctaattgcatagaaagtacgaaccctatttataataaaacttaacgttgttctttttttcccccccctaagaattgcacacttgagatagaattcgtaataagcatttcatttcattatctaagtttcaacctttaagtgttctgagagaatacgtatgctttttgaacttttgcagattatcagaggctttgagaaactaggtgactaactgaaagtttatttagttaatctccttgtacaattctacaaag

SEQ ID NO: 82436 - DNA, 739 bp, Citrus sinensis
  Intron number 1 from transcript orange1.1g001942m (locus o range1.1g001942m.g) derived from phytozome v7.0 (chr-ID sc affold00020; pos 1019378 to 1020116)
caaagctatcatctgataaagccaaagctagagaagtaacgatttacttcattaacactctgttctttttctgcttggttgccaagaaaatgtgagataacttgccaagataatgtaagataatacaacgcaagaaatttctggaaaatgaaagaaaaatttaaaatggccaaaaaacctgacctattttttcctagtttattgccagtaaaatgcaagcaataacaaattggaagaaactgttagaaaagaagagaaaactaagctctaagttcattatacgatgcgattttttaagacttcctttcttttttcttttttaatcattttattactgttcaaatgctaatttctttttggttttgtttctgtaaaattcataggaattggcttcactgagctaattgttgcattaggttagagtattgttttttctattattaatttctttgcttcttatttcttaaatgttgatgcaattttttcaacatctcacatttcctcaataataagtatcaattttatgaaaaaggatggaacttaactgtgaaagttattgtatttggttcacttgagtgagtctgtttttttggcctcagacgacgatttgatttttaagttctgtcattttctcaattttattaataactagttcatactttcactttagtttgtattcatgtgatattgatttgtgtgttcaggaaggaataaaattattgtgtacgtggttagaagg

SEQ ID NO: 82437 - DNA, 754 bp, Citrus sinensis
  Intron number 1 from transcript orange1.1g021981m (locus o range1.1g019591m.g) derived from phytozome v7.0 (chr-ID sc affold00021; pos 704305 to 705058 reverse strand)
tgaagcctcccaaaaaatcgctagacttgccaaatgtaagccctttctctctctcttttttttttaattagttattttatttttcacaatggaatttttaaattttaaaagtttaatttttttattttgaatattaatgcatagatttaggcaatgcttggtatctgagaaggaaattgattatcgaactaggagtaaattagagaagctcattttgagaaagcacccgttgaatcaaccagctgaagcatcttgtgctcatctaatgaattggcttcttgtttagttgttacttaattgtattataaatattgattggtagaatgaatacaagattattaggcataaagaaaataaaagttcgcgttcactctttaatagtgtgctgtttgttaacattctaatggcaaggacacaatggattattaaatgcttgtaagtgatccgaatggttaaaaaaagtttcttctagggagcatgtatcaaaattttaatttaaaagaagcttctttgatctcaaactttgcttcttcttttttttaagtttcgatcaaacactggaaatgtaatttctttttagtgatgctatgttgaccttaggttttgatttaatgtagtggcaaaaaggtcatcgatgtttgatgatccaattgtggagatacaggagttgactgctttgataaaggacgacattacagctctcaacatggctctttcagatttgcaaacccttcaaaacttggagattgtggag

SEQ ID NO: 82438 - DNA, 987 bp, Citrus sinensis
  Intron number 1 from transcript orange1.1g007852m (locus o range1.1g007852m.g) derived from phytozome v7.0 (chr-ID sc affold00032; pos 403656 to 404642 reverse strand)
gcttcggtatcttttttccttttttttgttcttttgttgattttgcaatttgtcattgtaatttgtgtttatgatgccgaatttagggcatatttggaattggactgctttagaatgcgatcagttgctgcagtatgctaaaataggtgctttggctgttgtgctttcaaaattaagcaaaaagaaaataacggttgcagaatacccttaattacctgttgttgaatttggtatagtcgtgtcactttgtctgtattggttaagagatgatcatttgttgtgccctttgatatgttgattgttgtgttaatgtttgaaagaaagcagaatttgagttggttcaatgttttgaattggagtagttttagcttaatgatgaactacatgaaaaagaaagaggagctaatttgttctatatttggagggataataatgaatgtaatgtgggtgcaccggggtggtctgcattttcgtagtagttatagttctttggaaactgagattgggtttttacttctttagaagtgatggagtactatagaatgtggtttattttgctcagtggtgcactttgtgaacagttctatttcaatgattaagtgaagttatttgtcgaagcttgaatttttcgcattctagaaatattcaatcatttgttgtatctgcttacaatgtaatattttgaattcatttacactaattgttggatctttgctacgaatttaattaggaaaagaaaaaatggtgaattgcacaagtgcttctgtactttgtgtaaccatgaagtgcatgcactcttttaaaagtaacattgtatttgttttactgagtataatctgcaagaatactgaaaaacttgctaataatagctcttcatagatgattttctgcttaattatggaccaccctgatgacaatttcctttctgaagcaattgatgttttcattacagccacggcagaaacctggggttgtcccaggatccca

SEQ ID NO: 82439 - DNA, 952 bp, Citrus sinensis
  Intron number 2 from transcript orange1.1g033046m (locus o range1.1g033046m.g) derived from phytozome v7.0 (chr-ID sc affold00001; pos 4098974 to 4099925 reverse strand)
aggatttgtacctgctacagattggtgctaaaaaggtgagcggattcttttaatttatatttgtcttcactcttcgcttccaattttattttgtaactcaggagtgaatgggatttgagataagaggagtaatcgcttatgcatatataaatattgatcttcatatgtgggtatgagagacgggcacacttctgatttctttttcatttatgctttctgtgtaacaagtactagttgttcggttttttaaccttatattttattttatttcatttcttgctgtgtgttagttcaactagatctgatgctaattggatacacttgcaagttattcaactcacaaacacaataaaaaggaacaattagatcagttaaactttagcagcatataaacattttgtccatgatgtcttagtttttaaatctcaaagcaaaagtaagtctagtgatcatgtttgaaaccgtatatgtgtatccgggtgtgacactgctacttagagaatggaagaaaacattcacacatacaagcatgctggggcaatgattgaatatttccttctgggaattagaatttcataatttggctaccaacacattttaccttgtcattgtctctaagtttcttctaagtagttacttcctgaagtcttgctgtgtgtgagttatcgccgcctgactatgctaatggaattgctgattggctaccctaatggaaaattggaagaaaataaggtaaggatggatcatatttgaaaaattagaagttgtttcaaactcaaaagctattgagacgaggctagtttattacaactaacatatcctttggttgaattgattatgaattatgtaagcttgatatggtattacttggtcagccttgttgtcttgaacacttgatgatatatgagcttctttgagttctttctcacatgtaatatgttgcagcttggcg

SEQ ID NO: 82440 - DNA, 701 bp, Citrus sinensis
  Intron number 1 from transcript orange1.1g028403m (locus o range1.1g024515m.g) derived from phytozome v7.0 (chr-ID sc affold00008; pos 640199 to 640899)
tcgtcgaattcctaagctccgtgggattgccggaggtgagcctggacatattagagcattcccttttgcatttcatttaagtgtttgattgatgtttcttttgtttcaaaaactgcaacgtgctgctacttgcaactgtcttgtctgatgaatattacagtgtccgcatttggaggagcaaaaaataatcatctttaggaataggagggccagttgctaatgttgattttattgtttagaacttattatgagaatctttactttcatggcattgacaatgatgagatcttaacccaaaattcttttcctatgtaatctctgaatttggcagtcctattgcaatggagacaccaagtctgagccattacacagtttttcagtgactgcatatttttctcctaagccccacctgtttgtcaaaattgttgatgtttttaactagcataggtaactcatagcagcagaactttgaaatcaattttgggctgcctactctactttcaggtcacatttagatgtaatagagttggttctttttaacctgacatttcatctcatttggctgtcactttctttctgcagcattactatgaattttgcattctcttgtgtgcttatataggtgttcatgcatctctttgcgtgcacatggattcttaaattctcactactatgtttctctgtttgtgtttttactaggt

SEQ ID NO: 82441 - DNA, 479 bp, Citrus sinensis
  Intron number 1 from transcript orange1.1g039717m (locus o range1.1g039717m.g) derived from phytozome v7.0 (chr-ID sc affold00029; pos 376395 to 376873)
gcaaacagtttaaggccggcgacacactcagtaccatcccatcacccattatacctttatttttaaaaaaaaaattatcatcttcctcctatttattttagttactatactattttttaaacaataatttaatgggtgacattatgttgtatgacattgatacgtaatgttattgtttaattatttcataacttcaacaccattgatgaaagaaataatataaactaattaaaattttagccctttttaatgagatttttatgttcttgtcccctttgatttgaagttctttttcttttgctcaatcatgtttgtaatttctttgagtatgcccccttggtccattgaaccaaactcctagatccgccactgattatagttcatagaaacaaaccaagagttttttttattttttttgggtcattattccttcacagtaatattgtgatttaattactctctgcatgcagttttcaact

SEQ ID NO: 82442 - DNA, 429 bp, Citrus sinensis
  Intron number 2 from transcript orange1.1g005173m (locus o range1.1g005173m.g) derived from phytozome v7.0 (chr-ID sc affold00201; pos 188324 to 188752)
gctgcccaacccattccacaggtatgcaactcactgttatgactgcttttgtgcagcactttccgtataatatctgtctttaggtttgagtgtggactagaagttccgtaactagtacattagttccaaatgcttattctgtgtctaggtcattaattttaatgtttctttgcaaccaaatggagcattaggcctcactgatgaaagggaaatgaaatgcttcatgaggacttgatgttgtccatagacaatgccattttttgtttactcttgttttggtttgctcacatgataatgtatttgcagtcgatttttcgttcagttataatacagcatttagaggcatctttaagattttctttgaactaattgaatttgttttgacatatttcagctgttgctttgggctgtaatcccttatttaaaggg

SEQ ID NO: 82443 - DNA, 1025 bp, Citrus sinensis
  Intron number 1 from transcript orange1.1g041966m (locus o range1.1g041966m.g) derived from phytozome v7.0 (chr-ID sc affold04097; pos 352 to 1376 reverse strand)
ttgcagcttcagctgggcatttaggtacttttgctaacttcgtggtggtaactgttaggtttaataatttgtatttttataccaaagtttgaccaaataaatctaacggtgggcctctatgtcttctcacgtgttactcttcttcaatctccaaccccccccccccccccctccaaaaaaaaagagtcctaagggagacataatcgcaatagaaataatggtaaaatcgtataatgttgttagtgttaaatgaaaaagaatgctgatttctaacttaatcctataaccctatatgattttatagttgtttgttgttagcgtgttagaatcttcgatttaaatatcagtactctttttcctttggatgtgttttaaagagtacatagttttaattcaacattatttgatataagacctcttcaattcatatttttgtttttcattacacaaagaaaatttttcttaccacagtataagttttacacaatattatacataatatttcttgtattggagtgaggaatgaaaatttaggtttcaatattgaaaagacttaaaaaatggaggagattttttatggggaggggaagccgctgtactaaacaacattatactatgatcatttaccatttcagaagtcgttgtccacaacaattttaagaaaatatacttactacaaagatacgtgaaaagtcttctatacaggcatccataaacttctcttttaacttccaagtatgttacatgatagtgatctaaaatatgaaacgatcctttaatcaaacaccatataaagctaaattaagtaaaaattgaacacgattaaaacatagaaagagtcattccctttgttaaacagttatcaatttaggcatcaccgacgttatttagctgttgttgtaccgtattgatatccgcatcgccgtcaaaatttggcatcttggcttttctagtagccatgaccgagttcctatcatgcataccttgtagaaattgtgaacgaacttctagaggcgcggccagaa

SEQ ID NO: 82444 - DNA, 335 bp, Citrus sinensis
  Intron number 1 from transcript orange1.1g022520m (locus o range1.1g015632m.g) derived from phytozome v7.0 (chr-ID sc affold00001; pos 4058872 to 4059206)
gatctacccaattttttcacccgatcggtaattttcacattgtttctattacttttattttcttttccattttattattattattattatgtgcatttttagatctttgcgggtaaatagattgaaactgttagctttgtaaagtaggtgcacattttttccagtgcggtgtgaacttccatccagattttgagagtaacctggtttgatgtgaatgtggataccatttactatttactgaattttctgatgtgtcttgtattgatttgcttaaaccgctgattgttactgcttctgcaggtgagttattaattagtgaaggtgaatttggaagg

SEQ ID NO: 82445 - DNA, 968 bp, Citrus sinensis
  Intron number 1 from transcript orange1.1g000631m (locus o range1.1g000632m.g) derived from phytozome v7.0 (chr-ID sc affold00020; pos 1312462 to 1313429 reverse strand)
cttcttcttccaattcagctaattcgttttataaggtattcgatttttgtgtcttagggtttgttttatttctcggcgttatgccaaaaatgttgagtactttattttatttatttttgttagatagggttttgtaaggtcttggaataatgaaggtaaaatttgggtaatgcttatggtttttggtaattatgagccaatttgaaattttctaatttctatttgataacgtggtatcaaagtttaagccttttctgggattgcattttatgtacctgaagttgaagtttattgcactgtttcactgtcctactatctactacttttaagcttggtgcttattgtaaaagtaacttcttcatttaacatttttgcatcagattgctatctgtttcttttctgttgtataatattctgcttgaaattttcatgcttctctatgaatatgtttggagttcttttttaatagagaaatataaccatgttgaaataattcatggtggttttatggttggagtgttacttacgggcaagatggctgtgtccatgtccaatttcttgggcaaactgcttgatgaaaagtaagtttccgggagattattgggatgtttgtagtctggctaaattggtaaaattcgtttaaatttgcttcttgtcgggctgagaggaggagacacatccttggggtttagttttccaaaccattaaatgcatcagaaatctgagcatagatttgcatctatttggtcacttaaggaaataaaacttatggtatgcatcagaaatatgggcataataagacatacccttgggtttagtacttttctttttccgctatcatttaatgctattattctttttgaatgtttctgtttaatatatcttttgagtgctgggttttaatccttttgtttagtcaactcactcttttgtctcaccaaaccagtttgcctgtttttctccacagg

SEQ ID NO: 82446 - DNA, 884 bp, Citrus sinensis
  Intron number 1 from transcript orange1.1g011727m (locus o range1.1g011727m.g) derived from phytozome v7.0 (chr-ID sc affold00001; pos 2951020 to 2951903 reverse strand)
ttttttttcccccttccctcaactcttgttcggttcgttctcttgctctcgttcaattttcttattgtgtttgatgcatgtatcatcatctggtggttggtttttacgctggcttgttgtggtcgcggtagctttatttatttaattatttttggttaactgaattagttattgagtcagatactgtgggtgtgattgctataagattttctaaattacaaaaattaaattggacagattttacataatacgcttgctatcttcggaaaagaattttattgttagttgcaaggcctctgtacttgattcctgtggtttggatttggatgtttggaatgatgatattggttgtgctttgctgctactgtgatgaaattagatcctgaattatctgtgttatgcctgttttggtcatttcttctggggaggtggtgttctgtttcttcaggggtgaaacagagggctgcttggtgtttggttatgataaatgatttgatttaacatatatcataagcctccaaaatacatttgcattactgacgatttttatttgggcttggcaacaacataagttcctcaaagaatttgatggtattttcaacgcaaaagtcttcgttttgggatttcgggatgaatattttgttttaattgctttgctttgctcttgattttcttttgttgctgtggggaagcagtgttgtggtagtgtgaaattatcactgtcttgtgtaacccataatatctattttagcttacgttttagtttggtcgtgttttattgactagaaggagaagcttaacagtttgtgcttcttaattgggatgaatatcttgaggtcatctaaagagtaagaaatgcttcttgacagataaatgtctccaga

SEQ ID NO: 82447 - DNA, 696 bp, Citrus sinensis
  Intron number 2 from transcript orange1.1g007188m (locus o range1.1g007170m.g) derived from phytozome v7.0 (chr-ID sc affold00015; pos 650368 to 651063 reverse strand)
atcgattcaacggtaatgtatttatgctaaaaaatacaaaaatcaaatcaaatgtgtgttaattttgtttattgttgtttaatttagtgttagataatttgttgtactatgatttcacttctattttgtgttgtctttgtagttgcaaattctatttcgtgagtgaaagattacttctaaatgtagaaatatgtggtttatttggagtgcacgatttggtgttgatagaatttaaaccaattctaagaattatgctatagtttctgttagtgactgtttggggctcaagtgttgccagtgttatagttcttaattagctataatcttttgtgaaatttgagtttcatagttatttattgatttttgaatgtttatcaccagtattgtttgtcagatttatttagttttgttatggatctgtttggccttgtattatttttttctcaaatcactttgaaaattgggttgttagcttgttggaatcaaggcatgaggtgaatgccggtcgtattgctgtttagtttgtacttattttcatgtatttcaacattgaaataaaagttcacaattaatgcaaaacaatttgggtgtaagtggggtaacattaaagaacataatgttggtcattgtactgcattaaccaatcttctcttctttacagacaaaggaagctgagataacatccttgacaaagca

SEQ ID NO: 82448 - DNA, 504 bp, Citrus sinensis
  Intron number 2 from transcript orange1.1g044487m (locus o range1.1g044487m.g) derived from phytozome v7.0 (chr-ID sc affold00347; pos 67510 to 68013)
attttattaagcaagaagattgggaaattttcgtatgttatcgaacctttagctcatttgaagtattgactaactttttgagttaaatgtatgtttatcattgtttgtgtacttaccttgattattgaatgtacgaaattggccaaatatatagagaaagaagggcaaagaatatatacaatcatggccttttaaagaaaggctatgtggtattagaggacgaactggtatgtatatataactttacttttcaatctatcacctaaattaatcacttttatacattttaatttatatataacaacaagctgctggaaacaatgaaaaaattagtcgctctaccttatggaaagcagcacgcaaaaataaggaaggtagatacaagagtgaggttgttagagaaaaggctgatgagatagtaagttttataattatatgactttttgaataatttaacatatgaactaaaaagttgctgattttttgttattattcaaatgtagg

SEQ ID NO: 82449 - DNA, 525 bp, Citrus sinensis
  Intron number 1 from transcript orange1.1g011410m (locus o range1.1g011410m.g) derived from phytozome v7.0 (chr-ID sc affold00188; pos 203175 to 203699 reverse strand)
gcagggtaatttcttgtttatttatttattttggtgtcatttgtgttttatttgtatgattgttgcttctgtatgtctaatattttattaaattttaagaaatattggcccacggttgaattctcatgatctttgttaattccatgctctgcttcatgatttttttctctttatttctgatttttaataatatctatgaatggcataatatgattaatatatcaaactttttttgttttaattttcttatctttgagttgcattattttcttttttttttaattttttttcattttcatcttccgtttaataatcagaaagtgatgaaattttctctttgttttctttatatttaatatgcaacttgaagtttctattataataatatatggaatttagatgttgtttgcttctgctgagataacatgacttttcaataaattttgtacttctctaattaattcacatggcacgttacaatttgcttgttcttacaccagcaaaataacttttcgtagggccttt

SEQ ID NO: 82450 - DNA, 456 bp, Citrus sinensis
  Intron number 1 from transcript orange1.1g003583m (locus o range1.1g003533m.g) derived from phytozome v7.0 (chr-ID sc affold00012; pos 1036484 to 1036939 reverse strand)
ctgcgtctccttcgacactccggtattcctttctctctccctcttttgattttctatttgtttgtcgagaaaaaaaattagaaaggggaaaaacatactgttgaaagaagttagtggttagtattattgttctgttctggcttttggtttgtttgactgatgaggaaaagtgcggaaagtaatgaacttgctaaaatttaagagaattttcttttgcattgctattcggaggtggagtgatgcaagctttgcttgtcttgagaagagcattagatttatattattattgctcttgaaaaaagttgttggtgttgttattataatcagaggttacctcgttttacttggaattgatcggcaaatgattgtgctctttcgttttgtgctttatgatggttatggttctcgttatggatttcagagatctgaaggtgggttgtttgtcgacctgaattc

SEQ ID NO: 82451 - DNA, 771 bp, Citrus sinensis
  Intron number 1 from transcript orange1.1g033651m (locus o range1.1g033638m.g) derived from phytozome v7.0 (chr-ID sc affold00032; pos 442655 to 443425)
gttcatccttagttttcgttaagattttggttctggtcagttcaatgcattggtcgtgtttgtttatgtaatttatttatttttatttttttggaaaatcgttgatgctttttcactttgagagatgacacggatctccttcattgatatatcgattcagaactcattgtttttctgttgaaactcattgttttctgcaacagaaaaacattttcttagtttctggtcacccttaatatacttttgttgtttcccaaaaatcccaactgtgaatttaattttcaagcattaaaaaggaaaaagatttcttttctgggaaaagagtctgcttatacgagacagaacaattccgtgtttgtgttcttctgcttctttgttgtttcttatgcaattctgccaattctctgtttggttcctgaggaaatataggaaaagcataggaaatagggactcatgacttcattgaagtcaaattcttggtttacactcaattggtggagggacttaatcactatttttgcataataatgttgtataaagatctgaaagtatttttttttttaatttctttttcagcaacaaaatgcatgctgaatgatgtgtggcttgtgaagttttcattttgagttttattataagaagtgtaactacagataagataaagtcatgggaaccgaccaatttactttccccctcaattggctttgcttatactaactttgagtctttggtgcaggaataagtctgctgtttattgagaagaagtaaact

SEQ ID NO: 82452 - DNA, 428 bp, Citrus sinensis
  Intron number 1 from transcript orange1.1g024720m (locus o range1.1g024720m.g) derived from phytozome v7.0 (chr-ID sc affold02162; pos 4148 to 4575 reverse strand)
gaggttttgttcattacttcctttcaccttcttattaattttgtttttattgtatgacgatttgtggtagattcatctctatggattcaagattttctcgtaatctgagttctcttgaatttgtaaaaatcttacttaaatatttgcatggggtatgatctgggagattatttaaatgatggtgcgtggttcagatttgttttatttaactttctttgtaaattagttgccacgatgtaggagatggattattgagtcaattagggttgtttcagttttccttttttttttttgtgttttcttctttatctgacctcatcatttctaaaactctgataaaaattgagaatttaaaaagaaaaaaactttttaaatttaataaccaccgatcacaactttaaatgttgcactacaggacgcgtcgaaga

SEQ ID NO: 82453 - DNA, 568 bp, Citrus sinensis
  Intron number 1 from transcript orange1.1g024280m (locus o range1.1g017338m.g) derived from phytozome v7.0 (chr-ID sc affold00052; pos 466348 to 466915 reverse strand)
catacaagccccaagttttcacttctctcctcaatgtaagtcccaaatcactatctgggtccgttttagtctcttaactcttatccggttttgattgattctgtggctcttttgcttgttttaccggttctgctttgtgggttttttggtgcatgtgctaaaaaaattcaattttgattattggggtttctgttttagcagtggtttcttgtataggaagtagggttttgaattgctgttatggctctgatgaaggttttagcatgaattgagtgagattcaaattattagtattattattttgtcaaatttgtggttgtataaagctttggatatattttctgcttatggttctttgaatgcactctgaaagaactgtgctttgtaaataatgtaccttttttgtttaaaaaagcttagcttgctaagtgtgatatgttatcaatttttctaacaattgttatcacatcgtttaattcttttgatattttactaattgtaattttttcttctacaatctttactttatgcagaagaaactattttattcaaggcctaaacacaccca

SEQ ID NO: 82454 - DNA, 1050 bp, Citrus sinensis
  Intron number 2 from transcript orange1.1g010331m (locus o range1.1g009310m.g) derived from phytozome v7.0 (chr-ID sc affold00166; pos 142683 to 143732 reverse strand)
cagcttctcaaacgtacacgtggcctgataagaaggtttgtttggcttcctctcaaaatctcgtgcttagtaattttttttttaagttaatgatttcacaactgatgcatttgatgatttggaatttagcgagatgcttctggacatgagttcagatagcgaatgctttgattcccacactacagcaatagaatcttaaacaatggagcatttgttaggacttagaagtaacagtagttaaggtttcatgtttatacacctgcagagttactcccagattggaccaagtgaatatcttccatgcagaattggatccttaaggtgggatccctagttagaccattgaatttgaactcttgcgcactctaggtgacccttgcatgcacagatttttctaaagcaaatgatgccacattgaatattccactaacaaatacgcgccaagttagattacaaagctcgtagagaccatggaattccttccaaaaactagttttatccctcacccttatcaatcaccattctttttagttactagcagaactttggcctaaataaattattcgccgaccgatgaatcaatcacccctgctgccatagtgttccaagccaacaaccatttcccctgacttctccatgaaatggagatacacttaatctttcaaatctctcttgaaagggagatgcctatcaaatcttttgtaattatgtaattttattttatgttggtaaaaaaaaattaagtcttttgttttcttttaatttatgtattaagaagataactctttttcttttggttcttttttctggttcttttgccttttgtagagacaaaattacagcattgttaaattttataggacacttgagtttaatgttagttttattttatctttcctataatccccaccttatggcttgagtttatggcaccttttcctcttgcagagagatcaattagcaattctagttcttaggaaccatatatactgacagcaacaagtttttattacagaagccaaggatttgtatattaggtggtggctttgg

SEQ ID NO: 82455 - DNA, 630 bp, Citrus sinensis
  Intron number 1 from transcript orange1.1g026031m (locus o range1.1g026031m.g) derived from phytozome v7.0 (chr-ID sc affold00015; pos 1030219 to 1030848)
agcttgaaaaggttctttaatttaatctccccttatttaaaactttgtgtataaatatacgcatgcatgtgtgcatgtatcatgtacgctatgtattgtgttgtgtaaaaagagatatacgtacattattaaaatttgtgattttgatggtgtgatatgatagaagctattaatttgtctgctctgaggtattaagagatatgaaaggtggggttttatttgtggatgtaaagggtatcactgaaggtattctatattaattgtcagttaatcataattatttatatgtatcatgtattattagtttgtgcatttgtaatattttttacgatgtatgtggtgtaggtcaattttttttttttttttttctctatgttgtatagcggtcttctgagaaaatgtgcctgacattagctattatgatttaaagatttgagttttttattgtgtgggaaccgatcattactcaattggggcgtacaagattgttttaggcttgagtttttataatctttctgaaattgttgtggccagagtggaataaactttaggttgttctataatatgattcgagttttgctggctgggaatgaggctaattaagtgattgcttttgctttcaataggtga

SEQ ID NO: 82456 - DNA, 689 bp, Citrus sinensis
  Intron number 2 from transcript orange1.1g016234m (locus o range1.1g016234m.g) derived from phytozome v7.0 (chr-ID sc affold05527; pos 471 to 1159)
ttgagactttgtctaaagcggtgagtgccttgttcgtataatttgagtaagattacattttcctaaatgttgtttactttgagattatctgacgggtgtctggtgcactttatatttgtacaatttcataatgacagtataggaaataaactatgataatgttcagtatgcaaaacaacattagcataataataaatgtgacaattgacagtgtgatctgaaatttcaatggttatttggcaacacctcaaaggaaatggttcaaaaggaccatttatattttcagagaaaagatgtaccaagcacaattatttttctccaatttcagccttaagatggaggagttgacctttaaatagaaaacaccagaagtcatgagcagtgtcaacagcataaaaaagaatgtcatgcaccatcatgttgatatgcaaatctagctcccatattcttgcgatttgtgaattactaagatatttttcttccctttagtgcttttctattttttttttttaaattgtgtttagacaagttctgatcgggtaatttgaatgttattgatttgtttcgttctggttgtttgacttgcattgagtatgtcctagtcatttctcagtccattattttcttttaactgctagaaaattactgtatcagggcatcacggcggtactgaatttccagagtggaac

SEQ ID NO: 82457 - DNA, 324 bp, Citrus sinensis
  Intron number 1 from transcript orange1.1g033307m (locus o range1.1g033307m.g) derived from phytozome v7.0 (chr-ID sc affold00032; pos 702174 to 702497 reverse strand)
gtgttggtattggtggtcatccacctggtaattaacttatatctgctgaaactccaccccctatttttttgggcaatgattatatctattagtttttctctttagaccaaaaaatagccttttgcatatcaaaacttaattacttttacatgatttcttttttaagcttccatttgacttaaaagtatcacaaccatgccctatttttccttatgaaaaaaatcttcttcggctttagcttgtgaagaaacacagtactaaccaaacttcattgccttctgagttacaggccagagcccgcaggctttaccagtcaccatagac

SEQ ID NO: 82458 - DNA, 587 bp, Citrus sinensis
  Intron number 1 from transcript orange1.1g012564m (locus o range1.1g012564m.g) derived from phytozome v7.0 (chr-ID sc affold00015; pos 1756895 to 1757481 reverse strand)
gaagtaagtttcttggttaagccttttgtattctattgtttgattgcctgataactgtagtgtcaactaattcatttgaggattgatgctgtctaagaagttgtttctcgtaatgttatctaacctcatgaagtaatccatgccaagggtaattagacaagtggcagtttacatgtcagattagcagatatgttgtatgtgaaagtttcttctgctgctagtacaagtcatgctgaatcataaatgtctgcacatgtcaaacacaatactatgtttgaaaatgattgacaatacgtgccaaaaacatgagaattcttttgctttatttcattaagtagttcatttctttttgcacctccagacttcatagttcattttgtcatcttctccatcttggctaaatctcctttgtttgaaaaaatggtcaaaatctagttagcagtttccctgaggttccattaaaagtttaaaacccataattggatatttaatttgaatttatgtcaacaattccaaaatgcaaagaaattacagtattgtttcttgaagcagggtatcaatcagaagattctttccttggattacaa

SEQ ID NO: 82459 - DNA, 477 bp, Citrus sinensis
  Intron number 1 from transcript orange1.1g032523m (locus o range1.1g032523m.g) derived from phytozome v7.0 (chr-ID sc affold00001; pos 5755135 to 5755611 reverse strand)
acctatcggctgttcttgaataccttgctgctgaggtcattttgtctatcatttcatttgattcaatctctgtttggtcgattcttctgctgacaagaaatgttgaatatcatttttcaatgttagggttttattaacttttgcatttgggaaattgatgggaccaattaactaattacgagtgaaatattggatctatatttgtttctttttaagtagagcatggaggaacagcattaaagctctgtattttggacatttgattttacaatgtgattctctactctgtcttttggtgtcaatggtatttgttgttgtttcagaaacattttggttttagagaaaatgttagaaaatggaagagattttgaaattttttttaaaactaatatatttagtacccgtttatatgttttgattctttctcatgttgttgtatacattaaattaatatacaggttttggagcttgctggca

SEQ ID NO: 82460 - DNA, 739 bp, Citrus sinensis
  Intron number 3 from transcript orange1.1g030921m (locus o range1.1g030921m.g) derived from phytozome v7.0 (chr-ID sc affold00008; pos 1818260 to 1818998 reverse strand)
ttcgctctttccattggtttagtgttgcaaaagctgtaagtttcctttttacccaatgctttttttttcatgtacgtatgcagaattcaattttttttctctgtttttttattctggaagaatcatattggatacttagtgcatacattggacacatgttaaactttggttgctacttctctctgtcttgattaggaatttaattactagaaaaagtaatgcaaaaatttgaatggtataattttatctgacatgccgaggaatggatctgtaaaaagtgatatgttgcagttatagaacttttaacagttcgactcagtgtatcttgctgcatgtattggtgtaggaattttcatgtaagtgcttcacacagacacacacttgaaatcaaatgatagtcgctaacacaaaatctttaggtaggctaaaaagcctgccaataattttgtatgaggatagattactttaccagaatgtaagtaagctaacttattaagtctgcataaacgaggtagccggcttaaagtcatattcaattttctcactgattgctgtgccttgtatggataattctgtaatcaatcatggattcagaaaatcaatgctgcaaagcaataaagaagatgcatcacttaaaaattatttatttgaagcttattcctagattcttctggtcaacttaagttggaaatttgaacttgcagctgcacaagcctgtgacagctgaagatcttgcttc

SEQ ID NO: 82461 - DNA, 256 bp, Citrus sinensis
  Intron number 2 from transcript orange1.1g030921m (locus o range1.1g030921m.g) derived from phytozome v7.0 (chr-ID sc affold00008; pos 1819111 to 1819366 reverse strand)
gctattctggtatgcctatttctcttctccgtgcagcttagttaatcaagtgttttaattgttgcataaccagttaattcatggaaaataactcatccatccggtgacattttgagtttgtaagaattctcttcttttatcatttttctttttttatttgatttcagcagttatataataataaacgatgaaattctctttgtcaaattcttgctctctaggctttgttcttggaaagaaaaatcttggcaagaga

SEQ ID NO: 82462 - DNA, 580 bp, Citrus sinensis
  Intron number 1 from transcript orange1.1g022574m (locus o range1.1g015748m.g) derived from phytozome v7.0 (chr-ID sc affold00001; pos 2545673 to 2546252)
tcgctaaggttttgtaatgactctactccacctaaattttcatttcattttttctttatttaacttattcattgctaattttgctctgttatatcgcaaatttttcttccctttaattgtcattttcattattttttattattgttagtattattactacttttgagaatcgtattgtggatagatgttaattattgtttctctctatctcaagaatagaatccaaatgttgtgtcattattctcagtccttgaaaagctatgattctttcagagaatgaaagaaaaggaagcaaaaagattgaaaaattaaattttctttatttagctacttttcacgattcttttactaattattataaatattttaaacgtgggctaaagtcgcccaattattttctaaatttgagttatgcttgttgcatggatcctctatctcttctccagtttaacttttttcagaaatcctagtcttcacattgcttcatcttttgagatttcatgatgaagctaaaaagctaatagatgtcctgccttcatcttcagacaaggttgcaagcccaggctgctggcgtccctta

SEQ ID NO: 82463 - DNA, 596 bp, Citrus sinensis
  Intron number 2 from transcript orange1.1g022574m (locus o range1.1g015748m.g) derived from phytozome v7.0 (chr-ID sc affold00001; pos 2546268 to 2546863)
tcgtacagcatcttttgaaagtaacgtatgtgaactgccctttttgggattctttactttgcattctacactatccgaaatggtatcttaagaggaaagaaaatgcttgaaacattgatattagagaaagtggggtatcttctctgtacatgaatagccatatcaagaaaaaaatcttcgtgtcctgatatcaaaatgacttatattgagcacacataacagtcttaccaaaactgagtggtattttacattatgaaatttcatcaattgctattgtggtctaagctctggccaccgtctaacttctgtaggtactaaatgtattaagtgttagataacttgttgagagaatgaatccaaatgttttaaaaatgcatgtcatctgttttgcttccctctggttttcccccttggtttgcttttgttaaatttgtctcctcctctccttcagttagtattttgagagggttggaatgacaaatttgatagatgaattctcttttctgttatgatcgttatgcatagacattactattcttactgctctatgttatatgatcttgtgatgagtactgtctttcaaattgtttctgcag

SEQ ID NO: 82464 - DNA, 685 bp, Citrus sinensis
  Intron number 1 from transcript orange1.1g022341m (locus o range1.1g021610m.g) derived from phytozome v7.0 (chr-ID sc affold00404; pos 148646 to 149330)
cagctcttcaaggactactttgttgaggagagaaagtacgcttttctcttttctttaatttactttttcttaattttctttttgtttccgtacgagattttttttcgcaaaacggtgtccaaaatctttttgttttcagaatctctttttcgttttaagtctctttttattttttaaatctaatttaagtattaatattataaaaataactatttgaaaatctcacattcaactttatttgtgggattatgatctctcatttttctggtctttttttgtttttaaataaataaaagtaaaaattaatataattgtgtagtttaaaatttaaatcatttatttacgaaaaaaaaagaaataataatcaacggtggggcgtcgtaatcaattaatgacataataattatttttaaaataaataaatattccgtgaccgttttgtctgacacgttatccttatcccttgcttcgacggggatctagtttctgtcggtttctatttatgttttgaaaacaaaatcagcggtcattctgtccatggcccaacgaaagaattgcttacgttgacattgatttttattgtagatattttttattgccgttatttgattattcaattgacgtgattaatttttattggcaggaaattggcaagcacgaagagcatgagtaatgaaagcttgaa

SEQ ID NO: 82465 - DNA, 820 bp, Citrus sinensis
  Intron number 1 from transcript orange1.1g024026m (locus o range1.1g019273m.g) derived from phytozome v7.0 (chr-ID sc affold00530; pos 52341 to 53160 reverse strand)
caggtaccagccaagtaggtgatgcttcaagtgaaagtaaaagtggcagtgcatcaacttctttcttgtctgttctctgtcccttgctcaagctcttctctgtaagtatgaatgaattctctgtcgaatataaacggtgaaaattagaacttttatcactggtcttctgaattcttctatttattcttgtttactcgtttaagtattgaaaattgaactgattctagttgttgacatgcttgaacatttgacagaaagttagcaaggttcttaattttacgtctatcttatctaagagttcaggtcgtagggttgattgaagtgaatacgttagaacttgtatgtgtgcaagtgctgatgattctgcttaattttgaaagcacaacagcgttgggtaagtgcgtaaatttacttggtagctaatgcttaccaactatccgcccacttgtattcggtagcttatgatatcaggggcttcattgtgcatacacttaatatgcctcttaatacgaataaactgtatgacaataactagtcatgaatgaacaatactaaagctgtttctattttcatatgattttgtttctcatttgatattctcaagaaggatactcttattcgtccaaagttggtcgatcaattgtgttaataagttttatgcttatattttccaattacacattttcaagaatattagtaaacattagtagttttggatgacatattagggtatgatattagtagtttgatgatttttttccttcacttcactagtgtgttcatgttacattgcagggaggagatccttctcgtgagcgaa

SEQ ID NO: 82466 - DNA, 718 bp, Citrus sinensis
  Intron number 1 from transcript orange1.1g034824m (locus o range1.1g034824m.g) derived from phytozome v7.0 (chr-ID sc affold00001; pos 5508747 to 5509464)
ccttgcccttttcaagactcttcaggtatttttaaaaaattattattaatttggttttgtcaattttgtgttagggttttgtgattaaatcttatatttttggaattcatattatgcttctttttcattcactaatttatggcaaaatttggcgagaatagttagaatctcaatgttgcagtatgtgaatgattatatgagggttctatttaaattaaattttactttagaagtgacttagagaaaccgatttcttttatgatctgaagaattgcttttgattgcccgaattggagctcttgccaagttcccgtgctcattttatggaaccagtgcttctcatataatctttgagaacaaatgatggtatgactttcatttgtgtagctgaaacgaatggtaggcttctgttgtttcgtggaattagacgtgttctgttgcttatttattaccatttgagagtatgattaatcagtcagtgtacgaacttaccagaaaacatgaagccagactcataactaatcttacacgagcaactccttgtttcggatatgagttatctctattggtttgctttgtatttaggatgatagaagaacaacagctttttgtctctgatctgttaacctatgattctttttttggggggaggggtggtggaaaggttttaacctacagtgctggatgttctttatgttacaggcagctggagacagag

SEQ ID NO: 82467 - DNA, 553 bp, Citrus sinensis
  Intron number 4 from transcript orange1.1g005544m (locus o range1.1g005544m.g) derived from phytozome v7.0 (chr-ID sc affold00001; pos 1239014 to 1239566 reverse strand)
aaaacatctgcctcaaggaacttgtgctggggattgtatccactcttttcataggctgttttctattttgaaaattcatgccctgcttactacacgaaatcattgttgctgtgattgtcatcttggcatacgttttctttccaatattttgatcccaaggttccttgatgtcaaacatagacttaccttttagaaatttattggcctctggaaactgtattttttgttactgttttgggccatgtttatagatgattatatgctcacctttttttatactctcttgtgtaaatatatagctatctacaaatattcttatatgttatgtaaacaaatttgatccccatgctcaaaaaaagcataggaccttttctatggagtatattttcttctttaaatttacatttttaacattgatgaagatcacatgttacattatgatattctctctattttgtttatatgtttcatttgagtctgttgaggaatgatattgctagatcagatgctgcttattctcacttgtgcagtgccttaactttagtagttctcg

SEQ ID NO: 82468 - DNA, 491 bp, Citrus sinensis
  Intron number 1 from transcript orange1.1g019012m (locus o range1.1g019012m.g) derived from phytozome v7.0 (chr-ID sc affold00008; pos 933896 to 934386)
cttctagctacattcccccttttgttcctggtcaggtattcatcttttcgatcacccagtcaattcacttcagatttgattttttttggatccccagtatagttattttggttttatttatgcttatgaaactgtctgctagctgtagtagtttagaatatcttctgccttttcagttaatttaaagatgatattacgccaacaatgccatatattgtccacagaaacttgtctaattaatttagggtgtcttgagagtccttatagatgttttctgtgaatttaaaattgttgaaatcatgctaattttcgttcatcaatatgtgcctacaagtgctggctggattgttttgcatttggcccttttgctctgttgatgatttgaaaaactattatccttgtattactgtctaagatttgtggtttatgtcttctgcggtgacaatcttgatgaagcccgttgaaggatttggtgtgtcgaaagtcgtgga

SEQ ID NO: 82469 - DNA, 600 bp, Citrus sinensis
  Intron number 1 from transcript orange1.1g035779m (locus o range1.1g035779m.g) derived from phytozome v7.0 (chr-ID sc affold00001; pos 2986126 to 2986725)
tggatcccaacgccgaggcattgaactacaatcaggtaaacgtaacttgtccattgaactttcgcttgtgtagaagtgatttcttgtaaaagcacttaaaatgccctttatgatcaattaagtgtttttcattcgtaagttctccataggtaaacataaataatctattaaggacttttgaaaatgcttttgaaaacactctcagatgcaccatcgattaatcttaatttgtatattgtattcttgtgttttctttattatatctgtgtacaggatttgagctgtggcattcgttctaatttgtgcataaatttgattaaatagaaaaattgacttttcgtaatttttctttgcgtttcttctcggtaataatgcatatctcattttgattgtatttcttatctgcttttttcctccagtcaacactgattgctaagtgtaagccactggaggttttgagaaacttttagccgtgcattataatttattagtcatttctgcaattttatctaatttagttttgcttctccaagagttgatgatatttttcattgtataactgaaggtttttgtgagggactttgttcccacggccttagc

SEQ ID NO: 82470 - DNA, 359 bp, Citrus sinensis
  Intron number 1 from transcript orange1.1g042603m (locus o range1.1g042603m.g) derived from phytozome v7.0 (chr-ID sc affold00437; pos 114767 to 115125 reverse strand)
gtcaaggtaaattacgggtatatgaagcttttatggtattaattcgataataattatttcttttcaagttaattttttcccttgaaataagatttttttttcttttaaatgttatatattttcactgtccaatagttctagcttctcttaattgcaggattcttgattaaggttaatgaaattttagttctattctgataagaatatttcgatcgcttagaagagtaaagaaaaagtagtaaattaccccaaaaaaaaaagaaaaagaaaagaaaaggactggattatctttattcccttgcattatgtgatcaatatcaaaattataaccatttcttgtttattatttgtagattttc

SEQ ID NO: 82471 - DNA, 550 bp, Citrus sinensis
  Intron number 1 from transcript orange1.1g044674m (locus o range1.1g044674m.g) derived from phytozome v7.0 (chr-ID sc affold01964; pos 3895 to 4444)
ctcctactttggagtacttcaccactaccattcaggttcttgatctccaataaccaacagcacaatatagacaggaaataaagagtctattgttctcctcgagcattattattcttactgtgggtcattttcttttcttcctagtttgtaacaaaagcagcatattacatggatcaaaccttgtttcttgcggcctggaccaacattgttatacattgaattgatatatcacttctggttttttcgctctttgtctgtctttaataagctaggacaaagtggttagcgtgagtattatttatatataattcagttgcagcgtgagaattgcagctgcaggaggatgaatttctaaaattgcatatgtagaaattgttgttaattgtccccacgtgcttagttgagtagtttccaaacagctttattcaattgaccatccgagtggaattaaaaaataaaatcgatatccccttgtgcttgttttaatttctcccgtatggtttctataaatttagcgccccttgtgctcgttttctgaaccatttttcca

SEQ ID NO: 82472 - DNA, 848 bp, Citrus sinensis
  Intron number 1 from transcript orange1.1g037478m (locus o range1.1g037478m.g) derived from phytozome v7.0 (chr-ID sc affold00012; pos 1964527 to 1965374)
tctgcttcagagctaggtatccgtaaactatcaattatttagttccacaattttattgtgcaatttagtattgaattctgattgataagctcctttcgcataaagcagtttctgggtatagcttctatgcatagaattttgctgctatttgaattcttttttcttagctatatgattattgacttgctttgcaatatctgaatacgctaatcaaggagcgaaaggtgtgcctacgacaaagatagtggtgatagtcatttctactgctgccctgttagctgtggtgattgcagctagctatttggttcacaaaagaaggagaaatatagtaggtataatattgcttcattttccttcaaagatttatagccatttgcttgcatttttatgatagccgtttcctttcaatcaatatttatatgagttcaatttttctgtatcaaatcttcaataaaatctttcaccaagtagaataagtttttatatgcggcaataactgtatatttgtttcaagatgaagagttaacagtgcatatcatttagatcaggggcaaggtaattaaacttgtaaatttttggttggaatagcaggtttacttacttgcatttagtgttatattaatacacgcttctttttcacctatggttctctatttacttgcactttcatattgactggaaaatagctttaatacaaatttacagataaagaaccttctcatcaagaagatcaaaattgaagttcctagttagtaatttgtccagtatacgtactgcatatgcgctttcaactaatattgtccaatatttcagagaaaacagaaaacgatcagattcaaaacatagac

SEQ ID NO: 82473 - DNA, 225 bp, Citrus sinensis
  Intron number 3 from transcript orange1.1g040947m (locus o range1.1g040947m.g) derived from phytozome v7.0 (chr-ID sc affold00001; pos 1798342 to 1798566 reverse strand)
ctgcttgtgagaaaactgtgtatcccttggagaaggtttgtaatgctttgatcacgtatatattttgtttcattttttgcaaaggaattaggctgaatcaaagtttcatattggatctcgtatataaaaatgttaaagttaaatcctatttctgaatgatcaatttgtgatgattagaatcaattttcattttcttcatgatcatttggattgaaacaggtgacc

SEQ ID NO: 82474 - DNA, 850 bp, Citrus sinensis
  Intron number 1 from transcript orange1.1g032993m (locus o range1.1g033015m.g) derived from phytozome v7.0 (chr-ID sc affold00021; pos 1179346 to 1180195)
accgggtgaggaaatttcctttggttgccgagatattagtggaaactgaaaaaagaaaattagaattttgttgagggttttgtttcttttgaattttaattggtaaacaaacttttttttttttctgtttgattgctgagaaaatggataagaatgaaagaaatttgaggtttttgtggtgtttttggatttagaaattaaaggaactcgcatggcatgtttggttggagttgagtgaatgtttatgtgtcacttagtttcttaggtgtgataccctattttgattgctgagaaaatgaaggaaaattagaagctaattaagttttagatgggtggtgctttttgccctgcctgaatagtgaatgatattatgttattattaacattaacataaagttattatgaaaagtaaaactagttgtaaatattacaagctgatgttctatataacacaatgttgtattagcaagcttttttctcctagtttatatcatttcccaaaattcctctttcgattaaagtgagcagatagctatctttagttattaaaagaaacttgtgatgtgaatggttttgtttttttaagaattatactagtttcgaataacaatagctgtcgtgtgtttgagttctcttggtttgcagcggcaagcttttgtgccggttcacatgttgaccacattggtgctataagaaagttttcatctctacaattgcagcctactttgttactgttcttttaattgttatacctatgtctatattatggtattttttcttgtgtagtatgctcttactttgtttttgatgaataggttgaagagactcctggtggctttcctttcaaaat

SEQ ID NO: 82475 - DNA, 851 bp, Citrus sinensis
  Intron number 2 from transcript orange1.1g023896m (locus o range1.1g022357m.g) derived from phytozome v7.0 (chr-ID sc affold00001; pos 1769303 to 1770153)
tcatcaaaacccaatttggaaagcttgatattttggtaagattttatcagttctattcatttccatttcaacccatacccattgcccctcccctaacctcccctaacctaagaggaggacggggatgacatatactgtatttatttcattcttggggtgggtaatatcatccagctccctttcatttttttcatatttttctattaaggacaacttttattctttttctatttgtatgaaataggtccctgactagcagcgaccagtgaccgccctgttggaattactgaaatatcttctaatgttaacttgcgtgaatgcattgcatcaatcaaaattcagtattttaattttactttggtcaaagcaatagggacagtgacctatttggtacaagaaaaatatgaaaatcagggatgtggatgtaattatacaatatgataatgtatgaaccaaactgcaatatagtgagtttttgagacagatctattcctgaaggtatctattttgccaagttatcaaaggttctgtctatgaatatgttctttcaagtctatattcttgtagtcgaagtataaaatgaaagatgctgagggttagacctgtatgtgcatacaggctaacaatgcaggaattgcaagtgtcaagtttgatatggatgctttcgcagattcaggctatcaaattgtaagatgtaatcaatatattatatatgattcaatattaattaacctcattttccaccatcagaaagtgagtttggaaccactaatattttaaatttcacatatctataggtgaaataataatcccattattagttaatgtttgttttctatagacgaagggtg

SEQ ID NO: 82476 - DNA, 1018 bp, Citrus sinensis
  Intron number 5 from transcript orange1.1g013834m (locus o range1.1g013834m.g) derived from phytozome v7.0 (chr-ID sc affold00093; pos 278092 to 279109 reverse strand)
ttcggttttcaccggaagtgctttcctctgctcaggtttctgtctacctctatcgtgtgtattttcacgtagattatctgtgctaacaagtttcttttgaacagaaggatgaaagcaatatgaaagtttagtggtagttggtttatatgttactcaatgaccttgtagatagcctgcctgtcgattaccttccttgctttgtgtaatctaattttggattccgtcttgagttggtgagtaacaatattttgatgacctcttgagatgaggaggaatactgaatgagtggattaatttaagattctcactctcatccttgagctgttacaaattgaagtaacactttggattactgagcgatgaagaaaattttaagttttacaaatggaaaaatcaaatgttgtctggcattactagagtgaaagtcaatggtatatagctgtggttgcaacactcttgcaacactccatgcaacaaagattttcttgctttaacatggttttttctttgtaacttttaaatgaggaagagttattgattgttcagaagtcttaaaagctaccacttggagtgccacaaacaagtcactaagcctacatcttgtccttaactttaagaaagtagttgattgttgaagatactatcacaagaaggaaaaggggtctttgatctttgtaaaagttgtgtagagggtgttacccaggttatttagtttttataaattagttttctcattactctcttggccaagaataatttggtggatattaggttttcatgagtgagttttgctgcaggtttctcagcattaaattttgttatttttaaacaagttttagatgaagattgatgtataatattagttttagcatctttgacctttgagtgaacgtagaaatagagttatatttagacacagcaaagatttgataatagttcttccagaaattttcttctgataatttttccttgataattttcaggttgctgtgaaagaaacaccattacaagaagtcat

SEQ ID NO: 82477 - DNA, 1002 bp, Citrus sinensis; identical to SEQ ID NO: 82225
  Intron number 1 from transcript orange1.1g016192m (locus o range1.1g015873m.g) derived from phytozome v7.0 (chr-ID sc affold00001; pos 3946805 to 3947806 reverse strand)

SEQ ID NO: 82478 - DNA, 316 bp, Citrus sinensis
  Intron number 1 from transcript orange1.1g044494m (locus o range1.1g044494m.g) derived from phytozome v7.0 (chr-ID sc affold05169; pos 4031 to 4346 reverse strand)
gatatattgctccaggtaatcttctagctattcttcttctgcttctttaattattcttttaaatagttttatttagttagctgcttaggttcgaattttggaataggtaaagagctggaaaaatgaatttgaactttgcctaccagtttaactttttttttatttaaaaaatacactttaaatatcaattaaaaacatatggttctctgtcataccttgctgcagaagctcaaagatataaacaaattgctcttgttattatttagaaaacatcactaataaaggcttttgttttcatacagaacttgcctacacc

SEQ ID NO: 82479 - DNA, 464 bp, Citrus sinensis
  Intron number 3 from transcript orange1.1g022468m (locus o range1.1g022468m.g) derived from phytozome v7.0 (chr-ID sc affold00129; pos 373306 to 373769 reverse strand)
tggtaaaggtctgtttatccttcaccgaatctcaataatagtaggcactttgccacaatatatagtagtaatttgcgtcccataagaatgactacatgtttgaatcaaaggtaaggtttgttcatttttaataaaataataatggtgaattggctgacaaaaatgttaaatttgaatgtcaagaaaaaagatgagaagaaagtaaaattttcaagaacaaaaataagttgatgttcacaatgtaaagatacctaagatttcactaacaattctttgctcctctctcaaggaagctcagtccttttttcccttttctttaaaacacaactaccagaaaagcatgactatagcattagcatccaacacaagagagagagagagagaatacattattacacaaaccaatgaaatgtccatagttcctaatatagctagattgattccatattctttttccagactct

SEQ ID NO: 82480 - DNA, 1038 bp, Citrus sinensis
  Intron number 1 from transcript orange1.1g022468m (locus o range1.1g022468m.g) derived from phytozome v7.0 (chr-ID sc affold00129; pos 374374 to 375411 reverse strand)
ccatctctgaaaaagatcctgctccaattgtaccggtaagcacatttattttgtctaaggaaaattcccaggtacccttattgaacttatggaaaatcataaaatattttacttttgcttctgcttgcatacattttcataccttgatactccatgcatggtgatgagtagttcagtttaaaagatgaacatggcaatactgcactcctgaaataaaagggtgaattagtagtgtgtgtcagtgtgtgcatgtgtgtttgtatatcttaaaacattagtataattctgaatgtaactgaaaaccataccaaatgacaatccttattatcttatacacttgatagttacagaaacccaagtcaagattgccttctatggctagatatcagtcaccttgtcatcataaaaatcagaatacatgaatcaatgattacaccctcaaatgtcaaagctagaaatcatataggaagttgtaacacaaccaaatggagcagctgcagataatgtttctcataaatgacagccacaccgtctctagtatagttatagacaggaacttttgatttacaggcagacaaaacaatgatgtgtccagaaataatgtatgtagatggtgggacaaagctgaacataagaattcttagcatatttgataataaatccaatcccaccacaaaagcaaggaacacttttgtttccataattttcttagggacagcctcaaattcagcaagtgaaacacacgatcaaacagcatcttgacaggttctatcatttggttcggttaaatcttgacatcatatcactcaacaacacaaatgcagcataagaactataagctataactgtagatctgcaaatcatacttgttaactgaccagtgatctttttttaaaagtaaattaggcctacaagagcatattatcacttgggaaaaagtagtagtttattgttgatgactgcaaaattatgctaatgataactattgttcctttcatgacagtgctgataaaccaattgagattgatcatcacttgc

SEQ ID NO: 82481 - DNA, 783 bp, Citrus sinensis
  Intron number 2 from transcript orange1.1g024440m (locus o range1.1g024440m.g) derived from phytozome v7.0 (chr-ID sc affold00001; pos 2251483 to 2252265 reverse strand)
aaccacttggaattgctgtcacactcagaggaaatgtgagcttatgtctttcactctataatgcttatcttttagctgctttttaagtccttcacctttcttttctgtttttgacttacatattgactgttaaattgttttattctattaatattatctatgtatgaattaatagacgaaactaaagcttcacatttccattggttatatgtggaacagttatcgtattatacaggttgattaacaagttgttattttaaatggggatcctagaagtctcagttgtttaattatgattgtgcttgctatgagttcaaatggagaagggtgtcaagtatttgttatttctttttgtgtatgctagtaatacctggatgctgtaggcagtcataatgctgctgaagtttctattttgtatgcttttaaaaaagtagtggaccagtgctggtattggcttttgagtatgctgtactgcaatgtcagtggtgcaacgcttacattgacaacaccactgcattgcacaagtgttgctggttgcagacttgcagaggttagaaaatatctttgatttgtcttaacaatgagtatggagtgatacaagaagataggcaaatagaaacttttgctttaaaaacctgatgttttctcaaaatcaccctcttttgatgttggatgtttgaagcatatattttgcttgtctgatattatatattgactttgtttcattcaaatcctattcttgtgtatctcttatatctaatatcgatgtggatgaaatgacag

SEQ ID NO: 82482 - DNA, 876 bp, Citrus sinensis
  Intron number 1 from transcript orange1.1g019952m (locus o range1.1g019952m.g) derived from phytozome v7.0 (chr-ID sc affold00029; pos 620940 to 621815)
ttctggtggcaagtctggattgaccggagcactgagttagcatttttttttttaatgaaatttttatctttcaattctatgttgtttctacttggtggtgtgatttaaaattttagagttatggcgtgccatggtgccatttgttgcattaggatcattattaattgtgcgtttgatgaagtttgcaactttttgaaacttttgttctagattcatgcattctaccttgatttcgtgattgctgtttggcatacctgcatctggcatcattgaaagtgctcagtgtttatgcataaaagtccttggtaaattgtttcctgagcgttatgcttagagttccagtttttgttataaactaagttcttatgctattagcttcttcagaaccgtaaccaaacctatgcccaaaccaaactggcagtatttttacttgatattacctatttgttattttatgccacaaagtacaatgccacagtacttgtagtagctaagagtagagtttgttgtctggccttcatatcgggtttcagaagttctcttccattcttggtaacctcatcttgtatgcgttatttggaagttagtcaatttggattatgattgttctagtttatttgttttcatgaattcaaggaagtttcgttctttccattgagtattcttttgtcctactaatttttgcaatggcttaattttgtttgatgagtttgctatggagaaggtacttttgcttgaaatactaatctgcaatttttatcattttccagtacgtctatgtatttttcaagtaatgtgtggggtctaataaaatgcttcctccttggcatatcatgtccagttcctgcagagaagaagggagagggaagatcaagg

SEQ ID NO: 82483 - DNA, 527 bp, Citrus sinensis
  Intron number 1 from transcript orange1.1g015010m (locus o range1.1g015010m.g) derived from phytozome v7.0 (chr-ID sc affold00274; pos 26726 to 27252 reverse strand)
tattttgctttttgggcttagcatttccagaggaggtaaccaaagtttcttcgttggctttggatttgtttctgttttgctttctaatatttatgtgaattgtggaggtttttcgagtttgttttgaaattgtaataatgggatctgaagtctggagaaacagctagtgggatattattggttttgaattcttgttcatgtttttgttaaattttgaaattgttagttcagggctccagttgaccttcactcttgaggcttgttattatgttgaagatgggtgcttttaatgccttttttttttatgttcttgttgaatttagggttccatgaaatgagtcgatttgatttgatattgaaatacaggacattggcattagtcattttctttaaaattattatgcttgagatttcaggatttaagattactaataaataacagttcgaagtcattttaaattttaaatttgtgaatttatttagcaactgttttgtgttggtttcctttgctgcagatttatcaaagg

SEQ ID NO: 82484 - DNA, 217 bp, Citrus sinensis
  Intron number 1 from transcript orange1.1g018633m (locus o range1.1g018633m.g) derived from phytozome v7.0 (chr-ID sc affold00103; pos 280692 to 280908)
tcaagcatagcgttttctcaattaatcaatttgccgtatgtccacagccacaggaactcctctccttttaatcggcattcagcagctttgctctcttttcttttcttttcttttcttttttctttttttaattttactgatatatatttatgaatgaaatagtagtatataaataaaacgagctgattgtaatatttgaattggtttctacttgtag

SEQ ID NO: 82485 - DNA, 686 bp, Citrus sinensis
  Intron number 1 from transcript orange1.1g022138m (locus o range1.1g019992m.g) derived from phytozome v7.0 (chr-ID sc affold00001; pos 953015 to 953700)
gacaccaagatttcataaggagttttctcgacgaggtaagctttgtgtttcattggattttcattctttatatcagttaatcttttacgaaatagcctcgaattaatattttctggccctttgatttgacctcgctgcttttatactgtcgtttctgaagacaaatcgaactttgaaatgaaaaaatttctaggcttctcctggagaccctgctgtcaaaatgctttttaattttttctaaattccgtgttctttagtattcttttgatttgtgaatttgttgtgaaaattgttcttgggtcggtagcccttctcagcttgcagccaggggatttttcattttttctataaagataattcagttattattggcatgtgaccgagtgccatagtttgtttcatttttgtcgggatatttttttgccaaaggaaccaaactttagtacagctaatggggcaatatttatcttgtaataggttatttgagtatattaactgttagtttgatataatctatagtggagcttgtatatgaactaaatgtctttgtggtttcttagcatgaggaatgccattcttcttcattttttctgttatctaatgctttttatttacttatctcatgaagttcatatgcttttgtgactcaagactccagagcatagctttcactctgagctgctaac

SEQ ID NO: 82486 - DNA, 974 bp, Citrus sinensis
  Intron number 3 from transcript orange1.1g030177m (locus o range1.1g028116m.g) derived from phytozome v7.0 (chr-ID sc affold00111; pos 144802 to 145775)
ttactccagccatattaggtgcttaccactggcaggtgtgtttatattttatatccttcgaagcttaccactgtctagaagaattatatggttaagagtgactattcatttattcttgtgatgagttgagtgaaaattatttgagttgggcattagtctaagttactctgcactgttatgtctaaaaccacacaggataattgattatgctatggttgctggccgttatgatttagagatttatcctatgcaacctgagtccaaatggagaataagcactaaagcagatgtgtggattctggtgttttttattctctaagtccattgttgtgacttgaaaatagcataagtggagtacagtgcattttaaagatgataaggtctttaaaagcctttgacatttcttgaacaatcacttctctcttgcttctcttgctttattgcgctagcactccatcttttctgtgctcattctgtagaattagaacttccagcataatgtcaaaatcatacttgaatttcttgtgtattgtgaccaagcattcaagatattgttatgaaaaactttctaggttaggatatatattgattaatgaatatatgagctataagttgagtgtatgcctgtcatatgaggttccatgagcatgccatcaacgatctggatctgctatcaagatagtagtttgattggatatttccatatttctgatctttgtttaatattttgtgttagtttttttttttttttgaatgttctggaatggtcggagaggcctaacatgcagcatgatataaataataaatattttccccattcaattgtgcatgactatgatgtatttcattccgtttaaatttaaatcttttcaacaattattagtgaaatagttttaaggatagattgaacaataatctggagattcaatttgttaaccaatttgtatcggcattcataggtaagaattgctagt

SEQ ID NO: 82487 - DNA, 866 bp, Citrus sinensis
  Intron number 1 from transcript orange1.1g026693m (locus o range1.1g022345m.g) derived from phytozome v7.0 (chr-ID sc affold05193; pos 2422 to 3287 reverse strand)
ctaacaaagactgaaggtattcttttgtcttcaggttattgcacaatgtttactctaaattatttactatttgtttgtgaagtgcaatcaattcagtggttgtcttgctaagctccttttattttccttttattctttgtcaatactttctcacagttggaaatgacttatttgatacttctctttatgctattatacgttttgtctatcaaatctagcttcccaaacatattaattgagaaagccactgtgatatctttacccatgttcttggtattgtttttgtcattatcattataaaaagatgagacattgggtgctaacgtggttgatttgtttatgctaaggtgaaaggctaggtttaaaatgaatatatattggtattatggttaaccataacaccttgagtttgtttgtggaagggtcattctttgctattattttatcttttatttttcaaagatctgagcagcttgcagtcttgttttagaggtagcaagatgcagggagagaccttttatatcccaaaggcgtacatttagtatatacaaatggattgcctaaagtggagttgtctattaactccaatgtaaccactttaacttttattgttgcatctatcaacaaacatatgaatatacctatttacaccaattaaatactatccgaaacttgtggtattaactattagccagttttcactctttttagttttgaacagattcctgatgcatgctcaattgtgtactacatgatacagactgctttgctctctgtccatgaccttttttgccaatacgtgtacattatgtacaatgaaattgatggtagaattaattttactaatgtggtaatagtctttttca

SEQ ID NO: 82488 - DNA, 1023 bp, Citrus sinensis
  Intron number 2 from transcript orange1.1g037801m (locus o range1.1g037801m.g) derived from phytozome v7.0 (chr-ID sc affold00039; pos 328999 to 330021 reverse strand)
ttgaggtaactaacataactgcttaaatttcgaatgagttcttttttattctttttttggattccatctattgctatgatttgagtctacatcaaagccatgatgctgagtattggataatcaggaaaatatatttgcataatctgggctgccttgtttattgaatgcatttttgtttttaggccatggtagaatgagataacaatatcctgtaaagtcttaattctttgcttttgcatattttatctgattgaacaagccctaaagagatcaaacaaaaaaaaaagaaatatttttgaaaaattgatctttggtgaatcttcttaaaaaactatacttaatgtcgatgtagaataaataatctaatggacagaataaatccatatattattccatgtgtggtgtcttaacaaaatgcttgctgccaagcattggctttaatgttaatgactctatgactatgctatatgcttaaagttgctctttacttcagcatcaagattagctaatggcatttcggtgttgcactaattatttaaatcatggactaaattatttacagtacatcaaaattaataagaatttttaagttcagtagagttcttttccggcaaaagaaaaagaaaaaagaaagagttaaatgaagtacaagtgttgattcttattggctgaagtaataatatcactgaagtacaagtattgattcttgttagctgaagtaataatatcactgaagtacaagtattgattcttgttgcctgaagtaataatatcactatgtttaaattattttttattttttctttggttatgcacatataatttgatagctgatgagttctcagccaagctagctaaacgggttactatttttgctggtcatgatgatgaatccaaacccgttttgctagttttcactctcttttaagatttgttttgttgagaaaacctgtttttagttaacacaacatttttttttcttcaataggttttcaggattgagcaagactatagaaataaata

SEQ ID NO: 82489 - DNA, 788 bp, Citrus sinensis
  Intron number 1 from transcript orange1.1g037801m (locus o range1.1g037801m.g) derived from phytozome v7.0 (chr-ID sc affold00039; pos 330137 to 330924 reverse strand)
tcgctttgagaaactactcatctgcagctaaacaagtaattgtgccttttataacctattgcttgcttgtatgatgcttgtattctatctatatgtataagcttgccttctatataagtattttactttttctaagttcataatagttttttcttttgagagagttaatgatatgagaaattacaaatttaatatatattcaaagttgcaatttcatgtttagggcatatgtattactttcgtcttatatggtgtgtgattcttgtcttaaaaagtaaattttggtgcttgattttgaaatagtcctaaaataatttatgaggttttttgtgaacattgaccgtgtgaaacctcaaaacagaaaatgcagtagaatgttcatgtgtgccctgttaaacatgatgtgcagctcatctgagattgtaatccagttagtcatattatcttgtgctgatgagtttagcccataagtctcataaccatgcaagtaatgtcaattataatagaaagacctctctgtaatcaacttcagtcattggctaattgtggaattcattgtgccagtgttcaatttcaccatttgcttctgatcattaacaaattttcttcacccgctttttcttgcttagaataaacaaaagggctaaaatgacttttatcttgttataatttttgcagctcaagttttgaacttttatttattttggctgatagtagtatgttgatttgtgtttgtgattgctttctttgtagggaaagttggcatctgttgaggagctggaaccatt

SEQ ID NO: 82490 - DNA, 924 bp, Citrus sinensis
  Intron number 1 from transcript orange1.1g035423m (locus o range1.1g035461m.g) derived from phytozome v7.0 (chr-ID sc affold00008; pos 299620 to 300543)
ttaccgtatcttgtacaagaagcgcacccgccgaagtaattttgtttttcttgttctttttttccttgttgattttcatctttaaaaaaaaaaacaaaattagggttttattttaaaggcgaatgtcagatatttgaatggttgttctatgactttggaattttaggtatttaggaaaaagcattggcttgaatgatttaattagtggcaaattttgaaagaatagtggaggtggctgttttctttttagtatgtgaagggaagtcgcggcagcattgttggcggtagttctctagcagtttggttcgctatgtggtgaattagggctttcaagagtgtattaattggatgttcgttaacggtgtaattgttatgcattgaatacatacccgcagggcaaaatcgcgatcttgacattatatagaggcaggttgttcggtcttgtgaatattgggcatttagtttaggtttctgtctttagtgatacttctttaaggaatagttgatgatacctccaatttgcacaataatgttcttttaaggatggatggcaaatggcctaaatgcatgtcccattatcatatcagctttgttctcacctatcttctttttattattggttgaagacattggaataacaatgaaattaagcttttgtactagtcgttgtgcaagtccagctttagacaaccaaattattctgcctggatctaatcttctggcacttaggtgaaagaaaagctttaattacttgggatactttttattcatatgttgccaatctgtgctgcaattattaataattacctctttcatttgtactggtcttgtatttttttttccctgttcacttgtcacattgcattgcttattgatcaaacatttgttcttatatgagcatttttcttcttgcagttgttcaat

SEQ ID NO: 82491 - DNA, 503 bp, Citrus sinensis
  Intron number 1 from transcript orange1.1g019626m (locus o range1.1g019626m.g) derived from phytozome v7.0 (chr-ID sc affold00157; pos 299973 to 300475)
acctccttgatagggatattgataatgtaactgctttgattctccctctccgtatttgattttaatcttagacattatcaataaattttttttcttttttattcgctaataattttgggtctttttggttaaattaaataatgccttagtgatgtttttgagctggtactttcgcaaaaccctttattgatactcacatggagaagggagcagaagagttcaaagttcaaattgaagtttcgaaattcagtagacatttatgaattcactaatgatcaactgtaacttacttagttgttatagtggtttgaatgagtagttttttttttttaatttaatttaagtcctgtcaaaatccatccctccatattttttgcgtattcaactgattgtgtgaagtgtttctttgaaaaatgactgtttcttcaagagctagatgattttatatttgatatttgtgtaatgcaggtggaacgcacaaggttaaggcccgttgcgagtgg

SEQ ID NO: 82492 - DNA, 337 bp, Citrus sinensis
  Intron number 2 from transcript orange1.1g030764m (locus o range1.1g029554m.g) derived from phytozome v7.0 (chr-ID sc affold00530; pos 55327 to 55663)
ctgttgcagagaatctattagatcgattggaggtacaagttgtgcttataagtttatgttctttgatatctctatcattgtcgttgctattattgtgataatctcttaaaaaggagactttgtatatcaatgctttaaatctacggaaaattggtattaatcttcgattatgttgccatgtttgataatatttcctaaaagagcttctttactctttgttttggtctctctctctttttttttttttgttcttttgataatcctaggttgttttataatgagtgagccatgtgcttgcttttttgtaggattgtaggaaaacatttcctacggcatt

SEQ ID NO: 82493 - DNA, 555 bp, Citrus sinensis
  Intron number 2 from transcript orange1.1g025204m (locus o range1.1g025217m.g) derived from phytozome v7.0 (chr-ID sc affold08189; pos 571 to 1125)
cagtctgagacagatttcatttgtgagtttattctgggaaagcttgagcaattggttttcatccaatattttccttttctcagtttaagtagtttattttctatacctaacatgaaaagtaattcttcaaggctatgcaagtgtgaactcttatatctatctgaggtgggtggtcaaagacattctattctgtttgcacatatgaaattagctcttaagatttttttcttctctttgaaaatttgctagagagttggagaaaagaataataacagaaaatgtttctccgaacttgtgcatagagactatgcacataggctttgcctctggctcagggctttgcaagtataatgttttggatcatgaaattctttatttttgctgtttaatgcaattctatccttctttatattctttttgggatagtatctatgtatttgtgctatatagttactatgaaataatttgattcggtggctaatttgttgggatgaaactgtaatgattgactatattgtaggttgcccgaggccaaattgagcgagctagtgccac

SEQ ID NO: 82494 - DNA, 487 bp, Citrus sinensis
  Intron number 4 from transcript orange1.1g015572m (locus o range1.1g015473m.g) derived from phytozome v7.0 (chr-ID sc affold00788; pos 44798 to 45284 reverse strand)
cttttcttccaggtatatatctttctctttactcttatagtacaataatgtgattgtttccctttatttttttcataattttctcttgacacgtcattggagctatagtggcaaaatcaaaggaatttttcaaggaacctgatttcgttctagcttgtggttgtgattggatttttgtattcttaaatctgggtttcagttactggaggaatttattatgaacttcgagtgtaggaataggagagagatcatagaagggcataggtgtcagagagggagagatgagggattttgtctttgatagcttattcaaattcttcattgacttgcgttaatggaaattcttaaattgacttgttttattgggaactctttctcagtttatgtctttatcttattttattctgcatcagcatcctgatttcttattaaggttttggttaatgtttcaggctaggcaccagaaggttggagaaaaacctcttct

SEQ ID NO: 82495 - DNA, 766 bp, Citrus sinensis
  Intron number 4 from transcript orange1.1g029840m (locus o range1.1g029841m.g) derived from phytozome v7.0 (chr-ID sc affold00001; pos 4976517 to 4977282 reverse strand)
aactggctcttcgtgctcctttgggtcagaacacggtatgcatttgactcagattcttttctattgtagtttgatttcataatttagcatgcacgctgcctacttttgagcttagcttattatattattattctatgatttaattggaacagtcaggttaacttgggctgttttgttcttaatagtgaagttgcaccatctagttttggaatgtttattttatgtcagtaaaaatattatagtgtactttctacctgttttatttggattttatttttctgtgaaattttgaaacttgtgggtacagattgggacttagattgcaatagaggtttaggttgttgagcattaattgtttacaagtaaaaagggactgcagtaattattttactcagtttatagttattatatctgtggttttagaaaactattccctctttaaagatttagcagcataagctattatgtaacattttcttctgtagatgttttattctaatcatatgaatccctttattctctgtgtgtgtgtgcgtgtgtttatatatattgttggtatatcttcacaactccaattctggtaacagtgattaatttttttaggagttctcctgatgccatactttgaatgcaacatcatttgctttggtacacaaattagttgggaaaatttagattgctgtataattgtttaaagttatggattaataatcttaataaggtgaattttatggccaaattcaggttctcctgagaggtccgaaga

SEQ ID NO: 82496 - DNA, 681 bp, Citrus sinensis
  Intron number 5 from transcript orange1.1g023783m (locus o range1.1g023783m.g) derived from phytozome v7.0 (chr-ID sc affold00093; pos 401247 to 401927 reverse strand)
gaactgtcactacaaggtgttgtttttacttctcagattcaaagcctatcttgaactctgtttcctttaaaatctttgttttatatcttcttggctggttgaacatctgcattttcatgtgatttttccttcatgattattgtttgccttacgttgagagaataatagagttctgacatcataaagaaatgaggatatgaatgaaaaactgcaaaagttctcccatctccactctttcttgaaagatctatacagagcaaagtgccctacctattgatgaaaaaaatccttggtaatgcagcttacctttcactctattttcaatgtgactgaaccagcctttaccgatcttgtggaggatatggtgcttcccctagtgactagaaggggcagcagttagtcgagtcttttgctttccttaattaagcatggattctcaggatggaatcctgaataaatgagtgatatttgaagttactaggtttaggtttatgcataattttcttattcttcttttatttatttgagtttgattatcctctgctttgtggatgtttttattcgacaaatgtggttattgacttatccatgatgattgtacatgtgcttacattttttttttttatacaaaactcaatatttaaaaaccttgtagggaagttgttgtgcaattcaacgctg

SEQ ID NO: 82497 - DNA, 825 bp, Citrus sinensis
  Intron number 2 from transcript orange1.1g023783m (locus o range1.1g023783m.g) derived from phytozome v7.0 (chr-ID sc affold00093; pos 402588 to 403412 reverse strand)
ctgcatttttgctgctgacttgtgggttaattgtggtatgtaactttatatataaatattacttattcatcacgcttgcgggtgcttatggatatgattgttgtaaatgatatggctttcgattgtaaatattggtttcccataaataatgaaagtgaaggcatggacttaaggtgtgagatgaatatattgttgtcccaagaatgcgacttgtgagtgcattatatctgctttttaaatggcttagttgagcaatttatgttttctttttcaataatttgttattattattattgttataggatcattgatatatgacttgtcggttaatatgaacatagattcattttcaacgttcatttctctgacttgtgatggtttcttgataattctagatttgatggcttgaaatttgttctccacaaaaagaaatgttaaacctatgtcggatttgttattcttcgctatactttgtgtgtgccaatagtctcaggttaccagaatctacttcagttagtaattgtgatcactaaaacagataggtacttgcattcattctatttgtagttttccactaatacattttgtaattgctatctgacgaagccttgagtttggagttctctctttttattcaatatgcaaatatagtgtgaattatcaatttactagctggaaacaaattagttaagggaaacatgggaactgtttgaatcatctgctgtttgttatgctttttatgaaacaagagacaaaaatagaggcaattaatcaaataacaaatgtttttctctttctgatttcagacaccactgctttcctttt

SEQ ID NO: 82498 - DNA, 1039 bp, Citrus sinensis
  Intron number 2 from transcript orange1.1g012005m (locus o range1.1g012005m.g) derived from phytozome v7.0 (chr-ID sc affold03334; pos 7375 to 8413 reverse strand)
caccagaaggaagcaagtgaaattaccaggtaaattaatattcttctaacgtggaacgtaaagcttatttggtgttgttttgtacttacctccgagtgtatttgaggaaaaatatcttattacaattaatttttttttaataataacacccaaacataaagttttatagtgtaatgaaatttcaaatatatattctagaattcttaatagtagtagttgtaggtatttgtgggttgtactttttgtgtgttgtttgtttgttacgaggtgtgtgacaaatattaaatcagtctattaggaaattagggtaatagtgtaatttccagaatttgagagccaatatttacgaaaagttggtaccaacttagaatggaggcaaatatctgaagtatataaggaagtgagaatattctatcaaagttataacgttagggagataatggtttattagcgaaaatattccgaagtaaatggtaaaatacaatttcttcaaaacttaatttcttattttccttttacagaacaaattttccgaataaaatttagaagattctcgtttttcactttaaagatttcggcttttaccacttaccccttataattttcataattctcatattacctcttgatatccaaatttcattgaaaaaagaaaaaaagaaaagtggtttgttttgtgaatgggatggcttttcctataaaaggtttgacgtcaaggagataatgatgtattatatgaaaattgtaagagcgtaagtgataaataggtaaaacaattgtaagaggtacgtaaatatgccaacacttttatcaaaactttcagatggctctaagtcttttagtgttaattaatttatatatgataatgaaaaatgaaacctaattgtttccttctctacgtttctctaatataaaagtaacaattgttatcttaacaaacttataatgtaaatagatcttcaatttagcaaactagctgattttgatttgaaattgaatttcaggtggtggagagatttagacttccttaaaaagctgc

SEQ ID NO: 82499 - DNA, 519 bp, Citrus sinensis
  Intron number 4 from transcript orange1.1g027583m (locus o range1.1g027583m.g) derived from phytozome v7.0 (chr-ID sc affold00292; pos 118555 to 119073)
aaaagtagtcagaaaaagtctttctcgtctaaagagtactcactccttgacttgcaaatatttttgatcaattgtaaaggctactgaattgtgatgatcatttgattatgatgatgctagtctgttactttcgttcattttgtttagattatcaatttatgtgcaattgttattgtgttatttacttgcaataacttagcttgtatcttgaaagagaattatgcgtgagaaagttttctcctctgagcatgtctcctttgactttatttatttatttttttctcttctaaaagaaaatttctggctaaacaatgtttgcatgagttgattctgttcttcttcttttaatgtttcttgtttgttgtgctactggaaattctaataagtagaaacaacgtgaaggcggaattggaactgtatgctagaaagggttctaattctatggttgttttaggcatgtttgcttataatagctgtcaccggtgcaacttgtcagggtgttgaagaaactgaggagat

SEQ ID NO: 82500 - DNA, 507 bp, Citrus sinensis
  Intron number 1 from transcript orange1.1g020559m (locus o range1.1g017106m.g) derived from phytozome v7.0 (chr-ID sc affold00032; pos 508388 to 508894 reverse strand)
aggtttttactttttgatttcatgattctgatgcccaaaaccaaaagcttaagttgcgaaggccctatttgattgttggaaaagtttgggagaaagaagaaaaatcatatgccgaactgaaagaacaaaatttgaaattttactggcttaattggtgccagagatacaaattttgaatttgttcagagctgaacaagcaataccaagaattttacttttcttttctgtatccaaattagagtttaggggagaactttttatttgctccattttctcagcatctatatagaattttaatcttttctctctggaaagaaaggtagacacaactgaaagttactctgcgtagtttagttggttaagtttttcaaaatttggaataagaactaatttgaaaaaacacacgaccatggttttttttaaaattattatgatctcttttctcaaaagttttaaaatgttattcctttattctttttctttttatcttgtttttagatcaaggac

SEQ ID NO: 82501 - DNA, 413 bp, Citrus sinensis
  Intron number 1 from transcript orange1.1g015797m (locus o range1.1g015797m.g) derived from phytozome v7.0 (chr-ID sc affold00266; pos 56762 to 57174)
ggctctatcttttgttgtgggaaagtctcagatcggtatgttagttcaaattattttttcctattggttcatccgttcatgtctagttattatttattcatttatttatttttttatatttgatgagcttgttttgatagtggaaatgtaaacttaagaggattttaaggtgtgggtttattttagattttagaaatgattacatgggaattgaaatttttttgctttataatgctagaggagaagaagaagctgaaattgtaattttttaagttgatggaatctaaataaaaaaaaaagacaatcaactgagaggttcaacataagtagttttgtttcattttggattggttgttgtatttactatagagcttgatgttgtataggaaagagaaaggaaagaagcagccaac

SEQ ID NO: 82502 - DNA, 227 bp, Citrus sinensis
  Intron number 2 from transcript orange1.1g001731m (locus o range1.1g001526m.g) derived from phytozome v7.0 (chr-ID sc affold00179; pos 100911 to 101137 reverse strand)
gttttccgacaccactcgtttcgattctactctcggtatttttgttctttatatatatatatatatatatacacttccgtttatagtaaattagattattattatttgttttatttatttaattatttatgtgttcatttcgtacttagaatatgaagagcactttttttgattttctatagtggttcttttattagattactaatctctaatttttatgtatttag

SEQ ID NO: 82503 - DNA, 330 bp, Citrus sinensis
  Intron number 1 from transcript orange1.1g010653m (locus o range1.1g010653m.g) derived from phytozome v7.0 (chr-ID sc affold00681; pos 19199 to 19528 reverse strand)
gtgttgaaagagttgcaaagatctgaactttgacggtaagtgtctgaacaatttgcttttttcttgtggtggttgttctttaagccctttcttccattttgttgcatgatctgtttaaattgatatgtttatggcttatgcttctgacttttgtttgctctatgtggaaaatttatgagtacatataggaaagactttagcctagggaatttttgatttataatattattggtatcaaccttaatgtcagatggtacattgctgaagttgcattttgtttttttctcttatgaaattatgtaggttgtggacatctggaagtagaaaagt

SEQ ID NO: 82504 - DNA, 438 bp, Citrus sinensis
  Intron number 2 from transcript orange1.1g023688m (locus o range1.1g023688m.g) derived from phytozome v7.0 (chr-ID sc affold00001; pos 3341168 to 3341605)
tgcacacaagactcgtccgccaactcctcaacgttcttaattatctctcttcgcatttctatttccatttctgcttcttaatggcacttgcttatgaaatatacatccaacaatatccagcctttctatgcaaaagctaacaatccctcgaccattcaccaaaagtccaaaatcatgcgcgcattgtcaaatatttgatttttacgcctctaaaataagtttttctcttcttttcctacattattcatgagttggtctataatcaatgtttcaagcgattaaaagctcattttagtttatttttatatttatgtatatgctaattaaaaatgcaatgtggatctcaaactagtgaatatggggtaaaacataatttattaatggacgaaagattaattttcaggtggaggacggtttagaccagcaccaggattggtg

SEQ ID NO: 82505 - DNA, 586 bp, Citrus sinensis; identical to SEQ ID NO: 81770
  Intron number 1 from transcript orange1.1g017158m (locus o range1.1g017137m.g) derived from phytozome v7.0 (chr-ID sc affold01369; pos 8851 to 9436 reverse strand)

SEQ ID NO: 82506 - DNA, 754 bp, Citrus sinensis
  Intron number 4 from transcript orange1.1g026553m (locus o range1.1g026553m.g) derived from phytozome v7.0 (chr-ID sc affold00075; pos 302012 to 302765 reverse strand)
aaggacaaaggtatcttcagtctggctgaaagatttctctactttgtgaattatcattttgttttttatttcatgttgtcatttttaaaagcataatactttcaatatccagtgaaaattttaagcatattttaagtattggttgttggaccagttaggaggtccaagcagacgagtgagttttataagctgacttgctagacaagctgagctacagagtctctttccaagacccctagtctagatcagggggtttgtgaacatatgttccttttccactacttgaggtgattttagacgggtgattttaactatagacctccattttggcctcagatgatatataaccaatgtgcagagagtagctttgtctgatacatattcaaatgctagatgtgctcaattttggttttgtttcatgctttttggtatgagttttaatgctatatgtcttcatggttcaaagatagacttgtttttaggagaattgaaattcaaaggaaactgttcaaaccattattcatttgaatgctgtgatttccttcctcgcgaagttgtgtatcagagatacggtcagcttatgcgtttggacaatgtgatgcctacttcatattgtttatagagcacactaaactgttcttattgctaactaagtgtacctgcactatttcaaagcttcattaatcagatattgaggttcttcttggtgcaattctcatttattttgcatgttctgattgcagcatttgcacct

SEQ ID NO: 82507 - DNA, 894 bp, Citrus sinensis
  Intron number 1 from transcript orange1.1g033256m (locus o range1.1g033277m.g) derived from phytozome v7.0 (chr-ID sc affold00030; pos 890974 to 891867 reverse strand)
agcagcacacagcactcacgcagggcaagaatcgggtgagtgagcgagcgagcaagcgagctaattcttttcttttaatttttcgttatattttcccgtcctttctcggctaccaaacagaattttaggttttcagatttgtttattttacattttttttccaagtttatctgatttgatctgttctctggctgttttaaaaccacatttcatcattaggcatacttctgtgaggataaaaaccttagatgtccatatcaaaaaatagcatgcttaatttaatgttttgatgttgatttttaaggcttggttttgcttagattatctgataatgacatttattattattattattattattattattattattattattattattattattattattattattattattattattattatttgctataattttatgttgattttaggtttacgttgctctttaaggcttagattacttctgttttcttaaataaaaattcattaaattaatgcctcatgtagatttttatttgatactttggttgtttgtggggaaaccttacaaattcttatttgatctggctcttttgtatcttccgatgcggcaggaaaattttggatgtcatttgcttttcataattttgttgtttttcttgatcttttttggatctagtttttgtaaaattttacatcagggctaatgattagaggaactatcttaagtttgagccaggctgggttagtctttaaagacttgtttatgccctaatttcatgttacatcaactctggaatgttggttgaaatttgtagtggctaacacttgcgttgcatttgcttctgttgcaaaattagtgcaggatctaggatttgttagataaaagttcaagagaga

SEQ ID NO: 82508 - DNA, 292 bp, Citrus sinensis
  Intron number 1 from transcript orange1.1g047108m (locus o range1.1g047108m.g) derived from phytozome v7.0 (chr-ID sc affold00032; pos 364574 to 364865)
ggtctcaagtctcttccctcctcaggctccacgtaagtgaacagacaccttaacttcagtttcctttcctcctttcttttcttagtatatccattaaattttgtggacgaactagctcaaatctatgcacccaaatttgtgttaggcctatattttcatattctttgttggattaattttttaaataatttttgagttgaaatgattttattttatttttccaaaaaaagcttttgatgggactttggttggtgcagtcgggtggggttgttttcaggtgggttttggcaga

SEQ ID NO: 82509 - DNA, 683 bp, Citrus sinensis
  Intron number 2 from transcript orange1.1g014184m (locus o range1.1g014184m.g) derived from phytozome v7.0 (chr-ID sc affold01024; pos 2928 to 3610 reverse strand)
ggccattcttgtgactgtggtcgagtgttttccaggtccttctctttctcctaaatttatcccctttttgattctttcaatcaaaccctaagatcctaacgaaatcgtgccaaaatctcgattcaccagggctcttagttaagctaaagcttctgttttgttatctttaaaggagctagagtaattaattgttctaaatccaagaaagattttggttagtacactggacctcatgttttcttccctcttgtgtggtgtgatctacatatgccagccaatccaagttcaaggggctgtactagctgcatgactatttccaaataattctatgtggctaatactatagctaaaataaaagccagttccacagagaacaaattaaacagtcgcatttgcacaaacagaccccatttcataatctcttttactttattttaatatttatagtaaacgtagtcgcataatctattctacagatctttaatcatttttatattgtttgtttcttggtaaccctacatgtgctagcctaaaaaatctttattgcttccattccattacttggtcatttgattattaaaagcaataagaaaattccatcatcactttcaatcaaccttttcttttcttttctttttttttttttgtcttttatagggttgagagtttcattgaacaccaag

SEQ ID NO: 82510 - DNA, 794 bp, Citrus sinensis
  Intron number 1 from transcript orange1.1g022801m (locus o range1.1g022806m.g) derived from phytozome v7.0 (chr-ID sc affold01024; pos 18350 to 19143)
ggcaaaaccctaaagagccgtttacaacaccccaagtaagttttctctctctctctttctttatcttcctctctttctctctcatccgccctctttctataatttgaatatatgggtccttttgtactgttaaaacttccatttttatacctatttttttcttttatttgtttgtgttcttatttacatgcttacatatttggaatgctattttctgacatgaacatgctaagatctatgattttgagtctcagattcgggggaaaaatgtctaatttgtagaaacttttcaattttggaggctatatattgcagatctgccgatgggttttcattggggttctgtttggttacggggaaaatgtgggaaaataggaagtggtttgaatctgaaagataccgtttttctaaccggagtctatttgtttgccatttttgttcatttgggatcattgaagtttccattttgttgtggatccaagaaaatggaaactatattgacatttttggatctccattttggctttcttaaggaaatgcaactttcatgtgggtgaaaactgtttcctttggctgatttttgtagctatggtttttttaaatgctaatgttatgttggatccgagtttgataaatattttcttcttggatttcacttcacattttagaactttatttgatgtcttggctttcaagcctctgttttcttttgcattttattaatatgaggctgacatcttcaatgctagatctgttaagattgtgagaaaatctaatttcttgcaccatattgt

SEQ ID NO: 82511 - DNA, 787 bp, Citrus sinensis
  Intron number 2 from transcript orange1.1g038065m (locus o range1.1g038065m.g) derived from phytozome v7.0 (chr-ID sc affold00166; pos 95113 to 95899 reverse strand)
ggatcgtaagggtcgagtacatcgattcaattgtggtgggttgtgagaacctgggtcctgaacctttaccttcatatcttcctatactaactattgatatcatatatgttctggaagactacaagtagtttcttaaatatcaccttactaatcgtttgaaatatcggttatcatactaaacaattgcattcattgcgttctggcattatattacaccaaatataatatttttaatattttttttcccatatacttgattgttaagtgtaggagtttgtacttcaaaggtttgaaccttgtgtgaggacaacatgatccatgttaattggccgcaacacaagataaggatgccctagccgcattatgccctcaaattaaaacatcttttggactctcaggattgtcataccaatatttatcctgcactgtgtgacttaaatgttattattattattatttttttctgtttagcaagtttgaaaagttaaaatttcctttgaaaaaatattattgtttttcttcatttaaagcagtagagactaaaattttaaatttgttaacaaataccatggaaaatttgtggtataatgttccttaagtttctaaattgagatcatagggaaacttgttttggcaatattgcttaggaaatttccctgtattttaaatttgatatatctgttgatatgggtatctcaatttgttcatatagatgtaagaaaaacagaatggatgcctctccctgagttataagttatctctcatctttcttctccaggtactgaga

SEQ ID NO: 82512 - DNA, 755 bp, Citrus sinensis
  Intron number 1 from transcript orange1.1g014551m (locus o range1.1g014551m.g) derived from phytozome v7.0 (chr-ID sc affold08114; pos 944 to 1698)
cttccattggcttggactccactcttgacaacgaggttttttttccctcttcttcccctcccttttatttttaatttattttatttagtaatttgatttttatttctgcgggaaggatagagaaaattattgtaaactggctctattttcgtctttttgacaaaatttatgtgaaagaaaaggaataaaaaatagaaactgcatgtttaggctccgcttcgtattgagatgtggcttcgaagttaaagctgcatgcttaggcaccgtgtgctgtaaaattcaccttagattctaatgcacagttgcaattgtttgccaaacgctttacacagctgttactttaaagctaccgtgagaggcagcaatactaaatggagccttagtttagttgtatttcatttaacaaaatgaattaagtttgtatataaatctacaaactgtcagaaaaatttagtgtttaatgatgaccaactaggaaaaacaatgctgctgatagttttggaacttgtttgtgactcttctgacttctaattgatttatgctatatggtgttactttagtagggaagttcagttacttgaagagagactgtgtatctttgttatgtcaatattattgagtaaagtgaggtaatgcttgccttgtgaatatgtgtagctgcagcggcatttttctttttctttttgttttttttttccttatgactgtttacttataaagcttgtatcttttatgcttgctgcaggaagaggaag

SEQ ID NO: 82513 - DNA, 791 bp, Citrus sinensis
  Intron number 1 from transcript orange1.1g033029m (locus o range1.1g032309m.g) derived from phytozome v7.0 (chr-ID sc affold00015; pos 1641915 to 1642705 reverse strand)
aggcttactctgctcatctcaagcgatctggcaaggtaaatttacacaaagcttctcacaaacgtatacgtatgtgtatctgggtcatgtttttcttttctctctgtagtatatattatgggtcatttgggccttttgattgattatttgtagaaaaaggtgtaagctcttggcatagtatactgtctgttattgacggctgatctggtttctagttgtattatgttatttacttctaggtttatggttttaacttgtttttgattgtttgatttttgaatttaagtggaaaaggagttggattttcattccagttcatttgttattgaggtggttgtggatagaaatttaactgtttggttcatacaatgttattcgaccttgactttaatggagattgtactagtgtttaaacaatttaatgtagttgttggtgggtgtgtaaagcaaactgatgatcgtttgtataatgctgtacgagtgtcctgttattaagatacaaaactgccagaattggtggacttattactgttcatgcttacttttatttaggagtgtgtaagaataatgtataactagtttgtacattccttggtagattgtcaattgaagagaaattttagatttgttcagttttgcttttaatgtgatatttgtgcttcaatagtcttgatttttttttattcttttcctctttatcttgtctgtaaatagatggaacttcccccatggactgacatagtcaagactgctcagttcaaggagcttgctccctacgaccctgactggta

SEQ ID NO: 82514 - DNA, 359 bp, Citrus sinensis
  Intron number 1 from transcript orange1.1g002861m (locus o range1.1g001402m.g) derived from phytozome v7.0 (chr-ID sc affold00001; pos 3036541 to 3036899 reverse strand)
gtttcagagcttctaaagagtggaaaagaggcaagttatcggttggcaattttattctttggattgaaaatgtaatatcaaaaagaaaatggatgtatttcatatatttttgtcatctcttggcctctgattgtccttgtttccttattatgatgtcttgctctatgaaaattactttcatattttgtctctatcagaaaactgttgattgcctctgagatggaacttgtaccttttggcaaagaaactagaaaattttttccccttttttattagtcgttatatggatttcttacaacaagattatagaacttttatcctgtgctcacagttcaattgttggcatttgttctttgtag

SEQ ID NO: 82515 - DNA, 551 bp, Citrus sinensis
  Intron number 2 from transcript orange1.1g002344m (locus o range1.1g001104m.g) derived from phytozome v7.0 (chr-ID sc affold00008; pos 1342669 to 1343219)
ttttagaggtcagtgaagtattcttcctgttcctagaatttattaattcctgtgttaatattattctgctacttaagtgtggttttttttattggtcattgttacaaaattttccattcaataagggttctacaattcctgacctatttttaagatgcttcatataatatatcttatcgaaagaaaaggataacggggggatgtttcttaagaagggggagaaaacatatcgtaattgaatttgttatcagattgttgtatagaatccactaaaaatcagccaaccagcccacatgtaaatttaaaaataataagtattaatcctttttgatagcctattcgtgttggttttggattcttaaaaattatttgttaaaaaatatctgcaacctttgatttggtttctacaggtaagagcatcattgtttgctgcaggttgcttttctgagttagcagatgactttgcttcagttttattggagatgctggttaatttagtgacttattctgaaacagagtcaactgtgaggatagctgctgcacgagttttt

SEQ ID NO: 82516 - DNA, 953 bp, Citrus sinensis
  Intron number 1 from transcript orange1.1g026683m (locus o range1.1g024612m.g) derived from phytozome v7.0 (chr-ID sc affold00001; pos 1628693 to 1629645)
ttctcttcttttggaccttttgatctgtactttaggtatgtaaaatcgatttttgtttatgtttatgtttatgtgaaagcttactgcaataagctgctttttgtttgattattgagttatgggttttgatttttatttgggaatcatgattaattaatgtgattttagatattgggttttagattttgtgattttattcatttgttgatgaattattcgctcatcttgttttactccgttgggttgcttggaaatttattgtggttagcagttgaactgagggttgagataaaaaaagtcttggaaggaagattgttttttttttctttttctcttgctctctgtttgtttacggcccaccattttttttttttttcatttagtttctgagtttttcttggagaaatacagtatcataatctgccggtttagaagagattatctgacgcagaagctattctgggatgtttatgtactttgctgtagattgtctcatgcagttatagggcggctagcggttcatggtgatgattcttggatagaaatttgaagttgtaacaagatttagtgctgcaacttttggttaatcatacttcctaaagttatcttgacatgtattcttgttaatgagctgttcaaattctttttgccaattgtaattgtgtaatttttatcctctaattgaatggtctccaccttatagttttctaattcgttgagaatggacggatctttcaaatggcactttcccttggacaatggataatatgctttttatagttaagctcttgcttgacttgatttaacttgtgttggttttgattgacatattttgcttctgttttatatttgtgatgtggtattttgaacattgtatgcctgatgttattttgttaatctgagttatacatgaatcataacgaaccgcaaataccttgattacaggataaaaa

SEQ ID NO: 82517 - DNA, 562 bp, Citrus sinensis
  Intron number 2 from transcript orange1.1g045241m (locus o range1.1g045241m.g) derived from phytozome v7.0 (chr-ID sc affold00001; pos 2789248 to 2789809 reverse strand)
ttcttacttgtttcgtcagccggacaaacatcttggtagttctttctttcagcattttctgtttaaagaattatagttgtataattaaaactagaaaggattcaataaataaagctcaaagtttgtaaccattttcagtttttcacccttggattacccttatcagatatatggaagaaacttgatagcatcctggttggtacaatgaagtgaacaggaacttatgattttatattgggctttaactgttaactgcgttagatagattatatcatgattaagatgatctcatttgggtttctaagtggcaattaagagtaatggcaaactaattgcccatcagttcaaatttcctctcaacctgccatgcctacttatattgttagtccacgaacgcatttcatgcctataggtttagtaagtatatgagtagcttgcctttttatgcaaaatatttgttgtaccaacaataataaatgtggaagctcatgcttcagtgcatctgccggctaatgaaatttcttcactgtgtttcgtctttttaccgaacgaatcagattgg

SEQ ID NO: 82518 - DNA, 883 bp, Citrus sinensis
  Intron number 1 from transcript orange1.1g024532m (locus o range1.1g023641m.g) derived from phytozome v7.0 (chr-ID sc affold00042; pos 235492 to 236374)
ttgcttctctctgagaaaaccccatttccattcttgtaagctccctctctttctttttcccattaataaatactcgtcacatgttaatcttacacattttgcatttcccattacttcattgaataattgcgtgcgtgatgcattcattcatttgtcaaaggtgacgcatttttaaaagcattagcatggccctctttcgcgctctctctctctctctgtattcttcagttctcacagttctgtttcttatctgttcattaacttcgcattaatttcgtttatgggtttatttttattatatttgggcttttgctttctgggattttgtatttgaggcaaaatctataatgttttcctatttccatagaaaaggttaaaggtgcctctacttttgtcctttctcagtttttattctgtacaatgcttggccgcatttacctaaagtttgctttcttttgttgttcatgtgttgattttttatgaagcttgagcattgctctattcactgctgaccattcattttgaataataaaaataaaataaattctgggtttaaactaccgcccgtcttctgaatttttttcctttttttttttctttctttcggggggacacttctaatcctcttgcagtgcttgttgggttttatttttggaagagcactttcttaatggtggttcattcctttatttattttctgcgtttttgttgcctagaaaagaatggggcataaaactatttttacggagtaagaaaaataatagacttgagacattttattattattattataattattagtggccttttatgcatattttatgctgacaaaatgcatttgattgcagattcatcttttctctcaactataacagaggtactt

SEQ ID NO: 82519 - DNA, 373 bp, Citrus sinensis
  Intron number 1 from transcript orange1.1g015389m (locus o range1.1g015339m.g) derived from phytozome v7.0 (chr-ID sc affold00001; pos 5830781 to 5831153 reverse strand)
ccatctggggaatattttagtttcttttttgactggtatgtctcaaattgtgtatcttaattgcatatattctttttccatattttgtcaatttattgtgtttcaaatcatgggtataaattgttttcctgttttctgtatcacaaaagtttgagtcctatttctgtttcttgttcttctttttctgcaacctccatcaattcaatatctttgcactcacgttagcgttagtttttattatcttccccatgtttttgctctatcaattattttctgtagtgttaaatttcgtttgatttatcatgcttactctctatgtctgctgatcaaatttgcagagataagaggacgggacaaagaaacagaatttaga

SEQ ID NO: 82520 - DNA, 468 bp, Citrus sinensis
  Intron number 1 from transcript orange1.1g021778m (locus o range1.1g021778m.g) derived from phytozome v7.0 (chr-ID sc affold00822; pos 19751 to 20218)
ttcagcacttccgtttgcagcaaataacttgagaggtcttttttctttttcaattttttttaatttttattttctaataagaatttttctatgtgggtttttatttatttgaccttaatactgagaagacggactgttgtattatttagtagattgtttgctgaaatgaagatttctatgtgatatttatttattttgattattttttttattattggttgatttggtgaattgaagtatttgattttggtttctgagtcggggcccggggtgtgtttgtttgattgtatgttttgtgtttgattaaatgtcaaagtgcagccgtgtgcatcggctttgtcaacttgcgtttagaaaaatgaaatttgtgagaaaattcacccttttaatttttttcttcttcgattttctctgtgtacgtgttttaggtaatttaagtctatgattaattgctaactcttgttacag

SEQ ID NO: 82521 - DNA, 883 bp, Citrus sinensis
  Intron number 1 from transcript orange1.1g004682m (locus o range1.1g004682m.g) derived from phytozome v7.0 (chr-ID sc affold00001; pos 3782806 to 3783688 reverse strand)
tgcgacaaaaattacaggacgtaagggatgataatgccaactttaagaatttacagcataaataggatgttttttcattgcttcttagttaaagttggctagaagatttggtgtaattatatttcaactaaaattattctgttgtcctaggttgataaaagatggcctgtacttatttccgacatcacagatcctttcataaagtcaatacttatttaattctaaaatttcggatagtaactcgtttacagaatggttttccaagatcaaataattaacccttttgtttttaagatgcttgataaactcatttttgctgcatagatttatgcttgtccattattggattttacttgggatagtgattgtggcagttttttattgctgttttccttgagattgtgtgtgtgtttaattagttgttaagagttgcgtggagaatggcttttgcttggatttgtagttctgtgcaatttgtagaccttgcttgatcagttgatatattggtcatttttttgtataatcaaattttgtttggaactccaatagtgtatatcttgtaaatattgccttctcagaagttatgtgagggcacgctgacaacataatgattttatagaactggttatttggtaactcagttttgcacattttgtgaatttggctttccctgtgtttaaaataagtgtgtgtgcctcagcatatttgaatttgggttataatgttgcgattgagcatatttgaattttgtttaatcaaagctccaagtaaatcatcagttgccatctgaactaataattgaatgaccagaagatgaataattgcaacctaaatgaattcctgagaagatgaataattgatgagctgcaaattatgtttcagg

SEQ ID NO: 82522 - DNA, 681 bp, Citrus sinensis; identical to SEQ ID NO: 82295
  Intron number 1 from transcript orange1.1g014152m (locus o range1.1g014053m.g) derived from phytozome v7.0 (chr-ID sc affold00084; pos 528259 to 528939 reverse strand)

SEQ ID NO: 82523 - DNA, 246 bp, Citrus sinensis
  Intron number 1 from transcript orange1.1g005957m (locus o range1.1g005957m.g) derived from phytozome v7.0 (chr-ID sc affold00030; pos 137533 to 137778 reverse strand)
tttcagcctcctaaatctacaccaagctcctccaggttctcctctttgttaatctttttgtttttgtttttggttttatttttatttttcaaatttttactttgagcgtttggttcccaagaaaacacaagaagattccggaaaatgaaacacagaggggaaaaagaatggcgaagctatctaatttatgcatttgtgaaatacagagcatagtattaacaatttttctcttctaaataaatagta

SEQ ID NO: 82524 - DNA, 874 bp, Citrus sinensis
  Intron number 1 from transcript orange1.1g047386m (locus o range1.1g047386m.g) derived from phytozome v7.0 (chr-ID sc affold00015; pos 200664 to 201537 reverse strand)
aagtattttacaataaaacccaggtgaaaaatattttcttttagccgtttttcattcaaattattgattttgttgtaatgtttaattttttttttttcgataggtttgtgcttaacgttgtgttttctaattggaggttagatttatatttcaatgcctgatgggcactttgattggaaactatcgatcgcttaatacttatattacaatcattgaattgaatttttgatgggtcatgtctttaagcaggaattgcagagcttaggtcattagtttctaagaaacctttggtagaataaagaaatcaaaatttaaaattctagaatttgcgtaattgagctatacactttggttttgaacctttggaaattgttttaattgagctatgctttcttattcaaatctcactagcggaaattgttttaaaatccagagggaatgaattcactttcgcggaaactactgtgtaggtgctctgtctaaaataggaagctttatgaaaatttatagaagaattgatctgtcaataaatattggtaattcaagaagggacatagaattccttcatccacccaaaactagtcttttcatgggtctcctcattctttgtgcatcttgtagtagtaaaggaatttgcgcttcttattgtcacatcaaaatttatttttcttttatataatgggtttctctttcatttcactgaatcaagtatccctcctttactataatctaatgtcattttttttatatagcactgattcttctccctgtttatatttggaacgtgcgtcagtcaattgttgatcttttaattataacttttgtgattttcttttgtcatcaggttaacaacagggacatatcaattgctgtc

SEQ ID NO: 82525 - DNA, 571 bp, Citrus sinensis
  Intron number 1 from transcript orange1.1g035709m (locus o range1.1g035709m.g) derived from phytozome v7.0 (chr-ID sc affold00001; pos 1500196 to 1500766)
cacagacgtataagtattacagacaggatactgacgtattggcctaagaaatgtcagcttgctgcttctctatgaagttcgatccccgcgccgagtttgctaaagtttctaccccccaggatgtccccttctggtatttctttctgtttctgtgttttgtctcaagactttgattcaatgttaatatttgagggacttgctttctgctaggttatgttcttttcttagatttttattaatttccaccaactttgatcgtttaataattcttgagaatgagatccagtttttgtaataattcaaattcattgtcatgagtctgacttgatgatgttaaattgctcctcagtcctaccaatcaattaagggcgctcgaggttcatatcctcggaaacctttataacattcagatttcagtatcacaactgccctgttttagaattgccaatgactatttcgaatttctttctaaaaaccctgttatgatggcctggaaaaactggattagtatgtcatctcttgttgaaatcaagtcatcttttcttcagaaagtttaacaagcttcctgctg

SEQ ID NO: 82526 - DNA, 962 bp, Citrus sinensis
  Intron number 1 from transcript orange1.1g044513m (locus o range1.1g044513m.g) derived from phytozome v7.0 (chr-ID sc affold00021; pos 1284031 to 1284992)
agctgtcaggtctcagccaatttcacttgcaacaagtatgtactcaactcatcgtaagcttacaataataataacatttacatcatggttttaaaaataaataagcttctaaaaatatgtaggggtggaactagaaattagaatttgggttgcccgtccttagaaacattagaattaaggtactcagaacaatggaatttgaagtgtctctaaaatagactaaaactatgtgtaaaacattattctttattttaaagatttgttttcttagcctgccaccaaaaagggagggggggggggtgttatttattttgaaaactgctggttcaagtgcagcagcagggctcggagggtcgctcaggactcgcgtatatttttatttctatttataaaccaaaataaataactataacttgaatctatacagaggtattgtagaatttctctataacttgaatctatataacagataaatctggactttagcctcggtttcttttgaaatataacattctaccccagtttatcgctttgttaagattatttcacaccctatctttatcactttgacacttcgccccccttgggttcccaataaatggagtagcataatatcataggataatcatgctcttaataacaataataatgcttgatacgtacccaatatttatcaaaaagaatttatcacaatcatgtattcatgtgtcatgtgacgtaacttttttgagaatggtaattaattttatataatttttaatttacttattcttcatatgatgaaaaccacatcatttgagatgcattttttttttatatgttcagtgataccacaatagagatatacaaaactttctcaggaaaatcacatgtgtgtccgagaaaaccttcagtctaataattcccgcgttcatgtcatgcttaatgcagcaaaattgtaggagcaagatactacaaaagtg

SEQ ID NO: 82527 - DNA, 729 bp, Citrus sinensis
  Intron number 2 from transcript orange1.1g036649m (locus o range1.1g036649m.g) derived from phytozome v7.0 (chr-ID sc affold00029; pos 988735 to 989463)
atactccctgggacggaggtgggaattttattatctttttactttatagaaataattttatgcttttgatttcatttttcactcagcttttgcttgttaggtttcgttcattagttttaatgtataattaagcgaaagctttgatgagctgacttttttattttgcctgtaactaagctgattctgtgtatagaacatggttgaattcctatggttcttggcttgtgttgcatttgctgttgtgggtcataacttgtatatattgttacaatttaattaccttgtccatgtttgtgctagtggttttttttttttttctggtttgatgttgagaaaattcgatcacctcttttttttttgtcatcatctttgatcagaaggactgtcaatatgagcagaatgagctatcttgtaaacgatgctttcacgttccaattatgtaaatggtgtttttgatggaattttaattgccgaagtggctttagatcgattgctgcatgatggtggacaatctgctttagtaaataattatacctctgtttctatatcgtgctatccttgctttcagtcgcatttgaggcctaaatactcctacttaacaaaaatgattgcttatgccttatcctttgtctttacagttgaaatatttaggtttttgcatttgtcatctaagcattttcttgaatttcttcaggtacgttcaagttgactctacaattcacagaggat

SEQ ID NO: 82528 - DNA, 975 bp, Citrus sinensis; identical to SEQ ID NO: 82075
  Intron number 1 from transcript orange1.1g019401m (locus o range1.1g019453m.g) derived from phytozome v7.0 (chr-ID sc affold00001; pos 1867206 to 1868180 reverse strand)

SEQ ID NO: 82529 - DNA, 429 bp, Citrus sinensis
  Intron number 2 from transcript orange1.1g033740m (locus o range1.1g033056m.g) derived from phytozome v7.0 (chr-ID sc affold00547; pos 103491 to 103919)
ctgccccaaagtatgcattttgttttgatttttgtatcgctttaattaactaaaattgtatcttttttattattattagtattacatggttccctgttttgttttggtcattttgataaaaatcaagaacattgagaattttgcccccccaaatgaggcaattgtgtggcattacgggaaagaagattcattttttcagttattccatattttttgtaaacttgtgtcatgataaattctgcggatgtattggtcaaatcatacagttagactagactagagttgttgtaatgatgttaagtttgcatttaaaaattaatttatatgccttttgtttattgtaatttgacacaatttttttttttttaattttgggttgtgaatggatgaaaaggacaaggccatcaagaggttccttgtgaggaacat

SEQ ID NO: 82530 - DNA, 875 bp, Citrus sinensis
  Intron number 2 from transcript orange1.1g030217m (locus o range1.1g030189m.g) derived from phytozome v7.0 (chr-ID sc affold00177; pos 147806 to 148680)
accaactctggcttgtctgtctttaacacttataggtactgtttcaaaatgagacctactcataagcaacattgttaccttttttaacaaaagaaaagcacgcttcatcaaaaattacatgtctcgtaatgaatatactgaacagaatcagatcagctgatgtatttgcttaatttaattgagaagattgcttgtgtgttatggtggagtttgtcaattgtcaatgcaatattgcaaacttgttggttttttttttttgttttgatggatttgtaatttgtgatagattttaaaattatgtgcaagttttttgtgtagttagtagttcatacatgtcaaaactgtaaaatccagtaaaagcaggtgaaaattgtaaaattgctgtaaccgaaccaaaatgaaccaaaataaacaacttgtggcatcaagacacatcatttgctatttacatttgacgaagcacagcaaattgtctctcattctctgccatttttgttttgctttctcatattgaaactaatatttgcagaaagttatagagattttttttttttttttgagcagtgtgttcattcaattcattgctttttattctgaaccggaagtcaacgatagttagtccattcaaaggtaaaattttactgttaaaaaaagggtaaaattttactgttgaaaaaaattttcttgcctaaaaatagaaaatcaaatcaatttaagagaacccatttgctggaatttgccaaatatcttatccataggaatatttgtgcatatttttaaacagaatttgcatatttgattgaatttataataccccatttgcctctatcttctgttgaatcttgacttgtgagattttttgtgtgtcaagttag

SEQ ID NO: 82531 - DNA, 573 bp, Citrus sinensis
  Intron number 2 from transcript orange1.1g003416m (locus o range1.1g003416m.g) derived from phytozome v7.0 (chr-ID sc affold00029; pos 1020783 to 1021355 reverse strand)
agtttgcggtaaagtctgacttctgtgattatgttttattgataaataatgccgtggttcagccttactgcagtagtttctttttttcagccttttgatttctcttttctgatggggcatttcatatacagaactgaacactgtcctatgtagaggatatagtgtagttaaggcacatgtcaccgatgtcagctacttcaaaattatatagtgctggatgtggtttaagccaataagacaagaaaggggtgtggccgcccatgaagatacatacaaatatgttaacattcgaaacatatgcaaagaaatgtgcctgtaatagttttcctgtctacgtaaagtagtaaaccagctgtctatttaatcttgatacaagttttgcatgtttaagaaaatgatctttcatctttaacagtgagtccatttttagctgtaatccttttctcaagcatgacttggttttgctttcgttttcatctcaacagtaaacctgtttgcaactagaaaacattgtaatttttttgtaacttttctctaggtcgacttggaacataatcaatatcgatctttcct

SEQ ID NO: 82532 - DNA, 357 bp, Citrus sinensis
  Intron number 2 from transcript orange1.1g013178m (locus o range1.1g013178m.g) derived from phytozome v7.0 (chr-ID sc affold00264; pos 17487 to 17843 reverse strand)
caaatctcacttcaaacatctacaaacaagagtatacaactcttcctcctcaaccattctgtttttgagcctttttccctcttcttattttatggataaaaatgactctcatatccgtaatgaatttaacaataatgttataacatcatgatgttataatattattattctattttaccgagtagaccgaatcaagccaggatttgtttaatactgattctatattctacctagttttcaatcaattcttgaccgtttggtgctcttcaactgggcaccaaaatccttagccttcacagaatataaattattaaataatctatttgacatttcgcagtggtgggttataccaaaagc

SEQ ID NO: 82533 - DNA, 491 bp, Citrus sinensis
  Intron number 1 from transcript orange1.1g017369m (locus o range1.1g017369m.g) derived from phytozome v7.0 (chr-ID sc affold00012; pos 2095822 to 2096312 reverse strand)
cccacctgcacaaaggtttaaacaaaaccctgaaggtgattttaattatagcccttttttgctttctaattgcttcttgtatttgtatttttggttaatttgatgtattgtggagatgggttttgtagcttttattagtttatccaatgagtttctaataaaatttgaattctgcatattttgatggtgttttttttttaaaaatttttaaacgtgtttttcttgatgaatttgttgatttcttgaagtgcggagtttagaaggttcatcttcaaagaataggaagtgaagagaatgaagttttggctgtttagttcttagttgtattggagttcgtcaatggacctttttaatgaagaatgaattaaagattaaaagttttagcttttccttttattgaatatgctgctgatttaaagtatttttttcaatagagaatgtaagttgagtgttttatgttgtactattaggtgattcacattttttggagg

SEQ ID NO: 82534 - DNA, 306 bp, Citrus sinensis
  Intron number 5 from transcript orange1.1g030974m (locus o range1.1g030974m.g) derived from phytozome v7.0 (chr-ID sc affold00111; pos 208757 to 209062)
ttctttagtgccacaaaagtaagcatacaccccttccttagcatttaattattcacaagaataataattctcatgtaaggatgtccgcgttttgtaaaataagatactattggtaactagcaagcgttcgaactctcgattttttttttaacatttgtacctagttaccagtaactatctgaaattttaatcatacaaaatgtgaacacctgccctagagaaagactcttcacgaaaaaaaacttaattttgtttgttttgagtttgatttctgattcaacagaaaaaatttttaggatccatatt

SEQ ID NO: 82535 - DNA, 441 bp, Citrus sinensis
  Intron number 1 from transcript orange1.1g023534m (locus o range1.1g019804m.g) derived from phytozome v7.0 (chr-ID sc affold00130; pos 186318 to 186758 reverse strand)
cccttggaacttttgcagtgtctgtcaaatacaaggtgactaatttgttttcatttcaaggctcatttagttcatgaattagttattagtacactaattaatgcttaatatactttagctgtgatggcaatgtacacagttaagaaagcccttttgttaggcatcaatggctttcaattttttctctttaaattgtcttatatagaagtggggttaaggtaattgcttaagatacttgttttatgaaattttgtgttacttttccctcacaacacaaatgcagggtaaaagttttcaatcttcctatatgattgaatttgatttgttcatgttgcttgtttctaatttgctggtagtgaaaagaatttttatagttaaatcttatgctctggtagcataattgcaggatccaacaagaagttttactggtcgtgagaagta

SEQ ID NO: 82536 - DNA, 984 bp, Citrus sinensis
  Intron number 2 from transcript orange1.1g022232m (locus o range1.1g022270m.g) derived from phytozome v7.0 (chr-ID sc affold00001; pos 2425885 to 2426868)
tggagcgtagcaaaagcttcgtcaaagctttgcaggtttagtctcgtctatttatttgtgtacattttggccagatctgccattggcttgatttttatgcattcattgcgtttcttgattttcaaccttgtgtgtaattgattttcttttccctaataatcttaacattgaatatttttgtttttgtactttttttctgttttaatctttaatttctcagctatttaattaggacgagaaagttgaaattgtttcatttaagagcattgaaggtttggatgtttgtatttatttcaaaacaatttaatggttagtggggagccataacaactttgactcggttgcaaaatcgaatattacaataacactgttcattaggtgggctgcttgttagcatgataaatagataaaaaatattgaaggtttttatgaacaaagtctgtcattgttaatggttctcctaactgatcttaattagtgtcatttctgttgaatgaatcaaaatactttggttagtgttttattctgcattgagtggaattttccagagaagcaagttagtgagaagttaactgaccccttgaataaaatattaactttatgaggcctcttaaatttgactttttgaactaggatattaaaaaaaaattgtcgggggaagctatctgatgcaggaaaatgaaaaaatataccatggcccttagaaaatggcttgtactgatatttgctgttgtttatgagtggcctgttattaaatgaacctgtaaagatcatatattcaacatgcttgggatcttttgattggatgctgtcctctctttttatttggacttgactctcttgtagtatactctgttgaataattccagcttgaccaatgtgaacacactatttggatggaaaactttgcttccatataagtttaatgatcatgccattttcctgacaggagctcaagaacttaagacctcaactgtattcagc

SEQ ID NO: 82537 - DNA, 603 bp, Citrus sinensis
  Intron number 1 from transcript orange1.1g048057m (locus o range1.1g048057m.g) derived from phytozome v7.0 (chr-ID sc affold05457; pos 3223 to 3825)
cagcttgttgaggattcagccataagggagttgaggtacatttgaatgaatggttttgtttttgctatttgcctgacataaagtctttgttttagatttctcgaattttggaatgaaatatgtttaatactaaattgttcatagaatttattgtttcctatagctagacaaatggattgcaaatgattatgaaatgaaaaggggtgtacgtcattttctgtaagttctatttcttattcatgagtatttggaatgacgcaaaggaaggaaactaattgaatcatccgtaatgacatatgaccccaaaaaacaacaataatactaattatatcaataaaagaatatcattttctaatgtttggccgaacaaatattatgctgaatttcaagaggtaatgtgcttttgttttgtatatattagaataatacttcattttcctggtttcttagattcttgttttccaattgactttttggtcttcatatccacttctttgctcttacttttttcaatttttttttttgttggagaagcttacttttttcaattaacatgccatacatgcaggctaaagaagcaagagttggtgtcatttgcgaaat

SEQ ID NO: 82538 - DNA, 591 bp, Citrus sinensis
  Intron number 1 from transcript orange1.1g011180m (locus o range1.1g011180m.g) derived from phytozome v7.0 (chr-ID sc affold00015; pos 803036 to 803626)
agtggtacaagtactaattgtaattatttttgttttcttttcttaagtcattatttttgttatgaattttattttcacagaactgttaaagtttacaaccttatgtgtgaatttaatttctttctatatttatcatcttcgggtttccatctaagcaaagtgaagatacataatttttttttccctttaaagtgatatatcagcatcattagttgaagggatatgttttgcatgaggttgaggatatgtaaaagtctcttgtttcgtttttgagaaaggataggagctgtgtgaaatttgttcatttaacgggattgtctataatcacttagtaagtatgtgtcgatttgtttttattgggtatgctaagctttgtgtgaggtttcacctaataacttgctcagtttgattatcttgccaaaattgaacattgaagcatgagcattcatagcgattttccttaggttgggagaaaataaatgtgttaatatggaggtattgtgattgtaactgcatttggatatcattgcatgattattgtttacctcttttgatatgtgtatgatttgtaatttttgggtctatcagcag

SEQ ID NO: 82539 - DNA, 873 bp, Citrus sinensis
  Intron number 1 from transcript orange1.1g011927m (locus o range1.1g011727m.g) derived from phytozome v7.0 (chr-ID sc affold00001; pos 2951031 to 2951903 reverse strand)
ttttttttcccccttccctcaactcttgttcggttcgttctcttgctctcgttcaattttcttattgtgtttgatgcatgtatcatcatctggtggttggtttttacgctggcttgttgtggtcgcggtagctttatttatttaattatttttggttaactgaattagttattgagtcagatactgtgggtgtgattgctataagattttctaaattacaaaaattaaattggacagattttacataatacgcttgctatcttcggaaaagaattttattgttagttgcaaggcctctgtacttgattcctgtggtttggatttggatgtttggaatgatgatattggttgtgctttgctgctactgtgatgaaattagatcctgaattatctgtgttatgcctgttttggtcatttcttctggggaggtggtgttctgtttcttcaggggtgaaacagagggctgcttggtgtttggttatgataaatgatttgatttaacatatatcataagcctccaaaatacatttgcattactgacgatttttatttgggcttggcaacaacataagttcctcaaagaatttgatggtattttcaacgcaaaagtcttcgttttgggatttcgggatgaatattttgttttaattgctttgctttgctcttgattttcttttgttgctgtggggaagcagtgttgtggtagtgtgaaattatcactgtcttgtgtaacccataatatctattttagcttacgttttagtttggtcgtgttttattgactagaaggagaagcttaacagtttgtgcttcttaattgggatgaatatcttgaggtcatctaaagagtaagaaatgcttcttgacagataa

SEQ ID NO: 82540 - DNA, 465 bp, Citrus sinensis
  Intron number 1 from transcript orange1.1g021578m (locus o range1.1g021578m.g) derived from phytozome v7.0 (chr-ID sc affold00098; pos 45866 to 46330)
acaaggttgagaggttcgccagtcgctccgaataaatgaaagagatgaggtcccgaagccctttattaatcattatctgtaagctttttcctttttctttaaatcttatgtagtaagcgggattcaaacttcaaaccgcagtagttgtcgtaatgttttctttgggtgttagttaaatttacacaacttgtcttatctttagcaattgaaaactctgttcttctttaccaatatgaatattttacgctcggaatgtttgttgcggaggttaatgatatgcctggctttttttcaataatgaaaatatatgcagcaaagatcttttttttttttttttttaaattatgatctaaagaccatgatgtatctcatgctatgtgtttgctttatgccgttgattcattgactgggagttatgactaaattttctgcagttcgaactttttggtaattgtcgcatctgca

SEQ ID NO: 82541 - DNA, 461 bp, Citrus sinensis
  Intron number 1 from transcript orange1.1g023991m (locus o range1.1g023991m.g) derived from phytozome v7.0 (chr-ID sc affold00546; pos 94476 to 94936 reverse strand)
ctttcattcgattcatcaatttttccaattttaaggtcagattccacgttattgtagatttattgcatttcaattcatgtaaagtttttagcttttttatgaaattgtgctgttttctgtcaaattagtgttttttatgtgaagttttcaagggtttgattcatatattgggtattttatggccaaatcttgatggggtttatttgaattgaatatgatattgctttgtgattttctagggtttttattgttaatgttgtattacaggatttggtttatgaaggaattatcatgtgttaactaatgtttgaattttttgtctgactttgtgcagatcttgtgagattgaaattagggaattttttttctttctttttgaaatttgaatgcattgggatttcttggcttgagagaggagctagttgtagctttattggtatcgtgtgtgttttctctaaggc

SEQ ID NO: 82542 - DNA, 676 bp, Citrus sinensis
  Intron number 2 from transcript orange1.1g008173m (locus o range1.1g008173m.g) derived from phytozome v7.0 (chr-ID sc affold00020; pos 1427548 to 1428223)
aatccaggtacatgtttttcatccactttcagcatcgagttctattaaactatttccaatctgaaagacaaataccacttgactggaaacctttagagtgagatgtaattagtttgattgttgttgctagaacaatatcttgaatggctcattgcttaatgatttttaggctcagaggcctcatggtagcaggagttgctctgttatattgatgggctcattgtaatagtttggtggactcatgacatcctgagcctgatgagcagctataaacacactgattcatgattaccaagatgtgctcattatcttttatttaacatattgcaaaaagtttttatttgtgtagtgcccacaaaaaggggtgattatgctggtaattttcttgtaacttgcactttcattgatgaaaaattgaatgcttacagtttttgaattttattctgttattatgaatttgcaacaacatcatatggtatttaaattcctgggtaagataaccagtcttaaagggaatttgtcttgttagccagaagaaagctatttatctaaaggaaaataaatgtgtgagagatcccaatttatagataggatattttaactcctttttcctcttattgatgtaagactctaatgcttctagctgattttgcagtacttccagctttttctggca

SEQ ID NO: 82543 - DNA, 798 bp, Citrus sinensis
  Intron number 3 from transcript orange1.1g040711m (locus o range1.1g040711m.g) derived from phytozome v7.0 (chr-ID sc affold00001; pos 3810886 to 3811683)
ggagccctcaagggcaggtgaatttggttagtaatttaattaccttttaccttaatatacgttagattatcatttttaattgtttgaaatcctcaaactaaaattttgtttttatatggaattgggtaacgtgcctgactcaaattggcgtcaacttttgcaataacttacttgttcatctttgccatttaggattttcttgtagtgtattaggcaatccacctaacggtggcaagcgacgtatctaacatctgtcattcccagtaaatttaactacctcaatcagcttacataaagtttaggtttacagtagtagagggtgttcttgatataccattcactttcttccttgaaaaaaaaaaaaaattatagtagagcgcgtgttttcttaaagggtattcaattatgttggcttttgtgcgccgactacgtgcacagccgaaaggttgttggtcccaaattattaaaggttgatcttcctcgatcctagaacaaatgccccatgaatccccagatcgaactatctatatataagaaaaagatcgtattatcctatgggtccttttttttttttttagccattaatgtttttcaatgttcggacgattttgtcaggctgttaacccatagtagtttaatgttcatcaaggaatttgagtaaatttgatactaattacaacatcatagttagttttctaaattatagctagctctaaacgttttaactgtcatacattttaatatctcattaactgatgaactacggttgaaacttggaacagaaggctggtgctttca

SEQ ID NO: 82544 - DNA, 909 bp, Citrus sinensis
  Intron number 3 from transcript orange1.1g044856m (locus o range1.1g044856m.g) derived from phytozome v7.0 (chr-ID sc affold00283; pos 182299 to 183207 reverse strand)
aacaatttgatttggttatgctctttatccagagttacttttattttatgtttttatttctgagtggatttttaatttgatcgttaagatttcattacgaggcaaccaagtgatctctgattaattcatgcatctagacatgttttctgcatggctcataactcattattgttttttctgacatattgagattttaagaatcatgagtgagggaaaatagcttatgaattagaaagctttcaattttatggactgttgctaggaggctaaacagctactgttttcaaatccgttataaggaagcattctacttgagatccttcattgactggtttcaaggaactaattagtgaaaattaatggttggtttagtttgagtaaaatcagaaacatactggcagtacaatttgcccattgttagaactcattttagtcagaaaatttgaatttgatgacattgtaattgagctcttatgatagagcattgtatatgagcatttactagttcctgtggattctaaggtttattattgcatctctcatgcattgagtaatttattactcttaagtcatctttctggtttatgtttgtctttcacaatcaactccaaagcttaagcaaattttatgagtgtttaccagttcctatggattctaatgtttattattgcatctctcatgcattgagtaatttgttaatcttcgtgttttatgtttgtctttcacaatcaactccaaagcttaagcaattttttttaaattttatatataattagaattttggattgcaagtcaaccacactattttttcttttcttttttcttttttatggattatttctttttttgtagcggggtctaaattaatattctgtcatatttgacgctgctttgtttgttacagcttga

SEQ ID NO: 82545 - DNA, 891 bp, Citrus sinensis
  Intron number 1 from transcript orange1.1g006497m (locus o range1.1g005096m.g) derived from phytozome v7.0 (chr-ID sc affold00251; pos 230238 to 231128 reverse strand)
atttcatcacctgccttccaaccctccttacgacggtaactctttcaattctttacaaatttagatgcatttcatttatagttagttacgttcatatttaatttatttaaaaaaatttgtgctgcattttgtgcttaaattttaggaattctcgattgatgctaaatttaggtccatttaagtgattgaattatgacctttcaattgggatttaatgtggtgattttgtttaggctttaagttgtgtggatggatttttgttagggataagttagtgtgaaaactaaattgtttgttttaggtgacaattcaaatgagcaatcgttgttagtgttggtggaaacagtgaattcaaaatctggtaaggttggtccttgaaaaaatttagagaattttggaggttactgctggcatgatttcagtaggcattgttattcagttaacaaagatttagatcatcgaattcggtttgtaaggtttgcatagtagattagttttcaattgccacacgcattaaataagatgaagagatttggagatgctttactttatttttctgaaaacgtggaaaaaaagatcggatgtgacacaataattttccctgccacaatcacctggaccaccatctctgttttaatctcagaatattgcttcagcttagtatatctagataatgagaaaagaaaaataattttttttttctttgttgtaattcatgatacacaactacagcagacactgccagctttgtagttgtagtatagcctggaaaccactatcaagaggctgtctcagagtagagcaggtggttttggattccatactgacaattctctgattagacttcagtgttcagactgtaggcattttggttttacgtgaatcactttg

SEQ ID NO: 82546 - DNA, 402 bp, Citrus sinensis
  Intron number 1 from transcript orange1.1g030450m (locus o range1.1g030450m.g) derived from phytozome v7.0 (chr-ID sc affold01481; pos 15928 to 16329 reverse strand)
gctcttgctcaattcctcaagatcttcaccacttggtccgtcggtttaattttcttcatttttcgttgtaattttattttatttttttcgcagcatttctcttcatttggttggttacgtgttgcaaattttgttgatttgatattttgtctgtataaaaaaatcgactttttttgtataaaaaagtagattgaccttttcattagggcttggagctccaagatgctccctttgattgtggttgatctccaattcaaagaataatggatgtacgatataataaatgttaattgaattgaaaattagtttaagcaaatgtaattaaaaagttgttattttgaaataaaaatgtctcagttattctgtatgtttttgctagatgctcaggtataaagaaaagag

SEQ ID NO: 82547 - DNA, 633 bp, Citrus sinensis
  Intron number 1 from transcript orange1.1g029526m (locus o range1.1g029526m.g) derived from phytozome v7.0 (chr-ID sc affold00306; pos 143839 to 144471 reverse strand)
ctgtgtctcagctgctgaacattccagtgtaagtggcgtttcatatgttatcagaaattaggatttagaacaatatttaaatgagcataagcatagactatgaatttggtagtaatgtgagttatgttatgccaatttggcaataattgcaattagactgatctgaatatatcaagccaacacagttatcagctaatattcaaggcattagattctgatcttcaattgtattaaattattttgcagctagccaccttttttttggtttgggttgtggggggggggggttgaataaaaaacttgatgcatggaagcttcattaagtttttggtaggatggatctttttgaacttacaataatcgtgattgggagcttactatgttttgaaccatgtggaaaattttacatgggcatttgtctttctcactttgctgtctcattaattgtaggtgacattgcccacccagggaaaaatgacttaattttaaatctgatatattgttgtatagattttcttaaaccttttgtaagataaatgttaatatgaacgaacttgttttcttactgcttttacatatttggtaaaggagttaatataactgcacaggttcccatcactgttcactttgacc

SEQ ID NO: 82548 - DNA, 743 bp, Citrus sinensis
  Intron number 3 from transcript orange1.1g019451m (locus o range1.1g019423m.g) derived from phytozome v7.0 (chr-ID sc affold00012; pos 783564 to 784306 reverse strand)
cttttccacgaacacgtttcttagtaccctgacaggtaactttcttcgttcttaagttttatttgtaatcaccgatagtatgcttaattttgaaaacaacccatttatacttgatagctgctgactccgtcccacaacggctttgtattaaagtcaccacaacatctcaattccaaacatagactacagttgttattgcgagcaatttagatctgtttgaaggataatgactgttgtataatatggatgggaattacatgaagtttgaatcgcataaaaagagttccattagttggagaatgaatgaatatgggaagtcaactaattagctatctcatgaaatcccatctctggtttgattttctatttcgtttacctttgttttgaaaggcttgcaagcttataatagttgtatcagcttgcttgccatttatattgtccaaattttgtttgctttatatgcctttttgagattttggtctttgtttaggaagctttaattttgaatagcatttctgtatggtaaaaaaaatgtaaaatttgtcatgtatgatctgttagtttagatgtagataggatgaataagttctaattatcttttctgcccttcaaattctagtttcttcacattgatttgtggatatttggtgtacattttagttgaatttaaacaacttttttattgttctttttcttaaaatctatatgttatgtttcagtggcaaatttggcagcaattggca

SEQ ID NO: 82549 - DNA, 675 bp, Citrus sinensis
  Intron number 1 from transcript orange1.1g015295m (locus o range1.1g015295m.g) derived from phytozome v7.0 (chr-ID sc affold00021; pos 1516893 to 1517567 reverse strand)
tcttttaatctactcaaaggtcaaagttcttcaatgtaagctcagttgcccaatctttaacgttttttgtgtcttaattggccttttctttttatgcatgttaaagaaatgtgggtttgttttcatgggtttctaatttcattgctttttcgaattttaatggaccaaattttgatgtatgtgaacaattataaatataatacgtgatttgtcatgcttgtctgtaacagatacatattgtaggcattttgtgagcatgcttttggcgttgccaaaaaagtgcttcctatgtaagcatattttcattatgcgcccaaaatcccttatagactaaatatgtaaaaggttaatggttagatgaaccgatccagaggacaagttctgaggatgggttttattcagttggtaaggaccaagggtaaaagagctttttatgcttatggaaaagctattcacagaatattttttagacttcctacaaaataataatagttttactcttattttcacatacatgaagaattgcacttaaagttgatgacttcctgttaacaatataataatgctgatatctagtttttttttttttttctctttgctgaaatcaatttttacttttcttttcttaatatccattgatccttttatccactttctgtgaattgaagacttaat

SEQ ID NO: 82550 - DNA, 1046 bp, Citrus sinensis
  Intron number 3 from transcript orange1.1g032981m (locus o range1.1g029554m.g) derived from phytozome v7.0 (chr-ID sc affold00530; pos 55679 to 56724)
tctggaggctgtaaggcgattgttacgtggccgtggtgagaataaatttaacaatttactttctctttcagctttgtaaacagctcttgctaatgttttggtatgatgatctttattcaatgatagtatataaatctcaaggatgtggttgtttttacataatgccttactattatttaaaaaaaaataaaaatacagtagtttttgagttggatgctgttaatacaatcagcagatgggaagcagtgcttttgtagaattttaagatgctacttatcctgggatattgctgttaagatggatctgtcagaactgaatgaagctaaatatggttcataatattatgggaagagttgagcaattatcatcttttacgatcttataagaggaaacatcttaaacagtcttctgtatataatgaaataagaaaaaaaaaaaaatcatattggttgtatatgtgcaaagataacttcctaaagctgtaactacattgcttatggtttatgtacttgatgtaggacaactcggtgagtttacttgttagctatctaatgcaatttaatgaaatatttggacactgaaggattttgtaggatggaaaagacttaatatcttttgacttactgtttgtgcattgttgtgaaattgacatagtattacacatgagtacctgagtatgattgtataccaataggtcaataggtcctctttgggctgctagatgttgaaataattgaggcaaaaatattttattcaattgtctgcttgtgtcattgtttgaaagggaacttgtttttgggctgtcaatgttacttatttgttagtttatttctagggtttttttgttagggatattctgtattggatttcatttcctcttggctctgttatggcctctaatataaccttttcatctggtctttctctttctcatttccttccgctccttttttttttttaatgcctttgttgtctcttcctatctttgcttatttcctgcttctttatcagttgtcttgcagaaagaaaattttgagttttggagg

SEQ ID NO: 82551 - DNA, 956 bp, Citrus sinensis
  Intron number 1 from transcript orange1.1g003299m (locus o range1.1g003299m.g) derived from phytozome v7.0 (chr-ID sc affold00105; pos 442186 to 443141)
taatctggtaatattatttcagtttttcttaattttctacttgattttactcattttacttgcagatgagtagattttattttattttattttttgtttttctattcatcatgggtttgttgtgtccatagaaactgaattgggtcaattttattaacttggttttctgggttcgttgagctcttggctgaattggttctttttgttcattgtaatatgaaatcctagtaattatagataaagcattgtgggttaccttctgattattcataatcgtttgtgtttgattatttgctccgctaatattaaattggaaaaaaaacaaaactaaaggtgcgtttgtaattatcgcttttacttggcagctattgcttaccaaactactcgcaagcttatgcttctctgctagtgatttcattcttaaactagtgtaactgggaaagtttttgtattcaattgctgtaaatattatgataagtaataaattatgatattgctgaaacaaatacattgagaggaatcagaacatttggaagagtaaaacaattatcaatttgacgcgccgaaatctgaattcataaaaagcaaacttaactgtgacgtcactgaaagagtcactattgacctgaaatgtaaaacaagcctacgtagatttagatttgattttaagtaacttttcaaataagataacacggtctgtctatgtatttatgatatgtttcattatggtgatagtttcttacagctgatttatgattctcataggtaaatttgtcattatttatggtctagtccattacgtgtactccttcatgttatctcatcagagggtgaaatagcggatatgattggttgctctatctctttctccgtatttctttactctgttaataaaaatcccatccggaaactttaatatcactattttgatctttagatttgttagcaaaggcaaa

SEQ ID NO: 82552 - DNA, 616 bp, Citrus sinensis
  Intron number 2 from transcript orange1.1g019367m (locus o range1.1g019367m.g) derived from phytozome v7.0 (chr-ID sc affold00399; pos 22126 to 22741 reverse strand)
cctgcaggtatgatttggcaatgaagaggtgcagtgaccggtcctaaaacaggagtcattagtctttttcttttcttatagctataagctaattttaaggaattttgtaaatttcaaactgttatatgagtatgaaggatgatgtagttgagttgttttccttttcctccttgctgatgtttactggattttaaagttatggccactgtaattattgaatatttttaatttgactgcagctgctcgcagggcaagtaattgagtagtatgtgagtttattttacagttgccaaatggttttatattgctgtttaagaattattttgcttttgtgttgttatttatagctttcttgagtgagtattaatatattactttaatggtatagcctattaccttttaatcttttatgctttggcattcctgtttctgattctgttctcgcttattactccttgattaagcaacacatattagatgcggtgctatatttatctaagtctaacacttctatataataaatcatttagtaacttcttttagctcaaaaaacatatttgtaacaatgtgtattctaacaggaattgatagcgcaaagaaaggaaccgattctaaa

SEQ ID NO: 82553 - DNA, 856 bp, Citrus sinensis
  Intron number 1 from transcript orange1.1g036147m (locus o range1.1g036147m.g) derived from phytozome v7.0 (chr-ID sc affold00201; pos 151722 to 152577)
atcaagtttcaggtttagtttttgaattcgggtttgatttctgattttttttataatataaaatcaatgttagtagtaattgaattggccgctaagtgatgtttctgttcaagaatttttgtagaatcagtgttatatttgctgcaattttatcatcaagctgaaactctgcaatcttgaccacgttgtttggagtggatgaagcaccagaatgtaatggtagatgttataaaaagagtggacttgacaagagcattttctatgatattagacgcaatcaagatatttaatttagcataccaattattggtggattctttgattcttttctttagttatagtatccaatgctcatagttttaataggaaatgcgactgtcaagttaatttgtctcatgttcaatttgcttagaatttccgtactttgggatcttaattttatatatctaattgtctatgatctttgccaatttttcttttctctttctatgttatttttcattttaatttaagcttgaagcctttgcaaaagactacctgggtctacttcgcccttagggacttgagaaggtgagtttaggcaagccagcacatcttgtggattgaggggactttatagtaactttttctttgacgtatttgcatcaaacgaatgccaatgttcataataataacaatcataataattttctcttgcttcctaatcgtacaaatgattgctccattttccagtttagtgggtagaagcatctatttgtggggttcaatagcacaatgtccattggtttacgaggccaaactaatcctttttggacatctagctgatcaattgtcgattcaaattgactcagaactc

SEQ ID NO: 82554 - DNA, 634 bp, Citrus sinensis; identical to SEQ ID NO: 81682
  Intron number 1 from transcript orange1.1g024864m (locus o range1.1g019591m.g) derived from phytozome v7.0 (chr-ID sc affold00021; pos 704425 to 705058 reverse strand)

SEQ ID NO: 82555 - DNA, 506 bp, Citrus sinensis
  Intron number 1 from transcript orange1.1g034020m (locus o range1.1g034020m.g) derived from phytozome v7.0 (chr-ID sc affold00052; pos 382888 to 383393)
gtaccaaccttttagcttcaagtttctcaccttaggtacggtttttcacctattttcatctgttttagttttttttcactcttatcactttgatggtattgttgatttgttactgtttgctgttgtaattattattgtgtggctgttgtagttatttaatgagtttagcctatgagatgatggagaatgagtttgaagagggctatttgagattttgttgctttaatttgaattaattatgaaatttcagatgtggcattttgtttgattaagttattatgaggccttgactgagattttgttactttatattgtgaatggatgtgtttatggacgtatgcccaccaagtgtttgatgaactgtctaagagaaaaagaatttggtgctttgcttttgttaattgtgtcctagagaaaaacaattaagttatttgcggattactcacgttaaacttggcacatgattactgacgattcactgtgaataacagtcacaaacacagtcg

SEQ ID NO: 82556 - DNA, 516 bp, Citrus sinensis
  Intron number 4 from transcript orange1.1g034020m (locus o range1.1g034020m.g) derived from phytozome v7.0 (chr-ID sc affold00052; pos 384085 to 384600)
tacccagactgaagcactggtttcatcatcttaaggtttgactagtgtatgatgtgaatttatttttttgttgtgaacttgctgattcatgatcaccaagaattatattttgttcaagggcttgatgtatattaatcttaggtaatctaattgagtggtaattcatttcaacagctatttgaataagatttgcgttttctgttgggtttatctattttggcctacaaatgagccttgaaattgaatgtataaaataatgtttaaagactgaaacattttttgaagtgatctaagtcatttgagtttcatgtttggtggaattattttcaaagctgggtctttttaaacttttactgctgtaattgtcctggttcggtttgtaggccactaatatctagaatagcaagatcatgtatccattcagagcttatccagtttcagtaaatgcagctctgatgttttcttctcattctgatgacaggttaagctttacggggacatacagaaagtgagaag

SEQ ID NO: 82557 - DNA, 544 bp, Citrus sinensis
  Intron number 1 from transcript orange1.1g035752m (locus o range1.1g035752m.g) derived from phytozome v7.0 (chr-ID sc affold00084; pos 367415 to 367958 reverse strand)
agacgacaccgttctcgattcgaccgtgaacccaggtgtccgttttacttatcctttgtatttatgttctcttatattgtatgttaatggtgatataatgatgagctgcaaatgggtttcatgtttagaggcgagccttaatgggaaaaagtaaataaatggagttgacgtatggataatgacttatcgtttaagggttttcggttatttgttgaaattgggtaggtgaaactaatgggaattcaatggtgtttgaaagtttgaatttttttcctcaactgcaagaaccattagaagattattattttaaggcgagaagggcaggctatttgaattacaaatcaatatattttgcatgaaagtatattattttatttatttttatgcttgggttggattttcattttaactttgaatggagttgttggcagagttgggtaacttgtgttagtgactagaggcttttaaatcctgatgagttttttttttccttcaattattattattatcattggtggcattagtcctaagaggtctcggaggg

SEQ ID NO: 82558 - DNA, 344 bp, Citrus sinensis
  Intron number 2 from transcript orange1.1g000939m (locus o range1.1g000934m.g) derived from phytozome v7.0 (chr-ID sc affold00653; pos 52762 to 53105)
tttctggattggctgtcaagtatactacttttggaagttatatttggtgtttttttactttgtttgattcatttgtgtcactttaatgcattctaaggcctttcaggggaaaaaggaaaaaaaaaaaaaaatttggcatgagaacctcaaatgttgtttacttacagcactttagtggttgttttgttttgctatgtccaagtggaaaaaaataaaggagaaagaagaggaaaaagagttgctaccctgataaagctgttatcccttgtgttgtctatttttatgtcatgtcttaatgtggtattgcagtcttgctccattggtgaaaaaggtgagtgagccac

SEQ ID NO: 82559 - DNA, 620 bp, Citrus sinensis
  Intron number 1 from transcript orange1.1g025237m (locus o range1.1g025237m.g) derived from phytozome v7.0 (chr-ID sc affold00204; pos 80520 to 81139)
cgcttttcttgcccacgtgggctgcaagacctcttgtaagtactcatctatgtttcctctttcaatattattagctcctaactcttgagtcttgaagctcgaatctaaagacctgagccttaggaagaccgttccttaccaatggagctaaaccttgggttcgacttttttgtttcttatttatttattgcaaatgcagtattagaacttgggcagctgtttgtttgtgaaaaatacagctggccccctgtggttttggcgacggtcgtggagaccctcttgtgttcttgtcactgtagtcgaaggccataattttctgaatagggtctttgagactgtttcggagaagaaggggtcactgtttgtttttatttggttgaaatttgatttaacagcgagttcagttggtgctaaaatgttttgggttgaaacaagagctgtgcagctcgaattgtacccacgcacatgggtggtgagatgggatttaattgacagtatgctgctattatcttatatgctatgtttatgcttagaatgaaaaagaaaaaaaatagaagtaaaataaaaggcttatattgtaacggctgtaatgtttgtattgtatgcttaattaggtggat

SEQ ID NO: 82560 - DNA, 834 bp, Citrus sinensis
  Intron number 2 from transcript orange1.1g014215m (locus o range1.1g014215m.g) derived from phytozome v7.0 (chr-ID sc affold00368; pos 153991 to 154824)
ttgtggggcagcatctgggacagattcagtgcaaggtttggactttgcttacaatacttcattttgaagtttctgtttgctaattgtttattttattttgattaatttgtttttgtgttgatgttgacttgcatgttgggcccttttgactttttaatcttctgttgagtggtttgtggtaatgatttgattaatctttgaggaaaaaaagaaaaagggtctgagggaactactggcctgatatatcacattgtgtgtgtgtgtgttttggtgtatttagttggctgtgatgttaatgatttaagtctacagttgcagctatatttttgtttgtgttgtaattaatatatcatgttattacttcactctcttttgcatgccttcccctgcatgtgcatgtatatatatatttaaaatcttctttttgactgctaaaagttagtagtgaagtacaagccattcttctcttgtgctatcagtcttaattttaattgaactaattatttcacatagccagcttccttttggatctgcactgcactagcttattttcacatcacataattaatgcatataagaaggaactttggttttctcctatttgtattatttattctatcaatgatattaaatgaataaaatataacaaaaagcttttcaaagtgagcaaagcttagatagtaagtgtactattgttagactgatttaatttgttattgtgataaagtgttgtttgtgcgtatgaattaaattttttacagatcttgcaattttacctgcagtaatatgtttcaaaatttttgcagttttaccaaagtacgggaggttgcaagc

SEQ ID NO: 82561 - DNA, 458 bp, Citrus sinensis
  Intron number 1 from transcript orange1.1g027157m (locus o range1.1g027157m.g) derived from phytozome v7.0 (chr-ID sc affold00015; pos 1199422 to 1199879 reverse strand)
gtagcagatcaagaagaaggaatacatctcagtaatttcttcatttttcataaacttcctttctctttaatttaattcaagaaataatgctcttgtttctatggtttcatcgttaaaatcttcatctcttgcatctttgatatgtagtctttagactgttttcttgtttgttttcaacaggtcttttgtgttcttaattgtatccattatggtggtttcttgtttgtttcaaaaaaaggctcattgtttttttaacgttgcccttatatattattattacgaaggccagcttaggattcccatttcctgaagctttgtcagtcctaatttgtttgttttgcatgcaagaaaatttgagcttctttttgtgactgctactttctatctcattttctggggaaacactcactttattatcatttttgtttttatttttttagcatataggttttccgaga

SEQ ID NO: 82562 - DNA, 498 bp, Citrus sinensis
  Intron number 2 from transcript orange1.1g023278m (locus o range1.1g023278m.g) derived from phytozome v7.0 (chr-ID sc affold00266; pos 25782 to 26279)
caaccccatccgtgtcaagtacacttggtatgagtccttaaacttctctacaatttaaatatttaaattttgagtttctcttgttgcaaattgctcttggcgattttgctagtgagtagaccatctgtattggttcaattttgtacaacaaagcaaaaagttgtcgatgattttaatgtcccatgttacatcagagtttgctgtggtgagcgaatagtacttgataccgctatttgaaaatgatgatacataatgaattgtttcctactatgatttcaaaggaggcttttagaaaatgccgggactaaaagtagtggcgtaatttttcttccattccacagctactgagaatggggacctaagaaagtctatgtttgagtacagatcataattaacaagtccctactagctattgaatatcttacttttctgtgtcactttgaatcacatgatttctgtgaagcaggtagtagctttaagggtgcttcgttgccgagg

SEQ ID NO: 82563 - DNA, 528 bp, Citrus sinensis
  Intron number 1 from transcript orange1.1g005909m (locus o range1.1g005909m.g) derived from phytozome v7.0 (chr-ID sc affold00008; pos 450023 to 450550 reverse strand)
tgcttttgcaagggtggccgctgtgactcggtcaagttagtttcttcttcatttttttttttcccaatctagtcatgatattaatttcttttttcttataccgttatacgtttacattttaattattatttcagagaaatacttcaaagacaaaagaatgattagacaagctatgaaaatcatctatgcccatcacctaatccgaaagagatacggagattatttcaaaagaattttagcatatagttgcgttcgatatgactgtattgcaagtttagggctatgtaaactcgaatcatgagcaaacaagccctcaattgatgttaataaaaatatgttgcttcgtttggaatagttgtaagctgaatggtagctgccaacattaattaattgcttccaactacatcagagtccagagatacctttgatgattgtaaatacctgtgattagatgaaaatttcactattttttttatcattttcaacattgcaggcggaggaaatctagactgcctctcattataggta

SEQ ID NO: 82564 - DNA, 845 bp, Citrus sinensis
  Intron number 1 from transcript orange1.1g008070m (locus o range1.1g007159m.g) derived from phytozome v7.0 (chr-ID sc affold00001; pos 2030110 to 2030954)
ttcttgccggaatttcggttcttttgtcggttcaggtattagcttctctacatttacatcaaaattccacttttccaattttttttttgttttcactgtattttttttcaattaatttcctttatctacattcttttcttctgtcgataaattctatgcatgctcagatttcgaattttccaatggattcgcttgctctttctgggagctgaatcttattttactttttcatgtttgttttacatatgtgcataatatggctatcagttgactgggggctctctctttcttttcagttatttctttatttaattaattgactggattaatagtttaataatattgcaactggacttcttttctttcctaatcttcatttacatgctttcggatttcaggttacctggtttggatttttctttttttcccttttaatttttactaaactgggactgacttaacgcaacgtgtgctctttttattcttttattattagctgctttggaaattccgcctggtcggtgtaggtccattactttgtttttgtaacgtgtccaatttcaatatgtagacttcttgagatgtggcaccacaactttcaataaaaaaactgctcctttacctttagggataaattaatttagaaagcataagttatctttcaattaactgaatcttgctttttgtttttaatttttttttccattatattgtttcatagtctgactcatatataaaaaggcaaattcactatgggctggcaactaaacagtttttgcaactccatttggtggtttttggttgaacatctttaagtaaattcctgatattttcaggcaaattat

SEQ ID NO: 82565 - DNA, 493 bp, Citrus sinensis
  Intron number 1 from transcript orange1.1g021062m (locus o range1.1g021062m.g) derived from phytozome v7.0 (chr-ID sc affold00042; pos 372563 to 373055 reverse strand)
ctgaatctctactgatagaacattggaacgaagaggtactggttttcttctatatttttgtttttaacgagttaaaggccctcaatttgatttttgtttgtgtcacagggtaatgtgtcatatagatatctgaataagtttgctagatacaaggtgttttaggattacttaatactttttggtagtttgaaaaagtaaaaagaagattgaacataagatggcataaccaggcaacctttgcataagaagatattaaaaagagagcacacacttttaatgttttcacaaagactcacttttgcatctaattggacaactgatgaaactataaaaagttaaattatggggagaatcgatttaaggaaagatacaatcagaatagctggattgcaccagtcatgtattcttccaaatttttctatcactgaatacaagcttttctaattactctgaatttcattttggccataaatatttcaagcagtgcagaacg

SEQ ID NO: 82566 - DNA, 804 bp, Citrus sinensis
  Intron number 2 from transcript orange1.1g001719m (locus o range1.1g001719m.g) derived from phytozome v7.0 (chr-ID sc affold00841; pos 45713 to 46516)
gaagtattgatattaaaggtaagtaagcttcatctcttctcccgtgccccatcttttgtggatcttatttcattgagcagctggaggtactgatgttagatctagctagactcttgctgctgtaaacttcaaggctttaagtactataaaaataggtctaagaaattatcaatctatgcaattttcaattctcataataaaaaaaaaaaatcaatctaattattttgtatgtcttcaaaagtagagaattgtactctaattggaaatcggcatcgttgctttttattttctctaatgctctttcttcgttaacaagattatatcttaagagagattgggttcaaaaaaagtttttatttttatatttatttttattcttttatacaagattccaaaaaagttttgatgttcaaggtaagccataataacctacatcttctttatctgcctatatcttatttactatttaacaaattaaaatatcgtgtttaagttgattttagtttttttttttttgaaaaaagaaaaaggtacagcagtaagtaaagtcgaaatgaatttttactctttacaaatttaaattcggggttgtcagttaaatatacttgcttaaagccactcagtcgggccctttgggagctgctttaaatttttcggattagccatatttttttcttattaataaaaatctttttgccgagatttaacataaaaaaggagaaaataagttatttaattaactcggttttaagtgttggcatatatacaggactggattccttgagtaacttggaggagctggac

SEQ ID NO: 82567 - DNA, 865 bp, Citrus sinensis
  Intron number 1 from transcript orange1.1g015745m (locus o range1.1g015745m.g) derived from phytozome v7.0 (chr-ID sc affold00001; pos 4004356 to 4005220 reverse strand)
agcctgtctcaaccgacctgtgcagctctcaagtggttggtttccctttctagatattcttgaattatgatgggttctttagttgattacatgtagagcagttttatgttttatgatatcgaattgattatttgctatcagccgacttaaatacttcatttggatgatgtttttatgttagttgctgaagaattgttgttgtagtgtagtttcttgttgaagcatgaattctagagtcttgttggtgaaaattaattgatcttctcggtaattacttttgacacggggcttcccctattgactttaatcaatttgagattttttcttggacacaggttagttatatgccaacaaaactaatgtatatcatccatagcgactaatttctttaaaaacttttgaagaatacaatcgggctaggttagatttgaggaatctgattctttgatgaaaagatgtggaattcacatattatgtttgactgacttgaccactaattggtaaagcgattcatgtatcatgagaaaaaggcatatcttttagaactttacccatttatttatttatttattttgggtgcaatttaaccttgcacaagtgcattgttttcaccttagttgactggacatgatagaggactgtttttgtgaatattaccatgtgaatggatgagctgcattagatacttattctcatccatgtgaatttggaactactttctatatatccatgtgtggttggttttatagtgaagttatttgtaatttctttttggacagctgttatcttctgaatctgaaatggtatacttaatgtcagattaattttctattgtaggatataaaacctgtagaaaaaattccag

SEQ ID NO: 82568 - DNA, 511 bp, Citrus sinensis
  Intron number 2 from transcript orange1.1g045839m (locus o range1.1g045839m.g) derived from phytozome v7.0 (chr-ID sc affold00020; pos 88934 to 89444 reverse strand)
tgctctgaccttggtggcttctttcttaaggttcttttttagactttttttattcttttaagctcaattcagttgctgctttttgttctctaatctcaaactatgcactgaagatcgtttaaccttgaatgggtttttgatcttttccattttttcactgtttaatcgatctgtcgtttgttataagtgattttcgctgttattagcattgggaaaatgtttttgtaaaatattcaatttcaattcttgagtaataattcttaacgctttctactttccaagctctattaggagtcgagcctgaaactattgggcttattattattattttcattttggtctgtttccatacattttctttaatgttgtttatctattttctacttccgttagcgaaaactggaattccatgatgattatattttgtatggtatgctttaataatttatgtttaaattttgcatgagttgaaataggttgctcaagttgttgggaagcctgacttggcccc

SEQ ID NO: 82569 - DNA, 331 bp, Citrus sinensis
  Intron number 1 from transcript orange1.1g037062m (locus o range1.1g037062m.g) derived from phytozome v7.0 (chr-ID sc affold01524; pos 1077 to 1407)
aaatccacttctggttctacttctgggtaccacaggtaagatgcaatgttacaacattgtgcacatatttttaatttctaactaaattgaccaatttattgaaataaaaaacaatgtaaatgtgacctgcattattcttcaaatagcaattttggatgcatttcttaaattaaaaaaaattgttttgggattcaaaaatctgttcaataattaaaggctatgaattttgagttgacctttttagttttttgagaagaatatcagtgattctgctctagtttattcataaactaaaccagatttttcaataaactacaggtttagcaactac

SEQ ID NO: 82570 - DNA, 459 bp, Citrus sinensis
  Intron number 1 from transcript orange1.1g008945m (locus o range1.1g008945m.g) derived from phytozome v7.0 (chr-ID sc affold00008; pos 914513 to 914971 reverse strand)
gcttgaacgttttcatttcatctacgaaagacgaggtatttgttaatttcattgcttggtttcttcttcattatctttgattacccatttgttttagatttcttgtacagtgaatcgagattcgattttgattgtatgaaaccataagttaactcattgcttgtttcttctctgttctgtataatgagtttttttgtttctttgttaaatgattttgctttaaaatgcgagtaagaattttttttttttttggtgggcttttaatttcggttggttttgacctttgcttgtacaatatttttgtcttttcgttacagattaatgtagttttcttctgtgtttgtgtccattaaattaaaatgatccttgttttttcatctgatataacgtttgtttactttactaacaaaaacgtttacatcattgcttgataattcttgtctgctttgcagttacaat

SEQ ID NO: 82571 - DNA, 583 bp, Citrus sinensis
  Intron number 1 from transcript orange1.1g015799m (locus o range1.1g015799m.g) derived from phytozome v7.0 (chr-ID sc affold00015; pos 1773355 to 1773937)
catcaaattgtctcctttcttgtaagttctcatggtttgaattctttcttcgaaaagcataacctacagatactagaactttaacctttaccactatatatacgcgcgcgcgtgtgttgtgtatccatatctattctgctatatatagaagcatgtattgcagctgtataatagagctgcctcaataatcacaacagctgtgatgtaggttttctgaccagcatcatataaattaacaattgagagtagttgatcgatcgatgcaacatcaaattagttctcttgattactctccccaccccaccttctctctctctatatatatgtatgtatgtatgcgtgtctgtgtttttttttaaaaaaattaatcgttcatactcctaatgtatctgacactaattgacactactcttttattttatgtgaattttctaattattacttttcagttgtgtaagttactagctctttaatttaattaggtatgcgtgggtgtgtgtagggatctaataattttttttttcctttgttctcttgtgttttcatagatcagggggaagaacaaaattgttaggaagtactt

SEQ ID NO: 82572 - DNA, 1023 bp, Citrus sinensis
  Intron number 2 from transcript orange1.1g002711m (locus o range1.1g002711m.g) derived from phytozome v7.0 (chr-ID sc affold00103; pos 126994 to 128016 reverse strand)
ctaggcttgaaaccttctttgacatgtaagcacttttggatttaattagtaattgtgttacatttcatatgacgaacttcagttattttaaaatatttaattaacggtgttaaaactcatagcaaaattataacggattgtgtatctaaactatcacgcttttagaaataattgttgacgcaaacaaaagtaaaaacttaaaatagctaaaatgagaatcttcacacgtattctaacgtttgaaaaaaaaaaaggacttttgaaacgagtaaggtatgagaacagttcatgggcttcccaaaagcaattgggggcttttgtgaaatgtcattcagcaaaattgcttggaaaaacttaataaagaatttcaatcatattcatacccacttccatgcaacattaatctttgatcaatcatagaaacaatcaaccccggaagtattggtaccttccatgtgcagtttgcatgttctgacactcgtttcaagatcaggcattcataaaacaaaaaaaattattataatagttagggaacttcgcttcttgtgatgcttcaggttttagctttttttttttataaaaaaaaaaatattttaatagttttttaatccagagttgacaaacctgcgttgactttcaaatgaattgctattccacacgtctaggatcagtcacttaattccaacttgttcaaagaaattcaacgtggtacttgaaaaaaaaaaatgaaaggatactattcatgacagtcgtggtgaaatgattaatgaaattcttttgaatgggcatgtaaatttatttttggataattataattaaatgaaatatatttgagctactataattaaagaatatcatatctaaaaaaaggtatatctgattatttttaaaaataagagatagctactgttatttttttattaaaaaaagaactgtaggagaaatagttctgtaatttgagaaattataccttttttttttaataaatgaattgtaataaacgcagggtggacaagaatttag

SEQ ID NO: 82573 - DNA, 936 bp, Citrus sinensis
  Intron number 2 from transcript orange1.1g024968m (locus o range1.1g024968m.g) derived from phytozome v7.0 (chr-ID sc affold00001; pos 5260996 to 5261931 reverse strand)
gttcaccgatacttctcacaatcaggtgcgtagatagctagcatttctgttattccattagttttatttttggacctgatggatttaaaatttggaaatgttaatacaaattggggttgtctttatctttaaatctgctgattccgtcagttagttgtagtttaaatggttggttttagagagcataatgtcccgtatatctctagtgctgtgactggttagtgttctgcttcaatagtactgttgggggagaagtagccagtaggcataaaggtgtgttttcataacattgttagatattgattttacatgggtctgaaggcagatctgcaattagttagtgacaactggtgatgctgcccaattatgtgctcttctgctcgtgcttggtaagtttataattcataattaggctgtttggagatagggctgcaaatgcctccatttttcaagctatgtatgttaatgaagtcgaagaaatctccttttgtgggttttatttatatctatcgaaatttctgtcgattattgttctgtcagttgtctcattcaacatccaatattctttcgtttgtggtttcagtctcagtttattccagattctgacttttttcttctggatttgaaaattttagctcactcctttttgttgatctagggccaaaatgaacaaaaacaaagtatgttcaattgacactttacatgtccagctgttcttggagtgctgttattaaacccttttcttagattggtttgacttatttccattttcaactgtaattagctatagtttgtagtgtcgtctatttggaggctaaaacattttccaacagagcatgatttctgatttctgaaagtacatttataaaatatatatatttatgtgatgccattgctttatgagatcattttttttttacctgttctttgcaggtt

SEQ ID NO: 82574 - DNA, 999 bp, Citrus sinensis
  Intron number 1 from transcript orange1.1g032544m (locus o range1.1g032544m.g) derived from phytozome v7.0 (chr-ID sc affold06209; pos 1830 to 2828 reverse strand)
cacaattatcaactagccctaaaatattagttgtggtaagttgcttcttccctttaatccacgattttgttaatcaagtgctgcatcacatcttgtaaaataatttaataattttgtttaataaaattttaggttgtaagaggtttatcacagcagcgccacatttgtatacctgtgagaatcattgctctcataccaagcatcaacaacatgtgaaaaattgtcatttggattttggtgaaggaataaatttcaaatagtttgatctggctgcataaactgatttgctttcttggaattctattctgcccttgtttagtataagttacaatactctttttgatgtgctttacttttggaacaaaattcttaacttatggcatccttcatcataggtaagagatggtattgttgtgaagtaactgttttcttgttagattaagtttatagtcagttgtgattaaatgtttatgcttattcttggccattcttttcatgttttctaagttgattatttgctttggagctcaatattcttaaaagagaagcagaaaaaaaaatgataattacctcttttgtgatttctcattgagttttcctttcaatatctagatggtggaattttaagaatgaagactggatatctgttaactgctgtgtcctgctatcataaggtgttaatcacaaatcacaatttaagtatgattgaaacatccaatctgagaaggtgatatatagggaatttagcagtaacatgtcacttgatagatttcagattacatgcaatgtaatcattttaccaaatttgagtaacatttgtttgtaacttgcttatatttgttgctaggtaatgacaattttagcagcatctttaacaggaagacactgcctaatgtaaattggtctgtgaactgtttttttgttatactgttaattgaatttatcttccttctttttttttttggcccatccttccctttctattcttgaggtaaacag

SEQ ID NO: 82575 - DNA, 494 bp, Citrus sinensis
  Intron number 1 from transcript orange1.1g048459m (locus o range1.1g048459m.g) derived from phytozome v7.0 (chr-ID sc affold00015; pos 153603 to 154096)
ctctcattctttcccacatcgcctctcaccataaggtttgattctcttgccttttttgtttaatgaaaaaaatttgtttcacataattaggaattttagattcttaagggattattgaaattcaactttttgctcatatggttttgtattttgacttcaattgtaatttgctgtctaagcttctgtgaaaaccgtagtatttgacgcttatctgagaaaccaattttgtcttttacccaaaaaaggtgtttttctttttaataaaaatctgggttcaattattcaattgctttgcactttaattgagcgttagtgagtcaagtttcaagggtaacaacgtttgctgctagaatttagtgggtggctcgagtgtccaacttgaattctctgagctgcttgggaatttctgatgatgaacaaacaattacactaagtacagttgtgcccgtctatcttatagttttttattttattgattcttttctatcaggaag

SEQ ID NO: 82576 - DNA, 513 bp, Citrus sinensis
  Intron number 2 from transcript orange1.1g048459m (locus o range1.1g048459m.g) derived from phytozome v7.0 (chr-ID sc affold00015; pos 154204 to 154716)
ctgagtcatttgcttgaggtatttcagaataattgttgggcatctttccttttccacagagttctttttcaagagtacattcattgtggtctttttcctgttacatggcaaaattcctctgctgatgtcttgttttataatccttcatcaagaaaagaactttcaatacctagttagtgggatccttttcatattgtttgtgtcaattaaagatcaataattttgcaggaattttggtttttgagaaatctgaaaaaaaccatggaatttgtagcgtgaagcattggatccctcacagagaactccaaaatgcaagaggttgcaattttaaacttgaatggaccagtatcaggttgggagacctcctgagaagctccatcaagtaagcctcattcacgcaatcttccgaatcgaggtttggatatgtatgcttgcacttaggtttgtcaactatgcagtggatcactgctgattcatttgatttgctgcagaggccatttcgctgctcggttg

SEQ ID NO: 82577 - DNA, 737 bp, Citrus sinensis
  Intron number 1 from transcript orange1.1g029986m (locus o range1.1g029986m.g) derived from phytozome v7.0 (chr-ID sc affold03800; pos 3591 to 4327 reverse strand)
aaggttctattcaagcttctttcgttatgtcttgtaatttcatttctgtgttcttggaatattttttcccatcatttggggttttttattgtatgtagttgactttttttttttaaattacatgggactaatgtttaagttttaactcatatttaatgagattagtataatgatatttacaataaaataattattggaattaatttataaatcatatatagcacagttcaaatgttaactcatattcgagagatgtctactctaattatatttcaaaaaggacagggctgccttcactcaaatcaagaaaaaaatgaatccgcataatgtattgtgcgagctcgaacctcacaattgtgaggcttgtgttctaaccactgggctaaagcttagtggctgcatgtagttgactttgaatgttcttcttttgtttttcttcagtgcttgatatgattttgctgttggtttgctgtcaaatgagaatagaatgaaatttatcagattcggtcttatttttcaaatctactatattctgttttgaagtgtcctttgttagctaattttaaagttactttgaaagtttctgctagtttcggaaatcagtcggtgatttgatttgttcatatgtggattaagagagttattttgtaggcctgtactttctgtagataaagttgtgtaatcaagtaactgtatgaattgttgattaagcttaacatggggttttcagttacaaa

SEQ ID NO: 82578 - DNA, 1015 bp, Citrus sinensis
  Intron number 1 from transcript orange1.1g039165m (locus o range1.1g039165m.g) derived from phytozome v7.0 (chr-ID sc affold00055; pos 21791 to 22805)
ctgaagaatacgtcggccgagccactttgcaactggtaagttcttgctagcttttcacttgcaattcttttttgtttttgtactttgtttttttttattattagaattttccggtattttttttttgtttttttcctattttgaaattgctgattctatcataaccacttgcgattatttcgttttgtgttaagactttgacttttgagtttcaaagtttttgaatatttgatcctgttctgtgtataaagcttagaataaaatgaataagtctgttttccagattcccttccggtttaggctagaacgaaatttgtggctaaactgggtagtgatgatgttttagatgagacaaaatgatgaatttttccggtatacaaatccaaaattcgttacaaaatattatgactgttagttgatgggacatctgttttgtttataagtgatatttgttttgtgatcattcaaggtaattaatttttcgtttagtcggacatggagatttacttgtgggctagtaggaaaagagaagagggagtgatcttgttgaaaaatgcaagtgaagctggatagagaagcatgtaggggggaggggaccattttccttgattggttttaagattatgagaggaaatgaaatgggaaggataagtaattttgtaaatcccctccctcccaaaaaaaaaaaaaaaaaacccagtcattaaatgaatgggtgttagggatcaagagataagtctggttaaaggtactaaattaagttagtttctattcattacctccttaggggacaccaaatactatcaggtagcaagcttcttctttggctattatcaattgaactaatagaaggaagtatgtggccttgtctcttctcttcttcccttatccttcattttgtattgcttccctccttgcaagccttgtattggtttccagttttgtttgaactaatgttttgacttgcactttttctgcagcttgattttgatagtgctgccccacctgagcaagc

SEQ ID NO: 82579 - DNA, 963 bp, Citrus sinensis
  Intron number 3 from transcript orange1.1g005218m (locus o range1.1g005218m.g) derived from phytozome v7.0 (chr-ID sc affold00758; pos 13837 to 14799)
aaagtttctctaatacggtaagcaccatctttcttgctcgttcgtgtcttgtcatgtctgcttctttactactccatggaaggataagcttatccacaacttcttcattgtcatttcccacgaagtccatgtcttggtctcgtatatttttgtgcataaacaacatttgttgatttttgtttctttgatgaagctaagaaaacttgagcctgtctatccttggaacagaaatataatacaaaatttatcccccttctggcattattgcttttgaaatgatttgaatacttaatatcattgacttgtaagtcatagcatccaatgctgaaaaattagtaatgcatggcattacagttgcaactaataaaattatgaggtgtaaatctaatttgtttttatgatttaacattcatgctgcatttgatgtagatacaaccctaatgaatctatagggccatctatgataattgtagatttgctaaaggcttcatttattggatttattgtttaggactatttagtttatcaccccttttcttccacttcatttgaaatgtgatgccctaaaatgttagcagttcaataataatagcaaatgctacaaatgtagtttgatccttgtcattgcaagcatgcatgaaaaatgtccacaggtagtgggaatggactcttgaagatttattgttcttttgcttgtgatcttccactaatgcatctttaactgccatttaacaatcatgtttataaaatgtcagagggatttttttttttccctggggagagaagactcttttatgtaaatttctgacaatgggactttggtcaagcatttttttttggtcatggtataggaaatcagagtagcattattttattgcctttgcataactgaagaatgtgtagtagtgtgttgtctctagtctggttgaaataatcacttcccggtcttacttaggtgctttc

SEQ ID NO: 82580 - DNA, 1050 bp, Citrus sinensis
  Intron number 2 from transcript orange1.1g036905m (locus o range1.1g036905m.g) derived from phytozome v7.0 (chr-ID sc affold01090; pos 4367 to 5416)
gctacgccaactttcattcctttcactgtggtacgtgcatgcatgttcataatttatatatacatattttcctaaaactattttaattacctacgtaaaattaattgaatcaaatatgtacttttagttatatgtgtacaactctttgttgtataaactgaattattgcagataattccataatacgggaaacagaacgtacaccaatgaccaatctattccttaaccagctgtctttcccagaatttgaactagagcaatgattagtcagttaaataaaattacttgaaaacaacttgactaaaccctagggtttcaggaaatgttaattagagttagggctacaagtttgggacttggtcaagagcgataatcaaaacccttgcatgggacgagccagtgattagaacccaaaccttacaattgtgaagtcatggatttaagctcccacaatgtattgtgggggatttaatttccttctttaattgagtaaagatagttttttcttttcgaaatgtgagtggagtaaacatcattcgaatcttaaagagagtaaaaattcgggcagtgtttcataagaattgatgtaaactagtcccagtaataatctgatttataaatctaatgtaatatgagttgtactcttgagcaattgtctcatgcaattaaaacaaaaaaaaaaagccatacgcgacaatgttcttctaattaaattcgaaacgatttgctggcttactttcataacaattgaaatatattcctaatgaacgtctttaacttttattatttttttatcagcaacaaaggctatagaggcattgaattatacaatactgaatggtaaagcaattagagtaatgcagtcgacacccaattctgaagccagattgagttggtaaagtgttccttaaggtaattaattacaaaaaattttcatgggatatgaaaacatttagttactcgatcatcattttgtctgctgtttcctatatatatatatatacacacttggcagaacttggctagtacaatagacaattggaagctcca

SEQ ID NO: 82581 - DNA, 939 bp, Citrus sinensis
  Intron number 1 from transcript orange1.1g024102m (locus o range1.1g023740m.g) derived from phytozome v7.0 (chr-ID sc affold00032; pos 662075 to 663013)
cttccctcacccagcgttccaatattgacctcaaggttgctacctatttaccattttttgccactctctttttttcatttggtgaaattagttctaatttacttgtagaattataagactcgttagctttggtgagagttaaattgtgttttggtctaattttggttttattgcgtaattgttgtaaaagtgtttttttttttttaaggtgttgcaaaggtctgggctggtaatgggtaggtgttgttttcgtgacttgaattaatggggaaattatggcaaaaaaatgattgcctttatgcattgcgggtgttctcatggtagttttcattgctttctgggttgtatatgggacctgtgtggttgacgtctactacgtactgcattgcgatgaaattttgtgctgacgatgttcctggcatcatgatgcagaatacagaagcttctgcttctgattatgtagaagctggttgccatttggtgacattctctttattatggtgttgtgaactattgccttcctttcttagtttcagataaatgactctggtgtttttcgttggaaactcaacttgcgtagaagaagggcgtgaatctgtgaatgtgctgtatcataattattggaatatgcatgtgatgtatatgaagcacaaatgtgatgaatgagaacaatagcccacaaaaatgagattgagaaatcttactgtgctgtgaagatgttagtgtatgctttcttatggatgttctggatgcttattagttgctggtatctccgtgaagttcgattgctacttttgttggttaagttcttgtgcagtaaagctttgattaaattgattaccaacactacactccattgtattatggtttctctgtcacaacttcagtcaatctccttgttatttacttgtctcatccttgctcatatttgcaggacaa

SEQ ID NO: 82582 - DNA, 719 bp, Citrus sinensis
  Intron number 3 from transcript orange1.1g024439m (locus o range1.1g024439m.g) derived from phytozome v7.0 (chr-ID sc affold00274; pos 146044 to 146762 reverse strand)
ttacctctgatagtgtggaagtctcctatttgcaggtacagcactttagtttatgttgcatcagaacttgcttttttcttagcatgtatttaaatattttttgatatttattgttgaagtgctacatcaactctttcttattgctgtgtgttggtttgagcaaaccacaattttgaggtgctttaaatttgataggtacgtttattctttttaagtcatattcttgtaaaccaaaaatgttgaaacatctaggtgtataagaaaaagttaaatggttttagagcatgtaggaaagattgtttgacaagctgttaccataaaaaaatattatattaatttgaacaaagaggtaaacaaaagaaaccagtggcttgagaatgtagggatctgtttctcccacatgttttataattagagtcttggggctagactgccagaggaaagttctaaattgcaccaaaccctgtggcaacatgcttctgtttctcagatagagtgttgtttgttttcattgcaaattcgagcccatatcatgtggtgatctgttgataaggcatttgtttcattgattcttgtaaccacactaaatgattccatgtaactactagaatgcagttgtcttcttgttattgacgtgctcaaatggttagttagctttgttttcctaacggataatgactctttcagcattaattcatatttttttcctccagctgtac

SEQ ID NO: 82583 - DNA, 713 bp, Citrus sinensis
  Intron number 1 from transcript orange1.1g014179m (locus o range1.1g014179m.g) derived from phytozome v7.0 (chr-ID sc affold00398; pos 29931 to 30643)
acaaacacactctctcgctcaatattcatcctcaggtaacactgttaattttttgacttcaattaatcaatttctttttttcttttttttttcttttttggtctttttgaatttgattgtttcatttcagttctgtcatttgtgtaaactgatttataatatttcttgtcatttgaccgtcggggtttatcttcaccaatctgtttccttctgggatttgcttagattttttattttttaattttatgttgaatgtttctctccatttggtttctgttgttctttataagaattcagtcttcaaaatgactactcaattttgcttgataactattgaattgtcaatcgtaaaagaaaaagaaattttgaaatttaagtattatgctcgctttggttgtactgaaaattttgggagaaaaggaaattgatagttttgaaattttgggatttggtagcaaaagtctccagttaagcgagccgactatggctaccctttactcgaggttggctttaattccttaattttctttcggaggatttcattgtcgatgtcatagttgcctatagtccctcatagtgagtgatgttaagcattgcttttgagtatgtgaagatggctgttaaattgtatgttgggattccatgaatgcttttgtaattttgattaatgaagtagaacttctgcaggatcttttcttgaaggtatctcgtca

SEQ ID NO: 82584 - DNA, 458 bp, Citrus sinensis
  Intron number 1 from transcript orange1.1g029437m (locus o range1.1g029437m.g) derived from phytozome v7.0 (chr-ID sc affold00001; pos 4529870 to 4530327)
aggttcattttcttccccttgttattgtttatttatgggtgatcttgtctcttgatcaattaagttatgttttagtttgctgagaattggtcggtgactgaaagttgaaacttggatcttgatttggaaaattagaaatcgccgtttaactgagttgtatttgagtaatcttattaaccatatggaatatagcttttcattttcttgattgatttgaatttttcatttttctgaattgaaaacgacatattcctgtcttggtccctgactggttcccgcggaaaacaatcgagggcagaagaaatctgaataatcttgtgtaatggaagaattggaatttgaaataaagtctatgatttgctttccacgaacacaagtacttttccattttgttgcaataactctttcttgaatggacttcagagattggttcaacatcagccaacacagtatcccac

SEQ ID NO: 82585 - DNA, 608 bp, Citrus sinensis
  Intron number 1 from transcript orange1.1g007210m (locus o range1.1g007210m.g) derived from phytozome v7.0 (chr-ID sc affold00032; pos 769494 to 770101)
cagcttgctctcttccagtcaagcagcagcttcaggtttctcttcttttcattttcctgatgcatgcatgccttcttttcttgatgatcaatctgtgcaaacagagatctgcaaataaagtttgtttcttcttttgttcttttttttttttaatatttcatttttggtgtttctttataactgttataaaagtttcttgatattgctggctagctaagctctgtttgttttagtttttcatgcagctaattattattcacaagtatgcatcccttcgcagcttgagctctcatttcattccaacagaggccgtagtcttggtttctggaagaaaattgttaaaagaaaatgaattatacttctggagattaatttggagagacattaagtaattttaactgattttgccatctttgcatggatggattgatgtgatcatgtttttgaaaatatgtcttgtgctttaagactcagaattttgaggaacctttattagctagtttccattaccatttttatcaataatgcgacactctccttaacatattcatttcatttaatttaatttgtcaggcgcaggagcaaagaataatttatacaaatacaga

SEQ ID NO: 82586 - DNA, 461 bp, Citrus sinensis
  Intron number 1 from transcript orange1.1g038990m (locus o range1.1g038990m.g) derived from phytozome v7.0 (chr-ID sc affold00201; pos 155780 to 156240)
ccacagagattacggtaaatattttttccactttatcttttaccccccccttttttttttacaatcttctatgcttcattgttttatcattttgcggtcacatgcatgttaatactctcaatgatcatttatttgatatttatgtttttgtttagtggttataaatatgagtatcaatctggtctagggatcttaaattttatttgaaaaaattattaaattatatgacttaatagtttttgcagactttaacaaagtctaagatcctagattagaacatttttatgtagatcattatgatatattgtttaatcacagttgttagatggatgctaagtgcctttgttaatggttagttaataataggggacaatttaatatatatttgaatacttagtgacttgatatttagaagtaaaatttaaaatcctatattttgcaggatccaataattcgaccaa

SEQ ID NO: 82587 - DNA, 922 bp, Citrus sinensis; identical to SEQ ID NO: 81815
  Intron number 1 from transcript orange1.1g001859m (locus o range1.1g001859m.g) derived from phytozome v7.0 (chr-ID sc affold00055; pos 408764 to 409685)

SEQ ID NO: 82588 - DNA, 774 bp, Citrus sinensis
  Intron number 1 from transcript orange1.1g001868m (locus o range1.1g001807m.g) derived from phytozome v7.0 (chr-ID sc affold00029; pos 102925 to 103698)
gactctactctctctagttccgcgtcatcctaaaggtaccgttttttttgcagtgtttcagtcttaaactgcaaatcgaatcttgaagatttgcttttcttctgctgtatttgcaggtttttttttaaaatacagagttacacttttcgcttcggtgcactctattttttaaaaaagaaacttttaatttgcatttttgcaataacttcgaactttttgttgaaattatagcttttttatcagcttttttatcagctttttgatagtgattttacagtttttttttatttgaatagaaaaatgcaggtgccggttttatttcgatcagtgcaatttcaataaacgaagtaattttggtgtaattgagagagctattagaatataatatatatatatatatatattttgatgtgatgcatcatctgagaatgtctcttgaattttcaccctcactgattcagctattcgtctctctttaaaatattcctcttttcttgttttccttttcactcaaatcaaggcctttttgttttgagttgattgtcttattatttgcactgaacttacagcttatgtttgaagtgctatattagttgttcgcttggcatctgtgtgtcctacggttctgaaagttttggcgttttactcagttttggttagcttcaagtcgagagttttggttaattttaagtaaattttagtacttctaactgaacttccttgttttgattttctctttgttaagtacgtatgactgtcaatgtaggtgtcgaa

SEQ ID NO: 82589 - DNA, 565 bp, Citrus sinensis
  Intron number 2 from transcript orange1.1g001868m (locus o range1.1g001807m.g) derived from phytozome v7.0 (chr-ID sc affold00029; pos 103812 to 104376)
caacaggctgcttaccgataagccccatcgtggtgacttccttttccattaatatatattttttctgtaatttttttattaaaattttaattaccatgagcaatgctttcctagctctcgatataaacatttgcttcttgatccttcgtaacttctctggttttatgtgagagagttcaatttattggtggcatattttggagagtcattttgttcaacccattaagtttctattttaaaattaaaattgtaacagtttatttctgattatttgtcactaaaattttgtatgggtttgatgttgactgctctgtacagttattaccctgctttctctctctctctatcacacacacactctaccctcgtctttacagctccacaagtgagagatggagatttaaaaatagtgtcttctgacattaaaccttttcttccaactcttcttatcctgttttcagaaattgtgctggttacttatctcatgtatcttctgctgtgtattcttaaattattattttgatctagacttatttgacatggagttagttgattggcaggtgct

SEQ ID NO: 82590 - DNA, 585 bp, Citrus sinensis
  Intron number 2 from transcript orange1.1g032773m (locus o range1.1g030547m.g) derived from phytozome v7.0 (chr-ID sc affold00423; pos 30951 to 31535)
tgtgtctctgagttcatcagcttcattaccagcgagtatgtaatgcaattcaattctatttctgttaattgcttttatttattattaatactgttttctttttggtgataattggttggtcaattttataacagcgaattggtgtgtttggaaagtgtgtagctggctcgattttgatttgagaatgtgatggtgttttggaaaataaaggtcctatagtttggtggaaggtgtcagctttggaaagtggttttttttgttttttttcattttatcgactggatttttttttttcaaatgagggattttgtttttgttgaacttgataattgttttgggaagttagattttgtttggttggataacgatgtcgttgattttaataaaagggattttattttgtggactgggtgaatggtgttgttgaaagtgaaaatttgtcttgcgaattgtgtttgatgcttccaggagctggcttttgttttgtggaatgtggtttgtttgtttgcagttgttttattggaagatctgattcggtttcttgaaataggtttttcatttttgtcctgtagggcgagtgataag

SEQ ID NO: 82591 - DNA, 830 bp, Citrus sinensis
  Intron number 1 from transcript orange1.1g027769m (locus o range1.1g025296m.g) derived from phytozome v7.0 (chr-ID sc affold00235; pos 187601 to 188430)
ttaactcctcattatcagctgatagccttgttcaggtataaggtttcaccttttttcttctcaatacttgtatctggtcagaatttataacattttctttttcactttctgctttataaagttttgtccattctcccatttaatgctttaatgtccaacatagtgagaatagttccattgctttacatgtcagatgaaactcatttcctgttggtgcatcatgttttgattctccagtagttggaggtcagtgcggccagatttctcctgtggacttgcttcattttgggtgacttcttgaaagaagagaagtaactaaaagttcagcaaaacttgaagcacaaataatttaaaaatgattttgtgaactgaatccagatatgatgtcttaatctactgtgtcctagtttaccccgtctctttcattccttatcttgatatctattgttagatttttcttctgaacttcttttagaattttgatctaaatagtttctggtggttataatcggtgtcacttcacagtaatcaatttagcgtaagtcacttcctaaaagtatatctgaattggatgatcaaatctggtaaaatcaaatgggtttgttagcttttttcattttctctttacctgttcctctaaatttctttttatctctgtagttaatagaattgtgtgaaaacatgtaaccccctgttgaagctgggatattcttttattcgctattgtttgtcatttctttctttaaatgtttctggatttacatttacttttgaagaactcagaaagttggaaaatgggtttatttttcagattcttacacagctggaga

SEQ ID NO: 82592 - DNA, 606 bp, Citrus sinensis
  Intron number 1 from transcript orange1.1g036944m (locus o range1.1g036944m.g) derived from phytozome v7.0 (chr-ID sc affold00012; pos 988455 to 989060)
tgatcctcaaagtaagtgcttctgatttcttgtttggttcctacgaaaatgaaaggaaaagaaatttaatgaatggcacactgaggattttatgtgggaagtaatttggctcttgtgtttcggatgggttgcttagtgaaaaagattagaaaagaaaggaactttcaaactttgatttttgtggttcttgggaatttctgtcagcgcctcggttgctttaatttgttaatcgaaaatgatagattctgtttgtttgctgggaaaatggagaaaaagaaaggaaagaaatgaaggaaagcttatggttttgtgtgctttttcatggattgaacatgtttggcaactaagaaaatgtaaagaaaaatatgctgattcctctgttttgtttccttttctttgccttaaatctaatgcaacggtttcttacatgcttatgacccaattgattaatttaaaagacctattagaaaacaagttcagtcacacacaaaatatcttttacaaatttatgcattgattgtttgatttctgaatcagacttctaatctgtgatcaatttctgaaacttactggttggcatttcatgtgttgcacgcagaactcgaa

SEQ ID NO: 82593 - DNA, 676 bp, Citrus sinensis
  Intron number 2 from transcript orange1.1g042218m (locus o range1.1g042218m.g) derived from phytozome v7.0 (chr-ID sc affold01481; pos 12127 to 12802 reverse strand)
tggagaccaatttccaaaaggtatgctagccctttttatctgtatattctttagaaaaatgcatgaactgattaatgtggagaagattattttttcttaatctttatttttgtttttttgctatataggcttagggtcaaattttgaaaatattatgaaataaaaacaccttttcatattgttttatcgatatttggccatattagcgtgccttctcactacttcagcaataattgatcatacaattggataagtgctcttccagtagtgttgaggcatatcaggggaaacgattgttgtgtcactatgtgtttgacatatcaatagttgactggcattgtatttctaacaagtttgagactctcatcttctcaaacatgattgctcaatgcacggacacatcacttaatcatgcctatggttcagtagtcaccttcgctactcttttgcttttgctgagacgtgtttccttttacatgtcttgttggcatgtttgcatccttgaaacatttgagtatgtctgagaagatgagttttaaacctgtttaaaatataataatacaaatgctatcaaaaactagtcctgcactctttatgtgttacatgcttgaaattttgtactacatttcctttttttataggcaagttgcactcttgaagctggagttaagattta

SEQ ID NO: 82594 - DNA, 673 bp, Citrus sinensis
  Intron number 2 from transcript orange1.1g034489m (locus o range1.1g034489m.g) derived from phytozome v7.0 (chr-ID sc affold00015; pos 1163631 to 1164303)
aaattgcaagtctactggttttcatactcgtaaaggtttggctgctccccacattgagattgcaatttaccggtttcgagcctaaagctgtatattaggtgttgaagacattgataatgatgattgttgagtttaaagaaacatagcaaccttgcttttactctttgagaattattaatataggagaaggcttaacaatatgcgtatgtgaattctaatgctgggtgagatttagatcgaccagggactatgttaagttttatgagtgctttaatttgttaataagatgacattttcataatcgcaagcttaaacattttagtgtaatctgaaattcttcattttgtattatttgacccatcctttgggattcagattttgctactatgtgttaacatacttcttcagtttttctagcactctacgcgtgtattttaccattccgttcttcttcatggttcaggcaggttgagttagtagaccactataagccccccaacctaaaaataaccccagaacctaaaactaagtttccaaggataaggtgtttcgttttgaattcctggagtctgatcataatttctctgaaataatgttaaaatgttaccaagttacctgcttacagcatatgtgatttcattgtttgtaatataataattgattgcaggtggat

SEQ ID NO: 82595 - DNA, 767 bp, Citrus sinensis
  Intron number 1 from transcript orange1.1g016103m (locus o range1.1g016103m.g) derived from phytozome v7.0 (chr-ID sc affold00015; pos 1810189 to 1810955)
ttttgcagcctcaccagcttcttaacctcaaccgggtttgtctttcatttcttcctttctggttaattgattttcataaatgtgtgattgatttttggccttgtgttttgttgcatatgcatatgtatttgattaggttgaccatggtatgaggaagttaagtttcatgtttgggatttcgagagtattcattaaattttgtttttttttttactttttacttctttaatacctgccttatattttgttgcttagagagtgctaaaagacgagtaatttctgatgttttgttctttattgacttctctgtggttaaagtgtttgttgctaacagagaaaattggtcttggaatcttttgtttctgttgctgaatgctttcttgtatggaattaatagtaagtaaattggccaattttagtatttgaaaatttggtcccatactgctttttatatgttgtagctgatgagatcatgtagctcaattatttcgctggtggctactgatgccagaggaacaattttggtaacaatgtgttggtccttgactgtcttattaaggggcgggcctgtgggggaggaaataaaagcatttattccttaacctcctgatctgtgatggaaattgaataaaaccttgtgaattgatggtttgtggagaccatacatattggctcaagaatcataaattgcccacttcatcatttagagttgcttttgtacgtagctgaattctgtttgcttcctaactgtttttgtccttgacagg

SEQ ID NO: 82596 - DNA, 574 bp, Citrus sinensis
  Intron number 1 from transcript orange1.1g026941m (locus o range1.1g026941m.g) derived from phytozome v7.0 (chr-ID sc affold00008; pos 2265217 to 2265790 reverse strand)
tttttccaacgattcaattctcctttctcttcaaggtaattttttgtttttttaatttccccttagatatgggtttagtttaacacgattcgttttgatgaatttattttttcgttgaatttttaggtttaaaattgattgattgattgcgcgtgaacgcgttttaaattcggttcctttaaaagccatcaggtgagtctttcaattgcattcggccttttatagtttaaattgatagatcctttcaacaatccatctctcttctagggatttttcttgatttgtttttgaatttttattataagagagcagttgaaaggtaagaattgtagcttgttacaattttttatttttatttttaatttctagttattatcattatgtttttcttttttaagattttggattgaacaagtgaacaagattttgatttatcactatgtgggtcatatgtaggctaattaagataaaagtaacatgaattgggtgttgggtatgaaacttgtttggtgattttggatttgctttgttggcaaagaagtctcatttaatatttttttgacgaatttcaggt

SEQ ID NO: 82597 - DNA, 588 bp, Citrus sinensis; identical to SEQ ID NO: 82420
  Intron number 2 from transcript orange1.1g015007m (locus o range1.1g011420m.g) derived from phytozome v7.0 (chr-ID sc affold00283; pos 77381 to 77968 reverse strand)

SEQ ID NO: 82598 - DNA, 723 bp, Citrus sinensis
  Intron number 1 from transcript orange1.1g019082m (locus o range1.1g017490m.g) derived from phytozome v7.0 (chr-ID sc affold00105; pos 438646 to 439368 reverse strand)
tctcttcagttcacaagggtaactgggcggatttggtaaagtttaatattttattatttattttttaaattatgtttttgatctttgtttggtgatattaccatctcctacagtatctgaaatcttaagccggtttctgcctgttctttgattttttattttgtcaaagatttaatcatttaagaatttttgcttgaattatgctcaatgtcgtctcattttaatattctattgaggaatctagtgaaatttaaggtttcagtgaatattattgctgtaattcatttcattttgtttcacttttcttcaattcaaacattcaataggatatgcatgacatatgcagtgagaaaagattgacatggttcatcattcaatttcaccaaggaggtgagagaatattatattttagcagcagacggagctattttttctagtatctggggggattatgctaatcttttcgtggtgttttgggaattttgtaaatcattaaattcaaaaaagttaaatgcccggtttatcacacccttggatagagtttatctcttaggctagtttcaatctagtgttctgcacacaaacacacttatgcacttgtgcaaatattttatgcatgtgtttgatgacagaaactttctctggtttggtgatttattcctggtcctctagaataaaaggtttcttttatttctcggcttgttcaatacagatataagcaaa

SEQ ID NO: 82599 - DNA, 384 bp, Citrus sinensis
  Intron number 1 from transcript orange1.1g029122m (locus o range1.1g027222m.g) derived from phytozome v7.0 (chr-ID sc affold00021; pos 520388 to 520771)
caagattggtctcagtcgctcttttgtgggctctggttctttttctaaccctagctttcattcaggtattttttttgggggggggggggggttcatttcatcggttaaatttatatgcataggaaattaagtttaattactgttaatgggatttattgtttctttgtttttagaatcgtttaagcgatgttgggatctcatcacagaagaaaattcataacagtgaggtggatttgcctttcatttatttagggtgatatgagattcgtaattcataggagtgtgtttattttgtatgtattttgtaattaatttatgattttgatctcattgtgtgtattttttgcaggaaggcaactcaagagaggaattggaaaaagtgac

SEQ ID NO: 82600 - DNA, 763 bp, Citrus sinensis
  Intron number 1 from transcript orange1.1g034042m (locus o range1.1g034057m.g) derived from phytozome v7.0 (chr-ID sc affold00325; pos 117377 to 118139)
ctaaccactgtgagaatagaaagcaaagcttcattgtaagcagttgaattttttttagttgtaaggtcgttatttgcttcattttgaatttttggttaacaaaatctcgttgaacatccacactagacataaggagaaaacaattgattattcttccctttaatttcatgttatagttttgttttccgttgaaatgtttattgtttaatacaatgcaaaatctgttcaaagtgtggttaaaaggctgggttagttgttatagctgctgctataagatccttgtgggctccatttaccagaataagaaaccagttaggttatgttagtaagtagtgacatcccctgttatcagcttgcaaggctgatgaataagcctagaaaagcattcgatttctccctttattgttatttaaatcaactgaggttgagtgctattgaatatctgtaagggagagactccattgtaacaggatcttagcaaagttctattgctgcttttcacccatgcatgttgccatttacgcaattgaatggatcacaatatacactggtggcattttcttcattgttttctctttttttttttttggttcttaatcaaatcttgtgttgagaattgggtattcttgagaaaattaattcagtctttatatattggttcgatttcaatcattgttagtgattgaatcaatttcaaagactgaaatttactatatgtgtcatcagattcaaattgatatagttgtgttataattgcagtcag

SEQ ID NO: 82601 - DNA, 533 bp, Citrus sinensis
  Intron number 2 from transcript orange1.1g023353m (locus o range1.1g023353m.g) derived from phytozome v7.0 (chr-ID sc affold00266; pos 35657 to 36189 reverse strand)
ttcttggttactccacacagcttccgttgcctcaggttcattttcaacctcacttcatgagttcaactacatttttcacaccaatgccctttattgcttcgtttgagtcatcatggaatcaatcttttggttttgttgccaagaaaagaaaatttagtgatttaactagtagtactttcttgggatattattaaaaaaaaggcttagatacatacctgtaattgataagtaatgaaaaaattatctacggtaaaccgtgactggtgactacgaatgtataagttaatgaaagagtgtctatgttttgcgtaagcttctagaaattataggaaaatagcttccaatggaaaaattaattcttgaaagggacgagattctctcttgatttcagccaagactaaaattttgtagtgtacaatttctcatttgtggtttctttgggttacattcaatagcataagcagtgtattatagctctattgacgattcagccacttgttgctcatcgttctcagggatttttgggttctggc

SEQ ID NO: 82602 - DNA, 500 bp, Citrus sinensis
  Intron number 1 from transcript orange1.1g023353m (locus o range1.1g023353m.g) derived from phytozome v7.0 (chr-ID sc affold00266; pos 36281 to 36780 reverse strand)
ctcagcttaatactctgtttgcagccctcaatacggtaccgcttttcatcattgacatcacttgcagtcttttcttttcttttcatttttttttcatttattgatttattatcatcatttatttattttagaagattataattttttacaatctttggttttagctgtaggggtttctttgtttttaatggttttgtggctagaacaagaaatttcaagattagtttaatcagcctcattattttcattaatgacaattgaatcagattttaaaaaaaattcttctctttttttttaatgtgctttttgtttggattggaattagaatttcacatgcaattgcatttcctgacagagacatatcaatcaattggatatgatatgcacatgcaatgtttattttattcatttctattttttcgtaaaattcacagcactctaatgtaatatgttatgtatttgttggtttatgttgcattatttattaggcgtttgtgggg

SEQ ID NO: 82603 - DNA, 835 bp, Citrus sinensis
  Intron number 1 from transcript orange1.1g015987m (locus o range1.1g015987m.g) derived from phytozome v7.0 (chr-ID sc affold00188; pos 37715 to 38549 reverse strand)
ttgtgattttgaggctttctagtgaagaaaaccaggtgtgcttttgttattattttttttaaaaaaaatttccttgtttagtttgatgcatttttttttttttttatagttgtcagctgtcaaaactgggtcgtgattgggaatcagattgatttatttaaattttaactgttggttgatgattttgaggttcatttgatgcacttgatgaacatctaacaagttcttttgcatctgggtctgatcctgctgcaggtcatttgattcataatttatctccattattgttttggatttaaagttttgtttttattttggattaatcatatgagcatgcttctgttttatgcatgatgtcttaaggttggttcttttctgcaatcaatgcactgaggcttttgtggggttatttgggtttttgttgatttttaatcaaaagagatttatctaatttgattgtgtatgtattacaaagaattttcaattggctcttggaatttatgatcagtgttttgattcagttgatcatggaataaggttctggaaaaaattgcagtttccgttggttttcagttttgatataacaatttctgtagattgttttcaggtgaaatttttgagcagattttcttttattcaacaatcttgatcatcagtttctgtaccttttaaagctaaaaccatcattgaaatttttttcatttgggttgcttaataagctatcattgctttcttcattttgcaaatgtagattgcttctctctcccattgttttcactaattaacaatgagttctatcaaactcattgcagtaattcgttgctggttttctttc

SEQ ID NO: 82604 - DNA, 334 bp, Citrus sinensis
  Intron number 2 from transcript orange1.1g046414m (locus o range1.1g046414m.g) derived from phytozome v7.0 (chr-ID sc affold00015; pos 392359 to 392692)
ggcagtctactgggaaggtatggtttttggattttcttgtgtttggttgctgagaaaaatgaggaaacaagaattttgaatttcagtttttttttttgttagtaattgtttttttagttgagaaaatggaggataagaaaggcaaccatatgatttttggagttttgatcctgttttatgctcggttaagtgttcatagtggaaactaaaacagtgttttagcataccactgtttttctgctaccaagattaattgatttttgaatctctatttatgattgctgaaatatagctttcatactctttgaccagccaagtgagcagaacacttatt

SEQ ID NO: 82605 - DNA, 823 bp, Citrus sinensis; identical to SEQ ID NO: 81824
  Intron number 1 from transcript orange1.1g013610m (locus o range1.1g012781m.g) derived from phytozome v7.0 (chr-ID sc affold00235; pos 83629 to 84451 reverse strand)

SEQ ID NO: 82606 - DNA, 641 bp, Citrus sinensis
  Intron number 2 from transcript orange1.1g006352m (locus o range1.1g003416m.g) derived from phytozome v7.0 (chr-ID sc affold00029; pos 1020715 to 1021355 reverse strand)
agtttgcggtaaagtctgacttctgtgattatgttttattgataaataatgccgtggttcagccttactgcagtagtttctttttttcagccttttgatttctcttttctgatggggcatttcatatacagaactgaacactgtcctatgtagaggatatagtgtagttaaggcacatgtcaccgatgtcagctacttcaaaattatatagtgctggatgtggtttaagccaataagacaagaaaggggtgtggccgcccatgaagatacatacaaatatgttaacattcgaaacatatgcaaagaaatgtgcctgtaatagttttcctgtctacgtaaagtagtaaaccagctgtctatttaatcttgatacaagttttgcatgtttaagaaaatgatctttcatctttaacagtgagtccatttttagctgtaatccttttctcaagcatgacttggttttgctttcgttttcatctcaacagtaaacctgtttgcaactagaaaacattgtaatttttttgtaacttttctctaggtcgacttggaacataatcaatatcgatctttcctaggattgacttgcctgatgcaaatttccaccagaaccgaagattttgtggtagatacgttaaagcttc

SEQ ID NO: 82607 - DNA, 426 bp, Citrus sinensis
  Intron number 2 from transcript orange1.1g032469m (locus o range1.1g032469m.g) derived from phytozome v7.0 (chr-ID sc affold00012; pos 233900 to 234325 reverse strand)
tggtaattttttttttcaaacacttattgtgcgctcatagattaataatttttgctctttctttgagtttgttacattacgtttggcctataaagggtttatcttttgaaattaggtattatgctaaacagattgaaacagtttgcatgcatgcatttgacttgtagtttcattgcttgaggtgttattttggtgatgatcctattcaattactagcttttagtattttttgctacatgtatgctttcctacacatttgcactgtttactttaatgtagatgataacggcttcttaattcttctatgggtgcaatattctgtatgctttatatacttttcctatgattattctgctgcctgtcatatattaatttttctcctgcattgcagggtctagacactttgaatcccgtattggttatcga

SEQ ID NO: 82608 - DNA, 747 bp, Citrus sinensis; identical to SEQ ID NO: 82237
  Intron number 2 from transcript orange1.1g011988m (locus o range1.1g010674m.g) derived from phytozome v7.0 (chr-ID sc affold00032; pos 683289 to 684035 reverse strand)

SEQ ID NO: 82609 - DNA, 612 bp, Citrus sinensis; identical to SEQ ID NO: 82400
  Intron number 2 from transcript orange1.1g008857m (locus o range1.1g008805m.g) derived from phytozome v7.0 (chr-ID sc affold00030; pos 114579 to 115190 reverse strand)

SEQ ID NO: 82610 - DNA, 743 bp, Citrus sinensis
  Intron number 1 from transcript orange1.1g045217m (locus o range1.1g045217m.g) derived from phytozome v7.0 (chr-ID sc affold00154; pos 235171 to 235913 reverse strand)
tttgtggctgtagttacattgattcttatgtaagtgcatgctgggaggcattctagggaatattagtgttaagtttaaggttttaggctataatttttttttttttttgttataagaaagtgagaattttattaatgatgaagaacattacaggaagctgaccagctgtccattgagagagcaaagcaatgaaaactattctgtgctctaaaaaagtatacagcactaacttcctgtaaatatcacgttattttctgatttgattggggataacgtattcttccacgcgaagtgtttgctcagcagcatctttgtccgcattgtaagggaaaattttatgctttttaaacttttctttgtgatctaaaggttgcttatttcttcaagcgatcgaattgaggcagcatttatatttagtgatgcagacgtttgtttgttctacggttttttcttttatatataatttatgctcgcatgtaataatttgtcagcttgtctctctaatatactctgtgctttaaggtaatttatttatccgtcatttccatcttggtttccccttaatagatgctttggaaactatgggttagtttcatatctacttatgcacatgcattgtgttcattagattttaatttgatataatttcattaaagacctttaggtttatggcatgagtgccgtcgtcgtccattttcctctagcaaccatttttttatgctcacttctttcttgtttcagtt

SEQ ID NO: 82611 - DNA, 752 bp, Citrus sinensis
  Intron number 1 from transcript orange1.1g003838m (locus o range1.1g003514m.g) derived from phytozome v7.0 (chr-ID sc affold00008; pos 1503267 to 1504018 reverse strand)
aaaaacaaaaggaaaaccgacttgggttttgcgtggtgggtttatcatattctgtaatttttttctttttttttttgtgtgtgtttttgatcttgtggtggatattaagctgaccccacttgaaaaatttggtgtatttattgtaaaaatatttgtctgttttattcattcataagcgttttttgttctcgtctatccttctcaactgggttgctgtgtttttatatatttatatatttatatataaatttatatatctgggaatttgccttctttgatttggctagcttttttttttttttaaagttttattgtttttgtttattgaattaaagcgtccagtttctgttttagtccattttcatctgctctttgctttccagcttgttttagtaatctttcctctacctttcaattttttggtgagtgtcgtcaattccttactcagtctggctgtaagtcaaattgaattattttttttaacttcttattatttggattttgctctctggtttgtcttagaaattgatgatagttttgtcttaattttcaatttggttattttctgggctttcatttcttatttggagtatggatgtcaaataaagatcaaatttaaaaattgagatataagttatttcttcctatttcaagttgctttatttctagaattttagaagtgggggtaatctaaaaaacctttgtgggtttaatctataaacagtcgtctgaagccgagttcgagatcgaga

SEQ ID NO: 82612 - DNA, 920 bp, Citrus sinensis
  Intron number 1 from transcript orange1.1g046357m (locus o range1.1g046357m.g) derived from phytozome v7.0 (chr-ID sc affold00012; pos 424373 to 425292)
actctccaaaagaggtaagttcattgatgttccaaattaaaatgttaacaaatataaaattttattaaattttaggataattattaattaaagagatacttaaaaaataggtttttctgcagtaagtattaaaaaaaagttcattaagtagagtattattgcagaattacttagaaaatagaacttttttaagatatggaccctaggcacccgactagttcacttaaaataactctgaaaagactactaaaaagatccaagattcacagtgtaatcttaacattatataattgtcagctcatatttgaaccgagtttgtgactatgtgcaattgctacgacttagagttttcctgttaagatggcagcatccttggtgtccataatgaactgaagaagtttctcggtaattttatcatataaatataacgtatgttatgcgatctttaattttgattatgattaacttttgtatggggtaatttcggaaataaattatgtcagccagtgatgaaatgacacgtggcagaaaggtcaagcagtcttttgattccacgaacaccattttgattagtggggattatgacagctcggcagcacaaaattaaatcctcatctttattatccgaagcttcaatggagatattaatctgagacaactttttgaagcgggggggcaataattggtatgctttgttgtcttccttgtaacttacagctgcttattgtacctcgacacatagcatttatcgtcgttaatttgtttcataaaaatgatgatagttctggaatgatacatataatttgatctgcagcaagttgtctatccacttgaattgagactagagcatgaagtgagagatgatatatctacttacttggtattggctgagacagtgaaacgagttctcttcctactgg

SEQ ID NO: 82613 - DNA, 1008 bp, Citrus sinensis
  Intron number 1 from transcript orange1.1g041980m (locus o range1.1g041980m.g) derived from phytozome v7.0 (chr-ID sc affold00052; pos 182543 to 183550 reverse strand)
cggagctacgcaggaccgcccggcccgattccctcgtatgtctttcttatttatttctgttttgattccatccgatgcatgatacttgttcaatataatcaaataaaaaaagctaatgaaccctcaacgctcaaacaaagttcttttttttttttaagcaaaagatcgaatttttatgctcttatgagggagactgttgaataatgtttaacctttcagtttaacttgcgtcttaaaataataggtatcatttagttggattactcttgtttgctgattggataatttgtacttttttttttctattgcacatgccgccgaattccaagtaatttgtgggttagtaatttggacacaataaccattgagttatctctcatttcgctgcactctataattttcttttgaaaaaaaaataattcatagctagggtaaaatagatttacttgttggttttccgtctagagtactacaaagtacaaattgcatctattgttgatgttatttcactttgttaatggatcatcaagctttttacttgcaatcatttatgtatcccatttataatggtcggactcgtcagttttttttttttttccccctcaatcactgaatgtcttgctgaaataaaaccggaatataattgtaaggtagatctctcctccaaagttcttaacccctgtgtacccatgtggctaaaaaatgtacttaacaaactcaacctccgatgtgagctacttttgcttgagcatctgcatccacttttcatattggttttggaaaggaaatggataagtgccaccatcttgatcatatcactcaaaactatgttcaagtaaattgcctgatttagcactcttctaattctaaaagcacgcacattatgttcacatgtccttgtgcatgctgttggagtacaaaaggtctggaattctgaattcaatcttggctttcatgatcagttagcaactgtggcaacagaatttattttctgaacttgtgaatcag

SEQ ID NO: 82614 - DNA, 697 bp, Citrus sinensis
  Intron number 4 from transcript orange1.1g018474m (locus o range1.1g018474m.g) derived from phytozome v7.0 (chr-ID sc affold00448; pos 131162 to 131858)
gaagtaagttctaattgaattaataataataatatatagcatgcttctgtccacgatttaactaagaaaaagggcacctaaagctcaaaggtctggagaaatgatcaagaaaacttcaaatttttaataaaggatactatggttctcttttgagcataataaccttttgctctaataacccaagaaagttgactccaatgttttataataaatagaaacgtaatgatttatatattttaaaataatttaaatgtttaaaaatatattaaaatttcacaatctgcatattttattgtattgaagtaaattttgtaataaattaaaacataatattaaaattttattaattgtaaaatttttatttaaccgaaagatttaattaaaatctttataataaatacaaatgtattattaaaataaatataataatttacatatttaaaattattttaatattatttgtcttctagatatattatattatttatattaaatttgtatttattaaaaagattttaaagtcaattttttacttgctatattcaacggatattacagcaaaaaaaatgccttgttacctttttgttaaaacttaagttctgcacgatcattttcccaaaacttaaagatatacctgttctttttcctttaattaatgaaataattctatttcgatgcggcgggggcttagatttcg

SEQ ID NO: 82615 - DNA, 595 bp, Citrus sinensis
  Intron number 1 from transcript orange1.1g019546m (locus o range1.1g019546m.g) derived from phytozome v7.0 (chr-ID sc affold00021; pos 69961 to 70555)
ccactgagtagtgacaggttagtttgatttttggagtttttttttttcccttatttctgtttctagggtttttgattccttgatctgattagattttctttaagtgggcatttaatcaattagggctttgtttttatcctaaacggctttttggagtttgcgtttaatttttctgatttttgaatacatcaaaatttgagtagtttagggtttataatttgttttttttttttataaaaaaaaaaattacccggttttgtgtctataggatctgacttttatatttcatttcttaattacttggagctaaagtaatccttttaaagttaggcgaaaggatattacttgcccccaaaggaattccgtttttaaaatggattattatcactagtggacaaaaacttttattttttaatgttttttcgacgtagcgtttgccaacttgttattggattcctacccataaaagtgtttccttctatataaaggtggttgctttgccacattattgaggttattaggaagatggctgtttgtagtaagcaaggttctaacgtgtctgcaattgattcctccaggaaaaggaaacgaagag

SEQ ID NO: 82616 - DNA, 799 bp, Citrus sinensis
  Intron number 2 from transcript orange1.1g042314m (locus o range1.1g042314m.g) derived from phytozome v7.0 (chr-ID sc affold00001; pos 1895756 to 1896554 reverse strand)
gcaagatattggaagatcggggtggaatagatccggtatttaatactgttaaacatatatacagctgttaatatatctatatttgtaatactatgttcaaaggaaaggaaatggatgttacagaacctatttatattttgcttttgcttttgtgatttggcatttacactaaccactttcccgctcaaacccccccacaaaaaaaacagttaaactagtggtgtgttaatcatatggagctatcaataattaattttatgtaccttgtcagcagcgtctaatgataattttgtaaggcctgtcagcagcgtctactttcacattgactgaaggatttctttttcttcttcttttatatttttgaacttttttttttctaatgctgtactgtaacttctttttgggtaactgtacagatgctaaaactgtaactctgaagtttttaagtgcaatgtcgttgaggttttgtgagcattctttagtcactatatgttagaacataaggttcatgaggacctatttgagttattaatagttttgtaagaacctttatctattttttgcttaagacaggtgggccttgactcgcatgctccttgctatgaaattgattttgatgaagtggccatggatgaagcaatacttattggagaagtaatttcctattttaacttttctaggcaaatgttgaggacatctaaaaccatagtcatactgccaaatcttaacaaccagcattctcccgactttctctattattgcagggagcatacggtgaagtttatctagtcaagtggcg

SEQ ID NO: 82617 - DNA, 688 bp, Citrus sinensis
  Intron number 3 from transcript orange1.1g004395m (locus o range1.1g004395m.g) derived from phytozome v7.0 (chr-ID sc affold00032; pos 996359 to 997046 reverse strand)
tacgctgcttgtggttgtcccttcgcatagttccggtacctacttttcttgccttctgatttttatgttactttttttctgaatgttctagtgaagaacagttaatgtttattttactgcttttggttttgacattgataatgctttttgttaccaccattttccgtttgacctgatttcaaaacatttgagcaatattcccaaaaaacactgggcttcttctaatgtcgaagattggtagaactttctctctaatcctcctcctggtcaattctattacagttgcattgctgaaaactggaacctttcatttattgatgagcaatttctgctctatggtttactctttggatagttgggtctgagctgtttgggatatttcacacagtaagcatacaaattgtagatctacccaaagctgaactgttgtactcaagggagggaaactttgctgcttattaaccatctactgtatcttctttctggctcagagaacctttcattggatgtcatttaatacatatttgctaaatagtcaagtgtggttaaggtttctttgataccttctttaaaatgcatggttttattttttggtttatccctgatttggttaatgtgttactaaaaattgtttgtttactgcaattctttaggtagaagattttgggttttccccagatttgcaggt

SEQ ID NO: 82618 - DNA, 617 bp, Citrus sinensis
  Intron number 1 from transcript orange1.1g034787m (locus o range1.1g034787m.g) derived from phytozome v7.0 (chr-ID sc affold08573; pos 275 to 891 reverse strand)
tctctgggatccccgaagagcatcttcgtagaagagtacctctctctatgcttttctcttttcttaattaatttagtttttgacttgtttcagacggatcgcattttattttttgcgcgatggtgtgggaataataattttttagttagcgaaatacttgcattttagattgaattgattaattagggtttctaggttgatggaagacgcagctattgcgattgctaactaggattttgtttaggttttaattgtgtgacgtgctagattaatctgattataaacttttaaaaatgcaaattgaaacgagagaaatctcttggaattgaaatcatagcatttatgttccttcttgtagctttaaaataattcgccctaatgacttggagtaaaccaaatgttgcagccgtttccttgtcttcattttttttttttttggtgttggtggtgggggtgacaggtggacttctgctgagtgcacaacttcctgtgttatacaaggcttttatgtttctttaatcagttatgtgtgtttatgatattccatcaaaatattctttcatctgttgatatgcatgacaggtggtgatttacacacctgctagaactgctactca

SEQ ID NO: 82619 - DNA, 873 bp, Citrus sinensis
  Intron number 1 from transcript orange1.1g015360m (locus o range1.1g011498m.g) derived from phytozome v7.0 (chr-ID sc affold00001; pos 2224398 to 2225270 reverse strand)
actaaagttgctgtcaaaaatttattaaataacaggtactattattatttttccaaaattggtttctgcttctgatccatgtttatttgcatgaagaaaaaggaacatataattttatgttatatttggttgtcaaattctttttctgtgatcgttccggtctatgctcaatcctgtttttgttgtttgttaattttctcgtgtcagttgcagaatttgtgctgcaaagttgcctacttttacaaaaataaaaagaaaagatgtttgctcattgtaaacgcctgaattgataacgtagactgaagaactgtcgcatatttagactatttgagtaccgttggacctcttcaattgatttgagctacattcacactatttatgtttgctgacgttagatggatatattatcaggggtcaggctgagaaggaatttaaagttgaggtagaagtaattggacgtgttcgacacaagaatctagttagattgcttggatactgtgttgagggtgcatataggtacggataattgatttaatttatggcccgcccagatttttggttgaggttgtggcttttgttgaatgttcagagatgtaatttgtttcttggttttattttgtaggatgcttgtgtatgagtatgttgacaatggcaatttggatcagtggctgcatggggatgttggggatgtcagcccactaacatgggatattaggatgaacatcatactgggaacagctaaagggtaccgtaattttatgttctaaatttgattcttcccatgtgattgaattgctgcattcaatcaccatccgaaggggtttgttttctgaattttaatttattgtaattcttacagattggcctaccttc

SEQ ID NO: 82620 - DNA, 814 bp, Citrus sinensis; identical to SEQ ID NO: 82250
  Intron number 1 from transcript orange1.1g011641m (locus o range1.1g011641m.g) derived from phytozome v7.0 (chr-ID sc affold00015; pos 1630142 to 1630955 reverse strand)

SEQ ID NO: 82621 - DNA, 457 bp, Citrus sinensis
  Intron number 1 from transcript orange1.1g034788m (locus o range1.1g034788m.g) derived from phytozome v7.0 (chr-ID sc affold00098; pos 357880 to 358336 reverse strand)
agagccaaggtaacctcttaaattattgttatcttaacgaagccattcattttagtttctccgttagtttcaatttcttttttaatttaattatcttgatgaataattattatttcagtggaagaagaagcgcatgaggagattgaagagaaagcgccgaaagatgagacagagatctaagtagaagaagaataagacacctcccttcctctttctctctcttcagaggttttcacattttgtcgatcttgttgaagtctaatgtcgtgcgtttttttgtttttgagtcagttgaatcagacagtgtattctgaaatgttttgatgactttcatagattttaatctaatggatattattagttttggatctatttttcgtttgactgtgattatttttttatactgcgcaactccttatgatttactgtggctattactgtcttttatttacttcta

SEQ ID NO: 82622 - DNA, 607 bp, Citrus sinensis
  Intron number 3 from transcript orange1.1g026185m (locus o range1.1g026185m.g) derived from phytozome v7.0 (chr-ID sc affold00042; pos 296656 to 297262 reverse strand)
ttgcctcaccaggtaggatgttctatttactgcttataatactgagaggcagtttatctaattgcttagatcagtgtattttggaggataattgtgtcaattttaggtattttctagcttcatacaaattgactcaaccgattgatattaaaataattctagtaggatgacgcagaaagtttcttgtcatatttttaagtttgatggttacaagatttatatggagattctaacattaggagtataagtcttctgcaatcttgtttaaatcctttattaatttggtagtaatggctttaacttgtgtcaaaataaaggtttgaattttttccctttgatttgacactctttcctttcttttcaacagggttgtgtttagtcttctaggaatagttgttgttcctattagtccatgtctaacatatttttgcaccatgtaaatttgttttcctgtatttcttgtccagtgtgttagtctgagatgttttctttttttaagaatgaataatacttcaatcttctttcaattgccttctcagaaatggggttttttgttgtttctgtttcttagatgtttgatattattgtgacgaggcaggtctcataa

SEQ ID NO: 82623 - DNA, 365 bp, Citrus sinensis
  Intron number 2 from transcript orange1.1g026185m (locus o range1.1g026185m.g) derived from phytozome v7.0 (chr-ID sc affold00042; pos 297299 to 297663 reverse strand)
gtcaagcttgcttgaattcttctggtctgtttgttgttctttactctttctctaaaagtattatttgagggtgtttccagctttgggttatgctcttattttgccttcgttatggattttgcaacatgttattttggttaatgcctttgttatcgaagtgttctctcctgtgtcatttgcaagtcaactgctgtagagtaaatcatgtcattattgctttttattctgttttaactttctgggcttttggctccgagggatagaaaatcagtgaaattttttgttgtgttaattacattggaattctttgagaagctcactggttttgtcttttcttttccattttgatttggacattacaggat

SEQ ID NO: 82624 - DNA, 382 bp, Citrus sinensis
  Intron number 1 from transcript orange1.1g026185m (locus o range1.1g026185m.g) derived from phytozome v7.0 (chr-ID sc affold00042; pos 297809 to 298190 reverse strand)
gcttactgcggctgcgccttcgcttctttgctttggtaagctttttatttctccacgaattcaaatttttttttatataaatattatgcattattgcaacatcaatttatctctcttcgttatttatttatttatttaaatttaaagctttcgtttttgttgttattattattattattattattattattatctgttcttttgtatgagctattcgtgaattaagctctgtaactgtattatatgattgaaaacgaacaatactgtggctgggattgaaattgtgttaatgaaaaatttacttaaaacttatttggccttaaaataaagtgaacttaattacttataaattctatctttgtagcttgttagaagaccagac

SEQ ID NO: 82625 - DNA, 881 bp, Citrus sinensis
  Intron number 2 from transcript orange1.1g037555m (locus o range1.1g037555m.g) derived from phytozome v7.0 (chr-ID sc affold00008; pos 257944 to 258824 reverse strand)
ccggcaattctctgtctttgcaattcaaaggacaggtactgtaaattctttctattctttagagattcatcttataattttgcatcttcttcagtttgcttgtagcccaccagtgaattttaatgtctcatactcaaattttcatttaatgaagctttctttgaaaagatatcttgtaactttaacataacgagataacaattctgggaaactcatgtcataatctctgttgtgcgcaagataatgagtaatggattctcatgtcgattaaacacaaatataaatgctagtataaactcatcttgctataatttaatagaaatactgagttgattttaacatgaaattagtcaaactagctaataccatgttgagaaataattaattcctaacgctttagatgatagtataactaagagcccaacaatagattttaactcttaacaaattcatttggttatttcctttcaaagataaaaggcagagaacaaaaaaaaatattacaattttaggtgccagaacctcattctgttctttttggaattatccctactactgggatctctagttgtcatggtagctgtaattattttcatgtgacttctctatctatcatgaactctacttcctaagaaactcattggagatcaatatgcaactccatggcgatatgaaatttaatgtggaggtcaactagtcaaaagggagaattttttggattcatgatgggaaatatttaccaccattcccgatcactctgcgtgaatgaacatcgcttttcataaagtgttctgtgatggaaatgtatgaaagactaattattcaatgtttcttgttttccgttaggtactggtgaaatagactatcagcttatagcaagg

SEQ ID NO: 82626 - DNA, 634 bp, Citrus sinensis
  Intron number 1 from transcript orange1.1g033292m (locus o range1.1g033292m.g) derived from phytozome v7.0 (chr-ID sc affold00020; pos 522299 to 522932)
tgatactgttcctgtacacaggcggcgaagagagagtaagaagaatagccttagaaatttgtttaatcgtttctcttcaaggagatttcatgagggtcatcaagttcctcgggacggtgacactcaattttgattaattagtgccgcctttattagaaaaataattaatattaatctgtgcgttttctggttcattatgacaacaactagtagaaatgttagctgtattcttttaacttcagttgcccagaaatttttctcttttattctttaggattgatgatatatatggttgcatgcatctagttcttttatgttttgtcaattcactcaatatcggttatatattaacgggaacattcgcactagctatttatatgcaaaatagaacaattcgcactcctcatttatacaaaaatattttttacatatacaaaaaaatatgcaaaatgcatccaaacaaggatgtatgccatccaagcaaacacaaacaacattcgcactagctatttatatgtgctaacaacacatcaaaggcaggccatttatttaattaggactagaacttattgtactgctggtaacgctaaaaaggggtgcttttgtctctgccagtcagtcaactgtgaccaac

SEQ ID NO: 82627 - DNA, 268 bp, Citrus sinensis
  Intron number 1 from transcript orange1.1g031629m (locus o range1.1g031629m.g) derived from phytozome v7.0 (chr-ID sc affold06865; pos 2675 to 2942 reverse strand)
aggactctgtgactgcttctccgactgctcaacttgtgagtccccttcaacttaatacttttttttttcctcaagtaatatacgattgacgtacctgatactgacacataccagctagttagcagtagtatattgtgactacaaatttacgtatgctgatgaagaacagatcgaggctagctactgaaagtttttattaattaatttatttgtttctttgaattaattaacaggttgcttgacatattggtgtccctggatcactttc

SEQ ID NO: 82628 - DNA, 535 bp, Citrus sinensis
  Intron number 1 from transcript orange1.1g003238m (locus o range1.1g003238m.g) derived from phytozome v7.0 (chr-ID sc affold00001; pos 2317089 to 2317623)
ctctctgctgtctcgctccttcactcgccgaagaggtaccattcaatttccctcttgcccctattttattcttgctctatactataggttaaagagcatcgttttattttcttttcaatttccagatttttttcctgtaatttatcaagctagcgatggcctgatttggtataatgagagttcagtttaactgtgttatcaaatcattattacattcattgatcttcattgagatagtaattgagtgaattgctacaatttgagcgttattttagggcactgcatgaatttgattgagctgttatttgtttttttttttattgaattacataagtttctctttagttatcaattgaacttagtaccttagtcgtgtttggctcatcattgtaatgtagatatttgtttgttaatttattaatacggtttgtgtgtattgtgatgagttttaagcttgctgtttaatgcattgaaattggatcatcatatgatgaacatgtagttttatgctcctgattgtgaatatgtgaaccag

SEQ ID NO: 82629 - DNA, 662 bp, Citrus sinensis
  Intron number 4 from transcript orange1.1g003238m (locus o range1.1g003238m.g) derived from phytozome v7.0 (chr-ID sc affold00001; pos 2318223 to 2318884)
tccaagattctaaacaccgcaagacacttgctgaggttagttacctttggaccatttcaggagatgtactgaaaagattccaaagaatcttggcaattactaattactctaaataaaacatctttatcataaattttaagttgttaaagaactaaacatcctcccattgtatagtatagtatatcaactatcgatcactaatggcagctcaatgcatctgactacatatttggattggaagtagaatgtacctaaattgcacagtcaaccataataatccaaagagtcaatatccccaaatggatagaaagacatctttggtaaacaatgctattattcataatagtcttcacacgccccgcttcaactagtaccgtttatttgtttcaatttgaaactgacttaagagtcctactgtctcttctaacatgacattctgcccattgtcagaatgagaatgttcaaatagctagaatacttcagattatgaattatttgatgattctgtctgtgattctcagtttttcactttagaagagggaaaaaagggccaaaaaaaacacaaaaacaaattgctagttattacaactgacccacaattttgactgcaatgtccttattgtttagctagaaaaaggtgtggacggcttgtttgatagttt

SEQ ID NO: 82630 - DNA, 910 bp, Citrus sinensis
  Intron number 1 from transcript orange1.1g041979m (locus o range1.1g041979m.g) derived from phytozome v7.0 (chr-ID sc affold00029; pos 589922 to 590831)
gcagtaagctcctttctttctttccatttttttttgtaatagcatttttgcaagtttttatttacattgtgtttctgttgggaaaattgcttgaagattaaaaaaatataaaactttatttgttttttatttttatttttgtgtcaaaagttctgtgtgttgttttggttttgttagaagagatgaacatgaagtcgctggttaattgtagcttggctcagttggatggagctttctttctttattttttttttctgttttatggttgagtttcttatggtctgtaacaacctttaatgggatgattgtataggatccttggattttggattccaattttggtttatgaatgttaattgtcttgtctgattggcaatgctgaatttttactatttcttcaattctgatttttttttgtcatatgggtttctttttgtttatttgtctgagctattttggaattacggatggataggataatttctcagtaattgttttccagatctcattgatttaccctttttaattctatgttatttccaaatgaaaatgatgttcaataatggagttgaatttgattaattagtatgtttttttggctttgggtttgatgaattaaaatgttttttttgacgaatttggctgttgtcttagtctcctatcttaccagacttaagcgatctttgaatcattgtatctgtcattatccatagctttgttagtgtacaataattcgcccaatctctttgaccctgtgataaaagagaattctagaaattataatttactgcttcttggatgtggagtcatggatgaactggaatataatcagagatgacaatgactcttcattattgatgatatttgggtaaattataacattctcatgttctgtggcagcaacgttcac

SEQ ID NO: 82631 - DNA, 769 bp, Citrus sinensis
  Intron number 3 from transcript orange1.1g046629m (locus o range1.1g046629m.g) derived from phytozome v7.0 (chr-ID sc affold02003; pos 6165 to 6933)
actgaggtgactgataatcaaacaaattacagtatcttttacatgatcttgtttttttttttaatgggatacgaccagggaaagactgcccatgagtttatgtatatcccgtagaagagatcaaacatctagtcggtttcatacacaataattggcttccttcacctataggaatagacgtgttcaagattaatgctttgaaaaatagcaaatgaaggttcatttgttgggcacagagatacaagtgttagaacaagaaaacctttggtgaaaactgtcacctataacccaggaacattcatgttgtatcaccaagaattaataacaaaattatgcagaagcgtatctgaatccatagcgctgaattgctctctagggtcgtatggttgaccttccagatctacatgttctcctatggaatcctttaagtttttcactgctctctctgataatgggatgtcaataaagaataaaaagatacgtgtgacatgaggactataacaacttatacagataacttttttctgttgtcattaggtattcctaattcttgccatcataaaattgaatatcattgggtctttgcacattaaaggcccacacccaattagatacattaaagcccataatactaaaaaccttaatagatcacttttaattgggcttaaccttatatattagtctgcaacacataattattcatatataagcccaacgtttaaaccgaacgttagattaaggatccaataatattggattataaaatcca

SEQ ID NO: 82632 - DNA, 625 bp, Citrus sinensis
  Intron number 2 from transcript orange1.1g022357m (locus o range1.1g022357m.g) derived from phytozome v7.0 (chr-ID sc affold00001; pos 1769303 to 1769927)
tcatcaaaacccaatttggaaagcttgatattttggtaagattttatcagttctattcatttccatttcaacccatacccattgcccctcccctaacctcccctaacctaagaggaggacggggatgacatatactgtatttatttcattcttggggtgggtaatatcatccagctccctttcatttttttcatatttttctattaaggacaacttttattctttttctatttgtatgaaataggtccctgactagcagcgaccagtgaccgccctgttggaattactgaaatatcttctaatgttaacttgcgtgaatgcattgcatcaatcaaaattcagtattttaattttactttggtcaaagcaatagggacagtgacctatttggtacaagaaaaatatgaaaatcagggatgtggatgtaattatacaatatgataatgtatgaaccaaactgcaatatagtgagtttttgagacagatctattcctgaaggtatctattttgccaagttatcaaaggttctgtctatgaatatgttctttcaagtctatattcttgtagtcgaagtataaaatgaaagatgctgagggttagacctgtatgtgcatacaggctaaca

SEQ ID NO: 82633 - DNA, 860 bp, Citrus sinensis
  Intron number 1 from transcript orange1.1g004790m (locus o range1.1g004790m.g) derived from phytozome v7.0 (chr-ID sc affold00001; pos 462900 to 463759)
gcttgcccgtacagattcttgttactgataaaccggtgcgttttgttttctgttctttttaatctctgctactgctagggtgaaatgaaatggctgtgtgtgtgtgtgtgtagcttttttgtggcttcaagatcattctctgtacatttaccgactttgaattcgtcggattcttcttgttttattcttcttttgttgaagatttgcgtagaattcaagtgcgtatgtagagaatgtgctttcaattaaaaagggaatatcgtatttttcgctttttttgaacttcaagtcttttgccgctttttatcaattttcttaaatatgggcttcgatttaataagagtatttttttttccttgtttattacttgattgttagtgaagataaggatttgacaactcatttgcttgatctgctgagctttctaagcattgactcagattagcgccttttctacttgctaatgcttttgcaagctctcagaggctatagcaaagggttagtgatgatttttttttttttttttttatatgccagttgaagcaggcttgtcagtttctgggtttgtgagtgcctgaactttgatgatgttctacaattatcatttccttttctccctgattgatcatttctgatttgattgatgacgcttctgctttaagtgatacaacaagggaaattcatatgctgattttctgttgatgattgagaaggataatttcattgaatgatttctctaaatgactggtttataaggcttctagttagaataccattaagatctaaccagcaaaattaaagtagtcattaaactcttatctcttttccttctgcagggcttttgtctgattgatttttcc

SEQ ID NO: 82634 - DNA, 370 bp, Citrus sinensis
  Intron number 1 from transcript orange1.1g030825m (locus o range1.1g030786m.g) derived from phytozome v7.0 (chr-ID sc affold00001; pos 99574 to 99943)
tggtggcactcactctgccatcagccatttttcaggtgatgattttttttttttccttcctttggcgaactgcttttgcttcgtgtgtgaattttgttgttaattcattgtttgatgcattcacatttgaagtcaaacacgaacggtatggttttattcaaatcgtctttatatgatattgattttgttaattttagtggacaccattagtttattctttctagggttttcttttcgtaaacgttgctgcttttggtctattgattagcgtcagggaggagataatgtcattattcgtaactgatatgaactcggtgaaaaacataaaagtttgtacaggaagaggaattgagtaaactaaactaaagag

SEQ ID NO: 82635 - DNA, 511 bp, Citrus sinensis
  Intron number 2 from transcript orange1.1g025919m (locus o range1.1g025919m.g) derived from phytozome v7.0 (chr-ID sc affold00111; pos 232868 to 233378)
tacaaagctgggatagtacctgtgtcttacagaaggtgacccgtttgaatcctacaaatattcatattgttttttactcgggcactatttggtcctgtgtttaactagcaagcagttaaaatgattattcaaatcttctgaccttgttttggggattaactcaattttactcccgatggaaaatctattacatttattactttaccctgagccattgttcggtaagttcaagagcacaataacaaaaaaagtgtttggtaaacaaaaaaatcaaactaaaagacaggaaaacacatatattctattacatgtttttggactttagctatttagtcgaaacattcaatagaaattagaagacagctgattttatcctacggctgttcgatgcatgcatcggtatactttcactcgatagctagtggttccaatttcacgacaacggagccttaaatagtttatttggttagcttctgatcctgtgttatgtgttggcaatgcccagggttcc

SEQ ID NO: 82636 - DNA, 473 bp, Citrus sinensis
  Intron number 1 from transcript orange1.1g001251m (locus o range1.1g001252m.g) derived from phytozome v7.0 (chr-ID sc affold00030; pos 919058 to 919530)
ggcattgtctgctttgtcctgtaaaactcattaaggtatttttttcttctttttttttaatcatatatacgttggttaaagtgtcttttggggtttctggggataatttgtctttgattgctgcagaagtttgagatttagcagaatttacggaaaactttggtagcaaatttttaggatagtggttttgattgaaagggggcagttttttatctgttgggtagtgataggagcctaaaattctgtactttttgagctgtgattagctggatttaggagagaattttggtgacttgtaaatttgcaaaacgaaaattttttccttttatggaaatgcatagtgtggaattatatgaatgtggaaagtgcagttttctcctacatttcattgcttgttaaaagcttattttgtgccttggttttttctcattattaaagacacgaggtgaaggtctaaaggggttcagaagttc

SEQ ID NO: 82637 - DNA, 630 bp, Citrus sinensis
  Intron number 1 from transcript orange1.1g025965m (locus o range1.1g020735m.g) derived from phytozome v7.0 (chr-ID sc affold00032; pos 105187 to 105816)
ccaacttttatttgttaactcaaattgttcataatgtacgtgcttctcttcagtaattttcttttaatgggaaataaaagttaatactttctgattaattttctaaaaagttatatgtttttgctgctgggattagagattagatagtgctgttgttacttcagttcagtttataatatttaatgtgcaaaatgtgttatttttgcctatatcgtaaaagggcatggctaaaattgaaactttggtttagttgtagcaataaaggaggttttctaaatgtgattttcctccaccccctttttatctgaagatatgttgaaaaaaaaaaattgatactacaggtaaccattgtgatttcatgatatttcaagaactttgtgtgggaacctcaaaactaagattagaacaaaaccacataagtgagaataatcaaatgcgagatcattgagtagttgttcatatattaggatttcttagtatgggttcatataatagataaagagtactcagggagggaaaattttggataaatttgttcgccatcttgttgcattttaactgactctaattgaagcgagttcttttactgaaccagggaagttggcttctcttcttcataaattggaaaag

SEQ ID NO: 82638 - DNA, 536 bp, Citrus sinensis
  Intron number 1 from transcript orange1.1g006803m (locus o range1.1g006803m.g) derived from phytozome v7.0 (chr-ID sc affold00030; pos 98268 to 98803)
ccaattggagggtaaaaaacccgaagctgttcctggtaatgtgtaattttatagtatttgttcataatcagaagtaaattcaaattgaactattttgtttggtaacaaatttgatggttaaattttattgtatatttaattaaaaaatataatgaatgggatcaagaagagatatagagagtataaaagcgactatgttttgggtttgtggcagggtatgtttgggattgggttgccggctgcagctttttcaaacacttgctttgcttgcaaagtagaagcacatatcctatctgtgtttagttgcatagtttctattggcaattgcgtggaatttatggttctgatttaagtaaagaaggtattctctgtggtggtattagtgttttgggattcactaaaattcttaggttgttgaatggtgctggttgtacttgggaggctttcttatcatatgaaaaggttttcttttttatgtgattaaaacatctagcattgcagaaagaggcggaggggctgctgtggaagtgcataat

SEQ ID NO: 82639 - DNA, 488 bp, Citrus sinensis
  Intron number 1 from transcript orange1.1g048801m (locus o range1.1g048801m.g) derived from phytozome v7.0 (chr-ID sc affold00001; pos 4479234 to 4479721)
tcttttccattaagttataataaattagtggagaggtatatatgcgttttcttttatttcaatttcagtgaaagatcagtctggaaacttatggtaatatgctcctgattttctctatcatttattggattgtctggcatcatgcgatcttctagatccaaaatatttcactgattcaaagtggagcagcagacatgttattttgggaagtaatttaaaagattttccttaaaataaatccaatgagtaattgatctggtgacaaatcttaaagtcggaattggtgagtcacttttcaagtctgaggtgttgctttacttaagtgataacttgagtgagattcatgctttttcagagtctattcagactacaatgcaaattttgtttgggtttgtgctttcttttcttcatttttgagtttatttcatgttgtttcttctaatttattgatttcccatttttataaatctcaggtatcctcacattga

SEQ ID NO: 82640 - DNA, 733 bp, Citrus sinensis
  Intron number 2 from transcript orange1.1g048801m (locus o range1.1g048801m.g) derived from phytozome v7.0 (chr-ID sc affold00001; pos 4479827 to 4480559)
gttacttggatctggctccttttcacttctggaatgtaagtgatatgtcataatgatttacttcagtcttatgggagtttcttttctttttcttttttttttaaattttgattcttccataaagggttgtaaatcttggaccaaagttaccaaagttgacttgcatcagaccttgtggttgcatttggacatgcttgcttaatgtgtcctccactgctctttctttttctctctgtatcttagtaaacaattattgtaattatgatattagaaatgacctaaacaatggtttggatctacgataccaatttgttccaaattcctaatttgttgagagcgagagtaccccaagagcatcaatactttattacccttatagctgtattatagtttctaaatggactttattttagctccagatgttacgctcttttagcgaagaaagttgataataacagaaaatccttagagcacaatatattctttcatctcgttgtagctaaatatcggtaaatgaaagaaaatgggaaaaggtataagcttatcacaaaggacccccaaatgactgtacttgggctgatgcatcatatggttttcataacttcccttgcgcttataatataaaaccttttctgcctttatgggtgtttattatgagactgttcctccttttctgcttttataggtgtttgcctaatccattttccattctgttgttgcaggtgatagaagt

SEQ ID NO: 82641 - DNA, 299 bp, Citrus sinensis
  Intron number 1 from transcript orange1.1g026873m (locus o range1.1g026912m.g) derived from phytozome v7.0 (chr-ID sc affold00001; pos 2888457 to 2888755 reverse strand)
atcaaccttcagcctcattgatcgtttcttttatcgtaaaacattttttataatcgcaatcgaataacgttgttttttgctttctcgctgttcttgtaatttcgtaggttgagctcctcgtttctgactcaatgaccttaaggtgttcgcgaaaacgcctaaatgaaagcagagtttaaaatgaaaatctaattaatacagcagcgattcatctctttctttcttcaaagttcgcagttgataacagaactttcttcgagagtaatgatgtttttctcaaattgcttgcagttgccatc

SEQ ID NO: 82642 - DNA, 685 bp, Citrus sinensis
  Intron number 3 from transcript orange1.1g031385m (locus o range1.1g031385m.g) derived from phytozome v7.0 (chr-ID sc affold00001; pos 1352493 to 1353177 reverse strand)
agataagggagtccctcaaggtataatcaattgcttggtgcactttctagactacataaattatgctacagtttttgcctctttggttggtcgtgaatttatagttcatgaaacgacctgccctggattgcggaaggatcatccttatatacaattcacaacttaaaacacggcggaagcgttaaaactaataaactttagaatctctatatctctgtgttctctggccaaagacagattggcaatctttccactagtggacaagctagggtgcttcgcatgttcaagtgtcagggaatagagcagattatttgggtggtggagcctaagtcctgttgttctattggttagactataaaactcatagtttagtgttttggatatttgatcgtcatcttctttccttcttgccacttctccctagactgcattcacaagtatacttattgtcatagcaaggtttatttagcagcgttatcatgatctagagatatcaagcttccgaaattgggccctgaggatgcttgtgaagtttggtttgtttgatttatttgctacataatttcacgatatctaaaaaaaataataataaaataaataaaagattgcatatcgtatggcatcctttcggctgatgatattttaccaatgatcttgtatatttttcccgcctttttgcagcata

SEQ ID NO: 82643 - DNA, 985 bp, Citrus sinensis
  Intron number 1 from transcript orange1.1g040746m (locus o range1.1g040746m.g) derived from phytozome v7.0 (chr-ID sc affold00179; pos 299353 to 300337)
agaagaagcagaagaactagtacataaagatttaggtaatcaattaacaaattttacaactttatatgctgctgaaaagaaagaaaataaagggtataggaaattctcgactaggaagaaaggtactgttgcattctcatacaactgcaacagttgctactcgctactctgccaattttatgagcctttttgtatgtgattgcagtttattttcttcttttatttgcttgcgctagattcttgttatcatgctttccttaatttcattatgagctcacttggtcactcctctcttttgatccttctaggaattacataaaagtgtttgcctacatgagtctgtatcattgctgtctttccattgtttgtttgcttggtaaaactaatgtaattggttaattgatttcgcatgtgccatgaccaagtaattcctagaaggattgcagccttcaattcagaaatatttgtagagtcttactttatctttttactccttgcatcagctcaagtgttattagttaagccttcaggaccttttggatggcatgaaatatgcatctctattgcttgcttggcgtttgtccataggaatgaatattacaatgatcatttcccatggaagtatgtggcttatgccttgcattgtatttggttgattacctggtccctagaaattcacttgtcttgtttggaaactagtcaacccaaaaacaaaattttgtgctatttacaattcttttgtggtgcaaacacttgcacaatcatgcattcagtgaaactaagaacatctgtgtatgtattgtgcccgttaaggataccaaaagagaggagcaaaagaaaaaagttaaagaattctcttttctgtttagtatctattatattattaagaagcttttgtggaccaaatttatgttatctaaatgttctaaataatactactacaatatctaatgatttgttatttttctctttgcagtttgtaatt

SEQ ID NO: 82644 - DNA, 1057 bp, Citrus sinensis
  Intron number 1 from transcript orange1.1g020026m (locus o range1.1g020026m.g) derived from phytozome v7.0 (chr-ID sc affold00547; pos 69991 to 71047)
gacagttgatcccaaacgagccaaaaggtgggttttttttttccccaaaaatgtggtacatttacgtttattttgtggaatgtgtatcgagcttataaggaaaagagagaattggtgacccttttgcaaaattctattaaagttgaaagctttttttttccccaaaaaagaaacaaattttatttcatttgaagtgtgtggaaagagcagatttatctttaagatttgttgaaacgcatttgtcaatgtggtcaacgttatagataataaagttggaattttttttagtgggtaaaagaggaaatttgatgggctttgcattttggtagacggggttcatgattttttgcttcgctggaagatatttgcttttgttacttttttttatttgtttctatgtgaacatactcttaagtgtcagttttcagtgattagtgattcgaattagttacacgagtctgatttctcttccaggctttgatgattctctgttgctgaggtcaatagtgtttatggtccttcattacacgaaaattgggtttaggttgaatttccatctgcttgtgcaatgatactacaccttttagtatttcggtctttacatgctactgaatgacagatttatactccttaaaactgccaatttacttttttccaatgtggtgatctagctgcacactcgtacttaaagtttgggtcactatacatttgatattcaattaatagcataatattgaattcttatctcatgttcatcctttcttttaaaatcgaatgttttctaagtgatggatcattatatattagaaatttttcagttggttttcttagccaaaataccttttgttatgggatcggagttcggcatatttgtcgaaccttatagaattttgttttgacttcaaattcatttgattggcagaattatgatggtttatagtagaaatggaattataatttacttaaccctttgattgtttgtttatttattgatgtttccttttacaaattgcttttctaagcaggattcttgcaaatcggcaatctgctgctcgtt

SEQ ID NO: 82645 - DNA, 743 bp, Citrus sinensis
  Intron number 1 from transcript orange1.1g018270m (locus o range1.1g018270m.g) derived from phytozome v7.0 (chr-ID sc affold00001; pos 4635105 to 4635847)
gacaggggagctcttgttgagttttacgctccttggtaacgttgtttacacttcagtctctctttcgtttctatgtcttatttttagttgtaatttaataatttatccgctgatcgcgattgtttgttatgttatatagatctgtgtgtgaaatggatttatgttaataatgttgagcgtatatgattgcatattagatggcaaggatcaaataaaatgattctttgaggatagcttttgtcaattgaagctgggagacagtcggatcactgatcttgttgaatattaagggaagctgtggtgttgttatattagaagtttgctttgaaggttgtatttggaaaattagaagaaagatgaaatcaattgttagctttatttctctccagagcttttggcaagaggagtgatttgaaagtttattcttcatactttatcggtatcaaagatgatatttttctcgtacgacatttcaccactctttgaaactcttgccgcctcaagccgcaaagtagcaggatagtgtttgttaaaaacttgctaaaagtacttaggagtccttaacggttcaggcaaacattctatactcataaaaggctatagaagttttcaagatgtttttgttttttagttgctggtctctgaattatgaatgtcagatgtgtaacctgaaacaatgttcctgaatgcgttttgtgttaaatgtgacaggtgtggccactgtaaaaagcttgctccagagt

SEQ ID NO: 82646 - DNA, 516 bp, Citrus sinensis
  Intron number 4 from transcript orange1.1g007611m (locus o range1.1g007611m.g) derived from phytozome v7.0 (chr-ID sc affold00029; pos 347428 to 347943 reverse strand)
tgacaagcacttagtgttgctactgaataaaattggtatctgtctttacccaatctttgtctctttcacttcattgcattaattaagaagaatgtaccaaactatcatggaaatattgctgcctgaaattgagcaaaatgaaactaggaaagatcttgaaaacagtcaaaggttgtcatacgcagatcagaaaaaaaattagaaagaagagtgcttggaagaaattggtagttggttgtaaatcatgatcattattgaatcaattgcttttgcatgtctgctgtctcacactgtgtatgtagagatgagaaatggcttgaagcaactttttctgttatgatctcaatatctcatatagttagttggtttttggttgccacttcattctagtaagtccgtcaaatgaaagatatgtaggttgatacttttttgttgtagtcgtttttttacggattacatgtaatttttttttttcaattagatcttgtcccacgagaatctgtggaaaagtggctc

SEQ ID NO: 82647 - DNA, 525 bp, Citrus sinensis
  Intron number 5 from transcript orange1.1g031941m (locus o range1.1g031941m.g) derived from phytozome v7.0 (chr-ID sc affold00001; pos 5215123 to 5215647 reverse strand)
aggtatatggtatatccattcattttgttgtttatctttgctttggtgggtgctccttttctttttgttcattcaacagaggcttcttttctctgaagcaagtttaagttcatgtactaaaaaatcacccagcaatgaaataattgttctatctagatgatgggttgatacattatctttattttcctgttggaatgtgttccatctgcccaaaaataccttccaatatttgaccaaaatatgaaataaaacatgatgtaattgtctcaagatcagcataaaacacagttaaatgatatctgaataattatgtttgttaatagttctcttagttctcagatctctggaactagtactgttgtttcacagaattttcatgaatttttttggcagggaactgaattcaaatatttttggactttcatattcttattgattgctttggttttggtatatttaattaattatgtactgttgcttctgagttcaggtgattgacaaagttcaggaagaaaccaagagtcg

SEQ ID NO: 82648 - DNA, 272 bp, Citrus sinensis
  Intron number 4 from transcript orange1.1g045878m (locus o range1.1g045878m.g) derived from phytozome v7.0 (chr-ID sc affold00001; pos 1803247 to 1803518 reverse strand)
aagtttctgttagagaatcaggtatggctgctctctctcggctcttgggaggtactaaagcaaagcaactacagtacatgcaaagttgagaaattcaaaatcatgcagcttttttaatcaattaaggctatttacaatgcatatccattttgtttttttttgttttttcccctttagaatgatttccttttcttttatttgttcaacatcagttgtaaaagttattctttgcattttcaggttcaaattcctctactaagaaaccatatatc

SEQ ID NO: 82649 - DNA, 589 bp, Citrus sinensis
  Intron number 1 from transcript orange1.1g010766m (locus o range1.1g004940m.g) derived from phytozome v7.0 (chr-ID sc affold00001; pos 2761472 to 2762060)
tttcttctactccccatcggtcgttagaacaacaggtacgtaaaagcaacgccaacaattctttcttcttatgtttattcgatttctgtttggatcataagaaaactttgtgaccaagaaaccaccgtttcataaagccagagcccttacttcttggttttctgggtgttttttacttaaataaattttcatgtgttactttgttcattatctttgaaaactaaacctgtaaatatttgactgttttccagtttgttttttaaacttaaaacttttggttgttttctctgtatttgtgttcgatttgtcgcttgaaatggaaaaaaaaaagggaaacatatttaagtgctatatatataatttttattctcataacaacaattgttaggtatgaagtagatagtgatcaaggcataattataaatttgataatgcaactattggtacatcaattgaccaattcttttataataatcagagtatatatttcacaaatagttatacctattgcatacattagtcttagtttactagattatatataaagttgaacttttgcaggcttggacttcaagatcagaaggaagtt

SEQ ID NO: 82650 - DNA, 491 bp, Citrus sinensis
  Intron number 1 from transcript orange1.1g016895m (locus o range1.1g015873m.g) derived from phytozome v7.0 (chr-ID sc affold00001; pos 3946805 to 3947295 reverse strand)
aactaggtggaggaggagttatataccgtacacttttctaatttttcttgtttgagtagtttaactttttaataccagtagaattttcttcctcatcatctagaaagtgattgatgataagaggctattgtggttgacattgttttaaataaaaatcaatctgttccttgattccttcttctttgcaactttatgtcattgagtgcttaaggaatctggtgtgagtgcgttattcctttaattatatatttgcccttgaaagtaaatgacagtgcttgttagtcggtttgctttgtttgtaaaatattccatgtttgaggaatttcatccaatcttgactatacttctttctattctttattctgtattctaagatatcaagacctatcatctaccgcaccaatgatgttcttttcacttggaacctgttattaattatacgatgtgttctgatatgctttttttttattattattctgtagcttgataag

SEQ ID NO: 82651 - DNA, 706 bp, Citrus sinensis
  Intron number 1 from transcript orange1.1g010400m (locus o range1.1g010400m.g) derived from phytozome v7.0 (chr-ID sc affold00042; pos 232489 to 233194 reverse strand)
gtttaaaagctctctttgaatatcaatcaattcaggtactctttgctctactccttcgttgattttgctttcggtaattattcattatgtgatcatttaggatttgtgtatttttagacttggtcaaatttgtgaaagctgggaaaaaaaaaagaaaaaaaaagagtgcaatttttagattctagggatcaattttgaaactaagtttgattttatttgattttattgtttgtgttcatttgagcttttctgttaattgaattctgaaggcttgaaaagcatagtagcagctgcgtttggtgacagataattggaattgagctatcgttttaactggagtttgatatataagtgttctataatattttgattccattattctgatattaaatttcaattcactacttttttaaatgtaagggatactgttttatctgaatagcttgatattgaaaaaggaatatgcatgattcattttttcccttcctgagccataagtatttagttctaccgtgtttgccacctcctatttgtattcttcactcatagatagtaacctatattcctatcacagctgtatcttaaaactggttaaactcccttgagatatttgtggtagaatgttgtctatgttattttgttgttttataggttaacaaactgaaatagttggtttgctttatctttcattggtaggatcatcact

SEQ ID NO: 82652 - DNA, 275 bp, Citrus sinensis
  Intron number 1 from transcript orange1.1g013530m (locus o range1.1g007451m.g) derived from phytozome v7.0 (chr-ID sc affold00029; pos 476601 to 476875)
gcgtgattttgtgactgaacgtcagttgattggaggttgttttgatcatcgctcaatttggaatatcgttctttgataattatgcgaactggtgtcgctttattggtcaattccgtcgttttctctttaggaaaaaaaaaagaaaagaaaaacatcttgcagatcttgaagatctctcttgtttgttaacttataactgtttcagagatttcaaagatttacttgtcttgttcggtacaggtacaatctaggattcaaatcatatccacaattag

SEQ ID NO: 82653 - DNA, 326 bp, Citrus sinensis
  Intron number 1 from transcript orange1.1g040513m (locus o range1.1g040513m.g) derived from phytozome v7.0 (chr-ID sc affold00052; pos 93792 to 94117)
tgctgctgctcctcatttcccacttccccatcaacgtactctctctttcttcattgcaagttttgtctttttatgtgtgattttgtttgttttgctgcttcttttcaatgggtatttcttcttctcttcattcttaatttaatcacgtcgtgtttctgtgtagttattatagaattgacataaaaaatagcagagtactatttatgtgatttgaggatatgttgtgtaaagaaagaaagaaagatcaatgtaaatatcttgcatatttctagtttgattgtactgtttgctgattcactcttatgtttttatcagctttagaggaa

SEQ ID NO: 82654 - DNA, 932 bp, Citrus sinensis
  Intron number 1 from transcript orange1.1g038231m (locus o range1.1g038231m.g) derived from phytozome v7.0 (chr-ID sc affold00246; pos 181545 to 182476)
tgtagaaagcattgcccaagagagaatctctgcaagtgcaggccgttactgttatgcccgacgttgtggcccatgttttcaatgagagaaaataaaatttaagaatttttttttcattttttctcaaaattaaattcttttcttttttttttgaaagacaaaattaaatgcatttaaatgttaaatgatttgaatttctccttaaccttctttctttctatcttcccctttttctttttaaagacaaatcagtaatatgtttattaatccaaatacctgaatttgtgtgtgttttcttctaaatataaaaaagtatgaaaactaatattttattttattttattttttgaatattttattacactgtctataacactcatgatctgttaaattaacaaatatttatttgtaatttggaaacacagatgttaagttatcctttattgagagttgtatattctgacccatacatctaggaattgcactatggcatttctgttacctcttcacagtctgcctaagccttattaaatagagtgttatctctacaatgaggaaacaatagaattggatatgtgttgttgaccccataatcacttcaaataaggtttggaccatccttccgaaatatcatacttttgccttttgctctccttctcaatctcttggcaatgtgtgtgtgtgttctgttttatgaatgtatgtattttcttcgtttagaaggttggtatctcataaaaactgcaattcttgttcaaatgattgctagtaaactagctctcatggtttctgtcagaagtttatgagcaaagaaactctatttatcaggttatggtgttggctaaaaagtaagcgttgttattgttatattaagagttgaatgtccagttgtccaccggacagggcgttgacgcgtaattcaacagacactt

SEQ ID NO: 82655 - DNA, 440 bp, Citrus sinensis
  Intron number 1 from transcript orange1.1g025581m (locus o range1.1g025581m.g) derived from phytozome v7.0 (chr-ID sc affold00204; pos 165672 to 166111)
cctcaaattctagtcacgggtactttcctctgtttaatattgccgttaattattattattattggttcatgatcggatattggataatattagggttttatcatttggttatccctttgagttaacgaattattttttccagtgataatgacttgttgaaattcctattcgattaatttaatttgcaaggttttaggtttttcttgttgggagtaactttaatttcttttttgcctatattgttttgcttttttgctttaatgttgtgaaatgatagtgacaatgttgtcttacaaccttcttagcttgattggtgggagggaattcggatgtttgttatctgtgttcaactaagtactatattatatttgctgccgtatttattttactattttacttcaatgccagagatcctgaatcggaacccaaacctgaattta

SEQ ID NO: 82656 - DNA, 1005 bp, Citrus sinensis
  Intron number 2 from transcript orange1.1g025581m (locus o range1.1g025581m.g) derived from phytozome v7.0 (chr-ID sc affold00204; pos 166132 to 167136)
atactggaagtcattgcttccactggaaaattttggtaggctttaatcatgacataaaaacgttagtttcttatgtattctctatatggtaatgtgctctgtttcttgtttactgcactgacatttcttgtgatgtggaggcgatgaccactcatcttgttagccaaaagaaaaagtgaatagatgcataatgactaaccaggtggagttactatgttgcaattttatccacttgaaaaggtttgatattaatgtttatttagaatttaaaatctgatgatcaagaggttggtattctgaggcaactggaaaggggtgtttagggttttctttaactggaatatatggatcagaaggttgttggaagtgttaggttttcatgctaaggggtggttgaggcgaaattatggttcagaatagggtaaaaagcaatcaaatgctgtttcagtaggtacagaaaaatactgaaaggtattttaaatattaggaggaagcaattttattaggcataatgtaaatactcattcttgtcaatattccctcctgattgctggaaatattacttttagacgctattttgactatgaattctcgtattttctctggcaaaatattgattctttgatgcttatgctaaatgttgttggcataatacaagaagatagttcatgttgatgtgaatatgaacttgaattcaataagatttatggtgaaatcttggtgcagttaatgcaactactgagatgttataattttgccaacattctaagaatccatcatctttaaattcttctatttggtctgagctccagggacaggttttgtattcttttatacttcctcaaaaccatgtgactgcatgcagttaatgctcttccatgcttcatggataatatattttaagaacttcctctttgtttctttgtttttgctttcattacaatctaaaaggtgaatgtagctgtaaatttggtgatgtttaatggtgtatatgtcactgcaggc

SEQ ID NO: 82657 - DNA, 465 bp, Citrus sinensis
  Intron number 2 from transcript orange1.1g045290m (locus o range1.1g045290m.g) derived from phytozome v7.0 (chr-ID sc affold00075; pos 279500 to 279964)
attgttgttcctcgcagaagggtaagccataattaaccatagactgttctgtactcatttttgtttttagctttaagacactcttaggaagagaggagcaaataaagatttacgaaaagaaggtccctttccatttaattaagcaacagcttttcttttattttattttctttttttttctcccgcttcccctttttgagagaagcaacgctttgatgagtattggataaaccatgcatgctacagctaatgcaccttaacttttgtttaaaattgcttggtttctttctctccaccaaaatttaagtaaaaggattaaagatgtagcaatatgaacagtgatttctttttaagcatggattaagcctggtggctactaactagctgtaaaaatgtataatacggtgctgatgatgttgaatggtttgtaaaatttctagacaaaagctcgggagcagcggcaga

SEQ ID NO: 82658 - DNA, 575 bp, Citrus sinensis
  Intron number 6 from transcript orange1.1g018887m (locus o range1.1g014207m.g) derived from phytozome v7.0 (chr-ID sc affold00102; pos 166247 to 166821)
gcacatttgctttaactttggtattctcttgccttgattcattggtgtgattttttaattctagaggctgataagcttgaaacatccttttcgattgattttttcttcttatcacattgctgtaaatatctttttttgttttacatctagtactctcatgcctagtaccttcaatatgttagtcttcccatttctgggaaaattctgtatgccattgagttcccatagatttcattgcctatttcaagactcccaaggggttcacatttccacatgtgtgcctgacttgaaggtgtactcatctgaattaggacactagtatgttcgagatttgatagccataaaggcaatttctgtttattaattgaaaataccatatatcaattccttttcatcctgtttaactgaaaactgtatttagcatattgtttctttgagttcctaatgataatgttgttttacttagccaaagctactcatagattgtagcttgttagcacagtctatattctttatatggttctttttgcaagtacagtatatgattattttttatttgttcagttattttgcgc

SEQ ID NO: 82659 - DNA, 554 bp, Citrus sinensis
  Intron number 2 from transcript orange1.1g007114m (locus o range1.1g007114m.g) derived from phytozome v7.0 (chr-ID sc affold00015; pos 435229 to 435782)
gaggaccttgtcagctctagatagagaaggaaattgtaagctacatactgaactaagtatgctttgttctattcttatttattgagcataaattgttgcttgagaaacttataaaataacatgcattctctgaaacctcagaccactaaaatcattatgaactttgattttgaatagctgcgagatattttttttttccccccattccatctgttcattctacttctgattccaaacaatagttcagccttgggcattggctgtaaaaggaaaataaatcaggggttatagttactggcttacagttacaacacatatttatatttgactggttaaattctaccacttcttgataaagacatctgagaaataaagaaatattttttttgtacttgttggaagaaaaaagaagaaacaatgttttatgattgtttcctctttgatattaggaaaagatgtccagtgcttgagctagtgaagttgttatctttttctcgctttttaacaaatacatgacagggatcagtgacaaggatacaggcagtttggaagat

SEQ ID NO: 82660 - DNA, 574 bp, Citrus sinensis
  Intron number 1 from transcript orange1.1g014516m (locus o range1.1g014516m.g) derived from phytozome v7.0 (chr-ID sc affold00839; pos 7914 to 8487)
accgaaagacgcttggctttctgacttattgtgagtttcaaactttatatttttgaattttttgtttttcaattcctctgtataatggtattgaaattgaaagttggcacttttgaggctattttaagttgattggttgctttggtattggaaattcattttgtgaattgagaattgcggagcaagcatattagtttattcacatggaaaatgggagaaaatcagagctacttcttttccaagtttaaaacctgggtttcctggtcctcatttgggtttatcccatcatcctccttttttagcttgcaggaaagcaaatattcaccggttgcagggagactggaactggacccggtttttgtcatccctgcctgaggctacatgtatcatattacccaggcttagagttatatttcttcaattgcatgtaaacattttccattattattattattactactactaatactattattattattattattgctgctgttgttgctgttgttgttatcacttggctaaaatctctcttcctttctcttggcagccaaagcatactattttctgaaac

SEQ ID NO: 82661 - DNA, 847 bp, Citrus sinensis
  Intron number 2 from transcript orange1.1g014516m (locus o range1.1g014516m.g) derived from phytozome v7.0 (chr-ID sc affold00839; pos 8542 to 9388)
caattggaacgtattctggaccttgatccccttatgtaagtaatataatcacttaatataacgattgctgaataagctaatttaatgatctatttctgtttggttgctgggacagtggaggaaattgaaaccaaaaaaaaaaaaaattattcttcttctttcatttgccttgtaatgcaatatccattgttaatagtattggtaggatattaaatgttttggtttaccaatgctttgcatacaaataatcttttttacacacttgtctgtacaaattgacatggcatgatatttttgaaaaactaaaatggataagtcaaaggaataaatgataacaaaaagtgcatttttcgctttcccgcttttccactcattttatacgatgctagtttgtacggattagtttataaaaataatttgtatggatgggatggtatggatagttcatgttgtgtagaataattctggcttctgtggctgctaggaacggattagaactgtattttaaatcagattaaacatttgcaccccattggtagtatagaaaattataacttttaattggatatgtttttactgattatgacactatggcagaacgagaacatataaggagctgatagagtgccgcttgcttgttcatctattcaagtagtttgtagtttactagtcctttattattatgtctgtgctacactaatgtggtcatttctttcatatttcttacttttcgctcttgcatgcttatcatgaattttgtttgaatagtttctcgtgcattttggttctagtgttttcatttttgtcagcatgattttaatatgttggctttatatcaaatgtagtg

SEQ ID NO: 82662 - DNA, 855 bp, Citrus sinensis; identical to SEQ ID NO: 82397
  Intron number 1 from transcript orange1.1g029767m (locus o range1.1g027810m.g) derived from phytozome v7.0 (chr-ID sc affold00021; pos 975135 to 975989)

SEQ ID NO: 82663 - DNA, 883 bp, Citrus sinensis
  Intron number 1 from transcript orange1.1g018216m (locus o range1.1g017938m.g) derived from phytozome v7.0 (chr-ID sc affold00029; pos 977477 to 978359)
tgccgatcaattcataaagcaagggcaattcatctgtgagtacgcaggtatcggcaaaatggaaatgtatgttggcatttttgtaatatttgtttagagtttttgatgcttgtgattttaattatacatgtgcctagttgcatctgcttgatgattatttgatacagtaagacttattattagatttagcgcgtgccgttgttggaattatatttctgctgtgttacggtagtatggaatcataagttcatagttttagaatgggattgtgcggatgaaggaattacatttgtttatttattttgaccaagaagaagaccaccttcagttcgtacaattctagttcaatggcagtattatcgaatcccatgtttcaaatcttatagtttttatcccttattatttggattaattttgcctaattggtaggcaaattttgttcgtctaatacagcttatattttacatctgctacgtggtagaatagagtctataaccactatgttttgcatctaccatagggctgtttagcttgccgttagccatatcttccatttcttatgactaccattatatagctgcttacttttcctgagttatagctttgactctctattgtgttttctccattcaactagccattgttgggcactttgggtgatgttttttatctttctttccattcttcccacatcacggggtttatgaaacattatggtaataactgattgctttgaattggtctagtgtgtaaaacattttcagttacttggatatttaagaaataattattgtttgtttctgtggacatttgttagaaattgtcttagttgatgtttacttgaataggtgaacttttgaccacaaaagaagcaaggcggcgg

SEQ ID NO: 82664 - DNA, 367 bp, Citrus sinensis
  Intron number 1 from transcript orange1.1g038342m (locus o range1.1g038342m.g) derived from phytozome v7.0 (chr-ID sc affold00020; pos 930156 to 930522 reverse strand)
aggaggaggtattttgtttttatttttgcttgaaagtaaaatgtgaagttgaattgctaaacttataatatggatgctttgatatgatggatttgtgatctggaatagcttgtctttgagggtttttgaaattagatttagatacttttaagtaatataatcggccatttttcaaatcgcattgtcttaataattttattcaaggatttgaggctggatttgttatgtaaattgtttcatgaatatcatttgtagacattgcagttggcttagtaattaatggtttagaaagttatcttattcttcccatagcttgtgttgttcctaagtgttgtggtgttgcagcttggtgtttttggtgacagtg

SEQ ID NO: 82665 - DNA, 1011 bp, Citrus sinensis; identical to SEQ ID NO: 82149
  Intron number 2 from transcript orange1.1g030484m (locus o range1.1g028761m.g) derived from phytozome v7.0 (chr-ID sc affold00292; pos 127733 to 128743 reverse strand)

SEQ ID NO: 82666 - DNA, 232 bp, Citrus sinensis
  Intron number 2 from transcript orange1.1g017380m (locus o range1.1g017380m.g) derived from phytozome v7.0 (chr-ID sc affold00001; pos 1704447 to 1704678)
tagcagggaagctcaaatcaggacccgacattaaggtacttaaaaacattcgcatctaatgtgcagtggccgcggcacacatatcattgattgctatgccacatcatttgaaaaacaaacttcgaatttgcacatttgaagaaaaaaagaaaaacaaattatatttaatatacattattctgttttcaattcttgaacattcattttctttgattgatgggattgctatagg

SEQ ID NO: 82667 - DNA, 588 bp, Citrus sinensis
  Intron number 2 from transcript orange1.1g021064m (locus o range1.1g020952m.g) derived from phytozome v7.0 (chr-ID sc affold00021; pos 707057 to 707644)
tgaaggaagtgaaagaggaggttgctaagtacaaggtgagtttctgattctattgttttattaaactaaatttgattgcttatttaataagaaactgattgatatccttttttcttggctgtttatgttattggtaactagtgcaacgtttttcacgatgttatattaatttttcgttcattcgattgctattggtagtagattaagtatagattatttttcttttttggaaataagcattgaagtttgtgtgtatttttgttgtggaacaatttcatattgtttcatctgattgtacagtttttgtaatttgatgcctaggtgatttgtgtggtaattgatgcttatgtgtagatggtaactagatataaatctgtttttgtggtcaaagttagatgtgactttgttagattctccctgcaatgatacagatgttttttttattgtttgcttgagtagtttggttgtatttggcactttctattgcaatttgctttctgattagtattctttttttatcccccattaatgttatatgatattttgtgaacaggttggagctcctgctcgtgttggtttggttgctcc

SEQ ID NO: 82668 - DNA, 479 bp, Citrus sinensis
  Intron number 1 from transcript orange1.1g013348m (locus o range1.1g004302m.g) derived from phytozome v7.0 (chr-ID sc affold00029; pos 370037 to 370515)
tacttcacttccctggtacaggcttcttgtaagtttgttgttgacttgccacatagctgccttttctttttaatttgtcaaagaagtaaggggtttcaatacttcatgtttttttattttatttttttctttttgtgcttagtcccgcaaatggctcataaggctgttgttcgtctttgaagaaggaacactagtcctgatagaaatcagttacataccatgcaatggttacttttcaatccaagctgaatatcaattattactgacgatatgagtagtccaatttgtatattgaataaagaaacttagactagtgccacatctttgatctaaagataaatgggtttcagtagtcacaaacatgattatgcacaggaagagctcatatatttttattttaccagcttcaagtggtgtgataaggtatagcacagttttctcatagtctgccattccatttacaggctgcatctctgctg

SEQ ID NO: 82669 - DNA, 522 bp, Citrus sinensis
  Intron number 3 from transcript orange1.1g034989m (locus o range1.1g034980m.g) derived from phytozome v7.0 (chr-ID sc affold00012; pos 683439 to 683960 reverse strand)
ggactgtccctgtgaactagcttctcctttcagtggtaaactccactcatgtttattgttggaagggttgtgggatggtgatggtctgtatgtttgtccagtttgcatttgttatttggttggtatggtttccctgttcttcaggattggttgctcaaggcgtttggttttccgttcaatgattatttaatatgcccatttgcatatcatcgtccattatgtatttcttgagcacatagtcacatagacaccaacgttcaatgattattagtatgcccatttgcagatcatcttccattatgtattttttgagcagatagacacatagacaccaaatgttcttgctgcataaaagtcttgtggtgaagttttagaatcagcttcaactctatttatatttgccttattcaatttgttcaatttaaatctggtgaatttaaatactcattagtttcttttaaaggattgtgaaccgttgttctttcaggtctactaatatcgttgcagtgcgtcaaccgcgaa

SEQ ID NO: 82670 - DNA, 901 bp, Citrus sinensis
  Intron number 1 from transcript orange1.1g044797m (locus o range1.1g044797m.g) derived from phytozome v7.0 (chr-ID sc affold00306; pos 190216 to 191116 reverse strand)
ttattcgctctggatacaaagtccaagcgtttgaggtttcatttctatttctctgtttctgaattaatctcttcgatccttaattttcagttgctgcgataagaaaagaaaaaaattctttctatctttttaaaaaaaattgttgatgaatgatgaatccacgtgttatgtatgtgtgatggatgtatacattcttggactcattggctttgcttgtaatgtattgaagtgaaaaaggttgggaggattgttgattgcatattagtctagactagaatcttctggacttttttaactttctattttgatcaatgtttcaagaaatgcaccagttatatgagtgtgtctacaggtcagatattggtggctgtgctttttgaaattctgattcttttgttcagtgcatagagttcacttttagtttttggggaaaactttgaaaaagatatttcaacaattaccagaagacgctgtttatttagtttgtgggaaattgaattttaattgcattatttgatgttctctaatcttatatcaagtattagagtctcttgatgccaagttctaactccatcctatggccgaggtcctgggttagagcttcaatgggggtgtaacaaattcgagttgcttaataagtattctccttcgtcatattcttctttccgtcgatatcatgcctccaaacttgaaaaaggtcttaggtcaattttatgttgattgctattcttctcaaacaactttgtacgtgaatgtatatccataatttactacttttatctgtataacctcttcatggtatgattcatgagaccaagagaatttgtttaaagtgttaatttcatatttaaatgctcttttccatatgcagatatccgatcccttggtagataaatttttt

SEQ ID NO: 82671 - DNA, 881 bp, Citrus sinensis; identical to SEQ ID NO: 82170
  Intron number 2 from transcript orange1.1g008337m (locus o range1.1g007659m.g) derived from phytozome v7.0 (chr-ID sc affold00015; pos 1712117 to 1712997)

SEQ ID NO: 82672 - DNA, 523 bp, Citrus sinensis
  Intron number 1 from transcript orange1.1g041283m (locus o range1.1g041283m.g) derived from phytozome v7.0 (chr-ID sc affold01206; pos 11726 to 12248 reverse strand)
tgtcgttcataatttatacaatacattatgggtgcgtttggaattgaggttggacagctatacctttaaagctacagtactaaagtgtttggtgaacattagctgctgtaacttgaaagttatgttgatatgattttccatttgtataataaaaaaatctattatatctttaataattttatcaaaattattatttaaaatttacatttactatatattattaatttttgtttcatagttaaaatttttttccacagcaattatagcatagcacctcaatcccaaacgcaccctatattttatttcaaattgcattattaatataacataacaaatcttgcattcttggttgtttttcttgttgattaattactcaaagatcttgtttgatatgtcgatgaatgcatcattgttttgagcctttcatcaatatattcatttcttcatgcctattgtgtttttatcatacgtgttgcttgcaattccagtctttatcaaacactcttgaggaaaaggcaaaatt

SEQ ID NO: 82673 - DNA, 969 bp, Citrus sinensis
  Intron number 1 from transcript orange1.1g017862m (locus o range1.1g017862m.g) derived from phytozome v7.0 (chr-ID sc affold00030; pos 793763 to 794731 reverse strand)
acgattgctttgtaagttttcttccaattattttgctttttcatcattgatgagtttggacgtgggttttgggtttttattcgataaagtttagatctttgttaaattgaagtttttttggatcttggcttttggatctgtggagctttttgctgttggttaaattggaagcagtaaacaattattttccccttttttttttgaaaaaaaaattgatttgatttgatttgatttgatgggtgggacatgtataaattcttattgctatttggatctgggattgttgctcgacaataattttagcttaactgtgtctttaaaatcgatccactttttctgcattgttgcttgttgcatgctttgttctgcgttgaattgcacacaacacacggcatttttttttctttaaaagaaattatcttgtagcttaaaagttgttctgagttttggctagaggagaatcatatctaatctcttttgcaagtcattttcagtaagcattgtgagcctagatctggcatgggtcttaatttaacaaaatttaactcaattcatggtctaaattgtgaaatttgaaagtcttgattggctatttaaataaattttaaattaagtatgcagatgtctgtttttttggcagactgttgatttagtatgctttgattttaatctgtgccatgcgtgaggcttagcattttggtgtctgccgttcatgtttcactttcaaatttcagtggttctcattcaatgttgcattaattttataagcagctttcctgcttaaatgtttgcatattctcggatacatttacgaaagacactccttgttcttaccttgtttgcgttaacttaagatttttaccacgacatgcttttgagagtgcgcaattgcacatggatcttggatcttaagtttttgagtattatttgatttgcaggttgctaaagacccatctggcaaagaaatta

SEQ ID NO: 82674 - DNA, 1028 bp, Citrus sinensis
  Intron number 2 from transcript orange1.1g016352m (locus o range1.1g016352m.g) derived from phytozome v7.0 (chr-ID sc affold00103; pos 195577 to 196604 reverse strand)
tgactgtggcaccatcttttccaggtttttgtttattactttaatttaatttaatcaatattctgcttacatatatatatatatatatttaaactagcttggaaagttgcattaacgtgattatacacacacacacacacacacgagctactattttaaggccttatcataaatgttttttataatagttcttaattttctcttctcaacgtctatatacgcttttagttaaatgccaattttaaaccgtataattttatttgcaccaataaaaagttataggtagtgttgtaaaatagtagtgtatttttaaagcgtatatcaaaaatattttaaataatttttttttttggtaaaaaagaaatatttaggtttcctttgtaagtgttgccggcttggctcttacagtgtaatattcgctgccacacaatatgatttctgaagtaccttagcgcagcttttccaaacgaccctttagtaatatgaaaaatcatcgtcttacttactacctaactcatctttattttataaaaatgcgaacgcccttataaataactcttaccgaacttatcttcttcatgttactcttgtgtatgaacaaaatcaagatcttgagcataatataatttttgaagggaaaaaaaaaatgcatgattggaccgagcacatagtttctaaatcttataatgatctaggaagacatgtatgatcttgcttcttacattggtcaaagtcatagtttgactgtataatcttaatataattgcttattttactgcaaacgtatcaaactatcaatcaaccttttcccttttttttttttttggataagcatccttttcgtttatattgccaagagtcaaaaatttaatgcaatattttattatatatttcgtttcaataattgacttgcgtataagctatgcattatccaaagactactttgtggcaacaaaattttaactaacagcttaattatcaattattttgcagaagggacagcttcatcacccacagggccttctgtg

SEQ ID NO: 82675 - DNA, 503 bp, Citrus sinensis
  Intron number 1 from transcript orange1.1g027623m (locus o range1.1g027623m.g) derived from phytozome v7.0 (chr-ID sc affold00157; pos 197636 to 198138)
gaaatcgtattgttcctctaacacccccccccttttttttccaattaatttctcacttttttgtctataaaaattgaaccacaagaataattcatgcccaaatagctgattattaccgctaatttactcacttaggtcgtgtcactgagtgtgacacatcagatgatacgtcagttgaaattcaaactatgtaatcccagctttgtaggtggagtggtactttatttgcttctgtgataaaatatttaactcaagattcaacgctgtatatttgcttttgtgataaaatatgcaactcaagattcaaagctttaccatcatttgtgtgatggtatagagtcgctgtgccgatatagatacctattatttgctactgtgtctaatttagttggatgcaaggaggaactttgatgattttgttagttcctcctttaagtgtggcttcttctataaactattctttgtttcgtgtggcccgcaggtggagcttgctgcacttctcc

SEQ ID NO: 82676 - DNA, 406 bp, Citrus sinensis
  Intron number 1 from transcript orange1.1g009582m (locus o range1.1g009582m.g) derived from phytozome v7.0 (chr-ID sc affold00020; pos 1331276 to 1331681)
tagctttgaaataagattgttaaaacttgaaaaaggtgctttctctcctcccccccccctttacgctcttctctttttcactattatcagcatttttgcgtttattatttagctgtctgtatttgtttcactcagaaaacaaaaccctcttttgctttagtggttacactttcattttcacgttcacttcacttgttattattattgttctctcctccgtctcagtttcagacccagttgtggtgggtactggattttcattttcttgcgggttgtattttctttgttttcttttcgccaagtaacttcatgatctgggttaccctcagatttgagttttagttcttagcttgtgagcttttcttttgttttgtagctaaccttttagagagagaaaagcaagatc

SEQ ID NO: 82677 - DNA, 665 bp, Citrus sinensis
  Intron number 1 from transcript orange1.1g024238m (locus o range1.1g024265m.g) derived from phytozome v7.0 (chr-ID sc affold00052; pos 303824 to 304488 reverse strand)
aacttttggccagagtcttgcatatccgcaaagaggtaataatctagggtcctctgaggttttacaattaatttgacaaactattgttattcttctggatgcaatatgtctgaaagactgcaattgtttaaaatgagttccttcatgaatttgttgataagtttgcaagtgaactttgagaatatatgtttcccaacataaaaggaaatgcaatgaagctggatgattttacctatatgcttaattgatttggtgctttaatattagtgaaaattttccttactaagcttgttaaattgattcagcatgtatatggtgttggcttgatttgaacataacttgaaacttacactgaaataagtttgtttggtcaggcatactgaaaacatcatttttcttgtccaaatagtaaacgaacaaatttgaaaaactttttgatattgctagctcgtacaatgctaatttggattttccttctaaagcaacgtgaagcacgattgttctttatgagtgtacttgtgttagggtgatgttttgcctcatattgacactgtattttgtctgcaacgttaaattgagactcagcatgcatcttgttgcattgatcttttgcagtattgtgatgagaatatagcttgaagaggaaaagttttaaaaaattgggc

SEQ ID NO: 82678 - DNA, 491 bp, Citrus sinensis
  Intron number 2 from transcript orange1.1g007618m (locus o range1.1g007618m.g) derived from phytozome v7.0 (chr-ID sc affold00029; pos 562343 to 562833 reverse strand)
ccgaacccaacgattgggtttacgattggtacgatgtttgttgttactgctgtattcttctttgatttccctatatatatatatatataaattgtcttagtttgaaagtaacaagttattatctgaacaattagataagaaaagtctgtgatagaggtaattacaattttgttttgcatttttagatctatttttctgctagtttcttatatctagaatctactgtaccgatatatggctgcatttgactgaagtaagaaggtgaattgctcaattcaataactaatgctcactcactttgctgattaatgtatttggatgtcattttaaattctttggtccttttcttatgaggttaaaagagtatacaaaaataaatattgatggacaaataaaacgaaaaatagcagattacacgtatctgcgacaaccattctagaaatctattcatcttccatttatatatatatgcagggatttccaaagagtag

SEQ ID NO: 82679 - DNA, 605 bp, Citrus sinensis
  Intron number 2 from transcript orange1.1g044251m (locus o range1.1g044251m.g) derived from phytozome v7.0 (chr-ID sc affold00020; pos 237400 to 238004 reverse strand)
ctgctatttctgggcttttttggtgtggaaggtatgggactgttgttctgttttgatttaatgctcattatgtgttgaggtggattgtgaagttgcttgagaacaacaaagaaaaataaatttgcaactattaaaaacttcatactttgctcgcccttgctttagtttgggttccattatgtcaagtggaaaagtttgtaagaaattcttttagagaacctgtgttcatgatatgcataggtaaaaattaaaatgaggttggatattgtttgttcataaatattttttgctactttgtacggtgctatagtctttatatttaattctgctacgtcatttgtgatactggggaggggatgagtctagcagtatattgtaagattgattcttactgagtacagcttgctgcttttcatgattttactttctgtcaatgtaaatggagattttttttttcctggtggtttggaaaattaactagtaaactatttgagaacaactgtcaggttgcatttccaagcaaaggaagaaagatcttaaccataaagtattgtttttccaacacttagtagggcttattttgaatttctaataacttatcaggt

SEQ ID NO: 82680 - DNA, 546 bp, Citrus sinensis
  Intron number 1 from transcript orange1.1g034342m (locus o range1.1g034342m.g) derived from phytozome v7.0 (chr-ID sc affold00032; pos 705001 to 705546 reverse strand)
agaaccaaaaccagacccatcaatcaatcaatcaggtataaatatattgtcgatatgtcatttatttcaagtttccatctgattattatataaggtttaattaaaaaagtgtaattattttgaaaatattgcattactttaataataatgcaaaactgtgaaattgacatatcgttcatgaaatttgatattatttgttttaatcttctctataaacaatcatgttcaatgggtgcttttcatttcatgctaattcattttctttgtacgatgccagaatatcgaaagtttcaatctttagtacaagcacaaactaaaaacttcagcttttgattaatgagaatcgagttttgtagataaaatttgatcccattctttaatacaaaatgtcaaaccactgttataagttgaggtttagaatttaaatgcatatttttcttaaggatcttgctagtaaaatttttgtggcagttggaactataattgtagctgatataatttacattgcttttttcttttttttttcaattcctgttaaagaaaaat

SEQ ID NO: 82681 - DNA, 723 bp, Citrus sinensis
  Intron number 1 from transcript orange1.1g019990m (locus o range1.1g017740m.g) derived from phytozome v7.0 (chr-ID sc affold00001; pos 755365 to 756087)
aaaccctctcagagttcttgtcactggcgctgctggtacgctttttaaacactcacttgtgtcaataatctcacacatgtattttatttatttcggcctctcaggttttcttgtagtgaaaggatagctcgccatccatgcatgcatgcttttctttggagtgaggagatgtttatatattttttgtaatttcttgtggtcttcattttggtatcaggttcgcttcatgttgaggtgtttgtttatattcttaggttgaaatgttattatatataactgtctttgcacgtacatgtaaaagataggactttgctttcttgattttggtacaggaattagttgtttctgtaaagtctcaaattattttgtgaaatggaatatttttacatcgtactgtttcagaaaattctggttgttttgttctgtgttgcgttgttttggaagatcattagacacatgtggagtttcctagatatacccaaggagccctgtagagtcttggttactggtgctacaggcaagctagctctgaagaaaatggatttgtagattttattatttttttttaatctttcatttcctgtttgaatatgcaccattggctatcaatgtgggctggattctagaattgatgccagatttcgtttttgatatatttgtcagaattttaagtcaaattctaacaactggaaaaattaatttgatcaacagggcaaatcggtt

SEQ ID NO: 82682 - DNA, 560 bp, Citrus sinensis
  Intron number 1 from transcript orange1.1g029174m (locus o range1.1g029174m.g) derived from phytozome v7.0 (chr-ID sc affold00129; pos 344414 to 344973 reverse strand)
gtctacaccttcgacactgtcgaagaattttggtggtacgctactaacacacataccctcgatatggctctgttatatgttattttcaactgggtttgtttctttctgctttaatatcttttttctgatcaatatttgtaaatgtttggattttcgtttctttgtgttgttaggtttattgatctaattaatgagatgggtttgcattgaattaactgagctttatgattgattcttctcgcttggttgataagaaatttaaagcaaagtaatgtgaacttttgaatcctggagaatcttgtgtctggagatctagtgaaattttattaacatctttataatagttattattgtgctcttcatgaatttgtttgatccagctttagacacacatttgtttttttttttttttttaacccaaatcaattggttttgatattagttagatcatatacgttttccaaaaaagaaataggtagttgagtttgattcattttaatgtttaatctagttatattttcttgatcatttggttgatttttttccttttttcagtttgt

SEQ ID NO: 82683 - DNA, 487 bp, Citrus sinensis
  Intron number 1 from transcript orange1.1g046352m (locus o range1.1g046352m.g) derived from phytozome v7.0 (chr-ID sc affold00001; pos 4391031 to 4391517)
actccagtctgtggaagaagcagaatctgcaggtaaatgactctggcattttgttggcctgagtcaatgaaatatggtaaccttattatcttggtgttgtggtaatttcatttgactatttactctctctcatctgaataatttgtccctttcacttaactgagatcacctacatacaggctatttaacatgcatcgaggtctgttgagaatatagagtttttgagttttgccatgtgaatagccacctaatttgattcttggaaacatatgatgagactaatttcagacatgtacacatggatttatgtagtttgacaaaaactcactttacttgtatggaaagatatcttctgtggtaatgtgttttgttgcaccttaataattgttctcattattgattactaattagaatcctgtgtaatcttcatatttaatttttttttattgcagggaaatattgattccgctgtagataagaggggtgg

SEQ ID NO: 82684 - DNA, 638 bp, Citrus sinensis
  Intron number 1 from transcript orange1.1g038423m (locus o range1.1g038423m.g) derived from phytozome v7.0 (chr-ID sc affold00008; pos 389834 to 390471)
cttgccatttttaaaacaaaagtcttgaactcgtttcaaattgtcgaggtcggtgccaacccttaaagctccacatgcgtatgccaaatttccaagctttggcgccaatttttcaacacgttttgttgaatttgtcaagtctttatcatagtcaaaaaagcttggtttgactttcacaatatcaattttaactgacaagaattttgaatgatttgatcacatcactacagtttttaataggttcaactaacaccattttattgtcttagtctgttgctgcagatagaaatcggaaattggaggtaggcctgggaccaggtaaagtatcatcttaatcaaatctatcaatttatcattggtaatttggtatggcattcaagtttttagtctgcagtttttccattttgcccctattcagctccaaaaaacatctcggtaccttataaacacttcaaatttcttctctgacacaaatatttctttgaaactttcaaagattcagagaacctctgaaagacgttgatctctatctaccagcaaactttttgggctatttcaaatctttctgcttgtttttcaacttctacttacttccatctgtaggcgtgcttggctctggaatttgcatcgtattgata

SEQ ID NO: 82685 - DNA, 838 bp, Citrus sinensis
  Intron number 1 from transcript orange1.1g036200m (locus o range1.1g036200m.g) derived from phytozome v7.0 (chr-ID sc affold00122; pos 123938 to 124775 reverse strand)
gtttgaagtgaaaaaggtgttaactttttgataattttatttgattcccatttgcttatttgcataatgtgatgattttctgtatggatatttatatatgcctgggttgattactaaagaaaatgaaccagaagatgaaataaaatgtgaaaatttgagtcttgggtcttttatttttagattaaaactgtgatagtgagctcaattaacctgaggttttcaatgcctcttcttttttctgcatttttcaggaacactatgtgaatcccttgactgaataattaaattggaattaagtctgcattctgactgttaaaaaaatatgttacatattggtgctgaccctgaactttggtatattggtattaagtagtttgaatgtgagtgaggaaattctattgtccttttttgaactgtaaaactgactgccaattgttaaatctgttaggatgtcttcttcagaatggttgttaatttccctgagctgcattttgtttagtaagaaaacctgtcaagattactcgctttcacatggattacattactgatattttcccctgttattaagaagcactttttgtttcatttttcatttctgtagtatatacttaattttaggatgagctacatgtttttcaattattatgttttgttaactacggtcacatggttgtgataagatttgattaccagtcatgtgatgcttaaaatggagaaaaagatatgttaacaatttcaatcaaaacgtgatccagctgagtgttgttggcttgcttaacttcatattttgatttcttgtctagaaacataaaagtagctcaaagatttccctgcaaag

SEQ ID NO: 82686 - DNA, 920 bp, Citrus sinensis
  Intron number 1 from transcript orange1.1g032447m (locus o range1.1g032447m.g) derived from phytozome v7.0 (chr-ID sc affold00032; pos 552372 to 553291)
atcaaggctctcactacaggttttcgtttccattttttcccgagaaaatatgcaagaagagtttgaatgttcgtttgttttgtttttattttgtttggtgactttctgttgtttttgcttcagtcgtgtttgtttggttctttcggaagcaaatgtcttaggaaacgaagaatttttttttttcaatcctgaaaatttttagtgtttttccgtcgtttttgtttcgctttagtttaatgccattcgtttggttttctgaagcacgtgattgtttgtttcccgagaaaatatctgaggaaatggaagaaaggtctatgttttgagaagtttacttttttgtttttaacgtctcgttcttatttctttcacgcggaaatattcgagaaaaattgaaagaaagttctgtattttgaacttttagcgtctttatgttgttttggtttcagctgaattctgcttgtttctgaatttgttcgttttctatggcctatgagttccccgacgtagtatctgtgatgatgaaaataaaaaagatttggacttctaaaaaattttttttgccggttgttttcaagaattcaaatgcagtttgtttttgacatttttggttttctacggctaatggtcatttgttcctgagaaaagttttgcattttaagacgtttaatgctttggctttagtgaaatgtggcttgttgttcaatattttctcggtatttattttatttagagtggttcttgagataacaatgaaaatttttagtctttatttattgttcctctagtgaaataaacattgcagcagggtttacagttgtatgtttttgagatgtggattatttatttgatatctttctatattgggttgttggaaatgtgttgtttcaagagtttaactatgccttttcgttgttctgcag

SEQ ID NO: 82687 - DNA, 695 bp, Citrus sinensis
  Intron number 2 from transcript orange1.1g028280m (locus o range1.1g028280m.g) derived from phytozome v7.0 (chr-ID sc affold00030; pos 123621 to 124315 reverse strand)
atcgcagctttcttcacaagtgagtttgtacatatttaaaactctacttttatgatttgtgtgatgattgtgatgatgctttttagtgggttaaaagggagataaagtgagcttctctggaaagttcaattagcgaatcaactgtcttgtaggtcattgggctgagtttctgtctttcaagcattgtcttgaaattgaaaatccattgttgcagccacgatggtgaagtgaaggagccaaaatgttttatgggtttttggacctttggttaagaaattggtcaatagtagatattggtttggtggctgaatcaatcttaacaaactggagaagaaagttttattttgttaatagcagtagcaaatggggggcccttgaccaaacgtgccctaatgtgattgaaaaccactagtttcattgttaatccactcaaacgtcatcaaacaacaagaccctttagaaaatggttgccacaagacgtccaattgtactaaattaatatgggtatatgagctgcaatcatttactgcaagcttcagggaccaaaatcttatccatatgaattatgcagaaatgaaacgacattggttcatgtgaactttgtgctgtaaccaaggagagaaattatatttatagaagtagacactagacagaactcaaaacagtgtttgttttcataattgtgcaggttggcc

SEQ ID NO: 82688 - DNA, 832 bp, Citrus sinensis
  Intron number 1 from transcript orange1.1g026375m (locus o range1.1g022958m.g) derived from phytozome v7.0 (chr-ID sc affold00235; pos 79168 to 79999 reverse strand)
aagaatttggatttattcgcctgtgtacaactctttatcccttctttagtattgcatctaaaatttatttatacactaatcccttagttttgacatagtcttagcattgtggtgattattttttgagaatgagtcatccttctaaaagggttttcctttactcatgggaaattaaatttttttgtgtatcatttttttttcgtctgataatttggatcttcaactgatgtttgattggatctttgtttttttgaggctttttctcatggcatcatgtcattgtgcttacaaaaatggttcattggtggttcaactaaaactcttatcatttacttcttggaaaaaaaaaattgaatatttctgcaataataaaacctctttttcaaattctccattaagtatgttggtgaaagtgtttgtcatgcagaccatcattagatttattttatgctccaatatatatatgtgtatatattcccgctttgcctttcctggttcatgttatttcagattactgggcatcatcttctgtctgaacattttttaatgtttttgaacactcgtacagttgcctttacaatactatccttagcattagagtcaacttctctgaaaaagtgaaggatacatcatcatcatgattttctttgctttaaatcagcattgccttctctctctctctcatatattatgtgcatcagtgaatctttattcttgttgatgctgatttctgagagatttcttactttgttcggtaatttctgcactgtaacagattccattatggtgattcatgttgaatatgcaggtttatcctgaggggactcatcta

SEQ ID NO: 82689 - DNA, 1021 bp, Citrus sinensis
  Intron number 2 from transcript orange1.1g008418m (locus o range1.1g008418m.g) derived from phytozome v7.0 (chr-ID sc affold00001; pos 3813793 to 3814813)
atctagctgaggaagagtcccctcggctcaataaggtatgagcatattcctagtgccagcactccctggggtacacctaaggaccgaccagagacctgttacttagaaagcggccacgatcctacgttaacacggcagtttcgccatatcccaaattgtttggggaagcacgataaccaacgcacgattttcgcggtccatgaggattcatgatcgccaaggtatgggagacgtgggagaaggttctagagacaaggggtggaaacccggaaaaaaataaaaaagaaaagagaaggggggaaactctgtcattttgattttagaattcatttccacaaaaaactttctaaaacattcttctactcagcgattataatcttgcacaaatataaatttcaacatttttcctaaaacctcgcatactgacttaagtatcagagggttttcgcccgaaaaaacaccagcacccctgatatatttttgtgagtgcaggtaacaaaggaggaaggaggttgacccaagttattggatttgcttaatcaaggaaagtaccagaagcggtgtgttccagtcagagtcagtgtaagtgttgacgagacaacctggtcagccctaaagacgaccatatttctgcatcaacacaactactacgtacattcagagtatctcgatgaatggtttgcttatctcgattttatttttgaaggttttgtttttcctgtttttaactgtttgaggttagtttgaattcagttcccatatgatctttagttaatcttttaaaaaaatataattggtagttattgaataagaatataaattaaatcttaaatatatattttatacacgtacatatagcaaaagattataagtaactgagtgcagatcaacttagtactgaattcaagtccaaatctaaagatattcttttatgaccaaagagaaattgagtgtgcctcccctacacaaatagttggtggaagtagaggtggcaaaaatacctgttcggtccggacccgga

SEQ ID NO: 82690 - DNA, 563 bp, Citrus sinensis
  Intron number 1 from transcript orange1.1g010603m (locus o range1.1g010603m.g) derived from phytozome v7.0 (chr-ID sc affold00015; pos 690291 to 690853 reverse strand)
cagcccggcaagcatttttcggaacaagcaacaaggtcagttcttggtacccgagtttgaagttgctcttttttttttttttgaacttgatctgttcgtcaatttgatttacatttgttagcgagaaacatgagtgttaatttaggataattttgcaatttgcaaatctttacttgatgataatgaatggtctagttttgttggtacaagaaaatctatcttcttacacttgaacagaaatgttctagtatccatctaacagtccggttggtgcacctcttcaagccgggctttgtaaatttaccgaaatcatcagtttttggtttctcttttccagtcacaaggttttttagtaggaaattaacagtgtagcctatggctgaaggcattaagaagattagtaataatctagtatagcacttacactgttgtggatgttgttttctttttttttggtttctcccaattgattcacactgcctggtgagtattgctctaattccatcagtaaacatttcaacattcaaagttatgattaatttgtgataatttttgcaggtttt

SEQ ID NO: 82691 - DNA, 537 bp, Citrus sinensis
  Intron number 1 from transcript orange1.1g047698m (locus o range1.1g047698m.g) derived from phytozome v7.0 (chr-ID sc affold00020; pos 54669 to 55205 reverse strand)
caagcttatcaaagacgattctctctctatctacggtactctcttctgttttatattagcattattattattattttcttttttgaaatcgcgttcacccgttataatcgcccgcttgctatttggcggaacactcttcagctgatatggctcgccgttccttttgatgttctggttatttgataatttgcctctgtacttgcagttcttattttcacaaatgaacttaacaattaatgcatttgatctgatttcggttgtttctattttaattttatatcaagctgtgaggatatagcataaagctattctcgtgagaataatttttgctataatttgagttaaaatccaaacttaaatggacctcaaatgttaacatcactatctatcacttgtattaggggcagatagtttttctaaacattcatagcagtgtggtgtatgtaaacctactgccattattcactggatagtagtggttaataaccttgaccaggttcatcaaaaatctcatttttggatgcagaggctacactt

SEQ ID NO: 82692 - DNA, 481 bp, Citrus sinensis; identical to SEQ ID NO: 82027
  Intron number 1 from transcript orange1.1g027880m (locus o range1.1g027879m.g) derived from phytozome v7.0 (chr-ID sc affold00015; pos 246823 to 247303)

SEQ ID NO: 82693 - DNA, 513 bp, Citrus sinensis; identical to SEQ ID NO: 82352
  Intron number 1 from transcript orange1.1g027293m (locus o range1.1g027310m.g) derived from phytozome v7.0 (chr-ID sc affold00001; pos 1125534 to 1126046)

SEQ ID NO: 82694 - DNA, 509 bp, Citrus sinensis
  Intron number 1 from transcript orange1.1g045706m (locus o range1.1g045706m.g) derived from phytozome v7.0 (chr-ID sc affold00020; pos 80322 to 80830)
cccgaaagatttagctgaggcccgttgttgggagtatttgtattccagtttttgttatttgtgaagatatgtcaaccaacatttttcacatacttcataagttagataatgcttattcctgtgtttataattcaaagcaaaccagaagtttttcgccctattatataagtgctatgaactcgttcatttcatgaaaataaagcatgttgctctattttattgttgataaaataaaacttgagaattatttcctacttaaaaaaaaaagaacttgagagtctcacaacagagtatgccatctgatttataagattataaggctttctttagttatgcttgttttttgacaattgttgcagatactttcctgtttgaaaagtttgtcctattgtggctattcaatgtttactcattttctctgttagatttattgatgattttaacttgtttaatatatatcttcaatggttacaggagcactataaggatctcaattccaaaccattttt

SEQ ID NO: 82695 - DNA, 646 bp, Citrus sinensis
  Intron number 3 from transcript orange1.1g034407m (locus o range1.1g032108m.g) derived from phytozome v7.0 (chr-ID sc affold00032; pos 143711 to 144356 reverse strand)
tttcagttgctgaaattaaaagagtaagtgccctttttttttcattattatttctttcattgcataagcggtgttgtctattgaccatgagatatgagataatgggtcggtcaataaccattcaattcttcttgcttcacataattaacatattttgataattttaaatgacagttcgattgattgcattttttaacagccaattgtatgacatttgacatagacatgagtttgtgacacggtgactccacaggattatgcagtgggatgtgtctctatgcagtgtgattttgtgaattcacactgatgtttgcattaatgaaaaccaaaccctttaaatactctggtgtgaatggatttgaaccccaaatctcttttaccatccttagggatcttactaataaaacccactactataagagtcatacacaacaaatacttgtatacatattcgttaatctttgtttttaatgtgtttgctcgcagaagagcagtagttataagcactttacataatataatccagaaaagacaaagagatggcatgtactctgaactttattgtcttgacatggacttactattaactaccggcattgtaacttcttcaggctcagaaagcagagagggaggcatcagatcttaa

SEQ ID NO: 82696 - DNA, 778 bp, Citrus sinensis
  Intron number 1 from transcript orange1.1g039210m (locus o range1.1g039210m.g) derived from phytozome v7.0 (chr-ID sc affold00130; pos 277804 to 278581 reverse strand)
acggtgaccacactgctgtttctgctcttgttcaggtttgcgcattgcttcaattttattttcatttttatttttttattgtgctattattgttttattagtcattaaattagtcttcaatattagcagaaaaaacttttatggcacgttatgtgatattcatcaattcgagatgagaatggagcaatgaactattctgaaactccatgaaatacactgttcaattgattagtgtagcttaacttcgtattcatgacgtgtaattaaaatgaataatgtctttaaaatgaatggacatgtaatgactgtagcatacatatttcccctaaatattgttggatgttactcgttcttaccttggatgggaaaaaaaggaagagttttttaggcaattatcatatcatcaatgtattttttctttaaggattgtgaattattggcctggattttaccaagtatctgagcctccgtattattaagaaaaaatatatacaattatgatcctaggaaaggagtgttttatagtcttttgtctattttggaagaggactggttttagtaactaaggattgtcaattatgggtatgtatttggcaaaatatccaagaaaataaataaataagtatatacacacaaaattttgatcttgggaaggatttttctagtttttctttcttgcacttctataagtttctaattgttatgcttcaatgatctgttgatataatcgttttgtagactaggcaggaattacaagagttgttgttggaatcaggaa

SEQ ID NO: 82697 - DNA, 575 bp, Citrus sinensis
  Intron number 1 from transcript orange1.1g023309m (locus o range1.1g018560m.g) derived from phytozome v7.0 (chr-ID sc affold00052; pos 269962 to 270536)
tccggctcccaggcgaagctctaagcgacccaagtgtatattttctcttccagctgcttcttcttcttctttccgggttttatttttgccggtttttagagtagtttacgagtacccagttatgattttgagcttattgtttgttggggttgacttatttcctcttctcagatttgtgattttatgccttgacttattttatttggccttgttattgagttctttgcttgatccctttagttgaagtcggtaccttgcatctggtacttgatttggaaaaattttattgcttaaatcatgggtttattagatacacttgcttatgacataaatctgcaatcatgttaatctcagacttataagaagaatcaaggacaagccaaagggttgttctgtcccggggttttggagaatcaaggattttttgaacatctaattagaagtttttccgttgtttttcttgttttgtcctccgaatattttcctcatgataccagtcaactaaaattattactttatgattctttttttccctttcagattccaagtttactcaacaggagcttccggcttgc

SEQ ID NO: 82698 - DNA, 475 bp, Citrus sinensis
  Intron number 1 from transcript orange1.1g016018m (locus o range1.1g016057m.g) derived from phytozome v7.0 (chr-ID sc affold00015; pos 1126422 to 1126896)
ctatttctgattctccttctgggttttcttcactggtaagcgtctctctagatcccaacccatttagtctttttgtatacgaagctctgtttgattggaagcttcgatttttagtttctttttgatgatttattaatctgatttcgtgtttgcatgataacaagttataatcttttactttaatttgatgtcaaggattgaaatatatgattgattgttttttgtgtatcggttttgctattaggacatagtgattattatattttaaatataatcatttaaattttatttaaccatttattatttaatagataaaaataaatttgtaattttatttaataatctattgtttaccaatattatatcttctatataaaattgacttattaatacccgcacacatgcaaactatgttatttcttaatttaatggctagatttttgaaaaatattcctcaacaaatgatagtatcagt

SEQ ID NO: 82699 - DNA, 1027 bp, Citrus sinensis
  Intron number 1 from transcript orange1.1g014572m (locus o range1.1g014595m.g) derived from phytozome v7.0 (chr-ID sc affold01482; pos 2142 to 3168)
gaatttgcttccacttctcgttcaagcgcttccaggtgaggcttctaaaaacgatccgtttcaatatctgaatttccgataataaatttttggtttgaagtgatttcatagcttagaatttgtttatttatttattttttttctggttattttttttcatatttatacgggtgaaaaagttggagtggtttagttctagatctgatcataattgtttattctaattattccttttgattattttttaaaatttttttacagctttattatgctaggaaaagaaaaagaaaaggaagcttttaggaacttttttatttattaatctaatttttggtaattgtaaatcgctaattttaggaaatggaatctaaataaaatagtttggagttggctaacaagtaattaatatatatttttttaattttggttattgtgtaaatatttggaataatgatactgcacatataaattatcctgtacatcttttctttgaactaatttttttatttcacctttaaatatttttttgtggcaacaaagagtttgaaccagtagtatgattgaaatatttaatgcaatctactggaatttatgtttttccggttaaaatttattgcaatatgtgagtactgccacttcatttatggaaaattactatttttgggattttacgtaaatttttagttctagttctcaatcttggaacaaacatatatgaatttgcacttatgtatgcatcagaactttggttcaacctttgatggtatgtttgggattgcgttttaatccaaaaggaactaccagttctcaagtattaaagtgtaccaatggtggtaaatactatctaaccaataaaagtgggtgattagctaacattttagttgctgtgctttcaaagttagacggaagcatagaagttctaaatgtcccatgagtgttggaaacacaaaatatgtttctgatgtatgaattttgttattcatattaggaagataggtgtttgggtggtacagaaggcacgacctca

SEQ ID NO: 82700 - DNA, 814 bp, Citrus sinensis
  Intron number 1 from transcript orange1.1g022387m (locus o range1.1g014007m.g) derived from phytozome v7.0 (chr-ID sc affold00001; pos 5362149 to 5362962 reverse strand)
gtaccttgctgcaagaggtatgcgtttcgtcttgtgacataatttttgttatctttgggttattgctgactgttttgaagttttgttatgtgcgctaataagaattagtgctctcaagtctactggttcttggtgttttgctttcttttagtgtttggtttttcattctctgaaatgagttatcgatgcttttgtggtaagctcgaagccctgccaagcagaatgaaccattgtagaaaaagtgaggccttcattgttatgcatttgcggcatgaaaatcttgagatggtgatcggccttactttatatctgttgagctgctctagatactggctttttgaatattcttttttgtttttaatttcagcatgtcctaacaataatgaaatgcacagtagcatagttaaagatctggaaactgcgaaatgtcgttgcttaaacacgatttcaaccttttattttgtttctatcatgctttttattgcttgctgattccaatgctgtatgctattgcagatttgttcttttcaggcctgttcttggcttgttgtgtctttgctctttgcctgtaactgattttaagttgaaccattaatcgttgccttcctatttgtgcccgcaaaatataaagtatcacatcttctttggtttcatcatgtccctttggacactgagacttttcattatgaattcgttcaatgtatatctttatgttttcttatggtacaaaattttccagaaaggttggtactaaacaaataccaaatataggtgagaaggggtgctgatagagcagagatctacagtctggcct

SEQ ID NO: 82701 - DNA, 519 bp, Citrus sinensis
  Intron number 2 from transcript orange1.1g024928m (locus o range1.1g021162m.g) derived from phytozome v7.0 (chr-ID sc affold00015; pos 1397744 to 1398262)
ctgagaatatcactttcgagaattctgcacctgaggttgccttttatttattatatatatgcttgatgagtttacatatttgttctttgatatttttgatgaaaaatgaggcctaagctaattgatgatcttgttatgttagtgagtaatgtttcgatcttggctgatttggtttttggtaaaatggggagacttttttttgttacgttgcacacatactcactgattttttattgtttctgcatatgctatgattttcggcatagggttatataatatgttgggtctcttgtaaaagggcaattttcatgctagctttatgatttcgagtgtccgcaactgcatcgtgctctgttaaaatttgatgtggagatctgggtattattggaggtgcttattttgagttgattataaatgctttaataatttctttaatatgatctttgaagttgttattcagcactctctgtcttcctcattatagggttccggccaagctgtggcaatcagggtaactgc

SEQ ID NO: 82702 - DNA, 582 bp, Citrus sinensis
  Intron number 1 from transcript orange1.1g036652m (locus o range1.1g036652m.g) derived from phytozome v7.0 (chr-ID sc affold00157; pos 68335 to 68916 reverse strand)
ggaaaattgtgccagtactgcactgagcctttcaggttaatttgtttacagcaaccccatttcaccacttttatcttcttcaatatatcttgtttgtgtctagggcttttgcttacagaagtgttaagcctatgttttttattttctttttttatttgttcatatgacatgcatgatctctccttattctgtctctctctttccctttcactctgatttctctgcaattcttgttgactaaattgagagttttgaccagttcttttcattcctctgacaattttagggtttctttcatgttgtatattcacgtatcttgcctgaagcagacagtaaaaaatcttaattcatgtttaattattactatctgtagcactcacatgatttgagttttacttctgagttctaaggttccatactaatgattatagaaaattcatgagatggagaaatgaaagatattaatattagctgggtttcttacatgaaagacattttatgactctattttcttttcttctcttaaattaagttgtttaattagcatcataataatcatataactgtttcaattaccacaga

SEQ ID NO: 82703 - DNA, 614 bp, Citrus sinensis
  Intron number 1 from transcript orange1.1g045895m (locus o range1.1g045895m.g) derived from phytozome v7.0 (chr-ID sc affold00264; pos 183931 to 184544 reverse strand)
cttaaaacagaatcagttccaagcattgtagccaggtaagcattcaactgttgtctagtttcttctatttatgttgtcttatcatgttctccttgtgtttttagtcagactaattgtaggtttcttgtactctctctctattttctactggatttgtgcaattggaaattaaggtggtgtttgcatatccctaagtagacattaatttgtttttctaccgtggcattttgctatcagtctaaattatcaccttttctgtcatccagaggagaaaggcatttcaaattaggaaggatcaagtttctagtgaaccaagaatggcttccataaccactattgttgtcctctacaccaatgactgttgaattttctatgaaataaatattagtttcttatgcagctgctcttttgagcatcagttggtacatgaaacagaaatggaatctttctggggatttccttgaactcaagaaacattttacaatagcccagaattcaaagctgctagctcaggatatcttttttatatataatattaaataagttgttacatgtagggataattctctgaatgcttggtgttgttgtctataggtcaacctcagctggtgttg

SEQ ID NO: 82704 - DNA, 1020 bp, Citrus sinensis
  Intron number 1 from transcript orange1.1g032092m (locus o range1.1g032092m.g) derived from phytozome v7.0 (chr-ID sc affold01062; pos 39813 to 40832)
gaaatctagttgtcttcaacttgcagaatcctcaggtatcgttttttattccatgagagcattgatttatatgtgtaaattaaatgggcaaatttggtgctggcagctgaagcatgtgttttgagtggcagcagttgctgtgacactagtagttggttgactttgatttaaaatttaacttgaacccatcttttttaatgtggaatggaaacaataattatttgttgactgtttttggaattgaaagctatcctaccgtatggaaccaccttcccttgtatttaaaagggttcctcaatgtcatggagcatcctgtataaaattattgtatgatttcttttgttgccagatatttttcttctgattggtgttgtctggaaaagggttatttctcgatatcattttgtttgtgtacaaggaggaatggatactataataaactggtctactgagaagagcttgatgtttgtagatttgccaacatatatacactacagttatagtatgtatttccatgtcttcaatattcctttttaattgaaaaaaatagcaatttggaatgtgtttatttgccttatatctttcaattttatttgataatttcagtcatgctttatctgttcttatgtgatgatgatataaataagatataatagctcctagaaattttgaaatctggctaatttagaaatttgaactaaaggttgggtacaatactatatcttcatacactatcatgagagtttagataacggtttccgcattacctgtattacaatttaccatatatggcacatgcttattgcaacataaaaatggtcaagaggcgatgaattcttgttactatttaacttttttgttgggtatttattgatttccatattttaccttcatgtattgttctttttatattttgtttcacttatttatatctaatatatgcattttcttccgagtatgtctaatcattgtttaatgctaccagactgagttcaagagaatcaattcccctttgaagta

SEQ ID NO: 82705 - DNA, 620 bp, Citrus sinensis
  Intron number 1 from transcript orange1.1g014777m (locus o range1.1g014777m.g) derived from phytozome v7.0 (chr-ID sc affold00307; pos 54203 to 54822)
gcgctatctgtttgtcaggtacttttgactgaattagcttctgttctggttatgcttatggtgcattttagagaattgatccgtgtttctgggtttcatttaatttgttcttttagttgattaagcctatatatgatgaaattgtttttgggaaagggctcattaggccatagagtcacgagtcacggaaatgctcctctgtcaaggagctccggggctggtcctcgactttgagaagcctgacattgaaagcactttcaaataactaggaaatttgctttcatgtttacagtatgggcgaacacgtgagctgcattgtggacaagcacttgataagtatttgtttttggagaatcacttgatatatgctttatagaaaagctctttcgcacgaagaaccatgctgaaattcaacgaaagtagtcttagacaaactgaaagtattggtaatgaatgggcacattaagatgtagtatgttctaatctgtgattagttggtcttggtttgaatgtaacaattatttgaattggaagtagaatcgattgtgaaaataaattaatatggaatgatagttgaatggttgatttacaaatctttatatgatgaaatcatgcaggaa

SEQ ID NO: 82706 - DNA, 696 bp, Citrus sinensis
  Intron number 1 from transcript orange1.1g019977m (locus o range1.1g012127m.g) derived from phytozome v7.0 (chr-ID sc affold00103; pos 71990 to 72685 reverse strand)
agagaataccagaccgggctgacgctgttaagaaggtgatttttagaactttgaaacttctcttttggggtatcctgttacaaggtcagttttatttaattttgactactctgccttcattttgttgtttgatgaacttaaaagtaaaatccaatctagtgctaacatgtttaggctttaagccagtgtacatctatggcacgtataataaaacatttcatcaatttaaagagcattcttgtttctttgtaggcaatgaccagttgttcgatgaaatcatggtttcactttcccattttttcaaaaaattttgaattggaaatggtgattggttgagaattgctgtatatgtagtgaaatgtgaattaggaggtgggagtctatttgcatctctttattttggttaaggttgtggcctttgcattggaagtatcaatcaccattagtaatgatttgatcagctacatgtagatagaatctagttgctattgtgagtaagtgatcgctgctttacaatatctgacaatcacatgaacatagggatgtaatttctttctttccaggaaagtccaggtggtctatcacaacctatcaaatagatagattatcaatcttttctttttcaacctgaaaaagattcatgaagaaatattttgatattaatttgcttcttatcttatcaaggtggcttctctc

SEQ ID NO: 82707 - DNA, 971 bp, Citrus sinensis
  Intron number 1 from transcript orange1.1g006659m (locus o range1.1g006659m.g) derived from phytozome v7.0 (chr-ID sc affold00130; pos 115205 to 116175 reverse strand)
caacatcgagtctctcgtcaaatccgtctacgaaggtctgcaaattcttcatctcctttcaatttatttaacttaattttggttttttggtgctttcttgtggtaccggtcgggtcgggcgggttaatctagtggcattgacctggaattagcttgcacgaaagtactgtttagttatcttaagttccttgtcggattcgtctacgtaaagtctgctgattttaagtttttttttttaaagtttaatcaaatgttttgggaatgtcagtgtcttttctgattcggatcagtataatcgggttgatccagtggcggtctgtgattgtctttctagttccgtcacgttgtagctataaagttttgttgtctgggttcgggtcaaagtagtcgggttgaccgaattgttactatcaaatgctgtgtgtttataaatggtctttatctatttatttatcataattaaaattggaactaggagatgaatattaagctgattctatctaattatggggtcaatgttgccatgtgagtgggccaaactcaccccccgtttggttgcttggaatatagaatgcaataacttcacttgtttgattcttgttcctattctatatccgtttctgtattttagctcatatggtgggtgagccttggctaaatgaattatcttcattcaaaatcaagctacaactacacttgctactatacttatattaaagtcaccttaagaaaataaaacgaggttgttaaaggtaataagtatttttcaaaattccacattgttttggcaattttatttgggataaaagagtcggtacttactatgtacgtgtggcactactcctttgaaaaaagggtgtcctgttgctgtggtttgtggttttgcttttcattaacattgtgggcagacctaatggttctttttgtgcttttcagaggtcgctgaaacagaattgaatttggaggagtca

SEQ ID NO: 82708 - DNA, 473 bp, Citrus sinensis
  Intron number 2 from transcript orange1.1g040637m (locus o range1.1g040637m.g) derived from phytozome v7.0 (chr-ID sc affold00264; pos 188837 to 189309 reverse strand)
ctactattttcccgcataatgttggccttggagctaccaggcatgtatttttctcatttggatcataaatcttcctctcaacttatgcatattttgcttgcacaagggaaaacaatcataacttatagactctttcaagtgtatgattattgcatttgtttatcataatcaagcagaaattagaccgattaaagttattaaagtgttgctcaatgcaaaactttttaagagtgaactttagtttaaatacagggatcctgagctggtgaagaggattggtgctgcaactgctcttgaagtcagagctacagggattccttatgtctttgctccttgcattgcggtaataatcagcatgatgtgtatgagttaataaaatttcaggatttgtcaatgcattctgtagtttgatgtatgagttttgtttgtgtatatttcctgacatcttcttcataggtttgtagagatccaag

SEQ ID NO: 82709 - DNA, 332 bp, Citrus sinensis
  Intron number 1 from transcript orange1.1g047291m (locus o range1.1g047291m.g) derived from phytozome v7.0 (chr-ID sc affold00020; pos 451614 to 451945)
agctctctcaagagaatctcaaagcaattttactggtctcattctccctctaattcatacacacacacacacacacacacaggaggggcggactcatgttggtgggtggatgaggatgggggtgtaccccatatgtaatagaaaaaaataatgataagataagggtacaaattaaaagttagcacattccaaatgatcttacctttagaccacctcttaaactatataattttgattggtcaaataagtttgtattcttttcattctggccacatttgattgaacaagaatcttggttctagcagtgcattttaatttactttttgcaggat

SEQ ID NO: 82710 - DNA, 725 bp, Citrus sinensis
  Intron number 1 from transcript orange1.1g033200m (locus o range1.1g033200m.g) derived from phytozome v7.0 (chr-ID sc affold00129; pos 341225 to 341949)
agtttagaggcaaagctattgccttgcattctcaggtatctatctctctctcttattttttttttcactttctaatagtttttcttttttttttaaatattgattatatcttcattatgcggctcttctttttctactttgtttataatttttaaattagttttatttttatttttaaaaataattgtttaggagaacaattaattagagtcatatagtatggccaatcaaatggatagatcctcttgtgagattgttgattgccggataagaatgttagaaataattattaaatcttaagcaaatggattataagtgggcccgcattgtcatatggtaaaaagttaataaaaattagtaaaatttacccatccaacagtattcaggtgatatctcacagcaatatatatactgttaaatagtcaaaaaattaacagaaattagtaaaattggaccatctaatggtgctcgaattatggaatagaggtaacagagtcacaaccgttatgagtacacgagagggctttgatcaaagttgagcttaactcatcaaagaagtcactgaaagattattattcaggaaaagcatatcctaatacgtatagattttttggtgatttcacttcacaagcagaaagcatttttctggttcgtgtaactgctaatctgttataatgttaatcttgacaggtaattactgaattctgcaaatcaataggagctga

SEQ ID NO: 82711 - DNA, 946 bp, Citrus sinensis
  Intron number 1 from transcript orange1.1g025711m (locus o range1.1g023638m.g) derived from phytozome v7.0 (chr-ID sc affold00015; pos 923562 to 924507)
tcctgaaaaaattgagcggctgaaagctgttttgggtatgttttcattcactcattatgtttgtttttgtgggactggtgcaaaatttgatattgttattgcattgttaaggttcttttacgaaatcaaattgcttgttgtttagtgttttggtattttttatatgcagttatgttttctgatttaagtgctttctctcagttctcatggttttctgatcattttgtaatcatcctcaagtaatagactgtcctttgacattgatttttttatggtatacctatggtcggagtatgtgcttctcggtgattttttttttttgtttttttatatcatcctatcatgttttactcctgtatggtgcatgcattttctttttgcggctttatacatgcacatttgtgtcctattgtgtgctagactatgtgtttttaaattaaaaaaaatcattttatcaataccgtgtgtttcgtatgctcagttgaacatttgtcttttatcaaggctctttattgttgcagcattggaaaagacaccatccagctctatgctgagtctgattttttttttttttttgagaagtactgccatccaaaagttgtaccatattctgacatatggatatgaaagtacagaagcacagctacttgctctgtggtgtctttaactttcgtattgtcccatatttgttgcatttgatgctaattagggtagatcatattgtttagatggcataaaaccagaggatgtgagcgtgatgccggaacagccatatttccgtagacaggctggtcggaaatatcctgcgataacataccagcacatctttgagtgtgaaaaattctctgtaagttactcttgttgagttcctgtgtgcaaaacttcagaaaaaagggacattataaagaatatttttattcacttctgattaatcttccatttgtag

SEQ ID NO: 82712 - DNA, 702 bp, Citrus sinensis
  Intron number 1 from transcript orange1.1g034525m (locus o range1.1g034525m.g) derived from phytozome v7.0 (chr-ID sc affold00326; pos 24192 to 24893)
aaggtactctaattattttgtacattgatgaatagcttaacagcttggaattgaactttttctttagaagctctgatttttaaagttccattaaagccaaagaacttgatcgtgaggatgatatagagaattacctgtaaggttgtttcctatatgtaaaagatcttactgatgtagataaattgtcagttatgataacgtttcgagaaaaaatgaacatcgcaagtcagtttagacatttgtctgtgcttgtggaatgggtgtgtttcttctacggattgggttttattttgcagattattggtcgtttataaattttctgtggggttccattgcttgattaggagctcagttatgtggtagattagtaagaggccctgtggctgttggcatcagaacatgtcgagaaagatatgttaaattgagggaaaaaaaagtttctttatggattatattcagctaaatatttcagttaacttcttggtgaatgtcaacctctttatacttttgattcacttttcagtatatgaaacaatcaaaattatgcaggaaaaagtattatgcttgtgggttttgtggtcgcttgtttatatttggttaatgcttaccatccttttacatggtgcttggtacttgagagcctatctacatgtacagttcttaaaactcatggacaaaacgcttgtttatctgtatacagga

SEQ ID NO: 82713 - DNA, 506 bp, Citrus sinensis
  Intron number 3 from transcript orange1.1g041470m (locus o range1.1g041470m.g) derived from phytozome v7.0 (chr-ID sc affold00015; pos 798240 to 798745)
ataaaatcgtaagcttcattttttttttttggctttaatttgaactttcggattttcctttgatctgttcttagtatcattcttgtttagcttaattactcatatcaattaattttctctcaatacaggtttgtggcaaaaaaccaacggtaatgtaacgatccacgttatagtttcagttttggtatatataaccaatatttaaattagggtttccaatcattttaatgtatcttctccattttttcaactaaagagaaatggagcatagaaagatgcatcaagaccaatgcaagaataattgaagtttggcattgaaattaatttgaaaactttaaaccctaaataagttaaaccctatacaccatgagctaaccgtacgagaacctacaagtggaaaatagcgagttagggaatagggatcgatttagcgcggctacattttccaattatggagtagtcaatttatgaattaatgcagggtctagtcgtagcaaattccaaca

SEQ ID NO: 82714 - DNA, 771 bp, Citrus sinensis
  Intron number 2 from transcript orange1.1g015777m (locus o range1.1g015777m.g) derived from phytozome v7.0 (chr-ID sc affold00042; pos 10393 to 11163)
ctcgccttggaggctcatccgcttttattgggaaggtacagtaattgatagtatatgttcaattcatggtaactttaatttgtttcctgggtagcttgttttcctcttcaattatttcttaattgttcaaacttagttggaactattgtctgtcaatgtttctgtttgattattctagttttgtagaggtataaagagggcaagcgcttagggaaatgaacatcaggatgacaggatcaaatcagaaattagcacatgaaaaagtcctttctggatatcaaatatttaatttatgagtctcctgattgagtttcgtaccttgtatctcagagaatttttatgttgtgcaagtgacaattttaactcgtcatcctatttttttccaaaacgtctagaagtttaacaacctatttcacctgctagcatatgcagataaacctgactcttaaggttctgtcaattttaggcttatgatcactcgactttaattcataatatcttatcttattagtcatgcgcacagggccacactctctatactcgctaactcctttgttttcccttttgggtttcccttgtaatgcttcgatttcagtaatattgttctttctagtacagcaataagttctgttaatggataaaacttttccatcttatgtcatgatttcttaaattttaactgcctctaaaagtttagtccctcactattgcatagctgatggcctttttctcatacttgctttatgctgcagactactttgttctgtttct

SEQ ID NO: 82715 - DNA, 922 bp, Citrus sinensis
  Intron number 3 from transcript orange1.1g033859m (locus o range1.1g033850m.g) derived from phytozome v7.0 (chr-ID sc affold00001; pos 1910429 to 1911350 reverse strand)
aggtgcagagaagaagaagtgaagcctcattcaaggtttcttttagattcatcagtgaaagaattttatttagcttttgttcttctaatattggaattttggttagagttttagacttgctttgaaatgttaactgtactttgtttccaatgagagagttcagttttgtttcctttgtctgtgaaatttgagtatcttgttactcacagttgccagttttttaatcatcgataagaattgattatccattcatgcattatagttgatgaaagatgtgagcattttgtatgaataaatctatttaatcccagtatagcaatctgtagcatactttgggaatctccttatcttctgattatgggaattcgttttcattgctctgcagactacgttatcttgattggtttgaaacacctgatctgccattggttcatgttggccaatgctttttcagatcaatggtttagtgataggtgtgatgaactgatcatcaggtgcttattgattttgattagaggtgaagcacagcccaaaaaaaaatggtgcatttacaaatttgaatttagatgaactagaatgaattggaatgggaattataatacaatggtgcctactaattggtaattggatggacttgaatggacttgaatggactgaaataagaatgaagaatgagaagtagagatgtttgcttaaactgtaggaatcgaaatcggaaagagttgtattgctatgtttattttgtcttgaaatcgaaatgaattgtatcaaggttttaaatatccttaattagttattattgttattgttattattatttgtcacacgaatgatgatgatgatgatgatgatgatgatgatgatgataataataatcacatcattagcatcatcattagcaacaataattgacagtcgagca

SEQ ID NO: 82716 - DNA, 503 bp, Citrus sinensis
  Intron number 1 from transcript orange1.1g023373m (locus o range1.1g023374m.g) derived from phytozome v7.0 (chr-ID sc affold00111; pos 414218 to 414720 reverse strand)
atcgattaagcttcatttctggacgtgtattggttgtatgtatgaatcttcatgagcaattttcaattagttttctgtattgaccttggttgcgagaattaatttaattagggtttttacattttttttttttgtctcttttagcagtatatatgttcgacgaattcctcgtggtgattgtgcattagtgacttgaacaatatgacgatgggcaatttgtagtttgtccctttggtggaactcgtagtgtttctttacccaccattgcgttttcttataccttgtatgtgcgttatcttctatcttgttggttttgattgttaagtttatccactttggcatgattggtgagtttgataagcagcgtgccgtattttgcttcctgttgactgattgagattttgatcaagtgttcagaactttcttctgtatttattggttgatagaatggtagattcaccttttgaagtcattccgttgtcactaaacatatttatgtgcag

SEQ ID NO: 82717 - DNA, 420 bp, Citrus sinensis
  Intron number 3 from transcript orange1.1g034327m (locus o range1.1g034327m.g) derived from phytozome v7.0 (chr-ID sc affold00725; pos 56189 to 56608 reverse strand)
tcacctatttgcaattggatccccctaagagagaggtgaaactcgagtaaaatactttctaagaatgcagttgtagttgtttgctttctgcttgaagcctcttgtgttttttagttaggcagtttttgttataaattatggacaagaaagggctaatgtggtgtgggactgatagattgtggtcttatatgttcaataatgcaaaatgatcaggtgaacaaaatgccttttgatgtaattttttccaatatataatcattagattttgttacctcaattgtctcttcatgatcttttttcagatttattcttcaccataaacaaaataggctcacattaagagatggatgatgccacgttagcctatgtttgttattattttaatctgaaattcttgttgtttcaactagttcgtgatca

SEQ ID NO: 82718 - DNA, 1003 bp, Citrus sinensis
  Intron number 4 from transcript orange1.1g009645m (locus o range1.1g009645m.g) derived from phytozome v7.0 (chr-ID sc affold00001; pos 5585087 to 5586089)
tggtacgctgatttcctttggcatcatatcaataggtatatcccgatctcaagcttgttatgttatttcctgtttggtaataaaatattaatcataattgttgtgtgaatgcagatatcgcatgattgatgtgactggactaagtgcaatttgcttggtgttttgcacacacttacaaaatgttatatgttaatgcatacaggttgttctggtggcaagtggatttattatgttatttgaatcaattaaaaacattatatcttactttatgaaatgtgttttcataattaacttccccataattctcaaactataaatttctcatgattgaaggcatgatatatcagaaggcgccttatggtatcatttttggctgtacttctataggcgttctctcttaagtttacctttcagcagagaatggactatccttttgacctgtttgttgactgttaaaagttttagaatccataatctttttgccagagcatattatttgtataacaagtttcttaataactatttccccattttctggagtcgctcaggttctttcttattgcataaagactagatgaataagattcctattggattgagacctagatgtatatgcagctttgacatttgatctatattctataataatatatgcaaataaatgtttttttcacaatcctccagtgatcattattagttcatgtgctggtggagttgtccaggatttgcatgttatcttgctcactgtttcttctctcgccaccagaaacaaaagcagcttgataacactttgctgtatatatgctgaaatgactatctaaattttaaaggcatgcttacattttaaatcacaatttcatatcatttgttgccaagaaaagaaaaatattataattctcaactacctcaaatacatggtattattgataactttctgtcattctgatgtgtgccatttctaattctcctgtatcatggtttaacaggttcagctaaattattc

SEQ ID NO: 82719 - DNA, 412 bp, Citrus sinensis
  Intron number 1 from transcript orange1.1g027463m (locus o range1.1g027463m.g) derived from phytozome v7.0 (chr-ID sc affold00330; pos 2015 to 2426 reverse strand)
aggatcagctaaggcttgtggctgggtattattattattgttgttttgattattactttgtttcattttattttcaagcctagcttattttttcttttgcttgctcaattaagttttgtgtatttttatataacttactcttccttttttatgcattgactcttcattcctccaacttttagttaaatggtgttttatttcctcattctctatattgtatttaggggtgtgtgtatctaagtatatagaatgcagccctgaaattgactttatttatgtcaaaactaatttttacattaatcattaaatctggaacttagttttcttagttgttattaattcagttgcttttcaatttccatgcaaacaaatgaacaatataggtgtattccctacaagtttgagaagaacg

SEQ ID NO: 82720 - DNA, 702 bp, Citrus sinensis
  Intron number 1 from transcript orange1.1g035697m (locus o range1.1g035697m.g) derived from phytozome v7.0 (chr-ID sc affold08462; pos 437 to 1138 reverse strand)
gatcctgaacccaggtataagatatatccttcgattgtataaagattttccagtagcagtatgcttcctgtcatgtttttgtttcttattttgggcatgcttatttcttatattatcatgatacatttcaaaaaaaagaaagaagttggttcggtaaatatttgggaatttcattcaccaaatgtgtggatttggaatttttatgcctttcttacccctgtctttgtctgcatcttgcattatttactttgtttagtgttcaaggtgaaatggatctatagaatgctttctttccattatttaaacttctggcagtatcaagaatgttgatttaagtgtcattttataggttttaggaatttctgctagtattcgagaattgagattatgccactacaaacatgcattgtattgcttgctgaatgtctatttcttcttcttctcgttttcttctccttcttctcctcccaagcttctcccaggaggatttcatgtttgaatttaccgtttgtcttattagctacaatagtactagctggctgttgccttgtcgggaagttctaaatgagctttcatattagatgaattaacctattttctgtcattatttgatgctttaaataatgtttaatagcttttagacgtcaattaattcttgtatctgtgttaatctccaagtttccttgcgttcttttagatctg

SEQ ID NO: 82721 - DNA, 743 bp, Citrus sinensis
  Intron number 2 from transcript orange1.1g044842m (locus o range1.1g044842m.g) derived from phytozome v7.0 (chr-ID sc affold00001; pos 1587990 to 1588732)
tgtggttggttaattgattcttctatcatgatcgttcttatcaatgtgttatggttgtctgtgcatttttgtattgaatccccttgtggctgctgagaaatctgaagttagtatgtgcctgaattgttttgtacaagataaaaatcacttgtgtgtataatcaattgtgttatatttgacaatgttgaaaagaaactctacacattttctccaaatagatattggacatgttttctttttcatatgagtcccagaagttatgcaattgaagattcaatttctttgcttctcctacatgttttaggtatgtaaatggagcatgaattgcttgtttaatttttcttttacagtgtctgcttgtcatatcaaataagaccaatattatgccatgaaaataggaatagggtatcacaatacatatgctttgccatcagagtgagatcagaatacttgcaatgaaggaaagataaagaagcatgaaagacaaagtattgtgtcattggttcagctttttgctaaacttgcattctaactgagacttaacatttgatgaataagttgtagattgtataagcaataataattccatcttagttcttgataaattattaatactccgtggttcttacattggagaaactattgtgatttaattgcttctttggataccttatctgacagattggtgttattttgtttgcacaaataactgtgctttgtaggaactgcttgaactatttggg

SEQ ID NO: 82722 - DNA, 596 bp, Citrus sinensis
  Intron number 1 from transcript orange1.1g048355m (locus o range1.1g048355m.g) derived from phytozome v7.0 (chr-ID sc affold00012; pos 1720961 to 1721556)
gaggcttcaaggtttttggttgaagatgctcttgaacaagaattcagagattctcattgatattttgtaattcgcctttccttttttttttttgggtcattttattatgatgtttcaagattatttgtgtaatgaaatttgttataccgaaggaaatgagaaatatagagaaccatttgcattttataattttgttcttttatttaattgttcattattggtacatactgaaaatgaagatatgaatttggtttgagaacttagcaaaagttacaaaaggtttcgtaaatttggtatgattgcgattcaattgagagatttagcgaacaagttttgttcaattgtctcaagactttactgtgtggctactaaatttaatcgattatggctctccaaaatttgaattagcttaggctagttgttgatccgaggaattttggtttctgggttcaagcctggatagtctccagtggtggaagcagaacatgtgggcttccaaattagatgatttgatctatctatactgtgcaatatgctccttaaaatctgtcccttgcctaaaaaattcgtacctttttggccttatcagcaatctt

SEQ ID NO: 82723 - DNA, 894 bp, Citrus sinensis
  Intron number 2 from transcript orange1.1g014591m (locus o range1.1g014602m.g) derived from phytozome v7.0 (chr-ID sc affold00001; pos 1120984 to 1121877 reverse strand)
ggattcacttcgtggctggattgcgatctccataggtaaattaaccaacttgtgttgtacataattgtaaattcacgaacttgagtgcttgtaatgtttaattcttctttggaggacatcatgcttgctcttccttcagttggctatgttggtttagtcttcttattttattggaattccacttggtgatctttatctttacaatgaaaaaagaatgttttttacccttggattgcttaccgtgattatgtgggatgatgttatgctagttattaggaattagcaggtcaattgaaactgaaatatttgaatgttcaaaagtgtatatgaaacacattcaagctagggaatatcagatgaattttgttcaagtttatgattgatagtccttggcttctattgtatttgctacacctgctgctagtgttatacttgtatggattcttccatttaaattatttggttatcagcaaatgaacatgagatattgaaaaggttaatcttttgatatctattttagaaatattcttgacatttttctggaatgcatttttatgtatcaatcttgaagataattatgagattggtccagcaccttttgcaaccctaaaaggctaaacatcttttggtttggatttgatttgttacatgtgaaccatgcgacaaaaatctttggagaattaaagccgaattgaagttccattttctatgaatatccataaagtgcattttccttttatctgctgctattctcccccccacaaaaaacacaaaaaatgaagcattcctttctcatatgtatgaactttatgatttctggagattgcaggtggttctgtgttggtttttttgctgtaggagtccaatctagctacccctttgttggtagtagct

SEQ ID NO: 82724 - DNA, 393 bp, Citrus sinensis
  Intron number 1 from transcript orange1.1g014591m (locus o range1.1g014602m.g) derived from phytozome v7.0 (chr-ID sc affold00001; pos 1121887 to 1122279 reverse strand)
tcttccgacgactttctggaaacgtctccgattaggtaattttcgcttgccctgtttgtttgctaggaaactaaccaaagtgagaacagcgaatatgtatgcgtgatagctttaatgagcttaatttaattgattgtatggatctctgtcttaaaataaaaataatgtgaaatcttagctttgccgtttcatcctatttactctgttgtattgtgtccgtgaagcaacggaagatctggctgaataactcgaaaatttatgattgctaactgaatgtgattggtccaagcggccttgtgaaaattcaatctgagcattgtaacattattagaagtctacggtgattattaattcattcttcttatttgattgtaacagtgttttaagagtatt

SEQ ID NO: 82725 - DNA, 655 bp, Citrus sinensis
  Intron number 1 from transcript orange1.1g043994m (locus o range1.1g043994m.g) derived from phytozome v7.0 (chr-ID sc affold00130; pos 48758 to 49412 reverse strand)
actcctctttgtctggctgccaatccagtcttaaggtatcaataataattgttatcatgcagatagaagtttgagaagaacatgtagttctcaaaacactcagtattttagttgcatttcttttgattgttttactgtcactgttcatatctagtttagataatttctgtggtttttgaacaacaggacaatgctataactgtgatattatgaaacattaatgatgagtctactatgttcacttagaaacttgtatacattggtgagtatactatgttcagttagaaattaggagacctgatatcataaacatttaaatgggttagagctatgaaattttttagattattttctcatcttcttgtttctcgctgtgttactttcatacagttttcttagtaacatgttattgagttgggggagatgttgtgatgacgtttgattacactaactcattttgcagatgttggtctgattgggtggatgatgaatctgcaatggaggttgctctgataattgtgtgtgttaaaagctttatggagtttatgaagcatattttcttgcatttgaagtgggtatgtgaaggattttaattggagactatatcttacattgtatgctatttcttgttatcaggagatcctctgtgatacaa

SEQ ID NO: 82726 - DNA, 830 bp, Citrus sinensis
  Intron number 3 from transcript orange1.1g018153m (locus o range1.1g018153m.g) derived from phytozome v7.0 (chr-ID sc affold00093; pos 395656 to 396485)
agatatagcattctttggacaagcaacaacattatgtgagttttcttttcttaacaaacttgtttctaagggtacaataccctacagtctgggtaatatactcgacctaattatttgataataccgagaaaatatgacataatacaacttaattatttgatagtatcgagattagagggtataatacctgaggaagccgttgtcgactttttttattattattatgacatatttattcttggatgtttgctttgcttgtctttttttttttttttttgttactttaaatgtgagtttgacaaattaaagagagagagagagaggttggcgtttgcgtgtggaatgtgttaaatgcatgacattaaaacttgtggaccaaggattacacgcctaaatcaatatcgatttttagcctgattttaaggccaacttttcctcttgttttgagatttcccattaatgaggcctaaatttttgtttctttttttttttttcaaactttaagaagttttctttgggaagcaatctttggtcaatttagaaaatactgttgtatattgaataaattaataaaaattcattgcatgatgcaagatcaagagttgggaccacactcaaatggaaattgcattttataaggttctgattatggtcaggctgccaaaataaagtgggtttctaaatcttctagattctaaattagtctgccatgaacaaatttatgattttacaccccaaaaaaaaaaaaagaatatctatgagattaagtataaaatgccaaaacaacccttgacttttttttctttttatttgttggttcaacagattct

SEQ ID NO: 82727 - DNA, 958 bp, Citrus sinensis
  Intron number 2 from transcript orange1.1g018097m (locus o range1.1g018097m.g) derived from phytozome v7.0 (chr-ID sc affold00021; pos 441115 to 442072)
ctttcatcgtcaacattggcgatcaaattcaggtgagttatttattacttcctaattttcttttctttttattttatttttaatttaattccgtcttgcttgattagtcataaaagtgagaagtgtttgtatgtttttatcaattgaacaactgaagcacatggagtgatggaattggtgggggtcgcttttggtgggctaattaatgtctagtcatcaaactttagtaaaaaataagtttatagtaaaaacttcagattctattttttttttttcatttagtcaacaagttatttttcttgtttatccaattgccaattttttttttttaatgagttgtcgatcttccaaattttatagtggataatctttgattattgcatgggataaggcaataaaatgatatacggattattacgcatttcagtctatttttccccaacatttttacacgtgctaccttagaaaagtatttgctctcatccttgtcactttcaactgaattattctcaccgcacctagttgctttagcaacttgaatccgagtcccatactcccatattctcaacgtgtttaaaaatcaaagaaagaaaaagttttgtttgaggccgacattcactccacagatggttccagagaaaaataccagcgtgaatgacgcgtcgtcaagtatacgacaaacttcttaaaaaatacaaatttaaaatgtacaaattacattattaaatatcaaattggaactagacttcgtgattaattccaaattcgcaatgaaaaatatagatttgaagttctactaaaatgttttagtgtaatacaatgtcaaattagaagtaaacaacaatatttagcctcgtgtctatacaaacgtacagacatatttgcatctgatgatttaattctattttaatcttgcatacttttccatatattttatggtgttctcaggttctaagca

SEQ ID NO: 82728 - DNA, 929 bp, Citrus sinensis
  Intron number 2 from transcript orange1.1g010974m (locus o range1.1g010974m.g) derived from phytozome v7.0 (chr-ID sc affold00020; pos 1510257 to 1511185 reverse strand)
ctaaagtatttctctttttcccaaatgcgatagtgtttgatcttgtcttggttatgattctacggattttggtgtttttgggtgtcagataagtggtctggttcctctggtggttgcatttagttttttttttttttggtttaattgtttatttggtagggcagtcagtcttcttcattgatttgattatgttttcacaacccgttgtagagagagcttgagtgcatatggtggcttcttttctatacatttatgggatactatgcagcattaaactttcaatttgctgttaatgattttttttttcctttagttcactgacaaatgatggtcattaatttgtagtgttttcttcaacaatatgctctggaatcacgtcttgaatttctgaaaagctaagcaaattgcaattgcactaatatttccatgtgttggtattgtctttaatataaaaggtacatttgaaaaccattaagatcatcccattataagttcatcaatatcattctcctagaagtctccatggttgttagatgtttattctcctttcttctgtgttggagtcaaaactcatattgtgtgtctgttgggaggcaagtgcagagtaggagttggaggtatttctgataacaaagaaagttgcctaaataccactgccctttcattctaaacatcaagatggctgctaaattgtgtttttagttccaagcttggtctgagaggcgctgggttgagataaataaacaactagggagaaatcatgcttgtcaatttgagtgaaattaagcaacttagcggagataccggaggcaattctttgttagacagttttggtttattttttgctctctttgtcttgaagaattgatttcatcatcagctgtgtgtaacaatcaaagtactgactcatagtgctgtattgtaggtta

SEQ ID NO: 82729 - DNA, 925 bp, Citrus sinensis
  Intron number 1 from transcript orange1.1g011169m (locus o range1.1g011169m.g) derived from phytozome v7.0 (chr-ID sc affold00029; pos 823982 to 824906 reverse strand)
gtgccaagattccggtgcctgacactcgtattccggtatgttattattattatgtgttcatttgtatgtttatgtttatgtttatgtaattgtcagattctttacatgaaagttgattgctaatgatgaatctttgtatgagttgtgtgttggttttgagcttttttacttgatgtttttggataagatgctttgatgaatcagtggaatcaatatagctgaattgggtgcctgaaaaaaacattttcatagcttctgtgtgatgtgttaaggttgtttctgggctgcaactgtatcttgtctgatttaggcgcttgttatttgattttcagtttgctctttgtttttattttttgtgatttgagacccaacaggatcatgtaaatcttgtcctgcgattggcagcacgaatttcaattagattaatagctgcatttgtggctttctactgaatctgaaatcggctgttccttgcttcattttccttttagaaaaaatattttatctgagaattaggatggtgctcctggattgaaaattgacggttgtaattgaattagtcaagcaatttgatgccttttcacaataaatttgaggaagaaagcagaaccataattagataaattgatccaatatttgttcattaatcatagatttgcaagtacacaatgatattcttattcattaaccacaagcttccagagagttctgttatgagtgacaagcgaatgccctattgatcaaaggtcatgagctctgtaatgagtgggctttctttagttgatcaggaaccttgcctgccacagtagaaactccttcactttcttttttcctctgaaacaagaaaataacctttaaatattctctaaacagtttgctttaattttcaggacgtttgcaaacaaataacaaaagaagaagctga

SEQ ID NO: 82730 - DNA, 861 bp, Citrus sinensis
  Intron number 2 from transcript orange1.1g017460m (locus o range1.1g017052m.g) derived from phytozome v7.0 (chr-ID sc affold00105; pos 63900 to 64760 reverse strand)
tctgcagaagtgatatcactgcctgggagacacaagtacttactcttgctttttgggcttttgcttttagtgtggattgaaatcagttctgtatctgccttcttggtgcttgaaaattaaagaagcaaatacagatggggtgttttgttgttaagaattattgggcttctattgagtatgcatcatagtctgttttgtactcgtattttgaatgctcaagttgaagaatatatttaaatttgcttctaatgttggatcttatgataaaagtgcttgattgagtaggataaacacctgcttttcattcccaaatgcatttggttagcaagatgatatgcattgtgtatgtatctaacacaacgcattttatttatacaggctatatttcctcgaatatttggccatgaagcatcagggtatctcctacatctttttcacttgtaatttaaacttattgggtttactgaaggcttgaggatagttatactgatgtcctatctaaagtgtaggatgtttctggaaagcactgaaccctgcataaactaattttaattggacattctaagagtttggtctatgagttagatgccatatattgggtgaaagttgaacataaatgtatcatgcttttacatttgtgagactgagggagagtcatagcaaatcagttgtgtcattgcccgcaaagtcaaagatagttatgttttcttatgcaataaggattaaatcagagtatgtaagacttagagaccacggatgattgcttagtgtatggtgctattagcagttcaatagctgtagatggtttaatgcttctttttatcttatgagaatgcattttgtattgagccagtggccaca

SEQ ID NO: 82731 - DNA, 234 bp, Citrus sinensis
  Intron number 2 from transcript orange1.1g040349m (locus o range1.1g040349m.g) derived from phytozome v7.0 (chr-ID sc affold00032; pos 147981 to 148214 reverse strand)
cagctccagcttcctgtaagcattctctcttatctcttctgtcaaaacaattttaattatttatttgccaaatgcagtactttggtatggtgggttcttttgatcttttcattttgtttcatgataatgaagtgaagcatgtacttcttttttgattactcatatgtgcatatattttgtgtgtcaacttgtgttttagatcgtaataagaaacaagagccacgcgaagaattc

SEQ ID NO: 82732 - DNA, 503 bp, Citrus sinensis
  Intron number 1 from transcript orange1.1g016559m (locus o range1.1g008931m.g) derived from phytozome v7.0 (chr-ID sc affold00246; pos 189229 to 189731 reverse strand)
gcgtctctgattactccaaaaagcttctcaaggtaacaagcacgtataagaatttagtgtttttcgcattttgcagggaattgaattggaagtttaatcttatttcctttttgtatggaattggattggaagtttgactttttaaatttgtaaaaaatgtcaacgctgttaaggaaagttattgagttcattctttactttattggaattcttttggttgcttttcttctttttttttttaatttttctcctctttctatcttttataattctattaattgaatttcttgatagtggcaatcttgtattcttttatccccatttgaaagttttattgggtttctcatggtgttttgttatgagtgacaacattgaatgtttgtgcaaagcttttggccggctaaaagttgaaacatttgttatgagaaacatttcaatttgtttttatactctttgtttccttttttttaaatttgtttggtggctgagaattgtgcaggcag

SEQ ID NO: 82733 - DNA, 624 bp, Citrus sinensis
  Intron number 3 from transcript orange1.1g014352m (locus o range1.1g014352m.g) derived from phytozome v7.0 (chr-ID sc affold00015; pos 334687 to 335310 reverse strand)
attcacatcaaggagaaaaagagtttcaaacagaggtaagggctcattaagaacatataatggatcatggcagcctctttattttgaacagacattttgagggtttagcaactggccttgttgtgtttgtattttcaagagttatacagttcctttgatgagaaatttttttttcaaatctatgatttttcaccagcccattgcctgagagaaccatgcatcacaaattattgatttgcagatagaatgttttattcttatgccccaagaacagttgaatttatttagttggcgaagaatattttgaatttattctgttcggaattgttttaaggataatccctgttagttttcatttaggagaaaatggataaagcaaaaaatctctagacattgcctgaccaacaattttgtgttcctatttctcttacattattacatagagtgttcattttattatggagaagttccaattgtcgcgagttatatccattttttcttcaggtttctaaattagtttcaagattcttctgtatttatgcttgaaccacccgctggtcttccattatattgcttggtgtttttgcaggtaagtctgctgggacgattgcatcataggaatct

SEQ ID NO: 82734 - DNA, 492 bp, Citrus sinensis
  Intron number 1 from transcript orange1.1g014352m (locus o range1.1g014352m.g) derived from phytozome v7.0 (chr-ID sc affold00015; pos 336093 to 336584 reverse strand)
tcttgtgggttttgtttttgctttcggctgataaggtatgtagttcttcgtaatgattcatttgattttttttttctttggctgtgttttagatgtgtttgcgtcctcaattctgttcttttaatgggcgtggctactattggagctttaacgaaagtgtttgatgttaaaagtttgaaacttgggctttctgctatttgaaaatctggataatatttttaaatgtggatgttcaataatgcttcagcctggagatcatgtgatctgtaaatgaataatttggcatctaagagtgtattagtagcataagaagaattaaggcattctgagctgagaaacatattggcaagtgattcaaagaggtttattttcccactgaagatcatgttatatgttcgcagtgttatttatgcttcatattttgacttgctgtgttctttgattcttccatgaaaaggtgttccgacttgtgtgaaattcggttccttgttg

SEQ ID NO: 82735 - DNA, 728 bp, Citrus sinensis
  Intron number 1 from transcript orange1.1g011938m (locus o range1.1g011938m.g) derived from phytozome v7.0 (chr-ID sc affold00292; pos 89238 to 89965)
gcgtttttgggttgtattaattcagtctgattcaggtatattattaccctttttttccattttctttaaattcaactggattttgtggggatttgaattgattgaagctcgaaaaggttaccatttttagtttttgttttgaaaaatttattaagatgtcaaattctgttatactatttagttgactatctttgtttaatttattgctgcttaatgttgaatttattatgttgtgtaatgattattaattaatggttgacaaatttaattctgcttgatggggtctgctttagtttcaaattatgggggcctgttagtggtttatttggcttccaagttgggcagaatataatttaattcaacttgataagtttatttactgcttctccatttttggttttaaaatatctgttctttttattactgttggctacttgtgtttttggtagaaagttaacactttgtataagctatttgtttcattctcttacttgtctgcttgataattatactgattctgtagataggttatatcagatttttcaggtatcctagttacttcggtttcatctttactttttgtcaggaggcttttagatttaatttgtgaatggttgtgcaaagttactgccagttttgctattctggggaaaagaaaaacccaaccttttctttcgtgtaattttgcttttcagctttttatttcaggattttgccctgctgtttga

SEQ ID NO: 82736 - DNA, 921 bp, Citrus sinensis
  Intron number 1 from transcript orange1.1g046367m (locus o range1.1g046367m.g) derived from phytozome v7.0 (chr-ID sc affold00333; pos 53712 to 54632 reverse strand)
tccacgtcggtggtccaccggaagcgtcgactgaagtaagttattttattattattattattattttttcacacttaataaaacaacagttattaaactctgttatagatgtaggataaaattcaaatttgaaagtcatccttccatttgcttatctaaattcaattgcttcaatgagattgtcttttgtcttgtgactttaacctgttttataaactttatgtgatctctctctctctctctctctctctttttgtaaattttattttatctagtagaaacttgatgatgataatacaatttgggaagataaagaacaaactatcatgtcactctttggtgtttgttgtgcttttctctttttttttttcttttttttttttgcgttttctaatttgctacactgcaaattttaccattttgaggtttattgggagtctaaattgaattcatattataagtatttagtaataagcattcagtaaagctatcggcaaacaaccttttcctgggatttcaggaacacaacaatctagaaaacaagtagacacggaacccttttgctgtatcaagcagaggagaagtcgggcaccctttctccacagaatgggccatccactttttcatatttgtgggaagggaatttattgttgagcccttcagtgagggttttttttttcagggcatcagcccaccattattacattaagttggtagctgtacatattaatgcagatagatgatggtaaaaatataatggattgttagcatcccttttcagcttatttaacctttttatatatgcataaagttctcaatggtttttggtttgtttctaattaaggcaactgcatatgctggttaattgttaatgccttagcccttaggtcttcatttaatagatggaggatgatcaggcga

SEQ ID NO: 82737 - DNA, 1004 bp, Citrus sinensis
  Intron number 1 from transcript orange1.1g042472m (locus o range1.1g042472m.g) derived from phytozome v7.0 (chr-ID sc affold02009; pos 10249 to 11252 reverse strand)
aacaatcacttttagaacatcatcgtagtgggagggtaattaaattgattggacaattgagatatcaatttaattaacgatgtggtacaaaggattgtgcagtaaagaaatcaatatggtctcggtcgaattattattcgaaaacattatcccatatagcatacaattatggaggtcaattccaatcttttagtggagtagatttgtaattaaataattgggcgaatttaattatatgcctaattattgtagccactattgtatatacctatatgatccctgggttagctcatttaattgaatgcaccgctacttgattaataagtaagataactagctatttgggttaaaagcctaaatatattatttagtaggagacttcatataatgtgcttgtgtctaaggggtcttgtgttattttacaaggtgggcccctatgataagaagaagcaacgttacttttgattttattatttttaatttaaatcaaatttgatttaatagaattaaaaatataaaaatatggagtttagggttttcactaagatagagatataaaatgacatattttctcccaaaagaaaagaggaggccacattatacagatcagagaaaaatattttctctctaattttgagagaaaaaatttcttctgctggttgcttttagtggtgataaagacacccacatgttaagtacaaatcaaacctgagtcataacctagaaaatcattggtgacgggtcgtgatctaacaagcgtggtggtggcagattgtgatctaacaggcgtggtggtgacggatcgtgatttgggaaggctggatcaatttcaattattcatcttctcggatagtaaatgtatgattttctagattatgtattcctatatattgtattagatcggtcctaaaagtttttataaaaatttgaaaaaactaattttttttgcaacactcacaatctgggaagcctttttcattcggccacccctccattgaagctgc

SEQ ID NO: 82738 - DNA, 922 bp, Citrus sinensis
  Intron number 1 from transcript orange1.1g034647m (locus o range1.1g034647m.g) derived from phytozome v7.0 (chr-ID sc affold00029; pos 619156 to 620077 reverse strand)
gtccgtaccaccggcgatatatacgaagtcagtgagtactccataaaccctaaatctttttattattatcattaatagacgtgaaagatgaatgaaaatgtgatctgatttatgaaatttgaagtttttttgttatttattgtaattgaatgagtaatttcgactgccagatgatgcgtgggacattgcgcaagggctttgagtcctgtaactctataaaatcaaaccaacgggtctgtgaaaaaaattttaagtttacaatcccttctgatggcagagtctatatgattttatattatgcactatttgtcatattatctgtttttctccatttcacattgttttgacagcagctttagatcgatttgatgttaaattgcatttaaactgccagatgatgattgagatattgcgcaagggctttgaatttcattcctaatgaattaatgaaatattaatgatctatctcttctgatggtagattatcatttagagtggcatactgaaattcggtgttgatgtattcttcatcaatcaacttttgaagatgtttgatattctctaagtttttattttggggatataatcacagttactggcttgttcttcagaaagtctatctcattctatatgcttttatccgcataatgatgagggttgtgtaatcaaatgattcttttttgaatggtgtaactgaggtgcattggtgcacattcacatttgtggttggatgcatttgggttactgttggtgcttgagtctttgatactttccctgcttttataccacttttccaatatcgggtgcaagtattagctggtaatgttacagttttactatcaggtctcactaatgaaaatcctaaatgttagttctttgaaacataatcaggattctggaggtgtttttcatttcaaattcg

SEQ ID NO: 82739 - DNA, 630 bp, Citrus sinensis
  Intron number 2 from transcript orange1.1g003747m (locus o range1.1g003142m.g) derived from phytozome v7.0 (chr-ID sc affold00281; pos 29296 to 29925 reverse strand)
cctcttactcaagtacttctattttgagttttgtcaaattttaagaacactatcatcccttttcactttatataatatgctgccttatattttgttgaatttcacttccagataatgcaattgtttgttaatagatcgttaattaagtcaataatgcaagttgttgatgaagatggctctatcaaagattctgcagtaggtttctttttcgactcaattagattctatattcttcaaggcttacacaattttatttatctgattttttttctttacctctttatatacaattttatttatctgacttttttttctttacctcagagtcctgccttgaaacaatctcgaggccaagtgcagatgcttgaaagaaaggtcctttttatatgaatattttgagttgctgcatgcttttacattcaatgatagtagttagtcaaggccttatcttaaaagagtactctttcttttcttagccatcaaccaatgccaatggcattattataaagatagcctctacctagcacgttgtttgttttacttgaaagtacatattttctatcaattttatttataacttactcaatttttaacccttgtcattgcttcttcatgcagttatatcaattg

SEQ ID NO: 82740 - DNA, 892 bp, Citrus sinensis
  Intron number 1 from transcript orange1.1g025018m (locus o range1.1g025018m.g) derived from phytozome v7.0 (chr-ID sc affold00001; pos 3031799 to 3032690 reverse strand)
cacttacagagctgtttttgcttactctcaccgtattttctatctctttctttctcgtcttttgtttgtttgtttgttttggcttacagattacgattttctttaatctttcttgaattttgcaatgtgggttcgtcgtttaatactcattcttttgtttttgcgtttaagattttttttccttgtatttgattcaattccaccgctgtttttggttcaattttttcctaaattgcctttatttcattttaattcttatttgcaccaattcttcttcttctttttacccttttgggttgctttttttctttgtttttccatatctgtatattatgagggctctttctttcagcttctgcaaagcaaactatccaatggaagctgtgaattggctcccactgcttcagggtaaccaaaatgcaaaacagaattgtgaaatgaaagcatgtttcattaaaatgcctgtgcagatttatgactactattgtccattgcagttttttttttcgctgattactaagattttttaagttgactgtgcaagaaaacatctatgctattggatcatttactatttacagttatgtttcttttggtggctgagatggtgggagacctaagaatattttgtggatttagatttttctcttattattgtgccttacataagatttggataatcttttcccttctcaatcagatatatatcccattctgatgcagaattattggttaatcatccgtaaaataatttgtaacagtatcttatggggtggagtttaaatgttcttggtcgattgataataagatccttgtgttttcaacagattattttgtgattgaatctactctaatcatgagttctgttgaatatcaaaccatacaggtattt

SEQ ID NO: 82741 - DNA, 889 bp, Citrus sinensis
  Intron number 1 from transcript orange1.1g020816m (locus o range1.1g020816m.g) derived from phytozome v7.0 (chr-ID sc affold00015; pos 1263375 to 1264263 reverse strand)
tcttgatatcttcgagatttaccgacggttttgcggtaaattacaaaatttcacctactttttatttttgaattgggattttacagattatcttattcttgtttcttgattcgaatcacgcttctaattttttacttggaaaattttgattatttgatgtaaagttttcatttttatgcatttttgatgtgggtgtctgtgtctgggagtttgatgggtgaaggatttgatcttgtgttttctttagacaactttaggggttttatctattgggttgctcagtggctgtgcaaatttagttttgatgagctgttgaggaacttgagctttttattccaatcccgcttgtagtttttttttttgggggggggggggggggggcattgaggtatatggaggtctagggttttgggtttgaaattattcctgatttattttggttttgtaggagggatagtgggttgttgtgtatagtttcctaaatcccgtgcttttgattgtttatgactttttctgaaaagaagtaaatagaatttgagatggtttatttaatgtagagattttagaaattatgatgtggtatcatgcgttacattttgtagcagttgtcaatcattgatttaaattagttttgtagtggaatgtacgagggagtggatggttatgtatctttgcaaaagcccgcgcttttgattgtcaaagacttttttggaaaaagagaatagaaggcacttttttatatgctgttaaattaaagattgttgaattaattgttactatgcgttaaactgtttagcggctgccattcattgttttgtacttgttgacgagaaagaagttgtcatttagctgattctttgaacttatattgcagaaattaaatcacaaa

SEQ ID NO: 82742 - DNA, 784 bp, Citrus sinensis
  Intron number 1 from transcript orange1.1g001879m (locus o range1.1g001879m.g) derived from phytozome v7.0 (chr-ID sc affold00015; pos 1610458 to 1611241)
gtcgccgaaaaccaaagatcgcgttactgaagaaggtccgatttcttttctttttttttaattttatttgtttctaaaaatcttaaatcttattatgaacaagttttttttttttttaatgtgattatagggagtgatgatcatattattgctatgtcagcattgagaaaggattgggacccactattgggtgaaatatatcgaaaagaaaaaaaaaggaaaaagttatgctttattttggtgataatagctctgtcttgctcctcaaaattgattgagattcatctaattaagctagcttttcttttctttctttttttctttttttgttatgttgagaagctaagtgcgtccggatccttttttgatactgatatggcaacgtgtgattggtcatttagaaaatagaaatgtagcttttttctatcagtagcattgtgacgccaatgctacatgatggaggagtcggtttagctccatgaagtaaacaaaaaggattaggatcctcctgagcttataaaaatatcaaataataatttataagcttgaattttgcttagtagaagcttgcatttatgattttagcacattcgaagtcaattgcagacttaaaatctgcaaggtgatatcataatgatgaaagtcttgttctctgtatcttctgaatgaggtgacatttttgttttaaaattaccgtggtcaatttgtttgatacttatcctgttgtttgggtggtactttgattttagacacttcaagttctcagaattcatctggtccagat

SEQ ID NO: 82743 - DNA, 671 bp, Citrus sinensis
  Intron number 2 from transcript orange1.1g033678m (locus o range1.1g033678m.g) derived from phytozome v7.0 (chr-ID sc affold00103; pos 228173 to 228843 reverse strand)
aggtgcactagcaaagacagcaatcagcgtatcaggttttgctcttcaattttcttgaattgctccctttttacaattagctgttatattatttttaaaaaaaattgaattatttctttgaattatagtttggttcgtgtccctaatccatggtaattagaattctactttcgtgttatgaaacacttgctatataatgctatgtggcatgcccattttgaaaaaatgagtgtgcaaacaaatcatgccaattatgattttcatattgaaaatatacacggctgaattgcaatcaagaaattcagaaggaatcagctgaatccgtttgaattcagaggtaagggaacttccatgcgagctttactagtttgtttatttacttagagaaagggtttttgtttgaagtgcaatgaaagattgaaagatccaactttttggtacaccaatactaacttttatttgaagggctataatttatcatttgcacacatgcatagaaacggaaaaagataaagtgatccaaattcgggtgctatgaatagaaaatcgtatgcggaaataattgaaatgtagttgtacacgtaagcaatccattttttgtgcttgctttcataatgttaggaactttatttgcaggaaccaatcatctttttccctgcagctcaaataga

SEQ ID NO: 82744 - DNA, 1032 bp, Citrus sinensis
  Intron number 3 from transcript orange1.1g039468m (locus o range1.1g039468m.g) derived from phytozome v7.0 (chr-ID sc affold00001; pos 3887302 to 3888333)
ctcaaaactgtaagtataccattactaattggatgagttaatcgttatattgataattctaccacggatattgacccatctttatttctttttttcttttattaatatgccattactaattaattgttatattgataattctattatggatattgacccgtctttatttcttttttatattaattgtggctctcgtcaagtgaaaaatagataggtagctagtcttattgcttgtcttaatactaaatatgtattcgtctaattggcagatattgataagagaaagattgtaaactagatagttaaagcatattcctgcaactctaattggaatgatttaaattcgggtgtagcttcaaagatgggtaagtcattaacaattaacctgtcattatccagccagtatagattaataactcttcccaaataaagttaatatgtaaagcctcaacagatatttattctttcatattcataaggaattgtttccatagaccttgaattagagtagtgaaagtcacaaggtcatattatttatctctgtatgtcataaaagccatacagctatggttggaagctgtattcatgttcagcctttttgattcccaggactgcaatcttgaggtagtcaaatcccaactaattcaaccaaaaacttaatatatgatcaatggacccatcttcactcatatttctgtaacctttagaacaggtcaaactgaaacagaattttagatgcagttacaagagatacacattactttcttggctccccttatggtagttagttaaatgtaaatcacacagttagattacaaaaccttggatcaagttggagtgacccaatttttgtaatcaaatgtccatattgttctgattgcttatggagataaacttcaattccgtccaattcggttaagttgagtttctctgttgtcttctgtgtgttgctatatcttcacggttgtgtgacatgaacaaaatggttgttttccagcttccggagtcacctaatttcaaggtaagattgac

SEQ ID NO: 82745 - DNA, 806 bp, Citrus sinensis
  Intron number 1 from transcript orange1.1g008556m (locus o range1.1g008352m.g) derived from phytozome v7.0 (chr-ID sc affold00283; pos 208612 to 209417)
gtcctcctctgcttcttcgtcttcttcttcttcaggtaacttttctacttcctgtgtttctttcttttgtttttatctcttttcatgtttcttttgctacccggttggtggtgtgaggaattatttatcgctttcacattctatgaaatttctgtagatgatgggtagctgctatgaattttcattttaagttgatgcacactttatgttcatgtaccaataaagggaaatggggaatctgaactatgtgttattgggtttgcattgtatttgtttcactatgtgtagtttgctgcataagtagatgcgtacgataaggtatataattgcaaacttcaagagagtgtggatttttaatccacagtactgtagtaccaaacatacccttagttacagtctcagttatattttatcttattgttctatttatgatgatgagtctattttaagcatgatgatgggtcgatatatttagaaatgagattttcacaggcgatcttagtgtcggatgttttgcttgctaattaattgctatagttgtcttgagtgtgtgcatgtgttatgtactttgattgtttggggatatagagatatcctctatttttgatgaagcaaatgataggatttgtttgaccattttaatttgtacatcgataaatgtcttgatcttctgtgagatacttagagatttgtagtgattctactttttagataacatcttgcatgtttatgtgcataacatagcagttttgatgcataatgagcaatcagcccctgcagttgcttctgttccaacttcttctgta

SEQ ID NO: 82746 - DNA, 272 bp, Citrus sinensis
  Intron number 3 from transcript orange1.1g009081m (locus o range1.1g009081m.g) derived from phytozome v7.0 (chr-ID sc affold01282; pos 14392 to 14663)
gtataacactgcaggttaactttctaaccatgaatttttctttgttttctttggtcagcttttatcagtaagtattagaactaaaacagttgtaccgattggataaggagcgagagagctttgatggtatgtttgtcatagtttagttcatattatattttaatgatgtgtgttgagtgcttccattgttttctttcataataatcatatcatggaaccttcttctttaagtaattatagggttactttcctcacagaatcaaggcttttgg

SEQ ID NO: 82747 - DNA, 701 bp, Citrus sinensis
  Intron number 1 from transcript orange1.1g017413m (locus o range1.1g017413m.g) derived from phytozome v7.0 (chr-ID sc affold00201; pos 83012 to 83712 reverse strand)
gaatcggccccgagatcgccgagtccgttaaacaggtattctctgtttgtatttttattataatttgcttgtttgactcaatattgcttcttcttttttttttgaataaataattgaatctgtgctagttcaaattacgtgagttatttactactatgccacttcaagcagatgaaatcttatgatatgattgtgactttgaagtagatttagcaactttttggaacatggagtgagcttcattatattttacttcaattttcttctgccatattggcaatttgaagtgtatgttgatgtataggaaaagaaaatataaagattttctgtggttaggcgtccaaaagttgtagtccactcaaaggaaattgacgtaaagtttgggattaggttgttgaggatgagctttgaccttagtttgttgatgggaaaatgttgtatattgttgggctgaatgttttttttttcattgtttcattcttttaaatgtaaatatgtatctttgcattctgttcccaatacatttttttttttttttcatccatgtattcttttaccctaaacttttatttttgatgactctagttggcaaaattaagcgtatctaaggagtattaattggccataatgtacttaaagttgtgatggattttgatatttaatctgttgcaggtatttaggacagctgaggtgccagttga

SEQ ID NO: 82748 - DNA, 333 bp, Citrus sinensis
  Intron number 1 from transcript orange1.1g010799m (locus o range1.1g010799m.g) derived from phytozome v7.0 (chr-ID sc affold00032; pos 67801 to 68133 reverse strand)
agaaagctgctcaaaggttagttcgatacttgtgagtaaattaagcatgtaatttatgttcaattattaatttatcaaaaatttattaaacaattcattaattttcttcttgaaatcatgatgatttgatattgatttggttccaccacacctgttagaatacaaattttacatttctcactttctatatgcatgcgtgtggtatctatttcttttctgtttatgagatagacaacacgcacgcttgcagttgcatccactcacttttgatcgtttctttgtttaacataagcatcagctttagctagctgagcttacaaaggagtttgagaa

SEQ ID NO: 82749 - DNA, 611 bp, Citrus sinensis
  Intron number 4 from transcript orange1.1g017397m (locus o range1.1g017397m.g) derived from phytozome v7.0 (chr-ID sc affold00236; pos 70095 to 70705)
agcgtatgctttctggtctatgcatgtgtgcatttttttttccttttttcttttttcaaccttctgtttcttaggtagcttttccatgcatcaaaatacctgcaaaatcagctataacattataattttgaaccagttagtgtataaactcttgaaactgcatttgcgatgtccaaaactttattctaattcaggtatccagtctttgcacttccggttaatcagtttgaaatagtttcattatatcaaaatggaccctttattgatgcatgttttgttccaccacacagagcatttggtgatgccagacccattggtttcacacttacaatctaggatggagaagctgatcaaaatcattatttttgaagtttcatctttggaataaaaccaatttcgatttggaatctttccaaatacaagtatatgaacagtgtctgagtgtctaaatatcaccaaaatgaaaatatggcaacagggtttcaggaagaagaaaagaaactgaaagattaaagtccggtttatcatgtaggtaactgacacctcatctgctttgactaacttgtcttgtttcaggttggataccttcttggtttaggggatcggcaccc

SEQ ID NO: 82750 - DNA, 489 bp, Citrus sinensis
  Intron number 3 from transcript orange1.1g032306m (locus o range1.1g027389m.g) derived from phytozome v7.0 (chr-ID sc affold00546; pos 54962 to 55450 reverse strand)
ttcagtctttaggaacagttaagttgttttccttttttaatttagcgctgatgtgtgtttgacaaaatgatgcatttttgacatttagccttattttgctttcactttctcacatatttacttccataatttcacaatatttgtgcatagtctggtttgtagttgtgcaatctgtccattcccgttcattaactagcctacaagatctgctctttccatatgtctatttcttgttgtccatcttctttcttattgatggatttaaaactgactattgataaacaataatatcccattcggaactcactgtttactgattctgtaaagtttgtttcagacttgaggtcagctggagccttgtctaaaatgaccttctttttgatagtccatttgctttgaattattagatctctgatcagataccaacttcttgttagacatgattgaagtgcaggagttttatcgtctccgctccagccttaaagctaa

SEQ ID NO: 82751 - DNA, 261 bp, Citrus sinensis
  Intron number 1 from transcript orange1.1g018578m (locus o range1.1g018578m.g) derived from phytozome v7.0 (chr-ID sc affold00217; pos 116375 to 116635)
tatatatatttcggtggtggggagcaagtacataggttttattcttaattttaaaacccaatctaatctcaatctccttcacagtctctccggtaactctaaacccagatcagttttcttctaattcattcaaaataacctaaaagatttaatttttagctaattttagggttcttttttgtttttgattaattaaaaaaggaaggaagtttgagctaattttcgatttttttttttagattcagcagctgtttagttcgc

SEQ ID NO: 82752 - DNA, 888 bp, Citrus sinensis
  Intron number 1 from transcript orange1.1g021864m (locus o range1.1g021864m.g) derived from phytozome v7.0 (chr-ID sc affold00021; pos 1456174 to 1457061)
ttcctgttgttactggggttattatcgctagcggggtatgtatgtttttcttttttctttttcagttctcttatggcgagtgatttgggtattagggttgttttgaatttttattcgtcttttctttttgttaaagttgattattttattgggtaatttggaattttggttatgggtttggtttaaattaagctttttgttgtgattcttattttagcggggcaaagattaaacccagattcatcttattacaaagtctttaacttttgttttagagctttagtttttacttcctaagggaacgacaattgctttgtactcggttcagtttttagaaattagagctgaaaagaatagcaatacaactctggtttttagatgtagtgttacatgggccttgttgatactagagcttcgcattagatggtgtaatgcaattgcagaaagttcttagtgcttctactcagaggacctctgatcttagggacacttttttcatcactttgcttgccagatctttacctttcaaccagtttgtttggcagccaaattcagagtttttcacttgcgatattcttgtttgattaatctgactatagattgtattgatgatcatgcaggcagatgcaggatttttcatctttagtttgtagtacttttaatttgataagtaaagtcttgggggtgctttagtattcaatgaaatatatatggaatttggtcagagagtagttttaagttagttcaatttatacccagattattatacatttctgtacgataatatagtttatatccttggagcaaattattctgctttctcatcattttcctctctcgtatgtggctgtagggtgaaccaagtttccacttgtttggattcttaat

SEQ ID NO: 82753 - DNA, 638 bp, Citrus sinensis
  Intron number 1 from transcript orange1.1g023135m (locus o range1.1g023135m.g) derived from phytozome v7.0 (chr-ID sc affold00008; pos 1368963 to 1369600 reverse strand)
ggtcacgcccgtgctctcgagcaagccaaaaaactgtataaaatactataaatttcatgtcttttcctgtttgtttcatgagaaacgtttttcccgctaaaagttttcattgtttcttcgctcaacagaacccaagaacaaaattatggttaaactactgtatctcttcgtgtaacttggtttaatcttttaactgttattgcttaatttcattaatttaccttgttttgtacgcatcaaatgacgaaatctttttttatttttgttttaaattggtgggcttttgattgtcaaaacttatgcggttcattttattttatttatttctctgggtttttttccatttcattctttctgtttctttgtgggaactgtgtatcattccattcgtagcaaaaagaaaaaaaatatcgtcttttctggttctcagttctcgtaatttgttatccttattcgactttctaaatgttatgagttaagtttgataaacgttgaagctataaaagcaattccgtggaataggtatttgagtttaatacaattcttggcacagcctaaatgagcctattagtctactcaatttgatttgtaattcttggctgaaattgtaggtttccaaacacttacctgcttgttgg

SEQ ID NO: 82754 - DNA, 776 bp, Citrus sinensis
  Intron number 2 from transcript orange1.1g028159m (locus o range1.1g028159m.g) derived from phytozome v7.0 (chr-ID sc affold00029; pos 343374 to 344149)
aagccgagcagcaaaagcaagtgcaggaatttcaggtagtgagccaattagtttgctattgatgcaaattatattcggtactgacatagaggctcgcaatgcggttaccctttattgcatcctcttggtttgcattgcatagccgttttctttggaagatgatgtttgtgatatggcaattgaaattggaagtggttcaaggaaaagctgtagagtggaagtagtataaatcttttagtaatgccatggccttcttgggggaacaagtttagagtttcttgtgtttgattattttatgaggttgtggagcatctgattataattgttgagaatccattactttagcttgtgttgaggaagtggtcattccaaaataatggatggtcatggcatcctagttctatgatcttaagttagtcaattgttatcaagtcatataaatgtcttgcaggataaacatgaatctttcatcactctttaagatgctaggagaaggctgaggggaaaactttaaatgttgacatcaaattatggttttattaagcataaaacaactacttattaacatttttgatgattgaacgtgcgaactttataatttttgttctgctttgcttattaattgctctagatcattgcacatcgcactacctttattatgtcatggccatacaacaacagattggaatatgtatctgtagtatttacagctgttgtaatacatgacatttgataatctttgtgtatatgcaaatatgattgattattgcaggaag

SEQ ID NO: 82755 - DNA, 758 bp, Citrus sinensis; identical to SEQ ID NO: 82162
  Intron number 2 from transcript orange1.1g015871m (locus o range1.1g015871m.g) derived from phytozome v7.0 (chr-ID sc affold00122; pos 149154 to 149911 reverse strand)

SEQ ID NO: 82756 - DNA, 702 bp, Citrus sinensis
  Intron number 2 from transcript orange1.1g008844m (locus o range1.1g008844m.g) derived from phytozome v7.0 (chr-ID sc affold00165; pos 115909 to 116610)
cattgcgtttaatcgtcgtggcactctccttgctggtgaatctttctctctcctagcttagctcagtgccattttagttcttttgccacttttactttctgggtattttcattttttcatagaagatttttgttttttgtgtagagcgatggaggttcaggtgtttgatgaaataacattttgagattagcttaaaataagaatatgacttgttataacttgtcagatttcaaggatttttatgttggctggattacttattttggaaaatatgcagtgaatgtagtgatctaatgctagctagcagatacattttggcttcgtggtggaatcacagctaatactgtttgcgagatattaattttcttgtattggccaatacttggttcttgttgtaagaaattcactgagtgtgtgtcaatataaaaagccttagtaattgtgaacccttttcattgaaagctagatttacaagaatttcagtaaagggaattatgctttgtaaagtttaaatgagcaataaatgtggatgatagtttaatggttacatctttaaattaatgaattactgtatattattaaggctagtttagttcctatatttctgttcagtaaagataattagtgggaattggtcggatatagtccatgttttttactgctcaccgtctacacttgttgtcatttttctttgacagctgg

SEQ ID NO: 82757 - DNA, 729 bp, Citrus sinensis
  Intron number 1 from transcript orange1.1g043944m (locus o range1.1g043944m.g) derived from phytozome v7.0 (chr-ID sc affold00001; pos 2693649 to 2694377 reverse strand)
ccctggtcaagcacatcagagctcctgttcatctcgtaaataaactttctgtttaccttccgatcaattctttcagtttcttttactggcttaactgacaccgtttgatttggttgactttgttgcatggcctctttattctgaattagagacagatctgaataataattggaaattgaattgtgatttggttcagtttactacatccgacaagtctgcttcgctttttctcaattatggaatttcaaatggtgtatttgcaggcttctcaaaaaaaaaaaaaaacggtgtattgtcagggattttttaaattttattttgaacttgataaactttcttctgatgaagtttactgaaaatttcacgtatcttttttccgcttggttaccaagaaaatgcatgaccgaaaagcctttttttttactaaaaaattttcatcatttaccagcatgttacgaagggagcctctgagttacaataattgtaacatacatctctcatgtgaaccgcacaaaattgtacgatccataatttatgtggttcacatgagagatgtatgttacaattattgtaacttagcatttgcctgttaggaattaaaagaataaacaaaagttaagtcacttttttctaagatcgccttctattttaaacctttgatattttgttcggtttttttgtttttttattttgtttttgtggactaatagtgtggttaattgatcaggt

SEQ ID NO: 82758 - DNA, 663 bp, Citrus sinensis
  Intron number 1 from transcript orange1.1g023806m (locus o range1.1g022738m.g) derived from phytozome v7.0 (chr-ID sc affold00029; pos 115627 to 116289 reverse strand)
tttgatttcaattcattcgagctgcccgctccttggtactactaaaattctttgacttttggtttgctattggtgtggtttagttgaatttggtcatctgttattttcgttaggattggcttttttatttcttgaagtgaatgctttgattatgatttttcggtagttttctctcacaatctgattagatggagttgaatttgcccttaatttagcttttaatcttttaaagtaaattttattttcttatgcatgaatttctttctagccatttggagtctgtttgtagcatcggtgtttctgcttaattttgaaaacatagttgctaaagtgtgtagtaaacacccacattttactttgcagctaatgtttagtcactgcctccccatttatgctcactgctagtgattctatttcacaatagctgttgattgagagctataaaaccttaatcccaaacgtatgcttcaaattgtatagtcgaggaactttctgactgtgttttgtgctagttctcttcagagttagtcaaagttttctgatggaatttagagctttggtggttaattttgctgattttattgggtcatgaggcagttatatggttgtgtaattggtgcttttcttttttttttttttggtggcaggttcatctactcattt

SEQ ID NO: 82759 - DNA, 250 bp, Citrus sinensis
  Intron number 1 from transcript orange1.1g004675m (locus o range1.1g004675m.g) derived from phytozome v7.0 (chr-ID sc affold00055; pos 524589 to 524838)
gacagctttgattgagtcgactcattcacagctcggtaaattctttatttttttaatttttatttttgatttacctatatatgtaatgtcatctgtaagttaatgggcgagttttaaattttgatgttatgagttatttttgttgtatattcttagcaaccaaactgaatagagtgaaatagtaacttaatatgtttcctttcattttctcacagttttcttggctaccagaagaggattttggtcgatt

SEQ ID NO: 82760 - DNA, 999 bp, Citrus sinensis
  Intron number 2 from transcript orange1.1g004675m (locus o range1.1g004675m.g) derived from phytozome v7.0 (chr-ID sc affold00055; pos 525522 to 526520)
tgttcctgttcatcgaggaagtgaaaccattgaaggtaagtgcaaataatgtgatccaaaagatgagttttcagtatgtgtttattgctgatgaatgtattttatctttagttctgataatttttctttttgcatgatattgtagccgtggttgataatgcatcactgtgtctgtggtgtcatttgtagtgagaataattacctttcattcaaaattaagagagaataattgaatataaatatttgttgtgggctcagaaaataatttttctcacataaggaatcatgatgtccttttatgggatcacgggtctctttattagttcttatttgtggtgcacggttacatggaatttgggtagcatttatgatcgatttgatactaaagaatagaacttttatagttctagagtgaaccacaagctcatcttattttgaagaaactattaaccacctgtggtagagatgagtttgcgctgggcataaataaccttatatgcaaataaaagagtgcaagaagtttttttggcttactatcctgtatctcaatgcgactgaatgattcccaaatatctcttgtgatataactcttattggctgaggctttactacatcttctatgtcagagttgaagaatagcatgcttgatatgagccttaaattactttcagaatctattcaattttttttttttttgggaagtgcaagaggtatgcttagtaaatagatcaacttcggtaaaccttttgataagtgaatggttgcaccctttgaatcaggcagaaatttgtgtttaggaatgtttcactttgaggtggtaacgtttaagttttgacattttttcttcagtcataagcctcgcatggcttcataatggttttgtgcatacattacatgcttgcattttaattgattgtttcttcacgtgctgatgctgctttgttgtgggtggttatgctgttttcagatagcagaggagcttcgaaagaagacgtaact

SEQ ID NO: 82761 - DNA, 576 bp, Citrus sinensis
  Intron number 1 from transcript orange1.1g037428m (locus o range1.1g037428m.g) derived from phytozome v7.0 (chr-ID sc affold00590; pos 36277 to 36852)
ctactcgtatcattcaaagtgctctgccctgaaaggtaagaccaaagagccagacagcacccccgcttttcttctttttgagatttaaccaataacaagtctctttctctctgtctctctctcttgcttgctttgatcgatattatcagatctatatttttttctttttttcaatatcactctattaaattttgtttagggttttatatcttttttcagatttactatttttgatatttgtatttctaattcttttatttaatatgtgtcaggtgatccagccatctctcttgacatttacttgcccttcatttgcaatgtaagcatatgattgatttgtcttcttacttttgtgcttgtgctgatttgaataattggagaaacataattggaatttttgaaatacaaatgctggggtagattctttttcccatatatttgtgtctgggtctgtacccaacttaaaatatgtagtcatgttgattttcaatgctttttcaaactttatatattatgcttcttgtacacacttatattttgcttcatttatttatttatctattctataaagggcgg

SEQ ID NO: 82762 - DNA, 349 bp, Citrus sinensis
  Intron number 3 from transcript orange1.1g017620m (locus o range1.1g012223m.g) derived from phytozome v7.0 (chr-ID sc affold00284; pos 30866 to 31214 reverse strand)
aatttgccatacagttatttatcacttttcatcaggtaattgaatgatactgtttcattatgtttaaacttatgactgataggataagaatttgcttgatccataattgtcggtaccttctttgaacttgtttcatcattacacttgatacgcatgaccctgcacccacataatcctaaacactggtatttccgtgtttttcatgagattatatccaaagaatatccagaaactgcaattcttaggttatggagaatcattatcaaaatcacataccaaatacctcctaagtttctttgccatgttttgatttctgatttcctactttcttattacgatagagagattg

SEQ ID NO: 82763 - DNA, 700 bp, Citrus sinensis
  Intron number 1 from transcript orange1.1g006851m (locus o range1.1g006873m.g) derived from phytozome v7.0 (chr-ID sc affold00085; pos 234567 to 235266)
tttactttcttgcttctcctttaacctgcaaaaaggtccctcttttctctctctctctctctctttagggttttttcttttaggatcaaaatttgatagcatgattatgagatcttgcctttaattgtttttctaattaggtttttcggattcactattattttaataattaaattctgcctccgtgatgtcaattcagtttcagtaagattgtggatattgttagggtttcttgcaaagctgtgaattgtgaccgacagagactgatttgagttgctttaattgtgaatctaatgttacaaatgtattggcaaaatattgttgctgtgttgattccaccagtcccaattgtgttggggaaagataagttatctttctagacattttcattaatgttgtgcgaaagtgtccaaaatggtagcttgtttggttcgcatagtgatctccttgtcaacacttctttgcatgacacgggtttatcagtttgtaaaaaaatgattaatgaagttgatatatcccgacatcagaaataaatgcttaatatattcttaatgagttattgatgtgttacttgttgtcaagatgcttttcgtcccttgatgttgtgttgctgctagctgtttggttaactagttgtaatggttgttgaattgtgtcattgatgcctttgattttgtttgtaatgtcaacaggggagtga

SEQ ID NO: 82764 - DNA, 744 bp, Citrus sinensis
  Intron number 1 from transcript orange1.1g010835m (locus o range1.1g010521m.g) derived from phytozome v7.0 (chr-ID sc affold00284; pos 180495 to 181238)
tttgtttcagctcaactaacatttaccaccttcaggtatgcatgcatttctttcactgcaaaactgccccttctttcattatattattctccatgacaatttcagttgcttgttgtttttgttttgttggccaccttcttttgcattttcttcttcttgagcttggtgttggggaaaattaagaaaaaaaaaggtttgagagttgagacaatcatagttgtgtttatatttatgctgagaatttgtcacctatagcactgaattcacttgagtggttactttttcaatatgatgaaaaatgaaacaaaaaaagagataaaaatgctaaaatgcgttctgtttagaattggaggcagtaatgtttttggagactcatgaaattaaaatttagagaataaacccacctgggaaatgagcatctttttttttttttaatatttatatgccgtggagaatcaattgcttgctacttctgttgaatgagttgtgttcacgtggttgttggatccaattctccttcttgtgtgactcgtgctctgggattgttatctagtagtttttattttggataatagttgtgataggcattaggcaagttcttttatgtcaactttagctggattttgattaacttggttgattttgtattgacaatttgttaatagaagtttccttagattcttatttaattagtttttattaatatcagaaggataataaagtcatcttgggaaatttataaca

SEQ ID NO: 82765 - DNA, 1051 bp, Citrus sinensis
  Intron number 1 from transcript orange1.1g033103m (locus o range1.1g033103m.g) derived from phytozome v7.0 (chr-ID sc affold02065; pos 4364 to 5414)
caacaatcatctgacctcacttcctctcttgagaggtcttgttttgtcatttcgatcaatacctatttgttgtttcttttatttttttggttgagtgttgacccttgatgattatctcaactgggtttctattttttcaactaatttagtgacaaagttgaaacaatcaaatttttttttttttgaatttgttttctgagttgtgttgattttgattatatttgacattgagctgctgcgacttctaatccacaattagtgtggaatagaaaggatcattgggtggatagttgataaatagtaatttcccatcaataagtaaaaaggtgagtgtatatcaaacagtttagctgcagtactttcctagtcgagtagaagcagaaatgttgctgagataaatagtaatttcccatcaataagtaaaaaggtgagtgtatatcaaacagtttagctgcagtactttcctagtcgaatagaagcagaaatgttgctgacatacccttcattttcttatatgtatgttttattttgcaaatttgtttttggatgctgacactgttgcaatttacatgctgacttcgctttggttagaaaaccttgattcttttgcaatgttcaatgccgtttagttttgagcctaaagtaattagtatgttgtttataatgttctatattaatcgaaacatgagagttacagcgttaattttggaggtcaacgatgaatttccaatgaacaagttggctagtagtcacattgcataagcaatatagcatagtttgaataagaagaataaaataatcgtaatttcattgagtacctctcttttcttgactgcattcctcgttggaaaagtttgttagattgaaattctggttgtcttttagacttaagttttagtgacaatacacttggtgaaaatatgtttacttcatgacatcatcttgaagtcttgttgttatggagacaaatatgtcgctcaattagcttggcattataagataaatgtacttctttgcagattaggagggatattaaaggtgccagacttga

SEQ ID NO: 82766 - DNA, 565 bp, Citrus sinensis
  Intron number 1 from transcript orange1.1g046235m (locus o range1.1g046235m.g) derived from phytozome v7.0 (chr-ID sc affold00085; pos 197527 to 198091 reverse strand)
gtgcctgagactaattcgtttggtcaaactttcaggtttgcttgctgatacccccctttttttttaatttaactaagagcagtaggaacaaaaataaaatttatagtggcaacggtggattatattagtttataatggcaatgatggattgattttaaggcataatgatgaaagaattagtgggagattaaaattttctcccccatcaacatataatgtttgtacagtaactcaataatatttgattaatcatgattgttgttacccccaaagccttcttagttctttgctctgttttgttgttgaataataataataattgtaacttttacatataacatattgttgcaagtcagatgtaagcttaaggcctaacacaaaacgtaaagattgattactttgttcttagaaatggatagggtataggctttataatgctacctacattgtcaaacttagaatccgtaataatttctagatttctgtccttgtgtttattctcttacttgcctttaatctattttccgctaacaattaagttaacctgccatgtaaaatagggatt

SEQ ID NO: 82767 - DNA, 723 bp, Citrus sinensis
  Intron number 1 from transcript orange1.1g029616m (locus o range1.1g029458m.g) derived from phytozome v7.0 (chr-ID sc affold00360; pos 60779 to 61501)
caccagcacactgccgcaagcagtcaccgtcgactgtgagttagtaattgttctttttttttaagttttttattcttatatttgggttttgggtaatcagtttttaatacatttatgtataaatggatggttggaataataatctaactaaataaaatttttatgattataacatcaaattatttaattgcttttttctaaaaaaaaaatctggaaacaaatgctaattaatattttttttgtttctcactggcatgtatgcttttagagtgtaaatgaactgtcaaaaagtaattaagcacaaaatctgtagataaaggcgcaagataaatctgttagagaaaagagtgcgtttcttgattcttttttgtagcttttgtggaagtttaatctgtttttgagtttaaattgttggaactgattgtgctgtttttttttttttgaaagggtgttgtttttaagcttgaatttgtcttttttttttttttctttttcttcttctgatagtttgtgtgcaatcgatttttgaaaatctaatttaaaattattttgttggctggtttccattttgtttcccatttctaaggatgagatagtttctcttggtgatataggggtataaccgctgatttttttttttttttcctcaagcggttggaataagctaatgaggagttgaaatctgcaggtactaacattttttgtagagactctactcgagtt

SEQ ID NO: 82768 - DNA, 635 bp, Citrus sinensis
  Intron number 1 from transcript orange1.1g032795m (locus o range1.1g029029m.g) derived from phytozome v7.0 (chr-ID sc affold00008; pos 1860902 to 1861536)
ctaaattggtcagttttcatcttaacacatctgaatttcttatctttgacttcttttattattgttctttgatgagattcgctgctgggtctgtcttaatttgttagattcttgtgtggattgcggtttatgtctgttttgttgatatttgcgtgggtttgacccaattctatgaattttgataagattatgcacgtttctttttttcaatctgttgatttaggtttgcgttttgtttttgtttcctatttaattttgttggattattctcatatgggtttgttttaattctcaattttctggttttgagctttgtgtatttctaatgcggttgatgtatgtttgcttttagatgaaatcttcctttttttttttttctttaaatgatatttgatgtaaacagcggacggccatgctatgaaaatgattatgatcggtataatatgaatatgtttgctgtaatcttgtatgagtttcaatactagttaattttggatttgcttcattgataatgatgaattgatgaggatttcatttttgtgatttccgtattaggcctttgtttaacacgttgttgttgttgttgttgttttgacatttatttgtgatttatatactttaggtgctgcttggag

SEQ ID NO: 82769 - DNA, 414 bp, Citrus sinensis
  Intron number 1 from transcript orange1.1g042402m (locus o range1.1g042402m.g) derived from phytozome v7.0 (chr-ID sc affold00008; pos 1535843 to 1536256)
gtaatatttttcttcctttgctgtcaaattactcaatgcttgtgcatttttgtgaattcaattgcattatattaagccatatgcggtttatagatattttgagttgataagatcatgctattaatgcaagtttactgtaggcttgatgcaaccttttttttgctaaagtatagtggaatgaaagaaatctttcatgcttaaaaacacatttgatgacttgatgatacttcaattgttatcgcttagtttttgtttttttagcacttttctttttttatttattttcttgaatgtatgagtagaatgatctgtcggtttattcatttgtttattttgtgtggaaatttgtatcttatttatctttttatttgtgatataggttgttcttgctgcttctatcgtgtccaaatctgg

SEQ ID NO: 82770 - DNA, 945 bp, Citrus sinensis
  Intron number 2 from transcript orange1.1g013959m (locus o range1.1g013959m.g) derived from phytozome v7.0 (chr-ID sc affold00059; pos 547564 to 548508)
gacacgtgtgcttctgtcgtgcgtgactccaccaggtaattttggtttttaactttttctatttcacagtttgattgcttttcttttgagctgtaaagaaagttaaagttgatgggattgaaataaaagtcatgtgtcagtctgacgtaatcagagaggacactgtctggccgattttttatggcagttgttgaaatatcttgcaataatgttacaggttgtaaaatcatctaaaattgaaaaaaaaaaaagggcaaaatattccatgaaaatagaatagacttagtaattcattacgggcatgtttattgaggttttatttgaaatttcattgaagtatttgataaatattaattattataatttaaaatttaaatttaaatttatttattttttattaattttattaaaattatttttaaaaattacattattatatcttattaatttttattttataattataatttttttaaagtagctgtaacttttaaaaccaaataaggttcaagtggatgcaagattttgattgatatactgtcactattaattattgagtgggttggtttctttccaaaccaatgttgggtggatttttgagaagaaatatgaaatattttcagtacatatttttcctttactttctcaaatatatgatttaagtgcatgtccgtattaaaaaaaaaatccttaataaaaaatgttttcagtacatattttcaagaaacagacattaatgtggaaaatgttactcatggaaatattatcaatatactataataattttattttttttgtattttaaagaggatagtaagtaaaacttaatttttttaaatttggcacataaatatataaaatagtgaaatatttaaaataatttttaagagtacaaataacttcgctcggacaaaaatcatattggtacaggcacgtgacattttt

SEQ ID NO: 82771 - DNA, 745 bp, Citrus sinensis
  Intron number 4 from transcript orange1.1g016738m (locus o range1.1g014924m.g) derived from phytozome v7.0 (chr-ID sc affold03142; pos 7483 to 8227 reverse strand)
tgaggtgtggctttcttgtgaacttaaacttgtttaagtattactgctgttttttttttttttttttcttgtgaggttaaatgtttgaattgtaatgttgtttagttttaacatggcattgaaagtcatgatgtcttgcttttgagttgttttttggtccattgtgtacttgtattgtgtttggaatctcattaattaaagggtaaatatcattcaactctttgactcttggcctaaaataaagcagctcgaaggtttttttctcagtcttcacacgtggccatggttggactaaagcaaatatactttagatttctctcaaaactagcctatagtgactctcatatttgctcctaatttccaaagcttacctttgttctttctgctgtattttatttcttagattgattaattggttttctcagcattctattgtttgtcagttgaggaaattgatggattgtaatgggaagttaaatgagaaacatgaaaagagtgtggagcagcttgatttcagactaaaactccaggagcttcattgtatttaccctttaattaagtaggcgccaaaatgagagagggagtggggttggggtggggttgttggaggttaaaatgctattattgagtaaaaagttaacctattatgaacttctgtggtaatccacattgatctatcctaacagtcctctgtatttattctcctgcagattgatctgaggaaagaatcaacaatacagttcat

SEQ ID NO: 82772 - DNA, 475 bp, Citrus sinensis
  Intron number 1 from transcript orange1.1g036423m (locus o range1.1g036423m.g) derived from phytozome v7.0 (chr-ID sc affold00210; pos 115371 to 115845)
gctgcactggaagccaagtgttggggcattataaacccttaacccatttgaaaattaactcatggttaattaactcaaccccatggttaattgtttatttatttatttaatttaattttttttcctaccccttatttaattttaactcaaaacttcacttccccttaagctgtctctctacacactctcacttcctttcttctctgcctctctcacatctttgctcttctgtctcttcttgtttttggtaaacaactttggttgccaaaaaacacacacacataaaagtcttcacacacaaaacctaaccaaagacaatcaaaaacattaaaacacattattgtctgtttatttatatatccttttgttttgtttggaaggagagaaagtgagggaaaggatttttgtgtgtgtgtgtgtattgtaatttgtaaatgaagaggtcccctgcttcttcttgttcttcttcatcttc

SEQ ID NO: 82773 - DNA, 798 bp, Citrus sinensis
  Intron number 1 from transcript orange1.1g005354m (locus o range1.1g002282m.g) derived from phytozome v7.0 (chr-ID sc affold00284; pos 170102 to 170899)
caccgtctttgcgtgttgttgttagaaaacctgtaagtgattttgttggtttttgattcattgattgatcatttctagctgaagaattttgggtttttgatttcttcttaaaatattagcatttttggaatctgaaatgctgtagagttgttgattgtattggtgtgaagaggcatggataatggaattgctggcttcttagatttagttatgaagttctatatgatatcgttgcatggtatatattgcatgttgtttgagctgtattctgtgttgtacagtgggcttgaagcttcattgtatgcccagtgataggcagctaagagttaatggctttagaaatggatgcttagcaagtagagttgtgtgttacagaatgattcaccacttgggatgattatattttgacttatgaataccttctttttttgttttttgtttggggtgtgggggaggtgaatgattagtgaactagtcaatctctcatttgtcaaaagtacgtcataaactcacacgaattctactattactttcccttctgaaagcattcatttcctttactattgattagagattctattgtgggatagaaaagtgcacagaatgacttgatactttcttgtcttctcacataaattcattggaactgctatttatatttttcaacttatctattttgcttgttataatggttagagaactcccacttgttctagttgttttgggcaaatctttgagctgacatgcacttccaattgtgcagttggtggttcgactaacaaaggatatagttgaaac

SEQ ID NO: 82774 - DNA, 777 bp, Citrus sinensis
  Intron number 1 from transcript orange1.1g000038m (locus o range1.1g000038m.g) derived from phytozome v7.0 (chr-ID sc affold00085; pos 269501 to 270277 reverse strand)
aaaatcttttcaaggaaaaggtttgctctaatttcttccccattttcatcctcattttttaatagtttcttcacatggatttgaaggtttggccatgctaacttacattcatattatgtgactccataattaaaaagagaatatttctgagctcacgctgtaacaattaatgatacctgtgatgtaaagtccttttaaagcagtttcctataaatctttactaattagttagattctagcatttccctttttgagttggaagtttgtttgatatctttactaatatgtctagcgttgctctttcaattatagatattaatgtttacctatattaatgatgtatatctaattttaattttaaaggaaagcagaagcatgttacttgctatcgaagtttctaataatggaccagatagcttataaagtgtttatgaatgtttcgcatcaagtttcacgggctcagctatttcagatttcagttaccgtctatgatcatggcacaaagacatacattgctcatacaaaattctgcgattgtcctatgtaactattgctgtatatgaacatttacatttctggtccttttatatgcatgactgtaaacacccatgtgtgttttcttactctttctgcaatattttaaacctaagaacctttgtgctgttctgcccattttatgtttctgctagcgaatttcattttacattcaactgtacactaactgctgtttcgttccttttaggtgaaacaaattccattatcgtttcagtctgacag

SEQ ID NO: 82775 - DNA, 788 bp, Citrus sinensis
  Intron number 2 from transcript orange1.1g010003m (locus o range1.1g009997m.g) derived from phytozome v7.0 (chr-ID sc affold00008; pos 1959522 to 1960309 reverse strand)
atcaggtttgttccgtttcagaagatttgtctttgagttataattattgcagcagtaacttcacttcatgatgctaagtctttgtctaagcccttcagattgtcgaaattgattgtaatctattcttcattttaccacatcaaataagcttttatggattctgagtttttgtatgatcaggtttgttccgtttcagaagatttgtctttgagttataattattgcagcagtaacttcacttcatgatgctaagtctttgtctaagcccttcagattgtcgaaattgattgtaatctatttttcattttaccacatcaaataagcttttatggattctgagttgttgtatgatcaggtttgatccgtttcagaagatttgtctttgagttataattattgcagcagtaacttcacttcatgatgctaagtctttgtctaagcccttcagattgtcgaaattgattgtaatctatttttcattttaccacatcaaataagcttatttgcacttctataaatgctttttccactcgcaaaccttgtattattgtctcttgaaaattgtttggattcaaggtcaatatctttgctcacatcttgcatttttagcctgtaaacttgtcatagttctcacattttgtaacagtgaaaaaaaaaattgactattatgatgaattctttgtaaatagctctcattgaatctattaaatataatgtattgaatgctagctttaatatgtgaattttatgtagattacacgtgaggaaaaacttgacattccgctttt

SEQ ID NO: 82776 - DNA, 748 bp, Citrus sinensis
  Intron number 2 from transcript orange1.1g047632m (locus o range1.1g047632m.g) derived from phytozome v7.0 (chr-ID sc affold11385; pos 1089 to 1836)
gaaaggggctaaattcgttttttaccctttgaacggtaagtaatttgatctttgaatgaatcaagataaagttaactattgcaggagtattgccaacggggggtctaaaagaagaaaatgattcgaggttaatgtgtccgaactggattatctaatacattgaattttattattttgatttgggaaattattcactaaccaccttaagaatattgagtacaggtagtcatcacgaatttctgataacatctcaagatcgcctaaagttctaattttatattcaccaactaattttatgtcaaccagctacttttccattaatttcgatagccaccctcaaataattcaagataaagactatttgcccttgaattcattcaaaaaggcaaagtgatgttttgcaaggctccaagagcaaaataatctataatcctagttttttttattcatttaagaaggtagagggatgttttcttttactggttggtaatagaaatagtggaaaaatagttggttaatatcaaactaaaattttgaagataattcggagatattatcaggaactcgcggtagctacttgtaggtttttgtacccttgaatgttttggggataaattagattttatttttttaaatctttcatattttaatgcagtgcagttagtgggtcctcactggggactaacggacacttactattttctgaaaaacatatgttcttgcttcttttcaggatcccccaacaacg

SEQ ID NO: 82777 - DNA, 750 bp, Citrus sinensis
  Intron number 2 from transcript orange1.1g017280m (locus o range1.1g017280m.g) derived from phytozome v7.0 (chr-ID sc affold00008; pos 1038155 to 1038904)
agaaccaaagattcctccggattcattaacaacaggtaccaaattattattattattattttttgaactttttcattgttcttaattttacgtttatgtttttctctgggttaagagttttctcttttactttgtatgtggtggggaatgatttaattttatttgattttatttatttatttattttttagggggtttattggttgatgggaaagaattttgggtcaatcaatttgggttaggatctactgttctaacccatcactccttatttgtgtgaagaggcttctctaaacgatttgcaaactttttttttttaatttttattagtgagtttacttttataccctttaaaagatgagcaaatgaatgatctcttggcatttggactatccaccaccttttacccatcccccttccggttcatcttaacttgttttctttgatggagtcattgattaatgcttttgtccggatcttgaaaatgatgccatctctttgaaaattcattttttagtcctccttttactatctaattgaatttttcgaatatttctttcccaaaattacattgtgtgttgtttttgtttttcatatatttcacttgttagtgttaaatattaatttctggtctttttttatttttctggtgctgtccgagtattttgttgtgtgcttgtgaaagagtcaataaaattcgatcaacatttaccatgatcaggaatatagaagatcgacccgcagcagcaa

SEQ ID NO: 82778 - DNA, 904 bp, Citrus sinensis
  Intron number 1 from transcript orange1.1g006095m (locus o range1.1g005440m.g) derived from phytozome v7.0 (chr-ID sc affold00008; pos 760160 to 761063 reverse strand)
gttatcgccaactctgttgtcgcccgttgttccaagtaccctcttcactcttcttcataattagtaatgtttgatttttcatcaaagttgattcatttggaagagaatgccgccttgtgaaatgggtcttttttttcgtgtaattccttttttgtttgggtgggatcatcaagatcttcccttttgatgtatttgcgtaaagtttctttttttttcccccctcacttggtggatgttagaaatgagtggggttagaattcaattagtgttttagctaattttatgttacaatgcatatatacatggatagaaagattcattttttatttgatggattttcgaaactgatagaatcagaatttttttcttttttccttttttttttgggaatagatgtgtatttataagcttctcataagtaagccttcttcagtatagaaagttgtcttgcaatgacattaaatgcttggaatttggctcaatctggatttagccttttaattgcgttgtggtatgcaatgttgtatcatagcagatttattaggttttgcatacattgttactgttgcttgatgcataataaattgatgccatacgcatactgcaaatttgagttgtatttttactgaaactgcttggatgtgtgcttgattttgcgatggtgcctctatttgattggatgtgaaaatgattgatgagaaacgaatgtgaaatgcactatgaaattgtgtttagtatacttttaaacaactttgagatactcagaacaattatatcctttcctatgatgctacgatgctcaacaactaagctgaaaagtgttatttcttgtcattgtaatgcctctaacacatttctgaatgttgcaggatccttaaagtctctactgcagaattacagcacc

SEQ ID NO: 82779 - DNA, 790 bp, Citrus sinensis
  Intron number 2 from transcript orange1.1g027472m (locus o range1.1g027472m.g) derived from phytozome v7.0 (chr-ID sc affold00008; pos 878019 to 878808)
accgccgtagttccatcgatccctcttaggtaaatttgcttgtttctctctctctctctctccatctctctctcatttttcgttgttgttgttgttgttattattattattattattcccaattcattattcaaactagggtttcaaataatattagatggtatatggatatcagcactgtatcttttcaagataattacataatcgcttaatgcaaattacttgtaaccataactaatatagccatgagtgttttttttttctttccttttaatttttatgaatggaattagtgtacgagggcaaaagttcgagtctcatagatttgatttctcctctcataaaatgtgagtgaaaatatatatatatatatatattagcgatgtgaacagattttcattggtcttggtagacttggtgagctgggtaatcatcgcagaaaaagataaaataaaataaaataaaaaagatgtggacacaattcccagtgttgaccaaaaggactaaagtgttgagcgtaaaaagagaaatggggtgtaaaaaattgtcccagtcgaaactgcatagcaatcgcatagggtcagtcagtgtcctaattccacacttttttctcatgatacagcctgcaatgcgcacggttgtttttgagtgtgagtcagccattccaattttgacgccatatcgctgatcagaatcagatctttaagttttttataaactcctattattaacatattctcatcttcttcttgttcttcttgttcttcttgtggagtgcagggtttgagct

SEQ ID NO: 82780 - DNA, 823 bp, Citrus sinensis
  Intron number 1 from transcript orange1.1g033774m (locus o range1.1g033111m.g) derived from phytozome v7.0 (chr-ID sc affold00008; pos 1620486 to 1621308)
ataatttaattataagtatattttaacttatatagctgcactaacaacatttccattttgatcattttagaaaaataagaaatctaaaattagttaagaacatgcatataatattgtgttaacttgcaatgagtactccgatgtcatgagaccaaaaccgaataaaataaaacgagattgatttgaaattgattgagatttgaggcagaatgagatgttgggtattgatccgacaccattagcatggacccaaaaactcaagttcttaagcaaaatcccaatgttagtaataaagacaattcggcatagagtgtggagtagatagaaatgttaggcattttagcgtcattagtagggccaacaccaacaccaaaagttaaccgctaccagtgctagcatatcctcgggcaccaccatcattgttgctgcaaatgccagtagttcatcgcttggttaaactctgttatttgactctttccttttcttttcctttgcttgtttatgttgacttgttatataaaaattgatgcagattgatgtcatcgaggttgatggaaattactatggtatgtgctcatttatactttctgcttatggtcttcctagttagtagttacttcatgtgtcttcttttcaacttttgggttcttgtgagtgttgtcaccaaaggacaaagggaaagaggtaaaagaagcacaagaactccttcagagactaaatacagctaatatcataatctttcatgttttctccaaggatggtgatcgttgattgttccttcctttttttttttacctcttaggtttttctgggtgtcaccggt

SEQ ID NO: 82781 - DNA, 626 bp, Citrus sinensis
  Intron number 1 from transcript orange1.1g037621m (locus o range1.1g037621m.g) derived from phytozome v7.0 (chr-ID sc affold00008; pos 72613 to 73238)
tcctgctgaacttaatttaaagtacaattaccaaagtatatggcagacacctaaatatcaccacgcatccacttttacttaatagctaataattccatctcacaacaatggtgaatttaaaggcacatagttcccatcaatcctaaacacacccttagtctcccactgatatatcatgctagctgctaggaattacccgttttctaaagaacaacgttacttactgatcttaaaaacataattttctcatttctttaccgacaaattactttcgcaactctcactaaaatctatatcacaaacagcaagtctcatcttgttcctccatgcatctgatattggcagattttgaagttgactagtctctttggggctaccattgacttagaaaaacagaagaaattaaaagaaacccattttcctacctttttccttgacaaattgacaatcaaactctgctctccctcattactccaaaagcataactcaaaaccccgctctaactcaaactccactctccctcgccctccatgtccctcgtgatgagtttaataatcctcgtcctcttcttaccttatacatgtacattagccaaagcttctgcggaagacaacaagacagataaa

SEQ ID NO: 82782 - DNA, 830 bp, Citrus sinensis
  Intron number 2 from transcript orange1.1g008328m (locus o range1.1g003814m.g) derived from phytozome v7.0 (chr-ID sc affold00008; pos 1573199 to 1574028)
tcagctaggattttggcgcaggtgcatttactcaggttagtaactctattcttggccattactcatagttgcaatagtggcagattctgccttacatgattcatatatttgcagttactcatgtaattagctatttcatatgatacaattatatgaagtaacctgtatatgctacagaaatggtccagtctcaccttcagcatttcattgatatcataaattaacaatacaatttacacaccaatgcgtatggcatggttgacatggaccatgtgaatttcgtattagtcagtgcaagtgttatacctttcttgctatcggacttccaaatgtttgtccaagaatctggaaaaagtcggtcattaataatgacattctcatagaaatactcagctatttgactgacaagtagtttattttcagtactgtggcactgattatagaaatctcttaattcaatagatgtgcgtcataaaaaatattagaagcaactaaaaaaacaaatcttgcattgttcttctcatcctcattatgcttttgttattttggaattgaatatggtatcctgtatatctgcttttaattgattatgtgacaatacacttgattactacacttgttttgtgccctggtcattgtttggaggctctgcttcaggcatcatttgcatatgaatacaatattggaatttaatattctatagcttctcattttttttctgccattaccttgtcaagtaattttatcatttttgagtataggtaggagaatactagttagaaatgcagggatttttctgattgcgctacctgtcatattcagtaccaggt

SEQ ID NO: 82783 - DNA, 579 bp, Citrus sinensis
  Intron number 2 from transcript orange1.1g015397m (locus o range1.1g015397m.g) derived from phytozome v7.0 (chr-ID sc affold00008; pos 1289681 to 1290259 reverse strand)
gagaagaaggtgaggtgctttgcaaatgcgtcacttatccacctaatttatggattgtttttgcaccagtttgtttgttgtaattagttttgattgaattagaagctaaagagcaaccaataaatagattagttacaaacagttggctgctggatttctctatggtgttttttttttcttgtgaacaattggcttatgctttgctggagtttttttcgctctcctgctcacatgtacgcaagagaggttatttttcagtagttgaacttctttttgtatagtttgcttcaatctccctggtcttactattcatattcaaactttttttcaagctagaaactgaacaaactaagttacggagtacttgttatgtttatatcttaattgttgattcaatgttcatgaaagtgatagataagtactttctaatgttccaagtgtcttggtggtttttggactcggtactaattctgtcttaagaaaatttgaagattttgcacatctgaagctattgagcaaaatagagcttcactcttaacaaatgttaatattattgcagaagaagaagttccatctaaa

SEQ ID NO: 82784 - DNA, 803 bp, Citrus sinensis
  Intron number 2 from transcript orange1.1g032736m (locus o range1.1g031610m.g) derived from phytozome v7.0 (chr-ID sc affold00059; pos 164234 to 165036 reverse strand)
tttgtgcccgtgcgcctctcatgttgcataatgtgtatcatattcttccttttcttcttttcaatttctgcgtttattctttttgttgatctcttctgttttatgtatgctgctgcttatgtaggttgtgatttatatgtatacaaaagactcatcaaatgcatcttcttctgaaagcacttgcgctattttccattttcacccaaaacggtcttgcagtatttttatgttccaacaagtgatgattgaaatgtttcaaaataggcattcaatgctggatctcaacagttctaaaaacactcacaaataacaaataaaatgctctcttacatgtttgatgtgaatacatcaaaattttggacggcctcagttccaatttttaagagtctgacgtctggttataggcaaaaagtgcaatcaaactattgtctcatattcagcatgctttttttggtccgatcaagtaactgttcgagggaatgcaggagatcttctctagttggtctcacaaaactgaccatttccggaggatccaccgaaagactggtgtaccctttagttcaatgctcttctttgatgatgaaaacaggaacattgaagcggtaccttcgcttcctttccagctctttattttcatcttgtttcttttttcacttttagcttgtgcaaatattaggagatattgaattatcagtgtcttagaatgccttgtagcgaaggaggagtttactgcttggcatggttagaactgaaattttgtgttattatctaatcctgtagagtattttttgcaggtatcaata

SEQ ID NO: 82785 - DNA, 526 bp, Citrus sinensis
  Intron number 1 from transcript orange1.1g014453m (locus o range1.1g014453m.g) derived from phytozome v7.0 (chr-ID sc affold00110; pos 294242 to 294767)
ccctccaagcactccctcggttacctttatttcttgtaattcttctaataattctaacattaattttaattattatgcttgtgcattgtgttaggcttttataattcaagggtttgcttttatgttattgttggttctcagaaaaagaaaaaaaaagcatttgtttattagttattgtactcgtagattattttaagattttaaactattgtatgacgtataaaggtttgttttgtttaattgctagtttagataaataaagtcttttggttgcggagaaatcaaatagatgagcatttttttttcaaattttatttttaggatttataggagaaaagaaaatgtatatttcttaggaatattgacttgtgtttaccaggctttttatcaaaaattttgaggagaggaatgttgttttcttaaagagttttgagattaatgttatttagtgaaatattcttatttcctgacgggttttgagtattggaaggagttaattgtatgtgttttgtggggacagagagcc

SEQ ID NO: 82786 - DNA, 610 bp, Citrus sinensis
  Intron number 1 from transcript orange1.1g024767m (locus o range1.1g021930m.g) derived from phytozome v7.0 (chr-ID sc affold00008; pos 1223815 to 1224424)
catttctgtttctcaggcaccgctcactcctactggtatattaaatccaagaactgtaactgtttcattctgatattattgttgtattttcgtttcttaattttttttttaatgcaattttgttgttttgacccagagaatctttttctcactgtctattgatttttgcattaaaatataattataatgaatactagtgctctgagatgatttaacttggtttaaattttatcaagtttgaccagtttcttcaatgcaatatttgtatgagtcttaattagccttctgtcgttgataagctagagcaattttgcaattaggtttggaaattaattgaaaatctaaacctgaatacggttgttaaaatagattacttgtaataattttgcaactctgagatgatttgatttctttgacatctccatatgttgaaagacttttcatatcactacagcagcaacacgctgttctttgtggatgttgataagacttgcataaattttgatgtctgagctcccaaacaattagattaagttgaggctagaggtttgacatgcaagcttaatttgtttctatttatacatgtttgtttgctatatacaggatttcg

SEQ ID NO: 82787 - DNA, 598 bp, Citrus sinensis
  Intron number 2 from transcript orange1.1g024767m (locus o range1.1g021930m.g) derived from phytozome v7.0 (chr-ID sc affold00008; pos 1224567 to 1225164)
ggtaatccttgctttctgttttgctacggaacttgttgaaattacagttgttatataatctcataaaatattttaaacacatattataccaagttatagcataaaagaatttagttgctcaagcctagatgttaaaggaatacaattttattccctttgatctgtcagataattgaaatgcttcatgttaatctaattctgaagttttttttctcatagtccctgaaatgatgctagattttcatttatttttctctgaggcttagtattttagtcaagaaaatcgtaagatgtgtttagcctttgtacccatcacttgattggtctcttatttttgccatgctactaagttagtattaatggatatggtaacagcccatacagcttgatcttcatggtttgaatctatttataataaaatattatttatctctgactgaatactttttctctcatatttcttattgtggagctagtattagtttatatgcttcttttttcttctcagatagtttatgaaggatgtttttgcctgttcttttatctgatattcaagcataacttgactttttcccttacagtgataagagctccaggg

SEQ ID NO: 82788 - DNA, 859 bp, Citrus sinensis
  Intron number 1 from transcript orange1.1g016355m (locus o range1.1g009997m.g) derived from phytozome v7.0 (chr-ID sc affold00008; pos 1959522 to 1960380 reverse strand)
tggtcttatcacagcagtgcagaataaaatccgctgtgtgtatgcttttacggattctgagttgttgtatgatcaggtttgttccgtttcagaagatttgtctttgagttataattattgcagcagtaacttcacttcatgatgctaagtctttgtctaagcccttcagattgtcgaaattgattgtaatctattcttcattttaccacatcaaataagcttttatggattctgagtttttgtatgatcaggtttgttccgtttcagaagatttgtctttgagttataattattgcagcagtaacttcacttcatgatgctaagtctttgtctaagcccttcagattgtcgaaattgattgtaatctatttttcattttaccacatcaaataagcttttatggattctgagttgttgtatgatcaggtttgatccgtttcagaagatttgtctttgagttataattattgcagcagtaacttcacttcatgatgctaagtctttgtctaagcccttcagattgtcgaaattgattgtaatctatttttcattttaccacatcaaataagcttatttgcacttctataaatgctttttccactcgcaaaccttgtattattgtctcttgaaaattgtttggattcaaggtcaatatctttgctcacatcttgcatttttagcctgtaaacttgtcatagttctcacattttgtaacagtgaaaaaaaaaattgactattatgatgaattctttgtaaatagctctcattgaatctattaaatataatgtattgaatgctagctttaatatgtgaattttatgtagattacacgtgaggaaaaacttgacattccgctttt

SEQ ID NO: 82789 - DNA, 891 bp, Citrus sinensis
  Intron number 2 from transcript orange1.1g030295m (locus o range1.1g029683m.g) derived from phytozome v7.0 (chr-ID sc affold00569; pos 50241 to 51131 reverse strand)
tgctaaagtttccatttaaagttgagattttctatgtaggttaccctggaactcccatggctatgtagaaaaatggctcagctcttatagacttatgggtgttgttatgaactgaaactagtatgtcagcatattgataattagtatgttttaaatgtattatagaagatatctcatgctattgtttgagttgtcgttggttttgttgttacaggtgaccaagtgagtcacaaattttcatcgcttttgtggaaatttgcagaacatgtttgggggttgagattgggattgtaaacttttcagttatgaactatctaaattctaaagatcttctcaaaaaagaaaaaaaaattctaaagatgaagaaaccttctagagtggtacaagaggtgtggggttatttatattaaaaaaagagtactaaggattaagaaatttgctttaggaagttttttaggttttccttgaggctgctccaaacactttgtggtgctttgtcatggatccatattcaatttattctatttactgctggttttccatccaaggtatcagttgatattgcactttaaatgtttgaagagtgctgcttaaccctgctaagatgtaagatctggcaagtgggtcttctattgtctatggtaccagtagctttagtagctatatattgttggggtttgatgtctgttaaatgtttttgcctgtgatgatagctaatgattaatgcaatttttttttaatcattttaatactttgagactgcacaaatgctatggataattgaggttttggttctgtttatttgaatttgacaacaacttacgtttggctttcccttttagatcactgacttgttggtcaatgttacaaagcacattttgcaaccaaagc

SEQ ID NO: 82790 - DNA, 748 bp, Citrus sinensis
  Intron number 1 from transcript orange1.1g014461m (locus o range1.1g014461m.g) derived from phytozome v7.0 (chr-ID sc affold00008; pos 1283180 to 1283927 reverse strand)
ccggaaagtcttccatcattaactacgtttgtctactgattttttttattttttattttttcattttggattgtaggtttaagaatgtttgattttttgtgttggtttttgaatgatgggttgttgggaatttttcaaatctccattattggttgagccccatatctagaagttctctaacttgtagaagaagatttgtatcttgtggttatggatgggttgattttatttgatttttagtttggagttggtatagaagtgttcaattggttgtttcatgaaatatatgagattttggaaaggattgctggagattatatttttacttgtatgttagtaccaatgatgtgaactggattatattttcactaaggtttcatgaataactgatgatggcaagagggagaatgttgtgacagtaaaggattctgttttgtatttttatagtatccccggtatagaggttttttatttctttacaaagttcaaactctgtcatgtctagtctttcaagttttatttgaaaatcgttcaagaaaacagattcaaagttatgatgtttctatgttgggtaagagatacttctagtttaagcattcataatcatgttttataagaactagctattataatgtttttggagcctttcatgactaacaattcagttgatgactatgtgctgatacgttatatggttatttcatttgttataggttgggacaaaggttgctgctgtttctcggaagac

SEQ ID NO: 82791 - DNA, 568 bp, Citrus sinensis
  Intron number 1 from transcript orange1.1g031267m (locus o range1.1g031267m.g) derived from phytozome v7.0 (chr-ID sc affold02965; pos 3054 to 3621)
ttaccacttgattcaatcctctttcgtgcaaggtctctctctctctctctctgactttaaaacacaaattcatcttctgaaatctaatgtttgacccaaattggaaaagaaaaaaatgatagtcagtttaagaaaagtatttgaaattttagaatatatcaccccattttcttcgttttttattttaattttctctcttacatactaagtcgtaatacgacaggtttcacattattaaacttaattaattttctgaaatccagttctcgataaaataggactactgaagctcaaaatatatatatatatatatatatatatatatatatgagagcccctatgttacgttaatcgtaacgtacgacacatacaacaacagtaattatgatggaatccattattgttattgtgtgtggatatacgttacgattaacgtaacatagcactggcttacatatatatatatatatatcgcttaattcttctttattctttatgtagtaattataatttttttttccgtttttttctagatcgtgagaaagttttggctgagctacaagctcta

SEQ ID NO: 82792 - DNA, 404 bp, Citrus sinensis
  Intron number 2 from transcript orange1.1g025010m (locus o range1.1g025003m.g) derived from phytozome v7.0 (chr-ID sc affold00110; pos 413764 to 414167 reverse strand)
cttgctcttttacactttctaaggctttgtaagtatattctcttttttagctttttttatatattttttctattcctagagctttgattcacaatttgtgttggcgtggtgtattgtgtttgttcagaaatgaagaacgtagatcttctaaacaatgtagttctataaaaatcagctgatggaaagttaagttacttgtagatgttctaaaatgatgaaatataatttgattcttttaatatagatcaaaaatattttttcatggttttctgactcagtttcagctgtggaactaaattgatgttaattgctgttgaaatatgtcatactcgggtcttgttttctaataatatagttgttgaattctagaaattttggagctttatttgtgcggcggtcaaagt

SEQ ID NO: 82793 - DNA, 924 bp, Citrus sinensis
  Intron number 4 from transcript orange1.1g006375m (locus o range1.1g004368m.g) derived from phytozome v7.0 (chr-ID sc affold00008; pos 732550 to 733473 reverse strand)
agatcctacggcctgataaggtatatgatcatcctactcagtgtcctatttttggtactatatttttttgaacattatcttggagaaactattgattgttgcacgctttgtttgtaaacatattcaatttgaattagttgttgcagagagacagcttaaacttggtgtctatttcctgattcattgcagtgttgcttttgaaaatgtcacatacttatttggagacaaagcaatgcctattcaaaagtcagtctgttcttccatagttgttggtcaagcttttagggtgttggatggttaccatccaaagatgatcagttaaagaataatatctcatacctgaaaattgcacggttggtatatgtgatgattgcattggtatatattgttgacggtgtgtcatgcactcattcaatccttatttctagagcatgaggaaaaaagtatttatttccccaccatggtaagttcattaaatgacattttatctcctagtgacttattcatttaaagtttccgtgcaaaagaggaacatattagtggagttttatataggattgagatgagttagaaatacatctctaaccttatctgttcttttattagacccaaccgtcgaacatgcttctacccttggcttcttgtgccagattccagtattctgcttcatcctcgcagcatatatttgtttgaaaaaatcttcttgaagtcattgtgttgttggtgccattttccattgattggttaaatttttttccccctttaagccctttgttatttattgctatttctcctaatcaatggtatttttgttttttcaagtagaattctgcaactagtcttgtcagctaatttttttttcattggtttggatgataactaatcacaggcgtggttacataagttggaagcagaccagtcaaa

SEQ ID NO: 82794 - DNA, 661 bp, Citrus sinensis
  Intron number 4 from transcript orange1.1g026014m (locus o range1.1g026014m.g) derived from phytozome v7.0 (chr-ID sc affold00008; pos 2269452 to 2270112 reverse strand)
aggtaagtttattttgtggtgcactagtttattgaatgttattactgtgtaaatatacagtctggaatctgatggaaacatttggtagaggatgagttgatttcttgttgacctacctgttggaatttttaaagtttgcatcttggtgttttatgtgatacattttggtctgaactttgaatatttttttcttcctagagcttcatgatgccatgaatgtccggatgccaaaatatcaggcatttctgatttttattttgaagctgattctttattgacctatttgtttaattaattctcttcctaaagcataatgatgccattaatgtccagatgatgtgtagcctcaataccaggcatatgtgaatttcatgtttggtgtttaattaagcagcttaagctccacaaaatctggaaacgtttccattttaaggaataggcacagtatttgtttgttatgggactgaagtctgtgtcaataattggctggctgggcccattcatgagccaaatatttggctgtggttccagagctcttagctatttttttttttttaactcagtcgcatcatgtctaatatatagctctcagttaatttacttctgacttgttattaactacttaggctgccactagaatattagcccgtcaacttgttcg

SEQ ID NO: 82795 - DNA, 740 bp, Citrus sinensis
  Intron number 2 from transcript orange1.1g005095m (locus o range1.1g003814m.g) derived from phytozome v7.0 (chr-ID sc affold00008; pos 1571781 to 1572520)
agcagtgtctctctctcagccaggagcagtttccggtatgttgtgtatttcaccgatacttgtcctctgctaactataaaatttctttgatttctatgtaaattacatgaaggataatgattgtagcatgctagtgaagtcacaagcaaaagcatatgattatattagttgttaagtaagagagtgaaaataatattatctaggcgtcttttagcattaactagggaagtagggttcggattttcttggtgttttaaaagtatatgcagtttatctcttccatgcttagaaagaatgattttatgtaaagtagcatttccaaaatgacctgctgcatgaatatatcatatatgcatgtaggtctatatatatgtacattgctttttttttttttctccagttgtggaacctaattctcgtctctgtacagttgaatgaattaatcccttgatttagactttgtttctctgctaattcactttgattccattaattaaaagacattgacaatacaaaagctgaagatattttccaccttaaaatgagggttaaactgtctcacaaagaattcaactactattatttacctaaaaaattgcgactttcaattccctgttgtacttgttccgttccctcctgcatttttctgaaataggggataaaattttgttccatattggcactcatgctgttgctaaaatgtttgaaaggtggggtcgaaaggaattgctttacttctt

SEQ ID NO: 82796 - DNA, 651 bp, Citrus sinensis
  Intron number 2 from transcript orange1.1g000162m (locus o range1.1g000162m.g) derived from phytozome v7.0 (chr-ID sc affold00085; pos 318420 to 319070 reverse strand)
aaaattctgcggaacttgtacaaaggtatgtctagttggagactcatttttgtatccatctaaagatttcagaatccctgtagagcttgtgcttatttaacctttgatgttgccctttgagaaacaagatctaatatccatcttattaacatattctactaccatgattgtttattccacccttttatactattttccatttaggacactattaggtgtacgacgaattcatattatttctgttaaacataattgaaggaaaagaggagggtaattagatgcagtggtgcaatcaagagattggacattgtaatgatgatacaattgaaaaagtgtgagtattctgactatattactgggaagagacatcctgtcatcccaacaaaatatgcgtcttttagctttccttgggcataataatataatttgtgctctgatcaattaaaaagtgcctaacaatgaaaccatgaaccagaatagaaccccacccatgagtaaatatttcatagtagcctgtaatcctttatttcttttgataacaatggactgttgatactcataactctttttttctttttttgccctttttgatatccttctaatccttcactggcagcttgggttgagtcaaaagagaaactcagcattgga

SEQ ID NO: 82797 - DNA, 902 bp, Citrus sinensis
  Intron number 1 from transcript orange1.1g037148m (locus o range1.1g037148m.g) derived from phytozome v7.0 (chr-ID sc affold00377; pos 38747 to 39648)
gggtatgcatagtttgtaataaatactgtagctttcttagtgttgctaatttgcttaccatgcatcatctgttttcacatgtatgtaagccttcttagtcgatacaaaatagtggtgagtctaggaatgcaagtttgaataatattctttctttactttaatttcctattgaaaagtagaaaaaataatgaagactaaatgcagtatcaaattattttggttgtagaatggtggattgatgcagttgcaattttcatttacatatttacacgttcttttgctgcctttagagttgttgtgaaagcaatgcaagtgtaaaaaatagacttttggttcttttagaaaagagcaaaaagattaataaaaagaaatataatttagaagagattattattttgctgtttttttcttgaaaacctgaagatttcagatgagggcagggtgtggcttataatatatttgcagcctttactgatatacttttaactttttcttgacaaaagaaataaaagaaactagaaaggatttaatcatcattcgaactagaattcttgattttttctaaaaaaaattaccttttattctctttattattattatcatcatttttttttttggggggtaaacaacatgattaaggactttattctttctgcctaaggtcacatgtgtattatatcttttagatgatgtaggctgtaaccatcatgattttattgattgtgcgtttacttccctttcatctttataaattgacattgttgccagggtagctggttgagtcatgtaatcatcctggtttttgcaatacaggcaatacataaacactaacatttttatgcaatggctttctttattgctctacagtgcaagatagacttcagtgatccagaaaatagtta

SEQ ID NO: 82798 - DNA, 512 bp, Citrus sinensis
  Intron number 2 from transcript orange1.1g023344m (locus o range1.1g022183m.g) derived from phytozome v7.0 (chr-ID sc affold00110; pos 97749 to 98260 reverse strand)
agaggggtagagacgtagattctgttctcgaacaggtaaggctttttatttgatatcttcaattaatatacaacataattttagttaattttttagttagaacctattggtcataattttagttaattttttagttagaacctattggtaattcaataagcaaaatgtttttttctttttccttgcttatctgtgctaaagcgaaagcctatctttatgagtggatatatttgttaacgatggtttaagcatctaaacaagagttctcattgtggaataattatggaatgcatatgtcaaagccactatgtcttatatgtcttgtatggttctaatttccacacagacttgctgctgtcagaaatatgatctgtaggcctctttaattttaatttgttaaacttctttttattttttaattgataaaatggattgtttgaattatgccaaatttcagtatgccaagtttgtgaaacctgcctttgatgattttgttctgccgtcaaaaaagt

SEQ ID NO: 82799 - DNA, 903 bp, Citrus sinensis
  Intron number 1 from transcript orange1.1g023344m (locus o range1.1g022183m.g) derived from phytozome v7.0 (chr-ID sc affold00110; pos 98306 to 99208 reverse strand)
aagatttttgttgacacaggtttgacctcttcgatcctgttgaatcttttttgctagtgtcagttttaaatgtattagctgttctagatttcaattgttgaatgaggatgctttgtgtcatctagtttaattttagtatcaaatatgtaatgaatggtcttttgaggatatttttctttggcaacaaggatgcttcatgtcatcaagtatagttttagtatcaaatatgtaatagatagtcctttgggtatatttatctttggcaatagttaaggaatagaattaaagcgaatataaattttatctttttataaaatcaagggctttctagagctgatggaaaatttctatgttattctctgagttctagttggcaattagttaatcaattttctgcagccttgccaatctgtttctggttgcaaactgtgtattcagccgtcaaatggccatgaatactcatttgtatggttactcatttcagaggctgcttcccaaatttggtatgctaataggatctatagtaatgtgcacttcagttttgttttaaaaggaaaaactgtgtttttacacacttcatatttctcataattaggttcttttgatgctatagattcatcatattggacaattctgaagataacataatagatgtccttttattttgcctaaaatcatttatgttaagacaggttaatcgttctcaatttgcatcatgtgtttttgtgtgtttatttgttttgggatgggtagcttttggatcgatagagagttggcttttacagtataatagaatagcacatcagaatgttatttttttgaatctatcatgctctacttgctcgtgcaattgctctgtcgtttcaatatcttatgttggcagttgatattcattggttgtag

SEQ ID NO: 82800 - DNA, 250 bp, Citrus sinensis
  Intron number 1 from transcript orange1.1g032681m (locus o range1.1g032645m.g) derived from phytozome v7.0 (chr-ID sc affold00059; pos 536360 to 536609)
gagaaattgagtggaagagttgaagaaactcagaggtacgtccttttgttttttgttaattaggttttttttttgtttatttagaaaaaaacaaatcttgtgattttgccgtgtcatcattcttatcgtgttggctttctcctcttaccggcgaatttgtcaatttagggtttttgattttgacttattcttgaaatcgcttgtgtaatccgtagggttgtcgtttatttaagatctgatcaagaattgg

SEQ ID NO: 82801 - DNA, 290 bp, Citrus sinensis
  Intron number 2 from transcript orange1.1g021250m (locus o range1.1g019570m.g) derived from phytozome v7.0 (chr-ID sc affold00059; pos 479842 to 480131)
aagccttgcttaaagaggtaacaatagtttaattctctctctttcttttttttttccccccatctatatataaataattaaagaaagaagaatatgacaaaagtgctttcatgaaaccatataaatataaacatatgtatatttacataactacaatgattaagaataagataacatgttttcacatgtatgttgctgttattccacacagataagagagctgaaatcaaagctgaatgaagagaacacggagagcaatatttctgtgaaacaagaagagacaattgtgc

SEQ ID NO: 82802 - DNA, 838 bp, Citrus sinensis
  Intron number 2 from transcript orange1.1g025604m (locus o range1.1g021930m.g) derived from phytozome v7.0 (chr-ID sc affold00008; pos 1220778 to 1221615)
ggtaattctagttcttctattttgcaacataatttttctgaaattacagttgttatatagtttcatgtaagccaaattagtacctagttatagcacaaaagaatttagctgttaatgcctagatgtggagtttaatagcttttcttatgttccctgaaaagagatgctgggttttcatttttctttttttctctctaaggttatcaaatctctttatatttgagtatataagttgagaaaaattcataagaggttataatcttaaagaattctgggattttctaatgacttgtcatacctcatgtttgtgaattgaatctcctatttactgcagtttatccatcaccacaagtggaaagcatttcttgctgcttacataattcataatctaagattcagtgatcattctcacatatttgtttgaattagaggaaatgagacgggcaaatagtatgttctatttgatgtggacaaatataaatatagtgttagttgtcatggtggttaggactgtatcctgttacaccttttgtacctgtcactcaattggtctatttttttcaccatgattcctttctatcatttcaaaattggtattaatgggtatagttagtagtgctttgggcgcatccagcttgatcttcatagattgatctattttcaaatattatttatctttgaatgaaaaatttatcgcaactgtttcctattctggagtttgtattaatatgcttcttttttcttctcagatagaacatgagttgttttttgcctgttgttttatctgattttcaaattggactcaactgtttcctgtacagtaataagagctccaggg

SEQ ID NO: 82803 - DNA, 1007 bp, Citrus sinensis
  Intron number 3 from transcript orange1.1g032686m (locus o range1.1g027612m.g) derived from phytozome v7.0 (chr-ID sc affold00008; pos 1993520 to 1994526 reverse strand)
gagaatattgaaaaggtagggatgctttgtttgtttcataagtgatttgttgggttttctacaggatagatgtatcagtagtttgttctcacttgcttttagatgctgggttcattctttcttttccttttgccttttacagttattgaatattttacaagtgttcctatttgtgttagaaatagttaaaagtgaagctggggggaagattgcaaaattattgtattgaaaatgtcatgggagaaaaacaaagaaactcaaaattaaagaaaaataagtgacaaattggaaaatggattgctgagagcctgatgcagttacaatttcactttatatctatctgcagctcattaatactttcattttaaggtctgattggtagcaagtcgttagttctctttttagactctctattgaagcaggctattaggcatgccaaacaatttggcttctccttcctcaatgtctaagaaaagtaacatgtacacatgtgattgcattcgagaaggtgagaggtgttgttaaatgtgtttttctcttgatgaggttttaggaatagtatcatgaatttggaaatttcatttccctaatttgtatcttatagcacctcacttgaatcatatttattatgccacgaaggtttttttgtgcttttgagaattatatgtataaccagttaataattatttgcacgatttaatctctgtgtagtttaagttgcatagcagataatgttccgacaaaaagatcgataactgcacacttctaggataaaattctatgttggaaaagttgactaactccattttttcttttttatgtaaaatgcaaatatcctcttattgaatcaaaataatgtgtggtacattctgttgacttatacggactatttggacctcaatgccttttcatcccttgtttgtcactgttgtggtatagtcatcactgactcatccttgagttttgatgcaggttttagataggggggaaaagattgagctactggt

SEQ ID NO: 82804 - DNA, 938 bp, Citrus sinensis
  Intron number 1 from transcript orange1.1g003905m (locus o range1.1g003905m.g) derived from phytozome v7.0 (chr-ID sc affold00110; pos 253554 to 254491)
tcaagtttttgagaccaacattccctcttctgttggttagtctttgctttttcaacactctaatctttcttgctttcgtatttgtttgttttgggaaataatgagagaaaatgactccaaagttgacatctttggttttctttctcatggcttcctttgaaatgttttcgttgtgtagcctctttcattttgctttttttatttttttatttttacgttgttcctccgtgaccaaacatgagttctgtctttccattgtgttatgtgtctttttatttgaaggtagaattttgtgtttatgtatgttatttggaggctcaatttgtattctgtttttagatttttggggttttaagcgttattatatgctaaatcgaataaacaattgttttttgccatgtgggtgttctttgaaatggctgaattagcgtgaattcatcttggttttgttaaaagttgagttttgtatctctgtttattttgctcagttcttgaaaattctttgtcctttcctttctagtacattcgtgttacaaccttaattctgcattttttacttgttcagtattttcaactttaacagttcatcaaatttcttagtaacctggggaatgtgtgttggttggttgtagaatttggtagttagggtattgaatgggcacaaatttctgtaaaaattttccacatttgtaatagttaagtgggggtttcccctgtcacagctcgcagcattctagaatttgatgtttgttcacttatgtaggatttactaatcacagcaagggtctcacatcaacatttttacattctagtctaacattttcaatgtagcttgttatttgtttttgcaagttgtgattattatcttctttttctgacactgcaaatttctacttccacatgcttttgtatcttcctaattttgatatcttttgcag

SEQ ID NO: 82805 - DNA, 902 bp, Citrus sinensis
  Intron number 1 from transcript orange1.1g046665m (locus o range1.1g046665m.g) derived from phytozome v7.0 (chr-ID sc affold10641; pos 678 to 1579 reverse strand)
ctagagacagtgtacagtataaagtagattgttgatgctgaaatctgctcgcccaatgttgatgctgaaatttgctcgccctttaccccaccagattcttccaccaacgcttagatgtttaatgggaacgatgttattttctccttgccttaacgatcgcttacgtcactgggttggaatcacccctttttatcttgctaagcctgcgttcacaaaaaatggatcaaagacgccgatggttttaccggcgtaaaccttccgatgcctaagttagcacaaggtgtttacgggaaaacggtttaatttagattttggaatggcttacgatttactctcaatttaggtagaaaaaccgtctggttttaacttggcagagttttcccttctctctcagttttttcatcccctttcttcattggtttcttcctcttttatagccgttgtcccacatttctgttcacccttcatcccctctttctcaagtagtggcagcccttcatgggactccaactgctacattgtgggcaaacgtgggacaccgtgtctccctcaacggttctggaaaaagcgcaactgtcgagattttgtgggatcgtgttcccactctttggggaatgcgtatctactcggtatatgtctctagtcggtgtattcctccggctggtactcgtctctggtcggtgtattcctctggctgtactcgtctctggtcggcccatgtttgtataaggcttattatcagtgttctgctcgtaccattcggctgaggtgatccaccccgaggtggggatgatgacatggttgagctggtgctcttatttacttaacatagatgattccaaaatcaaaggggacggaattcaacagcacattgaggagtggctgattagtgtggacgaggt

SEQ ID NO: 82806 - DNA, 406 bp, Citrus sinensis
  Intron number 3 from transcript orange1.1g021687m (locus o range1.1g013981m.g) derived from phytozome v7.0 (chr-ID sc affold00059; pos 111280 to 111685 reverse strand)
cggtatgtaccttatcctgatacacatggattcttgttaatatataacttcatataaagatgctcattattttgataattcattattattctttgatgtcttccccatccatggcatggataaaagccattacctatccatgtctgaacttttcatgagaaaccaaactgtaaggcctccttttatttagggtacaatctatagtaattttaagacatttaatgtattttgtttgttatcaggttaataccataactagaaaacactcaacaaaatagatttcgatcaagttgtgcattttggtttctgagaaacacttgagatgttcgctgatgatttaacatggaaataatttatcatctttttagaattttattaaatctttatacaggttcctctgagtgtt

SEQ ID NO: 82807 - DNA, 514 bp, Citrus sinensis
  Intron number 1 from transcript orange1.1g021687m (locus o range1.1g013981m.g) derived from phytozome v7.0 (chr-ID sc affold00059; pos 111965 to 112478 reverse strand)
tccctttttctgaggtaacttaacaggttgcttgaaataatttctttttgcttgtccagtagtttggttgtttattgttatccatactctgtgtgcacaaacatgtccatggtatcactttgtcctgtagtagtgcctaagcttgctatcttaaagctatttatctagagtatctgttcttatttatttcaatcttgcaaattaatctttctttatactaaacttcatggattcttgtatgaccctggctccagattcttcaagagtttaagaagattatgattttcattggtaaccgttttaagtatttttatcatatggtacattagtaattctgtagcatatattaaactgaaccattcattgtgtacagcaccatataaagtgtcctcaacaaggcattgcaatttttgaggtatttatatcttggaacaactaatatattaatttttgttcctttgtttgatgttgtgctgcagattgattaatcccgttgttgtagctccaactgttg

SEQ ID NO: 82808 - DNA, 629 bp, Citrus sinensis
  Intron number 1 from transcript orange1.1g005375m (locus o range1.1g004974m.g) derived from phytozome v7.0 (chr-ID sc affold00059; pos 165872 to 166500)
attctctgctccatcgtcacccttttgattgcaaggtaaatcttattcatatgaaattattctattcagtttagcattttttcccattattcgaagaaatttctatcgttacattactttttttttatatctaaatgattcaatttttttcggggggaaaaatctatgtttaccatttaaaaatctatgttttgtttgttttaatttaacattttcttcagtgagtcaactgatggaaagttataggcatttaggagagttgcatttaactgatgaattggaaaataatgaaaaatttgatattgaattacatttttagggtttcacaacaaataaagttaattttttgtccttatgtgaggtaaaggctatgttcaaagtaatttactgagaaaagatgattctcattctgaaatgaaactggacaaagttactagttaattttcttaaaatgattatatactttcaatgtcagcgtctgttccaattcagctttttaataatcaggaatgatgaattgaatttgtctagaaagtttcaaagctaacatttgtatctgtccacgatggataaattttaattcttgtgctccagtttctgaagccgcaaggtagtcaaatcctgtttgt

SEQ ID NO: 82809 - DNA, 336 bp, Citrus sinensis
  Intron number 3 from transcript orange1.1g045750m (locus o range1.1g045750m.g) derived from phytozome v7.0 (chr-ID sc affold00059; pos 423240 to 423575)
ctcctttgttagatttgaagaatatctgcttcgtaggtatattcattcatatgattgtgctgcttgccgtgaaagttccaaagatttttcatcagcctgatctgccaagaaaaaagggctaggtgtttggtcttaatctttggaatattcaggtcgaatatttgaaataataaaatcatacggtggctccccattaggtccttcattgtttctcatcccttagccccccctctctctcacatataagatttgaaccttaaccccagcccttgatttaatgtctgctaagtaaaaatactgagacatattcgtgttttgatatatctcagggcacaa

SEQ ID NO: 82810 - DNA, 457 bp, Citrus sinensis
  Intron number 5 from transcript orange1.1g021030m (locus o range1.1g021030m.g) derived from phytozome v7.0 (chr-ID sc affold00059; pos 624226 to 624682)
ctgtgctttcattcacagaaagctatatttaccaggtaacacaacctgctcaaaagtatgaactatgataatcttttcaataatatgaaaaacatttcaaagtatttttttgaatttttgtcgagatggtgctgagactgttgaattattattgctgcaaaactgatgttaggaccttgtagaagtgtataaatttcagtcatctatcaagcattggcatgtttctctagaaggcatatgagccttgcctgatctttgtgtgctcttctttttcctgctatattcttgcctagaataaaattttcttttataataaactgaaaggaatttgtacaagttagcatgagtttgccgtgtaacttcttcgctgatgcctattttatattgagctgcaagtcctttctgttttatcttctctcaacagttgtggttttcttagtgcagctggatagtctga

SEQ ID NO: 82811 - DNA, 207 bp, Citrus sinensis
  Intron number 1 from transcript orange1.1g019086m (locus o range1.1g017067m.g) derived from phytozome v7.0 (chr-ID sc affold00008; pos 1826601 to 1826807)
cctcgggacctcgctgttcttcttgaagttgacgggtaccctcttttgtttttccattatttgattatgagacactgtgataaatggtttttaattgcaagaatatagaagcatgcttgtttactatacattatgcatataataatattattgtttctgcttacaatttctgttcttcaatcatttttttttccagagtccttgtgg

SEQ ID NO: 82812 - DNA, 895 bp, Citrus sinensis
  Intron number 2 from transcript orange1.1g041564m (locus o range1.1g041564m.g) derived from phytozome v7.0 (chr-ID sc affold08581; pos 800 to 1694 reverse strand)
aacaggtgaaatttcaaatctataatctttctcttttggttttattgttgcatattttttaaatttttaatctttttattactgatttggggagcttagtgttcaatttgtactatcacagaaaaggatcctgtgatatttatttatctaacatttacattttaatgttcattactgagtaatgatctatgtttgagttttggatcatcatctgctaactgattgtttcttttaatttcatgaaccatagatataaaatttcatagctctttagttaatggctaagagcagagcacatcttattttgagccatatgtgatgccacttgttatttattaattaatagcaaagttaataaaatttaaaaaaataaaaaaaaataattgaaagataagaagtaacatttgttgtagtacattagctcttgtttaatgattatatttagttaatggattcattcattagtttgttcagaaattggagttgctatattttgatccaaatgaaaaataaaaacttatattgaaggatggatgggtgtcattttcccttatagtttttatattgcttcatagatgattgtatttattttttatgcgatcaagcctcaattcttgtatcttttatggcaccattttaatagaactttttcggccaaaaaacttatagggcggcatacaaattttgcagaggttacttcgtagagcctaattcaagttttctgttttctttgacttttgacatgcaattcttattttgaccattaaatggaaattaatcatgcattttctctgtagtgtgatgcttaatgcttttgggattcatttcactcgtactcacaatcaggcataggtatacttctaaaatatttctacctgcaaaggttgcagacact

SEQ ID NO: 82813 - DNA, 649 bp, Citrus sinensis
  Intron number 1 from transcript orange1.1g043477m (locus o range1.1g043477m.g) derived from phytozome v7.0 (chr-ID sc affold10049; pos 1507 to 2155)
ctagttcttctatttgcttcggttcagccaaaactgtctgaataaatggattcagctctgaacttatttattgttgagcactaaattaaaatagtccctgacaattaacataatttagtggtcaataaaaaatcaactcaatattgaattgatttgcgaaacaaatgggaaaaaatatattatagaatgatagtactttatttagtttaatattttaatgttattgtaatttggataagttcaaatttaagataattcatctcaattgaatggggttaggactaggatttaataagaaataagcttattatcttagtttcatttaaaaatattttagatgattcttatttagggttcatccccatcattaatttgaagttttgtgtcttttacttctatcaagttctggtgcattctagatatatactaaaatgaattatagtattgcttctttgttgcatcaaaaatctatctttgtttgcttaattttgtgaatataatgatcttcttaatataggattaaaaaagaaaacaaaatgtgtgaatcccatgattacccgcattaaagaaagttgattatccatacaaagattgaatattaatttgtacataccattttgttgattcttggttggaaaggattcttcca

SEQ ID NO: 82814 - DNA, 317 bp, Citrus sinensis
  Intron number 1 from transcript orange1.1g007043m (locus o range1.1g007043m.g) derived from phytozome v7.0 (chr-ID sc affold00059; pos 542758 to 543074)
atcccttcagggtcaaagatcacgatttgcctgaggtaaggcctttttctttttgtttttgtttactgcttgttctataagcaattgatggattgaatcttgaattgtgttttgtcacgcattttgtattaatttttcgattatcaattttattgcctttgagtttagaatcctgcccagatcaggctggtttagaatttggttttaatcaaagtaaaagacgtgttttttttttttttttttttttcatcgagtatgatcttcatgtataactctaatttatttgtgttagaaaccgattgttctgagtttcggag

SEQ ID NO: 82815 - DNA, 968 bp, Citrus sinensis
  Intron number 2 from transcript orange1.1g047843m (locus o range1.1g047843m.g) derived from phytozome v7.0 (chr-ID sc affold00360; pos 80025 to 80992 reverse strand)
gttgctcaaaacaactccagacagagtaccctgaggtcagtctggtttcagtcaaagattactccaaaaatttcctggttgaatttctcaaagaagaatataagatataccaaagaacaattaacaaaatataaaactgattttgttggtacatattctttttccttttatgtccattggtagagacagaatgcaggataatggtggaagtgtgatcatagctatctatagacattgactaaggcaccccctggcttgctacctatgtttcaaccagcaggatcttgtcttatcaagcctgaaaaatatatccactagcaaatttcttgatatttatatgtatgttctcttagtttgattgaatgtaggaattgggataagatgggactggaactggatttggatagagtggattatatagtactgttctttgtctagtgcagttccggactaaactgcattctgattaaacatcttatatttatgttttaaaagatttattgtcctatattcatggaactaaagtttcgagccacaccatttgtccagtccaattttagagtttaattgtgtgctattagactatgacaacaagaaatattgcttaatcccctgtatcgcgcaatcaagacgtggcctagagtcctcgctttaaattaatttacacttgttatcctgctacgccataaaacatactgttatcgaaatctaatttgttaagggaatgttaatatttgccctaaaggaactagatgagagagactactggcaatgaacgtgtgcaaaaagcaacttgactacaaataatatatctaaaaagtaaattatgcatctttttgagactttcaatgccaaaaggctcccttggtatgcacagattaagaggactcttgaagtaactaaaaggcgaaaaatctcccttgctttatcttatttgaacaacttttgtttttactttttttaagcca

SEQ ID NO: 82816 - DNA, 861 bp, Citrus sinensis
  Intron number 2 from transcript orange1.1g029683m (locus o range1.1g029683m.g) derived from phytozome v7.0 (chr-ID sc affold00569; pos 50271 to 51131 reverse strand)
tgctaaagtttccatttaaagttgagattttctatgtaggttaccctggaactcccatggctatgtagaaaaatggctcagctcttatagacttatgggtgttgttatgaactgaaactagtatgtcagcatattgataattagtatgttttaaatgtattatagaagatatctcatgctattgtttgagttgtcgttggttttgttgttacaggtgaccaagtgagtcacaaattttcatcgcttttgtggaaatttgcagaacatgtttgggggttgagattgggattgtaaacttttcagttatgaactatctaaattctaaagatcttctcaaaaaagaaaaaaaaattctaaagatgaagaaaccttctagagtggtacaagaggtgtggggttatttatattaaaaaaagagtactaaggattaagaaatttgctttaggaagttttttaggttttccttgaggctgctccaaacactttgtggtgctttgtcatggatccatattcaatttattctatttactgctggttttccatccaaggtatcagttgatattgcactttaaatgtttgaagagtgctgcttaaccctgctaagatgtaagatctggcaagtgggtcttctattgtctatggtaccagtagctttagtagctatatattgttggggtttgatgtctgttaaatgtttttgcctgtgatgatagctaatgattaatgcaatttttttttaatcattttaatactttgagactgcacaaatgctatggataattgaggttttggttctgtttatttgaatttgacaacaacttacgtttggctttcccttttagatcactgacttgttggtca

SEQ ID NO: 82817 - DNA, 976 bp, Citrus sinensis
  Intron number 1 from transcript orange1.1g012755m (locus o range1.1g012755m.g) derived from phytozome v7.0 (chr-ID sc affold00284; pos 23320 to 24295)
gaaatcgacggccgtgattgatttgagattttgaggtactgtctgtcttttgttgtcattgtctgaaaatcacgccatgattttaggtcttattattaggtttgatttgttcgttgaataaaaatttatattaataattcattggttgacaaaagtttcgttttttcagctgaagaattaatttgttttcttcttctttttcttttgttgtgggtggtttgggggggtgggggtgggttaatttggagctgccaatgctttacaaattttcgtatgagagtgtaatgaacaaacataaatagcttaactaattttgaagtgtgaaactgagaactgaaaggtccatgatttggcttgttgcaatgaacaattacttgaatttttaattgtcttcggtgaatgtcttgaaattcaagtaaaggcgtaaaatgcttacattacatgttactttttactgcttattttttgaattttaggggaaatttagtcagctttcagaatttcagctggggtttctgattaattaagctgtatctctgtcaaaacatcatgagtggtaaattgaatctactgttaaattttaaaaaaattattttgttgtgtttcaatattgtttcaaagacttgaagtcaaaagtaggatacagatgtaactgtcgtgaggcttaattttgaaagcacagctaaagtttttggtaaacactcgctttcacagttccacttgccagctaattacttactaaccgcccaatcacttgtatgtgattgtaataatttcatcccacagcagttctcgattaaaagccacagcacctctatcgcaagtgtaccgttacattgttcaaattattgtatcattttaaattgcttgtcagcactgtttgttctacagtctctaaatcacttattgacagattttgtttcttttatccgctgtctatcatcaaatagtgtctggactgcacttctcattcaaa

SEQ ID NO: 82818 - DNA, 387 bp, Citrus sinensis
  Intron number 1 from transcript orange1.1g012649m (locus o range1.1g012649m.g) derived from phytozome v7.0 (chr-ID sc affold00008; pos 1930142 to 1930528 reverse strand)
ttcagcttcaccggttgttcgacctgttgttgctggtatgattcattctcttttgaattctgtggaaaggtggttctttttctttcagatcgtttttttttttttgttcttggacatcttcatttatttatgtttaaaatacaatgtattattatgttgtatgtatttcttaacttgtggtttatgataatattggcattcctatcgaatttgttcttaattcttaaaaaacggaaatggaactgttttcaaggactaggagcatgtaattgcaccaaaatgagtgtaaatggaatcagatttgtctgtcaggagtgattttatttactgattgctgattttattattccagaaattcaaaaattgaagatctcggagccggtggct

SEQ ID NO: 82819 - DNA, 661 bp, Citrus sinensis
  Intron number 1 from transcript orange1.1g033111m (locus o range1.1g033111m.g) derived from phytozome v7.0 (chr-ID sc affold00008; pos 1620361 to 1621021)
tggacagcattcaacaaattggccttcaagtacccgtaagaacgaaccaccccccccccccccgggcggtaaatttaattattttggtcgaaatattcagcttagctaagtactgtctaccgatgataatttaattataagtatattttaacttatatagctgcactaacaacatttccattttgatcattttagaaaaataagaaatctaaaattagttaagaacatgcatataatattgtgttaacttgcaatgagtactccgatgtcatgagaccaaaaccgaataaaataaaacgagattgatttgaaattgattgagatttgaggcagaatgagatgttgggtattgatccgacaccattagcatggacccaaaaactcaagttcttaagcaaaatcccaatgttagtaataaagacaattcggcatagagtgtggagtagatagaaatgttaggcattttagcgtcattagtagggccaacaccaacaccaaaagttaaccgctaccagtgctagcatatcctcgggcaccaccatcattgttgctgcaaatgccagtagttcatcgcttggttaaactctgttatttgactctttccttttcttttcctttgcttgtttatgttgacttgttatataaaaattgatgcagattg

SEQ ID NO: 82820 - DNA, 719 bp, Citrus sinensis
  Intron number 1 from transcript orange1.1g029441m (locus o range1.1g029458m.g) derived from phytozome v7.0 (chr-ID sc affold00360; pos 60783 to 61501)
agcacactgccgcaagcagtcaccgtcgactgtgagttagtaattgttctttttttttaagttttttattcttatatttgggttttgggtaatcagtttttaatacatttatgtataaatggatggttggaataataatctaactaaataaaatttttatgattataacatcaaattatttaattgcttttttctaaaaaaaaaatctggaaacaaatgctaattaatattttttttgtttctcactggcatgtatgcttttagagtgtaaatgaactgtcaaaaagtaattaagcacaaaatctgtagataaaggcgcaagataaatctgttagagaaaagagtgcgtttcttgattcttttttgtagcttttgtggaagtttaatctgtttttgagtttaaattgttggaactgattgtgctgtttttttttttttgaaagggtgttgtttttaagcttgaatttgtcttttttttttttttctttttcttcttctgatagtttgtgtgcaatcgatttttgaaaatctaatttaaaattattttgttggctggtttccattttgtttcccatttctaaggatgagatagtttctcttggtgatataggggtataaccgctgatttttttttttttttcctcaagcggttggaataagctaatgaggagttgaaatctgcaggtactaacattttttgtagagactctactcgagtt

SEQ ID NO: 82821 - DNA, 747 bp, Citrus sinensis
  Intron number 1 from transcript orange1.1g010527m (locus o range1.1g010521m.g) derived from phytozome v7.0 (chr-ID sc affold00284; pos 180495 to 181241)
tttgtttcagctcaactaacatttaccaccttcaggtatgcatgcatttctttcactgcaaaactgccccttctttcattatattattctccatgacaatttcagttgcttgttgtttttgttttgttggccaccttcttttgcattttcttcttcttgagcttggtgttggggaaaattaagaaaaaaaaaggtttgagagttgagacaatcatagttgtgtttatatttatgctgagaatttgtcacctatagcactgaattcacttgagtggttactttttcaatatgatgaaaaatgaaacaaaaaaagagataaaaatgctaaaatgcgttctgtttagaattggaggcagtaatgtttttggagactcatgaaattaaaatttagagaataaacccacctgggaaatgagcatctttttttttttttaatatttatatgccgtggagaatcaattgcttgctacttctgttgaatgagttgtgttcacgtggttgttggatccaattctccttcttgtgtgactcgtgctctgggattgttatctagtagtttttattttggataatagttgtgataggcattaggcaagttcttttatgtcaactttagctggattttgattaacttggttgattttgtattgacaatttgttaatagaagtttccttagattcttatttaattagtttttattaatatcagaaggataataaagtcatcttgggaaatttataacacga

SEQ ID NO: 82822 - DNA, 514 bp, Citrus sinensis
  Intron number 1 from transcript orange1.1g005397m (locus o range1.1g004122m.g) derived from phytozome v7.0 (chr-ID sc affold00008; pos 1824914 to 1825427 reverse strand)
agatcgattccgtctaccaatcccacactgaaaaggtatatatatatgcattcttttttccttattcttgttttgtcatctgggtttgtaatgcattgagttcagtctatcaaaaattgctaccttttctcatgtctttgcgaaagattgtttctttgtatctggggttttctcagcttcaagttcatgctgattgttgctgttagcttttaaaagatgaatctttatcttggcaatgcgttatgcacaactgggttgtctagattttattttcaatgtattggagtagtttgatttcaattcttctgttttgagtggaaagctgacaacgggcaaaagttatcttcttatgggaatctcttagtgtggttgaattagtttgagttcaatcggtatccgaaattattcctttttacttatatgttctcagttcttgttgaaggaacgaagtcatttcttttccatgtttatcaatgtagggaatcagaaagctctgctgtgagctgttggattt

SEQ ID NO: 82823 - DNA, 282 bp, Citrus sinensis
  Intron number 1 from transcript orange1.1g032848m (locus o range1.1g032645m.g) derived from phytozome v7.0 (chr-ID sc affold00059; pos 536360 to 536641)
gagaaattgagtggaagagttgaagaaactcagaggtacgtccttttgttttttgttaattaggttttttttttgtttatttagaaaaaaacaaatcttgtgattttgccgtgtcatcattcttatcgtgttggctttctcctcttaccggcgaatttgtcaatttagggtttttgattttgacttattcttgaaatcgcttgtgtaatccgtagggttgtcgtttatttaagatctgatcaagaattggtttaaattaagcggtgattgtaatctgtacag

SEQ ID NO: 82824 - DNA, 612 bp, Citrus sinensis
  Intron number 1 from transcript orange1.1g025041m (locus o range1.1g025003m.g) derived from phytozome v7.0 (chr-ID sc affold00110; pos 414178 to 414789 reverse strand)
tagcttagctgctgagaaacggcaggaaacaaaaagtaaggagaagttcgaaacttgtcttctaatttgattatgtctttgaaagcataggagaatctgtgctattacttgagttaatttatggtgattttactcatttttgttttttcttttgactgaatgatttttcgtacttgcctcttgtaaattgaaaattgttggacacaggcttcctgctgttacgctgtttcaattttcagggacaatgaagttttcatctgcagattgttaattagtataattaatcgattgtagtagacttgttagtgaaatttgaaaattataatttgtttgattttccaatacttttttttataagaaaatgaaaaaattatgaatgttcaatgttaaactggacaaaacctgtcccctgtccctgtcaatggttcgatttattagttattattattttttaaaatttattattagcagtagtaggtagttattttttttcaatagttattatttatattataagtacaataaataaaactcagtttagtggctaaatcgtttggttctgaaactattgatttccaattttcttgatttattgtagtttcggaaaggcac

SEQ ID NO: 82825 - DNA, 811 bp, Citrus sinensis
  Intron number 2 from transcript orange1.1g009559m (locus o range1.1g009559m.g) derived from phytozome v7.0 (chr-ID sc affold00059; pos 327845 to 328655 reverse strand)
acagagtgcttcttaaggtctgtctgtgtcttaattgttattttgtttcttcattgattttgtgtttttgttagttgtttacgctctgaatgttgcttataattcaacgttctttctatttgctactttaccacttggaataacaaaagcaatgagctgtattggtggcattctcatcacttttggatatcattatgtaaattgtcgttttatgttcagaatttgtcaggatacaatacacggtcatgtaaccaaattttccgatgtagagctcgagctccttgtctgttcataaaagctagaattatgaatttattacttccgaacaccaacaattctttaacaatgttttaatagttgcaattcattgctacaactcccttcattacaagtttttgcagtactctgcttacgactatcccatatctttcctgagtaatctgctttagaacctttgaaattttatcctaatattttttattaagtgatggggaaactattggatacaatgatgaatcagaccatatgcaacttgggaaactatggttagagttgatacattatcgacagcagtaaaagtttaagatgaagtatgagacaaattaaggagagaataagtgtgaaagatgaaaattcatgcaagctatggtgttaataattctgacaaaggcctattgttaaaatctctgaagctctggtggaagatttgactaaaaatgatttggttctttgaaatgttgtaactgatttttcttgaaataatgaaacattttcaggtcataaatttctcatcacccacatctgctggtgc

SEQ ID NO: 82826 - DNA, 577 bp, Citrus sinensis
  Intron number 1 from transcript orange1.1g014862m (locus o range1.1g014862m.g) derived from phytozome v7.0 (chr-ID sc affold00008; pos 805949 to 806525)
gggtatgttatgtgtatgctatgttacgtcactttcttcttagctttctacaaatgcttgatgtgtctgttagttctttgggctgttggtttgacggcctctcactgaacagaatgcttatgatcagatcacagtgaaagttttatgttttggagtttctaaaaacttcttatggcatatgtgaataccctttaattgtgaaattactactgctgttaaaaattaggcagtacaatattagtgttcactgttcactactgtgaacagtctaatctgtattagaaatctgacaatatttgactttttgtttgtgtgctatctaagaatcactgatgattactaaatgaccagttgaataatatatagtaacttctgtcatttgttctatgattttaagaacccacaaatgaatttgttccctgtacattattctgaatttactttgataaaaccttttaatatattccctggatgaaagatttgttttagatataacaggccgaaaatggaattgaaaaagctggtggtttccttttctgcaggtggaatagttggaatcattttaactgcaaaattg

SEQ ID NO: 82827 - DNA, 155 bp, Citrus sinensis
  Intron number 2 from transcript orange1.1g014862m (locus o range1.1g014862m.g) derived from phytozome v7.0 (chr-ID sc affold00008; pos 806529 to 806683)
agaaaatcatcagagaaacaggtaagtattatccacagtaagaaacatgatcctcaagctgagtttcctattaaagaagattcatcaaggttgtcacagcatagttaagtaaataattgtatttgattttgttttcttggtttaattggcagctg

SEQ ID NO: 82828 - DNA, 893 bp, Citrus sinensis
  Intron number 1 from transcript orange1.1g020051m (locus o range1.1g020051m.g) derived from phytozome v7.0 (chr-ID sc affold00284; pos 66944 to 67836 reverse strand)
gtctatttctcataggttctttcatcaccccaccagtaagcctgcttacttcctcaatcttttctcgctctctctctctctctctctttaaagtgggtgtgtttgattttattttaaagaatccccttttttttgtgttttgttgatatgcatagattagcatttcagattttttttcttcttctttatcttcttcatctttttgagttgttgataatgatggattttgaagagattattcttgtacaaaaataatttttttttgtaatatttcctttcattgttgacctgaaaagcagttggggtttgtggattatgcttagttgatgaggttaaatcacatgtcagtgtcaaaggttcaaaatatatttgtttaaatttgtgtaaggggaaggtttttcatgcccaaatttctatttattttttttctaatagtctaatcagaaacttttcttgctgacttcattgcctttctcttggattttatttattctttaattagattgtacaagtaatttaatagttaaggattttcctattatttccctctgtttgtgattgtttgcatttaaaggcatatattgctgatgccaaatcttttctccagtctttctttgttcatccatgtgatgttgttaatgtcttgacgatgaagtgttagatcacttttaataaggtttgtttatttggattctgatgctattggctgtaaagttccttagcattcatagtataatacattagctttgtctccttgctgcagatgatgcattattttagttgaagaagcataatttaagctatatcttatgtcatgcttgttccattctgtaatgaagagtgtgatgcctgatattttgggtatgattttgcagtgggttattgttccttct

SEQ ID NO: 82829 - DNA, 829 bp, Citrus sinensis
  Intron number 2 from transcript orange1.1g020304m (locus o range1.1g018731m.g) derived from phytozome v7.0 (chr-ID sc affold00008; pos 769930 to 770758)
cctgaaaacactgctaaggccattgctagttgggggtaggttttagaaagttcagtggtttaactttatagttggcaatcgtcgcctagtcggccaaattgtccatcagctgtcagtaacattagtaacatacctgctgctatagtctatagaatatttcatgtgtactttggtaatgaatcgtgtaaagtaccgtgagttctttgcttataatataatgtttttcgtcaaccatttcttcttttgttgaccttgtagtgatcaagcataccgttccttccccaccccccaatgacactctatgaatgtatttccgaaggaccatgattctctcctgatctgatcatatcctgagcaaataactcaattgttgattggtagttaataaataaaaaaataatagaagttgaatcttacccatatactactactaaaaaacacatggcagaagatcttgaaaagttcaaaagagatcagatcaggagagaatctttttccatttccgaaatagtacttgagtttgatatctggctcttggtctactgttccatgagactttggaggaatagcagtaacttttagttgataggatcctcagagttgatccagttttgagaatgaatagattaattgttaagtcgaaagctttgagttggttaaaccataaatattttgtcaaatatatttagaggatacttctgctattctgcctggtgcatcaatatgcatatttgcagaaattaaagctgctattatcttaactaacaattttgcacatggcttgatttttgtagggtggattatattgttctaacgagtgtagatcgtg

SEQ ID NO: 82830 - DNA, 709 bp, Citrus sinensis
  Intron number 2 from transcript orange1.1g035059m (locus o range1.1g033622m.g) derived from phytozome v7.0 (chr-ID sc affold00008; pos 1190902 to 1191610)
aggttggtgactttctctctgtgttcaagtaatctattgctgttcttttgttaaatgtcaatgttttactcagtgagcaatcttattgtatctaagtaaatgtttggcaggattcagtgtctaatgtttatgatgtgggaaagcatattccccagaccttgtataacccattactaaaagattgctcaaaccctttatcaaaggataaggaatttagctgtttgcagaatgtgtttaaaatgtgagtataaaataaaaagggaaaataatatgattgatgcagaaggtaattaaagtgttttaatcatattaatttaacaaagtatgattaagaaaaatgtgattagttttcttggcagggagttagtttgctctctgagctattagtgcttaaaactggcacgtgaggtcagttcagtttcacttatgcgtctcactttcttctttcaagatgcattgattaaatgttggtgcttgtttgttgacatgcataaaattcaattcagttttaagcaattgacactacttcaatcatcttgtgtattttttagcatctcattgttatgttagaaataattgtgttattatgaatggtttttatccaaatactattataccaaattgtatgattctgtactttttttccctaaacataatgccagatagttttcaagtatgtaccatggattttgatttggttcttctacag

SEQ ID NO: 82831 - DNA, 458 bp, Citrus sinensis
  Intron number 2 from transcript orange1.1g022342m (locus o range1.1g022183m.g) derived from phytozome v7.0 (chr-ID sc affold00110; pos 97803 to 98260 reverse strand)
agaggggtagagacgtagattctgttctcgaacaggtaaggctttttatttgatatcttcaattaatatacaacataattttagttaattttttagttagaacctattggtcataattttagttaattttttagttagaacctattggtaattcaataagcaaaatgtttttttctttttccttgcttatctgtgctaaagcgaaagcctatctttatgagtggatatatttgttaacgatggtttaagcatctaaacaagagttctcattgtggaataattatggaatgcatatgtcaaagccactatgtcttatatgtcttgtatggttctaatttccacacagacttgctgctgtcagaaatatgatctgtaggcctctttaattttaatttgttaaacttctttttattttttaattgataaaatggattgtttgaattatgccaaatttcagt

SEQ ID NO: 82832 - DNA, 605 bp, Citrus sinensis
  Intron number 1 from transcript orange1.1g038983m (locus o range1.1g038983m.g) derived from phytozome v7.0 (chr-ID sc affold07972; pos 1927 to 2531 reverse strand)
ctgctgatcccacccaccaccagggttaccaaattgtgaactcgaaaatgacatgttaaatgcagcaacaagccccaagtaaaagaaaagaaaattcgtgagtacaaagaaatcaatttacaatatacaacgggacaaattattaaattcgtgagtacaaagaaatcaatccctaagctggtatagcatccactggactactctttttaatcgttaattaatatatagttactgatctataacaaattctttccatcaccacaaaaataaaataaaaattcaatctagcggaatgcatctaatgacaaaaattcattttaaagttcaactgatttcattgacttaaaaagcagtgaattagattataagatacaataacaattggcaattgcattgccatctaatttcattaacctaattacctaaacttaattataagaaacaaattggctgctggaacagaggacataaagaagtcaaaaattgaacttacaattttggtcataaacttaatttgaacttacaattttggtcggaaataattatagaaccgatcgagtgctgctagttttatgggtaaatcaaaaattgtatgtagtgcggca

SEQ ID NO: 82833 - DNA, 558 bp, Citrus sinensis
  Intron number 2 from transcript orange1.1g036428m (locus o range1.1g036428m.g) derived from phytozome v7.0 (chr-ID sc affold05371; pos 3327 to 3884)
gaggaagctagtagataatcaacttttcttcttcttcttcttcttcttcttcttcttttttatgaaaaacaaaaaaaacaaacaaaaagttcgttagaattctttcattctcctttccagattttgctgatgtgcctaatcagaattttgcttttctctttttactgggttcttttcgacaattgaatctttgtttgtgtaaaaccatacatattattgtggacaccagtttctcatgaagagaaacaaggtctaatgattatcgacttctgtttttagactggacggttctgttccttctgttttcattttcagattcaactagctagaatcataatggagtaattaccgtaccttgattattattattattattattattattattattattatatgatgatgctcaacttagtggactgcttctctttcactttctaatcattaaatttaattcttctcattaaccgcattcatcaaatttgagttttcttgtttttattgtctctcaatatttttaatctgattaatgaatgataccagtggtggaaactaagg

SEQ ID NO: 82834 - DNA, 703 bp, Citrus sinensis
  Intron number 1 from transcript orange1.1g025003m (locus o range1.1g025003m.g) derived from phytozome v7.0 (chr-ID sc affold00110; pos 414178 to 414880 reverse strand)
agggcatcattgtcttgcttttgtgtttgggtcaggtcagtcacgaactcattattgagtcaacaagcctttgtttgagtttaattgctgctagcttagctgctgagaaacggcaggaaacaaaaagtaaggagaagttcgaaacttgtcttctaatttgattatgtctttgaaagcataggagaatctgtgctattacttgagttaatttatggtgattttactcatttttgttttttcttttgactgaatgatttttcgtacttgcctcttgtaaattgaaaattgttggacacaggcttcctgctgttacgctgtttcaattttcagggacaatgaagttttcatctgcagattgttaattagtataattaatcgattgtagtagacttgttagtgaaatttgaaaattataatttgtttgattttccaatacttttttttataagaaaatgaaaaaattatgaatgttcaatgttaaactggacaaaacctgtcccctgtccctgtcaatggttcgatttattagttattattattttttaaaatttattattagcagtagtaggtagttattttttttcaatagttattatttatattataagtacaataaataaaactcagtttagtggctaaatcgtttggttctgaaactattgatttccaattttcttgatttattgtagtttcggaaaggcac

SEQ ID NO: 82835 - DNA, 760 bp, Citrus sinensis
  Intron number 1 from transcript orange1.1g040075m (locus o range1.1g040075m.g) derived from phytozome v7.0 (chr-ID sc affold00008; pos 1530461 to 1531220)
ggaaaactgaccgaattctgcagtgaatcaaccaggtccttccaagattatcattacatatcccttttcttaattattaatttccctataatgcatttctttgtttattttctttttatattataatattacttttggatgtatttgagttttttttttctctcattcatggcttctttctggcggctagaacgctgatcagtatttaaattgttatatatttctgcttaaatgagttaaatttacgttctaatttctgttttttttcactacgtaaaaacttgtttttcttttgaagaaatcataaaaaattcaaagaaattaagaccaacttgagttatttcttattctacttcctcctttttttttgggtttcttttttctctttgacatcctcctacccaattagggtttccgtatattaatccttgcctatttctttgttgatccgctaaaggtctccagactccggcttcctatgattatatatacatatttttttgttgacttaatgacatgaaggtcaggccttcgtcaatgtgattttccacgaaaagtttttttaatcaattatcacagaagtactaggaaatatcaaataaaaaaaaatgaccaaattgatatctccttttttaccctcttcaatcaataccagtaataaattcttgcagagttttctttcagtttgtatagattttcttcaatttaaattatagatcttgcagcattgaagaaatcataagaaggtaccaggctgcta

SEQ ID NO: 82836 - DNA, 998 bp, Citrus sinensis
  Intron number 2 from transcript orange1.1g038763m (locus o range1.1g038763m.g) derived from phytozome v7.0 (chr-ID sc affold00284; pos 120165 to 121162)
aggtatggatacttttcagttatccttattttggagggaatcatttttctcaattaatcatgctatacattgtaaggggacaaatattttagtgttgcagcccaagttcttattttgcattcaaaattcggcttgagtaccccaagcccttgcttgtgggtattcttacgtgttcccattatcttggatttgcacacattttgctatcttttggttgtgttcagaatgctataaaagtgtgcaatattcacctctagtagagatggcaatgggatgaaagtggctggaaattcattcttttattgaatcaaatcactgacactcttcatctgtttttcctttttttgagagtttttcactctgcatatttctcatcatactttgattgagtttcccattttatttcagaatttctatattccgtttcgtaaaccatatggcctgttgtaattacttctgtcttccttgccacaaccttttctcatatttgaacttctaacagttgattaaatcaagaattattcctcaatataaaagacctgcaccattcaaaacattttggcaagtttatttttcctcttttttcaattttatctggatttacctcactaaatcatcacatccacctagtccacaaaatgttagtgatgctctgttgaatggcattaaagctggagccatccatgctctaatcttgatgaaattagtgtagtgtaaaaaataaaaaggatcacgctataaaggcagtgcagtacagatgacattcctcgagtcaggttaagttttttgcctttggatcaacttcctaatttactgggttatacaaggttatataggtatagttgtatcattatgccacttacggtagggcataggacctcaaagccacatgttttgtagctgttgcaattaaggtttttctttggatagtgactttgcacttttcttaatcactaacatgttgtgtttctcttttgcagcgcaattgtgaggcattg

SEQ ID NO: 82837 - DNA, 911 bp, Citrus sinensis
  Intron number 2 from transcript orange1.1g041633m (locus o range1.1g041633m.g) derived from phytozome v7.0 (chr-ID sc affold00059; pos 605773 to 606683)
ggcgctgctcaaggtttttatttctttaaactttcgttctagttgttccttttatctcttcgagtttcttgagactgaaaactttttacattagttggtgaagttttgctgatgaatgacagcttaaagtttttattcctaatgaactgtgcaccgttaaaaaatggatagcctatccagcttagctttatggttttcctcgtgatgctgtgattgttaattattttatgttattacaagcttcattgtattgatctgcttgttgttagactctaataaggagcctgtttgccactatttttcttttacctgtatactatcttcctttgccagcaagttggattggatcttaggacacctgtgatatggcaactcacttttatttaccagagaagcttcccactgtatgttataatatttgattttaatgtgtatgagttttttaaaattatcttcccatgcgtcatgttaatgttacccaatctgttatgggactaactcatttttttggaaatgcttaaatatttttattaccccctgtatggaattatttttccaactttgtttttaatttgcatctggattattgaatgattgaacaaatctttttttagtatgtgtttttgcaatcttctgttcttttctatgggataacagttaaagcttttcatgtacatttaatttaagcttactttattcttgtttataatgcattgtttgtaattgttgaactgttttggaattccttttcaagtttatctgaaaatatgttggctgttgactttcaatttgtacgtgcttaagtaacttgccagtttcctctcgaattcgtaacccatgtgttagtatttgtttcttttgtatttatcaatctgtttacacggtgttcctcctatacacagatcctgcta

SEQ ID NO: 82838 - DNA, 898 bp, Citrus sinensis
  Intron number 1 from transcript orange1.1g039197m (locus o range1.1g039197m.g) derived from phytozome v7.0 (chr-ID sc affold00085; pos 212413 to 213310)
attgagaattccgttgcagagtcagctagtaagaaaatcaacctttgttcagcagttttgtttgtaactgaagttctccattgttcattaaaacaattttgcatttgacccaattttttggtttacaaaattttgatatattcttggattactatagacttatgctacttgaattgtgtttatctttctatgtcatttggcaatttaacttaaaaaaaaaaaaaccccgagtctttacccatatctaattgcaaatgactacatgcgcattatgtcgtacatgaaagtttgataaggaaaaatgaaattcaaggacaacatgactaggtggcattatttttataatttttctgcaagttcttgacctaatgacgttgtctatcttttaattacctgagaggctaaaaatcttgaaagaagggttgacattctagctgagattgttgatgctctccaaactggttacagcatgattcatcttttggatcttttatgaacatcggtttccattccgtgtctaggagcagatccttgatttgaaacctattggagaacttgctttcacagcagcagatataatatacttgtaggtccagtgtgtatataaaatacataattcttcagtctgtgctgttcagatgaattgagttcacattggtgcttactaggtagggctctctttagcttatgttactcaaacaaatgtttgtactttgttatcatattaaaactgctagaccagcagtcatctagttttttttttttttttgtttaagagcagtcatcagttataacaacctagaactgggttaaaaattttaccatcatatttctcaaaataaagcagattttataatatgaaatatttctgcaattcttgtagttagtcttagccggc

SEQ ID NO: 82839 - DNA, 427 bp, Citrus sinensis
  Intron number 1 from transcript orange1.1g047246m (locus o range1.1g047246m.g) derived from phytozome v7.0 (chr-ID sc affold00377; pos 159684 to 160110)
ttggaattaagcaaaagaagatagttgatcaaattgttagaaacgtcttggcccctattctgcggatgcagcaaaagacatgagtggccaaatagtggaataaagtaggtgtgttttctttagtggattgtagttggtgcgtttgtcgagtgaaatgtagtaggtatagttgattatgagtactataaatatgtactaaatccgttgtaaaatccaacctatctttaatcaaaatttgagtttctcgtttcaaattctaattcaaaatttgttataacttcttctctttgtgagaacgcaagttagagtgaaatatagcaaaactctgcgtcatttgactgcctcttttgctttcataattatctgataagttatgtgcttgatttccatcttcttgctgcagtttccttcgaaagattttgtcgtg

SEQ ID NO: 82840 - DNA, 527 bp, Citrus sinensis
  Intron number 1 from transcript orange1.1g025316m (locus o range1.1g025316m.g) derived from phytozome v7.0 (chr-ID sc affold00284; pos 84862 to 85388)
cttcttcttcaagatccacatctcattttgctcaggtactcctctctttctcgtaaccattctttttatttatttattctgttatctgtttcttgatttagttataacaatgtaatggtgctgatctgttatttatttatttatttattattattattattattattgttgttttacatttgattttagaatttttcttgttttcattttattatggagctgaaatttgatgcatttgattgttcgtctgcttttgtttaattgttggatttacattcttgaatatgttgagatataaatctagagaaatatcatttggcaagaaaaataataaaaacccagaattttagatctggtatttttcacttatttgagctgaaaaaactttctttataagtgattcattttcacttaccatttcttttataggaactaaagaagaggttgaattatttgctgttgattcttaaccgttttccaatgaccatgcagatcctgttgtattcaacaatttattactagctgca

SEQ ID NO: 82841 - DNA, 385 bp, Citrus sinensis
  Intron number 2 from transcript orange1.1g046615m (locus o range1.1g046615m.g) derived from phytozome v7.0 (chr-ID sc affold00008; pos 721758 to 722142)
ttacctgcctatcttactggggctagtcgaaagtgtgtacatgattagcggtttgccagaaacatttattgtactttcttggaattcagtttggttgctaagaaagtagaggaagacatgtttagttctacaatatttctgtttgatttctaatggaggaaaaataaccataaattggcctacatagttgatttatgattagctggctttcggtaccaatttgattctttccttcttctgccttttcgtggcaaccaaacaaaatttaaagccaagttcagcatatacaattcttttcaagcatgcatttccggtttaagattagtcctttatatttttcaatacattatgcaggaaaccagctgcaagataagttgcaattccc

SEQ ID NO: 82842 - DNA, 518 bp, Citrus sinensis
  Intron number 2 from transcript orange1.1g039744m (locus o range1.1g039744m.g) derived from phytozome v7.0 (chr-ID sc affold00389; pos 902 to 1419 reverse strand)
cttagttctgacaatgtttcagttttaaaataatatattcttagcttttcgaattcaatcactcatatacaagtttatataaacagtttacaagtattcatgttcaggcatcagcatagatatgataatttgacatttgatagttattacggaattatttgcacaaatattttttgataggcaaaaacccttgcatagctacatcagcaaataaaccttaagcaacctaaagtaatgtatataccttctttgagctagcccgtatctttccaaggatttgaacactgatagacagccacaaaaagctgttcgaaagagacgaaacatatatgcttaataaagaacaatttgattatttgtgctgatagctctcacgatttacttttatggtgtatattataggtaaatgaagaagtggagcgtggactaagacaatattacaaatttcaatctttaactaggtctcttccattgtgtttccaggcactcgaatcatcaagcctcaaacttaccttcag

SEQ ID NO: 82843 - DNA, 802 bp, Citrus sinensis
  Intron number 2 from transcript orange1.1g026749m (locus o range1.1g026749m.g) derived from phytozome v7.0 (chr-ID sc affold00059; pos 638577 to 639378)
aagggatccattcgtcgggcttctctggcaaacaggtaagtatctgaactagtagttaactcatattgtcatcggagcggtgcttttattttagttttatccaaacacgcttttactgtgcttttaaatttttggtcttaaaattaatgaatttaaagtacatcgtggggctgctagatttgtctcccaattttaggtgctgctgaaaaattggttatggtttcttagtttgtacattgattcttgctgttcgtgaagcatttggcttgtcaacaccacaatatatttggattttttgtttctgggtatttcaagaagatgaatcaaacttcttctcaagcttaaactttggtgaaagtcttttctatgcttattgattctttcattatgttttcgggtcaaatgtttttgttggataaattattgatgagtacattaacagcagatcctattcattatggcaggccattctaagtctgtatttgcatttattaattgcttaggtgtatgggagcaatttgagttttttctcttttttaaatttggattggctgatttcaattaatttgtgtatggaattattttgatctttgatgagtcaagatatggtgaggagtgtgatctcttttgtccatttactttgacaaccaattcagaatgtgtccgggaaaaaccctcttatatttattcatttgatatattttgcattattctggtaatttttttcttgataaaatttagttgtttcaattagtgttaccattctaaagtagaaaactttgaattgtgtttaacagttcag

SEQ ID NO: 82844 - DNA, 514 bp, Citrus sinensis
  Intron number 3 from transcript orange1.1g026749m (locus o range1.1g026749m.g) derived from phytozome v7.0 (chr-ID sc affold00059; pos 639425 to 639938)
tggagtgcgttgttcaaggaattatagagacacaggtaacttatgtaaatatatatttcttaagtttgtaaaagttttactcttgttttaatgattttgtagtcttgaaatatctgtatacagttgcaccacagtgaagattagtgttaattctagtgaagaattcgcacatcacttttatttgccttgaggttgaatgagatacatgcggtacattttgagttgttggccagtgagtttgacaattatgatcatggtagacgataaagatgctgaatattgaattaaaatttagcaataatattctataccaaggcagtttttaactgtttacatcaacatgtgtgtactagttgattcaattggcaaaacctcttggttggtacaagagatttagaattcgaatcctgcatgtactagggttggggagggttagtttaaatcataaaaggaaatagaacaaaatgaaataaaaaatatatattcacactgatatgagcttttgtcttgcagc

SEQ ID NO: 82845 - DNA, 963 bp, Citrus sinensis
  Intron number 3 from transcript orange1.1g034827m (locus o range1.1g034827m.g) derived from phytozome v7.0 (chr-ID sc affold00008; pos 1135326 to 1136288)
attttggactgtggaaataattagtgactgtaagtggcaaccttttttaagagtgtaattttagtctaattcccataaaatattgggccatttagcttcgtgtaaacaaagagatgcaagatgctggaatcacccgaaggcagcagcaggccaaaaaggcttattccacaaatgactgatgttttcctcttcattcttgtacatctgagagagaatgtatatttggttttcaactttgaattagaccacaagtgtggagatttccatttgatattgtcctatctggtatttgtacttttcttggacctttgtcttccataccatatgagagagcgagaggaggtgcataagaagtttgaaagtaggtaaaaataatctgttataccaaaatagtaggtctaggtaaagaccttggcaagattaactgggtttgttcaggttggcaagtggcccaattggaaaaccagaatgctctgtggtctgatttaccagcttgtgttggccgatcatagtgtgataactattgcttgcatgtcagcttgtgctgcctgtttatgtatgttcacttgtgcctgcagtttatcacaaaaattacagcttgatgctgtttgaaagattgtaagtttttactgcatttttggttcatttcatggctttgttttgcaaatatgaacaagttccttaaattgccattggagcaatatatatatctttctaattttagtttcataaggcactactcatgagagtcatagctatgttgaacctctgtcactctgtccactttaaaaaatttcttgtgaggtgactcattatctgcgttaggttaccatagttcagctaaatgaaaatgatgatgacagttcatgttctgttactgattacctcacatcctttttattatggtagaaaaaatgcacccaccagaattttgtctttaacttcttttttgtccatttgcag

SEQ ID NO: 82846 - DNA, 1003 bp, Citrus sinensis
  Intron number 1 from transcript orange1.1g033779m (locus o range1.1g033111m.g) derived from phytozome v7.0 (chr-ID sc affold00008; pos 1620486 to 1621488)
ataatttaattataagtatattttaacttatatagctgcactaacaacatttccattttgatcattttagaaaaataagaaatctaaaattagttaagaacatgcatataatattgtgttaacttgcaatgagtactccgatgtcatgagaccaaaaccgaataaaataaaacgagattgatttgaaattgattgagatttgaggcagaatgagatgttgggtattgatccgacaccattagcatggacccaaaaactcaagttcttaagcaaaatcccaatgttagtaataaagacaattcggcatagagtgtggagtagatagaaatgttaggcattttagcgtcattagtagggccaacaccaacaccaaaagttaaccgctaccagtgctagcatatcctcgggcaccaccatcattgttgctgcaaatgccagtagttcatcgcttggttaaactctgttatttgactctttccttttcttttcctttgcttgtttatgttgacttgttatataaaaattgatgcagattgatgtcatcgaggttgatggaaattactatggtatgtgctcatttatactttctgcttatggtcttcctagttagtagttacttcatgtgtcttcttttcaacttttgggttcttgtgagtgttgtcaccaaaggacaaagggaaagaggtaaaagaagcacaagaactccttcagagactaaatacagctaatatcataatctttcatgttttctccaaggatggtgatcgttgattgttccttcctttttttttttacctcttaggtttttctgggtgtcaccggtatgaggctcaccagcgccttgggcttccaacaatccgttgtaaagttcgtcgtggaacaaaagaaactttgaggtatgctttgctcagaaatgtctctactcctctagtatatacctgtaatatcagttgatgttcatcttgcaggcatcacctacgctaagtttcagcaagttcctttt

SEQ ID NO: 82847 - DNA, 631 bp, Citrus sinensis
  Intron number 2 from transcript orange1.1g012265m (locus o range1.1g005990m.g) derived from phytozome v7.0 (chr-ID sc affold00003; pos 849327 to 849957 reverse strand)
ctcagaagtttacttttgattttaattacttaaaggtttttaatgttgtcatttttttccttttgcttcctatttatgtgcctatattacatttgtgtgccattatggataaaagaaagttggttagtttcgaagaagtttgtttaacttcatatctgcataagcttcttagctgccatgatacaaccaattacctttgaacttgtcagtccgggactttaggtgaagcaatgtgagcatacatggatgcaggttttgctaaacaaattacaattcataggatattgcgtttacatctgttacttatctaagttactgccttgctgtttgcatctgttcttagataaaattaaacagatttgataatatttacattaagttgtagtataggtcttctctcttagtgtgatttcattatggcaatctgaaaacatgtgagataatgcatccaatgctaatttgcattctgtggctgctagatttgcttgatttaggattatagtggtgcaatcaaagtgtatctttagatgcattgaatgcactaaatttttatcaacttccagtattgattttgattttcctttggctatttttaaataggcatactgcctatacaggcaaaacaggttag

SEQ ID NO: 82848 - DNA, 867 bp, Citrus sinensis
  Intron number 1 from transcript orange1.1g025315m (locus o range1.1g022935m.g) derived from phytozome v7.0 (chr-ID sc affold00026; pos 859458 to 860324 reverse strand)
gggaagaaaccgccagacgcgacctcttcgatcaggtgtaattagtaagcaaaattaatattttaagaatgaattttattattttattttttgcagttaaaactattaaaattgagaatttgggactctagtctagcggcttgcaagttataagtaaaagttgacttgtcatttgcgatatgaagaacgtgcttagctggcttttcttttctttgtattttttcttcacatgcaaaaaaaaaaatattgcgataattatcaaacaattacagtacttagttagttctattctgtgttgatcaaaatttaaagttttttgtttctaaaagttttgcatgtgagagtggttttgcttaaaatgatagctgaactgatttttaaaagccatattttgcatttcgattatgttcttattgcaccgtcgttgagattaatctgaaatcggctgtttttcttatttatttttgtatgtttcaagatatcttacgctgatttttggatgggtaggagattgattttgcatttcttatacttatgaatcaaagttccatgtagtgatgcattctcataagcaagtattttatccgagtatatggctagcataatttctttgttaaggtcttccttgtaataactgccaaatgttttatagatttatttgtctctcaaagcaatgtttcagtatcatatattaaattagagtgtgctgaaatgggatggaaattttgctcgttaactatgcttaataaatgaaagaaaccaattgatcgaacatctcatatattttgttcactgacaggaagttcttatcctttacattttctttgtttagaaactgaataggaagcttgtgcatattagtatcgg

SEQ ID NO: 82849 - DNA, 833 bp, Citrus sinensis
  Intron number 2 from transcript orange1.1g030478m (locus o range1.1g030478m.g) derived from phytozome v7.0 (chr-ID sc affold00074; pos 462928 to 463760)
tctgcttctctgtcggcatattctgtacactattggtaagtttagcctcagcattagagctcttcttttttatgtgttcagtataatttccattgaggtgatggtgatgtcatctgtctgttctgataaatgactgaacaaaatatctgtctctgaatttcattatctaagaatctaagattaatagtctgttattttatcagtattgaaaaatgtttcttaatgatgtaagcatgtggtgtaaatttctaactactttctgatgggtctgcatgtaacctttttacatctgttaaatggtataggactttatatcaaaaggtgtgttcttcatccgttattaaattcagaattttgcattttcttaggaggaggaggaggaggagggaggggggaggggggcgagttaggattttccattaggtgctttcaagaaaaccaatgccgactttattatcctggacattgattcatgtccttgagtgttcagccacagtactttgacatgtttatgaaattttagccacagcccacatgtcttaatggctaagtgcatactttggacaccctttttaacatatatgactgactcaattggtttgttaaccatcttccattcctatggattacaagataaatatgaattttcagatgtaaatatttcaccatggaggtagagttaacaagattttatattttgatttgttaggttactagtttcttactggttttggcttgaataaatctggcggcttttaatattactgactattttgatcttttcctttttcatggcagtcattacttgttttctttaatccaatcaagttcgg

SEQ ID NO: 82850 - DNA, 815 bp, Citrus sinensis
  Intron number 1 from transcript orange1.1g040003m (locus o range1.1g040003m.g) derived from phytozome v7.0 (chr-ID sc affold00018; pos 1024280 to 1025094 reverse strand)
ttctttaggccaggttggtcaatttaatttcatttgtgtgttcattttaagcaaattatagcatttcgaagactccattttgcctttattatgaatgtatagtgacccttatctattttctttcttaatctgaatgattccatcattttttctgccatgtacttgtcgattgatagcttcagggatcagaaattgtagattaaacccattatccttgaggtgggctagttatcaattgcgggaatagtcagctaaaagggctaaggaaatagagagatataaatggtcttggctttctatgaactgataaatatatattcagtagtcttgtttctctttttgaagcaaattcctccgaggaagcatttattagttagtcttggtatttggaggaacagagaaattatgctcaagcactcttttgaacaactgtagtttttggccacacattcatgtacttttgaagtgatagattctgatttctgaagtcctagacttcttctgatttatccaaggaatcacttgtcagtcagtcttgacatctggggaaactgagaagctatcgtcaaagccatttttggagtaatgtctgcaaagatattttagcccttggtatggtagtcaatggatacaattggtgcatggtagctgtggcatttttgtggctaattcaatatgtgatgtgataatcttcttccgtaatccgcagtttgattgtcagattttcgcaggttattgtacacgagttaagttgaataccttataactgatctcgaaaaggacttacgtttagagtttggcttaggcttcatttt

SEQ ID NO: 82851 - DNA, 145 bp, Citrus sinensis
  Intron number 2 from transcript orange1.1g020354m (locus o range1.1g020354m.g) derived from phytozome v7.0 (chr-ID sc affold00271; pos 92799 to 92943 reverse strand)
ggatcttcaaggtagcaattattctcttttggtcattgctaagtttttgtttaaacgaagagggaaagtcatgaagccagtcttcaaatttgatttgttttgtttaattttgtagaattgtgcaaaataggaagtgaagagcaga

SEQ ID NO: 82852 - DNA, 845 bp, Citrus sinensis
  Intron number 1 from transcript orange1.1g029100m (locus o range1.1g024953m.g) derived from phytozome v7.0 (chr-ID sc affold00034; pos 815228 to 816072)
ggattgtggctgtgttgccaagctcagaaccaccggtgagcagccgtttgtcaccgataatggcaactacgttattgatttgtatttgaagaaagacattggcgatttgaaagttgcaagcgacaacattttgcggcttgccggtgttgttgagcacgggatgtttcttgatatggctactactgtgattgtagcaagcgagctcggcgttacaattaggaataaatagtgatttttttttaaattttaatttttaacgtgtcgagtctaattcccaagtgaatttgggcacattgtcattgttatacaaacacaaaaaagggatttttgggtccattttttaagaaactgatgaattctcctgtattaggaggtacttccaagttttgtttgagacaggtattagaggattttaggtgattctgaagataactgaaggatgagtgaacaatggtgtatcacagttatcattttcttttcaatagttatttccatgttatatttattaacgctttggaattgacttggtcagaattgatactcgctgttccttttttaaagtgttattttggattgcctctttctttccttgtgattgatacttgtcaaattgcaatttatgtttgacaaaaatgagcttggtatctagttctgtggtacaatcgaactttgactatggaatctgattggagatgatttttgccgtgtatgtttcatgcgcaattcttacttagtatgcctttgttcactttctgggtgggcatttttggttttggccatgaattgtgaattgtatttctgtgttctcaggagcagagtaaaattgcaggggtggggattgtgta

SEQ ID NO: 82853 - DNA, 856 bp, Citrus sinensis
  Intron number 1 from transcript orange1.1g044685m (locus o range1.1g044685m.g) derived from phytozome v7.0 (chr-ID sc affold03620; pos 176 to 1031 reverse strand)
gttggttggagagagggctggtgcgaccttggggaggcatgattggagagcttgaagtggtggtcaattcactccatttccttttttacgtccaagatacattggtgttaatgggttgcaccctcttgccaactcttgattggcacaggtgacaaatctttgttttgcttttgtgttaattcttttgttggttctattttgcatcttgcatattctctaattaaatcacaatggtaagaaactgctatgtatttgaagtttgccagtagttagtgttgcaacatgggttgatcctcccaagtgcagttctatggaactgattcaaggtcccaaaatcatcacaactttgaggtttaaccacactaggaatataagaatatatgaaactagaaagttaaattacgtgttcatgtgatttcaattgcataggctgcatgggtggacttaatgtaatggtggcgataatgatcatataactggggaaaagaaaaactagcacgaacattcttgcaccactgtattttgaatacaattcctgtgaagtaacaagcttatacatgcaacattaatattgatttggagttaggtgtatacaacatattatcaaggcataccattgttattaaattatgtaaatcaagtcccttttcccttcagctgtatcctttatggtctaaatctgttttgatgcttgttgcagacctctgaggttaatgtgatgagaccttgctggataggtaatcttgatccatttaattgaatgtggcacttgatggatagtggaataccttgtggggttattgctcataatggtgattcagcattgccatccttgcttctctctctctctccatct

SEQ ID NO: 82854 - DNA, 654 bp, Citrus sinensis
  Intron number 3 from transcript orange1.1g016237m (locus o range1.1g016237m.g) derived from phytozome v7.0 (chr-ID sc affold00091; pos 26978 to 27631)
ctggttctgataagagaattctttttctttgtggggtaagtttttgttttcagaatctcatgaataaaaatatagtggcttatctatagcctccagccattttgatattgttgttgatatttcacaaagaagttaagattaatatgatgtgatatatagttcagaatgttatagttcttttcaagaacttagcaagttcttatttctgacaagaaaccgtatgtgcaaatacgtgcaaatttgacacttttatttcaccataatctatagttgtgaagtctcttcacttgccacattgaagcatgtaacttatattttggtcaactattttgctttacaaatctgtatgtgcaacttgtatatttagttttttattctgtgtttaatatatattttgaatgaccctttttatacttgcacaaatgtattcataacagtagtgaaaggcctatgtagatgttcatttaaatatgcctactcaagatgcaaatggtttgtcgaagataacactggttttagaaatttactttcttaaaaatccactaaactttgatctaagtggagaaagctaacgtaagcatacatgagaattttctctgcactaagattttgttgagcataattgattccgttgttctgttatttcaggattac

SEQ ID NO: 82855 - DNA, 535 bp, Citrus sinensis
  Intron number 1 from transcript orange1.1g043133m (locus o range1.1g043133m.g) derived from phytozome v7.0 (chr-ID sc affold00070; pos 47926 to 48460 reverse strand)
ttcagaaactactgcaagaatctagacgctcactggtttgatcattgcttcttctgctcgtttaataaccttaatttcatgattttttaagttttatgttaaattacagttaaaattggagtgaattgaaatagttgttaattaatttagttgtgtttggaagtggccaagtgctcagtagaaagcacttttgggtaatctattttgattatctttcaacaaatttaattaattaattaattaacattttgttctgtatttgaatatatttttcagaaaaaagttacctatgagtgcttttttaccccaaaaaaattaaaaagaaaaaagaaaaataaaaataaaaatcttgcaaaatacaattgaagtgctttttatctgaaagtgctttcgtaggaagcatttccaattttctttctacaacaaagacaaagtaaaatatatgtgtgtatcacttccagacttgcatagttgtttctgtgtgattttatgtgtttttcatgccctactattggtttatgcagctcctgcagct

SEQ ID NO: 82856 - DNA, 675 bp, Citrus sinensis
  Intron number 1 from transcript orange1.1g009977m (locus o range1.1g009977m.g) derived from phytozome v7.0 (chr-ID sc affold00004; pos 2132764 to 2133438)
agcagtgggggttaaattttggcttattctgattggtaagcttcccatttcttgattcaaatgtgaacttagctcaaaatattctgtcaaatttcaattttgatatcttttcttatagatggaagtatcttttattgctggtaccactaattaatcacgttggctaagaatttattgagccgggatttagtggtagatggcacaaacttggagagagcaatataagaaaataaataacaacggtgactatagttgttgagtcggtaagagcagttagatattgcttgtcttgggtttgtctttctgtgcaatgctaggagttgatgatgactattcttcgaaattcgaattttgaatatctaatggggtcaaggaataagaaatgaaaataggaaatgagattgcttgtgggtttatataatataagcactgatgttttagttactgcatcatgatgcttagagtttttttgagggattttagcagatatgttgtgcagtctttacatttcatgattaactcattatccacaatttttatttcttccaatttaatggtttggcttctttttttaaatgtttcattttctgaagaatcccctcgataaaaacaatgaatgatttagcataagcttgcacctaacagattcttactactactgttatttgttaggta

SEQ ID NO: 82857 - DNA, 545 bp, Citrus sinensis
  Intron number 1 from transcript orange1.1g038360m (locus o range1.1g038360m.g) derived from phytozome v7.0 (chr-ID sc affold00261; pos 198782 to 199326)
ttaatcttgctaaggtatatataacgtctctcatctgggtttttcttctttatgattcttttcattgtagaatgatttgatctatttttttgtttttttatgaattattttgtgttgcaaaacctattggtgatctgggttctatcattttgatgtataaagtttagtgtcgttggatctatataataagtagtaatgtttgtgtttaagtcatttttgttctccagttgattttcttttatgtgttctgtgcgttgatgtgcgacatttgatcttttttctttgtaacgtgtagtttttttcctttcttctttaagagatattgtagatctcctaaaatcataaaagattttgatttactgccatcattctgttgttaagaaaaggaatttgcattgcttcatttcatttgatctgtttctacgaggcattgtgcataaactttgatttgttttaggaaaatcgtatatcatttgtacatggcctgattgttgcaatgttttctcgtgttgtccttttgatgtagaggtacatacaacagcacg

SEQ ID NO: 82858 - DNA, 1001 bp, Citrus sinensis
  Intron number 3 from transcript orange1.1g020131m (locus o range1.1g020131m.g) derived from phytozome v7.0 (chr-ID sc affold00035; pos 609165 to 610165 reverse strand)
gtgaaaaactaaaggacttgcttcaaaaattggaggtttacctcttagtgtggatatttgtttgctgacttggtaccttatggtcttggatatgcctttttaccttcaaataaatagttgagtttttattcatttttcaaagcatttatcaattgtgggcgaataaaacacagctgtgcattatacacattatgcttgtggattttaataatgggggcaagctttgaacaattttatagagaatagttatttgtcttgtggttaatcaccttttggttgtgtttttgtgcccttttcactttggacatgaagtagtgtgccagatgtcttgcagcaatgaaatattgggttaaaatgacaagaaactcatagtttaaaaactttccagtgatttttcaatatctttccctctgagtcgcttgtaggtttcttttgaatgccatttactccttgtgaaataagacagctccgaaaggtgttggcctctgaatttgcataggagatgtgatgaaggaactttaattatggcatggattcttgatttgctctagcatgcttatgcctgaacattttagtgctcttgaactcacatacttttatcgttaacccacaaaaggagataaagacctgcagaaatcaggtggtgtgggatatgggtgtggtctgcccctaaacacaagcacattcaagttttgagtgaaatgaacacctgatcacccttctttaagcagatgtgttttccatatatatgtttatatttgtctacaagtgcagcttgaatccccccttttccctaatatttgtttattttatatcatctatctgatgtttctggtcacacagtattcactttaataatgattgcttcaagtttttcaactttggctggccattttttcttgcagacccaaatatttgctacttattgacctttttatgaatgctttatatatcattattttgaattggtaaattgactgcaggttcatctgaagccattg

SEQ ID NO: 82859 - DNA, 862 bp, Citrus sinensis
  Intron number 1 from transcript orange1.1g014144m (locus o range1.1g014115m.g) derived from phytozome v7.0 (chr-ID sc affold00007; pos 2166627 to 2167488)
cagctcagctcagagtatgtacttcttcttcccctctttatttatttatttgaatttactaaagccaattgtgtgttagcttctgtgtttaaacttttatgtgggataagtaacctgttgattggatttgcatatgcttttgtcagaaacttttttttttttggtggagatcataatctatctttataataacaactttgagaccaaagatttgcaatttgaatttgtaatagatgaagaaagatattgttgtaatgttgttccacaatttccctttatttcgtaatccaagctctccttttataggcctttagttggggtcttcttgataatttacatgattattactatgatgaaccctttggagtatattccacagaatacagttgaagaggtgtaatatgctggattgttatgttaaagctgttagaatttactcaacacattacaattgaagaggtttaatacgctataaagaatagccatgtggaatgaattggagtatatggttttgcttttgtccagagatcagtttgcacatttaaattcagatagtgatagtgtaatacaaactttaaatctttgactgttctgctttgtttacctaagaggctgttaattttatatttaaattacatgtcaatagatttaatttgatgacttggtgacttcttattatgtaaatggtttaggtgactgcttatatttattacactacagttatgttgctcctactgttgcattatttcctgttcatttccaagaatgtcatgtgcatgcgagaaaatttgatcttggtgattgaaaatgcacttttaatgtagtaatatgaatgttaattttccaacttttgcagaggtca

SEQ ID NO: 82860 - DNA, 761 bp, Citrus sinensis
  Intron number 1 from transcript orange1.1g046948m (locus o range1.1g046948m.g) derived from phytozome v7.0 (chr-ID sc affold00328; pos 8289 to 9049)
atccttgggatcttccaagtatgaactacgtactcaatttgtcttttttttttctttttgggatcaaatttaaaagagcttttaaaggcttaaaagtgtttgttcaactcttctttttccccaatgtgttctaaattccaatcaatctcatttcaaatgaagctattaatgggtttttcagaattgatttgatattaacttagagcttatttgtcttattccttaaaaggagtggggagaagcttgcttaagttcttgagtgcaactttcggtttttcacatgaactttaattacaatgattaagttctgatcagtggatcatcaatttgaagtttaagtaaagcttcttttctttcttcttttcattttcttgtgattccaacttccagattttcatttttcttgccacacttgcaaagaaagtccgacgaactataagattcatgctctctcatttaccagcataattagattatcaaccgaaattacatggtggagccccatcttaaatttatatatatatccttcacttactagaacttaattaggtttaacacttataaagaaattttcatttacttggggaaaccccatcttaaatttatatatactcattttgtgtcggagcatatatatatgtgtgtgtgtgtgcatgcactccaatcagactgtccaggatatttcttgtaatcatctaattttgctctctttatctcataatgcagaaatcagttctacacctgacaacgaaggatacttc

SEQ ID NO: 82861 - DNA, 624 bp, Citrus sinensis
  Intron number 1 from transcript orange1.1g015358m (locus o range1.1g014250m.g) derived from phytozome v7.0 (chr-ID sc affold00074; pos 524891 to 525514)
aggtatgcaggctaatgtagggttgatgtgctagataatagatgtatatgccaaacttggctatgttctggatgcaagatctaggaaatggtaaaatgtatagcaaaactcattttcttttttcaattgccgtggatgttatatgttcctatgcaagttttaatctcaatgcagcacgatggaaactcaggctcaataactttgtgaaaatctaaatcttttacgaattttatgatctcaagtttctgatatgaatcaaattttaatattttttattgcctctgattataaatggcacggccaagtgttcgtgaggaaggttccacttgtgtaaaaatgcacacaatcgctgtgcactcttttgacattgagttgcattgaggcatgaatcacatttatgtttctacatgcaatgttcatcccaaaattttttaacacattattctatatggatatgttttcttcttcttctttctttcccttttttctttgggtttctttggtaacagatttagtggatttctttgaaatttaagagcgttgaacttctagataagtgatactgaggattttcactttttacactgtgcagatcagcatctcagcactccaaggcagccaata

SEQ ID NO: 82862 - DNA, 707 bp, Citrus sinensis
  Intron number 2 from transcript orange1.1g028481m (locus o range1.1g028481m.g) derived from phytozome v7.0 (chr-ID sc affold00007; pos 2376734 to 2377440)
gcagctcctgtcagcagttactcggctggagatatgtaagtttctcttctcttctcttctcattgattcaactaggatccgttctcctggatattacaagttttgaatttgatgttaccccctttcacctgttttgtagttttttttttttctttttatgttctttctaagtaaatttaattacaatgcattagctcgagaaatctactgaaaatttttgatacatgctagatgctacaaactggaaaacagaataaaataaaattcatgtggatttgggggggcaattcagcattcatgtgtaaatttaatgcgatagcatatttgattttcttacaatgatcatatttgattcctgtaaatgcaccacttgttattggggaaagaggaattatggctgtagggtttgagtaactgatttactgctaccacaggacatattaaaactattctctgatatgcatcaacagccagccatcaaataggattactcttttgcgcccgccctagtttattataaatgtttttcaacataaattaatattgttttgtttttgtggaaacaactattttatttgtaatttgtaaatttgtatgtagtttttctatggttaaagtgatgtcgcttctcacttgaagctagctaatgttgcttttatcattttttggtcttttgttaaaattccaatgactccaggagaaggcat

SEQ ID NO: 82863 - DNA, 706 bp, Citrus sinensis
  Intron number 1 from transcript orange1.1g012255m (locus o range1.1g012255m.g) derived from phytozome v7.0 (chr-ID sc affold00682; pos 37800 to 38505 reverse strand)
caccatccaattcttgctgatccacttcgttgcaggtaaatttttaaattttgtaaaatttgtaggagacgttggtttctaagtgttcgtgtgattttttttaattcctaaaaaatgaagctgaattgtttgattttcaataaatctactggtgcatgattaatttactgaagcgtgaaggttttgatatgggttttctttattttcgcctttgatggccgcaaaagatcaaattttttaatgtgggattttgggttcttttcgttttggtgaaattaattaattttaaattaggcacttgtttggttttatatgtgatttatgaaattgaaattgtttttaaattcatgtatttatgaactgttatatgcagattaaagttaatagttaccttgttgcatatgaaacttgattcagtctgtgctttaaggctctccacttagttcttttatttatcatgaattgattgttgctttttgaatagcaacatacattctatcctgtggattaaaaagagattggaggtgtttaaatgctggagtggtaattctctaatttcagaatacaaatgattgtctgcatttctaaaacatgaacttaactaattgaaaaaaaaaatgttataatcagatagcctgccgactattttgttgtctggtttcaggaaattagatttcggtgaggcaagaagaaatatctagtcgag

SEQ ID NO: 82864 - DNA, 670 bp, Citrus sinensis
  Intron number 2 from transcript orange1.1g009283m (locus o range1.1g009283m.g) derived from phytozome v7.0 (chr-ID sc affold00121; pos 308213 to 308882)
aaccatttctcatctcttggttagcaccaccttcttttctaacgtagtaattattattttttattctgttactcttggagattctttatattaacacggtgaaatagttaaacgacctctattttcattaaaaaaaagaagaaataatctgctttaaatatggtagtagtttcattttgttgcgcgacgatccaagatctagcggttgccaggctgtagtttgatcacacatctttacacacatttggttgtcttgaacttcatctatatggcccctttaatcaccctgtaagttgcaacttactgatagaatgagactaatttgttaaatcatgatactgaattctatagccttttaatgttttcgatttagatccaacaaacggaaaaaaaaaagtaaagaacagagatagtctactttcttggatttgtggtccttgttagattattgtaagtgataatgatgtataaccaattttcaatctaattgatgcacatgggtagaatcaaaatcatatattttttgcacatgagtttgatgaatacgcaaatttctcatggtttgtgaacaaaatatgtgaaaatcatgtggccctagttcatgttaaatctagtttaataacaatagactaattaaaaacttaccatgatatgctgtaatttttcagga

SEQ ID NO: 82865 - DNA, 514 bp, Citrus sinensis
  Intron number 2 from transcript orange1.1g021267m (locus o range1.1g021267m.g) derived from phytozome v7.0 (chr-ID sc affold00151; pos 85043 to 85556 reverse strand)
atcattcgaactgtcctcaccctcgggtgcaacaggtactgaatttgtttaatttgctttctctgcatatcttgttactttcattacatgctcaagctacatggttgcttggataacacacgtattacttgattggatgatcaagtttagaaagtccttggctaccaaagacaattattttgtaaataagcactccttttgcttcattcttgaagggatttccatgagtaaatggtagactgcttttagccactataagagaaaatgcagataatgatgctaatccatacaagtcaacacatgacacatgaagaaaaatacaaagtagtatttaggatcaactttgaagttatgtgagaacagaaccggcatgtgtttacattgtcaactgttgtggtgcattatcactgttaaaagattatggtttctttctggtccttttgaatcaaacatagttataagttcacgttttgttgaaggtgtggtgagccagccgctcagagtgtgttttccg

SEQ ID NO: 82866 - DNA, 741 bp, Citrus sinensis
  Intron number 4 from transcript orange1.1g023368m (locus o range1.1g023368m.g) derived from phytozome v7.0 (chr-ID sc affold00149; pos 126223 to 126963 reverse strand)
tgaggtgtggcttccttgttgtgaacttaaacttgtttaagtattactgctggggttttctttcttgtgaggttaaatatttgaattgtcatgttgtttagttttaacatggcattgaaagtcatgatgtcttacttttgagttgttttttggtccattgtgtgcttgttttttgtttggaatcccactaattaaaggttaaatatctttcaactctttgactcttggcctaaaataaagcagctttaaggtctttttctcggtcttcacacctggccatggttggactaaagcgaatatacttcagatttctctcaaaactagcctatagtgactctcatatttgctcctaatttccaaagtttacttttgttctttctgctgtattttgtttcttagattgattaattggttttttcagcattctattttttgtcagttgaggaaattgatggattgtaatggggagttaaatgagaaacatgaaaagagtgtggagcagcttgatttcggactaaaactccaggagcttcactgtatttaccctttaattaagtaggcgccaaaatgagagagggagtggggttggggtggggttgttggaggttaaaatgctattattgagtaaaaacttaacctattatgaacttttgtggtaatccacatggatctatcctaacagtcctctgtatttattctcctgcagattgatctgaggaaagaatcaacaatacagttcac

SEQ ID NO: 82867 - DNA, 744 bp, Citrus sinensis
  Intron number 1 from transcript orange1.1g036907m (locus o range1.1g036907m.g) derived from phytozome v7.0 (chr-ID sc affold01853; pos 10173 to 10916)
aagaggtttgaaaaagaaaatggagaagcattattcacgcgtgagagagagagaagaacaagggaagaataagtgaagaaaagatgattgataagtgtttaatgaagatgaaatgcatgggtattggtttgaatgattgatttgggcatacaaatgggtgagaaatgaagaaaaattgagtgaaaattgagaggttgttcacggttttggtggaagagggataacatgtgcagaaaaaacaaaaaatgaagaagaagaagcataaaacccgtgaccaagcggctagccgcttgcccgctttctctcgggtttggggacagtttccaagcggctagccgcctggttgctgtccatctgcactatagttgctttccggctaattttgatcaattctgtgatcatttcgtgattctgaaatatctcaagggccaatttaatgcatgaatcatgattttaaacattcaaaagatgattaattcaaataaataattcatccatcaagcatatatcatgaagcacataagcattcaaaaattaataaatcaaacacctcacatatcgatcatgcacaaatacttcataaacatcaacaatcaccaagcaaacagtattgacctagatagacaaatattctccttttctttttcttttttcttattctctacccccttcttctggtcatcaatgtcttttaggcttctgatttacaaacctatagaaaacattatacggacttgagcacca

SEQ ID NO: 82868 - DNA, 610 bp, Citrus sinensis
  Intron number 1 from transcript orange1.1g046637m (locus o range1.1g046637m.g) derived from phytozome v7.0 (chr-ID sc affold00002; pos 4502739 to 4503348 reverse strand)
ttgtaagtgttgagctttttgcacccatctattgatatttgatatttgatatttgatatttgatgatttgttgattatcacttttgtctgcatgcaactaaccttatggaattattcggaggaaattttgcgggaaagtttgttctttttcaagtttttaactaaaaagatgccttttgaattatgtcgttgatagacattatacatagattgtttatggaagatgggtttattcataggtcactattgaattcttggggcccatttaattgttgtacttccattaaagtgttcgataaacactttgaattaaaagccacaactacgagactcgaatattaagttctattctcattggcgtcggaactctttgctgacatttcagcttgctggttacttttctagtgtacttttctcggtatgacaatttttccccttgtctttaatgtaattgagatagatctctcgaaagtaaagggactatttggctgttttaagtattgctttgtctttaactgcttttgatgaattagaggcattctcccagaacttgtttggcataaaatagttgacctttgcttatttgaataggttgctgcattggctccaa

SEQ ID NO: 82869 - DNA, 447 bp, Citrus sinensis
  Intron number 2 from transcript orange1.1g028629m (locus o range1.1g028629m.g) derived from phytozome v7.0 (chr-ID sc affold03867; pos 554 to 1000 reverse strand)
cgttccaaacggcacactaaggagctggatatctggtaattcatgaaaatctttaattcgtttctcagggtggaggatataaagtaattaaagccactcttttgtactcctctgctctataagccggctttatggggtcttcaaaagtagctgtgaattttttaaccttgatcctgcgtgtagtcattgaataaagtaatcaatcagtctagatagttcagtttcctgcaagtaattaatttacttaaagagaataattcgtggtttttaaaatatattgttcaaagtcatcaagaaaagaccgaatcggaatcatgttccatagtaatcacaagaaattactattttatgtcctccatcctgacttgttgttatatccagttaatcaaattatgcctttatgttctggctggtttcaaagtcttagatacttttatgcagaagggc

SEQ ID NO: 82870 - DNA, 710 bp, Citrus sinensis
  Intron number 1 from transcript orange1.1g024584m (locus o range1.1g024584m.g) derived from phytozome v7.0 (chr-ID sc affold00120; pos 149939 to 150648 reverse strand)
tacggatccagagggtaagttgctaaacttcatgtttaattccttgttcggctttcattattttgttgtaatactttatttattttttaaaaaaattgagttaggcttttattttccacttgtttgaatttatattttgttgcaatcgcttactttgttaacaaaattgagattagaactgcgaaattaaggagattttgtttaaaagagaataatatttcaaaaaaagtaatgatgaatgttaaatagcttgtttggtagtcattgataattgattaattcattctttgtattagttatagcacagatttcatgtatcatgattttatgatgatgattcgctgataaatttctttctcctcaagtcgtgtcatatgtgattgatgtaactcagtgtaaaaactgtggtactttgcatgcaaatttgtgatatcttttgtggttgtatttatttttctgctttgttttgcatcttgtttgtttccttgtgtactcttatatacatgtatgcgtgtcgattattcttgggagggttgcccaatatgataatgctttgaaaaattacaaaagtcgaatagacattaggtgtctgggaagagtgggttgggtttggttttattaacaggttgagtggggattttttttttttttccttttgggtatggataattgaagggcaatattgggaagcgggggggtttcggacgggt

SEQ ID NO: 82871 - DNA, 811 bp, Citrus sinensis
  Intron number 1 from transcript orange1.1g025284m (locus o range1.1g025309m.g) derived from phytozome v7.0 (chr-ID sc affold00007; pos 2230566 to 2231376)
atatctcttccatcgtacaaggttcggttttggaattttattagttaccaacttattattatctacgtttatgtttcgtaggactctagttttttttttctttttttaatttgttattattgtaatgttttgcttgtcccatcattaaatttacaattttgtacgcaggttttgtaaatcaagggcaatggttcaattcagagtcgatctttcagttatttaacggattttatactctagatgggattttattattgtctattgtgatgggcatcctcgttttgtttttatctttgatttgctgagttttgatgtttttgattaatttctttgtagctattcggtaatctgtgggaatcgatttttgatttctgaaagtaccatacaaagttattgaatgtcatacattccttgtgtaatttttatgtcaagtaaaaattgataatgccttacgtctatatgctagcaaatttataaatgtaaagcgatgggtcacttatgaggttacttgatggtttgataaatgaacttaaagtttatagttggtcttcagtaattttatttaccttgttttgtgttgagaacttttgtgattggtgccaaatggattagtggcttttttgcaaatgtagttgttacttataactttcggggattttattgcttgcaactgtaaagtactgcatgaatttgtttttgctttaataaggttattgaccatacatatattataattaaagatattttttggctgatatttttgtgtgtccttgcaggcacattgttttctttaacctctaagacatcctag

SEQ ID NO: 82872 - DNA, 914 bp, Citrus sinensis
  Intron number 2 from transcript orange1.1g027989m (locus o range1.1g025479m.g) derived from phytozome v7.0 (chr-ID sc affold00312; pos 35133 to 36046)
tttcccaggtgaatcctttgttcgataacacctatgattacaacgttgatttgtctcagaatttgcttttctctttgtctggtctcagttgcatctacttttaacttgtacaatgtagttgggttgcttttttgcaggacagttgtctttttacttaaatcatggcttggcaagattgtttgcaatactggctgtgttgttttctttacctataggttgtagaaaattagaatgttatacattgagaatgatcacagtttctagattccatgccgcctcttcgtcatttggctaagggaccaaccatcagttatagagtatctgcctcatgccctgattggtattaaggtactctagctttaagctacgactgctactatggtaaaaaaatataattatgaaataaaagttgatagcattaaggcgctgctgctgtgggaaaataattgtaattatgaaataaaaattaatagcgtgttgtaaatttgacttttaaataataattttgacaaaaatagtaaagatattataggttttttatcattttaagcgtgggacatcaacttagcttctaagccacaatagttaatgtttagtaaacactttaaacgttacagctgcccaaccttaataccaaatagggacctagttaaagacaaaagctgacctgtgttattgtcatcatagatcatcagcatcatcatttctaaatattttcttttttctttctgtttttggttcattgttactattgataagctatggaatgtctgaaagtgactaaggcagtgtttgacgatcatttttgccctcttctccatcttcttttttctatgtagtttatactttgaaagaggttctttttatcatagattttccacacatcccctttaatacagggagggctttttcct

SEQ ID NO: 82873 - DNA, 715 bp, Citrus sinensis
  Intron number 1 from transcript orange1.1g042463m (locus o range1.1g042463m.g) derived from phytozome v7.0 (chr-ID sc affold00431; pos 80601 to 81315 reverse strand)
attctgtcattcagtcccatttcaacaagggccttgtaagtttcaatatagttattttatattttcagagatgattatcattatttattaggattaaggtgctgtataatgaaattactagccgttgaagaaaaaaattagtagtcgaacactgtcaaaattaatgtgaccttggtgggcattgaggtgccgccagccacggaatagaattgttagctgtggaatcatgagctgttaggtttaagtgaatgagtcgaatgaaaatggtacttgtcaagtgatacatagtgtttatggaacacttttgcccagtgcaacagttacaaacatactctatgttgtttattttggattgtgattatttttggttggtttcttgctcttttcttctctctgtctttttttttttaatttttggaaagttccaatttggagtgttttacgaaaatggttatggaaactgtttagtggaatgaacatgggaaattcaaaaattttaagttctgattgtttggagaaatgaaactgtggaagcacaagattttgaagtaatgaaataaggcttttggttgttttccaattcttgttcttggaaatacatggaacattcatgaactttggatttttgaattttacattctgaaaaggactaaaaatgtactaccagtgtgcagataattttatatgttgatttcttctcttgttctaggttcag

SEQ ID NO: 82874 - DNA, 805 bp, Citrus sinensis
  Intron number 2 from transcript orange1.1g019119m (locus o range1.1g011469m.g) derived from phytozome v7.0 (chr-ID sc affold00002; pos 2339958 to 2340762 reverse strand)
ggactctccttccacccaaacaaagttaagtggaggtagtttccctttacaaatataatgtgctagaattgtccattatggatatacaagttcggcctaggtcatattggtggtcctctttcttctctaggccatagatatcagatactttttttcccccaaaaagaaaacggccggagtcgcatagttggatatagagctggcatgatccactaccagtgccaacagttattaccgcgtattagtgcctgccattttctgaattatcatcatcatcatcatctaacttacgtactagacctagatacttgtaaacaaattttgggttccaaactcgtcgactcatggaatcctccttgacttgctttttctactggtaaattgacaccttttctcttatcaatactttctgcttttactatttactttctactatttctataataattactatcgttaacataaaaattgtaacttaaaaatccatatcaagtctacatttttttccttataaaatgggaggaaaaaaaagtctattcatgtcatccactctctctgttttcagaagcgtttgtacagttttcgactaagctaattttaaatcataatcgcataattcaaagataaataattaagtgttgctaccttgtgcaaccagtatttttgtttcttgaaaatgcaactaaattaagcaaagactaaacttaccctaggatttgtctccttcacctcacacatagagtagccaaaagaagaaaagaaaagagtaacccataataatttctgagttgtatacaggtccagg

SEQ ID NO: 82875 - DNA, 824 bp, Citrus sinensis
  Intron number 1 from transcript orange1.1g021361m (locus o range1.1g021361m.g) derived from phytozome v7.0 (chr-ID sc affold00096; pos 170062 to 170885 reverse strand)
gtcacttcgaattgggttctaaggtttgttatctgggttcttttgtttttgagcattggtttgtatttagtgatagtttatgagaatgaattaggaaagttttcattttcattggatttgattttgatatcattcataactaggtacaatttgcttctggttcacgaatttgtcttttctgcatgcaaatttcgattgatagtgtgatagttctggattgatttgatttgtatagtacggcacaatgctactgtatcttcttctttgtattgttctgtgttttattttgtaacaaactgtttaatcactggatttaggaagttgaactgtttttcatcttagtttggggttgagtaccattgaagatcaagtttatgaatctccattttgcatatattagatcataaatacgtaggtcttctaagtctcaggagagcccagtgcgccgataagcatagattatgaatgagatggaaagcgatttattgccaatccaaacagtttcaagatagattcagcgaagagacaagttgaattgatttgtggtgccttttcaggtgattttagcaatattggagtaaatatggtggagggagaatgacatctctccatagttcatagttgattaccttagcttgggtagggagatttcaattgtaggtataaagggcatgctaaatatatctggattgttgatgtgtttcatgaatttactattttctcatttaatatttccatctgtttttgcttctgaaatttaattaccttatctgttgttttctctttcagttcagtggtaaatctgtcggcattgttgggctggg

SEQ ID NO: 82876 - DNA, 462 bp, Citrus sinensis
  Intron number 1 from transcript orange1.1g029585m (locus o range1.1g028145m.g) derived from phytozome v7.0 (chr-ID sc affold00002; pos 986024 to 986485 reverse strand)
ctctgtctcagatccgtcaactcttctgtcaggtggtcagttctgccctcgtcctttccactttgatctattttgttccgttgtttcccgagaaaatcaactaaaattttattttattttatttttatttgatctcgcatttctttaatttttctttgctgtgtttgcctcagtgaataattattgttaacttcttttagttttagcatattcggaaatccccgattaaaaaaaaaaaaagtttagatttttgttttcaattgtttaaagttaaaatttgttcatgtcgtgtaattgatgggaatctctgcttatgaatctttgtgagcatgtaatgagaaatctaagaagatttttgagtatgtgagtttcgataagttgactgactgtgagttaatgcgtttatgaagggccggtgattaagaaattagattgtattgtgtgtccagatgagaagaactg

SEQ ID NO: 82877 - DNA, 553 bp, Citrus sinensis
  Intron number 1 from transcript orange1.1g020129m (locus o range1.1g019661m.g) derived from phytozome v7.0 (chr-ID sc affold00175; pos 176127 to 176679)
gctcaggtctgcgggtttatttatttgtttattttggtggtaaactctgtcttttgagcatttatttgactttgagtgtgatttaatttgatcagagcggagttgtatgtttggagtactgttgaattgatccgttaaaagcacttttgaattgtcaaaagttttcttcttttaaattttttttggaagggacaaaattcgcttagcaaagcaattgatgaatgattagcgtttctctttttagaactcagaaagtgcttttgtaagatgctgtttatttaacacagtagctagagtgcaatctacccacttgacagcaagagcacctcaattctgaacataaatattctgagttgcctaaagctgtttaagcttgactttcatttaatatatttagcttcacatgtttgttagtagtttgatcaactaaagtgttatctgatgcaaagttcatagccttatctattgcttttagttggtttcatctatgttttggactcacagtgcttattcgacaggttcctgagttcccatcaaaattattcttcttttg

SEQ ID NO: 82878 - DNA, 1028 bp, Citrus sinensis
  Intron number 1 from transcript orange1.1g030089m (locus o range1.1g030089m.g) derived from phytozome v7.0 (chr-ID sc affold00004; pos 3602099 to 3603126)
gatctcaatcaggtgagttacataattatcatttcatagttaatttgagtcgcaatcgattcattctctaattcttttgtgatatttttcagtaggattttagatctgtgttttccgaagattttgaatatgcccatttgtttttttgccccttatgtaatcagaaattatatatagcgtctgtttggttctcgggaatctgatgaaagattagcaaatgcttgatacagtgttgtgcgtctcagtagtctaaagatcttatagttgtgaattatatgttgcttcaatctcaatatagtagtgaacttgttgagattaagctgggttttgtttggttgtggacaaaatgtaggaatatactcttacattttaagtctttaaagggtccgagaaagcttgaacaggcttatttatgaaggagtattttaactctttcgactgatcaaggaaattatttgcgggatactttttttctggttcttcgtaatattaatgatttcttggagatcaatttgtattgtctttgaccatatgtgggcctttctgaaggtttttgctttagtttaatcagttatttgggaattaggataccgtgttgacaatgactgtctcatgcgtgattttgttattttttattatcagtaaagtgcttgtgggagcctgtgttggtactcctatgaaatggaagagtcatttggtgccctagaccctatgaattctgtcgtgagtgcaagagttttagaatctatacctgtttgattaatttcaacacttcctgtaacaatgaagtttgaaatacctctctaagtgatatgcaaaagagatacatacctaaggaacattgaatgtttttgctctttgaagaaaagtagaacctcttatatgactcattttgtttatgattgttagcatttaacattgggattttctagagggaaatttaaattgcttcattgtttcttataataaattcaattcttgttgttcctgacctagttttcatcatctgtagcctcctggtgaaaatt

SEQ ID NO: 82879 - DNA, 567 bp, Citrus sinensis
  Intron number 4 from transcript orange1.1g040046m (locus o range1.1g040046m.g) derived from phytozome v7.0 (chr-ID sc affold00002; pos 3420486 to 3421052)
tggataattgcttgaggattatccgtgaacgcaaggttttcatacctttacctttccttccagcagtagtaatgtgtcaaacctcaaacaattacttttactaatcaaagaaattttatcagttgaaccaattagcacctacttaaatcgtgaacatgctttgtaaaattttccagtgttgtgattattgttgtaaacttattatgaatggaacagagggttttctggaagagtgtcaaatttctcaataaaaagaattttagtcaaattaaagagtacagttctaactatatatagtgcaaattgataataatgcttcataatgaagtcgagatgagatgatatgaccttctcccagaaaaacgattaataaataacattaaatcttactttctttgtgtatattgattcacatctaggatttgtttatctcgctttacattgacctgcctttctaatctagcaatatatatgatccctaacaatcacctctttttttttacgttgtccaattatatatattgaacaacagcttcgagcgatatcgggtcagattgttacccacag

SEQ ID NO: 82880 - DNA, 336 bp, Citrus sinensis
  Intron number 1 from transcript orange1.1g000949m (locus o range1.1g000948m.g) derived from phytozome v7.0 (chr-ID sc affold00003; pos 4314329 to 4314664)
ctttcctcatcttgattcgacggtaaattagcctctgcctttttctctttaaaacaacctagctttttctttgccatattcccatattttagctgattttttgggaaattaaaagttacctacttgataattgatcttcaaaggccttatttttgcaaaagtttgcttttttatttcactcattgttattttactatcagaaaaaaaccctagatgctgggttgcatgttgtatgtttattatgaatttgggggaataattagggtttcaaatttttacccaaatcttgtttgaatcgttgttattgttgaagattgttgtgttacttccttagaa

SEQ ID NO: 82881 - DNA, 758 bp, Citrus sinensis
  Intron number 1 from transcript orange1.1g034766m (locus o range1.1g034766m.g) derived from phytozome v7.0 (chr-ID sc affold00150; pos 80421 to 81178)
tgataaaagtattcaaacatcaaaggaaattttaaggaacatgtacagggaagattggacaaacagattactggtcttatcttgccaaacaaccagactaaaggaaacaaattgtgcggctcaataggcttccctgtacaactaacagggatttaaatctaatttgggattgtgttgtgatagaagtgtaggatataataaaatggtaaaatttgacaattcaaaaacaattaggagctctcttattacttcacaactcattaaattagaaatgaaatgaataaagttggatggatgcttacatgataatcatcgtctaagtaatcatgctgcaaaacaaataatctgatttagaaactacatttttgcgcaaaatatgtatgaaaatgtctagatttaataagcattcaaattactttagaataccatatacaccaacattatttaaaatgtaacaaaatgcccatttatatgacaacatcatgtcaagcagtttatcatcgtgttgctatatcatcgtctattagaagctacatgatcttgaaaagaaagaaaagcaacagcaaaggaatgaaagaagaagcttagtccaaaaataagatgaatacgccagatttatacatataatactaggaagatgagttagtaaacatgaaggacttcaaaggaaaattgaaaaaaaaacaagtaattgacatcttaggccattcaagctcaatgattagcatgccaatgggctcgtagcccattagcggccc

SEQ ID NO: 82882 - DNA, 578 bp, Citrus sinensis
  Intron number 1 from transcript orange1.1g047288m (locus o range1.1g047288m.g) derived from phytozome v7.0 (chr-ID sc affold00034; pos 238779 to 239356)
caacgattgttactagtaacaaaaatggaaagggggcaccactactttccgcacagcaacttttggtaagctccacgatccacccatgcatgagtatgactatcaaaataataataattagaagaacgataagtttatcaaagttattaataataacaaacaaaattacttccaccaattaaaaccaataaacaaactgagcccttttcgaattggtgagagaaatagtaaacttgtctcctttgttcacatcaattggtaacgactttgacaattttaaaactcttcttatactttcatatttcacttttcgaaaataataattcataaattaccatataatacaagtaacatctaacaatcttttgattacactttgagggttacactttgggggatttgacaaacagctttgttttattagttacctgaattcaaagacagccagataggttaaaaagttaattttcattcccatcttttgttggggagggggtggaaaaaaaaaccttatactatactcactgtgtttacttattatggcagctgtttccggccaaggcttcattgctagagac

SEQ ID NO: 82883 - DNA, 700 bp, Citrus sinensis; identical to SEQ ID NO: 81260
  Intron number 2 from transcript orange1.1g026519m (locus o range1.1g026519m.g) derived from phytozome v7.0 (chr-ID sc affold00419; pos 87917 to 88616 reverse strand)

SEQ ID NO: 82884 - DNA, 425 bp, Citrus sinensis
  Intron number 1 from transcript orange1.1g047961m (locus o range1.1g047961m.g) derived from phytozome v7.0 (chr-ID sc affold00025; pos 47972 to 48396 reverse strand)
cctctggaggctttgattttgtcgttgcttccttggttcgttcttttttctactcttctccacttttactctttcttgcaattcgtctttgctttcttttttttttaaatgtttcattagggcgacttaggtaagcattcacataatttggtatcgtatgtctctgtctcatttcaatggcaatatagtcacctacaataacttgttaattgcctacttctcttctcttctcttctgtggtgaagcagaagcacagcatgccctgcttcatttgtatgcagttacagcattattgattttctttgtttttgcatttgcttttatgttgcgactcacaaaccttttgcattcacattcccacctgaggcagttgcatatttgaattcttactggcactattaatgctttaaaacctgatgacacag

SEQ ID NO: 82885 - DNA, 944 bp, Citrus sinensis
  Intron number 1 from transcript orange1.1g019627m (locus o range1.1g019627m.g) derived from phytozome v7.0 (chr-ID sc affold00005; pos 2454233 to 2455176 reverse strand)
ggcaatcaggtatattatgttgcttagatcattatattttgctacactgactatggtttctttgtgcaagtttaggattttcttttaatttgtactttttattggagattggcttattatgggattacttgaagacttttcctcttacattgacaataggtattatattgaatgcagaagtgactaaagaattgttatagagtgggaaaaagtgaccctctcttagtgtgatttgaggaaccttaatttcctttggaattggatgcgttaatttgtaggtgcgcccaccttatttccactttgcatgattgtggaatcagttcttgtgtagatctttctcttagcacaatttgtatgttgattttattattccctaggagtagaataatcttcaggaagttagaacttttgaatgcttccccaaaattctataatttctttcattagagagaaatggtattgggccaacaataattatgaagttcatgccagaacgagcttattgaaaactggattccataataaattgttaacggatgatttatgagttgtgttactatgataattaagttgttttacattatttgcttgtgcaaagaaagcttagccatctctacatatataaaaacagtaaataaagaaataaaaattgaatgaaagcaatagtaaagcttttgagacatgtttccactggattttttttctttaacatattaatattttgatgtaagttccaacaaaagctgtatattgggaattgtattgtggttgagagagtgtgtctgaattgtattgtgtatttcttgcttggatgacattgttacatataaacaattttgttgcaatgttgactgaacttgtgtctttgctatttattgttactgatcttggccttttttctgtaatcagaattacaggtaattggtggacgaactgaaggggaa

SEQ ID NO: 82886 - DNA, 826 bp, Citrus sinensis
  Intron number 1 from transcript orange1.1g041508m (locus o range1.1g041508m.g) derived from phytozome v7.0 (chr-ID sc affold00024; pos 1240249 to 1241074)
attaaccaccctctccttgctttcgaacacaagcggtattatccttcttctcctttcccgtactacctagtacctcctctcgccacgtgtcctccccctcctctttctcatttttcatttatttatctccaaagcatttattttagttttagcacgcaggtcgatcgctacgtgttcgtgtcatcctgtgatgtgatgattttgactgttttgactttgattcgtgcttaattattgaaaatttgcgacagattttgcgtttccgaattggattcgctttttgtaagttaaaaaaataaatttcaaatgcgtcgatcacgttgatttataggcaactgtgttcatattgatgcattatgcgcgcatttacgaattctcatttaatgtgcaattcttggagaaatcttgattggaaccccccctccctttctggtgattgatctggatttgaattggtcacgatttgattggattttattaggattaatttaggtttttgggtggaaaatgtggtgctctcattgtgaacttgagtttaagtgaatgtattatgcaatggcgagtgattggggaaatagaattgtggttttgagtggaatatgttgttgtctactgtgaatcagcaatctttggaggctgatgacaggtaatttgtgttggctgctgttttaaaacttttctgttgttcggcttgtcattgatggtttgggtttcttgatgctgttatgagtatttgattaatattttaccatgaagtgttatgttgtcaatgagaaggttctttgaatttgggatttaatagaaatttattttggttttgacaggg

SEQ ID NO: 82887 - DNA, 422 bp, Citrus sinensis
  Intron number 2 from transcript orange1.1g041508m (locus o range1.1g041508m.g) derived from phytozome v7.0 (chr-ID sc affold00024; pos 1241129 to 1241550)
ctaatatttacaaggttttcttcattccaactctaacctagttgttttcaagttcatgatcttatcgtctttgttgattgttcgagactttctcgatgaagagacgggaaaagaaatttccaagtgatatgtttgttttggtctttgaaataatggtgaatgatttgtttgatgaacgaaaaaatgaaaaacatcaaagggttgcagaccaattacatgtttgcacacgggagtgaaccatttggttttaatgagtcatatttgatgggagtttctgattgaaaagtataattttctcctgttgttcagaaaccaaattgaattttcagaaaattgtatttttgagaagaaaataactgattttttgcttttaatgcatgatattaggaggaagaggaagaaagatcagataggtggaatag

SEQ ID NO: 82888 - DNA, 360 bp, Citrus sinensis
  Intron number 1 from transcript orange1.1g002086m (locus o range1.1g002086m.g) derived from phytozome v7.0 (chr-ID sc affold00314; pos 46068 to 46427)
acgctgcaatgatgagagtggcgaattcatgtcgacgcacatctgattcaataattgcccgaccaaagacgtgaaggcatgtaataacgaccccgttgaccgtttctcataccctcggagacaaaaacacaaaaacagataacggaaaccaacccccaatccacccgccagtccccctcctttttctctcttccttccaaaaacaaaaaaacacaaaatcgaaaaaaaaaaaacataattcacaaaacactaccagaaaacgctttttttttttggcccttttcttatccttttcatgttaataataaaaaatcaataaccaaatcaaaaccagcaaccagaaaaaaaaaaaaaaggaaa

SEQ ID NO: 82889 - DNA, 615 bp, Citrus sinensis
  Intron number 3 from transcript orange1.1g041664m (locus o range1.1g041664m.g) derived from phytozome v7.0 (chr-ID sc affold00468; pos 14665 to 15279)
gagaccatacattcatttttgtaattgttcagctggtaggagaactaatagtttctgtttattttgtcattttactctagatattgattcagttcacttgggtcgtctagatttcatttttttgacctgagtagtaaacaattacgttataatgatttggttgattttagcttaacccagacaggaaataggatattaatacagtaccaacatttactttatttatgtctaggcagaaagttggcagaaaaatattgcctatgcaatctactgatttcttttcctcactatatttggttgaaatcgcattttgatcatttcttgcggagcttaaagtttctatattatttagctagattgctagctggttctgcttttggaaaagatcctgcattatttctttttggatactttggcaatactaaaggaatattacttacataaatgctgtactttaatgacagtcagcccaatttttcgtttctttataaattactattttttctcattcagtggttctgtcgtgtgaaaacaaaaatatctttgctatattgtgcaacttaatatgtgctttgaacagattgtggcattgttgggggtgctggtatacaaatt

SEQ ID NO: 82890 - DNA, 438 bp, Citrus sinensis
  Intron number 4 from transcript orange1.1g025723m (locus o range1.1g025723m.g) derived from phytozome v7.0 (chr-ID sc affold00058; pos 341200 to 341637 reverse strand)
ccgtttcactgaaagtaagttttgtggctgcatagaactgtatctatgcttctgcttgtgcctttgcttctgattcttgggattcttagggagaaacaagattcaatatatactctgagcttatgatatgagatttgaagagttcgcatttctaacttacttatcttcagagatctttgaaccgaggcatctgaaaatgtttacttgcaaactgatgcaaaattaaatatattttgatctgactgatttatagagaaaaagataactaatatgatatgttttatttatgtacaagttttgttatgaagctgcttgctttctaacttttctagatctggtatgttgcgtttggcacttcacgaaaacatagggtgtacaaccaagatacaactactaattatgtgctataaatcttgttatttttataattgaaggagc

SEQ ID NO: 82891 - DNA, 530 bp, Citrus sinensis
  Intron number 1 from transcript orange1.1g046325m (locus o range1.1g046325m.g) derived from phytozome v7.0 (chr-ID sc affold00248; pos 141129 to 141658 reverse strand)
atcttagggcaaagatcatcaaacaggttagccccttttgatattaaattttatgtttttgtcgatggtagttagcttaaccggtaaggtctcttggtctggtacaaatggtctatgtttcaaaccctgctcacggtagcgagagaactgaattgccattagattttatacatcaagatatgtatataaacgttgataatgttagaattggccgcgttcatgctctagctctatctgatcatattagattcatagaaagctatggattaattcttattcttttgatactcgagagtggtattaatgtgtgaaaatttgaatcttgttagatatatgtacttttgtacatatgttgttccaacaactagttgggcatatttgatgaaattctaaattctaacaatcgaggcaatctcttcatctcagtgtgtataatttttttcagagcacttaggaaaatttagtacattcgtatggttctgatctgttacattgtgtacaaaaaacaggtggaatatcagttcagtgac

SEQ ID NO: 82892 - DNA, 721 bp, Citrus sinensis
  Intron number 2 from transcript orange1.1g033597m (locus o range1.1g033597m.g) derived from phytozome v7.0 (chr-ID sc affold00050; pos 347903 to 348623)
ttgaggtaatctactgacttgttatattctgatttttgtttaaacttttgaaaaaatccggtcatggtgtgaatttaaagcatttcataagctgtcaagactggcagctgtcgtccttgcgcctcaatccatgttaatcacaagaaaatcaaattcgcattcaatttttcttttaagttgaatttgatagcagagttggaatattaatgacaaagaaactagaatttgatatttaagcatttcataagcttatttggattgatcctcacatttgctcactagtggtgagtcttgtttcttatgctttatactaggcacaatatttagaattactagtcatacataagtagcttgcatatatggcttgtaccaatcttttttccctttctttctttcttttccttttttttttggaatttttctttatttcataaacattgtgcatgatattttcataatggtaaaacttactttttttttaaaaaaaaaacctcattttctacaacttgttttatagctctctcagttttacagatagagagtggctttccattttctattagttgctgaatgaaaatatattgagaaattccctaatggatttctggagattcaattgattttctacagtccacttttggttctagtttgttgcaatatgtgcacttttaccatctaacatgtttaccatttttggtccagcgctcattcttcgggttta

SEQ ID NO: 82893 - DNA, 929 bp, Citrus sinensis
  Intron number 2 from transcript orange1.1g015561m (locus o range1.1g015573m.g) derived from phytozome v7.0 (chr-ID sc affold00003; pos 449359 to 450287 reverse strand)
agcttttgatttccccatttttcgattttctcctagtaagatttttcttactaaatttgctctaagcgctatttttcagttgtgttgggtcagctatctctcggggtttcatatttcacgaatgcatgtttgatttaattagtattaaatgctgaaaatttcgagctggagtggcgattttttgttcgagagtagtgaatttcttgtcgttttggcctttcgtatattgtcacttgtattgaactggtcgggtctcccctctagggtttgagctttagcttttggttgaaaggaaaaaacaaagggaaaaaaatattgtgttgtttgtctgctgattgtttctaagcggtttcagtaatgatcttattgaagttgattttaataattttcgaaatattaataattttttagcccctttctgctggttttgatgcttattggaaattctgaatgagctgttatagtgattggcttataccctctacttttattttatttttcatttgtttttaacagctgagtgaatccttttctactaattgtatctgtatatggccaattattatctctcactgtgcagaatgtttgctttgagttgatggtgtagcggagatatttattttatgtttgcactagaatttgtttttcttctttggcttttgtatgtaatctgatacatgttaagttgttaaccttggtaggatattatacattcctctttaccattaattatgtggcagatacattgtgctacatagttgctatccttatgctatttggatacttcttgtattcttagtgtttggacctacaaaatgtcgaaaactattgatatgatacttgggcactatttttccaattgaatatttattttgaggtgttctactgagtcagataggaagtgacagcctctgaacattgggacatcc

SEQ ID NO: 82894 - DNA, 445 bp, Citrus sinensis
  Intron number 1 from transcript orange1.1g030469m (locus o range1.1g030413m.g) derived from phytozome v7.0 (chr-ID sc affold00007; pos 2070218 to 2070662 reverse strand)
ttatacaatcagaggcaccaacaagattgttagaggtacatattcttcaatctgtcttttaaacttatttgagcatttgtattattgcttgttatttctatgtctattgtttaaaaatgtgattttgttggaaaagatttgattttggggtagttttgcaaatgggtatttctcgttggtgcgtttgcatgttatatggaggttaagaaattttgcttcaatggtgtaggagataatgtctgatggttttgcagtcgggggctgtgttctttctatgttaaaacttatgtccatgtttacgttaacaaaggcattttttttcaatggtcgagtgaatttgaggtgtttttgcattttggtccttgtcacgtgtgtgtatgtatatatgttcagagatattaatgaatgagtttttgtgggtttttcagttggggattgtgtgctg

SEQ ID NO: 82895 - DNA, 740 bp, Citrus sinensis
  Intron number 1 from transcript orange1.1g023724m (locus o range1.1g020987m.g) derived from phytozome v7.0 (chr-ID sc affold00005; pos 1661364 to 1662103)
cggaggcgcaaaaacgtgatcatcaacgtttgcaggtattacactcttcatcacataatcgacctgctgcttctgtttctcgccctatttttcttaactcatcaactcaagatcaaggaatgatcaaattggaaggatcacagcaacatgatcaaaaggcaagaacaataaattcaattactcgaagcaatttatttttcttgtttaattcttttgttatctatgctttcattatttttttaaaattttttacttaaacaattatcttaattttcatgatcgtgtgcctttatctatagtgattcttcatcagcaatgttagtaaatataatccatctgtttaattaacttttctcggtatcgttcatgccccgatcatagctgacatatatttatatatagcacaaaatcgaagtatctatattcacatatataaattgatgcgtatgctagatgatatgtttattaatttgatatattaatctgtttgatcagccttcatttatttgatctttttcattctaataagtacgtacatatgtgtacttaggcatttagcttttgatttacgtattttatttttattttttgaaaatatatatattccttcatctcgaaccgattcttgtaagccgattcttgtttttatttccttgtaattaatatacgtgatctcttaaatataaataattaacttgatctcagattgatcagcgcatagctggcggtggatcaagcga

SEQ ID NO: 82896 - DNA, 707 bp, Citrus sinensis
  Intron number 2 from transcript orange1.1g025899m (locus o range1.1g025753m.g) derived from phytozome v7.0 (chr-ID sc affold00538; pos 91881 to 92587)
tgcgttgctgagagatcttgataaaagtttacaaggtttgctttctgataacaatctattctagtgcattaagaagcatggacgtattcgatattgttggttttgtgatcaatataatctgacttcgggctttccaacaacctttgcaatcttgtctcttttaattcctgccctctggaaggggaaggaatggagcagaattagggtattggaagttagaggttttcttagtttattatcttattattcttagatctggtgtcaactttgtcattgtcttacgtagtgatgtagctattatagggatcctattgtgaccaagagctagaagaaattgacagtagccactagtttaatgtaagtaaactagaagtgatctccataaaaacatctccagatgaatcactagtgatttttatccttctgtgtaatagctgcggtctcaatgcccttataaacttgtgtgatgagtttcacagattctaggataggcaagcttaattagtaggattggaacaatcaaagtactaatactcaccctaccctcccatgccatttgtagtctgccatccctgcagaaagaagtatgtttaaaaggtttcaagtctttttgcttacgtttatggacatattttttcctcctttggtccgggatgctcaaatgcagtgtttttttgtacatacactggcagaaatccaaagacaaa

SEQ ID NO: 82897 - DNA, 711 bp, Citrus sinensis
  Intron number 1 from transcript orange1.1g042839m (locus o range1.1g042839m.g) derived from phytozome v7.0 (chr-ID sc affold03438; pos 5693 to 6403)
atagtttcacgacaagcccgaaatatccagtcaatgtgagcattctatgctttattgttttggaattagcttcttgctttgaatatgaatgactggaaccagagtttatgaggaaatgatgttttctccaggaatttgttttttggaatatgagattacaagtgcatttttgcattctatgtatgtctccatgaacatatgtatgtatgtgtaagtattgatagacaacagggcagttaaaaatgagtcaagacaaagttcatgtcgtgagcagaccaatttgcttgagtttgggaaatgaatctattatttggcttgagttgtccttttatatctcaattggtttttattgcattttcggtgcggccaaattttatatttgagggatttgtaagtctttacaatgttgtattctggtggcataacgaagataaatattatggtattccttgttcttgctataaatgtccaatgtcattgtatttccatctccatgggctctgaagggtaaaatatcatctgtgatggtcatgatttgtaggtgcagtaaaggtgagggatatcgatattggccataggttattgaaatacattgattacctgatgttgaatacccagattcgactaattaatgaatatgtgtatagagttttctcagtggtttatggttctgcaggaattggaagagtgcgcttaaatctactggtccac

SEQ ID NO: 82898 - DNA, 468 bp, Citrus sinensis
  Intron number 1 from transcript orange1.1g003612m (locus o range1.1g003612m.g) derived from phytozome v7.0 (chr-ID sc affold00004; pos 351792 to 352259 reverse strand)
ccggctctattcattatcctcgcagcactcctcaggtatttattttccaacaaatattttcacgttcaaattaaagtcaagagaattaatcagttggtgcaccgctttgttcgactttgatgactagctaccaattataatattaattgcccccatttttttaatttcttttcttgtttcttactccacacgtaaaccaagatttgcctaacaaccttttggtcataagtcatgtttgttttgctatgctacatgcattttggctttaaaatcatcatttgatgattttgtggctgtaacttaaacgcactagaacgtttttgactttcgtctgtcaatatttattgagacaaaaatgcaagacggactcaacttttaccaatttcgtttccgttggcatttagcgaacacgtacattatcattctgcacaaaaatgaaaacgactatgttttcatactctttttcag

SEQ ID NO: 82899 - DNA, 864 bp, Citrus sinensis
  Intron number 1 from transcript orange1.1g029321m (locus o range1.1g029321m.g) derived from phytozome v7.0 (chr-ID sc affold00282; pos 94234 to 95097)
agttttgcagcagcgatcttgaagtttgtgagtcttttattattaattttttaatttcatctagatccattttatgatattgagaatttgaattttttctttttattttgaaatgtgagatcttagggttttgatttatcattttagggaaaaattatgcgtagatttagatctaattattgttgtttttgtagattcaattatcatcaataggaatttaaagattatcatttctcgtaaaagggaaaattaaagaacaataaatagctttaaaatgtatatagcttgttgatcatacaggggctaagccgaaaattggtcattgttctatgtaaattgatttttgtttattccaattggacgtttctgagtttttgtattcttttgtagctttaaaatgtatgtagcttgttgatcatacaggtgtaagggaaaaaactggcattttttaatttcatttttgttgattccaataggtcgttattgggtttttgcattcttttgcagctgtcaaggtatatattaaaatggtgatgaattgtgatcccaatatatttgcatctcacttaaataagttttagctataacttttgtagctttagtctcaagatggctttgtttctttgtgcattatgcaatgtttgtttctggtgaatcaataagagtagaatttacactttcttctttttctgttttgatgaaatcttattgcatgttgtcttttggtttgtgtttgctaaatgatgtttagagtagaatttatactttcttcttttagtttttcaaattcgaattccttgtccttatccttttctttttatactaaccattaatcatgccaactggttaggtcttcttggaggc

SEQ ID NO: 82900 - DNA, 870 bp, Citrus sinensis
  Intron number 1 from transcript orange1.1g026863m (locus o range1.1g023423m.g) derived from phytozome v7.0 (chr-ID sc affold00034; pos 367602 to 368471)
gtctgaaatttttcactaagaaaggggggctaacgtcgcctgtggtggaggatatatgtggcgaagctgcccggaaatttgccaataggctgaccaaagtgtctacagtgctgagaaatcctcccacgagagttgatttcatgagtacttatgcaaaacacctcagagacgtcattaaggagagagtgaatcatcccctgcattatgagacaccactcaaaggatttcaggttcccttcttcacttctttgtttgtatcttattagcttgtggccgtacacacaattcatgcatgtgccaccaaatcttgcgttatcctcgttccaacaatttgcttctcataagattttgaggtccaaacttcgcagaatgagatatggtgcattgttgtggtgctgactgataatttgggcttttgttccattgcagtctgggcctaagttttgaaatgcactcttttatttattcatgcattggaagttttaacattttgacaaagaaaaggtgtatctagagatatttgtgatttgcgtatcgcagcatccgatcaacaaaaatcctcgggagtgctccattttttgggcccaaaatcacaagttcggcccatccaaaagaaaccgaaattttttcttcagaatttggctaccgttaaggggttaggggtactgggtagtacataatatgtacaagttttaaatctagttcttagatcgattacagaaataataataaaaataataattcttagattaaaatctaagattatgaatctaaatatgttttacttctaggatacatgttaacattgtatattgagcaaagtctaagatgatgatgttgctattgcacctccattgtagataattgtga

SEQ ID NO: 82901 - DNA, 454 bp, Citrus sinensis
  Intron number 1 from transcript orange1.1g019329m (locus o range1.1g019329m.g) derived from phytozome v7.0 (chr-ID sc affold00002; pos 4835102 to 4835555 reverse strand)
ctttttttcctcccttgatttcacctatttctttggtaagtttgctctattttttcccttaattttccctttttttaatgtaatttttattttttaaacagtaaattcccacaattcctttttttttaataattaaatttgtttttatcttgatctttgcttaatttttgtcaaaatctatagttgaagttgcagtaattagggtttggttttttttttttttttaagtttaagctaactggattagctcacttcattcaaaactctcttctttaattgaaagatctaattttcaccccccccagtcactactgtgaagtaaagttagtttcttgtttttaattttgttaattagatttacaaatttttaaatatttaaaatttttcaaagtttggtaatgcatggaattttggtacagtgagagaagttcaatcaaagtagctgaagtctcga

SEQ ID NO: 82902 - DNA, 839 bp, Citrus sinensis
  Intron number 1 from transcript orange1.1g017681m (locus o range1.1g017681m.g) derived from phytozome v7.0 (chr-ID sc affold00296; pos 187068 to 187906 reverse strand)
gggtactctgtttttcctctgcttctggttatctattttctatttgttaatatgtgcaagtgttaacttttttttggagttaaacttttgggttgttttatcatcattggttcaggaattgtgttatttcgtttgtgtgtgttgattaattcgtttaggcatctgggtttttgtttcttttagtgaattaagtgtccttagttgggaatttcttggtgactttggctgtttctttgttttaggtttaaaactaatcgagatttagtgatggttagcctggattcatgtgaattagctgaaaatggaaatttagttacttcttttgtggttgtgttatggtctttcttcggttcatgacctaaatggaaagctttttgaatactttggggagttgataaatattcgagctgttgatcatagaaagagtcataaatggtttcttcccattctgaagagggaaactagttatgttgttgaagtgtggtccactaattctcccttattggaggttgcgagtgcaaggtttgttggagcattcacgtgattggacttcattaaaggattttgattagcagtatctttgcctgtatagcatgttaaagtgagtccacaaaattggcgtagctgtgttgcataattggactttcaaggattttcacaaggtttactagtctccaaatattacaatttttagttgttgatgtaaaccgccatcagcatattatgtcttaaaaatgttaatgcatattcagaaattggaacagaaaatttatccatctagtgaccaattaaacataataatggctgttttcttattgcttctttgattacgtgcagat

SEQ ID NO: 82903 - DNA, 598 bp, Citrus sinensis
  Intron number 3 from transcript orange1.1g025588m (locus o range1.1g025588m.g) derived from phytozome v7.0 (chr-ID sc affold00115; pos 24194 to 24791)
gagggcctgaaatacctttccaccctggaagaccggtgagggctttttattttttattttatttcttttttcatatgcatgttctctagctcccgaaaaagacattatacagactggattaaaataaaattttgttgatcagcatcttggactaggcatcacttagaaggttttgttagaagatcatcaatgcataattaaatagacgtgagtcacttgctgggaactcagggcctttacttgacgtgtgtgatgtgtatgtcattcctattatgcataatttctatttatgttactgtcactagtgtacaattatattgatgtgtattcatgtgtttgatttacaattaaatgaatgaaaagaataataataacaataaactaaggcatcctcattctgtcgtccatttggattgtattgaagcaacagagaaagcaactaatctatccaaataatacagcttgttgatagctaagcaattttagaaggcagcagcgaagattgaactattgatgctgaactggtattctttatattaagttctaaacatctggtgttgcaggacaaatctgatccgcccccagaaggtcgcttgcc

SEQ ID NO: 82904 - DNA, 841 bp, Citrus sinensis
  Intron number 2 from transcript orange1.1g016971m (locus o range1.1g016971m.g) derived from phytozome v7.0 (chr-ID sc affold00035; pos 189421 to 190261 reverse strand)
cagcaggtttaatttgttgcgttgcatgctaaatttatttgggtttttcattagaaatgtgtagtaatttagtgattgtgactatatcactataaaatgtcccatcatatatgtttttgctgattattaaggattatagctgatttttgtgtttgaactttgaattgttttgtaaatttggacttttgctgctgttgaatagatttgactaatggccttgatattaggctcctgatataggtatctcatgctttttgtctaatgggttcttaaagagctgtgatgttatgttatgcatacaattgaaagatcgaagaaattatgctgcatctagtctaattcttgtagcagtatagaaataattttatttaattttttatttatgacttcaggtaccaaaaggactctggaaacggtggtctaagctaatttctctgctaattgtgttttggtgtccctcttcttaaaaagttgagctttagaacttaagaggctctctcatatactttgcaatcttatatctgtgtgtactaatattcttgaaatcttgagggccatttatatattaatttgcaatatcctttactttagtatgaaaaggtagcaacaatgcaagttaaaggtaaagtgaaggggcagaacagggaaataacttgaggtagtggaaactttagttcttcagaaatactatgatgatgaccgaacagtctgacctttaattgtttctgaaaattgtaaacataatggctttaactgtgaactatttcattgtcaagcaatcaacaaattactctatcaatttgtcacatttttgctagatttcattgcctggaggagtttg

SEQ ID NO: 82905 - DNA, 606 bp, Citrus sinensis
  Intron number 2 from transcript orange1.1g004858m (locus o range1.1g004858m.g) derived from phytozome v7.0 (chr-ID sc affold00220; pos 105357 to 105962)
gctgagccaccggtgcataataggcaggttagaaatatcatctggatttgtataatatttggaaatgcattgaatgaattataaacaaaaatgggccaatagtcaaatgtacattaattatgaaaaccatttataggaggttgtgaagcattttaagagagatattaggagcgaagaagttgttagctggatacatgcatgcatgcgtgcatacatacatatatatatagtcgttatctagtgtgggtttctttactttaataaagtgcaggaaccctcattgaaacatttcttttgtgtgtgtgtgtgtgtgtgtgtgtacacacatacacaagtgatacactatgtctatagtcattcaatgtttgtagaaactagatcagattaacttgcaaagcttgattgaaagaagaagttaggaaggagggtttgatttcatttgaagtcgttattgcctggacatgcgaataaattttttgaatatttttcactattttattttctaaaataattttttgtgaagtttagtgcattatctccttcagacaatttgcttagcctgtattttcagtctgatcaaactgcaggaaatttgaaggaagagct

SEQ ID NO: 82906 - DNA, 636 bp, Citrus sinensis
  Intron number 1 from transcript orange1.1g014356m (locus o range1.1g014356m.g) derived from phytozome v7.0 (chr-ID sc affold00123; pos 163891 to 164526 reverse strand)
accgcttgaacaaatccccggttaaaagcatcaaggtttgatttttttttcccccttcatctgcatcctatattctttattttactttctctctccaaaagtctccatcttttcattcttttttgtctgtttggttggtgggaaagtgagcgaaagtgcaggaaagtaaaaggaaaaatgcattttctttgaggcttttgttcattgtgtttttgggtatatatgaataagtgtaaatattagtcaataattgtttttctttaggcattggttgggtaaattttctctcctttactacattttgatataatcatgttagcttgaaagaaaattggggtttcaacaaaaaaataataataatctttgggtgaaagcttaggttattttttttgaagaagcaatgattttttctgatttatttttattttttcttctctctctgtgcaatgattttctttttgggagttattaaagcttgaggataagaaaatgagttcataatgataagttcaatttctttttatgatttgtcagaggccaagtagagcattaatgcgactttgaaagcaaattcttgaactatttaaaagctctcgcattttaatcttgtgtttcttatgtttgaacagagcccag

SEQ ID NO: 82907 - DNA, 543 bp, Citrus sinensis
  Intron number 2 from transcript orange1.1g026168m (locus o range1.1g026168m.g) derived from phytozome v7.0 (chr-ID sc affold00004; pos 3951105 to 3951647 reverse strand)
ttgtaagtacagattagaactgaagttactcttttggatttttctttttatgtttaattaggccgtggtccttggtaattgcattattgactacactatgtacagacatattatcttacattgcaaaatctaatgcatttgaattggcagtcaaatgattaaacaacttgttgtatgtcaattacaagggctttggcaaaggttcatgtggttattcggtttgttttgatataaagagaatatgacactttaatttttgatacacaatgagcaatacaaaactattgcaaaaattatattggatactaaactgctgacataatagtgcttctgctcaaaaattcattttcttttgttttcttggttggttatgacagatttatatatgcactttcatagttacacatgttacaaaatttgtggttaatgcagcatatctgattttctagcttactacatggtttcttttcccaatattctgatatatgtttccttctatcaatgtcagcgctttgttatacacaatacattgtccaagtcgat

SEQ ID NO: 82908 - DNA, 610 bp, Citrus sinensis
  Intron number 1 from transcript orange1.1g046274m (locus o range1.1g046274m.g) derived from phytozome v7.0 (chr-ID sc affold00993; pos 10747 to 11356)
cactcgagttattcatcctcctcgatatcttgacagtaagcatttgtcggatccttactttttgcttgtttattttcattttgtagcacataaaaaaccctgtaacaaatttgattatgttttaatttgctaattaagctaccgttgtacatggaagtaaaaataatatgacatgtgtgccattattgaaaaaataaaataaaaaacagccggatgggttgcttatttggctccctctcttactttgaggatattatgttacatcagctgaaaatagttatttagctaactatttaagtgtggggtaaccctcaactattaaactaattttttaatataagttaagttaatgggaattcaataatcttatactgagtttttttaattgttcgagcgctcgatgtgtcttgccatgcaattttagccattttagtcagattaatgttgttcttctaattcaagaaagaaatatccattatttatgtggtacaatcttaatttaaaaaaaaaacacataatatcagtgacttattattccaccgaagatatgtctctgatgtacataaaattttggtctaatgtttatttttatctgcagcacttctgccaa

SEQ ID NO: 82909 - DNA, 589 bp, Citrus sinensis
  Intron number 3 from transcript orange1.1g034860m (locus o range1.1g034726m.g) derived from phytozome v7.0 (chr-ID sc affold00417; pos 70287 to 70875 reverse strand)
aagctgaaaagtataggtctgacttgatctcactctcctacgttgaatcacctgatgtttttaatagcttacccattgcattggctaactacgagatttagcagggactgaaactgtcaccattgcctgttgtaatgtgtaatcaaggtttgatgtgtaaattaactttctattgtggatacttttgcagatgctttatctgcttttctatatttttctctgtctatgttctgtttgttgtcactatgaataaaaaatggaacaacatttcagttttatgtacagtttatggtgtgatttaaataaataattggaatttgctctcagtttgtggtttatcttcttgatttctggttttgctctgcaattgtttgttttaagtactgaatgcttgagtgtgaagagtaactaaaattttattgttggagtcaatgtaggataagacataaatttgaggaatgtgcagttcttgatgattgctatacattccattgctgagtctgaggctctcccctttttcagttggaaaatttacccagcaaatgcttcttctgtctaccaggttttctttttccccctcttccttctt

SEQ ID NO: 82910 - DNA, 351 bp, Citrus sinensis
  Intron number 2 from transcript orange1.1g000251m (locus o range1.1g000251m.g) derived from phytozome v7.0 (chr-ID sc affold00016; pos 861492 to 861842 reverse strand)
tgttgggactgtccatctggttaatttacatttgactcgttgcaaaggtttttaatttagtatttgttgtaccaattgactgtatatttgattagggtgaattgattggttgagttttgatgtggatagttcaggattttgtgcaagtttgctaacgcattgtgaatttacttaacatttgtttatcaattacttgtgttttatttagggtttttaagatcttaatctttaggttcttaacttcttcattaggtcatagtgttactgcttatgtactaatgattgtaaagtaaattgttcttactttctttttccctcttcattttgcttgtaaaatttacaggaacagat

SEQ ID NO: 82911 - DNA, 406 bp, Citrus sinensis
  Intron number 3 from transcript orange1.1g014701m (locus o range1.1g014701m.g) derived from phytozome v7.0 (chr-ID sc affold00272; pos 185202 to 185607)
ctgtgctgcaggttcttttccctctctcgctctccttctctctatttgagtcaaatgaagataggtgagcaaaaatgttataaatgttcctttgttgcctcataatcttaaccaatggtttccttgctgaagtaacagtattttttaatgaaatggattaagaatgaactcaattcaattctttgctttacttctatgaatagttttggacaatttttatggtgtatttggatggatcatattaagaatgttccttagtcatctcaggcaaactattacctatagtcctgtgtataggaattagaaaaagttttagatgaccttgggtttgttaattcaaagatgcattttatttttctttgtacaaatttgttttgcctctgacgttacaggtaacttggggaat

SEQ ID NO: 82912 - DNA, 783 bp, Citrus sinensis
  Intron number 4 from transcript orange1.1g031256m (locus o range1.1g031256m.g) derived from phytozome v7.0 (chr-ID sc affold00018; pos 325816 to 326598 reverse strand)
ctttatcactttggcgcctgcttcacatctgggtaatgttaataatatcattgtcctcctttattgactctaagaattcattttcttgatttgtcataatttttttgaagtgtgtgaactgtatatctagaagttcgaagttgaatctgatatttttgcttcatgggctggcctaagttgatcagggcaagtatttttgtttacgcttggtgttgaatttgataccaacaactaattgccaacctggatttacggctggtgtatgtagaccatctcaccttaacccaactgacctggggattattgaattctagcagagtcttttttaatacttcttgtgccttatattcttccacatccagtttcactcatttattaataaacctatgtaacttcccactcttgagtcttgactcacatccatgtctgatgagtgagctagtactgtctaagaccttcatcatcttaatatctggtcaacattgcaatgttgcaaattcgaagccaattcaaaaagtggccacaaaacatttcgttagagttttctgccagtgagaatttctttttctttttgattgattcaaaaccaaatccgtatttatgagttctggtgtgaatgttatttatgagttctggtgagaatggcaacttaagtgttggtggcccttggtttaatctttgtcactgcaattgtaaattgttattttcctttactagcaaatctaattatgttttaaccttttttttgtattatccaggaaagcacactatatttggaagagt

SEQ ID NO: 82913 - DNA, 718 bp, Citrus sinensis
  Intron number 1 from transcript orange1.1g017500m (locus o range1.1g017500m.g) derived from phytozome v7.0 (chr-ID sc affold00439; pos 108134 to 108851)
aatttagaccccaacgaatacccagaagtttgcaggtacatactttgatcgctggctatgtatagcattatctcccaacatctgaatccgactgattgtttaatatgcaattggatacactttatggaaggcattgggcttgctaccacaagttcaaataataagttcctttggagcaaaatttgttgaagttgaaaaagaaagtcttagttgggacgcatagttgctgcaatatgctgaggttttttctcatgcttgggttattaagtttgtttattgaatgtgaaagacacggtctgtaagcatgttcttgttcctgctaatatttcatttaatgtttcactatttgctgctgcaaatgagcaccctactttatgctcacttaggcatttaatcaaacttcttcatagatattatcaaacacctgtgaactccttgtaatagacgtgaaaacaaaccatcaacagaaatcatcaaccaacaactacaagagcaattaatgtgtggttcattgaattggcttatgtacatctaagttcctagcattcgatatcacaaaattgtaattctaaatgaatcaacaattttgcattttacaggtctattgaaattaattaattcgtgatcacagtgatatttttttctttttacttttttctgttaatacccaattgattgtatcttctcctgtgccaattgttctcacaaatttgcagag

SEQ ID NO: 82914 - DNA, 818 bp, Citrus sinensis
  Intron number 1 from transcript orange1.1g008815m (locus o range1.1g008815m.g) derived from phytozome v7.0 (chr-ID sc affold00011; pos 960137 to 960954)
gttaatcgcagctgaaggcttcatatttagagagagtaagtgcgttaatgtctgtttcagtttcacctttttagcgatttaaacttatccgtaactattaatatttgatatttgaaatctgttatgtttctatttaacgtgttgaatgcttcattttacttcagatctgttgcacctaacgttaaagtttgaatctttgtgtcgattcttgttgttctgttaaccattggagatcttttgttacgcactgtacttgcttggtattgctcgtgcagtcttctattttcttttcacgttgatattttcttttaatcacattgttgtgtaatcatattcttgaaaatcaattgattaatttgttgtattgaaatgagatgtcttcaaaaaatcaagtggtttctgaagtgaatttattttttctctacggaaactcttccttttgttgttagcactgactgggagagctttatttatgttcctgttgagactgcaattccacttttatagttggctttgttaaggttcatcgtttttgttagtggattatctgtagttggtggataatttgccttttcagttagtgaggtatattcattttctttttctaatttatcggtcagattgagaaagggttttaaggctgactgaggttttctttggatttaccattatgtggactctgagagagaatattttgttctattgtcatcactaagaattacaagctatctcattacttggggttggtatcccttgtgaagaattcaattactgagtgctgacaaatgttctttgacgtatttgtaggcttctttgga

SEQ ID NO: 82915 - DNA, 803 bp, Citrus sinensis
  Intron number 1 from transcript orange1.1g038226m (locus o range1.1g038226m.g) derived from phytozome v7.0 (chr-ID sc affold00374; pos 102014 to 102816)
ctgctggaattcactaccctcgtgccactcctgaggtgcccttttcgtttttccctttgattttttttcccatttagtttcgtcactgatgaatttgttgaccctcttgtctgttttttttttttttcactttttcagttttctcatttgcattgtttaaagatatgagtttaaatcaattgttatgattggcaacaaggcaattgtatattgtacttaagttgggtaggcaatttagcattttatgtaacttcgaattccaattattcaatgacgggcctgttcgggattaagggaatgtagcttttaatctgcaagctcctttgaaatgaaattactagctagcaagtgaaagtgggtggatgctgttaaccgcaatgccttgtttagggaagcattttagttgctgaatttgctgtgcttttaaaattaagtgaaagtacaacagttacgaggacccttagtcaagcaacttcctagtatgtttattgagaactgtatagatgcccttgaaattcacatttgtggtgcattggtgactgttgcttccttcattttagtcgtactctgtgtgttgattcgctctagttcttttcccatggtgctaatttatattctaatttcttttctacctttttcgcctgtttcatatggcgaccttctttgctggttttagcctgtttattacttatctagatatggactagactatcacgctttggcattgttaacttatctctcatcattacttttagagccactatgttatatgtctatgtgtaaactcctttgtatgatgtcag

SEQ ID NO: 82916 - DNA, 829 bp, Citrus sinensis
  Intron number 1 from transcript orange1.1g039144m (locus o range1.1g039144m.g) derived from phytozome v7.0 (chr-ID sc affold00014; pos 899915 to 900743)
gttccttttctaacccagctaaagttcttactcaggtaattaatcacatttcactcaattccatttttgtacaaaaggtttatcactatatattttcacattaggtatatgtaaaacaaaacatgcttgctacaacacctctcaccctccatttaaacccctaactaattgttttgtaaaattttcttaaattcctttgttgacaaccccaagtttttcagtagtacgtaatattatgaattgagagataaagcctcctaaaagtttgtgattttcaaagagttttctttgacttgctatcctgattccaatcctgaggagataaagagttaattttttttctttaccctaaccttttaagcaaaaaatataaataagcaaaaataagataaataaataaattgagagacaagaacaaagatttagagggccggaaacaaaaatttttaagaaacctgaagtcttcattggagaatagcgatacaaacaacactatagtgaccaaatcgcagtcttctctaagagatatatcatgttgttgtaaataaagcaatatgtatataaatttttaaataacatgtgaatgggatgggttaacaaagattgacttacggatttattttgtcggtttgtatgacttcatagtgttttcagtttagggtttcatgcaagcaatctctttttctctgctctgaaaaatgactatctttattgcgaaaaaaaaaagatattttatgtccaaaattttataatatataactgatttcttttaaggtttttatttattaatttgcctctttaattatttatttgtgcgttttaacaggga

SEQ ID NO: 82917 - DNA, 824 bp, Citrus sinensis
  Intron number 1 from transcript orange1.1g024224m (locus o range1.1g024224m.g) derived from phytozome v7.0 (chr-ID sc affold00002; pos 3084381 to 3085204)
ccgtctccaaggcaactactacttccaagagcaacgtgagctcctatttaatcctagatctcttttcctcttttttctaataattttaaaaacatgtttcctcttacaattgtagactttatttttaggttaattttctgaaaatgatttggttttttttttttaagaaatgacgagcggataacgttttgcttgaagcattaagagtagaaaatttattaatgcttgttttttaattttcctggtcgatatggattggtggattatgtgtttgattaatataatctggcgtttgattttcgtgaacattggatgaacttttagcttacgttaggtcaaaatgtacacaggttcaaaacgatgatatgtagatagcgtgtaaacatttgaaaagagagccgtgtttgtgcagatattgagttagttgatttgtgattatgataaacaattgaagctatggcattgctagtaattctttttttgatcgctcctggatgttagaatttttatatgactatgatgagaagatgtgggaatcataattgatggacttaattttaaacagaggactaaacatcaagtgtgcttaatcagtgaggtctaatggaacatgatgcatcaattctttaaggaagaatagctgaatgctaagggttttcttacctttctaaaatgttcctattttgatttttgcatttcatgttaatgcatgacttgctagttgtaattcacaattatttgctgctctgctctatcttctttttgtctatctaacaatctaattaatttattttcttgttttagtgtctaggcatcgaactctc

SEQ ID NO: 82918 - DNA, 645 bp, Citrus sinensis
  Intron number 1 from transcript orange1.1g030907m (locus o range1.1g030907m.g) derived from phytozome v7.0 (chr-ID sc affold00007; pos 327524 to 328168)
ctcgatttcgtcagtccatcgtcggtattgcccaggtaactctgcaatttttaaatttctcaaattttgaaactgtaattgtatcctattaatgagcgatgataagcagcaaagtagaattcatttttcatgacaatgtgaaatttaaatcttccctaaacaggtctttgctcatttaagattcgaatctgcagtgaaatgtgcctttgatagtaggagcaagagagattttttcaaattgaaaaggctagaaaaagattagtagtagcatacttacttggtcattgtttagtgcctgtgtttgatttttccaatcaatacggggctgggtgtgtagttgtttattgcccttattgcatgagaatacttggtttctactttctatagcagggctattgttgttgaattcccacatattccatttttatgttccagtttttgcctttttcgtttagtttcccttgtgtgaaatcatgttgtaagtagcagtttttttatattgggtaactaatcttttgaatgcatatatactacataaaattggatatcttggtttgtagttttggcacagagttactagattattaaatgtcttttcttaatgctgtacatttgaaccaggcaaatcatcgaatcacgacaaga

SEQ ID NO: 82919 - DNA, 582 bp, Citrus sinensis
  Intron number 1 from transcript orange1.1g015227m (locus o range1.1g015227m.g) derived from phytozome v7.0 (chr-ID sc affold00071; pos 89582 to 90163)
ttattagagctaaaggcaaatacaaagggtatgtcctcgttcttaatatttacattaactataaaaattataaaaaggaaacatttacatgagagtctatgatacttttaatatacaaatttattttaatttgattcttataacgtgtatttattttttataattagttgaaacatacacatgacaagaatccaattgaaaaaaagtgtatgcaccatataaattttctcaatatttgtgggatatttagtattattttataaatactattttttttaacatatctatatatatatatcaatagaagtgatagtactttttaattcttgtaaaaggaaaattaaatataccaaaactcggttgttactatttttacttgttctaacacctcttttcaatatttcacatgcacattgtttctgttttcagctcacaggtttttgagttagaaaacaaacgttattctcattttcaaaaacaaacacaccgcttgtttgctatcagtttttgagaaacgtttaaaggttgtttttccccttttctgaaggaaaacttgcaaaagttcaagggagacagaggtgg

SEQ ID NO: 82920 - DNA, 789 bp, Citrus sinensis
  Intron number 1 from transcript orange1.1g000163m (locus o range1.1g000163m.g) derived from phytozome v7.0 (chr-ID sc affold00123; pos 111518 to 112306)
aagtattgagccggttcaaatgctatcatcaattctttggagccacctgaccccataatttccaggcacaaatgagggattgcatgtgcctgcaattcaggcattcagtacgcacacgcacacacacactcgcacacactcacgcatccatacatacacatacattaacacgtgtaggaaaaaaactatgcttgttatcatatatcttttacgtttcttttcctatgtgggatgtgatctttgcttggaaaagacagattttaggatattgcatgttcattggttatagcataatgtttctaactagatatttactggtttctggtgaacttcattggttttacctgaaactgagcttgctccattcccagaatccttctgtggcctatagatttactttgtagccaatgaaaactattggatttaaaataaaagtcaaatgagaaaatttctcccagtaccacacttgtaagcattgtgcttatataggcattttattattaaaatcagagaacaattttttggtaatcagatgctctataagctgtttgacgagttggagaactagaccttctctgtgattaataaggaaatcttgaaagtgcgatgtaatattggggttagcctttatttatcacataggttttttttttttttccttttttgaccttatttctgccattattgtagttagagccataattcattatcatctagtcctttcagctttgatatgtactttgctctaagatgttgttacattggccattccacagggaggtcttcatc

SEQ ID NO: 82921 - DNA, 418 bp, Citrus sinensis
  Intron number 3 from transcript orange1.1g018860m (locus o range1.1g018860m.g) derived from phytozome v7.0 (chr-ID sc affold00005; pos 2696347 to 2696764)
acaagcacattgttcgagcttgttctttttctgaggtatagttggtttctttgttttcttttatttttatttcaggatagatcattttttttttcgaatgcttcgagctgtacctatgtttccagctccaagttatgcacaataccttgaagatatacgtcttcaactgctgcgttaaagtctgtttctggattttaccttttgaatttatgattactgaaaagcctaagcattttgtttggccggtagtatttatttgctatgaccgatctgtaaacttaattcagctggtcattcttgattgaatcattctatggaagtgggagcatggttgtttgttataaatatgcatattcatgcatcttgtttgatgtttctctacctgaaacaggatacgcacctgctactcactggggga

SEQ ID NO: 82922 - DNA, 698 bp, Citrus sinensis
  Intron number 1 from transcript orange1.1g009394m (locus o range1.1g009394m.g) derived from phytozome v7.0 (chr-ID sc affold00175; pos 295522 to 296219)
ttccacatttttcggattatatttccgatcttccggtacgtttctgccggtttggctgctgagaaaatgaaagaaagaaaaaccgaagatatgaaaagaaagtgaaatttgaaactttattttagaaactgttttccttaaaatcagttaatctgattatgttgagttacttattaagtgttttaaagttattatttgaatagccaaattttgatttaattgtataattatatgttgagattaattcctatttggcgaatgttttcatttgccgctgttggactgccatcagtgtttaattattttgtttgagagcaaaaatcttaatgagaataataataataataacaacaacaaaattttaaaaaactaactagttctgttaatttccttagtttattctgttagttttcttcaatttaaccttttcccgctatttatgatttatcattattatatatatatattttgagattctggaaaggaaaaaagaagaagaaaatttgggttagcatatatatatttatttatgtgattgttagtgcgcatgtctttctttacgcaaggctctgtttggacgcaattaattatacagaatcacaaaatattggtgaataactgttgataattaattgatttgtttatcttcacgttttggtgcagacgcatcctaatccattgcaagacaatccttcata

SEQ ID NO: 82923 - DNA, 699 bp, Citrus sinensis
  Intron number 1 from transcript orange1.1g022700m (locus o range1.1g022700m.g) derived from phytozome v7.0 (chr-ID sc affold00068; pos 435173 to 435871 reverse strand)
aggtaccctttttctttcttctttctttcttttcttttctttttccaaattttttaattcttgttttcagtttcttggtgagttttgcttcttctgttgttgctaatttcatcattttctgtttgcagtttttgttgtaaattggttaattagatgcttgatttttctttctttctttctttctttctttttggtttgggggtatctgttattttgtttgattatgcgtttctcattttaatttctaaagtctctttgtctttgcacattttggaatcattttatttttcaatttattttcactgggaatactaataatttagacccaaattgtgataggtgatcggttaattatatgctgccggcaacatgacgttttccagatttttttttttcttctatattacaagttttcgactcctatgacttgaacccaccgaaaaagaacagtcaaaagtttgatatagcagtctagttgaaacttgaaggactaatggcttagaaatattacccctcctttttttttttggtctgaatttattggattcattttgtggtcaataattcaatataacatgtatattggtatcttaataattcacacgcacctcttgattgtttttgttatgtttaatcatttcctcaatgagcatacggtgggattactcagcattttttctttcctgatattttgcagtt

SEQ ID NO: 82924 - DNA, 840 bp, Citrus sinensis
  Intron number 1 from transcript orange1.1g043077m (locus o range1.1g043077m.g) derived from phytozome v7.0 (chr-ID sc affold00186; pos 186025 to 186864 reverse strand)
agttgaacaactttgttcgctccctgcgtgagcaggtgaaactcttgctcttgttctcagatgtgcatgttgggttgttacttgttgattaagatacttgattgtgtatcttaggatacacgttaagcaacaagactctcgacccaagaaaaaggggcaaataaaatgcatgacaaaaataatatttgttcttattttgattttggtcatgtacgatttatattaactagatttttcatataatttttaaatttttgttgaaaagagtctttctcaacgtgtgtactttaacgaatattttttaataaatattgttgtgtaggtgtctcagtgtcattttgagatattttttatagtgattttatggtgttaattataacatgcatatatttgtaaggacgatgtataacaaatttgattttttttttttttatattgttaatgtatctgttgaagccttgatgatcatattgcatgtcctttttatgcggtcattaagtttgtaattggacttctgatgcttatcaagtacaagctatatagtttctcttgattctgatcatctgtttgggtgatgatgatttgtataagtcatggttaatgtagttcatctgaagaggaaaactaataaaactaactatgattttgtaagtgatatttcttgcatttgaaacttggatagaagaaatctcttggattaattactttctttcagcggtaaaagttaagtactgtttgtaaagcaaaaatcaatcctatacactgtcaaagaatcatcattctcattatttcttgctgcttgtagggtatactggaccataatttcgataccttgagcag

SEQ ID NO: 82925 - DNA, 912 bp, Citrus sinensis
  Intron number 2 from transcript orange1.1g038893m (locus o range1.1g038893m.g) derived from phytozome v7.0 (chr-ID sc affold00160; pos 32979 to 33890)
gcaaagccagactctgtctactttgttgtcaacaggttaatttcctttcttattttcatcttcttatttatatgtgttactgttagctctgcctctgtgttagcatatattatgttttacacttgattggagattcgtggcaagaattcagaaaatatgattatatatatgtcccggctgttcaaaatgggttagtagctctgttgatcatgaaagagtacacacattaaactctgttcaaaggacaccaataatatggtagctgaacaaagaaaatgcttgtctactacccggatcctgttttaagaaatcaaaaaaagttaagataacagtaaatggtaaaatccatatgattattggtagaaactctgtctctttataatctttctcattataaatgcaagctatgagacaagttactggtattttttctttaatatacccaggaaagtaaaattgggactcatctaactaatgatgggtcaagagttgctaatgtggaaaagcaaaactcttgaaataggatatccgtgtaagggagcgaaatttgaggactgcttgttagctctagtaattttttgtctatgaattaataatggtctagttgtgtatcaaaattgaggtcccatgatttattttccttttagctgactgatttttgtttttcaatttcttataaacaaattactatgttgatttctttgttgttgagtaattttggtccattcttatacacatagtttgtaccaatgaaattggaaattttcctttgaagaggaaaaagtatgaaaggaataattaagcaaatggaggtctcagaaacggaagctaaatagtttcattgctttgttttctatagctaattgatatgtcaataaattataaatatgcatccatgcagaggaggtgcag

SEQ ID NO: 82926 - DNA, 469 bp, Citrus sinensis
  Intron number 2 from transcript orange1.1g009284m (locus o range1.1g009000m.g) derived from phytozome v7.0 (chr-ID sc affold00004; pos 3960463 to 3960931 reverse strand)
ttatattcgtaagctgtttcttccatcattgactaattttattctttgcaaattttataatttcccatttatgtttttgggtccatttagaagcgaaaacaaaaagaaaattacaatctaagtttttattgttctggctggatgacagaagtgcagtaaatttacaagtttaagtattttgatgtatagtggtccttcactatccaaaggaactaaattttcctaatggaatctattatactccggtaaggttaggttggccttggagctggatgctaccatgctaatgtgtagattctaaaggcaatccaatctaaaagaacttagttggtttcaactcgaatctagacctggtatggtaggccttctaatatatgttctaaggactcttcctttcttgctcactttagttgtgattgcttggtacaatctgcatatttggttctcattaaacacatttgacaggaac

SEQ ID NO: 82927 - DNA, 902 bp, Citrus sinensis
  Intron number 1 from transcript orange1.1g009284m (locus o range1.1g009000m.g) derived from phytozome v7.0 (chr-ID sc affold00004; pos 3961072 to 3961973 reverse strand)
gagggaaaccaaaaactgttgaattaattcagcaagtaagctgtctggattattgtgcttattttgatttgacgcttctgtttggttgccgagaaaatgaaggaaaacaaacgaatatgagttttaattagtactcatttcttttctattgaaggacagataatcctttccttttttcttttttttttgttgatgagtgagtttcattatttatctgtctattgttttatatattgtttgatggtgtttggctgatgagaaagtgaaggaaaatataggagtgtgagttttattttattttaatttttttaaaaaatttctaatgaaatgtaactataaaaagtcagctcattcaagctaaattgcagactgggtgaattttattgattttacttgtatgcctgttaatcttcttgtgtttgtagctaagtaatgtctgtctgttatttgagttctatttgctaatttgactaataaaggactcctttttgtgtgtaatatattgtgtgaaagaatgaccaactgaaaagtcttactttttaagagttagtgagtggtagatcccatgtttcttagtgacatttaccctctgcttggtttgtgagaaacctgaagacaagaatgatgtgaaaatgaaaagcaaaaagttgtaatctagatgggtggttagctatttgatgattttgatccctggttcccataacaagtggtagtgtagtagttatggttaaatttttagattttgcaatctatctcttagtttcttaagtggatattttattcttaaactagtaatatatattggtgaatagaactatagaaatgatgttctgttactggacttaatgtgctatttatattatttcatatcttttctagatttttcattgtgtcttttgggc

SEQ ID NO: 82928 - DNA, 990 bp, Citrus sinensis
  Intron number 1 from transcript orange1.1g008935m (locus o range1.1g008935m.g) derived from phytozome v7.0 (chr-ID sc affold00005; pos 2603392 to 2604381 reverse strand)
cctctccttttaccatcactggaagaaaatctgtacttaaatttcatcacattcttacattttaattagttattatcattaaaaaaaaaaaaaaactcttcttcttcttcttcttcttcttcttcttctctttcgttatttggaaaaacaattaaaaagttctaaagctaagagttggttttgatgttcatgattaaagaaggtggtgatgttgtttctttggctttggtttagtagtcatatccttcaagattgtggcttttgagttttgattgaaagctttacattcttttttttttttgattttggctacttcttttttaaaaaactttttcagaacttttctgagctttgatgctttgatgttgaagttcaataagttcagagattttggactgtccactactctttgctttcgactttctctctctttcctcctcatgaaatatttaaattaaatccaaaaaactttttttttcttaatcaaaattctatttgctaattattttttttttaaagttgcattgatccctttttttttgtttttgtttttgttttttgcttgcagttatacacacacacacaccctctctcagttatttttttttgttttattggatcttgaattttgataatgaaattgtcttcttcttcctctccttcttcttcttagtcttctcttagtagggtctacgctgtttctgaatttaattaatgtggtgtgttcatttctctttcagctaactccatttttactacttgaggttgtttagttattcctatttgggtggtaatgtaaaaggcgttttatttttttattttttttatatctcttttataacttataacaaacatttaatgcccaccaaaaccatcatcatcaattttttgttctttttttgggtttaaaatttgggggtggtcattcattgtaacaattgaaattaaattgtaggtggcacatttcttgtgtggttcggacccacggtg

SEQ ID NO: 82929 - DNA, 933 bp, Citrus sinensis
  Intron number 2 from transcript orange1.1g033422m (locus o range1.1g033422m.g) derived from phytozome v7.0 (chr-ID sc affold00046; pos 209497 to 210429 reverse strand)
ccagctggtatagttgctgggatcaggtaaatggaagatgcatctggcttctttgttcttacttctcatacacaggatattcccaatcctgattatgattgccattctctaattgcaagcaatattatgcataacatgaaaaattgcataggtggaactttcgaaaaaaattagttgttattcagtggaacttttgaaaaaaattagttattcattcttttaaactctcaacctctttcctgcctcttccttcacattgatattatttttgatgttccacttagccatacaatatctgcagttgtattttggataagtgatgatactgccacaaacttttgtacaaacttattttgtacaaactgatgtgacattaattcattggttgaatgaaaatacaaaataatgaaaataaatcatgtgggccaagagatatttaatttaaccaattttatcatgccacatcagtttatacaaaataaatttgtacaagagtttgtggctatatcattactcattttggatatgtagattcttgtatcgggtgcttggcaaaagggatcttagaaaaatcttttatcattttgtatacttgttctgttatgacagcttgtggcatcttcagttcatgctctctgaatgcactcatgctgctatactaccaatcatttgttagtgccgaaaagaagtttgacccctgctgatttattaaatttcttggtgattatttcataatctaattccactccgtgcacgtgctgctttaaatattgaaaaatcagacctttactggtgctattagaaacttttaaattagctgcttcgttaattatttcttaacagctgcatagttattttgtttacacctggttaaacattgattttgatgtttaagagctcaactctagcaatctgttatcttgcagtgccctt

SEQ ID NO: 82930 - DNA, 573 bp, Citrus sinensis
  Intron number 1 from transcript orange1.1g033422m (locus o range1.1g033422m.g) derived from phytozome v7.0 (chr-ID sc affold00046; pos 210466 to 211038 reverse strand)
gaaaaactcttactttgctatagttatcgagactggtaatttttgttttttttttttgggttttcttttttgacttttttgatttagcttctttttgcgttaagctttctttctgcagatccagggtagtaacttcgttagagagttgctcagttttgatcttattgaagttctttgctaatgtgtgtggttgtgaaggttaaaattttttttcctgtggaaaattgttgcttgatttgacaattcaatagttggatgagaaacaagctaatgactgcttagcaacttagcatcaagactatgttttcaaccacataaactgaaaagagatccttcataatctatggatttgagaaaagttatgattaaggtcaagcatgcacattggagtagatttaagtgatttataagtaaatgagtgaaattgtgaacattagaggtcggaaaatttgatatagtgactaattttttttggttgtctttctttcttttgatgcaataatgcaagagtttcgatttggtcctgagttttatgctgttgatacagtttgtgcagctttactgactgcggtc

SEQ ID NO: 82931 - DNA, 828 bp, Citrus sinensis
  Intron number 3 from transcript orange1.1g022960m (locus o range1.1g022960m.g) derived from phytozome v7.0 (chr-ID sc affold00005; pos 1766002 to 1766829 reverse strand)
ggtaggatgattacagtaaaagcaattaaacatcaactgagtgaacttcgtcttggcagaaaacaattttcagttgcaacccactgggcctttaatttctaagggttcgcttgtggatatattaaaccttgcttagtgatgtgaactctccctagtaatttcatcagccttttcttttcaaattccatttatatttttacagtctattgaatttccattgagaaattttcaacgttgggcatcatcagcatacaatgccaaaattgctcgagagcatgtgaagctgcgagacctttgttactttatcattagtttcttgaagtaattagttcatactgctcttattgctgttgaatctaatgctgcattttctgctaactttggaggctcaacaagtttgtattgcctctagcagtgtaccaagtccggtgttttatggccagtgttctgtttttcttaattagatttgtagcgctgatgcctagtaagggtgtgttttaactggccatttaaggggctttaatggcctcttcttattgtcttcatttcagggatttaaagttgaggtgaacaaacacagtaacttcaaatgaattactttacaccaacctcaaatcacacacgtccagtatctcctcctgctaccagcaaattcagattcacataaaagcatgtaactcatgcgagatttcttagcaaatataatttggacttatgaagtaacaaatgttagactttgatgtaatttctttctaaacacattcttctaatgatgataagcagttgcttgtaatttgttttgtagagaaagtgaagggtcatttttgt

SEQ ID NO: 82932 - DNA, 868 bp, Citrus sinensis
  Intron number 4 from transcript orange1.1g032311m (locus o range1.1g030884m.g) derived from phytozome v7.0 (chr-ID sc affold00023; pos 632781 to 633648)
ctgacgtgagaaatgtgagtgttactatctcattcaaatgttaggccaaatacttgttgggatgtataggtattactgctaaggggaatggtgcatcatgtctaccaactgtggattttgattcatttctagatttgtttgacaagtttgattcaatacatagatacttaaagttatatgtcgtttgagttttgtgggattggttttattaataaacatcaactaagatccaaattcttaaaggaatagctgtctgaagcattcatatgatgcttggtaacaattttcttaaaagcaatggggttttatcaattcaacgcattaggtgcatcgactgccaggagatgttacctgctatctgatttgctgatctgtcttgagatgttattttctccttgatgtgaaatattcttattagcttgagtttcatatcattgtggattttccttcagattattatatcaacatgctgggggcttgttccttctacacagttatgaatcacacactgatgatattatgtgtactatcaaatcatgatataacttgctttaaacttttgtctcttcaactacagatttaagtgccctacctttttgaaaagttaggcagtcacaacttccctttaagtttctagcaaatgagattaactagtttccttgtgagtaataataagaaatataatgaaatgagaccttgaaaaatgaaaaagaagagttttcagtgtatgagcttgcccctgattggattgtcttgttttgatttacttattagtctatatttccaattgttggggaccagtgtatggggtctgacttattcttgctcattttattcccaacaattgtctagttcttcaggaggttcc

SEQ ID NO: 82933 - DNA, 1026 bp, Citrus sinensis
  Intron number 3 from transcript orange1.1g032596m (locus o range1.1g032596m.g) derived from phytozome v7.0 (chr-ID sc affold00158; pos 54441 to 55466 reverse strand)
ctctatcacctttcccgttgggcaaggtctcaggggtaagcatctgcatttgtttattttttggaatcacttggttgcaattagacattgctttcatagctgattaattttctatttatcatcttttattatgctaaaatttacaggtttctgcaatcaatatatatatataaacacacactccaataaagtgtattttatttcgtagtgtattggaatttgcgttttttcatcttttagttgatctcttactttgttaaagctttaaaatcgtaggattttaaagctctcccgaactttttcgcactttaaaattctggactagaaaactactatatatatatatctaaatacatttatgtatatatgagcggtgatttggtccagtatcctagatcttattgaagttcgggacgaattgacaacaatgtgaatataattttacattgttgttaattgttttacaacgttgtaaaagtatgttcatatcattgtcaactggtccaggattttaatctcggattataatttcggattggaaaattttatatatataaagttctgactggtaagagggttgttcaaggttgggctttcacctgttgtcatcaaagttgcactttattagggacaagaaagactagttagttttcatgttaaaatgtacagagtacgtttgtatttgtgcctatcttatattttgcctgagaaaaagattggcttcatggacattttagtatatctttattggacaatctgaaaaaggtaaaaaagatatgaaaagaagaaaaatacttgactgattctgaaaattctccacatcaaaattgatacattggaattgcaccaatttcttttcagcaacttttatttgttttccatccaaggccatatcaattggaattgatcctttaatttgttgacttcctctagccttcaattcttgctttggcaactgaagcagccaattgtaacgaactctgtcatattttcttcattgtaggtatttgtcagagaagaagaagg

SEQ ID NO: 82934 - DNA, 600 bp, Citrus sinensis
  Intron number 1 from transcript orange1.1g030976m (locus o range1.1g030976m.g) derived from phytozome v7.0 (chr-ID sc affold00022; pos 869606 to 870205 reverse strand)
cgatatcggcaacccaaagaaaaaacttgctcaaggttctttcttttagaatccgtctaatcattctttgagtgaactcgttagtctgtttgtacatattttatctgttcgtgcctgtagtttcatgttttgtgctttgaacctaaatatgaagttcgccttgaaagctaaatttaatagcttaatagcctaatggctgcattggtgaatgaattttgttagaacttaacaaagtgtagttgttttattcttccaattactacctaccttttattgttttatgatggcccttctagaaataagttgttgattctattgcataaaaaaagtttaatttatttagagaatcattgtgaattgaaaacacatgttgatgagtaccaaaaccctagcctttttgtaacttttttgacgttggatgaagaatgtgcctggaatcggtcggtggaactgtagaaatgcgcaactgttgctatatttgcctgctaatttttacaaaacattctttttcgcaagcatttccatctttcttatgttgtatgtatttcttgctgcatgcatacagttagctctggagggaaaaagagtggtgctatcgat

SEQ ID NO: 82935 - DNA, 721 bp, Citrus sinensis
  Intron number 1 from transcript orange1.1g024309m (locus o range1.1g024309m.g) derived from phytozome v7.0 (chr-ID sc affold00026; pos 114949 to 115669 reverse strand)
gcttcgatcattgaatctggttggagggtattggttttatcgctctttcattcaatcttttccctcaagatttgatttttcctttttcactgcccattggtgtttgtggatctgtttgtgcgtttaattgcttatttgttataaaatgataataatgatgatttttttttattggtttctgtgattttcttttgtttcaagctctggcttattgaaagattgtgactttagaatgtgtgtttcagtacttgtttgattcttgatgttgatggcggggttaagttgttagattacaatgactcgcgtattgggtattgagctgattagactagtgacttgtgaaatcgaatcaccattagttagatctttgtttattgcaaatagttgtttgggcaattcacgacaactgagcaatcacaagaagattaagaatttctagttaatccttttgttgttgccggtgtgcattgctgcatgtgtagaatttattgctagttgaaattataatttactcttcttagatgagaaaaagggttatgtgtgatttagcagcttggtacttttggtattgattgattttcgtcgaatttctttagtgtgattatgttcttctccatttctcagtactgtttatcgtcttgagttatattataattcttgcaactctgtctttgtctatgatgcagtatctcatcacacatttcagcgattttcaactggc

SEQ ID NO: 82936 - DNA, 693 bp, Citrus sinensis
  Intron number 2 from transcript orange1.1g035977m (locus o range1.1g035977m.g) derived from phytozome v7.0 (chr-ID sc affold00056; pos 633852 to 634544 reverse strand)
cctagtgatccttatctaagggagcatctccattggtaaactctcactcataaatgttatgtctaatgcattttatggtaattttgtcactaaaaccttttaaagatctacatgaaaaatttaactcttttttttttgaaagataaaatgacattgttgcttagcttgcagattcaacccaatgaacagatattgctcatacccaaacattacgtacttgcaaacatatggacccatgtagatagtttcagcatatctatcattttgattattttcatcttcaattacaaaataattgtgcaatgttatttgtgatcagctggatgcatccataatgtttgtgtctaaaacaaggcctatagttattctataagatctgaacttgtgttgaacaaaaaatacaagatggtgattggtgactatcgaaaaagaaaaagaaataattaaatcttaatcatatattttcataaatgcatatgttacaaatgatccataaaaaatcagacacaactaactaaaccagcaagagatgtattttgttagagcaaaattaatgtacaaaagcaaaacctaattttgaaatttgaaagatatacaaaaacatataaatagtgaaaactagctaacagaagggtctgatgtgaactatataactattttacaggattgtgacagacattccaggaacaacag

SEQ ID NO: 82937 - DNA, 376 bp, Citrus sinensis
  Intron number 1 from transcript orange1.1g036222m (locus o range1.1g036222m.g) derived from phytozome v7.0 (chr-ID sc affold00004; pos 425806 to 426181)
ccattacaagctccgggtttgtttattaacccaattattccttttttcttttttccctttcttccaatataactcacatattgtgacttgattctaatacaaagtttgtggaagcactttcaactaaatggattaaaatggagcggcaaattatatgagacatagtcttgaacatcttttcttaaactgaatcaagggaaaatttacttacacacagcaagcaatttttctattggcatggaaaaggtctaagcaatcggcctatcctttaaagaatgtcatgcaagtttaaccaattgatatgcgaattacgagaagcataagtttgattgatgttgtgctgatattattggttttggcaggcaactaattcaag

SEQ ID NO: 82938 - DNA, 722 bp, Citrus sinensis
  Intron number 2 from transcript orange1.1g047402m (locus o range1.1g047402m.g) derived from phytozome v7.0 (chr-ID sc affold00571; pos 101245 to 101966)
gtggtaagagatgggcgatggtggtgagagatgaacgattgtgggtgatggttatttaaacgtgttttgggtttttgattgattttttagtaagggtattttggtggaagttaactgctactcaagatttggtggagatttgctcatatgcttgtagcttgctattactatcataaaacaaatgggttcatgtgcttgtacctttttatgtagtcgagccatgttttgttcaagactattttcggtgaaaaaatctgtttttatttttatgtttaaagatcatgccttagcgttacgcttctgattaggttgaaattataagttataatgttaactgattcatttatttcttgttacttattctgtatttggcataaatataaggatttctacatatttttttgttctgctgctgctggcattgtttttgtttgttaaacgtttgtgaattttatactctgacggtgcacttaatgtaagattttgtattgcgcagattacataacacaatggtaaaagcagttgcagttcttagtggaactgaggacgtcaagggaagtgtttcatttacccaggaaggagatagcattttaatcactaattaattagttggttctggaactagttgctcttaaatcatgtttaaagtaatttcttttgcctttttttctaattttcttcttctaggtcaaacaactgtaacaggaagcttctctggtctc

SEQ ID NO: 82939 - DNA, 477 bp, Citrus sinensis
  Intron number 1 from transcript orange1.1g005980m (locus o range1.1g005980m.g) derived from phytozome v7.0 (chr-ID sc affold00016; pos 1722793 to 1723269 reverse strand)
acagcaaacccttttctgattctccttcatacaaggtaaggctctctcctttttcctcaattctttccaaagatcctgcaagtattttgccttttgtatttttttaactgtttaagatgttcactccgttttgattttggatacaactattgagcaaattttaagaaaggagcccttttcttaaggggttgccaaaagtttcatccctgcttctcaaaagtacccccatttgaatttcctttttggagcactttaagtttgtgcattctgttgttcttttctttttattgtttaatgacccttgtggtgtaaccattgatatgattaccttaaggatgattacttggttgttctggtttactagcaatgaatgatgccatctgtttagatgtgaaggaaagagttgcactatcatggattttttctttatgttgtaattcaggtagaagctttgccccaggggtccagaacattgcc

SEQ ID NO: 82940 - DNA, 848 bp, Citrus sinensis
  Intron number 1 from transcript orange1.1g035248m (locus o range1.1g035248m.g) derived from phytozome v7.0 (chr-ID sc affold00186; pos 230921 to 231768)
tacattttatcgcccgaaatcttccattttttcacgtaagtccttcttctcccccgtttaagcatcttagatctagtggaatcgattatatattttttaattatatttgttgaagcgatttaaatctttttttttctttttgattcgatcttgataaggtgattgctgagttttcagcttaagataaaagcttgtttcgaaattcatcaaaattagggtgtgataatcctttgattactattcttttcagtttgttcaaccgttgaatcgtaaaattagggttcatagtcctcacgttaatatatttttgaatgtagaaaaattagggctagactagttgtgagaagttcttgtgatttaggctattcagtaaaaattgacttgttgcaagcctgggatgtagacgacagatgtagaattttttttttttcaatgggatcactattttttgaattggaaattgtacttattggatcattttggagtacagtatcattttgttgaaacttcaatgtacacgcacgtaattgagatcagaatttggtagtttttattaaattgtatccttcatactgaagcttgcatgaaaggggcgtccctttctcagccttgtacagatagcagttctttaccatttttcttgatatatcttattgggttatatatactttttttttttttgggggatgctgttctatgtgccccacccccccctaccaaaaaaaaaaaaaaggatcacatgcttgccttttcagttagaaagagcatgattaattggtttgttagagagattcaggaatttgctttggccagacaatatttattggtatcttactctttattgtaga

SEQ ID NO: 82941 - DNA, 556 bp, Citrus sinensis; identical to SEQ ID NO: 79363
  Intron number 3 from transcript orange1.1g028391m (locus o range1.1g027730m.g) derived from phytozome v7.0 (chr-ID sc affold00483; pos 104440 to 104995)

SEQ ID NO: 82942 - DNA, 870 bp, Citrus sinensis
  Intron number 1 from transcript orange1.1g037700m (locus o range1.1g037700m.g) derived from phytozome v7.0 (chr-ID sc affold00679; pos 60030 to 60899)
aaactaaggagcgtgctctccttatcctctcccaggtactttttttatgtataaaatacacacccttttctggtttctgtttggttcctgagaaaacgtgtgggtaaagaaaagttggaaacctggaacatgcattattgtgatcattcatatatgatttatactctcacattgtttttaggcatatcagattttctgttcctgctggtgtttttcttggtaatcaagaagacgagaccaaaaactgtttacattgttttgttggtgatttttttatcattattttctcataattttcctgctgggatgagtaattagccgttgtgtttcattatactcgtttacttaaattgcatgcaacatcacctctgagttcttgatcaagaactagaatatcaaaacaagaattttttgtaattgaaatatggaatcttgatttgatttgatttgattcattaatataaatatatatatgaatgtttcaaagggacatccctttcacttaattttctattgtagtgtctcaaaagcattgagctctgatgacaatttttttttttttttttgggatgttatgaagactcattcatcgtagaagactaacagaaaaaaaatggtttgatacaattcaattttacagcttatttcatgtagaccgcgtaatgcaaagattatcaaatatgttaagtgtatgccagagcaaatatgatggtagtattgaattaatgttcttgaacaggcacttctgtttaacttgttttctaaagtaggaaatttgttaggtttcttaaattgccattacatggtgattcagataataatgttgtctttccagaataaggaaattcgtaaagatttggcgcccttgtt

SEQ ID NO: 82943 - DNA, 255 bp, Citrus sinensis
  Intron number 1 from transcript orange1.1g002364m (locus o range1.1g002309m.g) derived from phytozome v7.0 (chr-ID sc affold00002; pos 4713911 to 4714165)
ttgtaataggttagattgggttgatgtccttgtttctaattccggaatgtagtgattaatcaattttgatgaattttctttccctgtccttcccagtgtgcttcatcaatcatttatttagtttgaatttgctcaattgcttaattttaggattgatatttttctacttttgcatctgtacattagatttgcttacttatatgtcatttatgttttctcatgaatttctttttctttttcttatctgtagagtca

SEQ ID NO: 82944 - DNA, 542 bp, Citrus sinensis
  Intron number 1 from transcript orange1.1g024383m (locus o range1.1g024383m.g) derived from phytozome v7.0 (chr-ID sc affold00022; pos 1149135 to 1149676 reverse strand)
caaagaagaaggaaagagctcacttggtaagtatacacaacaaaattgttttctacaagttcccgtaagccttagttttgttttgttttctattttaaaaaatatttgctattttttttagtaatgatggtgttaggtccgttttcttttctttttatatttcgccttcatgcgttggcttttctgtttcgtgttatgtgtttgcatgtaagttatcgactattgcgttattaatgatgataagttctgttttaagttgttttctattataattcctttgaaagttttgatttttgattcttttttcaataaccagtcttttcattgttgcattattcggttacttgtgcgaggttatagttgttaatgcaattttgggcctccggggtataatgctcatttatttttctttaacaccatgaaatttggtggagagaatttttttagtaaactagggcatagagttaccttatttacttacttgctccaacattattgtgattgaagtcagaaaccgtcaacccttctgcggaggaagtggg

SEQ ID NO: 82945 - DNA, 1056 bp, Citrus sinensis
  Intron number 1 from transcript orange1.1g030072m (locus o range1.1g030072m.g) derived from phytozome v7.0 (chr-ID sc affold04279; pos 2965 to 4020)
aacagttcacttgatagcgctctgcaaaagtccatgtaagtgattatctgattttttcttttcttttcttttgattcctacatttgttaaacaaattttttatttgatttattgtttcttttgaactatttgatttttgcagtaattgtgcttattatttcttattcttaaataatttatttcaatttcttattgtgaaatttgatttgcttattggcattaagccattaacaagtagagaagaaccaaatgcacttgaaattctatctctttggtgctgaatttttgaaattagaattgaatatgagcggaaaatttttttaaaacacttattttagttggttgctcctgacaaatgaaaataacagctcaatttgggactctttctttttttttttttattagatatttggtagcaacaatatattaggcttttggttattatcttgcatttaccatttcatgtcatgattgatccactacgtgattgtggatgtaagagactggtacatacattccatgatttctcaagtgtctctctctggataatctatttatgcctttatgtaaattagtggagctatgcaggccttgtctgcctttaaagttctgagaggtttgaattgctgtgacttctttttaatttttagaaaatttccctcctctgggtttttgaacaaaatagaattaaaattttcaccctcttttttcttgcttttgtgtggttctttgcttttgtagcgctggaagtccatttgtaaatcttcttcctctttcttggcccttcaccgcctttttattgcttcttcttgttttctgagaggaagataaacatttttttcccaagtacccagaaatcctgcgactgtactgtgttcactgagttctaaactggagaatactgccagaccctactaaaagattgaatccaggggacctttaccactcaacctttggtttttgtgctgatatttactataacttttatgtttttcttcttatctaaggtctgattctggaatttcaggttattgcaaccctgaagtctcttttacc

SEQ ID NO: 82946 - DNA, 910 bp, Citrus sinensis
  Intron number 3 from transcript orange1.1g030072m (locus o range1.1g030072m.g) derived from phytozome v7.0 (chr-ID sc affold04279; pos 4884 to 5793)
gtcgatcatttatagagcttattacaagattctgggtatgtgaaatcattcttgatttgatttatgccaaatggtttattgattttgaaattgaaggtttccttaattttcttttctttcttcttctttttctttttggtgttacttgtatggttgaattgttttacaaaatattgagctgtggtttgtatgtcatctgaacatgccgggtataaatccatcctggtctattaaggcatgttatggtttggattgcatgacttggttatcaaaagattgaaaatcatagaatctgaatcttttttttttttttcttgttttcattcttgaaactgaaatcgagtaccatgtcggtcgacaactcttttttttgggttggggggggggggggggttaaggattcgacaactcacaacgcgctttgttgtaataatatttttttatgaagttatgagaacatttttggttgagcacgtcattcatgaatttgaatcataaatgtagttggcttgatagaagtttgccaagtgtattagttcatccctagtagaagtggtgtggtgactgtgtcactaatgcctatgaattgtatgaggggctgatagctgtggaggggacagcaagttagagagttgatggaaaaacggttgtgatgaattaagtagaggagtatgatgattaatttttttatttgaaaaatatcttctttgtggttgtattcatgaaaatgtttctcaagggttttgtgttgtttatctggtgcatattatttgacattgtattcttgttaatccttcgctttcttttactgatatttctacttttctatttacgtttgtggaatatagtaaaataatttcccctacttattagtttttcttcttctgattgaaagcagcaaagttgcatc

SEQ ID NO: 82947 - DNA, 558 bp, Citrus sinensis
  Intron number 2 from transcript orange1.1g034286m (locus o range1.1g032548m.g) derived from phytozome v7.0 (chr-ID sc affold00010; pos 2073013 to 2073570 reverse strand)
ctgacggtgagacgtgggaagaatgtaagcatttctctgctttgttctatatttcagcctactttgcccgtttagatgaagaattgtgttttttcttggtggaactgagattatgtttttgattgtatgtttggatccaatgagcatcgaaatcgtctcaaagttccgaaagaagcaattctcttatggctttatttgaattaaggatctagaagtttcagttatatgaagcctgtttctttgaagaatatgaattattaggatgtagtggtgattatatgctgctgctatatgaggcattttacttgaattgatgacctagttaattgctgtaatgccctgatcttatagtccgaggacaacttttttagagcccattcttgattgagggctgggtaatttgcatgattttagagatctgctcatgcactgaatcttggcatgaagggaaatattttattttaggagttctctttatagtcctaatatattattttataattcagtgtaagcttcatttgatataattacttatatttctaggcttggcagagtgca

SEQ ID NO: 82948 - DNA, 356 bp, Citrus sinensis
  Intron number 1 from transcript orange1.1g031307m (locus o range1.1g031307m.g) derived from phytozome v7.0 (chr-ID sc affold00023; pos 674476 to 674831)
ggccatctccaacgacttcgtcagtgagttaaacggtgcgtttttgtttgatgttttcccataattgaatataacgaaaaacactttgctttatccaaggttgaagttttgggtatgctctgatttcataaagcaaaattgaaaataaaccaaaaaaaaaaacgtttttgcctatctgggcatctctactcctgcaaacctagttgaaaaagttatttttatcattgaattgagctttcttcttgcaaaattggttaaaaaatgaacaacttttttcattcccttttaagtgagtcatgtacgagaaatagttaatgagagatgctgaagtttatattttgattatgttgcagtag

SEQ ID NO: 82949 - DNA, 948 bp, Citrus sinensis; identical to SEQ ID NO: 81562
  Intron number 1 from transcript orange1.1g029831m (locus o range1.1g027743m.g) derived from phytozome v7.0 (chr-ID sc affold00009; pos 1713504 to 1714451 reverse strand)

SEQ ID NO: 82950 - DNA, 803 bp, Citrus sinensis
  Intron number 1 from transcript orange1.1g034929m (locus o range1.1g034929m.g) derived from phytozome v7.0 (chr-ID sc affold07014; pos 22 to 824)
tttattgaagacacacaaaaacttgacggttcttggtacgtttccgccatgaaagaatgattacatcaacgtgtgtgcttcctcccctccccccttcttttttcaaatagtttgataataattcaattctataccctataatgaaattcaattctctaccatcaatgtgagtgaacaagcagtagcacattattatatagggtaaatgctcctttcagtcctacagtttgaatcaattaccctgtaatgagttattatatttttaaaaattataaaaaatgtcaattgtaatttgttttattgtatggaaaaagtcttgagcactcttgaagcattgtttctttttcattcacttcttattacgtgtatatttcaaccaattatgataatatgtatatacatgtgttagcgatcaagtagtgaataaataaggagaaatgcttttggatcaccaaaaaccttctttgtcatatgttgcaatttgcatgcctgctttgtatgaatattaagttatattagatagtagaaacattattttattcttgaaaaactagatccaatatatatagaagtattgtcaagggtattttagatatttgttaaaatataaagattaactaaataattgactatagagactaaatgagcagttttaccccattatttttagttctttctaactttcaatggtcaacaaaacccataaaataatgaaaaacatttaaatagtcattcaattgctacgaagattttagcggagcctagaaaattaaatataaagaactaattatgcttttacaggt

SEQ ID NO: 82951 - DNA, 887 bp, Citrus sinensis
  Intron number 1 from transcript orange1.1g035397m (locus o range1.1g035397m.g) derived from phytozome v7.0 (chr-ID sc affold00121; pos 295676 to 296562)
ttgccattgctttcaggtaatacttccgtatctttcttttcaaatatataaagattattttgtggtatgtattcgattcccagtttatatttattttctaaattgttaagacatgttaagattttagatttgtcatgaaaaatcgtttcctcctaggtggtgttttccaccgaatctcttacgtgtataattcaaccaatcatgaaaaattcacagaaaaatattaggaaaaggctgcacttttgggtattgtagacaagaagaatagaatgatctgccattggtagatatttcttagaaaattgggaaactagaacaagtttcaaagagatgccgaaaaagactgaatttttatttgaaggaaaaggatggccggtatttattttgtctatggttgtcattacataaactacctgttgttgactatctgattgctgtccttgtagaatttattaattaattccttgtaatgatcaagaattaaacagattattcaggacttggacacgataatcagccaatgattctgaagataactttagtataaagttttaaaaaatgaatggcaaacaaatctagagctggggtccagcaacggcatgcagagagcttcagttattgacgaattgccggcagattatgatttaataattggaattagtaatttgtacaaaattttgtgagactggtcttgttaatattctgaagaaaaattttgcatttgtagcttgcagtggagctgaaaatcttgctttgattgaacacgcatttattagctacttctaatcgtgtaaagcccgaatgtttgcttattcagtaactaattttgtttctattttgtgaactgggcaggcaacgggaagatcgtacaagctttggaagttcat

SEQ ID NO: 82952 - DNA, 353 bp, Citrus sinensis
  Intron number 2 from transcript orange1.1g025489m (locus o range1.1g017378m.g) derived from phytozome v7.0 (chr-ID sc affold00237; pos 238348 to 238700 reverse strand)
ttttcttcgaccaattcaattgagtggaaacggaggtatgcctcctgcttttttcttctcctagagctgaatttgatattgttttgagggtatgtttgtaattacatatattgcgcttcttctacttaactttgaaagtacaatgtttataatgtttggtggtttatagtaagcagtagccacttttacttggcaactaatgttctatttcacagcagttgtagattaagagccacggcttatcaatccgaacatatcctgaattattgaaacaagatagaaaatgtgttgttgattaatgattagcttaaattggagggtatagatcaagactcactgtggtgtagcataat

SEQ ID NO: 82953 - DNA, 752 bp, Citrus sinensis
  Intron number 2 from transcript orange1.1g031073m (locus o range1.1g031073m.g) derived from phytozome v7.0 (chr-ID sc affold00002; pos 3504912 to 3505663 reverse strand)
ctggtgtcaggtattttcttttaaaattatattggttcttttattttcaatttgctttctcaaatctcaattattattttgacttttgagcttcattctgggatgatttttgtataacttgatgttttaggaacagtataaattggattgatttgtactcttttttttaaaaaaaaagaaaaggaaaaaacacatgctgtgctgataaacatttgctggcttatccaaatcttgtgctttgttcatgtagatagtgcttttctgtttgttgtgcttactcttcccacatttgatctcaaatttccgtgtggtatgtgatgtgggatttatcaggatttatcaagtgaactcttgttcacgattaagataatctatcactgcactattcacgtgatgaatgccatgttatttggtaggcgaaaattttgggatcaatttaggactagtggcgttattcttgttaggacttgtcactagtcaccattggcttgccatcatgtgctatcagatccattcgtctttgaagatacttcatgctatataatttgatccccttcaacataaaaatcattattagcacctttctttgaggactttgaacttgatgcggtcagcttcgttgcattttaattgtttgtttgtttaagtctctttttatgacacttgcatttcctcttacaaacatggctagtaaatgttgtagattttgcaaagttcttccttttgaattgaaattgtaatgtgcagagcca

SEQ ID NO: 82954 - DNA, 452 bp, Citrus sinensis
  Intron number 1 from transcript orange1.1g047517m (locus o range1.1g047517m.g) derived from phytozome v7.0 (chr-ID sc affold00164; pos 195786 to 196237 reverse strand)
ggtataagagaacatgtaacacattataagtttgtaacgtcattgggaaatttaattgatattatgaaatgcaattgattgaagattgataagatatatttgatatttcagtggtatttttcatgtagttaatgttatttattaaatgatagatcacatgatgatgatagtgaagaatgatcataatggaaaataagaatgattaaaataaatgagcgtagatatactcaaactaaaggtttaggagtgataaattctggaattgatgcgatgtataatttttattttcccgacaactgcagtatagaagttaaaggaaaaggatgaaaacacatgtataactaaagaggttagtggatggacttgaaattttttaataacaaacaatattgaagaataatgagaccttagcttatcttattactacattgcaggttaggaaggaaattgga

SEQ ID NO: 82955 - DNA, 689 bp, Citrus sinensis
  Intron number 1 from transcript orange1.1g038921m (locus o range1.1g038921m.g) derived from phytozome v7.0 (chr-ID sc affold00003; pos 1606260 to 1606948 reverse strand)
cgagactccttgaggcttatatagattgccagaaggtaaaataaataatttcctttttcttaaaacaaagagtactctttttattttgttacatagtctggtgcaaaactggctggtaattgcttaatggattaaagtcatttattttatgtgtcagtgagtactgcaggaggtagctggctagctagaagaggaaaattgaagtactcttttcttttgctttgtgcttttaattcccaacctaatgaatgaatgaataagcgtttaatttttttctgatggttaaacagaaacttttctgttcacacaacagtttcagtttgctcggactttgagctttttacctgcgtgctttgtggaggattttttcttctttttcttttcttttctctctctctttttttctgttcttttattttttttttctggtttccatgtctttgatctccaggatccaagatttttctttttttctttgcttttgccttgtgtaaaatgtccaacattcttttttctcttttctttcttccggaaaaaagattttggtggtgaagcaagttaattttgagttaaattttgctgtgaaatgaagctccattttgcttattacttggatgcttaattttttttttctttccatttttgggtttttaggtaggagctcctccggaaatagcttatctgttaga

SEQ ID NO: 82956 - DNA, 205 bp, Citrus sinensis
  Intron number 1 from transcript orange1.1g027502m (locus o range1.1g027502m.g) derived from phytozome v7.0 (chr-ID sc affold00091; pos 488488 to 488692)
cccgtttcgccgttcaagaacacaacaagaaagaggtcctttctgttttttccattttctcttcattttgttttactgattcttcttgagtagtcaatcaaatcaattatttacatgatgatttatgtggtggtttattttattttattttattttgaaacttatttgttttcccataatttgcataaattttggattacacaga

SEQ ID NO: 82957 - DNA, 944 bp, Citrus sinensis
  Intron number 2 from transcript orange1.1g027502m (locus o range1.1g027502m.g) derived from phytozome v7.0 (chr-ID sc affold00091; pos 488877 to 489820)
tttctccgccctctccgaccttaaccttaaacgaggtaatgggctaatttgattacgttattataaatgtgatagacacacatgtgtatccaatgaccgtgtgacgaggacatgatcattaccagcacgagtgtcactagcaccgaacacaggatatctcttttgaggtttagttttgcattctaatgattatgtattgaactgcttaggttgtaatattatagatgtagagaattactgaaccactttaaaaacaaatacttttgagtttccagatcaagtcggtgatgaatgaatgtatgtaattggccattgtttttagatagcgatcgtggttgtgtttcttggttagctataaattggttatggtagactgatcacacaacactgcttgttctttactcttgttcattctttgataggttgtagatgtgaatggtttcggtatcatgggatttaagcatggttgactttgttacttgaaggccgttgacggttgattgtatgaaatttcgctggtagctagccacttggttgtataatatgttttgaaattgcatacaaattttcctgttgcaaacatttcaaaaatgaacaaagagggtaggtgttttctttgctgaagagctttttcaactgtgtttgaagcttcatgttttttcttcagcaccaaaggcatctctgttttctgtttaaaatgtaatcttgatgcatcatccctgagaaaaaaccaatttctgataagaaatgttgttgcaacttttgcatagcgtttactcttttgtccttgatatccagtttcctttttctctctcatatgttattgtttaatatatttgttgagcattgaatgattctgaaatgggataagttaaaaagaaacgaagaaaagggaagggaagccgattggttaattgtagtgcatcttctcaattcaggctgcc

SEQ ID NO: 82958 - DNA, 674 bp, Citrus sinensis
  Intron number 1 from transcript orange1.1g042099m (locus o range1.1g042099m.g) derived from phytozome v7.0 (chr-ID sc affold00996; pos 29327 to 30000)
ggttgtctgctcatagaaaatctgctcgtactaactaatcagtagtttcctactaaacaaatttaatgatgatgcagggatctgagatctgaccaacatatccgaatttcgacatcaacaatttccaaacaagttattttctcacttggtattagagccaagataatggcatttgttaatctagcttcttcaaatcaaatccaaaatactctcgcagcctcaactaatatttcatttactttcaattcgccagtgaaatttgatcaagctaactatgtcatatgacgatctcaagtgagtttcactgccgaccagttaggagaggtggctgagaatacgttaatacaatctactaagctgagaatatgtcaaacctcaagggaggtttctgataattaccctaattgaattcgctctgctggcttggccaggctatcagagtagactgagtagtggagaccaggttggcataaatatcagcaagaaagtcatatttttttgactaggtaatgaatttactgtacaataaagagaagaaaaagcctaaatcaatctccaacaccaagtaaaataggatttgtcgataaactctcaagaatctctgcagttgatctgttacaaaatcttaaaaatttcctttatggcttcaccttttgcaatacttggaggcaaca

SEQ ID NO: 82959 - DNA, 1049 bp, Citrus sinensis
  Intron number 1 from transcript orange1.1g046083m (locus o range1.1g046083m.g) derived from phytozome v7.0 (chr-ID sc affold00007; pos 2034980 to 2036028 reverse strand)
tgctgggactggtcttgtttttgtgccggcaagaggtcagtgttaattttttaagacgttttgacattttgagctagcttagtttagttctttgatcaccagcaatctgactaattaagatgatataatgcatcgaccaagaagcaaaaagggtttagatgacttagattggacggtccaataattagatgacttgaaaattttcatcaatccaattaggagtggcatattcctctagctaatatgaacaaaattgatgggaataaaaatgtaaacagaacgattttcacaagtaaaattatatgattatactgaagttgggagataaaacaaataaggtacgataacagattcaagaatacttgtcacttttgtagcattaatttgttacttgatacttgttcaagcatatcgtctttaaaattcttattcccttacaaaccataacacgctcttatttgtaatttacgcttgcacatgaaaatgatctctttcaaattgacgccccgtcttcatgtgtccttggcaaaggacgttgttgtttcttgtttgacacctctgttgtcacacgtgggttccacttccacatacctttatcacagcctttaattccgctaaaaaacattacgtaatgtttttcagaattgttaggggtgtaattagtattagtccaaaaaatgaaattcggcctcaaatatttgtggattcaattatgggccttccttccttggtccattcggaaatttgggagtcaggacctggactgggattgagtcagtatcgccagtcgccatgagaacctcgacgaagcttcggaaattattaaatttaagaatgtttgcttcagccgttgactcaacgtcaactccactaatctttgtattgtatgacttagttaacctcatgaacacgtctatcactctccgacatttattgcttcaagaccctccccggtccccaaaagtttaacatctaaatggatattcttcgagtgcaaatttgaaagaatgagagtttttgaactgaaactggcgctgcttttggtgctt

SEQ ID NO: 82960 - DNA, 762 bp, Citrus sinensis
  Intron number 1 from transcript orange1.1g043792m (locus o range1.1g043792m.g) derived from phytozome v7.0 (chr-ID sc affold00312; pos 43135 to 43896)
aggctacaccgtccacgctgccctccacaaccacggtattaatttattacttcatttctttcttcctctctcttcttcttcttcttttcttcattattttcatttcttcaattcaatttttgattttttttttttggtaattatagcaatacattttcccaaaaaaaatataaacaacaaaaaatgtttttagagctgtttcattttgttggtgcacgcacgtgtccagctaattcattcaattctgccagctaactcaaaagtaattaaacaaaaaaggtcatttttctggaataaaaattcttattgagttagacaaaataaataagaaaatacaaattttaaaataattctaaccggtgaacaaaaactcaactagcttaaaataatccttatcatcgattatattttgactaatactccgtgggaatggaatccaaaacgatatcgccttctacttttatgatgtgtctgtctgtgcatcacgcattgcatcacaagtccacaactttgcaaaaggttaactgaacgtggttttgaggttgacgcacgcacgcacgtacattgccttggttttcttcttttcattattttatttctttaagtaattcaatttccaatcattaactaatattttattttattttttatcttatcttgtttttatatttattttattttatcttgttttgatatttttcaaccaaaaaaaaaaaaaaaaaaacaggaaaattgcagtgtatcgaagaagagttaattaat

SEQ ID NO: 82961 - DNA, 400 bp, Citrus sinensis
  Intron number 3 from transcript orange1.1g013766m (locus o range1.1g013766m.g) derived from phytozome v7.0 (chr-ID sc affold00002; pos 4541367 to 4541766 reverse strand)
tatccttgtgcagtgaacaaaagaactttgtccgagtaatttcttagaacccccagtgttttattttctgtttggttgatagtataagagagtacgaagaacaggaatttctattattttcagttaagttcactcaataaattcaaataagacaagaaattgtatttggtgctcaatgagtgcgggtttctctgttctatttgcccttatctcttcgcagaataaaagattttgggaattatgtttatcttcaatttcccttgttagatgactatttaagttaatctcaactaagcagaaggagctttatgttgattttttaagttatttttttggttagccacttttgattttcttcttcttcttcttcttctcattcttattattttatgtagaagca

SEQ ID NO: 82962 - DNA, 720 bp, Citrus sinensis
  Intron number 1 from transcript orange1.1g020120m (locus o range1.1g020120m.g) derived from phytozome v7.0 (chr-ID sc affold00026; pos 1032114 to 1032833)
ttgtcaaaactcaattgcagtgtcaggtatatttttattgattcttccttgctgtgctatatgttttgttttgttaatcttattgttggatatactgaaatttatcaagcattttccttcagattaggaaatagcttgtgccttgtaggccataaacagactatggattgaagttcaaactttacatgaacaaagcaaagacgtttaattttttttttctttttctgatatatagtaaagaatccaactttaagtctagttgttcactggagaaaaggagagtatagttgttacttaacatagccatttacgcaaaagcaagatttgtctagttggtggctcctatcatgcatgatagttgttgatcacgcactataatctttttggctttgactattcagagagaggagttaaaaacattttttttggccttgaacataggattaatctgcttaaattttgggaggtagttattcatgatttgtggaaaattttaatccatcacttagtgtctttttttcttttttcctcaaaagaaaaaatatattcatttagctgcaattgctgccaggcatggggttcgtggtcttggatctctttttaattaacgtcttttagatcttttacagtgtgtttgggatgcttactcagttaactacatttaccatgttacattgctgtgcagggtgtttgcggctgtgacagattccagagcagttc

SEQ ID NO: 82963 - DNA, 423 bp, Citrus sinensis
  Intron number 1 from transcript orange1.1g007559m (locus o range1.1g006853m.g) derived from phytozome v7.0 (chr-ID sc affold00366; pos 138910 to 139332 reverse strand)
aaacgcgctcggttaattttttttttctttttggaacttcttttacttcctttggcttgatttatattatattgtaatatgttttgctctttgtagcaaattttgatcttgttatgattcttttctattaccactattgttgttattcatgctgttaatgagaaaatatgatgttgttttttgttgttatgttgatgtgttgatgattttgcattggctgcaattaacatgatagaagatacagattttgacttatattgttcatagagttttaaggagttatgacttagttttgttgttgtgtttaattgttgcgtagtgttgatgggatttttttttctttttttgggtttatttattggaagcagaatttttatatatgtggaaggtacaagaaaacaaacctgtggagggtgttaaaga

SEQ ID NO: 82964 - DNA, 879 bp, Citrus sinensis
  Intron number 1 from transcript orange1.1g001480m (locus o range1.1g001476m.g) derived from phytozome v7.0 (chr-ID sc affold00117; pos 74402 to 75280)
ttttttttttcaggtaaattttcccttttggggttcatttatatggaagtaggagtaatatttcttaaatctttggccgagctttttttggctgcttttggggtcttggcgctgaatgtgatcaaactcatttatggctcgtcctttcatataatttatatcaaaattcagttggtaatcaaacattgtgcaaagactttctgtttctttgagttctctgtgaagcattagcgatcattacaatgtcaactttgttttgcatgataattttattggactatttgcattcatgtttataatcaccgtttcagtttacttgatgcaaatgcaattcctgaattttctatatggctcgtcttttataataaactaacaattcagtgatgctgtgggtatgagggaaatggccttatttaaagttagaaattatttgatttatatggaaaattctgtctgttcatgctttttgacattttaagatcattgaagtccctaatcttgcttcagtcaagcatatttcttgagattgatattttactgtgaaagtaattactaggtggaaatctcacaatcttgaactttagtgaggaatctttttcttttagttgcatggtgggcacttgattcaaaggacattttcttttttcattgaaggagaaacaagccccattttgttctctttagacactggttatgttattttattttttcactttcttattaggagtatactctccattttcctttcgatcttaagtgtgtgttcccttgtttgtggtatatttgacaaatgtttaatttcttttctggagatactttactgacagagatactttcactgcagcgtgttcttcgctagtttactggagaattttctgt

SEQ ID NO: 82965 - DNA, 544 bp, Citrus sinensis; identical to SEQ ID NO: 79072
  Intron number 2 from transcript orange1.1g032366m (locus o range1.1g031871m.g) derived from phytozome v7.0 (chr-ID sc affold00322; pos 108620 to 109163 reverse strand)

SEQ ID NO: 82966 - DNA, 784 bp, Citrus sinensis
  Intron number 3 from transcript orange1.1g034311m (locus o range1.1g034294m.g) derived from phytozome v7.0 (chr-ID sc affold00482; pos 73878 to 74661)
agttctttaccagaggcaaaggcaagaaggaagaggtacctgtgcttcatttgcaactgtgaccattttcattattttgcttgcataatatgacctaaggcattgaatgatgttgagttattttgttagttacttagtacgaaaatgaatcatctgagacatggatattttgatgaatactgtttcattatcacaaagtaaaagtatgttatttatagtgattaaattccaaatgggagctggaatgcttgacctctgattcattccatcaaaatgatgatatgaaatggctagtggaaggagaatgttataaccttagttgaagtccattttatatccttcctaagattatggagttaaataaaccagatcactaatttagtgtgtttcaaggcctctagaggaaacaatggactgcgtggccttttcaatttgtttcagaagttggtcctgcatgctattgtaaaacctatagttctgttcttacactcaatgcagtgcttctcttctttattttggtttgccattggaaattagacaatccaaatgcattatttatctagttaagagataagcttggatggacttaagttcgtaaaaataaggggaaattatcaaaattgacctacctgactggtttgttcctatttagcacggatttgttgcctttctgattaaatgctaatatttgtattggtcagccacataagggttacaagttttcctgattctttcttgtttattgacagaaaccggtagaagcggcacattgaggtgtggagct

SEQ ID NO: 82967 - DNA, 506 bp, Citrus sinensis
  Intron number 1 from transcript orange1.1g013720m (locus o range1.1g013720m.g) derived from phytozome v7.0 (chr-ID sc affold00003; pos 2608219 to 2608724)
tcttcttgttcggcttcctcatctggtagatcattgtgaggtttctaatttttagtctatttttactgccaaaagtttattgttttgttgattaaacagttcagacccttgaaactataagattaaaatcaaaagtattgctgagaaatcaaccttgattgttaacatgtgatttgaaagcatcttgatgttgaaaggacatgctttggtcaatatgtttgctgtcactagggccgcagatagattaactagaaactagttttaaatcctttggctcaaacattttttattcattcattttccttaatttgatataaaaaatgttaagtacctaatgaattcagcagaaaagaaaaagctcatttccatttgaagcccttgtaatttccaagtttataattcttcaatttttcttaagctaccaaatagattggtaaatttcttggacggtcctttcacacatatattctgcatattctgtttggtcagggaacaggccattgagg

SEQ ID NO: 82968 - DNA, 870 bp, Citrus sinensis
  Intron number 1 from transcript orange1.1g006614m (locus o range1.1g006614m.g) derived from phytozome v7.0 (chr-ID sc affold01235; pos 15540 to 16409)
gatcgtcgcatcctcggcgccgctgcaaagcgaaggtaagcttgaaagctctgccttttatttggcttttcatattttgccagcttccgattattttttttctttttaatagtgattaattagtgtaattccatgttgtgttagaatgactagtctgcgagtacagttgctgctttctcgtttcttcttcatgttacacttgcagctttgcaattgacattttgtgttggatatgtgaacaatggatgatataaattgagatgctctgcctgtttgctatattttgctttgctgatattttttaattaaaaatggcatattttggaattcaggttgtaaactaaaccgaaccgaatcaaaccaaactgatttttgaaaacctaatgaagccaaactgaatttgtccaaaaactttcaaaccaaagtaaaccaaatttgtaaactgaatggagccaaactgagtttaattcagaagtaattaaaaaaaatgtgttaggttcaggaaaatctttacaggccatatataaagggctcatatagagctcagaacaataagtccccttagctatttagcactctgttgtacatgcacgatttaaccaccatgtacgaattaccataaagataaagacagtcgtgtcgtaattagtctacagaataaaatggcatgtcccacaaggcttcaaaattcagttctctgcgtatttgagaaaacttttggtgctttagatcatttgttattattgaaaaaccttgatggagtgaatccatattttaaattgtttttctttttgcaattaatagagtgacatatttatcattattgactctaaagctagtgcagggagcatctttttcctacttggtgct

SEQ ID NO: 82969 - DNA, 678 bp, Citrus sinensis
  Intron number 2 from transcript orange1.1g006614m (locus o range1.1g006614m.g) derived from phytozome v7.0 (chr-ID sc affold01235; pos 16487 to 17164)
tttgtcttgtctttgtcagaggattaaacaaacaggtaattgttattatttcaactgcccttcctttaaatttctatataaattcttcatttttttataattgttatgctttgcgtaatgttgaaagcattagaagctaaaacagtttggtggccaccttacctttatttggtagctaatactatcaactaactatttatttttatttgacggctaatatttgcattccatactagctatgaataaaggcatcaatacctcaattctaaaatatagcaatagttgtttcttttttcatattaggtatgaattttcctaggaaatgaatttgaaagaaagtgaatagcaaaaacaaagctcaaaaaatgtaaagaaaatagctactttgtttttggaccttttttaaagaccggattaacatatggctaaacgcttaaggatctgaggaaggtgttactctgtaaacctttcatgatatggttgtttcacaaaagattatttttataagaaattctctctcccgattaaaattttagtaatttttctttttaaacctttatatgttacatttttgtatagtcagtatgattagacagaaatgagaaaagaaagaatccaatagaaacagttatttgcttgttcttttaattacttctgtttgatttaaccttgcagaaa

SEQ ID NO: 82970 - DNA, 735 bp, Citrus sinensis
  Intron number 1 from transcript orange1.1g008626m (locus o range1.1g008254m.g) derived from phytozome v7.0 (chr-ID sc affold00484; pos 58158 to 58892)
taccgtgagttttaacatctcctatgcttttttttcatagattctttttactgggtttgttctattttctgcacttgctgtgttggttctgtttttgtcatgtgcatgcatgtattataaggcattttacagctctcccccccccccccccctccttttccacttctttttctgatttattttcagttttgaaattttcttgtttgttttcctattttgagatctcccactcaaaacaagatatttttgagatttttctttatatttcttgattaattgatgtctttgagcaaaatatttggagtatttgatgaatgatctgacagttactacaggcatagcctcatcttacttgtcatgcatttgaatctaaagcaagtgtttggtatgtaatggaatcttaagcatcatttgatcttcacagatcagtcaaagtatcatgctttcatgggctattattagttataaagtttccattaataatgggctgttccctttatgctgatcttgctttactaattatatttactctctttaaatttgtttattttggctcctctcaacaaaattcttatagttcagtaccttttttatctgtcttatcattatccttgctttaatttggcttaacagcccatttttaatttgatttaacagcccatttttaatttgatgtagttactctaattttttaatgtaatgcttttttttttttgtcatgcagaattgatttgg

SEQ ID NO: 82971 - DNA, 540 bp, Citrus sinensis
  Intron number 1 from transcript orange1.1g022377m (locus o range1.1g015786m.g) derived from phytozome v7.0 (chr-ID sc affold00356; pos 65959 to 66498 reverse strand)
ggcatttaggattcagaaattccaatttctttttggtatgtgcatgtagtatgaaatatgttgcctgctttttatcttttatttttcttaaattcttctatgccgtttcttctggatatggtgtctgaactcaattgataccatcccatgttcttttctgtgaccatttttaagatgctagtttaatcgtataaatgtttgtcaactcaaaaatgcatattttttattctgttcccaccaactcgggaaattttatgccctcttcaggctgacagcttttatactttcaaaaataatcaggttgattctcaacttggatggttaccttcggttttgacaagtggtactgatgatcacttgttgcataaatctgtcgcaaacatgaattatgccacttcttctgctaatttatcggaagatcccctgaaagacaaagataatcaccgtgtttctgatatgttaattgattcctttggaaggatgcacacttacttaagaatatccttgacagagcgttgcaatctacggtgtcactattgt

SEQ ID NO: 82972 - DNA, 410 bp, Citrus sinensis
  Intron number 1 from transcript orange1.1g013815m (locus o range1.1g013815m.g) derived from phytozome v7.0 (chr-ID sc affold00005; pos 792905 to 793314)
accaacagcaagaaggcccttcacgttatttcttggtaatttttcaatagcatttagagttggttgttggtttctgaattgcatgtctgttttgattttaattcattctgctagaaatttgattactgcagtgcttatttcttgatcacatgagatcttgcttctataaatttgcatgctattgatggttgaagatcctgcttttggctttttttttcttcttctttttttgtgttgtttatatttcttggttgtttgtttgtttgagtgttgttaatcaatgcagttgcatgtgaaactttgagcataaataatgagttatgcttttattaaaaattggattcataacattaagtgactggagggaatttttggctgaatttggattttggcaacaaccgtgtgcaggg

SEQ ID NO: 82973 - DNA, 507 bp, Citrus sinensis
  Intron number 1 from transcript orange1.1g034538m (locus o range1.1g034538m.g) derived from phytozome v7.0 (chr-ID sc affold00007; pos 338617 to 339123 reverse strand)
tttcggcctcgcgatcaagcagttatcaattgcaggttattgctttttctttttatcggaatcttttatttgataagttcgtttcttttctgatcgatcatttcattttcattcttttggtaattggcgcagatcgaaaaattgtctaattgagttacaaaacttacttttttgattttatgctcgattttgtttttcctcggattagcatgtttactctgtttggttgctgagaatttttttgaaaaagtttgatctttctgtctttatttgacgaaagacaataatttcaacttaaattaggaagttaatttataaacccgaaattctaatcttgatttggtttacaactgtgaacgtgatcggctattgtgtttttctttttatttgggttaaacagagaactgtttgatttcataaatgagatagaagattacttttctcaatcttggtgtgtatatttgaaccttttgtgaatccgaaccttgatattgaaggacttgagct

SEQ ID NO: 82974 - DNA, 565 bp, Citrus sinensis; identical to SEQ ID NO: 81386
  Intron number 1 from transcript orange1.1g019852m (locus o range1.1g019846m.g) derived from phytozome v7.0 (chr-ID sc affold00040; pos 843138 to 843702)

SEQ ID NO: 82975 - DNA, 583 bp, Citrus sinensis
  Intron number 1 from transcript orange1.1g043016m (locus o range1.1g043016m.g) derived from phytozome v7.0 (chr-ID sc affold00026; pos 611906 to 612488)
tgctttgtgagtgcccatttatataatatttaccttctttttaagctatttgagttattgatgatttttatcttgtgaaatttagttgtttgtagtggaataagttagattgaggtcagggtttgtggggtttgttttggaatggatgtaatttgattcagaagaagcatatgtgtggatatcagatgaaaattatgtttggatttaggtgaaggcatggagttgttgtctgttaatacactagttgccaagtaaaactagatctttaccaagcacttcagtttttgtgctttctgatttgagtaggagcacaacaatttcacgtataccccaaatttgagtggttaagtacatcaaagaagtaggttttgaagttctttgaaaacagtgcaaactcctattaaattgtcttttttggcatatttttcagcttactgtatagtaatattttttagtctttttacatgttgcatattccttttaatcagggtagttgtaaaggttgattttagttttatattgcatgacatgagaatttgtacatgcaggtcagtgcgggtacaacgttgaaaaggtattgtca

SEQ ID NO: 82976 - DNA, 517 bp, Citrus sinensis
  Intron number 2 from transcript orange1.1g000746m (locus o range1.1g000746m.g) derived from phytozome v7.0 (chr-ID sc affold00010; pos 438202 to 438718 reverse strand)
gagagaccagctttgctccctttgaggtggctgttttcactgttttattttttctttctctcttctttgctttcttgaatttgacatttgcctttaatatttagaatgtttaacccaagataaaatgttctgaaggttgatatttttagcttcaagatacttgcgaaattagttagatattaaatattacgagcatattttctgtggttgtcattttgggtacataatcagctagaaagctgaatccattactcttgttttattttgctagatatgatatgtataatttggttttgatcttaaatgaaaatgtgtttgaatattcattgcattgcagactttggtattccaaagcatagcagaatatgcaaatgcctaagcactctaaaagctaatcaattcgttaacatgtatgagacttaatttccccgtttctttgttgactttctgatggttaactgataccattgtctttctaattgtacgacacgcaaaatgactgcatcttctcttgcag

SEQ ID NO: 82977 - DNA, 630 bp, Citrus sinensis
  Intron number 1 from transcript orange1.1g000746m (locus o range1.1g000746m.g) derived from phytozome v7.0 (chr-ID sc affold00010; pos 439026 to 439655 reverse strand)
aagcaatatcaagagaacagcgcttgaattttgaggtgtatagttgttttctctgttcatatatgttgttattgatatgtttctacttggttttattttgtctgactgctgagaaaatctaggaaatgaaaaatggttttgggttccggattttacattgtttggattatgataaggctaggatttaaaatggcagaggctcggttaattattttagatatgcatctgacattttctctctttcactctgttttctcggcaactaaatgcaaggtggtcgaatttcctttggttttcctgtacatgatcacttttcgttattaaagttccatcgacaaaggtttaaatttgaatgggtttgtgttgttttgtgttcgtgaagagttcttaccatgtgagtttaattagttgcgactggttgccagtgtttttgttgcttgaaaggtgaatttgatttgttctttttgccgttagttcattgagtggaaaatcaaaggcagttttttctactaatttactgagtaaacagacagaacttcgtcatgctttcatcgtttctcgtatgctgaaagatgttatgcatgtacaaagtgccttaatcaatttgtgaatcttttgaaggcgataaaa

SEQ ID NO: 82978 - DNA, 255 bp, Citrus sinensis
  Intron number 2 from transcript orange1.1g020382m (locus o range1.1g020382m.g) derived from phytozome v7.0 (chr-ID sc affold00150; pos 132946 to 133200)
agaagcgtgtaaagaaagaagaaatagaagataaggtttaactccaaccctatgttttgatttttttattcatttacaatacaataatctttttataaaagaaaaataataatttcaataagttttcaatttttaatttgtaactcaattttcacgaaactttctaatgtttgaatgtatgtttttatgtgggtatcaactatgttcttcgatttgctaggtagtttggattactggggctagccgcggaatcgg

SEQ ID NO: 82979 - DNA, 458 bp, Citrus sinensis
  Intron number 1 from transcript orange1.1g046281m (locus o range1.1g046281m.g) derived from phytozome v7.0 (chr-ID sc affold00009; pos 542659 to 543116)
gtatgtgtttcatcttttcaatcttttggtttcttgattaattgttgctgtagatacaaaatcgcatgcatgtggttaggtagtaatatggccagtagcatgatcaagaatttgtctgattctgtaagaacatttcaatcacagtgcatgttgccgatatcttctttgttttcaaatttgatttcatgcatttaacgccaggcaatttgatctgccaagttagatatgtattggttgttgcagcaaccccatatgtcgcagactttgtaacatgcgactcccaaatttctcaaagaaacaattaattaactatattgatgaaatgggttagctaggtttcattatatgtatatcttgacaaattaaatataattaattatttttttgttttatatatatgtgtgtgtgcgtgtgggtcgggatattatggggacatgcaggcaaattcctcatcgggg

SEQ ID NO: 82980 - DNA, 540 bp, Citrus sinensis
  Intron number 2 from transcript orange1.1g047021m (locus o range1.1g047021m.g) derived from phytozome v7.0 (chr-ID sc affold00026; pos 125513 to 126052 reverse strand)
agttggttagtgagcttgatatcttgttgcatccggttgcattgtgtgtgttattattggagttgttatttgtgcacgagcacattgcacttttccttgaatggtgaattttttttttattggagtaatgatgttttatggaaatgaattaatcaaaattgttttcattgaattttctgcttcaatctttcaatttgaagcataggaggaatgacttgggagaaatattttgttgtgtatgactggtttatgaagcttttctgtattgatacttcgtataatgtagtgtgagaaatgtaatggaacattctagaatgtgatggaagcattccggattattgttatagcatttttcttctctctgtttgaattcttcttgaagtcagataaactatccctttctcactgtcattgcgtttgacatgcattgcgtgaaatttttgaaataatcttgtagcctggttctgccaatttatttgtttgttttacatgtggtaaattgtaggagcaaaacactgtcccatctttgagaaaagctct

SEQ ID NO: 82981 - DNA, 752 bp, Citrus sinensis
  Intron number 2 from transcript orange1.1g024606m (locus o range1.1g018502m.g) derived from phytozome v7.0 (chr-ID sc affold00053; pos 275861 to 276612)
tcttctattccaggaggtacctatgttgatttatttctctattttacttgaagcatgcgtttcattttttaaactagccaattcgtttgtttgatttagaatttaatttcgtctggaacttagtgttttatgtatatgttgatttgttttcttaatggtagtggctggagattgattttatgtggattggtttttgttctcagcgctatgaattgttacttaaaattagcaattgtagggctatttgtacatgttgggttttatcatttggcttactattttctataggcgttgaagtgaaaagaaatttgtttaatctgtaaaaatttcttctcatgtattgatgccatctgttttcacaattacagggttttctgttaacttgctgtcatagcaatgtctagggtgcaattcttaataggacgggctttttgagcaatgatcaaaatgtgtatgtgagtgcattttctgcctaagtaagtttcagtcagatatctatgagtcgaccagcaagttttgtataattgattttcatgttatgtggaattgtcaaaaaggtgataatggcttggatcctataagcagtaatctgttaggtgctcaatgtagtttgtagctataagttacaacgcaatggaatgcaatccttatatatcacaaatgatctttatgtaaatgacagtgagtttatttttgatcccattaaatggccacgggaacaaatggatgaagacttctttaagctgtctaaa

SEQ ID NO: 82982 - DNA, 992 bp, Citrus sinensis
  Intron number 1 from transcript orange1.1g007742m (locus o range1.1g006380m.g) derived from phytozome v7.0 (chr-ID sc affold00094; pos 339096 to 340087)
agagagagcaggtaaattgctaaacattgtggttgtgcttttgaaattgagtagaaatttagccattatgaacatacatcattttattgttcttgtatttctaatgattatgatccctattgaattatgatggatatggtattgtagaataacccttttaacagattttctgtttgaacaagctaagtttttggctttgtgaaaaaacagtgaaacaaatttgatattcttgttatgtatgcttatgattgttattgtaacagccgctagtttggccttcttttaatatttttttatttttgtggattggactaaatgataacttaagtgaaatccagtggggaattgtactatgaaagtaatgggatgatttgtgatgagtattctatgctttaacttctatctctgggagtgccactggagtaactgactttaatttctagtggtacagtcacccaacttgctttgatataactttgcttgtatatcaagaaactttttgaaactgaagttattgataaagcttatagcagactagcgcttccttatggtcatttttgaaaggctcaatgtctctgctgcatgcttagaatttctggccaaatatctacgtctaatattttatggtctttgctgcttgcttagaacttctggcctaacattgacatttgatattttatgggatattatgattagctaatgtaacttttattttttgaggccttcaacctctgaattagaatggttgacatagctgtatgcttagctaggatcttcagaatgggtcagatgtttgatgcaatgatcttcaaatagagaaaatgcatatggtttttgctatgttgtatgtgccactctacctattgaactgttaagtactgaagtgaggactttcaatgtaatgatattcatattctacacatttcctattttaacctggaagccatttgtctgcaggagatataaagaaaagaaagaagtggtggaacctg

SEQ ID NO: 82983 - DNA, 593 bp, Citrus sinensis
  Intron number 1 from transcript orange1.1g013481m (locus o range1.1g013225m.g) derived from phytozome v7.0 (chr-ID sc affold00002; pos 909507 to 910099)
tgatttcagagactcttcttcttcttcatcagctggtgcaataataactcgtaattttttttttaaatcaaattaacatcatttatcttcttcattttttaattaaaaattcaccattaaattcattcttctgactacaaatttattaaagtataatcaacaaacaacaaattttctcaaaaaaatttaaaaattctggattgtctccatgcttgttattcttcgtcatctaattttcttgatgaactattcctcaaaatatctttttttaaaatatcttctttttttttcttggccctttcaaatacgactaaaaattaacatatgctatctaatattgcatgtatttcatttaagtcatcctcctcatattttcatttttctttttcgttaaaaactttgagttatttgtaatatttataggataattatgaatagtgaataattaattctttattacttctttttttttttaattattgttgcttggcttcaaagcaataataatttcatacaacttcatctaaagaattctactgatcatgttaaatgtaacagaagagccaacgagcagtattgcagcgccggcaacg

SEQ ID NO: 82984 - DNA, 551 bp, Citrus sinensis
  Intron number 1 from transcript orange1.1g026170m (locus o range1.1g026170m.g) derived from phytozome v7.0 (chr-ID sc affold10406; pos 81 to 631)
cagccatcagcaaaagtgaggagttcagaaggtattactggcctatcttcttgctgctataattttttttccccttttattattgattctaaacatggcaagaataaacagaaaagacataagaaaattgagtaggaataaacagaacagtaagtaatgttattttactataaaatgacatcaataactgatgagggtgattgactcgccagatatgctcatatgtgggataaaataatgcctgcataaaagatcagatgcaagtttaatactataatagtactttgaagcttgatattgcttcataactagtgactaatagaattataagcagctattgaaatctttgattaagcactgacagtatcttcatccatagctttagaacaacattagcttatggagtatatatcatcatatttctccaatgtttataaactattatagttatctcaggttttatgtttttattagtgctaaacttgtgtgttaccttctcgctattggtgaatgtagatacgttaatttggctagcgaccttcaaagggtga

SEQ ID NO: 82985 - DNA, 423 bp, Citrus sinensis
  Intron number 1 from transcript orange1.1g029878m (locus o range1.1g029878m.g) derived from phytozome v7.0 (chr-ID sc affold00071; pos 370422 to 370844)
acgattctgattgcgatattatactacgaaaagaggtttgaattgacagaatattttgtgggtttgtttttatttatgattttacatgtgggatcctttgtttcagttataattgttatagtctctgtttggtttcttagaaagtggagtaaaagataagaaaataaaattgattagtagtgctctggttcatgagaaaaagaaattatatttattttgggttttatgggtttaacagcatgggcctgggggagttcctacttctaaattctaatgtcgtagttttttttttttttttgttacttctaaattctctcaaaatattacttgcaaaagcacttgccttttgttttttgttcctttacttaatacttttatgatgtttgttgatacaatagaagcttggagtggttgtgaagccga

SEQ ID NO: 82986 - DNA, 822 bp, Citrus sinensis
  Intron number 1 from transcript orange1.1g013521m (locus o range1.1g013521m.g) derived from phytozome v7.0 (chr-ID sc affold00004; pos 1164605 to 1165426)
ggatttctttctcagcagccgctggccagtgccacgttaggaattgagactgtaaagttagctttgcttttccactatttgaagcaaaaaggcatatcctttaatgcatgcacttctgtacgtagggaactcaaaacaatgttaggttcaaggaataattcgtgttgcaatttttccactggaaaaatgtgcacatttggtgggagctagtgtggaatcaatcttcggcgcatagaatttatgtaacctggaaacgggaacttgtgtgttaatgagatggctgtcgtaagcggcttgttttctcatttgtttctttctgggaactaccgtagaaagttctgatggacgcccattatttaaacggccccaggttgcacaattccctagggacttgtgttgtgttccaacaacagtcgattgcaaatagcaatacttagactccatatatttcgaattattttacaataatgtcatcacgcagtgtaccacctgcacttctgttacaacccaaacaaacttggctcaggttctttttaagtagatacatatataatctttacttgaatgttatttgtctgtcagcgttactgtttctttcataccgtcttatttaaagtacttatctatatctgtttatgtttattgggttgcttacagttcaaagtccaacaatggaagcaaacttggtatgttaatggcaaatggcaacgcaccacttttcgatataacgtagggatggagtgatgaaacttcttttatagcttagactaaatgatctttgatgcaatgtgatcgcaggtcattgcacagaagtatcgcgga

SEQ ID NO: 82987 - DNA, 192 bp, Citrus sinensis
  Intron number 1 from transcript orange1.1g008830m (locus o range1.1g007393m.g) derived from phytozome v7.0 (chr-ID sc affold00426; pos 5773 to 5964 reverse strand)
tctgcaaacgggagccctgggatttgcctggtaattaactttttcttcatatattcttgattggtgatgacggtcaataattaactcactcactaacaatttgagtctgatttatttttgtagatttatcagttataaaaacaaaagatcgagaatggttctttttctgcccacaggatagaaagtacccaa

SEQ ID NO: 82988 - DNA, 225 bp, Citrus sinensis
  Intron number 1 from transcript orange1.1g017644m (locus o range1.1g017644m.g) derived from phytozome v7.0 (chr-ID sc affold00023; pos 1343913 to 1344137)
aagctccgatcccacttccagtgccgccactaattgtaagctgctcttctttattgatgctaaagtaaagttcctttattttttttttctttttatgttttcttatctgattttgatgtcactttatctgttctatagcataagatgaagataatttatttgtttcttaatgttaaaagtttcgggattttatctgatttttattatgcttttggatgttaaagc

SEQ ID NO: 82989 - DNA, 685 bp, Citrus sinensis
  Intron number 1 from transcript orange1.1g021488m (locus o range1.1g021488m.g) derived from phytozome v7.0 (chr-ID sc affold00024; pos 737407 to 738091 reverse strand)
ggaagtttagaggaattgctattatcaatttcagggtaagtttccatgcttgtactggattcaagttatatcttattgtattcttctgaacactttgcaattggattgctagaatttttattttgtgttatttaggtactaataatgttatttttctttcatctgtgttctgtcatctagttgttatttaaatagttcacgctaagctgtaaattcatatttaatagaacgtagaaggttgtgtttctgttaggtgtataaaaggagaagaaaatattggtttatctttccccttcccatttctaatgttttacagtagaaagcgagatgcattttcccccacctttctctttctgtctctatctctctcttttttaacctgtttaactgaataatcagtaggccaaagtctttttctttttgtattccgttgtatccttatccattgtacctaattaatcaatcattttaggtacagtcaggctaacattcatatcaggtcggatttcctgtttacctcagtgtcttgatgcccattacttgttcctaattttgaaaacttgttttaacctgtattgttaaaatttaatccttctggaatagagtttgtgccttgcttcatttgagtttttgttttattccttctacagacagaaggcgcagtgaaacgagccttggctctgga

SEQ ID NO: 82990 - DNA, 854 bp, Citrus sinensis
  Intron number 2 from transcript orange1.1g038773m (locus o range1.1g038773m.g) derived from phytozome v7.0 (chr-ID sc affold00539; pos 99915 to 100768 reverse strand)
aggttattttggctcaatttgatctttctcgtcaggtttgctttctattgatactgtgatggtgctgttgttagttttacttatgagttcattcaatctgtttataagtgttgaaaagtgcttcacttgcttgaccttttgcagtagatttaacggatttgaatgaaggaaagggttgtgctttctttaaatatgctgtagcttgtttggcttgttaagtaagagcaaacatcaatcatagtaaacttagtacgtttggcgagccctgattttaccggagtaaaactaatggtgatgtgtaaaatatgttttcaaacaaactttatttatgtcgttctgttcttgcccatactaagatgatgcttatgaagcccagctgaaagtgtatgatagcatgcaacaatttaagttacttcagatcaatatagacccttaaagagcgtgtacattgtaaactcccgcaataatgcatagtcatctcttacttcctcaattccttaaaatgccatattaataacctagagaatccctgcgtacatggcattgatggacgaagtgaaagttgaattctcgataattcactactgctctctgtcatcatcactaagtggcttaaagtatcaatttgctcatatttgggagcgaagaagtgtattatctaatgtgtgaatacaagggaggcagttttgtttttaagagtccatttgtttctgagtccatgaggcataggcaagttttacttctgtttatctattttaaatacttatatctaaatactcaaagtttcttacattgttgctaaattatttgttgctcctatatgtaggcagaatctaaaatacttagaggaccac

SEQ ID NO: 82991 - DNA, 708 bp, Citrus sinensis
  Intron number 1 from transcript orange1.1g005345m (locus o range1.1g005345m.g) derived from phytozome v7.0 (chr-ID sc affold00263; pos 50797 to 51504)
ggagcttcacttcacaattttcaatgtgagtcttgttttcttttctttggttctattgtattcgttgaatttgatttggttgactttttgttttaggtataaatattcagtgttcgatactcaaagcctttacacttttgtttttttcctcttcagattctgtttggttcaatagaatatggatattttgatgaattaaaatcttttgagatttttcttatttttcatcacaagttgttgggattcattgtcacgtctaaggtcgatgactctgcttctttcataatgatataataatattttttggctgattggccttatgcagcttacttttatttgtatatgtgatgcttgtgaatcattttacagctgcaaattaaatagcataaatgttccttttagaatcttgtgaaattattccatttttggctatttcttatccgattaagggctaaatcttgattgctgtgttgtcattttaatattatgtaatttcctgattgtgaggtaaacccagaattcttgaatggtctaatttattgaattgaaacagtacagtttttttatgccatgcggttttgtgtttaatgtttaatactgagttcatcatggaagctttgcaaaaatgtaatacaaaacgtcctctttcacatttttatgatgaataatttagggcttaaaccaagggcagagacaaaaggttactgc

SEQ ID NO: 82992 - DNA, 572 bp, Citrus sinensis
  Intron number 3 from transcript orange1.1g019569m (locus o range1.1g019569m.g) derived from phytozome v7.0 (chr-ID sc affold00050; pos 704556 to 705127 reverse strand)
gttacagatatccctgttcaagttcttctcactgggtaaactaattaatctctctctttttgcatttttctttattatattatataatccatgcaaaatgattttgatttaaatgtgaaacttcatttgctattatgtttgagtggtaatttgtttgtaaagctattacaaatttgcagaaacatgtcaaagttattattgatgtaattgaactgcccgtgttcacctaccgtttactgcagcctattagatgtttcaaaaaactttaataagttcctaagaccctcatagacaataagttttctaccaatattatgttttctgaaactgttaacttttgttccagcgctatttttatttataaaaaatgtccttatgacattggaggagataacgaactctggagctgttaatgggttatatttgttggcatttgttcatcatgtttttaacctgtgtacgtgaatttattctgatttgaagaaagtgactcgatgtttctggcagtggtttcaattttcttttgtaatttgtgttaattagggtgtgtttggagatatcagaaggatcgt

SEQ ID NO: 82993 - DNA, 559 bp, Citrus sinensis
  Intron number 2 from transcript orange1.1g045211m (locus o range1.1g045211m.g) derived from phytozome v7.0 (chr-ID sc affold00025; pos 881997 to 882555)
agtatgtatctttttcctaagattaaccttaatataggctgagtttatcttattggggcaagaaggatctcactgatgtttccctttgcttctaactttattaatgaagctcttttcgtaaggagatgaggaaagagtcagagaagaagctgcaagcctttttaccatgctcttgatttgacttgatcaggaagcttatttagtacagtacatgattttgaacaagaatggtcccttaaatttttatttttgtaaatggttttgttgccatttttttggctaaccttccatggtcaaataaacagatgtctgaagccataagtaatagatttttcagttcaccacgatcaatatggaacatctaccaaaactaattgcagctttgagccattgtgacattacgtccttagtgtccaagtgactgtcagctttctaacatctgaaagagtaatttgactgcttttgtgatatttcaatttttctaactattaatttatgatgctaactgtatgcagcactttaaagttaatccttaataatattcctcattcaataggtg

SEQ ID NO: 82994 - DNA, 986 bp, Citrus sinensis
  Intron number 1 from transcript orange1.1g026321m (locus o range1.1g026117m.g) derived from phytozome v7.0 (chr-ID sc affold00004; pos 583287 to 584272 reverse strand)
caccagcagccaagaaggtaacatttctttttttctttttttttttgggggggtgaaatctatcaattgttgggttggcttcttacgtttttgccaatatttagtggttaattaaatgggaattattatttgaataatgacaaaagaatggtcaaagatgagctcgccggctgttgctcagtcaagcagcagtgctatttagagatcaagaatcttttttcagttttctgttcctttgcacaactgatgagcatatttcagaatttaattatttttagttaatgaaaaaataaagactgaggaatcaggccgatggtgaatatttgcagataatttcgtaaactcttcataacaccagaagttttgtcctagttttggtagttgagatttggtctctttgttgcatcataactctctgttttcaacttaaaaattcataaatttcaaccgaagttggtgagggagcggcattaattattactcactacatcatctagattttccataggctttctgccaaaaagaaaaataataataaattaataataataacaagagtaataatggtcttttttttaaaaaaaaagaataatggtctttttgaaaattcatgtaataggtattatttcttgctaatcatatttctaattttataattaataataaacacagcatgagtgtttacgtgtttgtccttgtcattcatgtcaacacacgcatagaagatagaagatagaagatgtcttctctttttctttttttctctctctctctctctctctctctctctctctctctctctttctctctctttcttgaacagtaagcactaatcaaaatccatatcattattattaaaatttttacagttgctttcttattttgtgccttttttttctttacttttcgctggaatcagccataattcacactccaatattatttagcttttgcagactctttcatctcaataaagtttgaagaca

SEQ ID NO: 82995 - DNA, 512 bp, Citrus sinensis
  Intron number 2 from transcript orange1.1g013229m (locus o range1.1g013202m.g) derived from phytozome v7.0 (chr-ID sc affold00135; pos 223354 to 223865)
caggttgacggtcagtcagatatatatattttagggtatgccctctctctctctctctctctctctctctctctctcgttacttcctcaaaatgattttcttttcgctaaatgaagaagttctagtgttctacagaagttgaatttctggttcaaatggtttctatagctgaattctcatgttcatatttgtattctcaaccatagcatggaatatgaatcgtatgaagtgatcaacattattaatttgtgatcaaagcgttgtaattatagttgctaatccatgccttgggttttaacttgtttctaagcacatgttggttatacgcaaaaaaaattttgaaaatttgatttttgtcccaatcagggaaaatctgcttcaaaatcaccatcatatttttgcatattttcatttttatcatgttagttatgaaatttgaatatgcatacagatttcttctctattttgattgttgtttggatttttcagttttcaggaaattgtcccattga

SEQ ID NO: 82996 - DNA, 547 bp, Citrus sinensis
  Intron number 2 from transcript orange1.1g009419m (locus o range1.1g009407m.g) derived from phytozome v7.0 (chr-ID sc affold00451; pos 79235 to 79781 reverse strand)
acgcaaagctatattcaaagcagcacaatcctccggtaagctttgtttgtttctcgggaaaatgttttcccgaaaagtttgattttcccgagaaattaatgaaaattcatggtcgcgtggtatctttgcgtttcaagtaactaagtagactttgaatgatttctctctaaagcttcattgcgaggtgtggagatggttcagcttctgtttgcttcctgagaactgtgtttggaaatgaaaattttgaatgttaaatttcatttaactagatcaatcgacaactcattagtaatttttttttttttgaagaaaaatgattaaaaaaaatagacctgcactataatgtaagtttctttttcctttagttgcttcatataacagcagaacgaaattccagccaactttagtcttattattcaaacattgccttaccattgatgtttcttgcatttagtttagtacacgtatactcgtgttttacttttctcaatgcattgcttgtaatgtatcagagggttcccaatcttatcggtggtgcttttattga

SEQ ID NO: 82997 - DNA, 1010 bp, Citrus sinensis
  Intron number 1 from transcript orange1.1g039516m (locus o range1.1g039516m.g) derived from phytozome v7.0 (chr-ID sc affold00096; pos 21690 to 22699)
tatatccaacaagaacaaaccagagacagaggtgagttttaggagttctaattaatcatatgcttcaatatttgagaatatataaaaagcaagcattagccaaaaaagaaaaaaaaggactcctttaacttctctagtttttctctgtaattgaactcaactaagcttttaaagatcttgtgtttgattaatgaacaagtttaattcttaagtaaatcattgtggaaagcctgctctaagttattacgaagagaaaattgaccaaacttttcatttcccaataccaagagaaagatatttctaaatataaatgagtacaaatcccccaagggaatgtacagtatatagattcaagtcaacaaatacaccaaaatgtgtcagattttaatttttatgttacttggtcaaaaatttcagagttaatagagaagatttttatatatacttttcaatgcagaaaagaaggatggagtactaagaagttgaaagcagtaatagcagctccacttgtattcctgtttatttgcatgtgctatccaacatggagaatatacaaggccaagggtaagctttttttgtcatgtttatgattaaaatttcactttagcttcagataataggagtaactgaattggtgatttttcttgaggatcttaagaactcaaagttgacttggagttaaatcatatatatattaaccaaaatcaccatctgaactatgcttttcaggtatatatgtacatcaattagtgcaaaaaaggaatcaagggaagttattacgcgagcttggagataatgagtcccgtcgcagcacaaattgtaaagcaagaacccaaaaaaaaaaaattcagagcataagccaggaattgaagatatttgacttccaagccattgttgtggctacaagcaatttctctattataaacaagctcggtgagggtggttttggttttgtttataaggtaaaactttgtgactatttttagtgatactagttgggaaatttccga

SEQ ID NO: 82998 - DNA, 480 bp, Citrus sinensis
  Intron number 1 from transcript orange1.1g029623m (locus o range1.1g029630m.g) derived from phytozome v7.0 (chr-ID sc affold00117; pos 246725 to 247204 reverse strand)
ctctggcagttgcaaacaacccaggaagctctaaggtattggatttctttctgtgaatgtgagtgttttttatcccaaattgtggtttccttttgatgttatttttgtgatttaacaacagataatctttcgaaatgcgcattttttgctgattattgtggaaccattgttcccatttcaagcgtatataattcactgttcgacctttagattagatcatggtatattctggaaaaagcattgatttttgcatcaggctatgtaaagcacttggagggtaatctttattttggcatataatgattctgcattgttatctttagtgtttcggttgattctttggtgaattgatgtgtgggttgttctgtgagaatattttcttctttgatgaagagatcttgatgggttgaaaccattgaatgaattgaatgtttgtgtgcctgtagaagaagggggaagtgaagatataacatttttgtg

SEQ ID NO: 82999 - DNA, 460 bp, Citrus sinensis
  Intron number 1 from transcript orange1.1g021665m (locus o range1.1g021656m.g) derived from phytozome v7.0 (chr-ID sc affold00091; pos 321726 to 322185 reverse strand)
aaaaataaaaaaaatcgaagcatttcttcttaaaggtacgtgccgatttcgtgtcttttgattcatttaatctctcgttcgattgtttatatcacaatacgattccataaaattttgtcatattttcactttcaataataatgacgtcatcgtttccggcttttctgttccgtttggtcgctgagaaatagcggaaattaaaacgaaatttagaaattattttttcgtaccggataaattcagtttttagctgatcatttaaatgaagaagaaaagaacaaattagaattgaaaattttcgtaaattttacgtttctgttagattgaatgatagctgaagcatagctttgattcttgactttgaattgtatcattgtttttgctttttattttgtaaattgatgttagcagttgctgtttaacagttgggtttcttgttgacgaccagcgactagtaaca

SEQ ID NO: 83000 - DNA, 610 bp, Citrus sinensis
  Intron number 1 from transcript orange1.1g004180m (locus o range1.1g004163m.g) derived from phytozome v7.0 (chr-ID sc affold00003; pos 2996938 to 2997547)
tgaggccattgtccaatctgagagtcaagaactaggtaccatacatattttaccttattatgtttttaaccactgtactaaagcttaactatatatttaattttttaaaaaataataatttaacagctaacaactaataattttatctatcaactatctctgattccattccacaaaaacttttggattaattcaaacctgcccttatattgttttttgcagcttacttgtgtctaaaattttggtatgattttcaagaatggtatctttgagtttgagagtgcaattggtggctaattattcttttgtgtttgactgaaatagataaaaagtgcctctttaatgtagacaatacttcgtatgttagttaatattgttccttagagattacaaacatagatgaatctattcaatttggtcatgtaaagacataataattaaattgacatataacatatttactttcttcctctcctctcgatgccaaatgatcaagagtgatatacaatctgttttttgttaatttatggtaatgttcttaatcattgcatatatttcatgattgaatacagcagaatcaaaagattttcagccacgtgctaagtacaga

SEQ ID NO: 83001 - DNA, 484 bp, Citrus sinensis
  Intron number 2 from transcript orange1.1g044478m (locus o range1.1g044478m.g) derived from phytozome v7.0 (chr-ID sc affold00369; pos 75420 to 75903 reverse strand)
gctataaaatttctgctggtaagtcttttttctcaccaattactcttgttcaatatcttgtacttctcaaaaatatgaaaaaacaaaatcttgcaaaatgttttcatcttcatcctttatctaatttttgggaactgaagttgcagctcctgtgtatatgtgttatgtcacttaatttcacttgcctttatcgatattttagtagcggatggtatttgtaggtactcaaataaagaaaactggaaaagagaatgagttccactaattatttcaaatggctccaaggcctagttatatatatatttctacaattatcgatacatgcaatttttgtttgtccacttaaaaacgagcatttgcttatctttatttgagcataagaaaaaagacgtagaaaagaaattcaaaattctcatttacatatcgttaattattgctataaatagaaaaattacatgaaatttgttaacgggtggtgaagcag

SEQ ID NO: 83002 - DNA, 951 bp, Citrus sinensis
  Intron number 2 from transcript orange1.1g033348m (locus o range1.1g033348m.g) derived from phytozome v7.0 (chr-ID sc affold00004; pos 234095 to 235045)
tcatcagctcactcatattccttgtgtcactgacggtaataagatttcttcaatcagtaggttttggttattcttcttaccctcaaagaagggaaaaagatatgtaggcttaaatgacctaattgctgcaattccagtacattgagtgatagatatatgttacccttggttgcttatgactgaatcaagtattatattgatttatttgtctcaacagcatgtgatgggagcattatgtttatgataacttatcaaagatacactttctatggcaagaggcattttggggtttgaaacttgaattttcttttatgatgaataagaactttattcaaagggaaaaggtagtaattgaagtacacaggacttatacgaagtgagtctttgaatgtagatgtctatttggacttttaataaagaatacaatcagcatgttagacaactcaaaattccctgaatggtaatttcttggaaagaatctgcatgttcaaaagtaagattttgttttggatgatcttttcggttgatgatttccttctctctcctacatttttacgctttcttctactaatattgtgtacaaaggaaataactttatttcactgaaacccacatatttgttcaattgctaaattggtgcagtatgtataattctctttgtttgaatatgtcaatttccagcctcgtagcatttgacttggatttagttattaatatgtgttgccatgaattgatggtgatttctgctgtgaattgatcaaatttatattcttcgttttttatggtcaattatcttcattctagaacatgattgatggaaattcttgtattctgcaacttcaagttgttattcttatcatgtgactcatattactcaatcataacttgtaatatgtattagcttggttactgtttttgcagttcattggaaattttcaggaaacaagtggt

SEQ ID NO: 83003 - DNA, 976 bp, Citrus sinensis
  Intron number 1 from transcript orange1.1g022004m (locus o range1.1g021988m.g) derived from phytozome v7.0 (chr-ID sc affold00018; pos 1494816 to 1495791 reverse strand)
cctggtattttcctctttggtttcaatccagcttggttggttatagatatcggagatttattttatgacttatggaagatgaatttgatataatttcttgttctggttggctctgtttgcatccagtttattctttatctatgctcatactgtcattttggtcttttcagtcggttatgcaaattccttggttgatggaggaattgttccctttgacgtggtttttctcttttttcttctactggtcattcaaacatggtttgaaggcagcttagttcttaatttggaacgtctaattcatttttttatcattttaaattcattgattggatgggaagagagaagaggaaaatttaccaacttgaaatgtgcaaagtgaatctgcaattttgctattataatctttgaataaaacaataatagtctttagttctgattgctacactttgagaatggttgttgaggattcgtactgcaccctgcttgtctggtgtttcaattctataattaatccgccttctgtgttttccttccagatcatactgacaaaatttgaaaaaccaacaagattacagagcagtacatagtcgtcatcctttttaaagctcatatgttgaaattatgtgcttagagattcctggggagtctgaattgcccatactgcccaatgagaatgtcattcttgttttgttgtctatagatactgaaacagactactaataggttttgtcaattgctataatctgctcaaggtcctgaagcctttaactccggggttggtcaaagatcatagaaacaacttattaactcttttgcttataactgtgatcatcgtactaattgtatttgctgctattttcttcttttgcatttagaattttaaacattaaaaggaaattgcagtcggtgcatgttggtcattcacatgtaaaattcaatctttattttgtattacagaccaacgggagtgaagttt

SEQ ID NO: 83004 - DNA, 1014 bp, Citrus sinensis
  Intron number 1 from transcript orange1.1g001372m (locus o range1.1g001374m.g) derived from phytozome v7.0 (chr-ID sc affold00002; pos 3656826 to 3657839)
ttttatatcccctttaggaagctacattactcctggtaggtgcgttatcaaccagaatcgtcttcacaaattattgttcaatttactttgtatgtttgtcattttgttttactattttgagttcgtgttgtgttttcattttgctacttcttgaaaacagtctctggctttattttaaaatcaaccaaactctgaatgcttttgtttcttatctttcttttgtttttttgtcggtgtggtttgtatctgttctttaagagcttccgtttcaaggttcccttctgtttgtttctggttttgatttacagtttcagcacttaacattgtgggaatcttttgtttttaatcctgattttggaatttattcccagtgttactctgtcactgtcattttaatctgaattcttcttcttcttcttcttctttcttattttttccttctacaatcctcttcttcttattattatagcttatagtgtttccgattaatttggatctcatttgatttatatttaaaataaatttattaatatttaagaaaaatatttattattttttttaattttttggtagtttcttctctcattcgatgtaaaattgtataatatcttaagcgaccgatatatattcagatcttaagtgttgataccacgcaattgatatacttctattggacgcttgaaacagtaatgttctggacgttttggttttaaaggcttcagattttgatagctgtataacaatgcatgattgaattggggagtcttatttcagttcaataataattttattaacaaatttttttgttggattactgttatcattttaatttcacatgctaggcaagtacttagttattcagttcttcttgcatgtctcatcactttttgttattttcctttttattgtttcgatttaattctttcttagtgaattaagtaatgcactattatgcactctcttttttgtatacttcttttttaattttaagtactgcaaacgatacagtttaag

SEQ ID NO: 83005 - DNA, 856 bp, Citrus sinensis
  Intron number 1 from transcript orange1.1g035025m (locus o range1.1g034332m.g) derived from phytozome v7.0 (chr-ID sc affold00016; pos 196275 to 197130)
gcatctcgctctccattggcaggtctgtttacagaactcttttctctctctctctttggatcttctttgaaatgataattttatcttgtttcttgttctacgttgtgtcacttgatctcatcatcattgaatccttagctgtttatatttgtttcttgatcaatctaaacatttctagtgacattttagaagagatcaagtcatctcccaaatgtttttctttcttttttttttcttcataacttaacaaacaaacgaattcggaaaaaaaaaaaaaaaaaacaaacgtagcctttctgtaaactcgccatgtgattttgattgactttcgtatgtgaaaaataaaaaattttaaaaaagatcggattcatcgagggttataacataaaaatcatgaatacgaggggccaaaaggtaaactaacattgggacggtctgaattgggctaaatattattttgtacccttatctttccttaatattatacgggaccttgcatatttgttcctccgcaaatactttggaaaggcgaaatcgcttaattttgttttaaacgcattcttgagacgcattaattcaataacctcaagcacttgcagattgattattagcgcttttagtaaattagtaacacctcggtttgcagaaacttgcaactttttgtatgcccaatgaacctttgcgtcacttgtcgtgcaagctagctagatcatatgattctgtttcaccatgtgaattataaaaactctttaaagtaatctttttctttgttatataattctcatttctttcacatatgattaatgatttctttctttctttcttttaataataagaataattaataatttcttaa

SEQ ID NO: 83006 - DNA, 788 bp, Citrus sinensis
  Intron number 2 from transcript orange1.1g002547m (locus o range1.1g001061m.g) derived from phytozome v7.0 (chr-ID sc affold00028; pos 726948 to 727735)
aggctaattcacattattttgccatcatcgagcaggtataaccttaatgccccacctttaatagcttctcattgtttaattatatgcagtcttttagtgactagttgaattcagcatatttagtgttcggtcttttatttgttgtaccattatatttttgaaatgctctgtaatatgttactgtcccctggtttagctctctgttttactcataatcaaaacaatttatatattgtatttattttctttttttatttttgtttttattttttatgtatctcagatattagttgtttggtttaccatgagcttttgaaaagtacttaaattctaacctatacagttgattaatataagaaattgaatttttgatgagttatataagctgttgaatagttattgctgtagttttgggtactttgatgatagtcttatgaattgtttggtaggtttgggtctcatttcattgttttgccctgggaatatgttattctggatcttatgttgccaactcagaggttggcgtatgttttctgctaatcaacttagggaaaaaggaaaaaaaattgaaaaatgctggatagattgctaccattctcggtgacagaaacatacacacaaaactacagattcacgcatgcatatgcacaaacatgcccacatgtgatgtctatcctcacctcttctgtttgcattcattttgatgactgaaaaaagtttctgtgctgataattatttcctaaatagctgtagaatattcatatttgctctcattcatgcatcagatt

SEQ ID NO: 83007 - DNA, 549 bp, Citrus sinensis; identical to SEQ ID NO: 80285
  Intron number 1 from transcript orange1.1g033431m (locus o range1.1g033431m.g) derived from phytozome v7.0 (chr-ID sc affold00004; pos 631307 to 631855)

SEQ ID NO: 83008 - DNA, 899 bp, Citrus sinensis
  Intron number 2 from transcript orange1.1g046145m (locus o range1.1g046145m.g) derived from phytozome v7.0 (chr-ID sc affold00003; pos 3165627 to 3166525)
gctctactgctctaaccggggcacagcaagttagtgattttaatttaattatttacatttctaagatttttcctccatggagccttattagaatatctggaaaggctttggttattcattaagaaaaattcaagaacttgtttagaaatacatctttatcactttatgtacatcggaagtgaaaagtttaggaatctacagtattttcttttatatgactggattcttaatttgaaattttgatttatgttgaaaaagagatgattatgtgagatatacgaatgattgaagaaaatgagagaaatgaccaaacacagtaagaaagatacatatttattgaaggttacataaaatatttcccgtgtgttgcctttattttttggtgtggttgtaggctacatgtatcggatagtatatcagaggttaatatttaagaagatggatatttataagtaaaaggttacgttaagttttgcccatgtgttgcctttatttaattcatggttaagaataattaaagaatgatcaattctatgttgctttaaatttttcagacagtctgaagtttgagatctgtgattcaaaagctaagtagatctgtgattcataaactaagtgctttgtataggagtggttgcctggtccaaccatttgcttctaaaaccagtgttctggtactactgtctgtgaccgtaccttgtgtctttcttggttttattgccttttaatcctcacacaatgtactacaattatatggttgatatcttttattaaaattttttaagtacattattgttggataaactaagtctggtgcaatacaaatttcattgtccgtcttatgtttagtcttctattttacaggttccggcaataaatatcaagggggctgcatcatc

SEQ ID NO: 83009 - DNA, 648 bp, Citrus sinensis
  Intron number 1 from transcript orange1.1g027487m (locus o range1.1g027440m.g) derived from phytozome v7.0 (chr-ID sc affold00068; pos 257067 to 257714)
ctcgttccggtacgtcaacccaccttttttattgttatttttgtgattttttttttttaaaaattgactctgtttgattcccgtgaaagcgcgggaagaaaataatattagacaatgcttgcaacgaaagtttgaaactttaagcaatacattatcaattttttttttaactgagaaaattaagttcaaaaggtcaattttttgttttgttttttagtcataaagtttttcttttccgggtgttattagaacttgaaattctattatattaggtattaatgtaatcagttatgaactgtgattagggagtggatagctgtgcttttttcttttcaagaggatgttttggtttcacgtttctggttttgatttatgcttttctcatgatttagctaattccccaatttaaaattgctgctattagtgcttgttacttgtaaggttccgttatatatatatataggcaatgtggtgattccgcaacagggagtgtggggtgggagacttttgaattatttaaagacaataggatttttttggatgtgcactgaattttcctttgttttgtcacgttctaaccatgtggtatttgtttctcccacatctggtaaagcaggaaaagctaaagcgaaggagatagagaacttt

SEQ ID NO: 83010 - DNA, 584 bp, Citrus sinensis
  Intron number 1 from transcript orange1.1g039218m (locus o range1.1g039218m.g) derived from phytozome v7.0 (chr-ID sc affold00405; pos 55005 to 55588)
tcattccattgtcgtcaaaggacctgaggaggaaggtacttgttactgtttgtgaatgtgcatgttttgtatgcatgtggatggcctgaattactttctgatcaatacactgcaacaatatctgatcttgttctctttcttccaactgaaagcatatagcaatgtggaatgtgatgagctttcgagcttaggcaacccatagcaccacaccctgtactatagttaaggaacgatgagcatcctgtagaagggtgaattatatttacataatagagaacttaactagttttcccaagatagtatcatatgtaaatatcgcagcatgtttgtgtggatgcattgacttgaaaaattgatcaattcaatgtctcatctttcgggagcttgtcagatttgatacattaagaactgaaggctctagaatgttttcttactgatactgttggggatttataagtaaacattcattttgttttgcacatatagtttgaattggtgcagattcattttgtgtggtcccataattctaatgtgaaggttgtttaataggtcctaagacggtgaaacttttctcaaacagagaa

SEQ ID NO: 83011 - DNA, 1030 bp, Citrus sinensis
  Intron number 1 from transcript orange1.1g038154m (locus o range1.1g038154m.g) derived from phytozome v7.0 (chr-ID sc affold00207; pos 82300 to 83329 reverse strand)
cttttgaaagagctgaagcacgaaaacattgttaggtaatcacttttgatatcattgttatttattttatcttggaatgatttgcattgaaaatgaaacattgaaaagacctttcatgtgcaaatttatgagaaagcatactgaggtttggttaaacaattgattatcttcatgcgaagaatagtcttaagaagtagcttttagtttctattttgtcattctatctcataccattttgttgcggtgcccaaaactttatgatgtgaagagccaaaaatccattgtgacagaatcaatctagaaatgtatattttaaacttggggatttcttaaacaatatttaggttaggatttgtgataaaaaatagggaagaatctaacggctggtgtgtgcattttggtccgagtttgcatatggcaatggtgaatatctcaggatgttgttggtagcttaagcacctgatgcattcaaaaaggtgcatcttgaaagcatgggactggtttatgaatgcaaatgtactgcgaactgagtctttcacatttctttcatcttaaaatgatactacaaaatggagggcctctcaacgtgtgatttcagattggattatttggcactatgcatggtccattgaagttgagaaataatagggtccatatgcttgtgatgcaagtaattccactgtcttgccactttattctccataatttcccattttgagcagcttcatctgtccagtcttttgtggtccagcagtagtttgctactgaaccataagcaaagttacttggctgtccattttcccatctgttgtacctatctacatttcaaatccatatcaatgtcttgagtatttgttttcagtttttgatgcatcagtggtttggatgtaatgctccacaatttggctataagtagttaatgtatttatttggagtcccagggttgaatcaaatatcaagaacacatatttgttgagagagtttatatgaaccaacttcgtgattttttttttttttggcaggttactta

SEQ ID NO: 83012 - DNA, 400 bp, Citrus sinensis
  Intron number 1 from transcript orange1.1g004225m (locus o range1.1g004225m.g) derived from phytozome v7.0 (chr-ID sc affold03177; pos 376 to 775)
gtgagaactactagtatcttcacggaaagggtaggtacaagaattttataatcaatttttcaattcttatgtatgcactgtgagagtttatatcatagagtttagagttatattgcctttgccttcatcgcttggtttcttactaaaactcaaattgtcagcaacgtaactctcttacggattagtgtatagtattcattcataattattctagatgttaggcatactattattactattttttttaaaggttaagatttattgaataaaatatattgtataaattagtggtaacttatatttcttatcaattgattcatcttgtatttcttttttttcttttttttggggttgtgatcgatctcccaggtattccctaatttggaaaagttgaaagttg

SEQ ID NO: 83013 - DNA, 537 bp, Citrus sinensis
  Intron number 1 from transcript orange1.1g017088m (locus o range1.1g017081m.g) derived from phytozome v7.0 (chr-ID sc affold00024; pos 308683 to 309219 reverse strand)
cgcctcgtaattcgctcgttctcatctcataaccggtcaatttctcttcctctttctctctctcatttctattttttataattaaattctcatcaaattctcattgttttttctttttatctttcttttcgatccgttcaatacctcgtagatctggtgaattcttgttaattttcctttttttttggtttaaatttaatttcggtaatgtactaatcgaaacatctacagtctgtattatgtcattgaggctttaatcatagatttattgatttgtgttttagtggctattagattgaatccttttctgttttgatatatttagcttatcttaaagatcgaatttttatgttcatttcttcgattttttttaattattgttattagtgtgatttgatcattgttaataaattgggaaaatttattctgtattaaagctacgcgctaatttgttgatatgatcatgaatgtcgttatctatataatgtgattgtcttgctgattttatcttgtgtattgtgctgcaggtagcagaag

SEQ ID NO: 83014 - DNA, 621 bp, Citrus sinensis; identical to SEQ ID NO: 79100
  Intron number 1 from transcript orange1.1g027652m (locus o range1.1g027652m.g) derived from phytozome v7.0 (chr-ID sc affold00374; pos 99862 to 100482 reverse strand)

SEQ ID NO: 83015 - DNA, 517 bp, Citrus sinensis
  Intron number 1 from transcript orange1.1g034434m (locus o range1.1g034434m.g) derived from phytozome v7.0 (chr-ID sc affold00011; pos 1949332 to 1949848)
aggtatgtaattataattcttttgatggtcgattcattttcaatatttttttcattatacatgtatttttaaaatatagaaagaagatgtaaaacctaaattaattttttaacctctttactttctcaagattcgaatttaagtgtccaaccaaataaaattacatggtaattaaccatcgatcaaatccccaccaaactctaatggtggagtcattttaaatgttattttattaattttgatttatggagttctcacttaatatcatctacggacctggtgctcactctccagtctgcaagtctgcaccgctgacttaaaagccgagggccaagaatccaatagattgaatttgggcggattcaatttatggcccaatcgtcttttaaagtccaatcatggcccattaatatcttcaagcccatatgatatgaattcaacctttatccttttaccatattcggcaaaaacaaaacgctcagaatcggactcggggagggaaaaagaaagagcggtt

SEQ ID NO: 83016 - DNA, 802 bp, Citrus sinensis
  Intron number 4 from transcript orange1.1g003977m (locus o range1.1g003977m.g) derived from phytozome v7.0 (chr-ID sc affold00004; pos 1880524 to 1881325)
actgcagtcacactttgcctgtcacttcccaagaggtgacgatgcatttccttgtctcatttataggtataagagctattgggaattatgtattaagcatactgtttcaacaggattctttatttgtgatgtatttgaaatgggtttgtgatcttttagttataacaatcttttcttaaaaaaatttcttagttgatataaaagatatgctatttcctttcatgtacatgcaacatatatactaccttggaagcacattagtttgtggtcttctgctgtgagcagcaaaagaaataaattgaatgtcctatttttatgtgatggtaaaattatcaaaatctggaaggaaatagtagtatgaacaagtagaggcgtcttgggcagaactttggatttgaatcatggatatttctgattagtaacttgtcttttatgaggatcagtgatctggcattcagataacctgtgtggtatagtacagctttttaaacaaattggtttggatgcagttgatgcatgtctttcatgcgattgattgttttatggttttgttatgatggaattgaggtattatagaaggaatttggtaggtggcacgtgaatgcacaatatgaatttgcttgaatgcttatgcagttaacccctctacttaatgctctcattgaagtaggggaggctgtgcatcaatatttttctcatctagtatgaggaaaaatctcttagatattatttatggatgatttgattcatctgaataccgtatgatgcaatattttccccagagaaaagcttgactggcaag

SEQ ID NO: 83017 - DNA, 441 bp, Citrus sinensis
  Intron number 1 from transcript orange1.1g011952m (locus o range1.1g011952m.g) derived from phytozome v7.0 (chr-ID sc affold00100; pos 418989 to 419429 reverse strand)
ggttttcctttcagctccagttgcaattcgcactcgtaagtttccaatttttgtcatcttatgtggtcggaattttttcggtatttttgttttcgatgctaatgttaaattgctcttgttttattcttgaattgatgaattttttcattaggatttctgtttggttgccaagaaactaaaactgaaacttaagcttcatcttcactctgttgttattttgattttctgaaattagacaagagatttattttgattttctgaaattagacgagattattgaactgtttgataaataactcgtttagtagctacctatgaaatgcattggtattaaattgtgagattgatatgataattactgataccttcttgtaagcagtggcttcaaacagattaatacaaaaagctggattgatatttgttgctttttgaaggattttg

SEQ ID NO: 83018 - DNA, 453 bp, Citrus sinensis
  Intron number 1 from transcript orange1.1g011650m (locus o range1.1g011650m.g) derived from phytozome v7.0 (chr-ID sc affold00003; pos 3476815 to 3477267 reverse strand)
cttctcttttagatcgaaagaaccagacccagaaggtaaattcttctattctttaatgggcagttctttttttctttaatttctttttcgtttttgtttttggggttcattttcatattgcagatccgctgctgttgtttctgttgtttacattgtcatacattttgttctattttacatgcccagttcgtggatctgattataaaatattagttcttggtgtaattcttgttggaaaaataactccttttctcggttgattaaattattgataaaatttcaccgaaccgtcggtacaattgattgctgattgaaagcagttgatctcttatgatatcaattgttgtggccacgtgtcatgtctttgcgtattgtacaagtttcataaaatatacatacatatataactttgtttgagttgtaattttttttcttttttgtagcgttgtaaaa

SEQ ID NO: 83019 - DNA, 508 bp, Citrus sinensis
  Intron number 1 from transcript orange1.1g038577m (locus o range1.1g038577m.g) derived from phytozome v7.0 (chr-ID sc affold00153; pos 176194 to 176701 reverse strand)
gcaagtacatcgccgtcggtacaggtaatttgatggataattaataatttaggtgttgaattcgagttcaatactttctagggggtttattttaatttgcaccaaatatgcccagactttgcctcaaaatcactttcttggcgaaagaacctaaaagtgcttttgaaatagcagctatgaagtatttttcttaaaacaaattcacatacttttttgacacatctgttataggaaaaaagctctgattgagtacttgactctaaaagcacttcctaatgaagtgtctataaagtactatcgagtttcttttggttgtgtcagagaaagagagagttttgcttttgaatttttactttagtttgattggtaagtgtattttacaagagattttctatttttatgagtttaattctttttgtttctccttttggaattgaattgatttgaaaatttaaattagccttaaaagcaatatgtttgtggaatttgcaggtaaactggtgcaaat

SEQ ID NO: 83020 - DNA, 393 bp, Citrus sinensis
  Intron number 2 from transcript orange1.1g013811m (locus o range1.1g013811m.g) derived from phytozome v7.0 (chr-ID sc affold00017; pos 91075 to 91467)
ctgttgttaagggttactacaagaaccttatcaaggtcagttatttaaatatttgatatttttctcttggtagtctaattgaccctggctttgtatggaacaatatttttaggagtgcttattttagtggattaagaaaaatgagaaagtcaataaaattgatgataatgtgaaattttaacttttgatatactgttaaaaagttcattattctgcttggaatttcagtttgtggttggtaatggtgttactgaagaatttcaattgaccatgataatgtgaaaatttcttgaggctcttcttttgtgagatatgagatgtatgatgaccactactattttgtctatgctttttgaagactgttcttaacagatataatacctttactggaat

SEQ ID NO: 83021 - DNA, 779 bp, Citrus sinensis
  Intron number 1 from transcript orange1.1g015510m (locus o range1.1g015510m.g) derived from phytozome v7.0 (chr-ID sc affold00014; pos 1333649 to 1334427 reverse strand)
tgactgacacggtatcaattccttctgtgtgtgtttgtgggttttttttttttcaatttttgtttgcattttgggagctgggtttctttattgcattattttgaagtttattagttgttatgtcgaatttggtttgtgtgtgtgtgtgtgtctctctctctctttctctttttgtttggggtaatgtgatagcttgatgagatattgtagattgtgaaaattcgacacagcttcttgattgaatttggcgtcttcattgatgctttatatctagcttgtaaataatttttgggtctgataatgccaatgcgacttattagaaaatctttaagtctgatttaggaaagggcattggtggtggatgccagctagttctgttggtaaaatatcttgtgtggaaacaagaggtctggggttttaaccccactcagacgggagggaacggaatttggttgcgattaagttatatcagaaaaagtttgaatttgccatgaataggtatgttatgcctttttcctgcctaatggatttagccaagtttgaacttcctcataattgctttatgcgactgaaaggaatcagaccaagaatacgttgttaaatgattctttctgatgcagtttgtcttgtcttgtatatttgtataaacgtataattatatgttggcatgttgctatgaggctgggaggacattctttcaaatgtatggaaaataagctttataaggttgatttgctagtttggtttacctttgttcatattttgtgttaacaatagga

SEQ ID NO: 83022 - DNA, 594 bp, Citrus sinensis
  Intron number 1 from transcript orange1.1g005807m (locus o range1.1g005807m.g) derived from phytozome v7.0 (chr-ID sc affold00815; pos 9056 to 9649)
tcgcctccgcccatctctctgcctgcaaatccgtacgtctgctttttctttatttatttattaatcaatctgtattaaacttgccggtgttttgcaatttgtgtttttttaaacttgcctgtgttttgcaatttgtggctttttaaacttgcccatgttttgcaatttgtatttagttttgtttttgccatttaaacttggttgcttttatttttttagcgccccaaatttatttatattttttatcaaaaaggtttaagttttagcttctggtaataattcaaccaggttttactaaagtctaaagcaaatgatgcgcattatctgaaatttgatgttggtttctgtgtttgattctgagaaaaagaaaagggtatgaaatttggttaggggcttttttgcaaaatttgtttagtgtgatgattgatgagacttgcgaatctatagtgtttggttagcgtgtatgtttcttcaagtattgattaaagttagctgcaaggattgccttctgatagttaaaagtttcagattgagcagattatgtacagaaattcttgttcttataaattggaatacttttgcagttgacgggca

SEQ ID NO: 83023 - DNA, 965 bp, Citrus sinensis
  Intron number 1 from transcript orange1.1g024445m (locus o range1.1g024445m.g) derived from phytozome v7.0 (chr-ID sc affold00003; pos 2955621 to 2956585)
tttttcaggctattgttgcaattctcttgtttgcggtgcgtacccctttttttttctttttcttttcttttacttgatttcttttactttttacaactggttttagttttaataattgtttaaagttcgtctcttttttttcttttttctttttttcattttgcgatgtctgattggagttttttttttttttttttcgtgttatagcttgtgctccttttcgtaagctttgaattgtaagggaattggaacttgctagagatgctttgctttttggaacttgttaatctatgtgtgcgactgtgtagggtttgcggtggttttgcttgattgcttcctgtgggttttatgtcaaatttcgccaatagcttttgtctgttgaattgttgatttaacctgagaagtgtgaaggatcaacttccatatattgtttctttatctcctcaaaattttaattctttttcagagaatcttctcaattgttaaacatgcttgtataaagagctttttatttggctatatggagcctgacaaaataggtgggaacaatcatcaaaacgattggatcagggtatcagcagtattttgtcattttgataggatggaatcagctgttaatctttttaactttggagattttatttaatgcaagaaggattttgcagggatctaatcctgataatttggatgtttttgcttatagggaaaacttggacattttttcttttctttttttttttccttttttgggcatcatagcatgctgtcagctatgtgttaactgttattcttctcttcgtatttatgctcactttttatcatctttcctctgttgttgtttttgttggtattgatgtatttggagccagcaaattgttaatatcttggctagagaagatggatgttttttgcattattgcaggaattcatgttggaatcttggttttttctataggtgacaggaa

SEQ ID NO: 83024 - DNA, 217 bp, Citrus sinensis
  Intron number 2 from transcript orange1.1g015387m (locus o range1.1g015387m.g) derived from phytozome v7.0 (chr-ID sc affold00023; pos 1197568 to 1197784 reverse strand)
tctcattgaaggagcttctaattttcaaggtagcttcctttagaatttgatgtatcttcctattttttcaaaagagaaatttgttaattcgtatgtgacacgatgatttacagctgcttacattttttctgtttttttttttaaattcagcatgtcgccttttttaatttactattattattttgtgtttttaatttgaataaattccgttctgaag

SEQ ID NO: 83025 - DNA, 1024 bp, Citrus sinensis
  Intron number 2 from transcript orange1.1g005198m (locus o range1.1g004999m.g) derived from phytozome v7.0 (chr-ID sc affold00047; pos 202426 to 203449)
cacggcgtgcggattcctttgagaagctggataaagtatgttccttcactgattattgtggtgcataaatattgtcatatagtgtttatttgcacatcgatattgtcctttttgaattttctgttgtgatgaattagtaattgcttgatagttttattatcagttttgtatctggataaagaatgataataagttatctagagagggaacatttaccaaacagctctaactttgtgtcataagctctcaaggtttccttaaaaaaaaaattatttctggtcatatatctatggagttatttatggtacatgtgtataatacaaatctatccttagatgaaattatgattttaacttttggattttgttcaagaatgtgaagtatagcctgggaaacatccaagaagcatcaccatgaattcagattcttatagaactatccattctacttctgcagagttcaaataatgttcagagtaatagttagttcttatagaaaaccagttaatgttagggagaactgaactttggtgggtaatttgagtgtaactgactaggtatgaagaaacttgaagatattgcacactaatgcgcatgattttagatgattgaaatttgtggattatgatgcgtatcaacagttttaagcatacatgcatgtttgcttgtgtaatatttgactgcttgctaggtcttggattatgcatgctacttctctttaaaattaagctgatactgcacttttggaattttagctaattttgtgcccatcactacttttctccttccccttttttgactactattttgctaatatttacattttttgtttttgtttttgtttttggggagtccctttctattttttccagatcattctatttagtgagtagttaccatgatttatcttcaattttttgtccttctccaatgcccactttggttgacttcacttggaggctggttttgatttatagtttgatgacaacatattgcaatgcagattggccagggaacttacagta

SEQ ID NO: 83026 - DNA, 485 bp, Citrus sinensis
  Intron number 2 from transcript orange1.1g026383m (locus o range1.1g026383m.g) derived from phytozome v7.0 (chr-ID sc affold00024; pos 1223306 to 1223790)
accacctttttgacaatatcaagagtatgctttcctccctattgctcaatgtaggaacgtttgttcagtgtactgtttcggttcatggaagttgctagtacattattgagtctctgtgataccacattacatcagtctggtaaattaattgttttattatttcattcttctattgcatactttttagagtcataaatgcaaatatacaggtgtttgtgtttttttcaaaattccttgggcataaacaacaaaaactttggcaccaaatgtgttatgtgcctgccatgctgtaattgaaagctgagtatcacagtcggtggaaaactgacgaaataagtaaatgtgtttttgaccatcagttgtgcactgatatttagtttcagtctgttcttctctaagatcaattaatttttttcctcccatagctttgattccaaatatttaggctgctggtgcacatgtgtactgacttttgacagctattc

SEQ ID NO: 83027 - DNA, 985 bp, Citrus sinensis
  Intron number 1 from transcript orange1.1g041833m (locus o range1.1g041833m.g) derived from phytozome v7.0 (chr-ID sc affold00048; pos 51952 to 52936)
ctcttgtggtccaagttctttggatcgaattggtctctctctttgtattcgattttattattattattattatttaaattttagattaataaaatatttaggttttgttttttatgatcagttttgatccattactcaatgtgtacagcccccctatcttgaaactaatgaattagctgggtttgttcatttttttgggcaaaacaaagccatgcaactcaaaaaaagacagctattataagtttgttctgttcaacttggtttaaaagcaaccaccgtgaattttttattttttaagtgcttcctaatgattttttttcctgccattttaaatttttattagaagatgattaaagaattaaaaaaatcatacagagaaatttcatgaattgaaaaaaaaaaatcataatgagaaatttcatccgttttaaagaaactctttagctgtaaatgtataatcatttacacattattggcaattaactttgttaaattcaatttttctttttaaatacttccttatgaattatgatatttaaaaaaaagaaaaaaacttccttatgaatcacgcgtctctcaaacgaccctaccaaacaaaaagcctgcagaaaagctgtttttggaaaaccgaaaaaaaggttaagaaagaaagcaaaaaataaagcaattacatcattcaaatcattcatcgaacccactattctggacagagaaatcaaaagggcttaagttctgttcagcagataaactgaacaaagaaaaaaaaaaaattcctcagaacactatcattggctccaacgtttttgcttgattatgtcttctttataagtcgcagtaccccagtacactaagccatataaaaaatggcttataatccaaaaggggcttcctttcttgttcaaatcttgttcatttgcataatttttatctgggcagtgccttttcaacagacccagttgcccagcaaaaacttgacagagttggg

SEQ ID NO: 83028 - DNA, 414 bp, Citrus sinensis
  Intron number 1 from transcript orange1.1g020635m (locus o range1.1g020635m.g) derived from phytozome v7.0 (chr-ID sc affold00011; pos 1848942 to 1849355)
tacttagagtgcatttccacgattgttttgttagggtaacaattaataacacatgtcatcttcatttattattagtcatagccattttcatagtgataattagaaatttttattcaccctaaagatattttgcaaacattatttgttcttttcaataccagcacgtcagcatattgttacgggctgctaaaatttaccttaaacagaaaaattatctaagtgccgtacgggttgctgtgcaaaacactcatctcgtgataatatacatatataaatttgttttaaatgaaagctctggtccgaagagaagtcacattctttttaaatacgaagaaataaaaaacatgtatcacaaatgcatgctttacaagattaataagcttgtgatttgattgattttgtcttagggttgcg

SEQ ID NO: 83029 - DNA, 779 bp, Citrus sinensis
  Intron number 1 from transcript orange1.1g031832m (locus o range1.1g031832m.g) derived from phytozome v7.0 (chr-ID sc affold00299; pos 181377 to 182155)
cgccgaaagctcgaagccgaagcctggcattcgaggtagcctcaagaagtgaatggtggtggttatttatttgctcttacataaatgttttaagagttgttatgatgatgatgatgatgatgatgatggctttgtgttgcttagagatgtcttcttgttgtttgatgttttctttgcatccttttggctttgtgaatgtattatactgtgactttaatgccatgatgttattgtctgtctttatgtttattaatattatggtggtgataattgtgatgttatggtaatttaattttgggtcataaatgcttaagcttgttgtttcttgtgttgccttgtcttttaatgtattgtggctgagtatatgtcagaataggagctaaataaagattagctaacaagtaaatgtgggtgtatacttaacaatttgattgtcgtgtttacgtggcctaacaaggtttaagggtgtgggattccaaataaggcgcacacgctggttgttaaagtggaaaaaaaagaaagaaattgatttttggttttggaggtttggatttattgggggtatgtttgaaatagaggtcttgtgatagttgcgagtgaataaaatgactggctgtcaaatataaatgggtggatagtaaacatgttgagtaatattgggcatgctgtgtttggatgttgagcagaaccatagccttagatattttcatttctaggataaaatgggtttactgtgtttgaaagcatgttgatctaacagttgttcgaaaggattttca

SEQ ID NO: 83030 - DNA, 712 bp, Citrus sinensis
  Intron number 1 from transcript orange1.1g025529m (locus o range1.1g025529m.g) derived from phytozome v7.0 (chr-ID sc affold00158; pos 83617 to 84328 reverse strand)
agtgcgcctccaagccagacaagcgccttattctcgttggtatctcttacttctctccttgtaattcatgcagataatatttctccgttcctattttcttcgaaactttcagatccgcaattgaattgtagtttctgtcgaaaagttcgaattttgattctatctatatgatttaaaaccgaattttgatattccaaaaaaacgaaaaaaaaaaacgaattttgaaaagttcaaattctgtttggtcgtggtggctcgtcagttttttttttttctctcttaatagttattaagttaaacaggaagctaacaagcattgttacttatttaaggtgtatagatttttggtagtttacgaagagtactgcttgagttgatatccatgtcggaagttctactttctgtttctgtttagttgaagaatactatggtttcaatatgtgaatgacagattgaaatgaaactgtaaactctggcaggcctgtttagagtgggactcgttgctcttttattttctgtttgctgtattttagtaacttagatttttcccgctgaagtaattaatgcagttgaataaccaaaagggacaattttctaattcctggtgattgaatgcaaatgtagagatgagtttgactaatgattcaagtcattagttagatgtttgtatccattagattattgtctggttggcaggcccacccggatcagg

SEQ ID NO: 83031 - DNA, 468 bp, Citrus sinensis
  Intron number 1 from transcript orange1.1g017225m (locus o range1.1g017225m.g) derived from phytozome v7.0 (chr-ID sc affold00127; pos 355681 to 356148 reverse strand)
gatcgtcggacgattatttacgtgagggcaggaaggtaaactcactagaaaactggtaataaaatcgatgtcgatttagtcagtcagttaattaataaaccaagtaattcggcaccaatcaatttttatctgtctccgtcgacgctctcttcagtacggtgtctctttaatttttctttttcttttttataattttaattacggaaactttttttcgggttcaaataatgtttgtgattgcttttattgactaaattatagcaatcatgattactataatcatatggttttcataaattatttacgtgaaccagtttgcttgttacgtgtccaaaagctatctaatttttctttgaagcatttgattttaaaaaaaattctagaaagcgtaaaaaacaaattatacttattataaagcttgaatttttttcaggtacgaagagagtaatttgaaggtggggaggaaga

SEQ ID NO: 83032 - DNA, 793 bp, Citrus sinensis
  Intron number 1 from transcript orange1.1g036981m (locus o range1.1g036981m.g) derived from phytozome v7.0 (chr-ID sc affold00004; pos 853003 to 853795)
gggaagctttgggatcaaattcagtccgataattcgtcagccattgatgttcgtttctcttttcctcactttatttatttatttatttttctgtttgtttgcttagaaaatatggtgaggaaaagaaagcaccgagaatgaaattttatgttttcgaaatttacttctttatttttggaatttaaaagactaaaattgaaaacttagtttttgactggattaaatttgttaacggttaatgtgactaaagtaaagcgagctattaatttccttgtttttcttgaatttgaaatttagaattagataaaaatcggtgcttctcattcttgtttgttaggttaaaagtgggaatttgagctcctctcaaatgggttaattgagagatgtggctttatattcataatcaagtagagaaccaaaatgtagttggtgatgatatgttgattgatgaatgggtattatgatattatggcgtaaattaagatgtttcagtaataggctaaaattctctctgtttctacttgtagttgtcctctgtatggaaatacaagagactgaaggtgcagaaaccttgcctgaattcaactgttggaagatatttcggcattgaaaaaggtaatgtgatttcttatctttcatcctgattaaggtctgctttaacatgttaaggcatggtcttcccatgaaaattgatagtttgatagaagtggtgctgagagcttatatatatatatatatatccattaaatttcagagtcccctggccctagcggtttcttgattgtcgaagcta

SEQ ID NO: 83033 - DNA, 748 bp, Citrus sinensis
  Intron number 2 from transcript orange1.1g019824m (locus o range1.1g019824m.g) derived from phytozome v7.0 (chr-ID sc affold00051; pos 476583 to 477330 reverse strand)
cacgaatttgtgcaagacctgggcgcaaaagctgagtaagttgattttttctttttttctttttttccaaaagctgtaattgtctgattttggatgcaactttcattttgttcatttaagattgtaattaaatcatctaattggatataattgaatagcatacgtctctccaatattgtcatgtttcatacatgagctttgttttcatatacgatattgccatgcttcaaaagttggcgcacaacttttttctttttcctcacctaatgtcgcgtatgacatgacattgttagttgttacaatttgcttggtcttatgtgatcattttatcttaccatctcaccgatacatggtgaattgtttgattttgatggccatatgtatgtgaaatcatttgagatactatatttgtatgccaactttgtaagtgtagcattactcacatacaagccttcaatagtgcccgtgtcctaaagcttggataaaaggtttaatccacatattttgctaaacagaattactagttaacaaatataatacagagagtgtgggttgctaaacattatcttccaagtaaaagtttagtggcttttggaggccagtagttacaaacatatccccatttgagttctgaggtaactggccaagtgttaatagtttctctgtgttgcttgactagatcctgcaatttttttttccgtttttctgattatttttcaatttcctttactgacaccacaggtcaggt

SEQ ID NO: 83034 - DNA, 783 bp, Citrus sinensis
  Intron number 1 from transcript orange1.1g009812m (locus o range1.1g009014m.g) derived from phytozome v7.0 (chr-ID sc affold00009; pos 1971960 to 1972742 reverse strand)
tcatcatcatcatcctcaccagtttactctgatcggtgagtttccctttctgtctacttctcctttcatgaaatatttgttgattcctactttccttttttgattctctgttaaagaaaaaaaaaacagtcatttttttttcttcttttagagtgttgagattcggttcttagatctgatctgaaattactcgacttacatcagtggtcatgaactcttttgtttttgttcataggagtttgctgtccctctttttgtctctgagaggttcagaatctgcttcatttattagattgctgatcctgcttgatactgtttctaaattaagaggccacattatccgagtagcacttggttgttgtttccttagcgattatatgatgatgtctgtgcatatccaaatgactaggagtctttcacttcatgtggagttgtgatttgattcattcttgtgcccatacgttagccctcgacggtggtgtttagaagctaatctgttgttcatctttactattctcctttgtgttcaagggtattattagttttgatggggtgagtatagaagtgtgcaaagttagaagttctgtttttgtctgtgtacttatccaaatctacacaagtttatagctatgtttgttgttggttggggtttccatctattcatatgcatttatttctccattaatgattgttatttgcttttccttgatgaaaacatttatttttattttttgtttcttctttccagaggtagtcttaaatctccttggtcccgtcggagaa

SEQ ID NO: 83035 - DNA, 717 bp, Citrus sinensis
  Intron number 2 from transcript orange1.1g002844m (locus o range1.1g002844m.g) derived from phytozome v7.0 (chr-ID sc affold00022; pos 62277 to 62993 reverse strand)
gaaaggtacttactagattactggacttatacaataatggaaaaattgattcatgatttcatttggtcattggaagtagaaatgtaacagcatagtagaattaggatgctcaagatgtagaaatgtctagcattggtgcagacatgtcgcataatatgaagcagctacagattatagatgttttttgtaatttctattttggttgtgttatacattggtatggtttatgtacattacagataaaccatgatgtatgttgatcttgattgactattggaaatggcaatttttgttttagatgtgttatcgtttgcttgggatgcactgtttagagactgaaccattggagcaatcaaaattctcctgtctttattgattcctgctttaactttctaaaaagtatttcaaatattcttttcctgtgtatcatattgaggaaaagttatacacagaggcatgcagcagtgttactaattagatctcagggttctgaatattagttgttgaccgagtgaaaaagttgtcagtgtgatataaaatatttttggggaaattgttttctgttatgttcatattctggttaaggttcacatttgtgtgtattttagtctgcctttcactttgcacatattaatgtcctttttttttttgggttgttgttgttcatacatgcttacagaagagactaatctcaattatttacaccattcggggaat

SEQ ID NO: 83036 - DNA, 743 bp, Citrus sinensis
  Intron number 2 from transcript orange1.1g020125m (locus o range1.1g018716m.g) derived from phytozome v7.0 (chr-ID sc affold00501; pos 27264 to 28006 reverse strand)
tcccttgtccagctgtcgaaattcttccttcaaaggttcgttttctctcctttaacttagttctttgatgtttagtatggatgtattgctcaaaaaatgaaaaattatttatgtttgtattgccaagttatccatctacaatttttattgggagaggtggcgttgtaagttggtatcaagattaagttattctccttgcgtactatacaggttgctcacctatataaatatgctggagataatgtagacttgcaagcgattagtatgttcaaggtatgtgagattgtaagacttttttttgtctatgttatttagaaacttgcagtttatatagatgccattcttttcctgtccatgaaaggaaggatggctaattgttgttggtggctcaaataagatcctgtgcttcagtgaaagcaaacagagaataatattattgatggcttttatagagggctatcaaagttactcttgtgttgcaaagcaatgattcagaactcttttagttcttcctaatggttcagatttttttttttcaaaataaaggctatgatttgcatgtttctgaagagtagtatgtcataacctggacaatgccaccctgctttcatgagctatgtcatgaaatattttttgtacaggcttagtgcatgttattatcggtgcctgctttgataggttggtaatttctttttcaatctcctgcagggaaaagttagtgtcgctgatattattgggtttac

SEQ ID NO: 83037 - DNA, 588 bp, Citrus sinensis
  Intron number 1 from transcript orange1.1g044108m (locus o range1.1g044108m.g) derived from phytozome v7.0 (chr-ID sc affold00209; pos 8416 to 9003)
gtcaaggtgagttggttataaggactaaaattaaaagattaaaaaacatatacactcacatgcaatctaataatgtcatgtgttttgtctttagtatattaaaatttatgtttttcaatcttttaatttgtttatcatttgattaacctcatttaagaaaggactaaatatataatttttttttttcaatagaaacgttggacagtttcaccaacttggaagacttagacattggacgattcttctctacatattagccttctagaaagcattgtagctttcacttcgctaaaacgtttaagcatccggaatggtatagtcgatggtgctctaggtgatgatgatgaaggtaaattttaaagtatcggaggtttttgtgaaattggttcgaatacaattcttttcttttaataattagataattttttcttcaagtaaaaagtaatacagtgttcactacaatacggtgttgttatttaatatgttgatgataattgtgtatttaattttttattgttgttatatactgaagaataaatgaattctatttcaggcctgtttagattgcggaatctacaagagctacgc

SEQ ID NO: 83038 - DNA, 814 bp, Citrus sinensis
  Intron number 1 from transcript orange1.1g008809m (locus o range1.1g008815m.g) derived from phytozome v7.0 (chr-ID sc affold00011; pos 960141 to 960954)
atcgcagctgaaggcttcatatttagagagagtaagtgcgttaatgtctgtttcagtttcacctttttagcgatttaaacttatccgtaactattaatatttgatatttgaaatctgttatgtttctatttaacgtgttgaatgcttcattttacttcagatctgttgcacctaacgttaaagtttgaatctttgtgtcgattcttgttgttctgttaaccattggagatcttttgttacgcactgtacttgcttggtattgctcgtgcagtcttctattttcttttcacgttgatattttcttttaatcacattgttgtgtaatcatattcttgaaaatcaattgattaatttgttgtattgaaatgagatgtcttcaaaaaatcaagtggtttctgaagtgaatttattttttctctacggaaactcttccttttgttgttagcactgactgggagagctttatttatgttcctgttgagactgcaattccacttttatagttggctttgttaaggttcatcgtttttgttagtggattatctgtagttggtggataatttgccttttcagttagtgaggtatattcattttctttttctaatttatcggtcagattgagaaagggttttaaggctgactgaggttttctttggatttaccattatgtggactctgagagagaatattttgttctattgtcatcactaagaattacaagctatctcattacttggggttggtatcccttgtgaagaattcaattactgagtgctgacaaatgttctttgacgtatttgtaggcttctttgga

SEQ ID NO: 83039 - DNA, 859 bp, Citrus sinensis
  Intron number 2 from transcript orange1.1g037193m (locus o range1.1g037193m.g) derived from phytozome v7.0 (chr-ID sc affold00024; pos 285166 to 286024)
acaatccaagtaagtactacttacaggaaaaagaaaatgtttatataaatcaaattattcaagatattatttttatgttgagattttaacatgcattattttccctttttttgtgtttaattgcaggtaatgctacatgtccaatgttttgagattattttgcctggaatagttcattgatcatgcgggtgacctgctaattaattaaggggctagctcttgtaatcgaattgatgcagattcattttttctttatacaaattgatcattacaagatgttcaattaataacattagtagtgacattaatgaattgatgcaaatactttgcttttaatattatttgccaaagcaatcctaaatggacattcatatcttcacatcattattgcatcaggggcctatttgataaaacgtaaaactatgtcctcagttgtgaaattataaacaaattaggtatctgatagtatttttcgttccgtgattgttagggcatggcacgggcttagcccattgccatttgcctgcaagtgctgggcttggctctcgggcctcagcacgaggtctacccgtcttaaaaaaaatttacaaactaaaatgaaagtttttctgctaagctacattattcttacatactgatagttaaaatctaatagagtgatactacatttttttttcaataatttcttaatcttcacatcccttttactggtataggttttttttaatgaattatatgagattattagttatattataactcatattatatgagaatatcttctttaatattcgagggatgtctttaaattacatgagatagtcaatttcttaaattatataaagcaactacttattag

SEQ ID NO: 83040 - DNA, 350 bp, Citrus sinensis
  Intron number 1 from transcript orange1.1g012565m (locus o range1.1g012595m.g) derived from phytozome v7.0 (chr-ID sc affold00003; pos 31224 to 31573 reverse strand)
tttgttcttcactgattcaacgactctttgaattggtgcgcattcaaaatccctaattttgttttcattttttttttcttttcatctctttttgtgctcttgatctgatttcttttttgagatctgggtttcctttagttgattatagaaatgggaacttttggattctggtcttttgggtagttgaagttgtgtaaagcaaatgatagtttttcgtttttttttttttttgggtaacagtcatgccagccgttactgaatctaaattaattgtgtggtattgattcggtggatctttgacttttctttttgcaggttgatctgattggttggttgattacttgctgttg

SEQ ID NO: 83041 - DNA, 730 bp, Citrus sinensis
  Intron number 1 from transcript orange1.1g044769m (locus o range1.1g044769m.g) derived from phytozome v7.0 (chr-ID sc affold00278; pos 146053 to 146782)
cgcctaaatttgttgggtccatctcggttgggggctcaaaaacctaaagtccaaaataacttacttgatgtacaattaccattaaactttggacttgaatgaaatttgtcatgaagtttggttttaaaaatcaaccggcagcccagtatcacaaccgcaaaaatgacgagggaagaaaagagaagtcagtggcatgacattcaattggacgatcaaaaaataaaattaacttttttttctcccaaattttaagcgtaaattattggcatcgcactctatagttttattgttcttaatttttattttatcatcttgttacttattatttgagatactcacttgttagagagacattaagttgttattgtaacagaagaatattgaaattctttgtgttgttagcctctagtattatttggagaagaatttatgttgtaatcccattaatatagtggaagattatatcggactactatcccgtagtttttttccactttgggttttccacgtaaaatttatgtctcttgtggttggtttttgctttgaattttgtttgtttatttttcagcctattcatttgtagtacatatcctattttgattacacaaagagagagagagttttgattccacttaatttgcagctgcttacgtgagtcccttttcccaacaaaatttaatttcttttattccaagggtttgtcaagccctgatcttgccaaagtcttata

SEQ ID NO: 83042 - DNA, 795 bp, Citrus sinensis
  Intron number 1 from transcript orange1.1g018056m (locus o range1.1g018056m.g) derived from phytozome v7.0 (chr-ID sc affold00019; pos 1707481 to 1708275 reverse strand)
ccgtgttcctcactttcatcgctattgtctcactggtaaattctctcctattcctacttcgtgcttttacgcatatttagtcactttgaatctggtatatcagttaatgtgtatgatattatattctgtttggcagcacggagctttttctttctttcttttttttattttttttcacttcgttgaccatttttggccaattatatttgattttatggtcgcaatttttttctcatttagtccgttttaggttttaatattgacttaacatcttctgttttaatcgtttgaattcaatcttgtagctttgcaaatattaagtgtgtgatcccacctgagtaaagggctttccttagagtgaatcagtgaaatgaagaatgatttcgattggcttgttgttaagttcaatgttgttctaaaatgaacagttcatcaatgtattatcatgggtggtgtttttaatgtgtttctcttttgcttaagatttcaataatttgttatttgctaaattatttttttgcttggtgatgcagaggctttaatgtcatgaggccaagcaaacatttagaattacataattaattgtacttccatttctatgacatcagagaaaaaagttgaattgtgctatatttttttccaatgacctttttcatttgtttatgtatccttgatgttttctaagtgtgtcagattctaacaagtctgtttatataataattcacttatgctgcactgtatctaattttaaatattccagatattgatcccatcatcgtcatccgtcaaaagtag

SEQ ID NO: 83043 - DNA, 626 bp, Citrus sinensis
  Intron number 1 from transcript orange1.1g018042m (locus o range1.1g018042m.g) derived from phytozome v7.0 (chr-ID sc affold00224; pos 226585 to 227210)
aggggttatttttggctacgatattggaatttcaggtctgttcattcctttaattctatctctttccttggtgcttcttgctatataaaaatatcacttctctgcattaattttgtttgtttggtactatctttgcattatgtaatatgtcaattcattaaatgtatattggaacgatgatggtaattttaatctaaaagatgagtcaaaaataaagagaatattgagtggcttttagtacctgtttgcttgattagtcatccaaattcgacttataaagatgaagatttgatcatgttgatgataattttaatttcaatcaacatgattaaagattcaattttacaggaaagaaaatttaaatggtttcacgtggattgcttggcgtgatattgacatgcacaaatggtggacaacaattgctaaaagacttaagacaattgccaattgttggcacgttagaagtatccgacaaggagaaaaacaaaacataaaatgattagataattgaaaaaactgtaaaataaacggtttctatcacttgagcccttgttgtttgtaaaaatttaactcgacgaaaggatgcactgatttgtgaaagtaaatgtgaaggtggggtgacatca

SEQ ID NO: 83044 - DNA, 850 bp, Citrus sinensis
  Intron number 2 from transcript orange1.1g000224m (locus o range1.1g000224m.g) derived from phytozome v7.0 (chr-ID sc affold00277; pos 117876 to 118725 reverse strand)
acacgggttgatacgcgaattcaccccgctcaaccgtaagtcttcagcgacctcagttctgtttccataatagtcttctgttttgctttttgcagtcttcagcgacctgttttatttgcaatccggatataagtctttgtttctgtaaaatttaatacctaaaagattagggatattcctttagtggagatttttcaattaatatatattatccatgattttgtaaatattaatttttgttgagtcatattggggcttgtaaaaaggatgatccttctgttaataaatagaatgggtcactccactgaatcggatagtgctttgggttggatacctgcatccttgatcccaataggagctatcaaaatcagccatggtaggtagactgtgatggcctcggtgtttcagggaaagggctggggtgatggactgagtccttaacggatagaaggttcagtgtggccacacgccagcagaggttttgcctaggggagagattgttgagtcgtatcacattccccaataaaggcatgatcaatgcatttacaaataggatgagtcattccacccaatagtttagtcttttagattagctatcctcatcctagtcccaacaattttctcaggttaatgttggcagagaaatataatttgattagttgaaattggaggttgtcttcaaaaatattgaagatgatattgaaattctattgaattcctgttcgaaacacgaatgatgtgctacccagcaactgttaatcacataactgatgggcatttagcttcatggtttgagagaaatgatgccatgatggttttgttgaattgatctaggtacataaggaaagac

SEQ ID NO: 83045 - DNA, 335 bp, Citrus sinensis
  Intron number 1 from transcript orange1.1g000224m (locus o range1.1g000224m.g) derived from phytozome v7.0 (chr-ID sc affold00277; pos 118750 to 119084 reverse strand)
tcaaagttcgtcacccttttgttactgctgctgaggtctcactctctctctatgccttagcaatttgacttcttgatgattttctgtttttgcctttgtttgaatttttgacttcgatcgttgactttcatgaactgttgtattattgcttgttgtgttgaatttttagttaaatttgtggttttgtgtttgttattggtactaatttcagattttctttttctatgttttcttggctaacgtatgactgatcaaaagagataaatgccgaagtggattaaatgtgagaagtaatatttttgttattttggcagattttgcttcctacggttgta

SEQ ID NO: 83046 - DNA, 571 bp, Citrus sinensis; identical to SEQ ID NO: 79313
  Intron number 1 from transcript orange1.1g003641m (locus o range1.1g003634m.g) derived from phytozome v7.0 (chr-ID sc affold00003; pos 302044 to 302614)

SEQ ID NO: 83047 - DNA, 630 bp, Citrus sinensis
  Intron number 2 from transcript orange1.1g047805m (locus o range1.1g047805m.g) derived from phytozome v7.0 (chr-ID sc affold00050; pos 180746 to 181375)
ctcctccaagagtcttctatttcataatacagtttgtatctcaaatgaaattcacagctatccttgattgattaggtgatgattgactttcttattcatggtacttttatatttcataatttttattacttgtctctctatatttttcataatatctctttattcccttgatgtcaaaacttttatttaaaaaaaaaaaaactatatcaatgataaaacaaccattgcaatttatttattttgactgaaaaattatgaataatgacatatgcatcttcttacaacattgttgatattgttcatctccaattgaattacctccttttgttttctctcaagagtttaaccgaatagctttcaagtcaagaaagggacaacctaactctgaatcttggcaagtaggggggctagaaaataatttgtggtttgaccacgcctgccttttttaaaataaacgcttaatattgtaacaaaaatattacgaagttgatgagggataactgtaaacccaaaaaactggggaagtgtcaatccccccacattttcatgatgcttgtaacaaaatcttttattttgattttttttttccttgcaagcagggacacgagggaaagttctctgtatacgtcc

SEQ ID NO: 83048 - DNA, 1000 bp, Citrus sinensis
  Intron number 2 from transcript orange1.1g038943m (locus o range1.1g038943m.g) derived from phytozome v7.0 (chr-ID sc affold01088; pos 5748 to 6747)
cacttgaggtgtgttgcatggagtagtaaaaaggcacaatctcggggtggttgactcaccaaaaaagttgccctcatcaaaaggtgccagcctagagaaaacaaaatcttagaatattgacttatcttaaaagttatccctactaaaaggtgctaatccagagaaaatagatcgggctcgaaatgagaattcaattgcctccaaaacgtctacacaagcttccattggaaaattatgagtcagcatgtgcagtctattagaaagtttatactctctcataagatttcatgctggaaatattcaaatttggttgcaaaataggagttagttgtggtatttgtatatgcgtcttatactgatttagaatttacttttccatttcacattgtagcacaaacttcaccttttcttctgaaaaacataggagattacattagacagctgaagaagaactgcagaaggtatggatttatggtcattgcaactgtttgctttcaatcaaaatcattgtgcttgtgtttccaaataatgtcctttgggtttgatatctactgtaaatcacgatactgatttcacctaatgaaatatttgaatctgtatgaaattgacaattgattcaatttcatttaacgcattggtgaaattattctgtctctgacaaggttttccacatttacctaatattgtttgattccttaaaatctttcttacatttcaattcgggagctcatttccagaatttagaaactttgccttcactactactttgaaattgaattatgagaaaagaaaatatataatgcatctcatgttgtacatagttttcatgtttttatatgcaaataagagtaagagccagattctaaaaagctaaattgttgttgtgattcaatcttaaatattcaagatggagtagtgtgttgatttaatttgcgggcttattgatatctactcttatattacaggaaggagtggaaaatttttcaactaaagtaattaa

SEQ ID NO: 83049 - DNA, 388 bp, Citrus sinensis
  Intron number 1 from transcript orange1.1g017182m (locus o range1.1g017182m.g) derived from phytozome v7.0 (chr-ID sc affold00439; pos 87309 to 87696)
acaatagttacaagtgtttatttaattaatactaaaaattcttttctattttgtaaaccgcgagtttagtaaaaattcctaataagtttacattagaaataaaaagaattcaatggaattttaggtaaaaaataatattaaaaaaattgtgtagcacgagatttatatcgagtccaaaacgacccaaaaaacaaaacatcatcagcgagttttgactgtcggcgctctcatgtgaacttgcttcagttactgacaaaaaggtggctgtcatttttgttcttttatttaacaaaagccatatacgttttatttaactcattttatttaatcacataacgtaatagacaaaaagtcaaaaatagtgatcacaagctcagttagcaaaatt

SEQ ID NO: 83050 - DNA, 849 bp, Citrus sinensis
  Intron number 2 from transcript orange1.1g017182m (locus o range1.1g017182m.g) derived from phytozome v7.0 (chr-ID sc affold00439; pos 88180 to 89028)
ccaccaaatcctgaagagctgcctgctgtttgtaggtatgtaatacatacgccttcatttatggtcagtttggtattcatgtccagtagttgtgcggcttgtgccgcctaattaaggtcaaagttgctatagtgtttggcaaatatttaattacaactacgatttaaaagttaaggtatctaacttttaattaacagtagctatagctttgaagtcgcaacattataatattaaagagcaggtgcggctcaactaattttggggtcttaggcgaattgttttaattaggtcttttaaaaaatttgaggtaaaatatatgtattagttttactaaaaagttatttatttaaaatcaatttttctagttttgttaggtacaaaattattgatcaaatttttacattctaatttcaataatatatttttctcaatatagttaaatcatttaacttttcttgtgacttagttgatcttaaataagtttttatcaattttaattacttttgacaaatttaataattataatgttggagagaaatttggggccttcatatatggtggggctctagacaactgtctaagttgcttagagaaagagccgccctgttaaaatgagtcttaatcaagatgaatgtttatatatttattttcaatcctacccattttgtttttttaacactataacaataattttgcaagttttattagatcacgccaattatatgctcgtaaagtttccttacagagggaaaacttttgccccatatggttcatataatttattcacaaggtaatcaaaattttatcccaggaaaagaaaactaacatcatttcaattacagaagtgta

SEQ ID NO: 83051 - DNA, 920 bp, Citrus sinensis
  Intron number 1 from transcript orange1.1g025161m (locus o range1.1g019915m.g) derived from phytozome v7.0 (chr-ID sc affold00028; pos 189977 to 190896)
aatttcacaaccactacccgtctcgatagtgaaaggttatatcgatgtggcattaagccaatggctagtgccaattcagtcatgtcttttgctgatgcatgtgccctcaccacctgggaattaaaattgatatgtttaatgcttggagacttcgagtgacaattgtgtgtcattgattatatttagtaaatttaaccatccacatagtttcgccgtatcacatgatccacagtccacacaccgcaacgttaattaattaaaatcttttttgttttttaaaagagcaaatatattcatatctgaactaccaattaatcgcatacaacaatatgataattttaaactttgcatcttatcctttcaggatttgaactcgaaaagataggaggtcgaaaaaatttaaatcaattttttaacttctttttttttaagatttaaattatggtggctaattaaataaaactacttaaaaaccgttatgacatataattggagtcgatatttcaataatataataattgcataattgaaatatatgattttaattgtagatagacaatatttatactcaagacattttcgtcatttcctctgcacaacaataacattgaacctcttggtttccttactcatcctactccttaactgaaccccaaatctctctcggtcccggacaatgcgttgttcgtttaatattttctctattcttcatcgactaatttgaaagcctaagctaaagattgaaaaaaagaaaaaaaaaaaaaaatattctaattaatgtacgtgcagccaattaattacatttttctaatttaattcttgtttgtttgagttaaaacttattaaaggaatcattaactttgaatacgtttttcgtttctaatacttttgttttgtcgggtaatttacagagggaagac

SEQ ID NO: 83052 - DNA, 687 bp, Citrus sinensis
  Intron number 1 from transcript orange1.1g018098m (locus o range1.1g018089m.g) derived from phytozome v7.0 (chr-ID sc affold00248; pos 111230 to 111916 reverse strand)
gcctaatactggtgtccctcttcattacaaggtgagttgtttatgtgaatgtgtctgtttctgttttaaaagttgaccttttgattatttgttgtgggacaaaggttggttctttgttataaccttatgattttggcacgcattttgaagggtgtttgtgtttttgaagttgtgttggttatgtaaatgatgggttccagttgttgttgataaagtgacgctaatgatcttgaatcttgatgaaggggacaaattgtgggatattagtgtattttagacgtatgggaggagataatattagaagggcattgttggttgttgaatgtctcgtgtatgtagtttgatggttggttgacctttttgattgtgagttgttttccaaatttttaggcaatatgtggattactgactttgtttgaagcatgtttgatctcttcatcgaagatttatcatctattcgagagtgcaaagactccctaagcggtgataaattttgatataagattgtttcaagtatcaatttgatagaatatgctgccggctagttgtttgcactgtaggtttaccatttactttggtgtggggggcagtgattgcccggcatcttttatctaatgctgcttttttagtctaattaggtttatgttgtttcagggagttcgctttcatcgtgtcatcaaagggttt

SEQ ID NO: 83053 - DNA, 674 bp, Citrus sinensis
  Intron number 4 from transcript orange1.1g021456m (locus o range1.1g021456m.g) derived from phytozome v7.0 (chr-ID sc affold00071; pos 387396 to 388069)
gttgcttattcactctcgctctcagtcataagcaggtgatttctctattgtgcaacttctttcaattatatctttttaaatttatctttccaaaccatgtaagtcaaaccctggactgtttatttgattccattaagaggttttattatctgtctataatctgagtaaataactgattcatgtgatcaactaaatcaaaggtgcggggatctctagagatgtaatcttttatcatatcatagactcatggatgaaatcttgtgacttttgagcatattggacagatttctgcttgggctaatttatttcaagataagacagatggtgctagcatgttttcggtaattttgattgtagagctattattgaacatttctaatttcttggccgtatacttgcattagaggaattttaactggagttgggaatgggttatgggcttgttgagttggattgttgagaaagaccaagcacgttgctagttatttacataatacatatatatcagctggcgatctctgattatatttcatttctctagctaattgattttaatgagtcattttatttattttttcagaataattctcaaaattgaaaatttttcttttctttttgtttttcaatttttttttttaattttgatcattataattgtaaatgttgtggtacag

SEQ ID NO: 83054 - DNA, 752 bp, Citrus sinensis
  Intron number 2 from transcript orange1.1g011677m (locus o range1.1g011677m.g) derived from phytozome v7.0 (chr-ID sc affold00026; pos 332284 to 333035)
cgagcttcggtccctagcggtgatccctccggaatgtaagtttcactttcattattcttttcaaaattcaaacataatcatttcatttatttttgtgagaatttccataaacgtcttgtgcatatacatacatgcaatatttgccaacttgaacaaaaattctggtaaagaaacgtaaattcagttgtcacagaccgtttctttttttgtggagagattcaagtgttgtggcttttaactttacacaaccagtatgtaaaatctttaatttatcagacgttcaattgtattcatttttatttattctgctagagtctgtaggaatatcttatatgtaattgtaacgtttggaaattcgaacaaagttgttggttcaaaaaacataaaattcaattatcaagatctggatttttttggttagtatctcaactaatgtgtcaccaattaaggacgatcatatatttagtaaaatctgaatttattatcttgccgtattgtgttgctttgaaactttgcatgcgtagcattactcattatgaaggccacaactattaatcactacttgttaagtatatgtttgataaatattaattcccaagtaaaagtgagtgtttaccaggtactttagttatggtgcattgaaaattaagtagaagattacaaatatttcttaaaatgattttatttttagttggcacatggcgttatcctgtttaaaaatcatttaattagtgttgagtgttaatctaggt

SEQ ID NO: 83055 - DNA, 757 bp, Citrus sinensis
  Intron number 2 from transcript orange1.1g035868m (locus o range1.1g035868m.g) derived from phytozome v7.0 (chr-ID sc affold01765; pos 1364 to 2120 reverse strand)
aggtaattataatttgtacgaggatcatctcttattgttccttttcttataatctctcagtgaaataaatggttaagattaaattttataatttaatattgacaattaactcaactttttcattttttttttctattcaagcattttttattttatttgcagtcactttattattttgaatttttttttaaagcaaatagattttacaatttaggatttattagaagtctgaactcaaaaacctataatatagcctaaaaattaaatttttaaagaaaaaggacaaaacccatatttatttttttgttccttatttactgttcaggattcgaattcggacagcagtcaaatatatatatatatatatatatatatatataaatatttgaggagatatatagtacgtgcctgttcccgcatttatgagatcaaattttgttgagttttccataataagacacattattgtgccctcaccattaacggatgccttagtgacatgataattggtaatcagagagcttcgctttcaatagtactttccgctccatacaaatcatctgtttaataatttaattacatattaaatttagacgttggggcacgctggctgcttcttcccaacaaaaaataaattaatagtttggtttctttaatccaaagtcacgcatgcataatagtgattttaatgatatagtaatcattattttatgctgaaacaggagattggcggttacctacgcaaaagaaatcaaaa

SEQ ID NO: 83056 - DNA, 998 bp, Citrus sinensis
  Intron number 2 from transcript orange1.1g027343m (locus o range1.1g027343m.g) derived from phytozome v7.0 (chr-ID sc affold00014; pos 358401 to 359398)
cctccactgattcctcttcagatttagacacagaggtcagttcaaaaaacggaagccatttgattcattatcactgtacttactttctgctaaattaaccagtcattagtctcattttcttttactgctcaatttaacctttgggtgctttttttaagggtaatgtaatgtaatttcgtgcctctcattcataattcaatatttaggtagtagttcttaatttttgctcggtatcatgattattttaattgaagatgccagaagaaattagggtccagtgtctgttagaaggacataacttgattaaaagatttcagagttcaaattattttttgtccaaaatctcgttgctgttggtctggactctggaatccgcagttagagattgttttcacctaactcattttttattgtcttgatatcgataggtatttaaactattaaggttgtagtatttgtttcctgaaaagtcttgtgtgcttccggtgttcactcttgtttgccggattcttggcatgtgtattcttcaagtattcatgtaaaaataaagattcaccagcaaaaatccacagattatgtagtatacaccgggatcaccagacatgaagctacaatgtggtaattaaccttgtaattggagtgtgacagttcataaattcagcaaagaaagctgttgtatttcatcgaatgctgcatatgcagtttctccgaaatgtaaatccaattgaacaaaataacgtgatacagaaatttctgaaattcagatcaccaattggaatcataattctcacaacaatctgacatctccttgggttacaaaagatttctttgaaattggtgtgaagggagctactgtgacttaaatgatttttcccttcctgttattgtaattttttatgtgaatgtacgacactacctgctgtgaaacagtggatagataattcgatggcctgaacactagtattgtaattgatttcagtctacagggtctttctttc

SEQ ID NO: 83057 - DNA, 692 bp, Citrus sinensis
  Intron number 1 from transcript orange1.1g045866m (locus o range1.1g045866m.g) derived from phytozome v7.0 (chr-ID sc affold00009; pos 2245968 to 2246659)
cgttgatctttctggacaggtgttttgattgattcttcattctcacgtcacttgtatgatcttgatttctttgaattaatggctgattacacgtccgatcttcatgttgccatcctttctgtgtgcttgttaatttctttgtttaatcatctattatttgtttttaaaagaaatgttcacgaggaaatctgatttctgatcatcatgtgtgtatctatccgatttctgaaagcttgaatttctttagctttgcatgtgcgtggatagatttattgacttactttgcctgtaccaaaagactccctcttcttctctgttccagagatttccaaacagctgcttatggatttagctttgctagtcgattccacctttttatctttgtggcgggggaaaggaagaaattggggtttcagaaacaaagatttgactagtagtcatctatggacaaatttttggtcttcgaagcaaggatggttggtttaagaacacacggatgatgagaatatgaccttctcattggtatttgaactcatgtgaagaacaaatttatttatctaacttctggaattttcctttctctgaagccacaatcatgattggtcattgtgttgcactgaatgaggacatcaaaatatgcttgcattggcatctgactcttttttccactcttcatgatgttgatttttcag

SEQ ID NO: 83058 - DNA, 689 bp, Citrus sinensis
  Intron number 2 from transcript orange1.1g018272m (locus o range1.1g018272m.g) derived from phytozome v7.0 (chr-ID sc affold01610; pos 12186 to 12874 reverse strand)
ggctggtaaggattgttcgactgagtagaaccatttaagaaaccagcttagtctttgagcatgttcttgggttttaacaaaattatgtttggtaacggttgttttttcgctttcattaataaatttctcactttagcaagttcgcttgaaagaaagaagaacaaaacacacacacatacatatattgtgtctttctgtagggaggacgttattcattaaaatagaaaaaaagcacaaatttcaatgcattaaaaatatattttttaaaattttttattaataattaaagtgagaatattctcactaaagaatcaatatacacacacccatacattccatattggtcatagcactcacacaccacacttttttataatcaatttaccgaacatttacaacttctggttatagtttaagtctatcaaataccttgataaactaattttcctgaaagctggttatttgagaattttgatctataattgattgatcatttgaactctgaagcaataccaatcaaacatgccctggtaatgcacaacattgtgacataagctttatgcatgattatttatattcttttgaaattgtttgtctttgttgtgtatatatttatctccgttggaagccaatgcatttatgttgttattgaaggaaaattctcattcgaaaacgaaagccttcacacc

SEQ ID NO: 83059 - DNA, 575 bp, Citrus sinensis
  Intron number 1 from transcript orange1.1g007024m (locus o range1.1g007033m.g) derived from phytozome v7.0 (chr-ID sc affold00068; pos 543582 to 544156 reverse strand)
ggtagaataaagcagacaggtaattaactgactcctcgattctgacgaatccaaactccttattccttttaatgttcttttgtcttttaattcctcgaaaaggtatgtaaatctaatgatctttaatttcaagattttgttttgattgcttttggttagagacaggtaattaaatgtttaatcggggaacgatcgttacaatcgaatcaaaaaattgtcaaatctgatttgttgatcgactgtgctgggatttttttttttttttggttttttatattgaaatcgtagaaatttgtaagtttcttctaacctagacctgtcaaatggtatttttggtgttagagcctgatttttgctgcatctgattggttatttgttgtttaggtttcatatttttgctgtatctgattaggtattgaagctttggttgttgcggcatctggttgtgcttttggtgtgaaattttatatttttgctgcaattgattgtggctttggtgttaaatttgatgtccttttcttttctttttgttttttccccaccttctctttgcaggtattttgtgaaactccata

SEQ ID NO: 83060 - DNA, 813 bp, Citrus sinensis
  Intron number 3 from transcript orange1.1g028212m (locus o range1.1g028212m.g) derived from phytozome v7.0 (chr-ID sc affold00314; pos 61984 to 62796)
cctctacactttcttcttcagatcttgatacagaggtcacttctttcttctcagttgatgcctcggttttattactatgcatttaaaaacttttagcacggaagcgcagatgcattatgttagtccaggcatacaattatttctttgagtaatactatgcatgcatagctaggataacaatcaaatatttaaacttgtgtgatcagttaaataaactcgtataaaaacctcttgagcaagtcatcgagcagtttgaatagactttatttgtacaccattattgtattttcattcaagtactagctttgggtatgatgagtaccagattcatttccttatcttttgattttgttttctttaatctttagttaatttcacggaacaacaaaagcaacttaaaatcccactttactctttccacatgggccgtcatgatggtgtttttgactgcgcttgttacttccactaaacccttttaaagattgcagatctctttgtttgagttaaaatatacaaatatggttgtcctcacactcaatgaggttccatgaactgaaaacaagaaagagatgcctactgcctcttggatctctcactgattagaatggtgaaaaaggtttcttatcacgcatgcaagtgaacctagggtcccagaacatgggctaacagatcaatgaatctgtcattgctattaatctctgatcagtcttcctttgtgcctaaacttttgttaatcaattcagatacaacacattctacttattttgtttgatatcagtccactggttcctttttccgcgacaagagcatcac

SEQ ID NO: 83061 - DNA, 258 bp, Citrus sinensis
  Intron number 1 from transcript orange1.1g007227m (locus o range1.1g007216m.g) derived from phytozome v7.0 (chr-ID sc affold00019; pos 1686390 to 1686647 reverse strand)
tcgagtgttagcttttgtacacaagtcatcaggcaatgccttgcttttcacgaaccttatcttgattctatttattacattatttaagtgggacgagaataatttagcttttgttgaagtttacaacgttaagagttaataaatttcaatatacttgctttgaagtttcaacttgcactctgggttctgggtttatgaagttgttcttgtcggcttattattttatctgtttttgattgattttagattgttggtggg

SEQ ID NO: 83062 - DNA, 570 bp, Citrus sinensis
  Intron number 2 from transcript orange1.1g038806m (locus o range1.1g038806m.g) derived from phytozome v7.0 (chr-ID sc affold00238; pos 62386 to 62955)
acctcaagcaacaggtactgtgttatttatgttgctggaacagtagtgacatttgtttgttgagtgcccactatttataaaacatgagttgtgacatggaatgcagattttctaacatggaaaatagtaatttggttgcacgttctgtttgatgttcgatgtcatcagtcgtgttatcgtgactgtttcagggcgtgtactgcagcaaatgcctttttcctttgagttaaagttgacaaagtttaattggtccttggtttttgttaatgattacaaaggtatctttttttttttgggggggtttgtcaggttggagtactttgtagcgactttgtgttcaattatgttattcttttgggattttaagcaagggaaacgcatagtttgctgtgagataagctgttgagaagaattgagtttatggatttctgtatctttgtttttgttatgcatttagttgttaggatctgtggagttcagatttatggtttgtgtgggtgtcttggttattggaattttcctgtggagttatacgaacatttccttttcttgatgtgcctgggcaggaaa

SEQ ID NO: 83063 - DNA, 679 bp, Citrus sinensis
  Intron number 2 from transcript orange1.1g046376m (locus o range1.1g046376m.g) derived from phytozome v7.0 (chr-ID sc affold00023; pos 940752 to 941430)
caagttgccaaagccgcctttggttagtacatagaaagagacagacatttctacaatattttaaaatgcaaatacaactgaatgttaatcaagattagacggcattgtctagttatatataatgccctgtcaaacctcaaatctccaaaacccaattcaaagtttttcatgtacaaaaactttctttttttttaattaaagcagaatgacgctgagatcctttatatacatttctcacttttaccacacaggtccccactttttttaattaccctgtacaacctagtttcaaaaaatctacttttcagtttttagttttttttttttctattatactcctattatcagtgttttgtaatgtgtgtttaatatgagagagcctttggagctcctggagcaaaccctcatccatccaaagcttgttacgtgtgtatgttagaggtacaaagaattttgcacatggaaaattcaagtaaaatttaaacattgaaattacgaagccggagatgtgcataatgagtaattaaggaaaaagtatgaaccagagtgttgttctctcccgtttttattcctttttcttcttgtatcacgtgttgaacggagacttgtagctataagtaaaagagacttatatatgtgtgcagggccgaagctggcgaaatctctctgtgtatttcct

SEQ ID NO: 83064 - DNA, 512 bp, Citrus sinensis
  Intron number 1 from transcript orange1.1g026594m (locus o range1.1g022320m.g) derived from phytozome v7.0 (chr-ID sc affold00068; pos 3423 to 3934)
gcaccccgcagcaagtgtttctcgctccaataatagtacgggttttttttccaagatcaaggtactaatttttctctggattttgtattttgtttatctttattcttcttcttttagatatttttattgatttttaatttattttttcgcctaagttaattgaaacaacaaatatatgcatcatctactttacgtctactgtgaatacttagattaatgcagagatacaagattcactttggtaaaatcaatgcatggtttttgttttgtttattttcctatcatggttttgaatctcggtaactagttagtcttttttgagacttccgaaactcacatctatgagtttcgattgttatttctttaagttggattaagaacttttctgttattgctggatttagcaattccattgtaattaaattgagatttttattgtttaaattcatggtattcattcgtttcaatttatggcagaattctacttgttttagttcatcatcatccgacac

SEQ ID NO: 83065 - DNA, 432 bp, Citrus sinensis
  Intron number 1 from transcript orange1.1g039105m (locus o range1.1g039105m.g) derived from phytozome v7.0 (chr-ID sc affold00091; pos 33690 to 34121 reverse strand)
ttctaaccaatcattctccaacaacttgctcgacggtatgtcactttattattattattcttcttctcattcatctcttgtaatttttttttaaatcttttacgtttgattcctcgattgctagctttatttttggaaattgaatcttacttgaatgttcaaacaaacaaaaactaaaatagaataaaatgaaatatggtaatggtatggtcatgatgttgtgtcattttgctggctaacagtagtgttactgttaattacaatgcgctaaaaaatatgctactgttgttatgttattcggtttcattttgaattgaagtcctttattttactcaattattattagagattttgtggactttctaatttttatttttggttcatgtgtaataactagatactgtagcttcgctcattgagagggcgcaaatc

SEQ ID NO: 83066 - DNA, 599 bp, Citrus sinensis
  Intron number 1 from transcript orange1.1g016306m (locus o range1.1g016306m.g) derived from phytozome v7.0 (chr-ID sc affold00005; pos 2330812 to 2331410)
tcatccgggttgcaccaagcaaggctattgaggtgagtgatctgccttcgatattgtgtttctgatattcatgtaatttaacccaatactttattctgtttaattgatacactgctaagattagtgatacacacacacacgcatatacatatacatatacatatattttacctatgtattaaaaaggacttgggactctttttataattgttctgaaattctgtctggtgtattttgcttttggtgttgtttaacccaacatcccatgtagggagacgttgattttgtttctccttcttattgttacattccatttcttcaagaaaggttttttttttaattttttttggaaaaaagaattacctataattttttcaagagtagggttcagtgatcttgaaattattgattgtttgtttctctctgtctgacttgttgacttaccctgtatataatctccttttggcagtttgctttgttatttcattggtatttataagtctattggtttgtgatcaatctaaaaagtgttggctaagaagttacatttgatgtttgtgcaaaaacgttttctggtggtaccctgcagttgtttgctt

SEQ ID NO: 83067 - DNA, 257 bp, Citrus sinensis
  Intron number 2 from transcript orange1.1g015804m (locus o range1.1g015804m.g) derived from phytozome v7.0 (chr-ID sc affold00019; pos 1638888 to 1639144 reverse strand)
tgtgtcacctccgtcttctcttgagcaaaatttgggtatataatgcttgatagataattattgctattgtagaaataagaagattagcattttttttttttttaagaatgattctggtgtaaaagactttgttaaaatgactatctcgggattaagaaacttttttgtggtagtttgattctggtgtccttgatattttcataatactttcttgatattaacaagttccatactaattgtagatcctgaagttgaaa

SEQ ID NO: 83068 - DNA, 671 bp, Citrus sinensis
  Intron number 1 from transcript orange1.1g014869m (locus o range1.1g014869m.g) derived from phytozome v7.0 (chr-ID sc affold00056; pos 266732 to 267402 reverse strand)
aagtctctaggtatacagtgctctaattttattgctttgttatttatttatttttctttaggcttctcccttttaacaaattcatgccctaatactcaatttttgtagttcctttaatttgttagattatttgtcacttctttttttagttcttttcttgttactagtgaaaatgcatgactcatatattatcaatactgtgtttgtcgatggctttgtttcctggttttggggctaggacttaaaagaaagtgactacaccatctattaataagttcactttcaggacccatgtgttaacttcacccttttccggttaccagaatggcttatctctcttctcttacatagttcaagtactgactcgttttcccctttgaaaatgtgtacccttcatttttattgccaatttttctaatttttgccaaaaagatgacagtagctggccgtttgatgattgagtaccaatctgctagttctagcttagccatccgtatcaacagtcccctcaaaacagtctctctctctctctttttcggtttttttttttcaagttttgttttgttttccacttccatctaccgttatcattttctagctctagattgtcatctcgtttcccttttgtgtcgatcatttttaattttttaacttttttttttataaggata

SEQ ID NO: 83069 - DNA, 738 bp, Citrus sinensis
  Intron number 1 from transcript orange1.1g013410m (locus o range1.1g013363m.g) derived from phytozome v7.0 (chr-ID sc affold00101; pos 195411 to 196148 reverse strand)
gactttgaggttttcgacagtagtggtaaggtttcacttgaaaatttcgttttttggttgtatttcgtgatatcaagcttgaaatttgtaaactttgaattagttttgatgattttcaaccccatgcttgtattaagtttgtgcttaagtaattatgagtgtggtgttatttaaactgattaacaattgaaattaagtgaaatatagtcatgaattgatcattataaattgttttcagttgtctgtagcccgtgtatcgaaagaaattaatcagttaagtagctgaagatttgatttgaaagagagatggattaccagctttctgatagcagtggtgagttaagcttaagttacaagaattagttcatgaatcacgtgttctttaattgctcgatttggttgcagtatagttaataattttgtaggttgtgtggccaacaatagtgctagttattgtgtgatagagggagaataaaacataaattcttctgcaggaaaaagatctttctttgtagagttattttttttttctattcctgctccgctcatgaatgtggatgcaagagataacaagaactgtgttagttgaatgggatgagttaaatactttagatgtgccactgatgctggacaaagatatcattttttttttcctttgaaattctttgtttctttggaagctacatgttagacagtctctcttttaatggcttctgtacgagaaaattgcaggcacgg

SEQ ID NO: 83070 - DNA, 292 bp, Citrus sinensis; identical to SEQ ID NO: 80756
  Intron number 1 from transcript orange1.1g004406m (locus o range1.1g004410m.g) derived from phytozome v7.0 (chr-ID sc affold00009; pos 1845039 to 1845330 reverse strand)

SEQ ID NO: 83071 - DNA, 934 bp, Citrus sinensis
  Intron number 4 from transcript orange1.1g021479m (locus o range1.1g021479m.g) derived from phytozome v7.0 (chr-ID sc affold00018; pos 526467 to 527400 reverse strand)
gtacagctattggcagtgcagctcaaacgaaaaaggtacataattcttataatcttaacttaagaattcttgataatgtaaaatggaagaagtagtacttgatattagttaacatgaaatctctgcattttttattcatgcgtctaagctgctgccagttatgctgatatgttgagaaacataaatggagctggaattttgataacaaaaatgtttttgagattttggtgaaagttctatatttggttcctcgattatgccttgtcttactagtgattgtgttgtgttaggagtattatttcagatttatttccataatttagtgacaaaattaaccgaagacaatatgtttctctatgagctatgaactaatctcttcatttaatgactgcttggaagctagagtaccgacgtaaatacttttttatgaaagtatcttgtttgaatctctcttaaaaacaaaattggtaatatggcatatttgataatttgtctacattttgctctggggtttctaagtaatctaaataagtagtggagatcacctatagtatacgagtactatctgttttagttgcaaaacaaactcagaaactctgtcaatcaagagttggtattggcgacaaatttggtagagaggttaccaaaaccacttgaatgttttctttgtgatcataatagtgtaggctgcaaccttctggagatgaaatttctcttcttttactagtttattttcttaatggaaagaaatagagaaagcttcataaatttaacaacagtgagccgcttcatcaaaagaagcattaataggcagttgcaaaggaattatatgcaattcaacttgtttttgttactttgcttgtttgattggtagtgcagctacccttctagaacttgatcttatatccttttctttcaccttcttgtcagaact

SEQ ID NO: 83072 - DNA, 552 bp, Citrus sinensis
  Intron number 1 from transcript orange1.1g038460m (locus o range1.1g038460m.g) derived from phytozome v7.0 (chr-ID sc affold00007; pos 1596172 to 1596723 reverse strand)
ccgctcctcttgctcctctcctgtttacttctcaggttttcgtttcttttgttatttcacgtaaatgggattatattttatgattcatgtattgaattactgttgcccattgattgttagataatggggcttcgattttcctttttttcaattatgagtagtttgcatgttatacatgtataattatggctcgtttttggtctctgtgatcacacacttgaatttggctttttcttttctctttgtttttttcaaaatacgtttgcatgtgtcgtgtacaaggcgacccacttccctctgtgtgaattaatataatatttatttagccaataaagttagtattggggaatttgacataaggatcaaacttgaccatgatattacttcacctaaaaacttaagcttgaaattaaggcttgaaataccttcccagtgcgtattctatgtgcttgaactataagtgcttttgattgcttcataatggatcggttgtttaattattattttttgtgattagattattggccagtgttggaggagatccagaatttg

SEQ ID NO: 83073 - DNA, 927 bp, Citrus sinensis
  Intron number 1 from transcript orange1.1g033787m (locus o range1.1g033820m.g) derived from phytozome v7.0 (chr-ID sc affold00233; pos 220508 to 221434 reverse strand)
gtctgtgagaggttggagggcggaagagatctgaggtaatctaaatttctttatctaattcgctttcaatgtcaatttagtttcgtatgttaaaaaatggaatggatttggtgtttccacgctgtctgtcaaattgtcaatgatctgatttgattagttagaattatgctaaagttccgttaaaatggtgaatgtgtcgagcagactccaccaaaaaaaaaagaaaaagaaataattctttggtggtctggtgtgttaaatcaatccaatcttcttccatcgaagattatggactggtcctacaaatttgcatgcactgatcttttccattaattctttggtggtctggtgtgttaatataagatggacatcttctcttttgtaaaactaattttctaagtgcactaacaattttctgcacacattcaggaaatgataaataatagtcttttgcaaatttcgaatgaaagaatgcttctgctttgttgatcactaattaaaaaaaaaaatcattcagggatctgtaacagagtgattcagcaattttttttttttgtttcccccatagtcaagaacatcaatgacccagcaatttcttgtcagaagggatgttttgtactggtttgtatgttttagtctacctctgaacctgtcaaaatgttgtctttgaggcatcttaatttttagttttcgctgctaattaatccactctctaaatcttccccatctcctgcagcgagagtcagctcgtcagccctcttagcctgaagtttccagtctgtgtggatcaatgtgtataccatcaaacacacacaggagatctgcgctgacagtagcccaaaccagagtccttggaagccgactttgaatttgaaagtcaagagaactgcaattggtaatccaacgaggtaaaatgaacataaattt

SEQ ID NO: 83074 - DNA, 771 bp, Citrus sinensis
  Intron number 1 from transcript orange1.1g019838m (locus o range1.1g019848m.g) derived from phytozome v7.0 (chr-ID sc affold00004; pos 1315485 to 1316255)
gcctcggtttcttcgctcggttcccgtctatataagtaggtgcaatctcgcctctccattttctccaaattaatttactttcttattgcattttgcttttaatcaatttcttgtttctgggttgttgcgtttttctcttctttgatcatgtatgtttgttccatgtatttgatttgtttatatctcgtgtcttatgatattgattgattttttttttaatatttatgagttcttgctctttaatcattacgtctttgaatttcgttaatgcgaataaaacatggggtatttctgaactttgagcttctaatgggtatctttaatttggatctgtatatatttgattctctgtttataactggttttttacatttttttttctttttttgggtggcggggaaatctgtttatttgttaaagcatgatgtttttaaattgtaatcatgttttggaatttgttgcataccacatgcatgttcaaattttataggagctttttgtgctgaatgtaaacgttgttgaatgtagatgcaaagataccgtttataatgtgattgtgaccttgtttgctcggcatttatttaaatttaccttttccttttcttaattcaccttcttttcttatgtttgaccatgaaaaagatatttctgacgctcatatgctgcttgagttaacactgattggtgtataatgtttttccattttactgcttgaaatttactttattatttgctgcaatgtaatctgtgtctgtatatttggttttcaga

SEQ ID NO: 83075 - DNA, 782 bp, Citrus sinensis
  Intron number 2 from transcript orange1.1g013593m (locus o range1.1g013480m.g) derived from phytozome v7.0 (chr-ID sc affold00049; pos 332652 to 333433)
aaccagctcgagaaggtcaatttttcgtatttctgattaatttcatatgctgtttgtgtaatcaaatttatttattttcttattcgaagtttatttgtgataagatggagttgatcatctagtttttgaattttgagagaagtgagtatggatcattgatgtgtttagtcaaccaggtatgtttgttttttgagaaaacgagggagagaaaacgggtgtggaaatttttattcattaaatgtaatgaaaagtcacttctgattgtgtgaagccgatgcaatgttgggttgagttgtagtaatgctgcactagtactgaggctctggatcattattgagttacccggtgccgaatctgtatgtgcaaaaacaattgttgggatccgctttgcagcttaagctatttttgagtgtttctgctgcctgtaatgccctcacattgtttagaagattttagtttacagtgacgatttttttttggatagatatgaactgtttgcttggttgttatctaatgtttttaagaaatcgaatggtttatgtagttttgagctgtggagcttccttttggttatttcatttcattgacttttctgaaaatgctcaccttgtgactgttattcagttacatgtaaattcgaggctgtaaacttataatatatttattctcttccagatttatggttcctttcgtcactatgtatttttcctaattggtgagaatgataccggtcctttgcaggataagaagtcattgaagttggggcctgaagacagtttgca

SEQ ID NO: 83076 - DNA, 893 bp, Citrus sinensis
  Intron number 1 from transcript orange1.1g022856m (locus o range1.1g015975m.g) derived from phytozome v7.0 (chr-ID sc affold00034; pos 732122 to 733014 reverse strand)
gcagaaagtcaagaaattgcttcagagaattgaaggtgctcgctttcttatcactttctttctttctttctttcttttttttcccctctaaacaagtgttgcacttttgttctttgtgggagacctatttgtggaatgttttgcctgctttttggtatttagtataattacttttctgaagtggtgtttggttactgagaaaatgtatgaaaaattactaggaaatatggttctgcacgatagaaaaatacctattaactgaacctaaaacttttaccttgaccttagggaagtgtgtttcccaagttggttgctgtactttcatgcccatggcttactactggttgtgtagttctgccatcatttcctgccactattgccttgaatcatctcactctctaggatttagataataagaaagatgatttctctttgtgaattatttatgtgaagtatgatgaaattcattgatggtctggtttgaccaattttttaaccttaattcgtaacgagtactggcacctttggaagtcttgataagtgataacccagaaattaatgatctgcttcttgttcttcactagaggtaataggacataggtttgtggaatgtcctaaacacaagtcttaataatttgtctttatgcatgtctaatttatttgcatttgtatttgtctcctttgttacaggagtataccaagtaaatatagatgcagagcagcagaaagtgacagtttcaggaagtgttgattctgcaacattgatcaagaaactggttagagcagggaagcatgctgagctttggtctcagaaatccaaccaaaaccagaatcaaaagaacaactgcatcaaagatgacaagaacaacaacaaaggccaaaagcagggtttg

SEQ ID NO: 83077 - DNA, 455 bp, Citrus sinensis
  Intron number 3 from transcript orange1.1g025392m (locus o range1.1g024391m.g) derived from phytozome v7.0 (chr-ID sc affold00011; pos 2274374 to 2274828 reverse strand)
acaaattgaaaacattcgctgctggttcttccaaggcaggtatatgacatcatgttacatcagtataaattttttgacttttatgaaatgctgttttgctaaaaaattgatctacgtgtaatattgaatgtagtaacttgctatccacttatgaatattggtatttacaccattgtttcctttggttaactgcttatgttgtggaaacttttgtaacttgtctgaagtagtttggtacagacttgtttatttctaattttttccttggaaatctgctaattcttcatccttttctgttgtttggaggtgcatacactgtttgatttggatttttcttgtgtttatatgattattttttaatgtttcagcttttatttgctttctcacaggttatgggctcattgttctgttgttttgcagaaaatcatattaatttaagcgcttacttgtcttat

SEQ ID NO: 83078 - DNA, 539 bp, Citrus sinensis
  Intron number 1 from transcript orange1.1g018395m (locus o range1.1g018395m.g) derived from phytozome v7.0 (chr-ID sc affold00014; pos 712012 to 712550)
tccttcaaggtatactttttttttttaatttggtttttaatcagttttagaatagccgtctgggttttgtttggttacttttgtctgttgttttgtgttcttcatgggactgtttcatgaaagtagagttgatgtacgagtgtttttcgatattgatacttgttttgatttttgatcgcttaccctgcagatttttgtgatctttttttgttgtgtttgttttcatatgtataaaggtgacctttttacgagactttatttcatgctgcgtgtattgaaattttcctcaagaaaaggaaatttggttaatccagtaaaaaattaaaaaaattatctgttgtttcgtttggtcaagtttaatcaacaaatcctaggtcaattaaaaggagatcagtttttacttagagaacttgttagaattgtggtaccactgaacttggctccatggtttcgttgttgatctctaattgtaattagcttttatttgatgttgtctctcttcaggaagtggtgttgctggaattgtccttcctgagaag

SEQ ID NO: 83079 - DNA, 590 bp, Citrus sinensis
  Intron number 3 from transcript orange1.1g002424m (locus o range1.1g002424m.g) derived from phytozome v7.0 (chr-ID sc affold00173; pos 140880 to 141469)
ctttgaggtatgtatttatttatttatttcttgtttttttaagtcctcaggatgagtattggcatcatatgtatgaaaggtaaacttcaggttcttccaaaaatttcatattgtgctcagctgcaaagatttaatgtttctacttctgttgaaatcattgccacgcatgattgtggaagtgtcttattatctgatttgcacagacgagtatgtggatgcttggttagttactatacatcagtcctggactgtttgtagaaggttatctgtttagttttgtctcccctccctaggttctgcacaggtactgattttaatgatgagtagtctgtgaagctatttatcaccttaccagtaattctattctctctttattcccatattgtaacatttatcactttgcttttcttttccccctcaacttgcatcccctcgcacatcccctcatttgactaaaagtttcaatgtttgtcattgaataaaggatgagtacatacatactcttcaccattgctagatcaattcaacttgtttgattttggaaatttaatgcagggtgtgtgtcatcttttgacaagtatagggatcta

SEQ ID NO: 83080 - DNA, 653 bp, Citrus sinensis
  Intron number 2 from transcript orange1.1g023435m (locus o range1.1g023417m.g) derived from phytozome v7.0 (chr-ID sc affold00017; pos 485075 to 485727)
attttaaggttgtgcaattgtgttttatttttttacctcttaagaagatttaattgtttgctcacgagaaattaatgaacatgccagtttgataggtttagaggtttagatataaactcaatttctttctgtaatcttaaacaaatgcaaagaaagttgatgaactaacttttcatgtaatcacaaaagatgtgctgaatgctctcgatttagatattgagtggacattgtagattctgtcattgctattattaccctgacaattctgggcatatgatgtgttagaaaaggtgggggccaggggtaagaaaagaggtggtaaactgcgctgtgtgtgtttgtatttaaagtgatagttgatcatggaatgaagtaatcagcttctaagtttcaaaatttctccagctaatcacaaaggaagaaatttccaggcattgtcaaaaaatagatatgtgaaatagaaaaaggaaaaaaggaaattcttttttcttagaggaactcaaatgctgcagttttatcaaaatgatttatgatgctcccttactaatttattgcggcttatcattgtttaatcatttgttgcagccattgattcttaatctttcatatttgaactctgtgtagcgtgactataactcggatatactttaaag

SEQ ID NO: 83081 - DNA, 408 bp, Citrus sinensis
  Intron number 2 from transcript orange1.1g048013m (locus o range1.1g048013m.g) derived from phytozome v7.0 (chr-ID sc affold00062; pos 462969 to 463376 reverse strand)
cagataatattgttaaagtttcaacaaatttgcaggtatattactgcccattgcccagcagaagagtttagaaaagtaaaagacatctcaaaatcttcatgctcgcaatccttccctttctcttaatcatcataacaacatgttctgttcaaccaactctgttgcattaataccttgttccaacttcctcagttcatttttgtttccagtacctttttgttttctgtttgaaagttgaccactctaatctgcattattcttgttatcagagtagaggtgagcttgagctttggttcgtttgaaaattgatcatgtgctcctcaagcttgttttttctgcttgaataaaccgctatgagtcgagtgttttgcaggacatagctgaagaagtggaaaagatacagaaagc

SEQ ID NO: 83082 - DNA, 580 bp, Citrus sinensis
  Intron number 1 from transcript orange1.1g048013m (locus o range1.1g048013m.g) derived from phytozome v7.0 (chr-ID sc affold00062; pos 463613 to 464192 reverse strand)
gttgtctggctaatcaggttgattgaaaatttacattttgaactaagttctataggactatgagatgagaaatatggtagactgactttatcattactgaaatttacaagggcataaactgtgttatacttactacggttagtatataccatcactacagaacaaaaaaatttcattacaagataaaagaaaattccactgtaagacaagttttttttttccctttctcttagagattttgtactaattactatacatacattattattctataaatttactgtttgagattttttcgtgtcttagattattactacaatacgatctatgcccttgtgaattctgttgcataaatagtggtgtcactttacctgtttttctaaaaacatactggttactgtcaattgtgtagttcccatttgatcttctgttccctcttgtcatatattttttatctggcaatgtttgttgattccttttatttgaaatgaaattggctgctatcaaaattgatcagctgcttgacataatgactaagatgcatttcttctctataataggtggtgcatcctgcagacct

SEQ ID NO: 83083 - DNA, 460 bp, Citrus sinensis
  Intron number 3 from transcript orange1.1g048692m (locus o range1.1g048692m.g) derived from phytozome v7.0 (chr-ID sc affold00215; pos 61664 to 62123 reverse strand)
agaattctcgaaccaaggttatatttcaattatggttcttgatgtttcattcatggaatctcttattctgatggtcttttttcttagggttttgttctcatggccattgtggaatgctcatcatattgaagggtcaatttgtgatattaattgttaactaggagttctcggtaggggatattataaaggagatgattttctaccgtcatttacacgatccttgtttgattgttttatgaacaagtctaaaagtttcttacctagtattgttgatcatgcatattgagttgtatttaatcaacactaagctgcttgaatatatgaactttgcttcaataacaatacctgattatccattgaacttctcttccttcaattttgaaactccattgaacattgtttgtgttctgtgacatggtatgcagtgggatactcgtttatttggacatataattcgaga

SEQ ID NO: 83084 - DNA, 282 bp, Citrus sinensis
  Intron number 1 from transcript orange1.1g005994m (locus o range1.1g005994m.g) derived from phytozome v7.0 (chr-ID sc affold00024; pos 926639 to 926920)
ctagtgccgcaggtgattctactctctatcttgtattcatattacttccttcttcttcttcttcttttttaatttttggttggtttaatttctttttttctgttttccagtttctgtttggttgccgagaaacgcccgaaaaagaaaaaaaaaagaaaagaaactaattaaatattatttacttctttgcatggctcagctttaatttttaagtgatacaagaggatcaaattttctttcattttagttactttcctggcaaccaaacaagttttcaacttg

SEQ ID NO: 83085 - DNA, 587 bp, Citrus sinensis
  Intron number 1 from transcript orange1.1g039688m (locus o range1.1g039688m.g) derived from phytozome v7.0 (chr-ID sc affold00186; pos 107880 to 108466)
cacgaggaggtatcgcttcaattcctcttcgtttcgtttatttattcttttttttagttaaaatggaattattggcttttttttttcccaaattcagtactgtttcatatgtatataaaagttgtcctcgatcttgttcatgctttcattgttttttgttgttgtctcgaagtttcgcgtaacaaattaacgcgaagtgttctgttttaataaacaaagaatgtaccgttttgagattttgaaacttgcgtaaagaacgtgggaaaccctagcatttatataaaggctcacaagcttttttctatttttaattgattttcgttttcagttatttatctttctttaatttctttcttaaaatcaatgtcagtatctaaaagtctgtgttatcctattaattgaattaaaacgaatattaattaacatgaattgctcaattcttgattacattgcatatatgataaatgttcaagatttattgtagtgtatatttgggacttattggtgaacaactatgtggaatgaaaactgctaatttagtttattcggtgatgcgtttgggttttaaatttttcagggaattgtta

SEQ ID NO: 83086 - DNA, 630 bp, Citrus sinensis
  Intron number 1 from transcript orange1.1g035677m (locus o range1.1g035677m.g) derived from phytozome v7.0 (chr-ID sc affold00026; pos 865802 to 866431)
gaggatcgtgagctggaagccaagaagctgagacggtggattaatctttacttacgctcttttttcaagattagttaacattttttttattagattctcttcctaattagccgagtttttgccctgaaggaattaaacataattgatcgctaacaagaattcatacaagtgtagagcatgactatgtacatgtacaataagtagtgaacgtgtcataaagcctttaaattaagctcacgtaagtttagattatgagagaatcttattatatagaactcttgaattttttttttttcaattttgcatcatgtatatgttcatcttcatcattaatttggataaaactcactttgatatgagattggttccggaaaaagtaacaataataaaagaacatatatcttataaccattgtaattagattctttgaagttcaggaaagttgagtttgtgagagaatcttgattcacatatatattacttttttttgtaagattaattttcttgcattaatttgtttcaacaaaatataagggtttatatcggaagatttctattaacgtgtttgaaaaaaaaattatttcttgtgtggcagcgttcttgcaagcaggcaatattctcagaaatata

SEQ ID NO: 83087 - DNA, 1042 bp, Citrus sinensis
  Intron number 1 from transcript orange1.1g043917m (locus o range1.1g043917m.g) derived from phytozome v7.0 (chr-ID sc affold00058; pos 140077 to 141118 reverse strand)
tgcttattcctgcatttgctctgggaagagcacaggtactgccatcacatgaaacttttgttttattttacgtaacatcataatttctttgaatttgggtaaagctttatggttggtttagttgttgtcagatatttggactttggagattaacaaacatgtagctatcctattacactatacagttatagcatttacaaaactagtgatttttgtaaaattctgcatggttgtagtgtgcttgtttatttgtgtggccttcaatttgtatacctagttatcttttattctgttccattctgccaaaaggtaattaatttatctttcattatcacccaatctaatggaaatggtttccacctttcttagctttaaagaagaaaaactagtgaataggcgaacttcaaattgattggacgtagaaaaaacaaaaaatcatgaatttttgaggcttttgagtattgatattcaatggccccccttttttccttttctttttcagagaaacaaaagtgatggcaacatgttgggtaaggtgttttatgaagattattcatagacaatagtttttttaacaagttgaaaacatcaaaatggtgtctcaactttttttactttttgtctcacttttcctcttcaacatttttctatatagattctgattacctcttcaatcttttgtacgtatatttcaatatattcaaaatctgacatttaagattatttttgcctgccctaagagaagtgagactttctccctagcaatttatattagacttatgacttcatgcggtgtaagattttgctttgatagggtttaatgcataccatagtttttttcccctcctctttcgtacatccacagattaattgacttgcgtccctgttcaatacttcaagagcagtcatggagatattggttatgattttttagtggactttaaggtgtagaatattagtatggaacagttgaacaagcccttacagtctttatatgggacaatactctttattataatgtaggaactctgtatacttttgg

SEQ ID NO: 83088 - DNA, 766 bp, Citrus sinensis
  Intron number 1 from transcript orange1.1g036980m (locus o range1.1g036980m.g) derived from phytozome v7.0 (chr-ID sc affold00239; pos 194749 to 195514)
gtactgtaagcctaactttactttgttctttttttttttaaatgtgtatgtcaaatttatacgcaaagcatatgttggatgattaattaagccattaattttagcgtatgattgatctgctgattaaactagaaaatggaattctagtcaagggtccaaatgagaaattggtcaattataagaatcttctttatctggattgtctgtccttaattgattttgattcttaatttgtgacggaatttatttttcccctggttttgggcatagtaagcgccgataattgctctgtttttgcttgagctattcgattttcttatgaaatgagtcaaatgactaaattaaaacaccatagatgacttgttatgcattgaaatatccaataaatgagttgctaaatgacaaggattaattgtcaacatttgtgctgactaaggcccgtttggttttgagattaaacaactataacttttaaactacaacacttgttattgtggcttaaaagttatatttgttatatactatcagttttattttcataattacatttttttttatttgcagctatggttcaaagttactgcacctcaaataccaaacagggattaaaattttcctcttctttgatataacctcgattttagataagagtataaatatgattcagtgcaatctcttctttgaatgaacaggaaatcttgaagctaacgttaattgtctttctctgacagagctttgtgctggataaagaaagcgggaaaaagtg

SEQ ID NO: 83089 - DNA, 826 bp, Citrus sinensis
  Intron number 1 from transcript orange1.1g014159m (locus o range1.1g009193m.g) derived from phytozome v7.0 (chr-ID sc affold00048; pos 548513 to 549338 reverse strand)
aacgccatctctaccagcacctccaaatttaacaggtatcacgtttgttaaatgcccttttgagttttccttttaatatggttatcaaaatttcctttccttttcttttttttttttggtatatctgatgtgtataccttgttgtgtttgccatgtgaaaaaatacacttcctttgatatactagtgaaagaactggaattggagttaagtatctaagtagattgtagcgtgaatttcaatattgtcgagttcgactgatggaaaccttacttgttggtttagttagtgatagggaactgaaacttgggatgctgagcaatttgtggaacaaaatcagcctgtccttacaacaaaagtatgtgtcagttagattgtacgtgctttctaggtttgtgaaatagaagggctgaagtgcggaggagagaaactgagtgagaagatggggagatgctgaaatcatataggatcatgcaagtagttggaatgaatgcaaactaactatttatgttttttctttggaggctatccggagttgtgctaattttccacattattcgggcttgtttcagagtatttatctgtttgccaacataatgttttgcaatgtccatttgaattgagacatctaggaaatcacacattgcatgtctactaaaatctatagtgctataatttgtgctgggttgttcaagatcagataaaaacttttcttatgaatattaagttttgtgcgcattgcatctggcaatatttatcccacgtgttgattcaaattccttctcagttgtgagggttcagtttttgatcccttgggtatcaatccag

SEQ ID NO: 83090 - DNA, 963 bp, Citrus sinensis
  Intron number 1 from transcript orange1.1g006525m (locus o range1.1g006525m.g) derived from phytozome v7.0 (chr-ID sc affold00025; pos 945320 to 946282 reverse strand)
acctccccggcgtcgctcctcaggacttcgtgaaggtatgtccacgcatttcttctttcatttgttttgattgatcagcaatagaattttggatctacgttgactgatattcgcattgttgactgtttgatttgcgtgtataaataataaaatgagaagctgcagcattgatttatccaaatctaatctgttcactgcattacgtgaacatatgtaataatattgatttcttgcaaattatctatacgtacaatacaaatcgaggcagcatgatacaattggacgtttgaaaacgaaaaagccaatgcactaaacgagaacagaaaaattgtcagtttgaatggaagaggttgtctaggtagctgtccgtgtgtagtatcactgatacaagttaatgaggggcttatggtttcattggtggtcattcgcgggtgattttgtaatttgatggattaggaatgcatagatgtatctggattctggatttcgagtaataatgcatgattgcatttgagtgactgattgctttgtcttataaatctggttgattaaatatgattaattggtcaacagtttagattcagatgaacgacgaatcgtttgggaataggatttgtgaaaaattgctgcaaacagtgaaatgtgtttgggctttttacattcttttagttgtttgaatgtggattgccgccactgaatgaaacgaagttgttgtaactaataaatgccgcaagctgtttgtgttttacgctcttgagattcactttagtccatgttatccatctgtcatgcttgtgagtccttttataattatagtgcgagagtttggtaattaagcttaatgaaaaattgaagtgaaatatatgaatcagtgtattaggatttgctcttgagagctgttgaagtcctttaagaatcctttgagaaattgtttgatttaatttttgtttcatatgcagggag

SEQ ID NO: 83091 - DNA, 967 bp, Citrus sinensis
  Intron number 1 from transcript orange1.1g041794m (locus o range1.1g041794m.g) derived from phytozome v7.0 (chr-ID sc affold00169; pos 148826 to 149792 reverse strand)
agtagacacccaaagactggtgactggtaccttctctgtttctttttctcttttggttgttgttgtttgatcataacttgaaattttagtttctgggcttgtgctgtttaccatcaatggttttgatcaggcaattaatctatttttctttttaaaaaaacaattgtcaattgttttgattaggcataggcaatcaatttattggctaaaggaagccaatagttcttttaaggtgttaccgttcttcttttggcaattaacttgtcttccctactctgcttcacagagctttattaaattgattttagatcattgtctccatttatgtgatgcatatcatttttcctcatgctttgcttggaaagtatacaggcaagacttgacaaacaagtcgatggcagtgtctcactaaggttacaaattcttgtttctgaacttttagtgaataagtagagagcaagcctcttcttgtttttttattctgctgcatttcttttgaaaaatgccattagaaatgatatttctttcctatttactactcattatatcatcaatgtgcccactaaatgtataattcatcttctgtgtctgtctgtgtgtttcttctttcttctttgctggtttgttaacatttgtactatcattatttgtatctgtgttgtgtttttattagtaactatctttagggaccattttaaatgtcattggatcttgaaaatcataagaaagaaactagaaaaaagttgtattgctttagagatgaactgaattctgaagcaactgaccaactatttttgtcttcttctttaacatttctttatttatttaatttgaagatccaaatgaaaagtttaagacccaggagcttccattccttgtgagaaagaaagaaagtaaaccttttttcttttttttttggggggtctctgcaggtatcctgcaattaacaaacctgctggaattgttc

SEQ ID NO: 83092 - DNA, 751 bp, Citrus sinensis
  Intron number 1 from transcript orange1.1g007982m (locus o range1.1g007982m.g) derived from phytozome v7.0 (chr-ID sc affold00061; pos 234189 to 234939 reverse strand)
tgctttgctcgcatcctctgtcaagagatattcgcgtaagttttggaaacatgatgattttgatttttaattttttagggaattgtggattttggaatatataattgttttaggtcgtgtgtgctttatattgatctattatatttttcttgtgtatatgtaattgagttcattaaaaatagttgtatgttaaaaaaaacacacacacacacacacaaaaagtgaaaggaaaaggtttgcgagagaaagaggagcaaggttgtaattcttactttctggattactagaaagtatcttgagcaccaaaacaggatgaatttcattgattctcttcgtgaaaactgtgacaatttgattttgatttttggttttttggggattgtagaatttgttatttatttatttattttaatattttgaggttaatttgttatctctatctaattatgttatttgatatgttttattgtatttatgcaattcaaaaggaagaaatagaattgaaacttttactctttccatgagtagaaagtatctttagggtcaaaacaggatgacttgcacagtttcttttcaatgcattttagtggtttttcagtttggtaatgctgtggtggttctgtgttagaaaaagtctatgttcatattgcatgttatttctctgagtttgtcactgaattaagatggaaaaatgttgtgattaatggtctttgcttgatgctgcagatagagtcattatctgttacttttc

SEQ ID NO: 83093 - DNA, 919 bp, Citrus sinensis
  Intron number 1 from transcript orange1.1g022434m (locus o range1.1g022434m.g) derived from phytozome v7.0 (chr-ID sc affold00047; pos 476018 to 476936 reverse strand)
tccaaaagtttgtctccaaaggccaactctcccaggcaagctctctctgttttgttcttgttactttcaattttgatgagttttatttaatgatgtttgcaaaaatattacaaaactcatgctttctaggagcttaccgatgttttgattgatcaatatagtgttatgatttttgtccaactcataatttcaatcactaacaaataagtgaggttagctgcttaggcttgagtcgtatatttggacttctcaggagtataattatcttatctaattgttccttatgattggctgtaaccggaaagttcatttggaaatttattgtttcattgcttctgttgtcgaattaatgcgaaattacttcgtgcttttcatatacaagaacaagatgggcttgctatgttttttctttcttttgtgtttaattttgggggagaaaatccttggcccttgtaaatgttaaatgctacatagatacgaatgatacctacatagttagaaattcctttaatcttcttgtgattttaacaacgatggctttgcccgtaggacatgcttaatttgatgttttttttttaactttttgtcggggaccgcggaatttattgtttgttagtataatgtcattcggttggttgcggctgtcgccaaatttattagttgaaatcttgctttctgagagtctgatttgcattcctcaaatggtaaaaacagtttcagggattgcttggaaatttttgcaaggatttggttggaccatttgtttatatttttatgagtatgcttaaacgttatcatcctctgaatgttgggtaattaagaatttagctggtgctcctagcctgcaccactggcgaccttgttgatttattagattgaaaaagtttgtcatctttaattagccaggcagtgggtactg

SEQ ID NO: 83094 - DNA, 857 bp, Citrus sinensis
  Intron number 1 from transcript orange1.1g023485m (locus o range1.1g023485m.g) derived from phytozome v7.0 (chr-ID sc affold00119; pos 39524 to 40380)
gtcataaccctatcctcatcgacgagggcaaaaaggtaggaacatttgcataccttataatcacttaattccttatattttcttctttgttcataacccataattgattttgatttggttttaatgtacggttttttttaatcattaatccgaatgactgaatccattaaatttttcagtttttttgttgaagatgctttttatttgaaactgatttcttttaaaacacctcaaaatacacttctaattatctagttttggtaaagatcttccagcatttgttgacttgtttcggtagaattttactgtatttgttagaattcattcggggagcttgatgtctgttttggtgctgcatgttctttgttgcaagtgcttgtgacaccaccaaaagcatgtcttttaattaaatgaaatcagttgtcttgggcccgcgggggaataaaaaaagcgcttttagagaaagcacttgttatgtatctctagatggtgttttatcttgtggagaaaaatttaataacatgttaaatcaacaataatatcttttgggagtgaaaaagcagttggtagtgtgaaagggaacttgatttgcctttttcttgagaaacatttgataactgataattgctcttataaaatgtgcttttgcacttccacaaatatttttaattcaaaagtgatctgtccaaaactcatctaaacacttttgaagttgaagtgcttttttgggaaaattttaccgtcattttcatgcggttttgtcttcttctttccttaccttgttaatataagcaacggtgcatatctaattgtgacattcagcagagcttttcgttggacaagcagagtgggaagaa

SEQ ID NO: 83095 - DNA, 935 bp, Citrus sinensis
  Intron number 1 from transcript orange1.1g042196m (locus o range1.1g042196m.g) derived from phytozome v7.0 (chr-ID sc affold00133; pos 77803 to 78737)
gctttgttgataagattttatctgaagactttcaggtatatttaaaattctattagttagataatattattaagttcctgtaactattttaatcaatatccgctttgtgcaggaaaaaagtaaggcagcaaaggaaaaaagagcaaagaatgtgtacaatcatcatttgggcagcacaggatatgctgggctgttgcataaaagagtaagtacaataaccactctatataaacttatgacatttttaatacaaataataggatgattcatagcagttttgaattcaatttttgttgaattattgcagtagttaaacctcggagttactgagcgcgagattgaccgtagtaaagcttggttattggctcataggaaaaaagatggaacttatacacctgaagtgcagcaagtggctgagagaattataagtttccaccaccactgaaaattaccaatgcaaatagtatgaaactgaaagctgcctgaattagtttataatccaagatcatgtaaattaatagattaggttgctttgtttatttcaaaaaatgctagtaatgcgatgtatgtgtacactgtcattatttaacttatttgttttttttattcctaattttgataaaatatttttgtatttattttgtagagtgagctaaaaatccaagttgagcagggaacgttccaattccaaggaccgaacgatatcctaggtgaagcccttcaaaagaagcctaatggaagttgggtgcaaggattgggttaatttcaatgttcctgaccccacagagttggtgtgagaacaaagaatgtatcaggagagttttcagtttatgcaagctcaattagatcaaatgaatgcaaggataaacacctgcaataacactaaagttggcagttctaactttcccaactccaaaggtggttgcagtgttaag

SEQ ID NO: 83096 - DNA, 592 bp, Citrus sinensis
  Intron number 1 from transcript orange1.1g026416m (locus o range1.1g026416m.g) derived from phytozome v7.0 (chr-ID sc affold00016; pos 875170 to 875761 reverse strand)
gctggtctcttaccgtatactatttgctactgcttactaattcatttgtttatttgttcagtgaaaagtgacaatcatgaacatactaagctcccatattttcaatttcttacgatattggtggaatctgtaattgattatgcaattcactttggtacgtatatattttagtaatcttttgtgcaaagatttgctttttcgaattttaacatgtcgtggatgtcgtgaaaaaatgactaaggtatttcaactgatgttggtcgcattatggtgagtaacattgttacgtaacgattcatggttaatccacaacatcaattttcttttctcaaaggtgttattaaattatgtcatttgtttagttgctcactagaattgtgctgcgtagttcctcactagattattttatgcgtgtggatattaaaaaggtgctagacttgtgaaccgggttgtaaatttggctgttttagcctaaaacccctttttatttttttaagttgaaataatttgtgctgtgttctgcttcactgtgagcatggttctctttggttatgcagggacaagattacatatttgttagggagtttgtcgc

SEQ ID NO: 83097 - DNA, 370 bp, Citrus sinensis
  Intron number 3 from transcript orange1.1g018382m (locus o range1.1g018382m.g) derived from phytozome v7.0 (chr-ID sc affold00065; pos 549587 to 549956 reverse strand)
gtcgttgatcaaaagtaattatcacgacatcccttctgtcaatctgttaatattatatcttaaaagaatcaaacactattttctttatagtcaaggtaactgttttcttttctttttttttttctttttttaaatctttttgttgcttaagctttttatagacagaaatgatgatggctataatatgcataaagttctttttgcttgtgctacaagaaattttgttaatcaataatgattttcttgcgttagaagaaaaaaaaaacatttcaactaaaatgaatattttcagttgatgggctgctcaaaatgagtactcatatgaaggaaattttcatttttgtctctaggtttgtggtgaaaataccag

SEQ ID NO: 83098 - DNA, 957 bp, Citrus sinensis
  Intron number 1 from transcript orange1.1g034427m (locus o range1.1g034427m.g) derived from phytozome v7.0 (chr-ID sc affold00302; pos 46643 to 47599 reverse strand)
aagagaggtaatatatttagctaattccaacaccatgtttggtcttttttcagatggtattagacttggacttttaatactaacgttaggtaaagtttaagcttctggatcaagatgttaattaagatatttagtatcaaagccaagatcctgagggtgtgtttagtgagccgcactggattgcctaagcttgaacaaatttggatggactgtaatgtatttatcaagtcccagatgaaaatttactgtccatggactaaattaacaaagaaaactgaatgactttgttctaaaaagtttgcatagcttaaagcggtccaagaatggtcagttcaaaaagccagccggtttggataatcctgaagaatcaaaattactttcagcttcttatcctctccttaatctaaaagaaattccacatgagaaaaaatcccacttgataaatttttggtccacctgtgcttggagctttgacccttgcctgttgtggacctgtgatatatagaaaaagggttacgtaaacgtgtatcctgggaacacatgttaagagagcgagagagttataatgtaatactttcggtatagaaatataaaatgctattgcttatcatatatcatttttgagatctcctatgaaataattaaaagcatgtagaaccaagagaacgctgatatttaaacagaaaaatttaatagaagagcttgacagaaacagagggtacaccctagccgttttactgtgtgataagcgatgataatacggtaattctacctgggtttatcgttaattccgtcaacatctggcagccttcatatcatcgcttttcatttttcaagcagtttatgcactgataatgaatattttgcatgcttaataatatgtcaaaatctaagactatatttttgtttcttgcttttacaggattctaaagaatcttaagctgcaataaaaagtcc

SEQ ID NO: 83099 - DNA, 608 bp, Citrus sinensis
  Intron number 1 from transcript orange1.1g006324m (locus o range1.1g006329m.g) derived from phytozome v7.0 (chr-ID sc affold00323; pos 54225 to 54832 reverse strand)
aaacccacttcagattttcacctctttgatatcaggtgaacgctttcttacattacgttgcttatatatttttctgggtttcctttttcttttaaattttgtttatatttttccataaaatgaatgtaaatgtgtaaagtttgcacttttatgttattgatcatgtagaattacgtgcgttgtttgctttcgttttaaagttgaatatttttgtttgaattgggttttgaagtgaagaattattcactttttggctttgaaactgtacgttgtgaaatgatgatgcttagtcttcgttttaaaactttattggcatttgtagaattccagttttatgattttgattctttagttacttggtggagatactgaaacaatttgctccattcagttctgtgatgggtttattctctatttcttgaatgatttcagaagatatagaagcacttgagatgattttttagtatgagcattttcttgttaacctttctgatttcagttgtgttctttgagaccttaggtcgttgaattcaatcagagttcttggatttgtctcgaaaggaatttaatttcaatacaattcaattcatttgattagcatcacatca

SEQ ID NO: 83100 - DNA, 731 bp, Citrus sinensis
  Intron number 4 from transcript orange1.1g036031m (locus o range1.1g036031m.g) derived from phytozome v7.0 (chr-ID sc affold00004; pos 1835608 to 1836338 reverse strand)
cgtgctggggtttgtatttttgttttcttctatgcataatttttcgttttgtctgtgtaattatcccatggcgagaaagctcttcattttctggttggtgaattgagaagttacaaaatatacacctggaatgcttcggtgaatgattccattttgacctgttatggtgccagattctgagttctgttttaatgtttattcattttcatatttttggaaattgatccaaactttggttaaaacagaacagtagaaactaatgatgcttctttttatatttctccattttagtttaatttcattattattattattatcattagtactaaaagtgtgaatgtattgtattcatattttattagttacacaggcataagcataacctggtgtcctacctgtgagtgtcagattggatgaactagacatgttattttgttgtgcttactcagtctacttttctcattaaccatctatgtgcttaccgcttgaaattggtttgctttatctgctacatttccttcttctgttgatagtattttagacaattttaaatgcaaaaggtgttagtttcgttgattggtgcgtctttggttcgataactataaaaaatgtagtttttctaacttatgtttctgtttcttcttgctttgtgtcaattgctttgttaaaaaatatttttttgtggctattattgggagctgagttatagtctaaatgtttgactcgcagat

SEQ ID NO: 83101 - DNA, 688 bp, Citrus sinensis
  Intron number 1 from transcript orange1.1g009833m (locus o range1.1g009833m.g) derived from phytozome v7.0 (chr-ID sc affold00011; pos 827560 to 828247)
ttggcgtttctggtaatttttttattatcttttttttcaaattttttttatatttagatttctttaataaaaaatttatgttattgtagagaaaatgatcatcaagttatgatgcataatctggttgtagtttttgaaagtacttttttttttcttttcctttaaaaaaaaggccttttatataaggtttctggtgactcaaacactctaaaaattttttatgaagaatttttgaaaattgattgaatataaaaaaaaaatcaataagttcatcctttggttgagcgtaaatctggaaaataaaaaaaaataatgcgaaggcaagtttctcccgccaaagtggagatcctagcaagctgggatatctttcaacttttcagctgtgaaattactaatatatcgggagtagtaagtcatagcaatagggtatttttggtatttcgtgcttttgttgcggttgtttgttgctttatcgttgcggttgttggttgctttgtcggtgaagcttggtcgatcgttatgccgttactgcgacggccaataaactctccataccgtctcaatgatcttgctaacttgcgccacgaaaaagtaaaaaaaaaaaaaccagatagaaagaatttatagtttaaatctcaggaactaatttaaaattaattttgaatttgatgcagggggagtgacggcg

SEQ ID NO: 83102 - DNA, 625 bp, Citrus sinensis
  Intron number 1 from transcript orange1.1g047704m (locus o range1.1g047704m.g) derived from phytozome v7.0 (chr-ID sc affold00007; pos 928397 to 929021)
aaaggttcacatcagaatcagatttaatttctctggtgagcagagacatggaatttatcaacgaatgggatgtttgactgtgcatgaacagacgaagttactgagaactaactacatatacatcagtggccggcggcctatcttgtagcctcacctaacttgactgccacgcggcattcgcatactaatttttagtacacccactaaataccatatgagaaaacgcaccaacatataattaagaccacattaagcttacgatcttgacttaccgtccctaatttttcttgcttggactccacgctcaatagccgtcacgcggtgactgtatctgtatgaagtggtgggtgatgactttctcacatctcagtctgacttgcctataaatagtaaacccaaaccatcttccgaaaaacactccatcaacctctgtcttcacaacttatttccaccctcaaaagctaatatattttctctctttgtttctccttgtttacaatacattcaaatacaccatatattcatggatcgttttggtgcttttgcaatcattttctttgtcgtgtttgcttcgtctgtgccatctttagaagcaagaaagctcttaaacacagagaagatcgac

SEQ ID NO: 83103 - DNA, 782 bp, Citrus sinensis
  Intron number 1 from transcript orange1.1g017587m (locus o range1.1g017587m.g) derived from phytozome v7.0 (chr-ID sc affold00002; pos 2714876 to 2715657 reverse strand)
ttttaggcagcatagtttttctacgaccggagcaggtataaatctttccctttattaaataataaatattatgttttatgtttctagtcatcaaaacaattagatgctagccttaatatagggattttgtttattccaacttgtctgattttttttttcctttaaaatatctttatatgaaaattcacctacattacatatatactgtaaatcaggagcggggtcaggacagcggaaatctgaagaattgtattggaggaacactcaatcaatagcaagtgagagggtggttaaaaaatgaaacttggaatattgaacaaaagtgtttgattggctatacacactcattcttgaattgatttcggattaaaagacgaagtgagctgacatgatgaccggccttctgccacattcagttttcccctttctagagacctttgcgcccaaaaacgtggatctgtcatctatggttatgggcaggaccgagttgcgcattcagttatttcatttaattctttgcaaagtggtaaaagaataaacataaataaataaataaataaaagcgtttgtttgagctctgtccggtgcgggtggtgtgttgtctgtacaacggtgggaattaaaagtactttatgagtttatttgcttgtcaatctgactcgcacgtgatgattaagagacgagacgttacgtcataattgaaaattgtcctagatgaagactttctttgagaatgataataatgcgatccagctatttgatgattacaggtggcaaaatcg

SEQ ID NO: 83104 - DNA, 654 bp, Citrus sinensis
  Intron number 3 from transcript orange1.1g013384m (locus o range1.1g012280m.g) derived from phytozome v7.0 (chr-ID sc affold00049; pos 242913 to 243566 reverse strand)
cacaggcaggtaaaaataggaaattcgtgtttactgtttctatgatatatggtattccactattcctgctactattgttgatctgtagaattctgtcaatttgctatcaccattgacctgatgctattacttatgactttgaatacatacacgcgtgtcacttcagtgtctttctcaccatcaaaaacattttaactccccctgtaacaggcacatgtaggcagatgatcaatgcttataaaaattatatctacattgctttattttctgcatctctctttctacaatgtcatctcgaattttcccaaaaaaaaaaaagaaagaaagaaaaagaaaaattacttatggtgattgtgattgtgattataaatattcttttattagtttcttttttatttgcatatttcaggttatccacaccgaaccatatattggtcaatcaaaagtgaaatctgctgctgctacttgtcgttcgtatgttacttttctgcattttttgcattagctcaccttattctgaaggctgaactcatttttgtcttcacttgagagtttggtggggcttattctgttgtattggctttgtcttgattttatctaatatgaatgtgtgttccaggatcaactccactgttcacattattgagcacagag

SEQ ID NO: 83105 - DNA, 529 bp, Citrus sinensis
  Intron number 1 from transcript orange1.1g031338m (locus o range1.1g031338m.g) derived from phytozome v7.0 (chr-ID sc affold00062; pos 437423 to 437951)
gcttgattccgagttgcaggtaacatgcttgaatctttgttaatctaactacttattgaaatgacttgtttttgttttagtctctttttgtgttcttattctgagcaacatagaattagatatttcatttgacttgcttaaaaaaaaaaattggcaatttgcccttgttgttaggaaattgtggaactatttttctacttttaaatgggtgagtgtttcttagaccatttagatgagctttgaggccgaaaatgtgtagtagtttcatgtaatatttttgcacaagcttggggatgtggagtcataggcttgcacaaaatctgctaaatggaagatcccaagtcgctgcatctgcttttgtgtctctttagtaccattttatgaattttttagactaataatatgtgtaactaaccagaagaagtgtgtcattttgacaggtaagtaataaatttcctagtgtatgattaaccctttgccctttttatgtttcaattgtccaggacggtcaatttgatctgcggttttt

SEQ ID NO: 83106 - DNA, 597 bp, Citrus sinensis
  Intron number 1 from transcript orange1.1g012021m (locus o range1.1g012046m.g) derived from phytozome v7.0 (chr-ID sc affold00233; pos 112691 to 113287)
agacagatctcaatcaccactcgagagccgagacggtaccgtttctttccctttctctctcttttcttttacccgtttcttttctttctttttttctctttttcaaaagactgacttttactgatttgagttgcttttgttttgtgttcgtattctctgttattattattatttttttttgtgtttatacgtgaatttgttgaattttctcaattacgttgatttcaagagttcaatgtgagaaacattatttagaattttgttcgcaattgtaaaagatctaaagtggtgatgattttttttttcacgatattcattttttaatgaagaagaattggaaatttcgagtccttttaaaccgcttacaattgtttcttgcttttagtttcaatatctattatctaggcggttcaaagaaacatctttagaattcagtaacagtatcatatcactggcctccagctgtccagcatgtaattaaatttcccatttttaaattttaatgtttcgtggctacaataaaatcaattagctaattctgattgttttattcctttttcaggttagtgcctcggattttaggtgccggatttaata

SEQ ID NO: 83107 - DNA, 372 bp, Citrus sinensis
  Intron number 1 from transcript orange1.1g017611m (locus o range1.1g017611m.g) derived from phytozome v7.0 (chr-ID sc affold00017; pos 1488148 to 1488519 reverse strand)
ttacaagtcagcggtcatctttattgctttcgcttgtgagttttcttttctttctttttcagtctcgctgtgtttgtcgaaatgcggcacttaattttttttttttcatttgtttgccattgtaattagcttagctttcaacttacatcatggtgaatcaattgttgatggataatcataaccttccattacactgccgccaactgttctgttttactttatagttaatggtggctgtttactgtttctatgcttatgcttttctttaagaaaaataaattttgaaggctgttaattctggttattgaactttgattgccttcgaaacaggtttttttccccccctcgacgatactagttaaggtttgtaaa

SEQ ID NO: 83108 - DNA, 990 bp, Citrus sinensis
  Intron number 1 from transcript orange1.1g042065m (locus o range1.1g042065m.g) derived from phytozome v7.0 (chr-ID sc affold04793; pos 4069 to 5058)
tgggggcttacggtaaataaccctatttatattcaccaaaacagtaccttcatcattatcttatataaaaaaaattcgaaatgacaatataatatatctatttatattttaatcaagctttatttctccgtcattaaagagtaaatagtaaataaataaacaaaaatgaaaaacgaaagtcagtcaagcaaagcccacaaagtctacgcgctattgcagtcctgagtcccagtcgtcgcttttgcttggaaaaagaattaacatggcctccccttgtttgacccgataaccaccttctgcttccacacctgggaaccctctgtgtcttctttttcatagtttctctctgtttactttccccgttctttcggtgtgtactctttctctattatagcttttatcattttgtttttccttctgaattggcaaaacatgttacggtcttgaggacgacgacgacgaatcttcatttccaagtgaaaagatcgctgcttgttcgtttttgcaaaaacccttttgcctgttcttcgatcttgctcagctagccttcttggaaattcaggtaggtgggatgggcttcttgattttaattctaattgtgtttggtggggggaggaggggatgcctgtgttggtcaagccaactgggtcacttgttctttctgaatcttttttatcagtttaattgtttatttatttatgcttaacataaatatgaagttgaatttccacgcatactgctgcttggtgctgaatttgatgttattttttgtgttggggaatttgtttcaggctttgatggtgtgaggagttttcattttgtgggtttagtagttgaaggtcatttatttgctaactagcagtcaagaaggatttatctttgagtgtaattggttttggattttgatggctttgttcataagcattgaactgaagagcctatctcttgttggggtttctgtctgtttattactttgctttagtcttagct

SEQ ID NO: 83109 - DNA, 528 bp, Citrus sinensis
  Intron number 2 from transcript orange1.1g040490m (locus o range1.1g040490m.g) derived from phytozome v7.0 (chr-ID sc affold00252; pos 19053 to 19580 reverse strand)
ttcaaccgttacgtgagtttctttttgtgtcattttggttaggaggggattttttgatgccgtgcttttgagtttagtacttagtaatgttcaccctttttcatatctgcttctgttcttagggtttttaatgtgtttaatgatcatggcttcattcagaatacaataaacttctttatactagttgttaatagaacctgtccgattcttctctgtgacagagcttatttgtcagttactgagttctcctttatgtgtatcagtatggtattctgaactttcacgattttaaagtgatggttgagagttctatttactcctaaacagatttaaatggaaggcttttaactgtaagcaaggctgctcccagaggatcacagtcggaattgactcgaacttacagaatctacattggtacttggtaacctcccatggcaagtagatgatgcacgtttggagcaagttttcagtgagcatggagaggtagtgagtgcaagggttgttttgatcaggaaacgggctgttcac

SEQ ID NO: 83110 - DNA, 472 bp, Citrus sinensis
  Intron number 6 from transcript orange1.1g027818m (locus o range1.1g027033m.g) derived from phytozome v7.0 (chr-ID sc affold00091; pos 208954 to 209425)
tttactttgctgaagacaggtttgtgttatcaaaactctcgtttttatgtgaagatgataatattcttgacttgtgttgatcttttatacggagaatatatagattctcaataaagataagagtgcttgaatgatttttactttaacttctgaattgttatgtggtgatcccctcccccttttgttcttaattttaatactgagttggaatacctgagtcatggaatatttttcaatgaaatattgttacactgcgtttgttgtaaagtctggagtatttttcgatgttttgagttgtctggtacaattagtggtcccattttagcttgaatttgctacaatatgttaaacaatctgtagatccttgcaatatattatttgaagttggaatgaatatttggattgcttttaccctgtacttattgtattttatgcagggaagaggcaaaagaaataaaatctcaatctggac

SEQ ID NO: 83111 - DNA, 611 bp, Citrus sinensis
  Intron number 1 from transcript orange1.1g005941m (locus o range1.1g005941m.g) derived from phytozome v7.0 (chr-ID sc affold00243; pos 41383 to 41993)
cgttttttcattgattgaactgtcttctgatctaggtatggcttagttttttgagatctgtgatcaatgttgaagatttgtttatcccttttgattggttattgccatttgttttagttgcattgttgtgcataattggatctggatcttgtgtgatgatcatagaattttgaactacttgttgagatcatagctttagaagttttctatgaatgggatcgtttgaattattcatggtgattgtgatattcaagtaaagatctgattttttttttcctttcgtcttttgtattttactatctccagtgttggatctggtacttaggtttaagttcttagtatcattcattgaaggctatgatgtgattattttgatagtgcactgatcttaattttttgtttaattttctcattctgctgttattgtgtgatctgcatctttcttctttattatttttgtgattgtgatctaactttctattttatacatctctataagaagtttctggaaacttcttatatatttagtatgtgttcatttatttgtagtttgtgactggtggttttgattttaatttatgtactttttattatgtagaagttcatttgca

SEQ ID NO: 83112 - DNA, 559 bp, Citrus sinensis
  Intron number 2 from transcript orange1.1g043085m (locus o range1.1g043085m.g) derived from phytozome v7.0 (chr-ID sc affold00050; pos 24980 to 25538 reverse strand)
gctcaaataagtaagaatgagattattacatctcatcatttatatattttggtatttggatttggttttctctattccacctttaattgggctcgttccatgcgacaagcttgtattggttttgcattagtctgcttggtattgacgttgcatattcttagccccaaaagcttgcacaagggttaagactttccttcactataaaatgaccaccagcccaccagctccttccacaatcgatgtaaacacccgttcttcttgttcaactctctcaattggattattgggctgagatgtttgtgaacctgagctttgataccagtgttaggtgatctagacctctctcaaccccaaaaattaactcatggggtaaggcttttccctacacttataagatcaccaccaaccccttccacaaccgatatgagatcacgtgtgagagggggtacaagaacttaatactattttattgtttgaggcgccctaccaatcaacttaagtttctgggcccagcaatagcttttaacagttatttgtgaatatggatttgcaggctagc

SEQ ID NO: 83113 - DNA, 687 bp, Citrus sinensis
  Intron number 1 from transcript orange1.1g007610m (locus o range1.1g007610m.g) derived from phytozome v7.0 (chr-ID sc affold00730; pos 48233 to 48919 reverse strand)
tggtgtcagggttgttccggaaattgacactcctggtgagtttgatgttattttccagacactgttttctcaattttttttaaaatgagacattgaaaattgttgttttgagtttgatgtttttcggattcgaaaatgcttctggtaatgtctttcaaaaatagtaatttaaaaatgaaaaacgtttctgtttgacaattttatttatttatttttaaaactaaaagctgaagttaaaaaataatgtaatactatcttcaaactgtttgaatatgagtttttaattttgatattacccgaaattttaagccacaagatagaaaattttttctcttgttttgtaacatgaaacggaacaaattgtctcatcagtcatcaacatggtaaaagagaaaatatccacaattaaagtaaagcagtatttatttttatttttatttttgttttttgtctttttaactctaaaatatgaataaatctaactgatgttaatattcaagaccaacatttatcggtaggaaaaaatcttttgtcactttatctacccatttgacaaaatcatagccttttttttttttttctctccttataattcatatgatatgttcccatcagacagccgtgcgcaaagactgttccttaaaaactttcaattttttgtactgtaatttcaggccactcaggatc

SEQ ID NO: 83114 - DNA, 285 bp, Citrus sinensis
  Intron number 2 from transcript orange1.1g037320m (locus o range1.1g037320m.g) derived from phytozome v7.0 (chr-ID sc affold00004; pos 3813307 to 3813591)
aattcgtactgtacgagaagaatcaaaataattatttaattaaaattcatcattaatttctaccaaaaatgctttatatttttactgttactcaaactattaatttgcacaaggttccaagcatttaatctattttcccttgttttcttggttttaatcatcatgaaaacagtaacttctttatgatttgattatgtagtggcaacatcctgtgcataaaagattcttgtttctctttttctttgtctaggaatcatacagtgaggtactgcgcagatacaaaga

SEQ ID NO: 83115 - DNA, 920 bp, Citrus sinensis
  Intron number 1 from transcript orange1.1g022711m (locus o range1.1g022711m.g) derived from phytozome v7.0 (chr-ID sc affold00002; pos 1940067 to 1940986)
tcaaggtacttcgaatcaagtttctgttatgactttttattttcttgttcagctaaaattctgttgtgttcgggtaaaaatattttgttgctatttctgaagtacactgacagatgaaacggtagtggttttttagtgaatttaaatgcttgaatattttttctgttgtaaaccactgctttggtttctttttaataaaatctggataatgtgttgaaaaaaattgttcattttaactacggttctagatgtctgaactggaattcatactttttgctgcctattgtttatgtgagaattgttgaaatttgttctgtcggagactcttgctgatcgttgagcatgttccattttctgtgaatatatctctggcagatgttctttattgaagactacgagcaggttgaagcataacttaagatcttaattgtctgtctcttttgctttatccaatttggtagcatcatttcacctaaatttattccacacctgacctcgttcgtactctcttcaattagttgagaaagtggtcaagtctttaacttagcaagcagttagctctatatataacctcacattagtgaaaaatgtcacagttaatatgtacaaataatctacctgtactcctttctcataatcttcttattgtactgctctttgcaacctccaaaggtggtgctatttgaactttggaaggtatttttattcaatttatttttttatctactcatttagttcagaagttgagatggttttactttcttattcatgggacatagagaccaattgatttgtgcatgttataataatccatttgatttgtgcataattatagttatttttcttgtgttgctgccatgttatctcagttttaacctgctgcaggcctcttttgtgctctgccgaatatttgtcaagtc

SEQ ID NO: 83116 - DNA, 771 bp, Citrus sinensis
  Intron number 2 from transcript orange1.1g031835m (locus o range1.1g030644m.g) derived from phytozome v7.0 (chr-ID sc affold00353; pos 131164 to 131934 reverse strand)
caggaagtcttgtccattaaaaacacgtaagttcttttatctcggtattgccatcggattttcatttgtgttagtagcagttgttttcatgtcttggcagctttggtttatgttctcttttagcttcttcttggtgattatttgacccttttctctttaccgtggcatgatttctttatcaaccttttttcttgtttcccatatgtttggtgtttattcaggcgattcaaaattccagactcttattggaatatcagttgttgacctgatatctgccatactgtggattgtcgagactagctgagactagctgtgaattttaggcaaatattaaatatactacaaagaagtatcatttttctgcaagtacatgcttgttgtaaagtgctttatggcttggcagggatgagtttaaatgggtgttaatattttttgtgcgttatttcactcaaaagcaaaggcttttgagggatagaagaaatgattttcttttactagtttggggtgtctcttcgccagtgctattatggatccgctgcttgtcctagaatgcttttctccttttgctgactatctgtcttttcttgtttgttgtcttattctagatatggttttaaagatcgtctatagtttagtgatctgagacctaaaccaaatttgctttagaacgacaaacctaagaattgttttaggtctcagcatgtgaaattatgctctcacgtcctaactttttaagtggtgttgcagggaaattgcaaaacatctttctct

SEQ ID NO: 83117 - DNA, 683 bp, Citrus sinensis
  Intron number 1 from transcript orange1.1g015649m (locus o range1.1g015649m.g) derived from phytozome v7.0 (chr-ID sc affold00011; pos 1435380 to 1436062 reverse strand)
tggtgagtctttttttttttgccctttatttgtgattgttttgttagttattgtgtgatttgatgttaatgttttaggatgcaaattgaggctctgtccctgtaaatttatgcggctaatatgtgtaggaatttatgtaataagattgtaaaagtcaagaaatgcggattttgtggttttagaagttaaaaccaaaaattgtgctaccggttgatgaatttaagtaccaaatagtggattttggaagtttctagtgttggttggggttgtgcatgtttacatagttcttgttagaaggttatttatatattgtatatctgcatttggagagttttacgatttttggggttttttatgatattgatggagttcagtttgaattactcttgattcttgcaaggtgctttagaatttcttctacaattcactgggtggctggtctctacacttttttttttttaattgcaaaagcagggccgtaggaggatggtttgtatgtggatgttctatgattattaaaactccattgatcaggtgaaacctgcattagcaaagttgttctcttttctgtgttgtcaaagaagtcagtgctagttctgttattttctgtggtcttaattaactgggttccattgttgggtatttcaggggttataaacgctttttcaagagaactttgctgg

SEQ ID NO: 83118 - DNA, 526 bp, Citrus sinensis
  Intron number 1 from transcript orange1.1g020848m (locus o range1.1g016605m.g) derived from phytozome v7.0 (chr-ID sc affold00796; pos 3479 to 4004)
gagtctgtatttttcacttctctcattcaatatgtttttgtttcttatttttgttttaatttagaacccccattctgctaatgtatttttttgcagttttagtgaactgttatctgtttttttgtttttccttttaatgctttgggattattttagatttgtttcttttttcacaaattattctcgagaatgaaaacaggaaacttagaatatttgaaaaatgtgttgtctaatgattttcaaaaacagtttttgacacaagtgtctggtattagtcttttggagtagaagaagagtattatgttttccaagaacataatgccctgcgtgatctttttggtttaaaatttatttgtaggcaataattcactgttgaattatttttttttttaagtaactatatgcaaacttattgttaccgattgagtaactaggtaggaggttctttttattttttaggctcaagttcacagacatgctcataacttcagggaagtgcagcagtgcactctcctctccatcaaga

SEQ ID NO: 83119 - DNA, 520 bp, Citrus sinensis
  Intron number 3 from transcript orange1.1g021397m (locus o range1.1g021397m.g) derived from phytozome v7.0 (chr-ID sc affold00017; pos 917362 to 917881 reverse strand)
ttcttgatctttgtgctgctcctggtaagcaatcttctattcttattctgttacgttattctcaccaattgtttgctaattgatgtgatgtcgtaaaattgaagttgatgatatgaaaagtgatatcttcaatgagaacttcttaacctgtgggtcaaagtagtagtgctgatacttgttcacttttaattgttaaatggtctagtatatttgattatattcctttttacgttccatggaaacaggaaatttggtcaaatctgaatattgaagaaaaaaatgaatttgatttctttttacaccaatatgaactaagaactatgaagagatatttttggcatctaatattggatagttgccaacttgattcaggaaacatatagtctataaatggagtcatgttaggacattggatgattttgttatatgtcttttagttgtcattttctctgactcttttgacagattgctcacttattcattaaccgtaaattttgtatgtctaggtgctaaactttgt

SEQ ID NO: 83120 - DNA, 958 bp, Citrus sinensis
  Intron number 2 from transcript orange1.1g031556m (locus o range1.1g031556m.g) derived from phytozome v7.0 (chr-ID sc affold00060; pos 624339 to 625296 reverse strand)
agcttcaggaagagcttaataatattgaaaagcaggtgattctccttttataaattctagtatagtttcttgtacaatgtctgttggtgtttgtgtacctaattgtgttaagttgtccaagaattgcattcgacgcaggcttgttagggtttccgggttttgaattcagatgtggctgttttgtactgagattgtgcatttacttgaatagggtcgcgttacaaaagctataagattaatatatttctgtttcttgtttgaatgtgtcggctcctgttagcaaaccaaagtggagcttgttaagcaatacatttttttgtgaaagattgttgttatcttctccttgatgtcgaaccccccccccccccccggttccgtgctaaaccatggttgtaagaagaatggaagcagtgcattttaaaggcttaaactagccaaggttagtgttggttgaaacatgaagtcttcgtttctgaactttgtctgcatctagatttcattagtgaggtgagaggtctgttgataaaggcaacttatccagaaatgatctcgctgaagaaggtcctgagagggtgttttggatatgttatatggtcaaaccttttgctccaatcggtctctaacaatgcttttgaatcgaagtgcttgcactcatccttcaagtctaaaattgttataccagacaatgcttctttgagagttctatttaacttgtttttcagcgtggaaagagaaactgagctatccaactgacattaattgcaatataatgcaaatttttaatttttaagctatgtgagacccttatgctcaaggtgtgatgtgtggaaattaacagatcttttgaagggttcctcttgtctcttggaattttcttgtatgcaattattattattattattattttttcgaaaccctcttcactggaggctgatgagttttcttctagtgcaggttt

SEQ ID NO: 83121 - DNA, 856 bp, Citrus sinensis
  Intron number 2 from transcript orange1.1g017355m (locus o range1.1g017355m.g) derived from phytozome v7.0 (chr-ID sc affold00137; pos 10984 to 11839)
catcaaagagattttgcctcttaagtataccaaaggtgagtttatttctttgcaattaaattctcctcatttgagctcgcctaagattttaaaaggtcatgcaacgtgtgtgcattattttttaaatgattagaacccttgttttatttgtcaaaatatatcatttcctccttcatgttttaaaatgcatcaaaatccataagcaatgcttaacattcaatcgttgtcgtctcttcactaatttaatctagaatattttattgatcaatattagattttttttccttcaacatgacggataaataataaaaaaataaaaagttaaaaattttaataatgaaaattttggatctaatgttgagtttgagttgtgctaatttttaatattcttctatgtcatgtgtatttataatagtatatagttaagacttaactgcatatttattcttatccaataacaaacgatcacaatattataaataactcaacacaaagtatagctcagtattgaatctaagaatatattcttgaagatggattttgatcattttttttctcattattgatgatgtatgataaaaaggttgatatttatgaattatagattttttcaaattaatctacatctaaaacacatgagaatattgtttaaatttttaaaaagataatgttgataactttttcttttgtgatatattgatataatttagtatagaggggagcccctatgtgtgattgttgttgagtgtgtatgttacattaattgtaacatagcatttgcctttagtatatacatcaaactaatgtacagtagaataattttgtccatattcatgtgcaggtaacctagtcaaaa

SEQ ID NO: 83122 - DNA, 962 bp, Citrus sinensis
  Intron number 1 from transcript orange1.1g030000m (locus o range1.1g030000m.g) derived from phytozome v7.0 (chr-ID sc affold00197; pos 118923 to 119884)
ggttttctcgattctattctcaattggctccgcaggtactaattttttttttttggttcttccacgtttttactgttatttcgtgattttagcctagtgcttactgagttcaattttatcgttatttcgtggttttagtttatcgcttgtattttaaattattttaggccttgggctcgctttcttgaacaataaaatttggcaaaagaagaaaaacaaaaaagtttagaatttgaatacaatttaattctggttaggagtttggtgttcggaatttggttaattcatcagattgtatgtttgaaaatggagctgcatggtaactggaagaacttgtaggattggttacggaagtatagttggcatctgtaccacttttactagcacgtcttgttttgttggatgggtttaatttcgtagtatgcttttcttttgatttgcctttggtactattgtttgtaaattaatatctgttaccttaaagatgcacatttattatgatactctctttgatatattctcacaattggaagaccagtgatgcgaatctggttgcaaaatttgtttagttccaatttggactgaagttgttgatgttcctgaaattgtctctgtgatggttaacaattatttaattattttagttacaattattgccttttgtctctcctggggcaaatgatgttattactaaatatgctatcgagaaaatacatgctcttttgttgagatgcttttgttagggtaaattttagattccaataactacatctgtttgtctacctttccataaaggcaatacaggaaagtcacgagtgttcataaccgattgtcatgtttactgaattaaacccttttctaaatccgtttgtttactgaatggaaagctaatttttccatatctaaacccttttctgctcctgatcatgtatttgcatatcagcttattctttaaacaggaa

SEQ ID NO: 83123 - DNA, 334 bp, Citrus sinensis
  Intron number 1 from transcript orange1.1g031647m (locus o range1.1g031645m.g) derived from phytozome v7.0 (chr-ID sc affold00053; pos 83684 to 84017)
gaggtaaaattctcatcattgcattttctaacacataaattttcgttggaaatcctcgtttcttactttgctactgctgtaatatctgtcatatgaagtgatagttaataataataataataataataatcctaataataataataataaaataatctttgattatggttagtactgtaacaacacctcaggtgccagtatacggtaaacgatcaagaagaaaacagtgatcctcaattgttgggctaatagacaagcatataataataataataatatttttttttttccttaagcaggtttgctgtgagggcaaggcattgaaaaaatttgt

SEQ ID NO: 83124 - DNA, 348 bp, Citrus sinensis
  Intron number 1 from transcript orange1.1g004911m (locus o range1.1g004911m.g) derived from phytozome v7.0 (chr-ID sc affold00003; pos 4211492 to 4211839 reverse strand)
tgacctgcgtcgttctgcttcaagtcttgtagctggtgagttcgtttttattttaatctcttccgtaactttctatataatttgctaatgtgtatgcctgtgtcttgtttttctttttcttttaatcatgttttggttgctaagaaaatgaatgagagaaaaatagaagtagttgtagactttgattagaagaataagaaaaagataagaaggttgctatgttgattgtgcgcggatctatactgatgtttctcttggttcttttcgttttgttgtatgcaaatacttcgatttacaggatcgttgatttttttattttttatttttgatttttcagttgattgaagc

SEQ ID NO: 83125 - DNA, 830 bp, Citrus sinensis
  Intron number 1 from transcript orange1.1g020225m (locus o range1.1g020225m.g) derived from phytozome v7.0 (chr-ID sc affold00234; pos 163341 to 164170 reverse strand)
atcggagcttctcattccactgacaagaaaacaaggtctacaaacaactgggttcgtctctttttgctgaaactgcattaatgtccctttcatgtgtgtgtgtgtgtgtgtgtacatatatatattctgttctcttccttcaaatggcttccacccggttaaaatttaattgcttaatgttaaaattttgggtatctgggtatctttgatattgaagtgctgtggtttattaccttgctgctgttgaataaaatcactaattgtcaagtacagcaagtgctgaacttacttaaggtttgctaattgttgcttttggaatatgttaagtagctgtgccttaagctttttcagacaaggagaagtgttgttacagtgttaattgtaatgcttactgtctaacaaatttaacttaatccagttattttgtcatagaaaaggttgtgaccactggctttgaattattcgcccgttccatttacatgtggaaacttttattagtgatttgatattgagcacgatggccattttttttttttttggtttacaatgcattaggtgaacaacttgggacctttttcacttgaattttggcctaaaacatttggcagaaattccaaccatccttcttctttaatccaatggtgtagattgacatcactgatgtcactaaattagaatctgtaatttagcttctaacgtaattggtaccattactagtgaattagtcactttgcaatagctttgtgttattgtacatcttggtttcgatttgaaataaaaattggacctgtttaggtttgttttcgttgaaaaagaagattgaagacgca

SEQ ID NO: 83126 - DNA, 494 bp, Citrus sinensis
  Intron number 1 from transcript orange1.1g017595m (locus o range1.1g017595m.g) derived from phytozome v7.0 (chr-ID sc affold00796; pos 57478 to 57971)
gctggagaccaagccatactagatatgtttgtcttgttaactttaaatatcttttatttttaaacattttccaacccaattaacgtcagtacgcggatttgaagcgaaagagtttgagaaagtctttgatactccctatgtgtatactctctctggtatattcttattaagtgtaccccgccaattagacaagcagagattatctttttaaggacgtttggaccaagttaaaaaattaaacaaaagaaaagaaaaaacccaacgccaatgcattattattatttatatattaattggagtttattttattttactttttgattttgttcagatgattaattagaagggcagttgtccgcataagattattcaggaaaacatttgatgacattttattagattaattgctgaaaatacctttttgtgcgcgtaattaataataatcttttgaacttttaggtacaagctggcagacgcagttcttcagggaggaa

SEQ ID NO: 83127 - DNA, 668 bp, Citrus sinensis
  Intron number 1 from transcript orange1.1g014263m (locus o range1.1g014281m.g) derived from phytozome v7.0 (chr-ID sc affold00004; pos 4026655 to 4027322)
ctcaatgtacacttctcacttcttgatctgttgatgtgagcttagggtttcttgatttctccatttttgtatctcttgtagcacctttttgagtacactatgctcaatcttagttccattttactaaagttttgatttttgtgcgtaaagtttgaatcctcgttaaggaacttttttctggcttgtgtacataatttttttcttaaaggaaatttctaattgatttgttttcgctgggttcattgtgtagtgcgatttgcagtgataattggatatataatgcaattaagctaatgagtgaagatttttttgattttcatgtatgggttggtgaaaaatgtgcaaagaaatgttagttgattggttttgataaaatggtgttttgggttgtgctattgtattgtaaaattttcgctggtcatcagtatattgactctgttcataattgtgtgctacattgtagtaatatgttctggagggagctctatatagttggagagattcatgtgatttgctttctgatatggattagagtaaaactgagaaaatgttttgattgatttatgcggttattgggcatgtaatgtatagcagcatcagcatttgtgaagagaagttctaattgatttgtttggttgattagggtgttctgagaaaacgacttggag

SEQ ID NO: 83128 - DNA, 960 bp, Citrus sinensis
  Intron number 2 from transcript orange1.1g018132m (locus o range1.1g018132m.g) derived from phytozome v7.0 (chr-ID sc affold00091; pos 277155 to 278114 reverse strand)
ggttggtcagtgcattggaattgtaagtttaacttttatgtatgtggacttactttccccagtaaaacatataagaacatgtctaacattattgctaatgtagtaggccagtggtcgattgaactgagattaatttatttcagaaatgagtgagtctagaacacttccagtgtatgcatcccctcgcgttggattcttccatgtgtacatctaaactgatcatgaaagagtaaatacacacttgcaaggatccaagaagatgtttctatacccggggtatgctagactttctttacagaaacagaaaaacttagtagtcatacattgcactttcatcattaaaaggagccatattgatggtgcaaaatggtgttatcatcaagatggctataactgtgagttggtcatggaccctgtttgcattaggacgcttttagccttttagccatctccacaagctgcttgctttcagaacattgctcccttgcagacttttggttcctgtttattgtgaagctgctcaactaagctcttgttccatcacacagttttcttcctttttgttgttacatgtttaagaacacttgtcttgaccatgcaacaagtgggtcaagttatcatcattcaaggagtgcactaatttaattggaaattgaataacagtagaggcacaattcaaagacaactatgcattttatagtataccagcacagaccgtaattagtagggtaggtgcaaaatgggaaatcagatattgcagatactaaaattctgatctaacctaaagtggttaaacaacaaaactaatacccaattatttcacatccataagtatgcaaaatggatgatgttagtctgatttggtatcaatggtcttgcaaagtgattgtctttttgacagttaactgatctcttatatatattttgttatggttgcagcgcaattatcgattcttctac

SEQ ID NO: 83129 - DNA, 762 bp, Citrus sinensis
  Intron number 1 from transcript orange1.1g018132m (locus o range1.1g018132m.g) derived from phytozome v7.0 (chr-ID sc affold00091; pos 278367 to 279128 reverse strand)
tggtgtcaattgtgggctcaatccttactgtactggtgagatgctttactttttttctgcataaactgtaatgtgccacaatctctattttgttatcttgcaaatatactctgtatttttcggttgctagtctctattgcattccagggctgataataagtaaccttaagcacttctttcaaattattgattaaaaatttattgagagggattaatttttttcaaaaagtttattttgttattttttttggaattatctgtgtggactaaatatgaaaaagtggtggaagcgcaaggatggttgaaacagtaaggaatcagcatgcaaagtaaattctcttcttttatgtcctaaatatcctgaaattagcttcttttcttcttcatgtcaccaattctattttaattattttctgtgatgaagtttctttaatttcttttctttttgataattacttagctgaatggctgatcattttcatttgcaagtgttcaatcttaaggcaggcatcagtattactggaaatcaattctattttaattattttctgtgatgaagtttctttaacttcttttcttttggataattacttagttgaatggctgaccatttgagatgaatgcccgtatgcttaccgtcagagcttccccccccttgaattatagatatgagtgagcttttttcctttgacatatatcttcaaatctaaattcaaattttgtgcaggatctattatttcttttcttgacgtctgccagaga

SEQ ID NO: 83130 - DNA, 756 bp, Citrus sinensis
  Intron number 1 from transcript orange1.1g047150m (locus o range1.1g047150m.g) derived from phytozome v7.0 (chr-ID sc affold00003; pos 4190327 to 4191082)
cttctaagccaccgcctcctttgatttctatcaaggtacttaatttcatctctcggctttgagtagctctgtactattaattcgttcttctttgattttgagttgattaatttgcttcgcttaatcagttaaatctcttgctaactggactagtttcagtcctttgagtagtggctagtgatgctcccttaattacctaagaaaacatcactactatcaaggtacaatccttccattgcatgaaattagttagtggggttgcaatggctttgttctttctttccagtaatcctacggcttttgtgcctgaatgtacaaccgcagttgaaaaagtccaaaggttgtgtttatattgctgtcccaagtttgggctttcaactacaagtgggcctataatgggctttcgttttggttgagtgtctcaacagtcatttaccatcttctttttctttttcaaacatttattccacgctattcctcttagcacaagcacaaattaaagaactttcctccctaaaattcatccttttagaacttcttttaagttttcaaaagactaaccaatcaaactattcccgagagatattattagtataagattgatcttaggtttgagtacgggatctagtattttaatatttaatcacactttgtatatgaaacaaacaaattataatgccatcctctaaaacttcattcaattaagtaaaccccatttcagattgcaggaattcgccaatttggactaggagaagg

SEQ ID NO: 83131 - DNA, 868 bp, Citrus sinensis; identical to SEQ ID NO: 82932
  Intron number 4 from transcript orange1.1g030884m (locus o range1.1g030884m.g) derived from phytozome v7.0 (chr-ID sc affold00023; pos 632781 to 633648)

SEQ ID NO: 83132 - DNA, 1031 bp, Citrus sinensis
  Intron number 1 from transcript orange1.1g022203m (locus o range1.1g022187m.g) derived from phytozome v7.0 (chr-ID sc affold07925; pos 537 to 1567 reverse strand)
gtgagtttgatggtgttaagagtttgttttgggtgactgttttactttttgtggaatactttcagtatagagaaagttattgttggtttccattttctgtagttgactcacttattgtgctctggctttgtttgaggttaaatgcttttgttaggttcttacatataagttcaatttttgcatctgcagattctttctttactgcatttttaggatacagggcagaatacagccttagataggcaaaatgtgccaagaaaaaaaaacattgtcattcttctaggacatgtgagcctccaatgctcactggcagattttcggtcaaatagttcagtgacaggtttaagatgccttgtcttgaaagatttgttagatctggcacttccccagataggtcattgccagaaagtagtaccatgcaggtattttgttccgttggttgctaccgacatttgccattcatgtcatacctttgaagattagatgccataccagtccaattcctacatgaggaaattgatcccacaaaggtttattataagtagagaggagggactgtatgattctgggaaatgttcccttaaaacaaatttgataatagaagtaatagcaacagagatggggcctttttactccccttgttggagtgtcaccatgaactgtttgacatatctgtaacataggcatctggtatactatttcaagaaatctggaaattttcttttcaaatgattatgcaagtggacatacaaattcatatgttgaatgtcttcaatggatggatactgctcaccatagtcttacagctactaggggtttaaataaaaatttgttctttcagcatggtttaatctgttagctggttacagtggtgctactttaacctctgtttcttataggaaaggtagcaaaaagcaattacattgtaagttaggtgttgcttccactttttgctttgcttgcaaatttaattttctaccttccttctttttccaggcataatagtctgcaatatcttgtcacttcacaga

SEQ ID NO: 83133 - DNA, 729 bp, Citrus sinensis
  Intron number 1 from transcript orange1.1g021553m (locus o range1.1g021497m.g) derived from phytozome v7.0 (chr-ID sc affold00025; pos 336380 to 337108)
cttttggtcaatatctgttagtaattttgttatcgtcatactcaatatcgatttaaaatgtttatttattttttaaaatattagtgatatttgattgattgattgattaattaatttcttggtcactgtggaatttattgcttgtgtttatacgtggtagatgttatctcaagcttagacttttattttttatgatgatagctgttgaatttcaaatctaaaatcgttagattaatatgggcttaagttgcttttttttttaattaatttgcagtacttttttttggggtaaaaaaaaaaaagagagagagagagagagagagaagtttctcagctttttgttaaatgttgtttggttttcctgaaaatgaagcccttcttagtcagtccatgcatttttaccagggttatattggcaaacttttatttctttgatttgggctttggaaattaattaaaggttccaaattttaatttgtttttacaaactaccaagtgttcttccaatttactgggcaactaaatggattagcatgctacactgcacccaagtatatattgaactcattggaagtttcttgagtatttgaatgtttcttcgtggaagcgttgatgtggaaatgaatagttttaatcttttgcttttttcccaagcacattattattgttttcttcaggcttaactcatgatcactgttatcttctaccatgtgcagtcatctttcgagc

SEQ ID NO: 83134 - DNA, 864 bp, Citrus sinensis
  Intron number 2 from transcript orange1.1g026795m (locus o range1.1g026795m.g) derived from phytozome v7.0 (chr-ID sc affold00025; pos 1184440 to 1185303)
ggttaatcgtctcgctcgcttgggtaagaattattttcatttgttatgtacgtatatgtatccaaatattatgttataagtttttgttttttggtcaaattttgcaactatgtctgtatttttattataaattttattttaacgccggtgtgagcgggatttgaattttagaccacttacaggatttaccaatcaaagtaaccagcgtgtaggttgacattcgttttacttatactttagatgggtgaatgtgtaaactaggaagcataaggtagcaaaggcgagcctgggaggtttttatactctatgggttcttattctcctaaataggtagatacattttgagcgaaggatgaagtccaaaagcaatctatggcagtgaagggtatgtgaaactcgatgcggacaaatatctaattggttgctatgcctagttattaaatggattgttttactgatgagctaaacttcaatagtgcctaatatatatatgtcaggcactaatcaatcagaagtttctaagtttatctgatgttagtttcattggtgaagtttttaatacagctgtctaaatatagaaatgattgaaggtgtagttgatttcattgaaatagagtagttgatttcatagaaatgggttttagttgttaaaatgttgttgcattgttgcgattctattgttagtcaactttatttatttgtttattgtatttctgattttttccataacaagagaggagtattgctggtcttcccagcttgcatctttggaatgtttgtctctgtgcaatgtgccacttatacaatattcttctttcataatctgtaggttttctctgcaactgtgttcttccagcgggtttg

SEQ ID NO: 83135 - DNA, 732 bp, Citrus sinensis
  Intron number 1 from transcript orange1.1g020734m (locus o range1.1g020734m.g) derived from phytozome v7.0 (chr-ID sc affold00473; pos 96152 to 96883)
acaaattcagtgccgtatttgcctcgaaactggtaattgtagcgaaattactcaattttgtaaaacttttttttttaattgtactcgacatttgctctgttttagctttatttatgtttttgcttcgtatcagtgagtgaattagttggtttaattttcaaattcgagaaagaattaggagaattaactgaaattagaagaaaaatgaagcaacttcacagtgaagctttatgcgaaaataaaataaaatataagtaggttatttcttctccgttaaatgctggaaaatgtgaggaaataatcataaattttttttgttggttttaggaatttatgaagtgaagtcaactatgggatgatttgtgggagtgcttctgttggaaaaccacctggaagtgctttgccctagtaaaaaaatatatatatatagttttgtgcgtttctgacaatgatcaatgattgcatttttagctatttgagactgataaaagcaactcttaaacacacttaggttttgtagttgtggtgttttgtcacagtctagttcagaaatgcttttcactgtgatgttgatgccaatgttatctggctgttatagagtgataaatgataatcttgtatgttccttgtatttaactttgagttaaaatacatgtcaatgctctcatttttatatattcatgtgcattttcttcaggtagggactttattgctccttgcaagtgcaaagga

SEQ ID NO: 83136 - DNA, 863 bp, Citrus sinensis
  Intron number 1 from transcript orange1.1g028138m (locus o range1.1g028138m.g) derived from phytozome v7.0 (chr-ID sc affold00018; pos 560207 to 561069 reverse strand)
atcaagaagccgccgttgagttgggcaaagaactggtaatggaattttctcaaattttttttttccatctgtttttcatgtctctttttcagaatccggagttttgaaagacaatctcaaatatttctccattttgtttctgggttcaaccaatcctgcattgtttcattcaatggtgcaattttggcttcaaaaaattcctttttttttttttcctctctctttccttgtgtttttccttgtccgtcattaaaagggattttcttttatgcattgtttatgtttcttatcaactgggtcgatttttgttctggaatcaaacaatttagaaacctcgttgtttcattaagctttgaacgtgggcatatgattgttttgttgataaaataaaatattattagcataggagatggaaggtttagggtttatgtttggcatgacagaaaaactgctagtgctagctgtaacttgcctgtcaggtgagcagcatttttgcatgatcttgtttgtatgtatttttctattttcagtttcacaaatcacaacacaaaaaagaaaccgttttttaaaaacatttttttaataaacaatttctcctagagaagctagctagctaacaaacgtgctcgcttgatatcatgacactcttttgagcgtggtcttctcttgtgcatattcccacaaagaaacatccatgaccatgatttttacttatgggttggttcctttgtaataattttaatattaattttttttaaaaaataatgtttgtttattgtgacatgtgttaatggtttttttttttctttttccactttccaatgttgttttcttgaaggtggagagaaaacttgatttggttt

SEQ ID NO: 83137 - DNA, 776 bp, Citrus sinensis
  Intron number 1 from transcript orange1.1g033112m (locus o range1.1g032690m.g) derived from phytozome v7.0 (chr-ID sc affold00123; pos 233681 to 234456 reverse strand)
ttcgtaccgagtgaagcttcttcttcctccaccatgtatgtttttcaccagatctgataatattgtacgtatttttcgatttataatatatcttatttgtttatttactcagccgtgagatatagtaactagctagctaggtatttaaatacatactaattctgataaaatacatgcagatctatagatctggatcaacagtaaaggctttcattcaatgggtaatcaagttttcaggattcaaaagcatgtttacttcggccctttttttttgctttaatttgttagttgcttaatttggatgaacctttttaagcttttatgctttgacattttcttaccatcttgctgtattttctttatcattctttctctgtatatcttattaataaatatatcatgcatccttgtgggggtggagagtgattagaataccccataattaattaactaccatctccgtggtgctagctggcttctcgaaacagttttatagggtaactttgtgctagcttgtttcaaatgctttcacataaaggaagcactcatggataagataaatgtacatatgagttaaataatctcttgcatatatatacaatatgtaggagggttaatttccttcatccacatatatgtgtgtgtgtgtgcacatatatatatatatacatccatttatgattttttaattaattaagttatatggggatgcatgacagaatgagcaaattaattcttagcttttgtatatatatgttataataacagggatcaaa

SEQ ID NO: 83138 - DNA, 295 bp, Citrus sinensis
  Intron number 1 from transcript orange1.1g022829m (locus o range1.1g022829m.g) derived from phytozome v7.0 (chr-ID sc affold00003; pos 1791718 to 1792012)
ggtaaatttcacttctcaaattattgtggtttttgctagtacgattcttttcttggcgagttattttttcttttgagggatttgtaatttctgattctcgaatgctctcggttttcaagcttttgtttgatttgatttcttgggaagaaaggaaagaaaaagaaaagaaacttttgactgccggtctaacttttctatattataaagggtatgtttggaattgaggttccaattctcttcacttacatttctgatatagttttacaatttcacagtgtgctttcatcagagtcgg

SEQ ID NO: 83139 - DNA, 272 bp, Citrus sinensis
  Intron number 1 from transcript orange1.1g009565m (locus o range1.1g009565m.g) derived from phytozome v7.0 (chr-ID sc affold00004; pos 3544909 to 3545180)
gttagacgacgtcgatagtcaacaacaactttctggtaagtgttaataactttatcgtatctgcggtacattcatagcttcacttgttaaaaaacttttttattgaaaattttcttccttataaaggagtttgagtttattacgtcaattgagaattgtttgaatcattgaaattgataaaaattttatttttttaatcaaaacgctgaagaaatgatacattatttttccttaaaggtgcaacgaattacgagacagccggtgaagaagga

SEQ ID NO: 83140 - DNA, 881 bp, Citrus sinensis
  Intron number 1 from transcript orange1.1g039022m (locus o range1.1g039022m.g) derived from phytozome v7.0 (chr-ID sc affold00025; pos 430195 to 431075 reverse strand)
gcggtaacaagtaatttcttttatttaggtttttttttgggaattactgctgaatggatcataggaatttttttttccttaaaaaaacaaaaatttaaatttagtaattgatgttgcttgtgaatattttcgaaatgacgaagcttaaggaaaattagttgaaaataggtggagttacagtgtagaaatcggatctatgcatggaacaattaagtgatatgtactaggatgcacatgtactctttaatttatgaaagagagatgcgaagcaattgagatttgtaatttgccctgcttatatattgagtttttggagttgagtgcttgttgattcttgtatttgattggcttccagttgttcctggaactgtcgcattttgaaaactcttcaaagaaagtaatgttgagtggaagttgttctctgaatttggtcttttttgtcggatgttgtccaagaaacatcctcaatttgggttaacatctaacaatcattgtttttttagcaagtagctttcacaagtaattcaaatttcaccatcgttggcttgatgatgatagtactttattgtgctttagatgttggatttagtgctgcttggtagtttctgtttgttttggctagcttcagatagattcttgcattctggtattagaacagcagattatctacactactaatgtgcttttttttttcaatcgggttttatctaggcaatttatgggatataagtgaacagaaccccaaagtgaatcaagtttatttactgctgtgttgcattttgcatttcttgtaaatccacttatttgagaaagaagagttattaatctcaaggactttttctgtgatgatgatgataggactaggaggaattggaagccaa

SEQ ID NO: 83141 - DNA, 950 bp, Citrus sinensis; identical to SEQ ID NO: 78282
  Intron number 2 from transcript orange1.1g008940m (locus o range1.1g004992m.g) derived from phytozome v7.0 (chr-ID sc affold00011; pos 899668 to 900617)

SEQ ID NO: 83142 - DNA, 927 bp, Citrus sinensis
  Intron number 2 from transcript orange1.1g009574m (locus o range1.1g009574m.g) derived from phytozome v7.0 (chr-ID sc affold00128; pos 61606 to 62532 reverse strand)
ctacttctgttgaaggtagtctttttccttatccaagacaaaccataaagctctttactttgttttgataagttccatatccgtgtaaaaatattacgttgttcgctgaattaaagggtatgcttgagactgaagtgatgtgctgtgctatgaattggaatcactagcagactagcattcaagtataagtgggtacccagttggtacacattatgtgccaatcggaagtgtgagtgtttacttaacactttacctactaacataccccaagtaagatatgccgctttgatgtaggacgcatagggttattttaaatttagaaattcttattaaagtcaatattatttttgatttcatatgactgttatctgataagtttgatacctttatcttctttctctttttctaagaaactgattcatgttagagcttaaaactactgtttgggctgttagctaccggcttaaggtttttaggtcaagctgtaacttaaccatgataaccaaagctagattcctagccagattgtgttggtctcagtgctggactggtggactttttgtctgagatggaggttgacagttccacattagctagtaaatggaaaatccacaggatagatgattccaactaatatgctagtcttttggatttgacaaatagacccaagggcccaataagagtatcaagttctagcacccaataagagtattaatctctaacgtgctaaactttgaaaaggctaatacgttgcattctagtcgtgtgatgatgaatttatgcttcttgtaatgttgacgtcatcatttctattctttctattagcaatttgcttcttctgacttttatcattttcattttctacacgtttccttttcctccttatctttagctggtgtttctgcagtatctactggaacagctgag

SEQ ID NO: 83143 - DNA, 989 bp, Citrus sinensis
  Intron number 3 from transcript orange1.1g048204m (locus o range1.1g048204m.g) derived from phytozome v7.0 (chr-ID sc affold00323; pos 8835 to 9823 reverse strand)
aaaattaaaggaggaacattgtaatgtagttgtttgggtttgtagtcatgtacaaaccgacaaattgaattgttcttaaatatatatctaacaaatatagaatatacttaactacttgtttccaagaatctctctaatgaatttacgagtttcatcttttaagtttaataaatacagaatacggggaattgtttccttttacgaatcttttgggtcaacttctgtgtttgctgcacgtggcgctgtggtaaaataagcagggacaaattaattggtgattttgtctttttcttttaatgacgatcatttaagtcgggtcaatgttgcaaagttgttgaaattgctacttttagcttccagaggtgggaggatcatttggcttgtcgattcataagaatcagttatccaaggctaaatcctacatttcttttatctttgttatgcatacaacaacagtctatgatgcaaagggcatgctaacatcttgagtctagtctttttaaaattgagttaccattttcctgaataatcagagtcatttgtgtaatgaagtaatttgttttaagacactaatttcaatttatatgctttgattttgggagataacaatttgctatatttcaaaagaaattgcagtcctttttttctttttaaagctgatatattcggatccattctatggtaatttttctttaaacggatttagtaacatcgaaagggaagtacgaacaaaaatgttgtcaacaggacggattgtgtcaatgtcagaaaagagaaaattcagttaccttgttttgcttttgacttggtgtagcacgaataagttaactacataatttgttcctcaatatctctgttcttcatatgtgatacttatgcttctttgatcatcctattgttatagaggtggtttgatgcttgagcttactcatttttctccatctggtggtccagcattggtgctcatcaaattgcacttgcgtgtggtg

SEQ ID NO: 83144 - DNA, 503 bp, Citrus sinensis
  Intron number 1 from transcript orange1.1g048204m (locus o range1.1g048204m.g) derived from phytozome v7.0 (chr-ID sc affold00323; pos 10116 to 10618 reverse strand)
gaagttgaagtaccctttatctctctctctatctctttatttatctattcacccatgcaggtttttggattttgattatgcaacttctctgatgtgcactcatattcttgtttcattttgatgcttgtaatttaatattttgtgatggaacgaatggcaattacaagagaaaagaaatggattttttttttaatttaataagtagtctataagcaacccaattctctgcggcccatgtgagcatgtgagctgagttcgaatctaagacctgttatacttagtagttgaattaagttgctatggttagtttcattttcccatttttcttgtttaactgtgctgtgtctaaactatatagttctgacgttgaatatgatggatttagttctgaagctgatcaattattttagtggaaaaaatcactttcatttgggtctaggagatgattgtggatttatttgtttgtttctgtcttgcagggtttagtggattctcggtttaga

SEQ ID NO: 83145 - DNA, 723 bp, Citrus sinensis
  Intron number 1 from transcript orange1.1g015665m (locus o range1.1g015635m.g) derived from phytozome v7.0 (chr-ID sc affold00007; pos 1004171 to 1004893 reverse strand)
aaccagccaactttctggcgcaatttccctttcaggtgaaaagctcaaaacacttgaagattcttgcttttagttcctcgttctttttttttttttttttctttttttggggtttctttgttattttgggaattcgtcaattgttattgttttttaaatattgcggtatgcggattgccaaataggctggtgggttcaaacaaataatgacaaaatttttattattattttctaaaattttaattttaattaatttgttttgcgcggcatcagtgcagtgattaggagtgttgactgctgctatgcttatagagacttgtgattgatttttgtgagatttatgatctgggttcccaattgcttttgaatttgaggtaaaaaaagattggtgcttgactaaaaattgttgctgctaagaattttggattttatttttatttttattttttgcttttattgctggaataggctccagaatgcttatgctatctgatttgtattgattgaggatacggagcttttcgtttggaaatttgtgatttgggttgatgggaatttaaggttttggtttctttctgaggtcaatgaacacgatagaagggtttgttcttgattgagcttactaataatcagaagtttgagctttccagcttagattctgttgctgtattgaagaaaattaagtgtttgactttccctggaaataggattttgcactggttt

SEQ ID NO: 83146 - DNA, 659 bp, Citrus sinensis
  Intron number 1 from transcript orange1.1g030757m (locus o range1.1g030757m.g) derived from phytozome v7.0 (chr-ID sc affold00048; pos 501581 to 502239)
acttgtcggactccgacaacctttgacagatttttgtaagttttttgagttttttgtttatgagtaattgttatatgcaatttgatttagttaatggcaaattggcaatgtatagtatcaagatcttccaaatataaagaattgcctaatatttgtttaaatttttttcttaaaaaataagataagagtgaattttgtcttgagaatgaaagatcaattatgttttatatttatgaagcgaaattaccaggataagtgtcgaaatgggagttattataatttagttatgttgtttgtaatttagctacaacaagtaggaagatctaaacagtttgattggaattcgaaaataatgaataagatagagcctttatttgacaggattagaatgggattcttctttgaagtagtacatgttgataaattgtctagaatttgaagtgaaggtatatgccatgggacaaatatggttgcatgtggttctgtatcaagaattcaattttttaatgcacctgtttgctgtcaaagatgggggttttactcctcaaagctggttttttccaggtgtttcccattaagctctgctggaatagcagactactgatatcttggtttgattgtgtaggaggaactcattttattcaatctgggagaactaa

SEQ ID NO: 83147 - DNA, 918 bp, Citrus sinensis
  Intron number 1 from transcript orange1.1g020736m (locus o range1.1g020754m.g) derived from phytozome v7.0 (chr-ID sc affold00004; pos 1724551 to 1725468)
catgtaaaacattttgttctatcatttttctttttgccttttgtctggttactgggaaactggggaaaccgagctaaaggaaagtgattttgtgactatgatgaatgctgtgggttgttttgctcctctggttatgaaagttctatctattagtaaacatttctgctttgcctcctcattttttgtgggatttgggtatccttcaagcattctgtaatttgcatgcagtgatgatttgctttaggttcgttttcctgtgaccttgattagttagttttggtgccctttgctcactttctctgtaaaagtttccttgtaattcaatatcttttgattctcatgcgcctgatagtttatctaggcaattttatcaagtgggttttgttggatctctaaagctgctttatttgtgtcttttatgcatcaaattttacttatttgtcagtttttttcttgcccaaattaccaaaccatggattttcctatcatgtttcccaagtctggtccttgctttgttattatcggagaaataaaaggagtcccatttttcacccttttgttcttgctgtatttatctgagactttttctttagtaattcttttcccttttttgcatattgaattctcctttttcactaggtgtgttcattttgttggcaaattgtcagtttccttatgctttcttgttatacaaagaataattcttcactttgtttcaatggaatgtaaaaactggtgatatttttgtaggcgataacatctcctacttctcatggtctgtttgtgataattggttatcattaacgttcattgttgaggcactgtctcatataagttctatgtggacatttatagaatgagtctaactttgaatatttttgctactttttgtgtattcagtaccttaaggtagattaa

SEQ ID NO: 83148 - DNA, 510 bp, Citrus sinensis
  Intron number 1 from transcript orange1.1g025281m (locus o range1.1g025281m.g) derived from phytozome v7.0 (chr-ID sc affold00010; pos 623038 to 623547)
gtacgagatctcggtgaattctcgggcaacttttggtaagacagttggatcttagtttgtctttcttttttctgtttggcaggttagaaaatgtaggaaaagtaattatgacgtgtaatgatggtagtaaattcgcataatgctagagaaaaaaaacgtaaattcggcaggttttcttccattacttctagtacgtggcgttgcatggtcctttttagatctgcttttcatcttttaatttctcattatccacatgtttaaattaactttaaattttgcaaataaacctcaaaattttatctataattattttaaataacaacccagtagttttggatagaaaatagttaccagacttgtcatgcgttacatgaggcggtgtcccccattaaaatatgaagtagctagcgagagagtgcattgtaattttgagaataaagcgggtgattttgtgatgggttgacttgactaacaggagaggtaaagaaggtgttaacgggagagacaggg

SEQ ID NO: 83149 - DNA, 824 bp, Citrus sinensis
  Intron number 2 from transcript orange1.1g025281m (locus o range1.1g025281m.g) derived from phytozome v7.0 (chr-ID sc affold00010; pos 623746 to 624569)
gaagttgataagctggtcgagcaggtttgcacgtctcattaattctcattttatatttttaattgtttgactattcttttcgaaattacatattgtgtactcgatagaaaaaagctaattgatggtgtaaaagctcaaatgcagggaaagagctcaaattaattaattaaaaaaaaaacaccacttgtttatttatataatgaaaaagtaagtacaataacttttactgaagtcatagaagcttaatgtagagtggatgagtatcagccgttggatagggtagagtcaaaagtgggtgacagttctactgttatgatgatcaaacagctggctttgatgtgggtgttacatcaagtcattgacgttgacgtacagacgggttctatgtcatcatttgctgtggaatctagattgccctgttgccgtcgcgtggggctagtaagtttttaattaagcagtgagagcagaaagctccactggttctcaggtgtaattaatctttgggagcttctttaatggggtaattttaatttcgcgggaccattatctgtcttctggaatatgcagatcaacggtgctggatcccatagtcttttttatttttcggtttataaaagggacccatagtctcttcatagtctctttaattttgaaattcattatattgttattagattatatattgccaggcaatatattcttgagtcttgttgtcccttaatctgcttttctgtcttctttacatgccatatgattcttgatattagcatcattttccttttgcgctttataacaggtttctgccattgaaaagtccatctcaa

SEQ ID NO: 83150 - DNA, 747 bp, Citrus sinensis
  Intron number 2 from transcript orange1.1g031397m (locus o range1.1g031397m.g) derived from phytozome v7.0 (chr-ID sc affold00019; pos 862303 to 863049)
caaattcagaagcggaattgagtgattcaaataaggtatgtgatataggatttattaatgtagtctatttaatgagctatagcctttcaaattgacattcttttgattattattaagtttattaatagtgtgatgtgtttagcttgagcttttcttctatattgttcgtcttagttaatgtccacgagaaaatgagagtgagtaaatatccatattttgagagtttgtatctgatggatgacccatcactagactaaacaaagttaccgtaagtaaggagtggcatgttgatttcatgatataggttacacacgaggtgaaaattatgatattcagaataggagctcttttcgaaatcatgatcaattttcccaactctctcaatttagtaaaggattgtgggtgccatctagtttagttggtgaaacctcttgggctgatatagtaggtctcggttttgaaccctaatggtgaggagatttaaatattcagttaccagtcatgctatgtcttataaaaggtcgattcaatactcttaagtgttcccttcttaggttttaggataatctaaatgtgatgttagtaagtgagattgcctggcagtgggataactatttcatgtctaacaaatttcctgatattctgctgttgcttgagaccaaacaacatgtatcttttaatttattagtgattaaatatttacctttctttaacttgtttttttgtcccacatggcgtatatgcagg

SEQ ID NO: 83151 - DNA, 774 bp, Citrus sinensis
  Intron number 1 from transcript orange1.1g019146m (locus o range1.1g019146m.g) derived from phytozome v7.0 (chr-ID sc affold00585; pos 33359 to 34132 reverse strand)
catcggagctctcccaagtttctacggttagtcattgctcttcatccccaacactaactttgataaatttttttcccgattcatttaaataacttcttaattttaaatattggtctcccaagttcctttttctcaaatgtagaataagattgatgttaatggatttgctctttgttgaagccaattgaagatttttatacattctgtggcctgttaaaaaaatgaaatagaaaagtttcttaggatgccaatactaaatcttgagtgtatatgcattggtaacaaataaaaaagaagtgggatgaacagttttgtgacatgggttttaatgggtatttgggtttgccaagtaatgcttgattgtttaatttttattattagtttgactagttttatattgtttgttgttgtctgttatgcgccttgtgtatttgagagatgccctccatataaaggtgcattgccggagattctcgtgcctcctctcaagggcagacctcatgtcatgcaatagtctgaatctgtttatgcataaatcatccgctgcagtctgttctttgaagcaattattttgtgctcctgtggcagaactttgtattgctgcacatttatttattgaacattctgttgctgctgtgcttcagtttgatgattttgtggtttctattttgaattaaaatttgtaatctaaatcatttctgtggtccttcttgacatttgttaattcttcttatgacagagaagaatttgcttcttgcgtatcccttatcgttc

SEQ ID NO: 83152 - DNA, 558 bp, Citrus sinensis
  Intron number 1 from transcript orange1.1g016751m (locus o range1.1g016751m.g) derived from phytozome v7.0 (chr-ID sc affold00023; pos 776504 to 777061 reverse strand)
gaaaaggtaaattttttctcacacttacatacttgactttgttttagtttttctttctttttacacttcgctttgcatgctgttgaatcttaatcttatatttttgtgttttcttatataataatcatatcttttgaggaaggaatcaaaaagtttctgttttctttttcatttttattaaaaaggaaaaaaagtgcagaaggcaaagtacttgattaattaatgtaacaagatggtattttgcccaactgggtattttagcttgataatttcaggcatcatattgtgtctcatgcttggggtttatttgatttaatgggttcatcatattgtatgatcttttgttgtggaatctcgtggagaaacacttgaaagttgtaatctttttttttttaattttatttttaaatcgtttaattgcgacacggcatattgtccttccaatacttgcaaattacaaattctggtgcagttagattagaaagaagattgatcaagggaatgtagtcatttaatgttctcttttttgtgatatttcagatttgtggagatagagag

SEQ ID NO: 83153 - DNA, 338 bp, Citrus sinensis
  Intron number 2 from transcript orange1.1g014850m (locus o range1.1g006639m.g) derived from phytozome v7.0 (chr-ID sc affold00121; pos 418958 to 419295)
aaggtaaagatatgttaaagttacatgtatctgttctacacacaaaataaaaatcatatttacacaacgttttagagcagcgacagaaacgacaataaaactatatggtattaacgtattttttattattttattaacagtaattccacatgatttgatcgtgtttctttttattagtttttaaatttaagttaactgcatatagttttaaccattgattaattaagtggttaaatcgattctatttgtatgatcttatgtagaaagagtatgataaacttagccaaaacatagaacatgcagccaaaagatcttctttatttgatctaacaggagga

SEQ ID NO: 83154 - DNA, 540 bp, Citrus sinensis
  Intron number 1 from transcript orange1.1g030108m (locus o range1.1g029394m.g) derived from phytozome v7.0 (chr-ID sc affold00062; pos 189286 to 189825)
aaaaacttccccaaggacgttttactggtaaaagtttctcccattcaaatcattattatctttctttcctttttttttctttctttctttttctaaatttcattttcctttaacaatttttattttcctgcattttctcggttgacaaacagactcgtaaggatccgtttttatctgatatttctcctattttgtaagatacatgcagtttatttcagaatttaatgatccgtggcttgaattagtttgattagtttcatatatgtctcgattcatgagctatagattactgtgcctgattcttgctatatatatattaattatcctagcttcaaatttaggttttaacaagtattttatggataaaatttatttttaattactatttttccttgattttggtaagtttctttatcatgatctcattaaatagtggattcgtcttcttagtgcatttaattattttttttcaaaattcatacaagcttagatttagaggttgaagtttcatatactaattcaggtatcaagagcatcgag

SEQ ID NO: 83155 - DNA, 168 bp, Citrus sinensis
  Intron number 1 from transcript orange1.1g030894m (locus o range1.1g030894m.g) derived from phytozome v7.0 (chr-ID sc affold00186; pos 245134 to 245301)
aagaagctaccaagcgcctgtctgagattagagaagtaatttgattgatttgtttcttcgtcgatctcttattcatgtatatgtttctttgtttcttgaaatataattaagaaaatattttgattttcatcaggagcttgaaactttggctgatccattgagaaagga

SEQ ID NO: 83156 - DNA, 516 bp, Citrus sinensis
  Intron number 2 from transcript orange1.1g030894m (locus o range1.1g030894m.g) derived from phytozome v7.0 (chr-ID sc affold00186; pos 245343 to 245858)
agttaaagccactgggtctcacctgccaaagaaaggtgaaaattttacagcttatttttctttatataacattgtttgcatcacgacaattattattaattgaacaattccattaattgtgattcaagattcaagtataccataaaaaagttagaatatgctgttaatttgtttttgtttatgtttatgggtggaattttatgctgtctatctcattaaaggcctcttaaaatcagaaaattcacagtttccttgtataattttactatcataacttgtctcttcttcaatatttaaccaaacaaaacattgtccatatatagtatatttaattatttaatagctaaaattcaaattttacaatgtatagatgtccgcacttgagagtgtttatgtaaatgtattagtgtggttatatttttattctttaattagctgttgacccaatttttttttgtttttctcttatcattgtatataggagagggaatacaaagaagctcttgaagcttttaa

SEQ ID NO: 83157 - DNA, 772 bp, Citrus sinensis
  Intron number 1 from transcript orange1.1g021718m (locus o range1.1g021718m.g) derived from phytozome v7.0 (chr-ID sc affold00028; pos 788502 to 789273)
aatttgacactcttattgtaaatttaccaggttttttccccccctttttccctcatttccttcatttgcattagttcaattattaacatgtatccaaatcatgacaaatttttgccatttaaggtcccaaaaatatatggagacatatataaggtgcagacgtttgcacttataaaatgtgggttcagcattttaagctcttcttgtaaaatgcttttacaatgttctaaggtccatgtacagcctttttataatgtttttgaaatgccgaatctgcactttattacgtacagaagcctacacgaaggactcattatttatatatatatatatatataacacttgctttaacatacttttttttaagaatataacatagttgaggacgtctatattttttatatgatttaaaattttaattttgatgacatcagtttccattaaaattggagatagaattgtttcgtacaaaaatttcatcttcacgttaatcctttttccgctttcagaaagaacgatgagaatatttaaagacaggaagctgatgcctttttctttgcttttcttcatcatttgcgtctaaaaggaaggaatcaagtaaagtcaaagaaacattcagactggaaatagaaaaataaaaggaaaatttgcacatcatgaggttaaaaggcaaaaaaatagaagcgtctaagattatatttaacaatatgtatatctttgttatcgtaactttacaggttttagaaaggaacaactgaaggttcaagtaacc

SEQ ID NO: 83158 - DNA, 891 bp, Citrus sinensis
  Intron number 1 from transcript orange1.1g020609m (locus o range1.1g011452m.g) derived from phytozome v7.0 (chr-ID sc affold00024; pos 269008 to 269898 reverse strand)
cccaggaaagatttcgcaacattcgtttgcaggttagctcttttcttgttcatttctaaaacttttagcctttttttttttaattttcatataggtcattaattagcttaagcctgggaatttatatttccagctatatgaatggattttgcttgatgggtagctgagtttgactctttttgcttaatgagcatttgatctaatttgcattcttttagtgtttcactgcaaatttgttaaatttaactgctctgggactgaaagagcaaaagactctacttttaactcctaattcaagctaaataacctttcctatttttctttcttttatttattttagtttatttaatctcatctacttgattttgaagttgcgggtatgaatattttgactttattatccattgttgaacggctaaataattgtgttttagttcttttatgtgtttcttaatattgcttggttgttgttttagtcgctggtcatatttcgaatatgtcagagttagaattcttgggagatttatttctcaattttgaaattggatttagaaacaggagttacattttctttgtgatcaatatgtgaagataagtttcatgatttcacttatggtcatatttctagtaaccaggagcatggggagtaagaggaagacgcatacaaaattatgatatttctgcaattttgatgaatttagctgggagcaaataatgactccaccttatggtggaccattatgaccgacatttaacatacatttaatatatgtatcatttagggtcaattattaatggatgctacaattgtgtatcattcagtgccgtttagggctttcttatttaaactctgcttcttacttgtagtgttattttatacacaggaggaat

SEQ ID NO: 83159 - DNA, 927 bp, Citrus sinensis
  Intron number 1 from transcript orange1.1g035374m (locus o range1.1g035374m.g) derived from phytozome v7.0 (chr-ID sc affold08735; pos 956 to 1882 reverse strand)
ttctcttgtgggtgacaaagctgataatattccaggtactactctattatgtcattggagtaatttacttcttgaagtcctcttcatttgaatgccaaagttcattcgatattgcaatttacattaagtttgattgttcagttgctcatgcattattcatgagttcaaaatgatgagttacgctatgctgtcagcaacaaatagactagaacatgtttgtgtccgctgattttttgtttaatgtttttgaaaggttgtgtccaccaatttcagtctggcattaacgtcttatttcagtaaattgctgtttctctatatatggtgcagttttctatgttcaccataatcgtcttttatagaaaaaatatgtagcttgttttatgaaattattaatgaaacactgagtcctagaatttgcttgcacatacaaatttggaaaaaaaggaatagtaattcacctcttgtcttatatttggactatgctttagtcaattgttctttctatatttgttcttctttttcctctttttcttcaaaatagatgtacgtctatatgttctttgatactgcttaataattatttgaagtggataaggtaatttactaaagataacctcctggaaggaggtgaggaaaggaaaaaaaaaaaattatggcatggttaaagcaaaatcctaaagcttgaataattccaaatgtaagatacgaccacgttcaggtactatttcggtttccgaacgagtgagggaaggaaacgattgctttggattgcttcagaaaggaagcaaattttaatatgttaataactaacttcttttttcacttatatatttcaaggtccaagcaagccttaaattctattgattgatgcattattactttgtaaattcaggagttgaagggattggagacgttcgtgcggtgcaa

SEQ ID NO: 83160 - DNA, 881 bp, Citrus sinensis
  Intron number 1 from transcript orange1.1g008389m (locus o range1.1g008389m.g) derived from phytozome v7.0 (chr-ID sc affold00016; pos 785358 to 786238 reverse strand)
cactgtgtaaacgctccatcggcctcggttgcacggtataaagttcttatacacacacatacttaacatcatacatgtgcacgtacatcgtcaagaagcaataaacccgttcgtatatttgttttgaatgtttatggataattagattttaagaagagataaactgtattaagcgtccagactataaagactatattacagtcagtagaccgtaaaatgatatcaaaaagtgttttcggatttgttttatttgaaaaaaaagcgtttttttttagtatgtatttttatttttagaaaattgttgctaactttattgaaaatggaattgagtgatgatattatgctggcctattttcattttattaaaatttctcgcttgatttgccatatcgctttactaaatcgttttgtgtgcaataactatctaataaattgtgaggaagagtagtatcagttagagtttttatttttgaaactcagccctgtttctatttcttgtatcgcttatttccgcatttcgacacaaatttagttaccgttttgggtgcttgaaaattcttgttcagctctttttgtcccattgattcgtgtacttgatatttgactagcattagacatgtagaattttagcaattctttaatcggttttggttcttatcctcgctctgactttaaaaagtgacaagaagttcgaatccactaaatttgtgtagaatttttaggtagaaagtatattatggctggattataatgggtttgctgtgttcagtttgtttcatactactttatgctgatttggatgctgatcatcggttaaatgttatcttttctgttttttgctggcaggtagcaataattgcaccaaacattcctgcaatata

SEQ ID NO: 83161 - DNA, 801 bp, Citrus sinensis
  Intron number 1 from transcript orange1.1g034435m (locus o range1.1g030647m.g) derived from phytozome v7.0 (chr-ID sc affold00115; pos 100626 to 101426)
tttgttttttttttccttctttcttttgtggttgatttatttttgtggtcgttcgttttgtagggcgagtgataagtgtcagagagagaagagaaagacgattaacggtgatgatttgctttgggctatggcaacgttaggctttgaggattatattgatccgctgaaaatttacctaaccagatacagagaggtgatttgcgttactttttgattctcgtttgttttgtttttattagtccgtttgtttacttgctatgaaaatggagagcatttagaagactgatgactattaaatttataaggttctaaattttgtttggattttgtttttgatgtttatttcttgatttattttaactaatgtagtttttttttcctccccatttttttttttttgtcttttgtgttgatactgagattgcaatgctgtgcagatggaggtaactttatttttcctcgctaaatcatctctcttttttactaaaatttcctgttttaaacttttgattttttgatttatttatattagattatgctaattatggcaatttttagggtgacaccaagggtaatgcaaaaggtggagatgcatctgctaagaaagatggtcaaccaaacccaaacactcaggtataatctgtttttctttagtattttttatttctgataaacatgcgcgcatcaatttttttattctttagaattaaaattaacaagctttttcggattttcttaatttctttcttttgtacaattttgacagcttgctcatcaaggctccttcccgcaaggtgttaa

SEQ ID NO: 83162 - DNA, 731 bp, Citrus sinensis
  Intron number 1 from transcript orange1.1g039386m (locus o range1.1g039386m.g) derived from phytozome v7.0 (chr-ID sc affold01091; pos 13273 to 14003)
tctggtgtctgtgctgatctctgctacgattgcgggtacttgttctctttatctaattttatttttgagaatttttcctaaaattggggttcgaaagttgaaatttttcttcattaatgcaattcttttatattacagtttaattgcaaaatataattagcaacgctactggttatcgatatattatactccgcttagtttgttatttttatttttgtttctaagatttttatagaatcaccatcggtccctataattttcccaaatataactcttcggtcccaagccacgaataatgtattaaaatagtcttttacgtcattgttaattgaattgatgtgatgctttgcaagttgaaaggagtagcaagttcaaatgcaccctgctctgtgtttttagtttctgagctatgtgagctatctggcttattagaaattctgtgggactttttttgagtttctgtaatgcattaagttcataattttacaagttaaggcaatgtcttttattagtttctttcactaattgacattctacttgtatattcagatacatctctatgttcaacaaagaaatattgcacgacttttttttttctgtttttaatcattatttaaacattttttgaccattttagtagttttttttaatttgttcattatattctattgtattgattttttttatcgtttcttcctcgatttggaattgcatgtactttagatctgcat

SEQ ID NO: 83163 - DNA, 645 bp, Citrus sinensis
  Intron number 1 from transcript orange1.1g044987m (locus o range1.1g044987m.g) derived from phytozome v7.0 (chr-ID sc affold00072; pos 238914 to 239558 reverse strand)
tggtagttgatcctcttcctgctggtcttgatcgggtgagtttttctcatctggttggttcttgttgtgttcttgtttttatgcaacattttacaagattcctcaatgtcccagctatttacggaactcaatttctttgatacttttactatttaacttttcaagcagaaatttaaattataggaaaaagagtgattagttgaactactaattcagcattgctgtttcagacattatgttgtaggagctgcaatcttttgctttcggttacatcaggagacttaatcaatggttgttaattcacaatgtattcttcaaacttgcacgtcttacctaatgttttgttttttacatataaatgcaataagttgcttgtcattctcctaagattaatttgaattttaagttaaaagacatgtgagaggcctacctatcgccaactcaaccgtaaagtgtccacattatatcttggcaaaagctgtactacaatgatatctgggttttcttttctttgtttaaattacatttaatgagtgtctgaaatgtcagaatacgtttcgcagaagtttttttttttttttcccttgtactcattttgaaatgtttccatttctatactcagggatacattgtcttaaacagacc

SEQ ID NO: 83164 - DNA, 1060 bp, Citrus sinensis
  Intron number 2 from transcript orange1.1g025729m (locus o range1.1g025729m.g) derived from phytozome v7.0 (chr-ID sc affold00023; pos 452396 to 453455)
aaactgtgaagttggccattcgtgctttgcttgaagtaagttgctaattttcgcatgtgcttgtgtctaaccttggcttcgtaagtctaatatgaaactagtcttatctaatggcacttttctgtgttagtaaatatgagattctctttaagtagggttttcaaaacctaacttacttggcctttatatttcagtgtagttattggcttttgatataggatacggtatcagattattgttaagtaagttttcagcttgttagatgtttgataagctaagtatttgctgaacctttaagatattcatgacgcaccggcttaactggtaactgaattattgaggtctcttgtcatgattttcacttgtaactgaatgtttcattgttcataacttgtattttgtttgatgaactctttcgtcatcattccttgttttcacatacatcatctttacataatatgattaagtgtaaagaggtgggtattcacatcacacatgtaacttttctcctttctatattttggcttctatttaaatattttagggaaactgaatgattggagtaataggtggaagaggactctatgttaagagaaagattgaacatgaaaatcaattaataaatctaaccgaaaagaagaaacttaaggaggcatagcctgccacaaattccatcttagagacttccctgaccctaaagatcaagaaaaaagtcgacctagaaatatgcaggaatcagtaactaggcttgcagcttatgtggattggcaagtatgattgtcaactatattcagggattgaagaagccacttgggtctggaacgaataatattttggttggtggtgctggaagcgggtagatttgctttcggctgtttcatgcagttggattgtttggttgacagtgaagaattagtcataatgctatagaatttttgtgtgatttttttttttttcaaatgtacaaactgctataatctctttcacgtgtatagtatttaacattttgttgcttatactattaggttgttgagagtggaggcaagaacattgaagttgc

SEQ ID NO: 83165 - DNA, 1014 bp, Citrus sinensis
  Intron number 1 from transcript orange1.1g016462m (locus o range1.1g016462m.g) derived from phytozome v7.0 (chr-ID sc affold00238; pos 177135 to 178148 reverse strand)
tgctctactcttgctgccaagactaggtaagcttatatatttatttatttttaattattattatgattatcatcatcatttttgtacatagaacaagcgtgcatttgggactgatgtacggtaactggattgctaaagcctagctgataaggtgtttggttatggcttttactccatattaaaaaattaatttaccgaataccatcaactcctactctaaagtgatggcttttatttcacagcaattgcattttaaagttacaataccttactactaccaaacgcaccacaagttgctttctgcttacattgaaatttgtttgcataaatacaggctgtgaagtgatcagttaataattttgcaccacaatttacgaactgatgttgcatgctgtgtgattcaattagaacaaaactgagatactatgattctgattttctaatttggtcatgttgacgtgcttggagcgattggagctctttcagcatgcgccaacaattgattcacatgaaactaaaacacacccaagctacgtggtgttgtgtgcgctcacaagtcacgcatattgactagataatcgaaggaccaacgaaaagtatggcctaaaaaatagattttgccatcaagattgcgcatgataaaacaattcatattagtgcgttgaataaaaattaaacaaactgaaagaggccaaaaaatgatggctctgagtctgaaaacagtctactttatgtcccagcagctacattctcagtcccactgcatcacatctcctaaaccgtgtaagccttgttaattttttcagttaaatttggtatcatatatggtatttaatcgattaatctagggtcatattgtatatagagtatttccaggcaagatctcagtttgcttagttgggttcacttacactcagtcttcctttgtgttgactaataggaaattaaagttgtgaactcaaaatgattcttcaattggtgatcatcattcacagggacgtcgtgacgcattcc

SEQ ID NO: 83166 - DNA, 484 bp, Citrus sinensis
  Intron number 3 from transcript orange1.1g031168m (locus o range1.1g031168m.g) derived from phytozome v7.0 (chr-ID sc affold00016; pos 918191 to 918674 reverse strand)
gtgattggaaacagaggacttggcaagcttaagaggttggatttcatcaatattgaactcctaattttcttttaaaaaaaaataaatttggtatgtttttgattgttatagtgttgctttcgattatgttggacattatgttaaagctctactgtttgtttccattcggagtcatctgggatttcagatgctctctattggaaaattttctgtatgtgactttatgaggccatgaaaaggcaccaacccaaacttttttccaattaatgatttttcttttggaattaaacttttttctgagaactttcttgaaacaatgggctaaagtcttccctgctatttgaatcaagtgtctgtatagctggcatcaggcaccatggcttcaacggataattattgagacctcttttgactgaaagtgttttcttttgggacttttttggtttataattttctcttctttttgtatctttgcagggctata

SEQ ID NO: 83167 - DNA, 909 bp, Citrus sinensis
  Intron number 1 from transcript orange1.1g013015m (locus o range1.1g012146m.g) derived from phytozome v7.0 (chr-ID sc affold00005; pos 2079245 to 2080153 reverse strand)
agtaaagttgttcaaatctctacttttttttctgaaaatttggttccaagaattacgacaatgggggggggggggggtttaacgggcaagagagtggattttgatgtgtttaatagtctgcttctccggttttattttgttgattggcattcattcagctttagggttttatgcaagggttttcgcttgtgtttgctttagttgttggttactgtaaatttagcgctaatttaatgagaactgtactgccctcttgttgataatgatggtgctttagcattctaatctttttaagtttgtagcgcttttactttcgtagattttagtttccaattgttgtgtgtgcaatttggatgaataggtctgcttgtttgtttgttcgtttgttggaaaggatgataaatgggtttgtttgcatcttgaaaattttaatctatgtttatttttccttgaggttcatattttaaataaattgaaagtgatttcgttgccatgtgttcgctgtatttgaatttgaatcgtctttaaagaatctttttgtgtgcttgtttagttgctgggacagcttggttagaattttctattactgagtaggaatttatactgtatggagctcaatgcaacaattcgtttttcttcactctaatgggacatttatattttaaatgaaaaaaaaaaagagaacttttttctttggttgtttgcctatcattttctcattatctaaaactgggaaaataattttgaaatgagtgtaatgacaatagtgacttctattttctgctgtaagttgaattctcttttcattcattctctttttattcgtttattttgtttatattgcttacctttgtggtaaaagcaaacgctgatgtaaatgtgatgatggatttcaattgttacagtgcg

SEQ ID NO: 83168 - DNA, 492 bp, Citrus sinensis
  Intron number 2 from transcript orange1.1g046499m (locus o range1.1g046499m.g) derived from phytozome v7.0 (chr-ID sc affold00018; pos 193359 to 193850)
ggtaataaatttgtttaataatcctcaattaccggcttcttcttttctttatgttcaaccttatattaagttacttgtttgaacatcatgcgaggatttccctgttttctcctgacattcgtggtgaaaaatgatttctaaccacttcaactttcttctggtagatgtgtctgccacagccttttatgaacctatttcagttgtcgactttgtggcaaagtatctcaatcttggagatccaagaagagcagcctcaaagactttctcagagagtgatcaaataaaggtagtattcctcaacattcaaaatgtattgttgcacacccaatgcgtttgttagatttaggaaatgggatgattttcaataattatatttttttaccaatatttactgcattggctcgagtgtttcccatatgctgcgtttcttattcaatcccatgacaatccagctaaagaaggccttgagaggagtaaaagtagaagttgctc

SEQ ID NO: 83169 - DNA, 357 bp, Citrus sinensis
  Intron number 2 from transcript orange1.1g036039m (locus o range1.1g036039m.g) derived from phytozome v7.0 (chr-ID sc affold00082; pos 205018 to 205374 reverse strand)
aagctactaaagcacgtatgctattgctacctcttctctctctctctctctcttttttctcctcttgtgacgtttgataaaaacaaacatttccctctaaaggctaaaggacttaccatttccaatagagtaatgattcttttgcaatacacttgaatgttgtgaagctctaaacttggaaatttttttactgactccgcaactgaacaaagagatttataaaaataaaaaaaaagtgattttgaaaaaatcttttttcttttcccttttctttttgatttgatcctctgagattttacttttgttgtgattctcttgacagctttatttacagcagcagcaggagggagaccagct

SEQ ID NO: 83170 - DNA, 773 bp, Citrus sinensis
  Intron number 1 from transcript orange1.1g032744m (locus o range1.1g032744m.g) derived from phytozome v7.0 (chr-ID sc affold00356; pos 77078 to 77850 reverse strand)
agctttttcagcttctaacaaatctccttcaagaggttttaccttttttcttttcttttttttttttttccaactatttcgcttcgatttgtttcttctatgttattacttggctttgctgattcatataatttaattgtgattttcatttgaattttgttatgtgcttacttgattttgtcattaagaaattcaattgtcatatctccggtcccgttgattctaaatcagttagaagattgtttgtaatttcaacttatggtctggtgtagacgtgcagtgtgtgtgtgtgtgtgtgtgtgtgatgctgatgcatatgcatacccaaaatggggacttgacatatctttctattacctgtaacaagtaacaactaccctattttttatcaccccatgtagagcagttcattgagatgatcattcacttgtctgatctcctcagttcagctgtaagtgattagtttctgttatgggggaaaaattttgatttttatgattaaggggtttctttggcattgtgcaagtttggactgaaaatcatggatagttgattggggttacagattttgacgaaattacaagcctagattcccccttccatcataacaaatacggaggggattgaacaatgggctgaaattcggtttcattttgttcattatcttttgcatacattattacgtctgactagacgagatattcatcatcatgaagctttctcatcagattcttgtaggtagaagcattgaccaaccaggaagaaattgaatt

SEQ ID NO: 83171 - DNA, 620 bp, Citrus sinensis
  Intron number 1 from transcript orange1.1g042785m (locus o range1.1g042785m.g) derived from phytozome v7.0 (chr-ID sc affold00003; pos 442642 to 443261 reverse strand)
aagccgaaatcaccgaacaagactcgcttcttctggtaatcaacattttgttatgtgattatctcttcttttagaatttgtaacttccgacgatctgaggtcgagaacccgacttgtttgtttttttattcatgccttaatttgttatagctgtataaaatttattcgtgttaattagatctggtgtttgttgtatttaattttgaatttcctcctattaaaatttagccaaacatcaaactctttcttgtttggtgattggcaggccattatttaattaaattaagagattctgaagaagatacactttgtatagatcggaattaaaatttaagctcacttgaattaatttatagagatctagcttgctaataatatcgatttgctcatttgcttctgttctatttctgttgtgagaaaacgtggtctacaatgtgttcttcttttaaattctggtgaaaaatgaaaaacgaaatgttgtttcttaaatttaccactggttgattacagttttttgtggaatcattaacaattatgtgaaacacactggattcaattggtttttaatgaattcaatcttgacagacaaggaacctacttcgcatagccatattcaacat

SEQ ID NO: 83172 - DNA, 599 bp, Citrus sinensis
  Intron number 4 from transcript orange1.1g014639m (locus o range1.1g014578m.g) derived from phytozome v7.0 (chr-ID sc affold00002; pos 3057100 to 3057698 reverse strand)
gatttgaaacaaattggtctcagacccaggtacttgttgcttttttttttaattaaattttttcccttttctttgttggaatcaacttgtatattttaaaactaacaatttggttagataaatcgctaaatgtacttttctttttctaattttgaggatcagtttatttagagtccactgaggagaatgcttcatccagtcatacaattagtttttatcttcaaattgcttatcaaatctgtggcgtgatttgtggttgatactctgaatattattgaaacattagttgatcaatgtagcagtacgtttgatataacatgtttgaaactcatataagaacttagctgtggtctgtggggttatcatcttatttgcaactctccagggatccaattgttgaaatctcacatgtttatttcattctatataattttctctgttgttgatattacacttgattattattattattattatttatgttccactcctgatgatttctttaatatcagatgatcaagagggataacaatcatttgtttcagttgctgatatactctgctgataattttaattaaacaacagctctttcaggtgat

SEQ ID NO: 83173 - DNA, 852 bp, Citrus sinensis
  Intron number 1 from transcript orange1.1g045431m (locus o range1.1g045431m.g) derived from phytozome v7.0 (chr-ID sc affold00023; pos 102644 to 103495)
cgttgccgcgcctcaagaagagaaaattggtaccttttatttctttttctttttttttttcatttctggatacaacttggaaattttgctgtgttttaaactccaaatttttagcactttgaattccattttgatttctatagctaattggctttttgttgttaagtatgtatacgaggatcggtagtgcttcaattttatttttggaacctttacatttcagcataatattttatagaattattggctgtgtcttaacatgacattgaatcctggttgaccaagagttcctatgttcatattgctcaacatgtctacaattttgtgtctgcttaagtatatgtgcagtctaaatctggttttttggtacatttgatttgataaatatgaacaaaagaatttgttcaaggatcaacagcaatggagttgactggacttggcttcataacattgagatggatcgcatgttatttcattggtgcatgtacctaccaaatatttcattgaaacatgtgttaatagttacgataacctctgtgtatctttttaacttctcggtccattttcccaaagcatggttctttatttataattttcttctggaaaaaaaataaaataaaacactagttactggattaattttaccacatgatggtgttaaacgttcttaatagcaaacataagaaaaataacccttgcaaagggatgtgagaatgagttaggctaacacattatttgctgatttatttttagtgtaagcacttgttgatggtttttcttctgttattacattttgatcactaagatatttcccggtttgttttgaagcatacaagacaaaagtctctcgta

SEQ ID NO: 83174 - DNA, 397 bp, Citrus sinensis
  Intron number 1 from transcript orange1.1g014813m (locus o range1.1g014813m.g) derived from phytozome v7.0 (chr-ID sc affold00064; pos 374763 to 375159 reverse strand)
ccgtctccagttttattgtggagattcaaggttttgttgttagtttaatgcagggattttgtttctgaatgttgtttagcttgtgctatgagtggctcaacttaacaagaatttatatctgagtttagattcatgtttatgatgaatatggaaggtattgttctatgagtgtaattgcttttcttcaaaaagtataaaacctaaaagtggtattttgattaattacaagccagtttgtcacatgattatggtaaatactgtcttcagttgattcgaagccagtgttttcttcttcaatcgtattcttttcaggtgagatattttatatatttgctcttatcctaacttacaaatatgtccaggtactgctattcttcatctggggtttcatttgctg

SEQ ID NO: 83175 - DNA, 592 bp, Citrus sinensis; identical to SEQ ID NO: 78853
  Intron number 2 from transcript orange1.1g025196m (locus o range1.1g021153m.g) derived from phytozome v7.0 (chr-ID sc affold00880; pos 14960 to 15551 reverse strand)

SEQ ID NO: 83176 - DNA, 720 bp, Citrus sinensis
  Intron number 1 from transcript orange1.1g032502m (locus o range1.1g032502m.g) derived from phytozome v7.0 (chr-ID sc affold00036; pos 201053 to 201772 reverse strand)
tctcaattctgtgaacgtcggcgttttgttgtctggtaagtttttgaaaatttgaatctttctattctgatttccaatttaagttaatcgcgaatttctttgctcctttaatcgatgatattgtttaggtttaaggtaaattcatttaaattttcgttcttatgttttgtttcggttttgtagatttcatttttgaattgattttttttttttggcctgatcaatgccaattaagtgctaagattgagctaatcttctaaagcaatggaatttgatagatttgtcttatttgttgttgcttataattcattttgttaataggaaattattacctgctttttgttcgaaagaagctggaaatttgatgccttaaatgctaacgcctggaaagcaatatttttgtaaggaccttttttattagaataatctgaactagcaatagagatgcaaaaattatatttctaaatttgctaaatatcttctgtaattatggctactgacgcctgttttactctgctctatttggacaagatcattagttctgaatttatttacttaaataggactttgaagagaaaggatatgacggcttcatttgcgttattgttttcaactagaatgaacagttaaaagagagtttatatgcaattccagatatgtcacattgatggtcttcaactttcaggttatccgtctgttaactgttagctttcaggcctt

SEQ ID NO: 83177 - DNA, 633 bp, Citrus sinensis
  Intron number 1 from transcript orange1.1g028050m (locus o range1.1g025475m.g) derived from phytozome v7.0 (chr-ID sc affold00003; pos 3935610 to 3936242)
cccgtaatttctcctccactccgtacctctttttctgtttcttctactttgtctttgttgttcccttttttaatttatttcttttaatttctctgtttgtttggtcgcggctgttattttttttctttaaaaaataatatatttgaattgctttccactactgtcctgtttgattgctaagaaaacgcgggaaaatggggaggaatttgagtttgcttgtgattgcgaattctcttctgagagtctagggtttgaattaattagaccgttggattcttgcaaatctggaatagcacatatgagatgttatctaattattggatagtttaaatctttaatattttctcgatactgttttatgaatcgtgcttgcaatggaaagttcttgaatttctttgtagtgatgtcagaggacatggtgaaggatggatatgaagatatagtgaacattgatatttcttcggtggctatcgacatgatgaaaatgaaatatgaggaaatccctcagctaaaatgtaccctctttttacaaacatttttactatttcctgttacattatttttcccctttctctgaagtaaccacggctatttttgtgtttgttttctttatcaatctcaacagacctgcaa

SEQ ID NO: 83178 - DNA, 520 bp, Citrus sinensis
  Intron number 1 from transcript orange1.1g035280m (locus o range1.1g035280m.g) derived from phytozome v7.0 (chr-ID sc affold08544; pos 1079 to 1598 reverse strand)
ctaaagaagaaagaagttgttcgattaaaaccaacgtttgactctctctccccttgtgatttattcgtttaactttagatatgaaagtgaaaataaaagttttgtgggttcatttgcttttagtttgtggtttatctgataaacaattatgtcctcttttctttcaagaggatgatgaagattgaaatggatgactcttacttagttattgagtaatttttagcttcaagttgttataacaacaatagtgtcaatttagagcttcaatttagttctaattaggttatgctttgggatattattaggttgtttctttaattttggtgtaatatttggtttaggttttttaattttatgcttttttttaattaatatgtcacatgatgaaattatagatagtaatatatttctttaacttgtctttttcttcataaaaacttttaatttttttattcgtattttcatggtacttttttatttgaattatttcatgtgctgatttgtcataggttgtttgctg

SEQ ID NO: 83179 - DNA, 660 bp, Citrus sinensis
  Intron number 1 from transcript orange1.1g047722m (locus o range1.1g047722m.g) derived from phytozome v7.0 (chr-ID sc affold00101; pos 130056 to 130715)
tggcgtagaggccctcttggccccaaggtcagtaaattattgcatattattgtcattatttctatttgtagacttgaaaacagttattctttgatgcattcgcatacatacaaagttacggtgcaaaattagttttttggaaaattttctggatgctagtgtgtgtgtgtgtatatatatatatatattaaccggatcatttcttggaatcttttcgcatctgttggttcaaaatacatatgccaagaatataacaaataaaagtatatatacattcaaagcatccaagattttcttaaactatacagcgaataaaatttgacactattatggagtccaacgagaatttgataattatttttcttatcaccaatattaatactcactaataataaatgtcatctgccatatcatttgtgatggaatatgcacaaaaattattcattaagtatatttatatcttcgagaaagattaattatgagtagttacattaaatctacagttttgatacgttaaacttgcacatggacagccaatctcgaaacttgtacaacaccttgtgcccatgtacgtaaattagagcttcaagtagtgtttttaatcctatgaatttcctattttcagaccctctgcaacgcctgtgggatcaagtacagaaa

SEQ ID NO: 83180 - DNA, 584 bp, Citrus sinensis
  Intron number 1 from transcript orange1.1g039012m (locus o range1.1g039012m.g) derived from phytozome v7.0 (chr-ID sc affold00064; pos 607734 to 608317)
ataaagtatgtgaaacttgtccctttttgaatattttgtccaggtatgccacccataacgtctgaacccatttgccgaacttgatattgggatgaatttggaaaggtcctttctttgcaacatttcgagttgaaagtagtaaggaatctttcatttaaaaagatatgttgctaggcaaatataagtcagaaaaacaaatggacgattaattaaatagtgactggattgtcatggaaaattatgtagtgatttcgttttgtataatctttaaaggtaagtgcaagcttatctcgttttgcttcgtgtttcttgttagtgtatgtgaaggtagctagatatcttaaacctgttgtaccttcattcacttcaccttcatattatcaagggattcgagaacaccaagaatgtcaatcaagattgaggagaaagcagcagtagttaaatcagaattgaggaaatttctaaaatgcttaaattgaactcttaaaaagtttgttcaattctgcatgtacgataattagcaaaatttgatgatcattttaatcgcaggtagaacagacatttgttcattgcaggaaccaatt

SEQ ID NO: 83181 - DNA, 582 bp, Citrus sinensis
  Intron number 1 from transcript orange1.1g048231m (locus o range1.1g048231m.g) derived from phytozome v7.0 (chr-ID sc affold02376; pos 12294 to 12875 reverse strand)
ggtcattgccaacctaaattccacaatttttgtaagtctaaatttgggcaacaacagcgacgattcaatcctgcttggttaaataaatatggaaattggctagaacatagtatatcaaaaaaatgctgcatattgtttatgttgttatcttttcataccaaaaattagtgagcaagcaagtggtgaaacatttacaaaaaatggattctcattagaagagcaaattggaggtccaaatagtgctcacaacaaggctatgggttattgtgaagatttaatgaaacaagagcagcatgtttgagcatttttcaacaaacattctgatcaagatcgaaaagattatcgaactcgcctgtgtgcatccattgatgttgttcggcttcttttagaataagggtttgcatttcgtggtcatgatgaatctgataattcaagtaaccaaggaaattatcttcaaattttgaccttgctaaaagaatggaaattatagcacttaaaactcaacttcaaacttgcataatggatatgcattctaatattgagtttacaagattgtagggaattggtgaccttgctaaaaga

SEQ ID NO: 83182 - DNA, 644 bp, Citrus sinensis
  Intron number 1 from transcript orange1.1g011736m (locus o range1.1g011736m.g) derived from phytozome v7.0 (chr-ID sc affold00003; pos 3775382 to 3776025)
gtaattctcaggaggagcttctgagctttctctggtgagtcctgttgatatttctcgattttggctgcttagtttggagaattgttaaagtagtacattcggcttgctctgtgtttttacaaaagatgtgagttttcttttgttttagacattattcatttagggacttttagttgctgaaatgtgtttggaaagctagaaaataacattatgagagtagaaatgcagaattttttcactcatctgattggcctcgttgtataagctgcattcatgtgtttttgagggtgataactaaatgaaacatttaaacaaatttataaaagaaaacactgactttgttactccttttcatttaaatgttgttttttttttcactcgtttttctatcttattttctgtactgaaataattttgcgtaatcactgacaaaagaagatagcagacaagtacttgaacttatcacattctactagtgatttttcagctgggactgttgttattcatttttttgaaaaattaaaccatgtttcattttcctctattgacgtctttcaaatttgattggtaacaacatgatctatttctggctgaaaatattctctgctttgcatttcagggacaggagtttgcttttattgtga

SEQ ID NO: 83183 - DNA, 722 bp, Citrus sinensis
  Intron number 2 from transcript orange1.1g002212m (locus o range1.1g002212m.g) derived from phytozome v7.0 (chr-ID sc affold00402; pos 67986 to 68707 reverse strand)
tgattcaacaacttattcaagtatatagtcatcttctctggctcttcgctttgatatgtttcacacctgtagttgaattatgtaactgctagtatttctatagtgctgcaggtttttggtgaatgttagtggctgtgtttgagtaaaacctttgtcacagttgtgtagttattttacatgttgaagtgcttttgttatttgaaatcagtgctgaaagtacagtctgttctgtgttttgcagcagtcagacattttcttttttctcatttgaaattaagcatttgaatttgcaaagaagacaacaaaagaaaccattttcagatttttaggaatttattagtacaaatcagacaacattttgatttccttattcaattttgttactattttgcaaaaagaagccaataattgttttcaaagtcaatcattttgattgcaccgtaaattgtttttctgtgctctttctctgttaattcattcacatagtatgtatagctggtgcaattattacttcttatgtcaacacatcactggctagtttgtattaataacttaaatggtcaaatttaattttctctgtgtctgaacttctaaatgtacattggtcttagaattttttttgacatttgtttgttttcccttagtaatttttgtaacggaatgcttattaacacttcgatatttcagggtgcagcaaacagaaaggttgctgccactaatat

SEQ ID NO: 83184 - DNA, 297 bp, Citrus sinensis
  Intron number 2 from transcript orange1.1g044875m (locus o range1.1g044875m.g) derived from phytozome v7.0 (chr-ID sc affold00294; pos 166334 to 166630)
tgggtgattttggattaacaaggtttattcgttaagccatgcatgcgttcgaatcaaagtagctcagttggattgaaaggaactatagggtatgctgcaccagctaatataacttctttttcttttttaatgtcgatagcagaagaataaaatcatatcaatttagaagcaaaaccaaattgttaatcacacaatttatttttgtttctaaaattagctgaagcacaagaagtgattatgcttaaactgtaatatacagctgtttctaagcactaaacaatttgaatgttgcagaat

SEQ ID NO: 83185 - DNA, 559 bp, Citrus sinensis
  Intron number 5 from transcript orange1.1g029788m (locus o range1.1g024565m.g) derived from phytozome v7.0 (chr-ID sc affold07918; pos 1167 to 1725)
ttacagacaaggataaggctgctgcccatttgaaggtttgtccttcaaaatttaatgagtctcacagttacttgatatgtagttgttggaatcatgtattgttgaatacttgttttctgtatgtgtaattacttgatcttgtttttcatgattgctactttttatgagttttatccatatgtataaggcatctttgctgatgataaatatggcataattgaaatgttcatatatgctaagtgtattttttgtgaactaactacttcctgcgaatgtttcataaattccaattatttttgttccaattattattgtatgtaactgcctctttgatctgtgtatgcttttgtgaaatggcatagtgtgataagaagtaaaggcaaataataaagggatactacacttaacttgtagacttcttttggctgtgtctgattatgttgtgaaggttttctgtactttgattttatgtgtatcatccttgttcatgcaagtaatcttaataaatttggtttgtctatcagggtggtgctaagaaagttatcatctcagcccccag

SEQ ID NO: 83186 - DNA, 629 bp, Citrus sinensis
  Intron number 1 from transcript orange1.1g010250m (locus o range1.1g010250m.g) derived from phytozome v7.0 (chr-ID sc affold00036; pos 814323 to 814951 reverse strand)
ccagcaagctccttcaatcatccctcaaatcccaggtttcactttcatcgcgaaaattgaattttatcagttaccaccatgtctttttttttttttaatgaatattatgctattttacatcttttgatcttcactaggagctacttgtttgcaaaactataaacaaatcctatcacccatttggcctatttttcagttttagactgcttttctgtctctgaggacttcatattcttgctttatatagatcaatatatgtactgggaacttttcaaattcagattttttttttctttttgggttactaatgttgttttgttactatattttgtttcttaatttactaatagggttgatcagttttctcttttttttttctcccttaatcttttgtcattctaaaaggttcacttttcccatgtcattctaaaagtgaagagaagcttcaccttttgtcataaatattataaatatcattcacgaagatgaatctgtgcatatataacatataaaacttattggagcagtacaaaatattcactattaattttttaatcgtaatagattttttttcctttttcctttggtttacagattggttcatttacaaagcatttttctgcttccaa

SEQ ID NO: 83187 - DNA, 893 bp, Citrus sinensis
  Intron number 2 from transcript orange1.1g008158m (locus o range1.1g007862m.g) derived from phytozome v7.0 (chr-ID sc affold01931; pos 6594 to 7486)
agaccattacttttgcttccattgcggctatcctggtacgtttttttttttttttcttcttccttctcattttttatttatttcttctccctgatttcaaccatacatatataatattgtagtttgtcctgtataatccgaactttttcttttcttttcttttctttttttgggtaaaaaaatacttagctggcggagcactttgtaacaaaatatcaaggaaaggtagttcatgtggtatataaagttaatttcgtttaaatactactcactaccacccatttgtttttacttttttgtttaatttttgctttgacatcttttcactttcctctataacataaaaagctcagaaaagtttattataattttgagagtagtgctagagagagagaagtacgagataaaaacgagagaattttactctctctctctactcatttactctctatcattttcttcattatttctctcgtgtttctctcgttcttctcaaccctaatcattttcctaattttgattctgcattattcgttttggacgtaactctccctgctcctcatttatatcttttggccttttattatcaattggttttgttaaagggaccctcacaaaatggccgtggggcccacttttaattttaccgtgcaagggcagctgtaaggtgcagaatctgtaagttagcctccctcttgttagttgttaaagtccgcgtgggccccatttgattaccaaacatttacttaactaacatttaaggtttttcacaaccgttagatttttatttaaaggttactacgtaatcatctccaacattcaattacatttaattaatttgtatatatttatttatttgacgaaatgtacatcctccgaatgaatgacagggc

SEQ ID NO: 83188 - DNA, 422 bp, Citrus sinensis
  Intron number 1 from transcript orange1.1g045708m (locus o range1.1g045708m.g) derived from phytozome v7.0 (chr-ID sc affold00327; pos 68241 to 68662 reverse strand)
tgactctcacgtgagtatatttatcgtatctcttacgaattgcattttatatttttactgtttgcttgattgttaaaaaattgaaaaattagagaattgagaagcgaattagcaacgacgtgtattagtaagaaggtgaaaaaaaaaattctgtttgatttgttgaaaaattaccccaaaaaaaaaagaagagaaatgagaagtcaatcagcatcaaactttattattattattttttatttgaagtgaaatgtgaccaatttattgccgttcatgtcaaaaattaatttaaatgatgtactattagcatataatttgcaactttttgcccttgaatttgattgctatatgtggcatggctgaattcattctttttaccggttgcagctagaggagggtggaaagaagggggacaatttgat

SEQ ID NO: 83189 - DNA, 546 bp, Citrus sinensis
  Intron number 1 from transcript orange1.1g039532m (locus o range1.1g039532m.g) derived from phytozome v7.0 (chr-ID sc affold00018; pos 298372 to 298917)
ggatctcccgcgtaaatacatctctctctttaatattctcatattttcaattttttgttttttttgttttttgtttttgatgctttcagctcaaacgggttcttgaagaagtggctagctagcaacgatcaaatgtattatatagcatgatttcatgtttaccaacacatcctttacaaattttggccataagtgcatgcactttggctcaaaattctaattactacatatactttgaagttaattcctttgattttttattttctttaaagatcatcaagattattattagtgttttataggaagaaagcttaattttcactttcacaatgttcgatttcatcatcgcccttgaaaactccataattaaatccaaattaattggcacggagttaacttattaatcaaagatcgcaacttttaattaatatattattttctttctttctttctttttaattttgggttgttcttgatatgttattgaattgatttatatttttggttgcagaattttcgcaactgctgtgccatagagatcctgaa

SEQ ID NO: 83190 - DNA, 845 bp, Citrus sinensis
  Intron number 2 from transcript orange1.1g039532m (locus o range1.1g039532m.g) derived from phytozome v7.0 (chr-ID sc affold00018; pos 299147 to 299991)
cctcaacgtcatctagtagtgcaactcccccaccggtatcatcatcaattatgatctatgccatcatcatcatcttcttaattattagattcttcaatagccaatacatctcatttttcagtaattagcttattagggctaagtcaattcatcaccattgatcatcatctatgatatatttgaatatctttgacctatatggatcctcatgacttcatctgttttaatttgatgtggaaaaaaaaaaaaacctagctagtgaagttcaatatttgactttaggaagagtcagcatcatttattgtttcatgagactgaatcaaggttgaaatgtagcgttaaacccaagtacgtactgcttcaagatcaattgagagaataaatgattctttagcttacttttgaatatattacttaccctaaaatatgaatacttctcttcttcatgccaaaaatctatagacctcttgttctggaaattagttatatatattaagagtattgttagaaagaaggattattcactaattgtaaggatcatgtttcgagttagttttgttttggacatttaagatttcaccaagttaaagtttaatgtttttgttaaagtattgcacgagagatttcatcatttcaatgtaacccttttttttttttcctaagaaatgacatccccaaagaaggattttagggaggtcattagcatctgcagtgcttcccacaagaatggaaaggcagtcaccatgatatagatttatcatttcaacttccatctacaaattaagtttctagtcttaacagaaatcatatctgaaaatctaattatttaattttgcaggtaaggc

SEQ ID NO: 83191 - DNA, 460 bp, Citrus sinensis
  Intron number 1 from transcript orange1.1g044766m (locus o range1.1g044766m.g) derived from phytozome v7.0 (chr-ID sc affold00087; pos 23771 to 24230 reverse strand)
ctttgtcccaagaaggtatgtggtcacattctttctgccagagcaaaatagtatatatagtagttgatttttaatgtcaatttggttttcttgttattttttttcttttgaagttattgataagaaaggaaatgaagttccaactccaagaattatagacttgaactcaagatttttaggttagtgccctagtggatcacagcttgtttgagcctatatagttagtatccatagtcaaaacattgcattgtaccagcacttctaggagttttttttttttatttggtctatggttgcttgcttttgcctctaaccccaagtccgtgactactgtatacttgtagtagcgtgtaataactttgtaataataatgtgtatatttattttgttttctgtgggtggggttgtgattttttggtgggtagggttatcggaggagccggtgcagcaagataaggag

SEQ ID NO: 83192 - DNA, 763 bp, Citrus sinensis
  Intron number 3 from transcript orange1.1g004849m (locus o range1.1g004849m.g) derived from phytozome v7.0 (chr-ID sc affold00169; pos 267986 to 268748 reverse strand)
agggtttcatcacttgctacttgttgtggaccgaggtttgttgctttttatactctgcttttaatcttctctttggtgcagtgtttgggtttattggattgaattcctgtttggttgctgagaaaacttggaaaattaacatctaattaaaaaatgagcattgtgattaattttctttcttgaagttatgcctgctaaggtaatgtacatggtgttagttttataattcaaaagcttgaattactctctttccattttagcattgggaaatataaaattgagcattgagagtgcttttatttgttgataattcacaactgtactacggtagagagggattgaaaatttctgttgaggagttaaaaagtagtatgatgaaatactttaagcatcatttattactacgatgttgtggaagttaccttttgttaagatgctgcaatgtgacatgtcgtggtactgcatgtcaactaccattgtcttatgtttctttgaaggagctttcacatgttgggtaagctaaagaaacaatgacagtggaatagccttgaaaattgttcttttcatatggtgatggggagtttacatagagaggttcttaagttcaataacttgcctccacgtggttcctatgtagcattaatgacatgccttttttcacttatttaaagaaagtttcatattttgactgcacgtttgttaaattttgtggtttcatattttgactgcaggtttgttgaacttttgtggcaactttctttgc

SEQ ID NO: 83193 - DNA, 896 bp, Citrus sinensis; identical to SEQ ID NO: 79966
  Intron number 1 from transcript orange1.1g027853m (locus o range1.1g023068m.g) derived from phytozome v7.0 (chr-ID sc affold00036; pos 291708 to 292603 reverse strand)

SEQ ID NO: 83194 - DNA, 256 bp, Citrus sinensis
  Intron number 2 from transcript orange1.1g035838m (locus o range1.1g035838m.g) derived from phytozome v7.0 (chr-ID sc affold00025; pos 1084800 to 1085055 reverse strand)
tcaaaggttaaagtttggtggccgaaggatcgcatgtaagtattaatgatatttcctcttcagtaatttttttttccttttggtgaaattagtgtttgttttatttggttgtactaaaaccttaatgccggctttttatgaagctctctgttatttaataatgttttctcaaatgttctattgcaatgcttgagcttagttatacatggcaccatgaatctgaaatgctaatcttgtgttgtcacgtacaggtatt

SEQ ID NO: 83195 - DNA, 515 bp, Citrus sinensis
  Intron number 1 from transcript orange1.1g024906m (locus o range1.1g024906m.g) derived from phytozome v7.0 (chr-ID sc affold00014; pos 1861263 to 1861777 reverse strand)
cgactcccgtggctttcaccagtgcagacccgcctgtaagctcacccttttttctattttgctaatatctctattttttttttttttgggtttcctttttgagctctctattgggcaaaataggaacttgtgtgacgtttgatcaggctttgaatgttggtccttcacccccccccccccttattaatgtttttaattatatttataaaaaaattgcatctttgggttgctctttaagttcatgtattctagcatgtttgtttagtttatatgaaattttaattttattgccttggtctttactattgtcctgttagtaattccatgaacttggagacaagaaatgtgaactttttgccttgaaaactaaatgatgaatctttaatatgtagtggagtattgatcaagatttgcattgaatacatccccgttccactttgaaagtgttcgtatttcgtgatgttttgttgttacttgcagttttccgcactggcgctgtgaattcagcatcgggt

SEQ ID NO: 83196 - DNA, 561 bp, Citrus sinensis
  Intron number 1 from transcript orange1.1g035288m (locus o range1.1g035288m.g) derived from phytozome v7.0 (chr-ID sc affold03874; pos 6907 to 7467)
caggttggtagaaagttaaataaagatacttaatttaaattttctgatttatatatttgttatactattacaaaagggtgttgtccgtatttccttgaccacagtctcgttgttatgtcattccccttaaattaggggcttgttttcgggatttgggttgtctgttttgcttttagatttccttgccaagtattggcctggtaaaagaaatgattttcggtacatagatgatagttgtctcatattgcttggttgctgtggaaatagttttctactcgataagtctgaaacaccaagcaactaaaactacaattgcaatctggactatgagtaccatctctttcatgacccgcaaacactctgaatgatccttacagagcatattgatatgcttggaaatttgaggctcttcaaattacaggatcagatagtcagcctgtacctacttggagtttttaccttttggctgtatatgatggaaaatcctctgtttatttctgaagaaaattattgctatgtcatccagttgcgagactagcagaattatactacattggaaag

SEQ ID NO: 83197 - DNA, 922 bp, Citrus sinensis
  Intron number 2 from transcript orange1.1g042069m (locus o range1.1g042069m.g) derived from phytozome v7.0 (chr-ID sc affold00066; pos 47955 to 48876 reverse strand)
cactctaaacactcacttgacaaggtagtgtgtatagaagctatatgaattttataataccaagttaaaaaataaataaataaagttaaagcatattatacatatccaacgaacgtaatataatgtgaagaataatgttaatattcatagccgtcgagctagcttcgttgactgtgaatgcacttcatgagttcgcagtcactcgagttttagtatgattaaggattaggtttgttgtttagtggatgagaattttatagtattccccacccaaccttaaaaaattattttttatttaagggtaaatgctctttttaaactctacgatttattcaattatatttttaaaaattatcttaaacgtttcctgtcgcatatctattttcatcaaaaaaatttaattattctctatatttcccccgttgcatgttatatttatttgaagtaatctttggttatatcaaataaatatattattatacttttgaaaattagatccaatgctaatggaagtactgacatggacttttggattttttttagcttaacgatagagagttaattctaactccatctcaactccacacaataacaaataaaagtcgaaattttttgagatatccttaaaatttgaatcaatgacaaagttaccttaaaaatctgtctgagggaggttgaagtggaaatcatttctagggtagacatcaattttttatttctaaaatacaaagaataaccaagcgtaattggtgcaaacctagaaaataaaggattcagcagagcaatgggcagttcgtatacgtttttactttttgatatcgtgcaatattatgcaaagcctttaattaattttattttttgaaaagagcctttaattaatttgtagtaatttatttatttatttattttgtgtataaaggac

SEQ ID NO: 83198 - DNA, 418 bp, Citrus sinensis
  Intron number 1 from transcript orange1.1g014755m (locus o range1.1g014755m.g) derived from phytozome v7.0 (chr-ID sc affold00159; pos 175897 to 176314 reverse strand)
ctcattcgtttaaggtaagttttgcggagtcatgggggatttgaaatatgtttttttttttaaaaaaaactacgtttattaggcggtgttaatttgatctggatttatctcatttggattactgtttcaaattagatcacgtgatgatgacttgactggtatgaagctttcacattttgcaaattaatgaaaatgtgcctttagtgaattagttaccggtgtttttcgggtgctttcggtggaatgagctttgagtagaagcactttggggaaagaagttctcttcagaactgcttctccaaggatcacttctcaatctgtagaagcatttttgtttattccaataaaaataaaattctaaaatagaattgaagaggtcattcttatgttctatgatgcaggttgtgcagttgttttc

SEQ ID NO: 83199 - DNA, 931 bp, Citrus sinensis
  Intron number 2 from transcript orange1.1g048280m (locus o range1.1g048280m.g) derived from phytozome v7.0 (chr-ID sc affold00034; pos 267261 to 268191 reverse strand)
agcttggtgagggaggctttggacctgtcttcaaggtaagttatcaattcaactgggtttgattaggagtctaaattctgtttggttcctgagaaatattttgatccaaaagattgatgagttcaccgtaatctttgcatttcctgcttcttcattttaattttctttgttcataacaaagttttttattttgtcggtgttgtttatttgatttattctttggtattgaaattgctatgtgatcaataaatctttctgttaattcgggctaagaagttattgaagggtccacacacgcggttttgaagaagaagaaagacgtgacccaacatgccaactcagctgttcaacaactgcaaaccgacttgttcaagaaaggatttttcttttttttccccctcttttttgtcttctccatatcaacaatgaaaatagctatatataagataatgaattttataacacttgcaagggaagtaacaaattaagggtatacttttaaccattgtgcttttgcttaattgtggaagcatggcacctaaattacttggctgctaatgttgaccaactgccatttatatatgtttgactgttggtgattcagtcccatagcaactgtgaattaaaaacaacaacacttgatcctaaaaataccctaatgagtaatgagtgagtctattatgcctgcagttactatgtccacgcataattttgccgctgatatccatatttaaattagcaatgtcatgcttatctgcactattgtcattagaagattgtgtttgtatttattacactccagcgatgcatgctgcactaaattacttattctttcttcagctatgaccatacctttgagatttttctgttattttggtcataaatcaaggttttgaggacttctgcgatgtttccttgcaggggaagttgg

SEQ ID NO: 83200 - DNA, 578 bp, Citrus sinensis
  Intron number 1 from transcript orange1.1g013225m (locus o range1.1g013225m.g) derived from phytozome v7.0 (chr-ID sc affold00002; pos 909522 to 910099)
ttcttcttcttcatcagctggtgcaataataactcgtaattttttttttaaatcaaattaacatcatttatcttcttcattttttaattaaaaattcaccattaaattcattcttctgactacaaatttattaaagtataatcaacaaacaacaaattttctcaaaaaaatttaaaaattctggattgtctccatgcttgttattcttcgtcatctaattttcttgatgaactattcctcaaaatatctttttttaaaatatcttctttttttttcttggccctttcaaatacgactaaaaattaacatatgctatctaatattgcatgtatttcatttaagtcatcctcctcatattttcatttttctttttcgttaaaaactttgagttatttgtaatatttataggataattatgaatagtgaataattaattctttattacttctttttttttttaattattgttgcttggcttcaaagcaataataatttcatacaacttcatctaaagaattctactgatcatgttaaatgtaacagaagagccaacgagcagtattgcagcgccggcaacg

SEQ ID NO: 83201 - DNA, 863 bp, Citrus sinensis
  Intron number 1 from transcript orange1.1g007020m (locus o range1.1g007020m.g) derived from phytozome v7.0 (chr-ID sc affold00002; pos 1574867 to 1575729 reverse strand)
gaaggtctgcttattgctgcttctctaaccattatctctatgttctggttaaagtttttactctttttttttccttttttttttaatgagattttgatctttgtttgatttctgcgaaagggatgtttttattcgggtagtgagaaataggaatgcttagctgagtatgcttatttttatgattgcgactgctgttgaggttattttaaattttattttgttccctgtatcttcctctcgagtttctttgtatttggttaatttatgataatatggttgaatttaatagagagatagtctcgcggtttgtacttcatttatgtctcaaaggtttccttttcattaaaaaaaaaaaaaaagatatggttttatgggtccttgagagaatgtatccaaggagaatactttttgatgaaggcctctattcaagtgcttggaatatccttagcagttgggtggttctgttctttggaatacattgagtgttgagtgggtgaaactgtgactttgcttaccgtgttaaaggtttgctgctgtttaaacactcctcacaagtttaatcatgtcctgctatgcctgtggaagccttaaatctaactagttgtgaaataatatttactttgccatctagctcaatgcattgtcaacatgttcctgtctgcttgcctttgaattagtttccataattggcaaaaatgtcatccctacgaaacttgtatcctgtttaaagtttcatgcaactctacattctgcttgtttaatgaattttgagtatggattttgcgcatgagattgcattcttaaggtctggatttggccgactgttgtaacttattctattggctcttatcttggaacaggtg

SEQ ID NO: 83202 - DNA, 858 bp, Citrus sinensis
  Intron number 3 from transcript orange1.1g036495m (locus o range1.1g036495m.g) derived from phytozome v7.0 (chr-ID sc affold00088; pos 215622 to 216479 reverse strand)
attctaatagacgtaccaggagtgacatttctgatgtgagttttcatttcagcatgattttttttttcaaatgcggatgagatatcaaattctatatttgttttgtttttagtttatgaagacataatgtacttcatactaattttatttagttacttttacaccaaaaaatggaaaatcgattcctgcatgatttcataatgggtggggaaaaaaaaaaaaggaaatggcagagctacgataactactgaacagagtgtgaaccccataataatagctaaaaatttaatttgacttaatctttttgttgtattggcaggctgggctcattattgattgcaaatgaatctgcttatactagatgcttttccatctataaacttgtttgctgttactgttttgcttgacaaagattctagtacattgactagataattgaattagaaaaatggtttgtctagtaatcttacctggaaatcaggctctaccattctagattagaggtccaaagatgttacaagagaaagctgcatttggaaataaccgaactgcataatttgcacaatttacatcattgcaataatttgctcgatgcagtatagagttactatcctggataactgaacagttgaattgatgaattttttttttttcccgtaagctcatcaaattaggattgatgatatccttttaaccattgatgttgtgtgcattggtaatcattaaaaaatgaggattgcaagtaataattttttggccctgtgttatatgaaaagttttctagtcgtgatatgtaatcaaagttttcatgtttttatttcagctaactgatatcagtgcacggccatttggggcaac

SEQ ID NO: 83203 - DNA, 471 bp, Citrus sinensis
  Intron number 4 from transcript orange1.1g028792m (locus o range1.1g028792m.g) derived from phytozome v7.0 (chr-ID sc affold00095; pos 411010 to 411480)
gcaaaaccattaagctccaaattgtgagttgccattttatatctgtttaattattaggagctaaatggttgttaggcttatgggttggccgcatttccagttctactgaaatttctaagttcaacaattgtgtatcgaactgagttgggtgtaattaagatagacggctggaagggttgtagttatcttaaaattcttatcacaatgctctttaagtttcagatgatttattcaaaacaatttcctctttcttgagcataactgtcttcttcttttgaaataattgacaatgcattttcttttagataatcctatgtcttgcatttttctttatttccccttgtttgatatatgaagaactttcgtaataatgtatagcatatttttagattttgtttctatctgattgttttgatgccttttcctggacaaacagtgggacactgctggccaagagcgttttaggacaat

SEQ ID NO: 83204 - DNA, 811 bp, Citrus sinensis
  Intron number 1 from transcript orange1.1g005657m (locus o range1.1g005657m.g) derived from phytozome v7.0 (chr-ID sc affold00018; pos 483770 to 484580 reverse strand)
gtatagggttcctgaaatctgggagggatcttcaggtttgtaatttctgttatcaaaatatctgtattgtcatttggctatatttttatgcagatcatctgtttgataaaattcgtaagagaatcaagtaaaagaaaaacgaacactttctgcaacatgtatgttttctgcaacatgtatgtatacagagattaaaaactttatgggtactttttccatatggaattgttaaaatattcgactcttgttgctttctttgattaaaaaaaaaaaaatagctgcaaatttccaagcacgattagtttcaatgtcaaatgtattccataagtgattcattgaactgatattttttggggcttgcccctgttggtatgtgaatctgcttgactagatcgttcccagcatggatgctaataataacatttagttgggtacacttagtttttcaattggaaaaatgaagactaagtaattagctgtaattgttgttggaatgagctgcatttgcattataattgcagtgttagagagatgaatggtgcatcttccaagtttgctacttcattaaaaaaaaaaaaatgcatatgtacatattagctgctagaatatagagaatcatgccctatgatgaaagaaggctataattatttttttagtgtgtttgttttgtagaaaatgaagtgtaattatttttatactgtgattaaaatattcaagaatcactttagttttctcacactatttctagatttttgggtctgcttgtgggtaaaacaaatgatttttttcttccaaaatgttttggttgcag

SEQ ID NO: 83205 - DNA, 552 bp, Citrus sinensis
  Intron number 2 from transcript orange1.1g042270m (locus o range1.1g042270m.g) derived from phytozome v7.0 (chr-ID sc affold09170; pos 426 to 977)
aatgtaagatgctggataaatgttgtaggatgttgatgtaggattggacaaatgactattccttttcttttaacttttgttttcattcattttatttggaaacagacaaacttttatagaataaatgaagggggaaagatttccgaagtaaactagagttccacatactaaaatttcattgaaggaacagattatttccaaagggcttcccatacctgatccctttatttaggtttagttgagttgagagaggtcatgtgttgattttgtttgattgggcttttttcacattttagtaaattttgggatttgcatgctgtttgaggtatagatatgcgtctgttctatatggttagtaggtagctttttttgggctgtctttgtttcccctgtgaacctctggttcacttccatatcatcttctctttcattttgataaaattcttatgtttctggtatagagcataacttccacaatttacataatttctgtatttgtgaataaaattaaattttttccttacccatcatatctttatgtatcagcttact

SEQ ID NO: 83206 - DNA, 327 bp, Citrus sinensis
  Intron number 1 from transcript orange1.1g034925m (locus o range1.1g034925m.g) derived from phytozome v7.0 (chr-ID sc affold07334; pos 2058 to 2384)
ccaagttgttagatccagacgcgtcctgggacaaggtaactggttgtcgaatcgcgatccttgataaaccttctctttttattggttttatttgttaataattttgaaattagtaactgcttttgtgagtattaatccccgttattgcagttatttacctaattctactaattaagtaatattatggccgtgttcttttggtttttctttttcttctgggtaaatgaagtggattaatgaatttgtatgtgcagtggcaaacttgggcatgaatttgatttactactgtttgttgtgcttaatttttggggcaggatcaattgggag

SEQ ID NO: 83207 - DNA, 630 bp, Citrus sinensis
  Intron number 1 from transcript orange1.1g040666m (locus o range1.1g040666m.g) derived from phytozome v7.0 (chr-ID sc affold00011; pos 1868487 to 1869116 reverse strand)
atcaaaaccggcttctgtgtgagaaccctcctttctgcttcttctcttacaactgtttgttgaaaaaagaaaaaagcaaaaagaaaaaaattccctttattttcagattcccctgttatttattagtgttttattcccctggttcttcaacttggttattccgctaaaatggtttgcattgtccatacattggtgagttgtggttggtttgtatgtcgcattataattagttgaattgttactagtgtattgtttatgagcttcaggtctaagtgaaagttgttgctaagtttgaatattaaaatgttaatctagttgaatttttgccgctgtacaactttgtaaaataaggatcatttaggcattgggaaatgttaagatggacacagaggaagttaaattggaactgctatttcccacaaatgcaacattgcacttgtcattggattgaaaaatggtggatgaggtatccgttggagaaatttcagctccatgaccgtggttattgtcatgaaatgcttgtcctggtcctatttttgttccacatgttatttagatcatgtcttatttgaaggttcttatttgattttcatttgtctcattgatgttgatgctcttgttgtcgtgcag

SEQ ID NO: 83208 - DNA, 663 bp, Citrus sinensis
  Intron number 1 from transcript orange1.1g035132m (locus o range1.1g035132m.g) derived from phytozome v7.0 (chr-ID sc affold00011; pos 1504356 to 1505018 reverse strand)
aataaaagtattttttttatattttattttgtcttatttcttatttttggaatttgcatttctctctgaaagcactaatttttcgaatttggtctctctctctcaaaatcctacatgagctcaatgggaagatgattcgtaatgaacaaaagatatttttctttctaaatcttttttattttggttaaatttctaatttttaagaatatgggtaagaatatgggtttttgctttccatattgaatatctaagaatttggatttttggttaaattcttatgaaacagatcttgaatttaatttaattttatttttctatggctttaagtgttcttgagcattttgttagattctcgtcaggaaactcaagatttcatgatgggtgtgtgtgattgttaggctttacccctcccctctctttaaatggctaagtgttttgggtagactatggtcttggagtttggattagttgcttatttattgtgataggttttgctctgaaaattttcatttttgattgcagttcgtataatcaatatttctttattaggcagtgatataataaattctggactttttttttttaaagatggatcttactatttatttcttgtacaaactctggttaggtgttgactcaacacttggggctggagcatatatt

SEQ ID NO: 83209 - DNA, 779 bp, Citrus sinensis
  Intron number 4 from transcript orange1.1g027180m (locus o range1.1g026076m.g) derived from phytozome v7.0 (chr-ID sc affold00071; pos 530888 to 531666 reverse strand)
aatttcagtggggaatcggttagttctgtctcctatttcagcttttaaattacactatagttccacggatgtcagttctccattttcacatggcatttgcaaatggctgtcatcttggcccaatagatgccatgttgagaattgttaaatctcaaaaaggattaaaaaaattgagcgtgttccattagctgtccaagacttcttttggctccttattttatttgtttgtgatttgatcctgcattctagattattatgaaaaagttatttcaagtgtccaaatttcatttgtgtttggtacaagacaaggctcttttcttgaaaggatttaatctaggtggatattccgtgtatgatgcacttctgaggtcttacatttctgtaatggctatcaatagcctgaaaaacatttattggtgttgattggctggcatttatcaattaggtctaattgttttgattgttccattgaatgtatgcttgtttgtctctaatattcctgtggtttctcttctttcctccttaggcttaataagtagatatcttttctcattagttagttgtagtcactgaatgatagtcatttctgttcctattttttctttcttttcactattcttaaggtcgggcctcttgctgcacattatcaagtaccgctgcgtcacattttagtggtaagcattctccatctcatgctcagcagtaggaaaatcaaatgactccgtacgataaatatagtgttttgacaaaatgtttctgggatttgcccttgtagatct

SEQ ID NO: 83210 - DNA, 924 bp, Citrus sinensis
  Intron number 1 from transcript orange1.1g010346m (locus o range1.1g010346m.g) derived from phytozome v7.0 (chr-ID sc affold00044; pos 330269 to 331192 reverse strand)
ctattgataaagcaaccatcaaggctctccttcaggtatgtagatctcttttccttaagagcttggatttagtattgatattagttgtgctatttttttttaaattttgtgctaccatgcattaatctcgaacaattaaatttttagtacattcatatacttttattgaatatttacattttttgacaagaaattaatgattttctagtaatctcaaatgtttgacttttcgacatgttttgatttactattggtagggagaaaaagtcgtgtacaaattttatcatacaataattgatgtgtcaatatgttattagttggacaactttcacaacgtgggccaatgtaaaaattagccgaccaatagtgtattaatacattagtttattagaaaaagaagtacaacaatttataatttaacactttaaacaattgccaccatacttaatagagacaactagtatcataaactcataatttgtaaaaattatccggccaatagtgtaatgacattggcgcatgagtttattaggtgtgaattttaggttactctcttagtaaattgattatattcaaatcgcttccttatttttaaaaacttcaaattactcctatatttggtcaagcaaaaaatggaggcggattgtttttttaaccttcttaaaaaaaggataaattgagtttttcaaaaataatgaggacgatttaaaaacaatcaattcacgaggaaaataacctgaaatttactcatttattaaaaaaattgtacaaaaatttataatccatatatataattcattattcatagttgaataaatagtccatttaaacactatacacaattaataccatgttaatagaaacaaccaatatcatgaactcataattcagttaatttttcccttgattttggtttcttatagg

SEQ ID NO: 83211 - DNA, 752 bp, Citrus sinensis
  Intron number 1 from transcript orange1.1g027969m (locus o range1.1g020747m.g) derived from phytozome v7.0 (chr-ID sc affold00003; pos 4025550 to 4026301)
gggttacactgtcaaagccactgttcgtgacccaagtcagtatctctttatcacagcagttttcttttcttttttctgttttttaactctctttatctatccatggagtcggagatttgtcacgtggtgcatctgacccaacaagattttttcttctgttcatgatttttgaggatctaataaaatttggcgttcttaatatttgatggtgaagatttatttgctgttatttttctctttaagcctttaaggcatcatttttaagaatggaagagttttcaaattactcttcaggatattctatcatctaattaatgaatattaccacatttaaagattaagatgctacttaaaaatgtagcatttgtccttcctaaattttatttttagcagtggactgttaggcttcttataaatttgaagcagagcaactaaataattggtagacacccacttgatggctaatatttaccgaccacccaaccacttataattgacaacagtgaagagaatatcatttctattagttagtttcttccttgtgtttgtatatttatttatgttctccctcagaattaaggccgttgataattttgaattataaatgactgtaattaattctcctggcactcaaaatattttccactttcagaaatagattcaatatactggtaaacctcattggacgtacgagttctgatattatatgtacaccatagatagccccaagacagaacacttgcgggaacttg

SEQ ID NO: 83212 - DNA, 764 bp, Citrus sinensis
  Intron number 2 from transcript orange1.1g028334m (locus o range1.1g028334m.g) derived from phytozome v7.0 (chr-ID sc affold00286; pos 31564 to 32327)
tttgccacttctaccgagaaaattggccttgcaaagtttgttttttttttctctttaatttttttattttattcaaatattgtctgattgaggcgtgctctttacacagcgttttgaatagttgaaattggttcgtttcgttttgagaattgcattttcattttcttattttcaattttttggcattgtaagcgcttttcgtacaaatgcacaagtcgaaatgtggctgaacgaggtctatctggaagtgcttttgacagaagcactttctaagatttataaaatggcctctgtggttttgagaagtgatggataggagcttttttaactgttggatagcattttaattatttcatttattttggtgttattagttctcttactcgaaattgcttcatacaaaaggactatatgaattatggctgtttgtggcttatttggaagttcttttggcaaaagctcttctaggagtttgaaatggctcgtgtggtttttatttattttttggtagtagaagagctttttctttgaaagttcttcacataagggcattattccaattatggttatggctgattgaggcttatcaaaaaatgcttttcacaaatataagaatttaattttgtaaaaatcactgcacacctccattgtaccggtgcaattgttaggggccttatttttagcttcttggaagtttttgatatttgcttacattgtgttctggattgtaattgaagattagaatacaatttgatttgtaggta

SEQ ID NO: 83213 - DNA, 752 bp, Citrus sinensis
  Intron number 1 from transcript orange1.1g037785m (locus o range1.1g037785m.g) derived from phytozome v7.0 (chr-ID sc affold00019; pos 665512 to 666263 reverse strand)
ctaagctccgcagcttactccccagcacaaccaaagtaagtctcgtaataaaatcaaaaaattaaattattattaaattttttttttttaaaggaaacccttagatatcctcatgcgtacaacatggtgtatattatatatatatatgggggtgtcatatgcgatatgccttttcggttccctttttgttttgtattataaattataatgagtttgttttcatattcaaagatctccttagatctttctaggattctacttagatggttggtctgataatatatgcaaagccaagaccaaacctagctttaagatacatcaaaggtagttacatttcttctctttttgttcgcatctttagggaaaaagaaaaattgttttgtcttatggttcgttcgtctgagtctagctagttgtagttccgaggagaaaattaagcaaaacacaaaaggaaataagcgttgatgtcgctctaatgacacgataaagaggaaccaacggacagttgaaaagcttcctttggaaatttcttgccggacatatatagcattcaaactatcaggacattaattgaaaagaaatcaataaagagagagagagagagagagaaaactgctgggacattcttgtctgacatgcattacaggtttaaaatgaagtaataacaagtaaccttaaataattgaaattattttgcgtttgattattaatatgcagacggacaaagcttctttgctagctgaagtgatcca

SEQ ID NO: 83214 - DNA, 947 bp, Citrus sinensis
  Intron number 1 from transcript orange1.1g007911m (locus o range1.1g006403m.g) derived from phytozome v7.0 (chr-ID sc affold00234; pos 154588 to 155534 reverse strand)
tcttctccttttacttgtaaattgagcctctaaactctacttctctatttcactacatatttaccatgttttttgtatgtgggtgcgtcattgatgtttgcatatgatctttggttttttctttttattttactagagttgaagaagaaatgattactgtgttcttcaagctatagcttctgggtacctgatttctcattgtttacgacctgggaaaatcaagttctccttcggagcttagcctagtgctccagtttcatagaaacaagaaagtagtaataagcgaggataggtgttgccagatgttctgttaattcaggtgatcaatacatgtaaattttgagttgagttgagatcatttccttgggattaattaattattcctgactatttgattgctattcatgagatggtcttttagtgttggttgaatcatcatgatgctcattaatttggtccttagatgcagcaatctttaaagattctgttttccagtagcttacgtattcacaaaataaataaaggttgaatgttaccatgggcaggttttgaatgctcagaaatcacaaagatgggtttctggtttgctactttattattgtccttatcaagagaatacttggcagtaataaggatcataactcataatttgacaattattctatgtcctggtaaataataagtaccatatctcttaaaatgaaaaacaaagctgaacaattgtggctgatttggtttgccattaggctacatacaaaaaaaaaaaaatttggtatctggggctggggttgtctccttttccgttgtgtggccctctgcctctctttatgacgttgtagaataaaagattcaaagcaatattttctatttttaagtgagaatgctgtcagctaattttgttaattgttacttttgcttttggttgacacgcaggattgatctctctg

SEQ ID NO: 83215 - DNA, 166 bp, Citrus sinensis
  Intron number 1 from transcript orange1.1g024258m (locus o range1.1g024258m.g) derived from phytozome v7.0 (chr-ID sc affold00605; pos 90202 to 90367)
cacttactctcttctcgtcctcaacataaccttccgtgagtactgtgatgagatgatacctctttcttcgctcttttgattttcttattaataaacagaagtttctgtgtgaattgtttaattaatttttaaattttgtttatctcaatgtcaggtactactgctg

SEQ ID NO: 83216 - DNA, 632 bp, Citrus sinensis
  Intron number 4 from transcript orange1.1g024258m (locus o range1.1g024258m.g) derived from phytozome v7.0 (chr-ID sc affold00605; pos 90930 to 91561)
ccgagaggatgtaagtcctgtgctagtgcttttttcgaacttttgtatttaaattatcaccgtggatttttgtctgacagactaaggttcctacttgggtttacactgcattttatttaaggagctaggagactctttttctttttttttcctttttttgtggggggggtggtgtgtgaatctttttatttggttgagtggcagcagattgtttctcggtttctgccaccattgttttgatatctgtattccctgaggatatacacatctttattaaatggcattttagcttgatggtattgttgctgtagcttgtgatgattgtactatatcatctggacattgatgaaagtttaaacgcaagtttagatgtgactgttccctcctcttatataaagtatgagtgcctaagttatgtttgagcttcaatcaatattttacttttgattgtatgatgactgatttatttgagttttttcattcacttctcctatattgaaactgaagaaaatcacattttgaattgagttgcttataagaaaatctcattttgatttgagttgcttatcaagctgctggtgtttatgttttagtcagaaaggaaggattattgaatcattcccgagatcgaa

SEQ ID NO: 83217 - DNA, 700 bp, Citrus sinensis; identical to SEQ ID NO: 78160
  Intron number 3 from transcript orange1.1g014578m (locus o range1.1g014578m.g) derived from phytozome v7.0 (chr-ID sc affold00002; pos 3057100 to 3057799 reverse strand)

SEQ ID NO: 83218 - DNA, 727 bp, Citrus sinensis; identical to SEQ ID NO: 80484
  Intron number 1 from transcript orange1.1g004133m (locus o range1.1g004133m.g) derived from phytozome v7.0 (chr-ID sc affold00685; pos 61601 to 62327 reverse strand)

SEQ ID NO: 83219 - DNA, 988 bp, Citrus sinensis
  Intron number 1 from transcript orange1.1g039766m (locus o range1.1g039766m.g) derived from phytozome v7.0 (chr-ID sc affold00007; pos 191816 to 192803 reverse strand)
gccactgaggtaggtacttaatttcctctgtattattatattaaatttttttttttgttctattttgattatcctgtgtatatgctattttgtttcgattattttgtcactgagtgactgcagcaaattcatgaaaagaatatcctttatgaattgttcaagaatgtggtgtcgaagctctgttctttacattgtctgactaatgactattgccactatttgattgttgtgtatgttacagtaagtcgagttgctttcctcgatttcttgctcatgacaagctgtagatattatctgctctggtctgttctgttatgttctgttcgcttatggatttttctttttaacctacatatgatttctctgggaactgtatgtgtaatcaaagaatggtgtctatatatggcaatttttgaactggtctagcgtgctctgaagttgggttctccatcttcctatatttgtatgactgggctacaaaaacagttgtcggtgctttctccaactacccccaataagtacttcgatcatttaatttggatgcacatatatatagatttgattgtctgtgattatgtttaatcatagcgtaatacaaagatcatgttgcattctactgaacgataaatactagtcagaggtcatttagattttgtaaaatacattgaagtacttagatcatctaggttcaagtttggaagaagcgaggcagagaaacagcatcatgaaataagccaaaatcttactcattccaacttctgtagattcatttgatgatactatttcccttgtcaattagcctttccgtaccactaactctgtaaaatcattgcaattgtctcattcatgtcaactccggttcttttgaagttatttgcttggcttttggtttacatgattcaaaactatggaaacagtcatgaaaacatgtgcaaatgttatcatctgcataccagtatgagttaattgatgagaaatttccaggaac

SEQ ID NO: 83220 - DNA, 725 bp, Citrus sinensis
  Intron number 2 from transcript orange1.1g035497m (locus o range1.1g035497m.g) derived from phytozome v7.0 (chr-ID sc affold00408; pos 139354 to 140078 reverse strand)
tggattgcaacggcgaagggatcttgtttcttaaggttgaaagctaacttcaaacttgagcagcttggtgatgctattcagcctccatgcccatatttggaacaattgatctataatgttccatgttctgaaggcattcttggttgcccattgctcttaattgaagtgagtctattatttactaaccattgaatttacttcacatgcatactcaaaataaatagtttgaggatacatttaggtctctactatgtcacttttatcggttggataggttcatatatatttttcaattacctattgcattataacattataataaaaaaaacacatttttttgggttctttaagtcaagtgtactcattgaacgttatttttattagtctttttacaaagatgcacaaaattatctcattgagttcacgaaaaagtgcttcttaatacaattccaaaacttaagtagataagaaataatttttaaacaatttgagtatttggaactttctacaaaaattcagtggaccatcaataattttctttaaaattacactgtccaatatagtgagtaaatgaaaaatggtactaatttagtggtaaaaatgtaaaatattagataccaaaaggtcattcttacttctatatattacataattctgtacttttaaatatttaatcattaaatttcatggttttctttgtttcatatgtgcaggtgactcgtttg

SEQ ID NO: 83221 - DNA, 545 bp, Citrus sinensis
  Intron number 1 from transcript orange1.1g035497m (locus o range1.1g035497m.g) derived from phytozome v7.0 (chr-ID sc affold00408; pos 140183 to 140727 reverse strand)
gcaggaaatttgcataatttggtaacattaagtttccaaacgcggtacacacgtgcttctttcttcagctataaatgaaaaattttggaggccaagacaaccagtgaaacagttcaagccttgccaaaacaactgaactagaaactcaaattaaggtgcgtttgagaatgaggtgctatagtttttaagttatgcctgctatgaagtaaaaatcatagctttggagtaaaattaaaaaaaaaaaaaaggctactaacctaccaaaacccaattacaatgtgttattaaacaccttagcagttgggatttaacagctcaattactacacatcactcccaaatgcacctttaaaatgacctcaagattttctcaagttttgtcaataacccgaaaggcaccaaaattaatttttccggcaagggcaacaccgcatgaattaaagcaactttccggatatagatgaccaagaaagcttcaggtttcatattcctgtaaataatcttttacaagaataacccttcatcatcacctccaatactcagaga

SEQ ID NO: 83222 - DNA, 583 bp, Citrus sinensis
  Intron number 1 from transcript orange1.1g024893m (locus o range1.1g024893m.g) derived from phytozome v7.0 (chr-ID sc affold00046; pos 207367 to 207949)
ttcaaccgttaccatcgcaccggccgccggagactgtgagttgttgacttcgtttttttttttataatagttcattaatttttttccttaattaaattgtttgaattgtgattcgtactttaatttaatagataataatttaattttgcagcagctttttttttttcaaattgtcttgactctgctttcttaatccaccattacttcaaatgatctgagctattagtgtatttagggaaaaatttctgcagctgttagtgcatttatggtgctgtactgctgttcttagaattgatattacttatggatattttccttttggtaatttctgtgctgtaaattgaattatggaagaatgcttctgcttttacagatttcaaatgaaaaaactatggtgctgttacagggttcaaatgaattgaatcaatctacctagaggcaacaaaaattatagtgctgaaatgaattaaaaaaatatagcttacaccttaatgattaaatcaatctggaaaagcaatgtgattacccaagtaatttttctgaatatttctgagatatatttccattttgtcagggattggtg

SEQ ID NO: 83223 - DNA, 410 bp, Citrus sinensis
  Intron number 1 from transcript orange1.1g014666m (locus o range1.1g014666m.g) derived from phytozome v7.0 (chr-ID sc affold00002; pos 1111253 to 1111662 reverse strand)
gtaggactttggcttacttgctgcctcttgttcaggtattttcatattttttgttggttcttaattttcaaaataagtctcacagggtatgcttgaggtgctgcgactttttgtattaactaacttttgattttagttgatataattatgggtgttaagttatgagatcctgccaaaactgtaatgttctgcggctgcctgctggctacccacatctttattttctgtaattcttaatgattgatttctcttcaaatttcatcgtaaatcaatacattaatttttctttaaatattttcttctgtttattgaagctataaaatgattttcatttgtcattggtcctgatcttgattggaatataggattggttattttgacgacttgttaataggtgtattctcaattag

SEQ ID NO: 83224 - DNA, 643 bp, Citrus sinensis
  Intron number 1 from transcript orange1.1g037283m (locus o range1.1g037283m.g) derived from phytozome v7.0 (chr-ID sc affold00026; pos 719525 to 720167 reverse strand)
gacgttagcatctggacttcgagtcttctgtgcaggttagtatccagtaaaccctgttggcgttaatcttctgtttcattttcctttgtttgtgagattttgggtttttaattaattgtttgtagattgatttaaagtaatacctttgctgctgaggatgcggagaacaataaaagaatagtataaaacttagcttttggttcctaaaacgttttgtaattttgttattgcgtgggagttgattagttagatcatatttgtttagtaaacaattggtcttaattagttaataggtgtggagttgggacctgaaaatgcttttaagcccacaagaacataatcttgttctgttctgtttgttttactaatgtttgattttttctgcttaatttcgtaattagtgatcggtttttgctgttttccaagatagaatcaaaattctgataaatttagccccctctctcgttttgcgtcttaagtttgggtatttggtgagcataacattgttgattgtggatatatctgcaggtcctaagaacttataggagctaccagctttttgtcgtagaaaccatggccaagcatcatcctgatttgatcatgtgcaggaagcaaccagggatagccattggaaggctctgcg

SEQ ID NO: 83225 - DNA, 756 bp, Citrus sinensis
  Intron number 1 from transcript orange1.1g015239m (locus o range1.1g015239m.g) derived from phytozome v7.0 (chr-ID sc affold00081; pos 423984 to 424739)
cttccattggcttggactccactcttgacaacgaggttttttttccctcttcttcccctcccttttatttttaatttattttatttagtaatttgatttttatttctgcgggaaggatagagaaaattattataaactggctctattttcgtctttttgacaacatttatgtgaaagaaaaggaataaaaaatagaaactgcgtgtttaggctccgcttcgtattgagatgtggcttcgaagttaaagctgcatgcttaggcgccgtgtgctgtaaaattcaccttaaattctaatgcacagttgcaattgtttgccaaacgctttacacagctgttactttaaagctaccgtgagaggcagcaatactaaatggagccttagtttagttgtatttcatttaacaaaatgaattaagtttgtatataaatctacaaactgtcagaaaaatttagtgtttaatgatgaccaactaggaaaaacaatgctgctgatagttttggaacttgtttgcgactcttctgatttctaattgatttatgctatatggtgttacttacgtagggaagttcagttacttgaagagagactgtgtatctttgttatgtcaatattattgagtaaagtgaggtaatgcttgccttgtgaatatgtgtacctgcagcggcatttttctttttctttttgtgtttttttttccttatgactgtttacttataaagcttgtatcttttatgcttgctgcaggaagaggaag

SEQ ID NO: 83226 - DNA, 1061 bp, Citrus sinensis
  Intron number 1 from transcript orange1.1g033513m (locus o range1.1g033513m.g) derived from phytozome v7.0 (chr-ID sc affold00023; pos 1322481 to 1323541)
aagccgcttggaaggccgaactctcccgccgcgaggtttccttaaattatttattttgttttaattctatttttccttttcttttatttattttccaatttcatttttctttctctttacaccaaaaaaaaaaaaaaaaattgatttttggcatttgtttgttgtcgattagagtgaaatttaatttagttcctgtaaaactaaaataagatgctgtagcctacttgaatgtgctttcagtagaagaatagggccaaaagcacttctaaattcaaacatgagcatgtttgtctgaggataccaccgagcagtgccggtgttgcttctgggcactgtcaatggcgctgccaagctttcacctttcctaatcttgtcctggcatttgtctacagtggggtgttttttctttcccataactaattaaattcagatactacttaggtgatgccatgccctccatgagtttccccaccatagatttgtgggataataatgggtaaattcaaaagggctgattttttttttttttggcagcttttaatttattgaacagagtcagctactcactttatactttttttttcaagtaatcacttttctatttcatttggtttctaaatgatccaaaggttatatatacatttttcccccctttttctccttttatggctgtgctattttctgttttctggtttcttgtacatttaatagtttctgttgcgctttagaagcaagcttgttgctttgtgtctgttgggaattaatgacgtgtttacttgtgtggatgcctggatggcctttttgtctttgtaaccatatgcggaagtagccattgttgtctcatgttcttttgaaaactgtgtgcatgctcatgagttgaacttacagatgaaaggcaaacttagaattacgcatctataatgttgatttaataatttctctctgtcattttagtattagatgtcactagagtttggggctggtggtttttgagcaagttctcatatgttgttatccattttccaggccgagattgcccgtcaggaagcaagattgaagat

SEQ ID NO: 83227 - DNA, 509 bp, Citrus sinensis
  Intron number 1 from transcript orange1.1g002649m (locus o range1.1g002649m.g) derived from phytozome v7.0 (chr-ID sc affold00101; pos 445900 to 446408 reverse strand)
tgtcttggagcttgttagcgccgagcttgatcctggtaagtgcatcggagtttttcacttcaaagaaaaatcacacacacacacacacacatatatatatatatgccctttttatcccaatagttcgtaaaacacctcaaaacatccatctctccctctttttatataatttgacggttttaactttaatgaattttgatcattcaaataaatgaaaagtattttttttaagccaagaaaaaaaaatcaatgcggattacataattttgttttgctttttcaaagttaatttgtggggaataaaaaatatttaacaattatcattttgaaggttttagcttattgttatacatataattgataattttcttttaaattaatttcttgtgcttatttgtcctcaaataaaccaaataaattattttttgaatgcttgaaggtgtttttaattacagtttttgtttactttttcagaaactggaaaagagaaacccaccatcaaaagccga

SEQ ID NO: 83228 - DNA, 185 bp, Citrus sinensis
  Intron number 1 from transcript orange1.1g023867m (locus o range1.1g023867m.g) derived from phytozome v7.0 (chr-ID sc affold00019; pos 864916 to 865100 reverse strand)
atacaacaccggcaccggcaccatctctgaatttggtaatgttttttatcacccaaaaagaaaatatattttcttgacttctagatgacaaaatttttcttgaattgagcattaatatttgagttatgttcattgtcaatatccaattgttctgaataatcttccttgcttgtttggcttacaga

SEQ ID NO: 83229 - DNA, 574 bp, Citrus sinensis
  Intron number 2 from transcript orange1.1g033507m (locus o range1.1g033507m.g) derived from phytozome v7.0 (chr-ID sc affold09460; pos 753 to 1326)
atcgacataaacgtcataaacagaaagttaaagaggtagggcagttttctgactctagctttctcgcctttatcttattgtcaaaaaatatgcttatgctttgtctgagtcagtttcattctaatttttatcgaatgatgattaattaaatcccatgttaagtgaatcaaaatgaaagattcacaggcacggggtaggaaattatgtttgatgtttacttttgattttctgtatttctgctcaccaagttctgctttttctaatcttcaatgtgcttagaagttgcgaaatttcatctttttatgtggtcacttaccttggcttggtttctttatggtcaatgcatatatagtaatttatcagagtagtttgaatgtttgttattttgatgcttgtatcaaatgtctatatctgaggtgatgctaatagttttttctgcctcttttgtaaattggctctttgaaattggagctggggtctgtgacatggtgactgggtactattgacttttcctggattttgtttctgggttgggttcgtcctggcaatgggagccatatatagaaggagaaag

SEQ ID NO: 83230 - DNA, 678 bp, Citrus sinensis
  Intron number 3 from transcript orange1.1g007769m (locus o range1.1g007769m.g) derived from phytozome v7.0 (chr-ID sc affold00386; pos 109796 to 110473 reverse strand)
caatcagtaagtaattaagcttccttctaattttcttcaacatattatgtacaatttcggttcatgatcatcagcttgtattttattttgattagttccaaaaattttccttgaactttgaagttgaattattagttttaagtgtttcatgaatgatctcttggtccagtcaacattaggccggggttcgtatacggggagggcaatgatgggaatgatgggaatgatttaagagtgtgtttaaagcgactaaagttataagttacttgttaattgcacttaattttctacttctttagtttggtttgaccagattcactaaatcatgctttattgtatgtaatcgaatccacttgcttttcttttcttaatttacttggagttgaagccaattcattgacgtcttgcattagtgaatgataagagatttctgatttttttaatacatggatcattgaaaatttatgtttatgctattgaatgtgtcattattctttacaattgctttccaagatatgcccgggatttctagtgattatggatctatcatttgatgaacactgagaaattctgcacttagtattttattttattttttggtttataagcacttaatgataatattggtagttctttaattggatgcttgaaagaattttcttttactgaactgtagac

SEQ ID NO: 83231 - DNA, 726 bp, Citrus sinensis
  Intron number 1 from transcript orange1.1g043884m (locus o range1.1g043884m.g) derived from phytozome v7.0 (chr-ID sc affold00119; pos 353889 to 354614)
ttcttcctgatcacatccttctagatctctttctggtaaattaacctccccttccccctctctttttcttctattttactttatttcagtcaatgatttattgattattgctgactactattactgggtatctgttgtttaattgatcgatcaagttaattttgtgattatcgattttgttttggagaatcattaattgggttttggatgctcgtttcttttgggctgtcaaatttgaattatgtatcgttttggtttggtttacttgatgaatgatacatctcaaaacgaagatcattttgctttatttatttacgactcctgcctcttgcaatatttacacgattgatccgttttcttacaaaatgcccttttttgcgcctcttaaatcaagattagaccagactgtctgctttgtaagaattaaatagcagcgcattatattatctctcaaatcagcaaaaatggatggaaaaactaaagatattttgagcagatagtagatggcttgtttgatatttttttttttgcatttagtcatgccagatgagatcctttttctcattcttatctgaattgtacaaatcctactagagctacattactgatagcattgcctttctacagactgactgttatatcgttaatattcttcctcattcttgttgtctataatatcgggatgtttataatatcattggtgtacatggtaccagagaacattaa

SEQ ID NO: 83232 - DNA, 645 bp, Citrus sinensis
  Intron number 1 from transcript orange1.1g038025m (locus o range1.1g038025m.g) derived from phytozome v7.0 (chr-ID sc affold00366; pos 109944 to 110588)
attagaagagccaatcacaagtttaaagttaaaacagtttagccattttattgtattgtgtacataaaatattcagagttaaaatatagaagtagtgctttagtttgtaaccatcttcattagcaatgtaaaaatatgcaggtgcatgctttgtgctttgagattctttcttgttttggatttgattaattacctgtcataacttatctcaaaatcctgatttgagaggaagataaagtcattttaatttgtgcttgacagccttgattgcacttgcatgcaaggaaatggacgtgaaaccaagatacttaaaagatatgagcaacggatactgaattggggatatgcatgattcaccgaaacctgcagctggcaagctctcggttgtcatgtcaggttaaagaatggcaaaaaaattctgttgaaagatataaagaacaatcaatattcaccatttatgttataaatttctggttattgttgccaatttggaggcatcaagatggcaacaaggcaggtgaagctaaaatgttgccaaagaagcattttgttcatcaaatgaaaagaatgaatggattgaaaaatcctgtggtctggcccatggttacagccttacagcacactgattctagccgaagtggtgca

SEQ ID NO: 83233 - DNA, 995 bp, Citrus sinensis
  Intron number 1 from transcript orange1.1g021869m (locus o range1.1g021869m.g) derived from phytozome v7.0 (chr-ID sc affold00007; pos 53604 to 54598 reverse strand)
actaagtacttgactttcccacacaggtaaagtaaatcaatctttctttcttttcttttctttttttcccaatttttttggtttcacttttctgttgcttttctggtttgagtatggatgtgtgtgataatgagaacgtgaaatgtgggaactcgagattactgatgtgtttgttaagtttgctatattctgtggaattgtttgtttcagacagaatgttgtagaattgttttgtgtggagactggattgattttgaatctgttgtttggagggtgcttaattttggggaacctgtggtttgggacagaatgtagtttccgtataaagagttttatatatttgttttctagaaacttttttgctaaggcctaattaaaaaaactcaaggtggatgttgaacattgcatacatatagtttcagttgatattttgtcatttttgtttgtgtaaaagctttatgtgagagtcataaagctgtggtctaactatggtgattttgatgaatttatgcttaattgcttatagcgtacatagatttacaatgtagattaattcagtttgatcgtgactgagtgaatgttttgaaaccaggcagaaactgtcggaatgagtaaattgtttctaaatttgttttaaatggttcatttttcattgaaactacccaaatatatgcctttgctattcctttaaacaaatgatagaaacgtcagtgtgatagaaatatagaaaagatgttagtcgtaacctgagttacagactttacctccagattgaaaatatatgtggataataataatcctaccatatgtgtgcaaaagcatgctatccagattccaaatgcattccctttatgatcttgcttcttgatttgcatatctacccctaaactttacatatcgctgagggcatgatttttatgcaacatatttgaatgctgatgtattttcttcctatgcacttactgattctgttgaacaaataaatgacagatctg

SEQ ID NO: 83234 - DNA, 682 bp, Citrus sinensis
  Intron number 2 from transcript orange1.1g000789m (locus o range1.1g000789m.g) derived from phytozome v7.0 (chr-ID sc affold00007; pos 1222529 to 1223210)
tttggctgctggtacgggaattgcagcatttctacgtaagtgcatatgagctgttcctgaaattattacttcaacagttgtcttttcttttttttttaagaaaataaaagtttgagttttttattcttaaattttttaattatgcattccaaatgaaactatacatgttaatgaaagtcaccattgtatatcactgctattcctaaccctttcagaattttttctttctttcttttttttttggccaaatgaaactgttaacgataatatttgacacagggtattatgcttgttctgtcaggttacgagtgcttgattttgtggaaagctactgtaaatagaagtttttttttttaatgaaacttgaaaatgcttttagtaaaatcacctactcatccaaaaagaaataaaagcaggtttaactattggttttatcaatatcaaaagcacctgactaatgcaaaacaatcatttgccagtctggagtacttagtaatggcttgttataactcttttttccccctttttttttcttttctatggttacaaggcttgttatatcttaaatgaacagtttctagtgctggctgctgcattactcaaatgaatttgaaacaaaatgaggtgtaatatattcaattatttgtatttgttctgcattattgcagaggtgtcctgttgg

SEQ ID NO: 83235 - DNA, 670 bp, Citrus sinensis
  Intron number 2 from transcript orange1.1g020716m (locus o range1.1g019223m.g) derived from phytozome v7.0 (chr-ID sc affold00022; pos 1452908 to 1453577)
tgaaggttcaattgttattttggttttgatgagcttaaatgaagttttatttgtttgaaaataattttgtggtgcaaatgctggcctgcctgcttgcagattgttagttttttgtttggtttggatgtaggcacaaaagatgttctgtagacatatttacaacataattaggcaatatggatgtatttgtatttgtatttgtatttgtatttctctatgagtaatgttaatgggttaagacttgatgctacgactgaattttgtaaaaggaacatataagtctggttgcatactcgttctttctatttccacctgtgaatactgatttgttgatagtgtgcgatcaaattctgataacttcagatgcagttgttgccttgttggaatagttatccaccttgaaacatttaaaacttttacccttattggcacctgggttgattgttatgttgaaaaatgagctaggggacatttgggcgaacatccattgaagttcatattgcaggtgtagtgcagacaacataggttacatgtggaacgtatgttggttgccgatttagtttgttgctggtggcattattgatgctacaatatctttctcaaagaataagttcttctcttctttcacctttcagcacacttgcttgatagtggaagtaaagttttgcca

SEQ ID NO: 83236 - DNA, 995 bp, Citrus sinensis; identical to SEQ ID NO: 80710
  Intron number 1 from transcript orange1.1g027921m (locus o range1.1g027783m.g) derived from phytozome v7.0 (chr-ID sc affold00256; pos 119512 to 120506)

SEQ ID NO: 83237 - DNA, 201 bp, Citrus sinensis
  Intron number 2 from transcript orange1.1g028574m (locus o range1.1g028574m.g) derived from phytozome v7.0 (chr-ID sc affold00026; pos 628285 to 628485 reverse strand)
ttactttgacgttgagattgccggaaaacctgccggtatgttttattatgtcaagttttgaattttgatcgttatatggaaaaagaagaaactttgtatttaataatgctaacttttttcttcttcttcttctttttttaaataaaagatagtattaatatttagttgtgacaaaaatgtttgttctcaggacgtattgta

SEQ ID NO: 83238 - DNA, 859 bp, Citrus sinensis
  Intron number 1 from transcript orange1.1g040101m (locus o range1.1g040101m.g) derived from phytozome v7.0 (chr-ID sc affold00366; pos 47917 to 48775 reverse strand)
gcaggaagttcttggtgttggtgaaaagttggaccgtaagttactttaatttattatttcacttgattctggttatgtcatttgttatgcttttccttgaatgaattaccaataaatggatgctaagtttattttatgggctaactagtgctaaagaaagctggatttaattgcctatttgaagatgataaatggtttttattttgatattgcatttgtaaatttactattgatggttatgaatgtgttataacatcttttctggattaatttacaattctgcatccattcacattgcatattctggtacggcatctatcttccactgttgattatctttactagttggtcaagagacattatagtgtattggaaatcaaagaatcaaaaagaagatgtttgcaacatgattttaatgtctccagggactacgaaatgcacccaacctattgcattcgtaggttctttccagtggtcacttcaggactagacactatgatttcaaactgttatggaaattgaggtctatgtttaccttgtaatttttttcttcattaatgaacttaagtatcaagatatttacaaatatgtttttactttgatatcttgttattctttctgtaggttatattatgttgttttcctggatttttcttattcccagaaaattgacaaaactgaaattacattgttctctgcttcacagtccacccgttaacttttaataaaatcttctttctctctctcactcagttgatagatcccatttctacccccccccccatacacttgtacaatatgtattttttgtgttttggtattaactgtttctaatatcaattttccagaggtcagtgaa

SEQ ID NO: 83239 - DNA, 898 bp, Citrus sinensis
  Intron number 1 from transcript orange1.1g027083m (locus o range1.1g027083m.g) derived from phytozome v7.0 (chr-ID sc affold01796; pos 17839 to 18736 reverse strand)
cctgctccagaaagggttttgaaacattggattcggtatgtctttaatacttcggcatcttcaatcagattgtatcatgtctaccttttagcgaatcatctattagttaagattatttatcatccaactatttctgatttgaatagataagtttgagaggtatcacgcctgtctttcccaattatatatatatagaaatatgtcattttttctattactattatccaatggagtcttgtaaaataaagttcaaagcacctacatgcacattattgttaaacaaaatttgttattttgagctaatgtgatggatatgcaacgagcacttatacatatcatcactattaatatcctctttctgtcttgttatgggctatttggaaaatggaggtgttattctacagcttctttctttttctttttcctttttgtttatttgggccatctgtgcatcaaggtttggtcatggttagcatcctacaaacctttgtttgcttatatcagcatctggcattgccatgatgataactcttcatgataaataataataactagaatatagcttgcgggttcctaaggaaaaaggaatactgaaattgcagtcttttatgctgactatgattcaatgtgtaatttttaatgaaaagttataataatttaatttatattttttattagcaaacttattgttgtagatcaagttttatatatttcatgtggtaatattgcatgtttaatattcttctggaagagaaattgcacatacagtttttggtaattatgtagttaggtttggaatatctttcatcaatttcacatacaaatgtgggttgttgctaattctatatcaaaaattgttccaggtgtattttcaacttgagaatctgagccgcgcaga

SEQ ID NO: 83240 - DNA, 723 bp, Citrus sinensis
  Intron number 1 from transcript orange1.1g034033m (locus o range1.1g031638m.g) derived from phytozome v7.0 (chr-ID sc affold00079; pos 367270 to 367992)
actttactagggtctttagcattccaaatcactgggtaagttgatctattttaactaaggataatatttgtcaaataataccttgatgagccagttttcaaaatcaaagctcagtgctgagtcctagattttgagctacgactcaaaaggaaggtttatgaataataacaatactaagtactgcaatcagttgtcgaaaagaatggtagattctgctgtttcagttactttgacagaaaactttttcatccaaatttttacttgccaataatgtaaaaataagtgtataacgatattataatgcaaggaaaccatgataatgtgatatgcaaagtttctatagaaaattactgttagtcatccacaggagtttttggcctaaaaaatcaatagctggagaaatggctcatggggttgatgtcttctatcaaatattcttgatttagtgaactcccttgaatgttttcgctgtggaggaattatctttgtgtggtctaattggtactccaaatatctcagaaaatttaaagatatcgctcattttctagtttaggggagtaaaaaactccgagtagtgcttttagcacattttttgatagaaaaccgaaaaaaggtttagtaacagcaggagaccatctgttcgtattactgatcctaattctgatagtttaataaacctcatttccagtgcagttgcttgtaccttcagctcttataccagca

SEQ ID NO: 83241 - DNA, 680 bp, Citrus sinensis
  Intron number 1 from transcript orange1.1g048185m (locus o range1.1g048185m.g) derived from phytozome v7.0 (chr-ID sc affold02024; pos 2564 to 3243)
ggcttagatctaaaggagggattggaagcgataaggtaatcttttcttgtagggtgctaaattgaattaaaaacataatattatttacattatagagtacaggcataaactcattatctatgttaatttattcataattttactccaaatgtagtaatagatctccattaatttattgatacatcattcatgtttgtttgtcttcagtttttatattccaatatctaatctattaagtattctttaaaaaaatacgagaaaaagttggaaaaacactttaggggtgattgggtacactttcgtatggcacaaatagtgctaggctttgttttttaagcggacggcttgtccaatttctgttttacaacttattcattaatacatttttgagtttcttatagaaaaaaaaaattgagaaaacactttaagtgaaaaaattttgtatttcaatttatacttatattcttcaccctagtagtatttatgtttaatagtgaattggaaaatatattctaccaataattaaaggaatacttttcttttaattattaaaaagataacgtagttactcattacccatataaatggacagtttaatctgttccatatctatacaacaaaacgagcttcagacacggtttgcagcgttccactatcacttccattctgagcagcagtct

SEQ ID NO: 83242 - DNA, 808 bp, Citrus sinensis
  Intron number 1 from transcript orange1.1g016145m (locus o range1.1g016145m.g) derived from phytozome v7.0 (chr-ID sc affold00005; pos 2091100 to 2091907)
caggctgtttttgctggaacagcttcttcaggtacaacatcactttcctcctttatttctctattcatttctgattcaatcacagccagaaaagttcagtggcagtgccataacacgcagaatattataaaatctgcaagaacagtaaaccatactataaacagattgttaacagtaaaccatactataaacagactgcttcccttgtcggcaaagaatcaaaagatcgactggtttttttaatgtaaaaatgaaactttttcaagtgctgttgcataaagtttaaggaaacatagctctaatgtgcatgtttttgctttttggagaagtttaaagttgcatcattgcatgcttgagtctgggaaaagtactgtctaaaatttacactatcaggaatacgaaagacatatgcgcactttcactatttttcaaaacatgaaagaacctcagaatagcgcactcatcccctgttgtgatatcattttatatttatttcctccaatggcccgatagtgttttcgctttccaagaagatgctgaaaggttgcattgcgatttgccatatagttgataagttaccaatttatcataaatttggtgattggaaagagttaataaccttgtgaaaccattagacatgtttcctgtggccaagttagtaccagaccagctgcgtcccctgcctgcatctagctcaagcaattcatatgacaacttttaaatttcagcgcatgtttcatcctagattcattagatcctttactctgcaacaggtgttctcgtttccatcttgaggattataacaaag

SEQ ID NO: 83243 - DNA, 1016 bp, Citrus sinensis
  Intron number 2 from transcript orange1.1g043255m (locus o range1.1g043255m.g) derived from phytozome v7.0 (chr-ID sc affold00244; pos 153303 to 154318)
ggtacgttattttattatatttgctagtatgtgcatatgtataaaagaagagtatagttatatttagtggttataaataaacaccaattaaggtacctaaagtacaaaagaaagtttgtatgtgaccattttgttttgtgcttgtatgttcatccgtgtgagactttaagatagagagaagcatcttactatgtactatttagtggtcatggtgaaaccctattcgagtacttgaaggtacaaagggaaatgtctaatttaattggattcaggggttgtaaggattgtttcaacaagttacctaaggttttgggactgatctatgctgaaatgaaagaaacattgtttaaggtacttaaacttaattgtgggtaccaaaggaatgcatataaaaagagagaggaaggaagcagctttgaatttcactttactcgggagtcatagatgtatgttattgttgattgcaagattgaaggagttctctgtgttttgagtttgacatgcatagaagcatttaactgtgcatgaattttaggcctttagaatttttaatcatatttaatcttttagtttctctctgtgtctttttttttttgatttactgtgctcatcttcttgagctctttttttaattatttttttttaatctttagtacaagaattatatatgaaatagagaacagaggagacaatttggcttgagttgagacctataacacattcatcaatctgtgcctgctaatatctccaaaagtttgtttttaaaagttgttttactgcgcttggattggttagcaattattagacctagatggaccattactttgagtgtttgatataacaaatacatattgaaaaactatactgaactatagttcctgcaggcagtagaattatgcttaattaagttcaattctactttggtaaattgggtgttttcctctattgcgttatatttggtatattgctttttttgtgtaggcatttgaatacaaaaggctgttgctggattatag

SEQ ID NO: 83244 - DNA, 647 bp, Citrus sinensis
  Intron number 1 from transcript orange1.1g028668m (locus o range1.1g024770m.g) derived from phytozome v7.0 (chr-ID sc affold00010; pos 1536143 to 1536789)
caagcttgatcctgccaataagctctactttccctgtaagtgctataatttttttcatttttcgaaaaatggtcacgtttaattcctcaaatgaactgctagaaaacgcaactgctactgctagtagagcagtaccgaaataattagaattttactctatatcatttacagttgaaaaacaaatcaaattagaaattagatagcatgaaaaagatagaaagcaagacaaatatttttagttaatgacaagaatttcacgtcactaatgagagaaatttagtaagcccagctagatttgaacaagtttagttagtggaatatgaaaataacttttcaggtgcgggtgctatctagtcgaaatggtaaaatttgttgtgtcgaaaataagagctctgggaagtccaacccgcttatgtgggtgtggaagtgattgggttgctatttggctaaatcataataaaagagaccctcatttatttatttttattagttgcatgcttatttagcaagtttgatgtagcatttcaaatttcggtttatttgactattgtgattctaatttaattctgaattttttcatgatttatgtcgcctattttctttcaagatgaggctggcaagcaggtcaggagtgcaatcaaaataaa

SEQ ID NO: 83245 - DNA, 939 bp, Citrus sinensis
  Intron number 4 from transcript orange1.1g014917m (locus o range1.1g014917m.g) derived from phytozome v7.0 (chr-ID sc affold00227; pos 153527 to 154465 reverse strand)
ttagtcaagctcttgaaggcataacactctctgtaagttttatttttatttttttcttttttggctccaaaatactatggatattaccagcttgagttgtttatagcaatagcctgttgcacaggttagttggcgctagctatagttgaaaaagctgaagaaactcactagtgctactgtctttagctttctttaatatcaagggcattgatattataattttcttgtttttttatttattaagtgttgagtgatcaatgaaagagtggaataagtaagcaattgtggtttcttgtcatttgataggagggtttgttgtgatctactatttgttcttgaatgaaaccatgagccactgcttgagctatacaactcttgtgagacacaatgtgcttgactaacatctcgtgcactgtatctgcatgatgacagaagttgattctgctttgatttctttcccatgttgtgacgttttgcattttaaatgtaaagaaacgtgttgcggtatttcatggtggatttaactttccatttcattgcatctttctcatcattttttcactgcgtatttcttgattttgcctctaattgtcatatgtagaatgtttaatcatgtatcactaatgatttcctgtttataactggttgttcttaatctgaaatctgaatatatcctgctgtgtcagtgtaatgtgtaattagtgatttcagtagaactaaggggctttgatgtgttatgactgcttgatcattaacttgaaaagaagccttttctaacttttcctccaaagagaccttagcattgtgataataagcctagtttacctctgatattagtgtcataattattaagcacttaactgggctttgtatttgctgatccattgagtttaaccgcaggttaactcttttgtatgattcagattcttgaagcaccag

SEQ ID NO: 83246 - DNA, 364 bp, Citrus sinensis
  Intron number 1 from transcript orange1.1g014917m (locus o range1.1g014917m.g) derived from phytozome v7.0 (chr-ID sc affold00227; pos 155056 to 155419 reverse strand)
aagacgaagcgtaactaaaggcttaagactcgaactaaaaccagaaaacgcttctcaagaatgcgctatagcttgacttgttctcttatggccaaattattttccttacttagtcaaaatttttacaatccatgcattaatcaacattttgttaaggaaaaaaaaaaaagaagaaaagcaaatcgccagtttaaaaattcacaaaaacgtacctcagagaaaatgcaacattctattaaaaatttcaaaaaaaaaaaaaaagaaagaaagaaattagtaacggaaggcaatgtcttggttaaaatcggcggtgaataaggcggttgaagtcggtggaagaaacaacctaactcgcaccgttcgg

SEQ ID NO: 83247 - DNA, 949 bp, Citrus sinensis
  Intron number 1 from transcript orange1.1g023649m (locus o range1.1g023649m.g) derived from phytozome v7.0 (chr-ID sc affold00168; pos 209561 to 210509)
acatttcaccgttaaagcttcttcttcttcttcaggtaaatttccattagactcctccaaattgctcacattgcctaacttttctgctggtaaaaaatgtcatttatttatttatttatttattttttgaacttctatatgcaaatgggtttttgtaagaaacatattgaactgagaaagtgtgtaaattatacattttgggattacaaaaatttatcagtggattcatttacatgtagattggttaaaaagatttggctactaggagcattagagaaataaagttaaagacttgttgagtatgcagaaagttttgaaattgggaaattttcgaatcacaagttgaaattttgggaaaaatgataggcgttgtacatttttcagattttaaaccatcatgaacacaagttttcacgaaaatgtgagaagtaaatttagaaggtattttaacttcggattattttacattggtttacaattaatcgtggaattttgttttaatgagagtattgactgacaattttaccgtgaaattggactcctttacagttgttggctttcagcttagtagtttctttggttatgttagattcaggtaaagaaatacagtatgagcccaaaatttcttattgttctattggacaaggtgtgacttgagaaattgtccttgtcaaagggctaagaaattttcttccttcatatcatttgtagctagaacaaactaacaccaaatttatgtgcatactatgtaataagtttaagtagtgacatcccaacttcagattacatatgtattgtatagagctttaatagggtacacaaggtactcacaattaccagttgatatctctgttgatcaaaatgatccccttgcgagctgccgtgaattataatttctcttttcccacttgcagttggaagtgcagagtacacggaggaacctgcaact

SEQ ID NO: 83248 - DNA, 813 bp, Citrus sinensis
  Intron number 2 from transcript orange1.1g032672m (locus o range1.1g032672m.g) derived from phytozome v7.0 (chr-ID sc affold00209; pos 1080 to 1892)
ttgtaaggttgtttatctgttttttgtctactatgtaatgtaatgctttggaagaactgaaaaacttaatgatatggatatattccatttatgttttgatacagtatgcaattgccttttatgttttcattctccgtcgcttccttcaaatctctcatagtatttgcttactcaattactttgactttctgtgtgttttatgttgtttaccataacaatcaattcaacgcaatttgtatcagatcatttaagcaaactctatggtttacgccctggttggctcttttctcctcaaagtctcaatgtaattaaaccttattctttatcttttgcatgtcaacgattaacgttcttacttggattgatgaataattattatttatgtattacattttaggatgtctccgatgctcaatggagaaattttcgatcgaatttaactattctgactatggtgttcgctctttttgccatgctcgccaatacgtttagaacattttttaatttgaaagcaagaaggatgtccattctttggcttttcatttctttcatttacctattctatctacatggagcttggtatgtcatttttattatatctttcacaattcttttttgcaaatttttgttgcaatgatgttggaatgttcgtagtttatgtagagtatccggactctgctatttggggtctctgtaatgtgtttcttttttcccctacctctctttagtttatctcttctattatgaatgctttagagcaatatcttttatgttgcagggtaagagaggttgaattattggtcctagttcttg

SEQ ID NO: 83249 - DNA, 306 bp, Citrus sinensis
  Intron number 1 from transcript orange1.1g043723m (locus o range1.1g043723m.g) derived from phytozome v7.0 (chr-ID sc affold00196; pos 139748 to 140053)
gaagtaaatcgtggttagaggtagagtcaacagtgattgacaaccatactcaaacactcaaattagattttgaataataagaggcggtcttgagataaaaaatggaacttaaagctattaacagcggcaaatatgcgatgaggaagaatataaatgtgtaatttcaattttcacccgacgcgaatttgtttttttaccttttttttctgtttaggattttttgatttggttgcatttgtgggtcaagtgttaatgggtccaacaatataagctctgttaacagtgagctcaacgcattcaatcaaa

SEQ ID NO: 83250 - DNA, 629 bp, Citrus sinensis
  Intron number 3 from transcript orange1.1g006738m (locus o range1.1g006738m.g) derived from phytozome v7.0 (chr-ID sc affold00003; pos 3567174 to 3567802)
aagaaagtggtaagtcaacatactttctcttctgccttgttcttttgtaccttttttttttgttaacatagatttggcaagtattgtttgaaacatgtcttaattttactaatccactgtaatggctctgccagtaaaatattattcaaaggcgatgttgagcttaatgttttggccattgtttcattcttcaaatcttatgaatagaagaataattgaaactcaaatttgaagaattatttgggcatagtatggtaccaatgtgcttcccagttttgcttaaaggtgtagtttgccaccgtatttatcctgatttttttttttttaatatttcactcactattgttgatctgtcaattcttgcttttgtaaaaattgaattgaacatttgttgtataactttatccaagtttgttaatagtttcttgttcttgtgagtgctaaaattatggtcagtgctcagtcttatacacccaaaataagtcagttttgccttcagttaattaattcttttttttttcccccttagagatgcatggtcagtgacgtgtgttttttccccattctagagaggggcaaaaagaaaaatattaagttgttttagttcctgtgcaggcaaagtcttgtta

SEQ ID NO: 83251 - DNA, 645 bp, Citrus sinensis
  Intron number 1 from transcript orange1.1g034919m (locus o range1.1g034919m.g) derived from phytozome v7.0 (chr-ID sc affold00388; pos 151054 to 151698 reverse strand)
tcaaaacgccttttaaaaaagggaaattatcaccggtatacccttaaatgtcaccggtatcaaacgtgttacaacactttttgcttatatcactcgtataccctaagttaacaaaagagttctggcgtccaccttttcgtttactatcgttaagacatgctgacgtcataggggtaatatagtcttttaataaagaagaggctgcaaagaaagccgacgtcgttttaatacccaaaaaatgctgtcgtttcattgtaactgaaaagaaaaaaaaatccgacgtcatttttttattttggttaaaaaaaagttacagagaaacgacatcttttcactgtaactcaaagacaaaaagacagaagtggtccatcctccccattctttattcacatcgagagaagtttgcatgaatatgaacaaccagtgcaagactgtatgcatgccttccatctttttactaaaaaccctcaatatttgaccatcaaacaagtttaagtgatagctgtggagattgatttggaccttgacagaagagtaagtgttagagtgcaatttatgcactagttttgcattgtttacttctcttaatatcgatgttttgcacttaataatagtgatttacttgtgttttatttttgtaggtga

SEQ ID NO: 83252 - DNA, 371 bp, Citrus sinensis
  Intron number 3 from transcript orange1.1g003561m (locus o range1.1g003561m.g) derived from phytozome v7.0 (chr-ID sc affold00585; pos 69898 to 70268)
aaggtattagcaaattcaatttttgttgcataaatgttatattttgatgtgatatatgtatcttgtgaatgtagagcacttgcgttctgttccacaaatatcctaagattaaaaaatatataagtcttaaaatctatcttcatcaggtgcctttgcttcttaggagtgaattaacaatgttgtattcttttttcattatatattttttaggttgattgttatgaattttatttggttctcttgtcaaatcatatgctgacttccattcttctgctttgtttattccctttttaaaaatgttacatgtacaattttggtattgtataaggaaggcagggtaatggttttatttttgaatgttttgtttcaga

SEQ ID NO: 83253 - DNA, 661 bp, Citrus sinensis
  Intron number 1 from transcript orange1.1g028800m (locus o range1.1g028800m.g) derived from phytozome v7.0 (chr-ID sc affold00074; pos 117504 to 118164)
catcgtcaagtcccttgaatcctctctcgctaccggtacataaaaatatttcttcttttttttgtcaattttttttcccaagttatgtgatttagtgaattatgttgaatatgaatattgatgcgatataccattgctggtgcttttgttttggttggtttttcaggtgatcgtatattttcaaaagttgaattgtttattgagtgatcatgcatttttcctaaaggaaaaaatgattttattttatttattttattttttttgttagctttgtgagatatcaaaagcattgtatggttacagatagaaaattcaaaagtaaacttcatcctgaatattattagttgatatagatggcttcaggctctggcaaaaaatatgcaatttggctctgcaatctttaaagatttggccttaatgattactgcacctttgtagtgtagaactttgctttggggacacctgtgaaaagattgctttccaattcctgaagccattttaccttcaaatgttccttgataatatagaaattctgtttattggcatattttaggatggtacatgattgcttttaattcatgttcagaatgattggtttgatgtaaagataagttatggataatgttttaaatcaacatttgttacaggtaatttgcagaag

SEQ ID NO: 83254 - DNA, 784 bp, Citrus sinensis
  Intron number 1 from transcript orange1.1g013969m (locus o range1.1g008210m.g) derived from phytozome v7.0 (chr-ID sc affold00050; pos 622574 to 623357 reverse strand)
ttagccgcactgttgaatctttgccttactggttggtgagtattctttcatctgtccttcactgagtatttgttcctatatgggtatattatttagtcttttcagatcatttataatgaaatttcattgattgaaattggcatctggtgtagtttaagggttgtttagaattgagttacttaggcttttagtctgcagctattgggaactgaaatcactaactgtcaagtaaaagtgcatattagctaactgctgaactctagtggttactaaacacgctctctaaaatttaagtagaagcacaatggtcacagacataccttagattttttttctagtacacagttgatttctgctattgtatttttccaaatggctcttccagtgcatttgtatatttttagcactaacatcacaaaacgactaagtcaaaaaattgaaggagtatgtgagcacaaaacttttgcggggatttgctttgcctcctggaccttgctagatgttcaatagaatggaaggttggtttttttttttttttttgagaagataatagattggaagttagctaaagctttaatggatcgtttctcattttgactttttttttcacccctgggtatgaaattacaatttcacttcatctctggctctcaaatttatgctgattgatgtttgattctttagttaagtcaattgtgagccagctcaagatatggactttcacagtttataattatttataaatatatagttatagttattccttctttgcaattttacagtt

SEQ ID NO: 83255 - DNA, 770 bp, Citrus sinensis
  Intron number 1 from transcript orange1.1g020417m (locus o range1.1g020417m.g) derived from phytozome v7.0 (chr-ID sc affold00245; pos 154683 to 155452)
tgtgtttgtacttcacgcaaggaaagtgtacagtaactttttgtgctgaccctttattgcgtttttgcgaagataagctaccttttctgcatttgatttttcagtttgtcaaatttcgtattgcatatcacatgttcgatcaaatgtttcaatgaatgtacacgaacctcgttcttgctttggtgtaaggtttggttctcacaaatgaaagcatttatttgtatataataacgattcacattaaacataggccgagagagatttaggatcaaagggatgtttgtaactgctatggttctgctttattttcaaagctaatttggaaagtatatctctaaacacccttgctggtgtttacttatgcttaagtttgaaagcacaatggctaaagtgtgtggtacctacttggccttctattgttagcactttacttaccacgctcctgtgtatacttaacagctagttatttcatcctactgtggatttggattaaaagaatttttcactcatgtcctttcataattaacagccaccttaaggcatactttgtcgggtaactttttaattcgtatctttcaataacttttctaaaatgttccagtttacaaattcaaccacatttgtttctagaagttgggatgcttgtgcaatctgtgtttttgattacattttctctccaaatgttgttttgaattgtgttccagaatctattttcttctttgcaatttgaaacgtggtttgtaactggaattacgccctcttcattttag

SEQ ID NO: 83256 - DNA, 437 bp, Citrus sinensis
  Intron number 2 from transcript orange1.1g047738m (locus o range1.1g047738m.g) derived from phytozome v7.0 (chr-ID sc affold00396; pos 67987 to 68423 reverse strand)
ctggaccttgcaagtcaagtaacatctccattcaggtaaaatactgaagagaccaaaatatatttaattaaagttcgactaatttatgagtgtgtaattaataatcttaatttaatcatcactcaatccatgggttcaatttggttttcttgaaaaattgaaccaaactacgagaatggattggttcaaaaatttttgactaataaattctctctctctctctctttttttttttaaatttagtcttttaaagaagaacgaaaccgaatcaaaccgcaaatcaattttagagccattaggctctaggaaacttttgcctagccctaactaatgttgcatacattagtatatatgttagcagctaccatggaagttaaacttaaaactcttttattttatttttttcatgaagctatcggggacaatcaaggcgcctg

SEQ ID NO: 83257 - DNA, 735 bp, Citrus sinensis
  Intron number 1 from transcript orange1.1g006611m (locus o range1.1g006582m.g) derived from phytozome v7.0 (chr-ID sc affold01276; pos 9662 to 10396)
tttcagatattcttggaaggtttatatttcactctctttagctgaatttacctgtcatatttttatcatataaaccttaggcaaaatgtttgttactgtgtggtgaacatggaaaataaaatatttgttctgctttcaatatttattaatatctttgataatatgaagtgggtgtcattatttccatgtattagtaattacaatctattttgtgctcttcctagcctatgctcaatttgaacatcgcaatgaacttatctacttacgtatattttgtgctttctggttggaaattggaagtgttaaccaaatttctattcagaaacagctcttttctgtgctgtggcagagagagcagatgtgacctaaccttcatttttaatttgtatcaattggtagttttttaactctctgttttcccctcgtaacaataatgaatggcattcgctacagaaaccataaggggactaatcattgtgaaacaacactaggtgataactagcagtttcaatttgacagcaaagaagctgctaaggaatccattctgtacagctacaagcatggtttttctggatttgctgcagtcttaacacattctcaagccaagttaacagcaggtgttataatgttggtgaagaaaatatgttttagccatctaaatttgttttattaaccaatattttctattgacacgttttgtccgatgtgtttgtgcagatctccctggtgttgtcc

SEQ ID NO: 83258 - DNA, 601 bp, Citrus sinensis
  Intron number 2 from transcript orange1.1g006277m (locus o range1.1g005916m.g) derived from phytozome v7.0 (chr-ID sc affold00078; pos 552549 to 553149 reverse strand)
tacttgagactgatccaacttgtcgatacatccgggtaatgttatgctcttttttatattgttaatcaatttcttctattttccctgcttgtttgctgggaatattgggaggtgaaagaaaattagtgtgttgttatctttttttgtatgccttgttttgcttttgaggcaagagactgaagttctatgatgtgtcttttcttatgttttcctgtctatccccatcaacaaaactgaaaaataacctgatgtgggttcttacagtacaaagaagtgattggaaaaggggcttttaagacagtgtatccttcattattctgtttttttcttccttttttgtttcatttggagatactagtgtttgtacttggtcctgtggatacatatgtttgcagaagctgttacagaagacatttttttttcttttttttttctctgataagaaaaaggtaatgttggacaagctagtctatgactggatgtagcaaagttgcaaatggaaataaattcctttttggtagtttgagcttattttgttcatggatctgtatgttttccttaattttttgaaatcctagctacaaggcatttgacgaagtca

SEQ ID NO: 83259 - DNA, 384 bp, Citrus sinensis
  Intron number 1 from transcript orange1.1g044354m (locus o range1.1g044354m.g) derived from phytozome v7.0 (chr-ID sc affold00169; pos 184666 to 185049)
ttgccattcaagactccaccatctaattcaagaaggtaaaacatttgtgatatcattgcattgttagaaattttttttgttttttttcaaattgttgtttggtatttggtcgctgagtatttacaagaaaagaaactcaagtgggtcaaatagagataaagtttgagacttttattgacaatttctttgttaatttttacattggatcttgtgaggaacttcaggaaagaaaataagataggttgcacccacctagaatgtttgattttttaaattttttttccaatctttatgtgatttgattttcttggctgctaaagggacactttgtgtatgatcggttttacaggaaacgtaggcttcagaaaaggagccctgtttcga

SEQ ID NO: 83260 - DNA, 848 bp, Citrus sinensis
  Intron number 1 from transcript orange1.1g022009m (locus o range1.1g022009m.g) derived from phytozome v7.0 (chr-ID sc affold00007; pos 2091628 to 2092475 reverse strand)
gcacctcaagagtattacactggtggcgagaagaggtccatttcttctaaatctccctctcgttttcgctgaagctatcatagtttatccaattttcgctattttttagtcaaatttaatttaataatgttaattttctatgcttgtttgtcctttttttatgttgtactgttcttagtttgtttggttagggaaagagggtgtttttcatgcaactgcttttaactctatgaattacataagatcatttcgtgtgcacccagcagtgttaggttaggaataggatcgtgtgatagcttgctttggacaaacctaacatgttttaaataaatttaaaacattagtgtccttggaggaaattaatcgggtaatttggaattgtcaagattcaaacctgaaaccccaggtcatatgctggagctaatttagggttataagtggggttaaatcttattttgttgaataattttactgttcaaggggggccctcattgctcttgactgtttcattttgtttaataggacttcaacaagatgctatatacttgaataattcctacatatgattgatgaacggctgatttagacattgtttgcaacctaaggcttttactgttgctctacatgccagcccttgatagtcctggtttcgagtattcgcaaggaattagttcttagcgtgattggccaagtctgtatgttctggtacatatatgttcgtggctctaatttgggtagtggttttttacatttattttgtttctgagtttaaacatgcacttttgtatattgtaggttttttttttttaaattatgtgagtgtcttatatttttaattttgcagtggt

SEQ ID NO: 83261 - DNA, 859 bp, Citrus sinensis
  Intron number 1 from transcript orange1.1g037145m (locus o range1.1g037145m.g) derived from phytozome v7.0 (chr-ID sc affold00047; pos 399678 to 400536 reverse strand)
actcttgggcctgtgtcactggatttgatttcactgtaagcattcaatatcttattaacatcatcgtattatacagaaagcttcaattttttaagtagtttagattataatatacaattaatttgaatttgtattcggtgctgcgctgagctgagagctgatctttatgctgagattttataactgcgattgcccgagtataccttaatgtacacgtgtgatagaagattacaaaaagttcagcaccacttagtagttagcactatccaaatccaatcaatcttttgaaacttataagtcagcgcgtggtggttcaatttttaattttcaatatgtggttgattcattttcttcattctccgttctcctaacagcaaggactaagtggagcacttgaaacactctgtggtcaaggagttggcgcaaaacaatacagggtgttgggaatacacttgcaaacatcttgtatcatatcttgcttcttctcaattatcatatctttcctgtggttctacacagaacctatacttattttacttcatcaatctccgaatatttcagaacaagcaggtctctacatgaagtatctcattccgggtctatttgcattcgggtttatacagaactttctaaggtttcttcagacacaatccattgtcatgccattggtcttctgctcagctctcccattggcaatccattttggcattgcatattctttagttcattggacatcccttggtttcagtggagctccactagcatgttcaatttcgttgtggatctcgacacttttgctagcaatttatatccattgttcaaagaaaactaaccgtacgtgggagggactttcttttga

SEQ ID NO: 83262 - DNA, 673 bp, Citrus sinensis
  Intron number 2 from transcript orange1.1g016724m (locus o range1.1g016706m.g) derived from phytozome v7.0 (chr-ID sc affold00419; pos 39680 to 40352)
ctctcgctctctttctctgccgccaactccacgaggttttgcttctttctttctttcttttttcaattttcttctaacacaaagaaaaaaaaaaatcaaactccacctcctatttttcaaaatcatatgaaattaaataatgccctgttttggaaaataaacccactgccattttgcgaagtgtcccaactattgagtttatctagaaaactgcgcctttcctgctaaaatacgcttgcttgtgaattacgccacattccgcgcacacagaaatatgtatgagaattttaaaaaaatagtaaaaaggaaaaagaaaaagagaaatcaaatttcggctctctttttatttctttccttctagataattacaaaaaagtatttaaatttcgaacatttatcggtcccccataaaagaatttgaatttttacaaccaaagcctatgttaaataattgcatttgctaacatgcgccacgcggctcgtgagctggcttcttcgcttggcttgcattatatttaaatattaacacattggctttgtccactttcttcttctacacatatataaattcacagcagaatcaaaattcctctttgggtttcttttgggctcattttttttttcttttgtttccgtcactttctcaggaaaattttaattatcaaactcaaac

SEQ ID NO: 83263 - DNA, 909 bp, Citrus sinensis; identical to SEQ ID NO: 83167
  Intron number 1 from transcript orange1.1g013041m (locus o range1.1g012146m.g) derived from phytozome v7.0 (chr-ID sc affold00005; pos 2079245 to 2080153 reverse strand)

SEQ ID NO: 83264 - DNA, 502 bp, Citrus sinensis
  Intron number 4 from transcript orange1.1g039187m (locus o range1.1g039187m.g) derived from phytozome v7.0 (chr-ID sc affold00443; pos 74167 to 74668 reverse strand)
ttcaaaggacctctattttcttactcaatactcttgttataattttggaatggctaataacaagaactaacttgtttcgtcaacctttaatcaatcaagatcaaattgaaactgagattgataaagatcaaagcaaagaacagaaaacagaattgagttttagggaacgagctaacaagtttgaaggaaaaattcatactcttttattcatcaaaactgaatacaaacaaattacagatgaagaaaagattacaagaatcacacataaagaagaagtactcgaattaattaagaaatgagagagagagagctcttatatcagatgttacaagccagcatcgcgtttctggaaaaccgagccacgttagcagaacattacacaagcactcctcaaatgattacaatctacataatgacccacataactcttacttaatttcactatggtccctaaaacaggtaattacaacttcacaactctcagtcagatttcacccaattt

SEQ ID NO: 83265 - DNA, 913 bp, Citrus sinensis
  Intron number 1 from transcript orange1.1g036821m (locus o range1.1g036821m.g) derived from phytozome v7.0 (chr-ID sc affold00007; pos 913335 to 914247 reverse strand)
ctgctctggagtcagagtctgagcccgtgcttacgtgattccccaattcccaattgccagctgccatcatcttcctttgataagaactacataatcaagacgcaatagtcaaaagagtgaaaactagggatggcgatgggcaagcccgcagtagatttgttattattaaatttaaatttgtataaaatttaaattgttaaattcgcagatttgttattgttaaattcgcagatttgtataaaatttaaattgtcaaattcactcgtaacttacagtgaattttaattttttgaaaaaaattcactcgtagtgggttttaataattattaaattcgtgatgatacaatgtctataataataattaaaattaatatttttaaatactaatttgaaggaaaatgtttttagttttttttaggttattactttagaatgagagatgtgtcacatacacacatacacaactttgaatctttggttatttgataatttaaataatgacattattatttttatatatttttagattaaaattaaattaaaaatatttgaaaaaaattatgggtttagtggatattcatgtgggtattcactagatataaagttaatactaaatccacctgtatccatgtgtagattttaatttataatattaaactcactcgtaacggataaaattatccacaacagacaaattttaacagataaatttagacgaatttatgggtataattaccatccccagtgaaaattaagaagaaagggtggcaatagcattaacaatcttcggcgcactgctctgtgaaatttctattagatatttaaatagaatagatagcaatttgggaaaactaatttaataaaataagaaaagagagtagcctagtagtagacctgtaggctgtggtggcac

SEQ ID NO: 83266 - DNA, 1053 bp, Citrus sinensis
  Intron number 2 from transcript orange1.1g038345m (locus o range1.1g038345m.g) derived from phytozome v7.0 (chr-ID sc affold03368; pos 2224 to 3276 reverse strand)
acccaatcaaaaaaatttgattaaggtcgctctaggtaagcagtcaaagcaccttctaatacattttgttgcatgtttgagaaccttttgacataatttgctgccccgtaatattctctaaaataattttttctaatagacatcgggaaatccaattgtgcttgatgacgcttttaagagaataaaatacttaaacaaaaaaaaatgtttattgtttccttttcatataccttgcctaaggtcttaaaagaataatatattttagactaaacgaaacaaaaatcaggtgttaataatagaatatttttagcacacctcttaagtttgtcgaagtcatacagaattcaaaagccatatggtggtaattaaatatttatttattcattttatggtagggtgggcaaaatcttttgtatttaagtatgtctaaatttttatgaatatcattactgagagatgtgttgtatagtgtcaaggtgtagtatgtggaggtaccaataggaatttgaagatcccggttggactatgagttttggcttacaggatcaagaccagggcgacttttccctataccagactcgggacataacctgggtattttaaatttgatcccaagaatggactgtgtttaaccaaaataaatcccaataatttcgattattgaaattcaggatgatccaaatttatatcgtcgggatataaatttctagatgaaacatcaagacatcgctatgttacattatttatatacaacttattgacttaaaattaatttcccaaaaatgccccaagagttttacaacgaactctattattgattaaacgactattttaagttaaactctattttttgattaaacaactaattttaagttaatgtaagttattaatgatttaacttaggaagaccaagatacccaaatgatatacacattatattatgaccttttctattacatagttccatgtgatgaatgatcaggacggtgagctaactaattatccttgtcctggagaggagcaggttgcagtggtgggcttggactcttgttt

SEQ ID NO: 83267 - DNA, 621 bp, Citrus sinensis
  Intron number 2 from transcript orange1.1g021517m (locus o range1.1g017858m.g) derived from phytozome v7.0 (chr-ID sc affold06678; pos 1086 to 1706 reverse strand)
aagttcttacatataatacggtaagcagtttgtttaaaaacttgatgtgaatatatttacatacgctcgcactcgtgagtcttagaattaatggaagagtggcaatgattagaaataagaatagtggttagatgacgtagcaataaattataaatgcgatgacaatttgcataattgtttgcaagcataattattacttgtgttattatgtttctttgtgtatttacaattaagagattaactgcctagcaataactataaacatgaattattgaaatttgattggagtaatgacagagagccccactccgatcccacataaactccatggaagaataaatgaaaattgaattaataactaagctacctctaattgtaaattagtgacaaaaattctccaaaaagtttttcttggtggggttcaagtgcaattcattagtggaatatatatatcatctttcatttgattttagctttatttttttatttatttttaggggacagaaaaaattgaaggcatctgtttggatatgtcaaaaataaaagagatccgtctaaatcctagtactttcacaaagatgcctaaattgagatttttaaagttctataggtcatcagtca

SEQ ID NO: 83268 - DNA, 581 bp, Citrus sinensis
  Intron number 2 from transcript orange1.1g032590m (locus o range1.1g032590m.g) derived from phytozome v7.0 (chr-ID sc affold00016; pos 26392 to 26972 reverse strand)
ttggagaatatcgacaaggtaaatttactatctgaaaaaatgtagtttgtttcaagtgttttcattcatgcacttgtgttattctcttgatgtactttaagtgctttgattagtgatgtcattattaccagagtccacacttcttcctcttgtgaaaagtacgcaccatgtattactcgttccttgctttatatatgaatggttttgagaatttaatttcaatggatcaaaatgaacttggttgccatcattattggtttgtggatgctcgaagaggaagatttgttgttggtctatatgattagaatggaagtttacatttagagactctctggcaaccaagaaatagcaattctacaccatgtccccctgtttggggtgttaaaattacgtgcattatttctgttctgttttatggattagctacattttgagcttttccctgtgttgcatcctaaagatcatctgattaggtgaaacatgtgataaagttacaaaagaaataagttctttgtttgtgcatctaatctaagatattcctttcaggctgtggacagaggtgaaaacattcagaatcttgc

SEQ ID NO: 83269 - DNA, 366 bp, Citrus sinensis
  Intron number 1 from transcript orange1.1g014189m (locus o range1.1g014189m.g) derived from phytozome v7.0 (chr-ID sc affold00123; pos 241151 to 241516 reverse strand)
ttcagtttacatagtttcatcaaatccaaagtcaggtttgtgtcctttaaaagctctgttttctccccacttgttcaataattctatgtatctagaataaaattgtaatttaatcctgaaaatgagttagatgatcatgatatatgtcataattaaaatcagtttctcacatgcaaactgtaattccacttaacatacgctctgtttttttctgcccttcctttttttttttcctgggcttgttattttagaatctttttttataattcaaatttttctctggttttattgtattctgataactgatattcttctgttttttttttcaaagattcatttgtagggttctttattctagatattcca

SEQ ID NO: 83270 - DNA, 744 bp, Citrus sinensis
  Intron number 1 from transcript orange1.1g034344m (locus o range1.1g034361m.g) derived from phytozome v7.0 (chr-ID sc affold00113; pos 123967 to 124710 reverse strand)
ctcttaacagatctcattctctctctgctcaaagtgtacggacacttcgactttcgttatttattttattttaatttttcatgtaatatttgttttcttaattatctgccgttgttttttttttttaaatttgatttcgatttatcttttataattcactccgttcaattcgatctccactatattatcttacagacttcgtgtaaactttacattatttgttctctttcacgatccgtttggtttgcaagaaaacgcgagaaaatcgaaagaatttttttaaaaaaaaaaaaaaagtgaaagcgcgcacacactctgtactgcttcaaaaccgtttacctttttagcgcttagaaaattcaaaagattttgaatgctctgttttactcgacaacaaggagtcttacaggttcatatccttttcgattatatttatttaattaatttagtttttgtttcattagcttgcgttaatctggtgatcggattggtttaacatgtaatttagttgactttttttttccccgtgaggttgcttagaaaattatataccaaacctctaaattgcattgtaattattaaaaatatctttattaggtatcaaatgtttccttttttgttttcttatttagaagctaacatttatattgtcgttaatatatgtatgcggtagtgaatgtgaagaatgactgagttttgtgattatttatttatttacctttttggtgctgtttcagaaagaaa

SEQ ID NO: 83271 - DNA, 843 bp, Citrus sinensis
  Intron number 1 from transcript orange1.1g033045m (locus o range1.1g033045m.g) derived from phytozome v7.0 (chr-ID sc affold00003; pos 1236102 to 1236944 reverse strand)
cgcaagctcaaagccatcctcgtcaagaaagtcaggtaatcttacgttcaatgcttcatttcttgcccttttgtcgcacatagttcttcttgggagcccaatttcaaggaaatggtttccaggattttatgtgtgcgtataacaaaagttaatcctttctgcttgagccttcttctttttttgaatggggatgtgctccaatgttattggataacattttatttatttcaaccttattcaagatttatgtcatgcattttgctttttttatttgtttcatggaatcaaatatctttttttaggtttaatttattcaatcagatttagctgccattttgccgattctgtagtgcttgataggctatgatagttttatagctcccataaatatatggcttagtagttgcaaattgtgatatgcatgtacatgtactgaagaaatattgggcttactagattgaaattgtcttggactgtcttattcccgtcttgcctaattctttagtaaaagagaaactctatttgctgagtacaaattgatgtagaaactactgtaaatgttgagttttcattgctaatatggttagtagtttgttttccatttactctgattcaaaagcatcatctgccttaatgattttggggttacaaaagcctttctggttcaaggccagtggctaatgcaacaggttttcttccttatctaacgtatcctagattaacttaacggtgatgatatcttatttggtggagtcagataacttttcctatagaagaattcatgatctgtgtttttacttctcttacaaattatataggagagataggtcctttggttttgcg

SEQ ID NO: 83272 - DNA, 635 bp, Citrus sinensis
  Intron number 2 from transcript orange1.1g043230m (locus o range1.1g043230m.g) derived from phytozome v7.0 (chr-ID sc affold00046; pos 538649 to 539283)
cactgattttggattatcagtgttctttgaagagggtaaatttctcttccttccttgcatattatttgtgttcagattttatgtagcagtctctcatgctagtagggcttaggcttcgttgatataacttttcaaataaaatttatttaaatgaagtttttattagtaaattttctacgagtagaatttttactaaaaaattttagttatttagttatcaatgagaatttttattaaaaattataaaattatcttaataggtaagttatttaaagttatattatgaaattaataaaataagattatgaaataaattaaagatgttttagttaatatttttaaaaatcttttcaaccttactctcaaaagttcaaaatttgagtttgtactggtggaggcaaaatagcttatgggattaattaagcacttatggccattagataagtcataccaaataggcacttgatgtgttgatttaatgatttagatgaaaccataagaaaataatgcaaaactcttaggatcaccatgaagggcatctttaataaatctagctattaatgcatcctttttttattatcccatgatatgtttttgcaggaaaggtatacagagaaatagttggaagtccttac

SEQ ID NO: 83273 - DNA, 730 bp, Citrus sinensis
  Intron number 2 from transcript orange1.1g040196m (locus o range1.1g040196m.g) derived from phytozome v7.0 (chr-ID sc affold00056; pos 419351 to 420080 reverse strand)
cagtccgaaatctaattgcaaaagggaaacaggtatgtcctgtaatctctatatgaatttatgcgcttgtggaattatgttttgagcatttcttcaagcatgggaccagcgtaataggtcacgtaatttgtaagccatataacaatcttgcttggtgacagattctaatttgcaactcagtgtgtgtataaatgtctaattttctttcgttaagaaaactataaaagaacctagccaatctccatgagatctatgctaattcaattatactgaggagtgttctgatttggattgtgagccaaatttggagaaaaaaagagaaagtggcttcctgcaaaatggatagagtattggaggcagtggcagtggtgtttgacatagatcgtatagtcacagcatgatggtatggagattgattaggattttatccttcaaatccaaattagagctctcctcagcttaatcaaaatgacatagatcttgtggatgtttattctctctctctctctgtccttaaataaataagacatttggcttagcatcccaaaaactaagcttaaacaatattatgatattatttccattttgacattattatggctgtctggaggaatcttcaagaaatgttgatggaatttgaagcttaagttcctttgtttgttgaagaagttccctgaaatattgttttaattgtaaacacactttttctggtctgaattgcagccgggtt

SEQ ID NO: 83274 - DNA, 707 bp, Citrus sinensis
  Intron number 1 from transcript orange1.1g009000m (locus o range1.1g009000m.g) derived from phytozome v7.0 (chr-ID sc affold00004; pos 3961072 to 3961778 reverse strand)
agtgagtttcattatttatctgtctattgttttatatattgtttgatggtgtttggctgatgagaaagtgaaggaaaatataggagtgtgagttttattttattttaatttttttaaaaaatttctaatgaaatgtaactataaaaagtcagctcattcaagctaaattgcagactgggtgaattttattgattttacttgtatgcctgttaatcttcttgtgtttgtagctaagtaatgtctgtctgttatttgagttctatttgctaatttgactaataaaggactcctttttgtgtgtaatatattgtgtgaaagaatgaccaactgaaaagtcttactttttaagagttagtgagtggtagatcccatgtttcttagtgacatttaccctctgcttggtttgtgagaaacctgaagacaagaatgatgtgaaaatgaaaagcaaaaagttgtaatctagatgggtggttagctatttgatgattttgatccctggttcccataacaagtggtagtgtagtagttatggttaaatttttagattttgcaatctatctcttagtttcttaagtggatattttattcttaaactagtaatatatattggtgaatagaactatagaaatgatgttctgttactggacttaatgtgctatttatattatttcatatcttttctagatttttcattgtgtcttttgggc

SEQ ID NO: 83275 - DNA, 690 bp, Citrus sinensis
  Intron number 2 from transcript orange1.1g045681m (locus o range1.1g045681m.g) derived from phytozome v7.0 (chr-ID sc affold08427; pos 401 to 1090 reverse strand)
gagaaaccttggctgcgaaggcctcttcataataagtaaatttcgccactagcctttatctttcgcttgctgtattgaaaattataatcatcaggccgtagctaaatcaaattgctaggttgatatacaatcaattatttatagtggatgctattagaactatttttctaaacttgagtctgacatatttctctcacatggtatttaatctgtagtttattcattaacttgaagaaattgcatcttggagtatttaagatattgctgtaggttattgtaccatgtgcattgagagttctgctttcttacctcaaaacttacattgccatatttacagaattcataaaagtcgtacatgaaaatgatgattctacaaggttgatttgtagttccgtttcagcttttcttgtgtggtgtgcccaaccattgccctagttgaaggtttgacatgttttgtcctcactgctgtagttgtgtcttctttttatcttgttatcttaattcgtactcactcatagttatccatttccaatcaccgctaatcatgtaggctttttttcgttgaactctttcttctcattctgtttacaattcattgaaaccctcatcatttttatttgaaatggggtgttaagatgtatctggattgatcttaactaattactaattgcagaattctggatctttttg

SEQ ID NO: 83276 - DNA, 829 bp, Citrus sinensis
  Intron number 2 from transcript orange1.1g029629m (locus o range1.1g029629m.g) derived from phytozome v7.0 (chr-ID sc affold00003; pos 2776669 to 2777497 reverse strand)
agcacatcatttgcactggcaatctctctatcaaagtaaatctctctcttgtcttttgggtttagttatggtatgtgatataattgattggagttgttctcttggtagtgtttatcagaatgttgaaattgcttttgacatgcattcttaatttctcttgaaaaattgaagaaaaaaaagattatttttattagaatttgaatcctgagactattatttgttcttgttatgagtagcattgggaaatcttagattggaaacatttgaataactaataatttgctgatattgtaccactttctttaacatttactatgatgttgttgccgcctgctggttgatagataattgtaaccgtataatacatactgcataatggcttcttacttagactggatgatccagatgttacctgttgatctggatggcctactggtggaccaaaaaaatggataactaaagtcatggttcataacttacagcagcccccctggaattcaaaagaaagcattaaaacaaatttggttattcttattgttttactttggcattgacttgtaccttattctgatattgatgagccagattatcattatcttcattacttttttggttgtgataactgatattcacaccctgaagagaacttctcttgagctgttaattccctgctctagatttatatattatgattgatactttgataaatgtgttgtagaaacagttgaagttccttggcttcattgctttactcaccctcctacacatttgcttccagaatatcttgttaaatttactcttacgaatgctatcaatgggcaggaagtcc

SEQ ID NO: 83277 - DNA, 867 bp, Citrus sinensis
  Intron number 1 from transcript orange1.1g014040m (locus o range1.1g009463m.g) derived from phytozome v7.0 (chr-ID sc affold00003; pos 1003384 to 1004250)
ttacaaaagttcgcttcttgttggttgacataacagtaattgtgtaattctcttcattttattgacagatgcagatggattttttgcaatcgtgggactttcttacatgtaatatttgtcttctgattgttgtgtttcgatctgtagatgatcattaatgtacagataaacgataaaaagttgttgaacatgtgatcatgtcctgtttctgcttggattctttttgcttttttcggtttgatgtgatcaagtttacttgtgtattgcatcgtttgatgtgttttatgatatgggtttgtctcaaaattggattcttctctaatgagtttgtattgaacaagggtgcagattgttttctccccagttttaaatttgttgattttgcttgtttggttcattttgatcgggtcaatttgactttttttcatttttgctgtgtgttataatgagtttacgtgaacaggggtgtctcttttgatgtgggaattcttttctttctttgtttcttttacaagtagaatatcctttaacagaagtctagtattcttctcttcaaagtttccttattttggtgtcccttcaattttaaattcctctttttgattcatattttgataatatctaccagttctgtaactccttctaaggtttctggtttccttatttgtctcttttttttcgctcctcttctttctctatgatctgaatttgattcttttcactttggccatggcaactgattgatctgataaaaaaatcttttatttgcttcatattttatgtgcacatcctttcatgacataacgtttttcatctgtgtttctatctgtaggtttgagacttgaagtctgctgatccttccgaaat

SEQ ID NO: 83278 - DNA, 1002 bp, Citrus sinensis
  Intron number 1 from transcript orange1.1g034759m (locus o range1.1g034759m.g) derived from phytozome v7.0 (chr-ID sc affold00113; pos 94649 to 95650)
aatcgaggtttgtcattatggccataagaaaaaaaaattatttcttctttcgtatttttcgtcgtaaatatttcttttctggtaaattggataatcccattacaaatttcatttgaagagagacattaatttttttttttaaatttgtggcttagttatgtagttgatggagattgtttaaatttgaaaacccatttaggtttagcatgttatcttttcttctgtgaacttataagggatgggatcgttaatctatttgctgcaaatgcttctcttgcacggtgctactatgatcaattcatttgattttggttcacgggaatttgttttagtagtttcggaacattcttaggattgagaagctgtgacatttgcgattaactagctgttcaagtcattttatttatcttagtattatcattgttcttttctttttttattcctattcttcttaacttattagattacaatatgaatgtcattttgtgtttgtatttgtgtttgtatgaacagaaatatttgtacatacttcacaaatcacaatcatgctattctacctccatttttaggattcaacgagtatgatactaccttgtgcataagcatctggtagcgcttgttcatttgtgccggatggtgctttggaacagattgttaattttcgtgggagtcagcataatcagttccatattaaaattagcaagttgtgactagttgtggctgattcatgaatgagaaacggaattactgttcttctgtatttttgtttgcaatttgatcaatgttcaaatctttttcttgtagagataactgattttggcctaactcttgaatttgagtcttgattcttgagatacatgggatctactaactttgttttcaatccatggttgcctgttgtctttgttcacatacattactgagaagctggaagttttaactaaatctaactcatgtcttctcgtaggatcaaagcatcagtcacaccaagattacttggaa

SEQ ID NO: 83279 - DNA, 740 bp, Citrus sinensis
  Intron number 4 from transcript orange1.1g046849m (locus o range1.1g046849m.g) derived from phytozome v7.0 (chr-ID sc affold00151; pos 152714 to 153453)
agcttgctacatataaagagcttcttcggtcccaagtgagtgctcaaattggtgtctaatgaaagatttttttctttaatgatattggacaatgagcatgaggcatacaactcttttatgctttttgtatctctgactcatccaaactgcctaggttttgttcttgtggaactttgttaacaggctttcactgctaatgttgcactcaaaatattgtcgtttgcattgcttattttctgtgctttcttttacttccaccccaaaccacaacaatcatgttttacgtttaacctaattgaaagatgcaagccttccaatccctaaatcaccaggatgggtgggtggggatccaaagcattctaatctgtccaattatacttaaattcatttccatttccacctcattaagaattggatgaaggacattatgaagatgcaaaggggctgaaaaatcatgcctggacctttacattaacatcaaagaagtgaagctaattcttgaaagtatacatacatacaaacgtacatacgtgcatatatatgcgcgcgtgtatgacatcatcactcatgaggatgccactgaacacacaaacaaaaaaaactttaatatatgcttatttatataacaattgcctaactacgatctcaaaagaggccttttaccgttgctgttatacatgattctttagtctattttatgttgtaactgagttctgagaaatgtatgttgcaggttgagc

SEQ ID NO: 83280 - DNA, 462 bp, Citrus sinensis
  Intron number 1 from transcript orange1.1g048184m (locus o range1.1g048184m.g) derived from phytozome v7.0 (chr-ID sc affold02325; pos 8040 to 8501)
caggtaattaaattgtatgtgcaaatatacttaatttcatatttgtttcagaaaagaacccttcccacaagcacatagataaagaaacgggatatgattttcattcatgaaatattttgttttctgaagaaaaaagtataaatataaaaatccaaatagtaatttttgagcatactatactaatacgaatactaatatcacacacacacacattgaaatgaaaagaaattttgtttataatgattttaactttttagtaatagttcattgtcctacaaaagcaaacatcatgaataaaactatccaagtgtcttttgcactaaaaatctgaatcatattattctttttattattttgatgattttcaggatcttttagttggtggaattgaacctcagcggtcaccttagagtggacaatgtcagagctcttaaaaaatccagaagttatccaaaaggcaac

SEQ ID NO: 83281 - DNA, 915 bp, Citrus sinensis
  Intron number 2 from transcript orange1.1g036653m (locus o range1.1g036653m.g) derived from phytozome v7.0 (chr-ID sc affold00068; pos 483150 to 484064)
aaggaactaaactgaaggtgggaaactgaagctgagttgtttatttttgagttaactgcttaaatagtgatttgctcagttgaatagatagtttagtcggtgcttgtgggattctttgtagcttatactgcgttgagaaatggtttcaacttattagtttcatgtttttccaagaaacggaagaataaagatttaaacttgaagtggagtaagtactggctgcggaatttaatgtttatttagtgctcgtttgaggttggggtttagggtttaactaaacctcagattaggcttatggaaaccatatttagggtttaactactctcataccttgatagttttctctttttgttggctacacgtttctcctgtttaatcatgttagagtatgtgcctggttactctatgtacagggttcttctgtcttgtgcttttgtttttttttgtttttggcattgatgtttgtatgtgctttcatattcttttgaattcagcacattttattactctattggcacaatgtattttggaagtgagaaaagaaaatgggcatatgctaactaactaatgcttttttcggagaaacctatttttaaatgcgtgtgaggcgtgcacctctcatcctattctgagcgagctgaatgttattataaatgttggctctaagtcataactgcataagccatgccatggattggtcatgaggcacactcatcatcctccacatgccatgtttagcattgatttagatgcatcttcaataatttaggtaaagtatatataaatggaaactccaaactatgtttacaagccaatccggtggcttgtgcattgatttttttcccgatcttattattcttttcatcagttatttcctgtttcatccttatcaggagcaggttgaggtgtctcacc

SEQ ID NO: 83282 - DNA, 257 bp, Citrus sinensis
  Intron number 1 from transcript orange1.1g045656m (locus o range1.1g045656m.g) derived from phytozome v7.0 (chr-ID sc affold00114; pos 193434 to 193690)
gcaactctcctttctcccttaagcctattgaaactgtaagctgagcttcttcaccatttcaattgtctagtaattttttttttttttgggggttaattgtgaccacatgggtattttatttttctgttattttcttggtcaaaatgtgctgaagattgaactttttggggttttagttatatggataagtttttggttgtttgaattttggtggtttagtttgtgacgatgagtgggcttggatttggtgcaggcga

SEQ ID NO: 83283 - DNA, 920 bp, Citrus sinensis
  Intron number 1 from transcript orange1.1g038329m (locus o range1.1g038329m.g) derived from phytozome v7.0 (chr-ID sc affold00258; pos 214390 to 215309 reverse strand)
ggggggagagcttggagagccaagttttgtagacagtgagtggtaatctccaagcactcttgctggaagctatttgtagttccttgttcttgattaataagaaaaggttggaagttggtgcttccgtaaatcttgtgtgccttgtgtttgtgtttcggttgctgtattgttgaaaatcttggggtgtgtttcacacacgtagcctccgttgcgaattttcgagtggctgactaagcagaaaacttagcgccatcacgggcttgccgcatcaaagaaaatagccttgtgacacctagcaaaatggttatcgttatcgttatcttgatcttgataaatacaaaaataaaaggcttaaattaatgataagctaagagataaggctaaccactttaaacttctagagcactaacgaatgccaagtatgctgccatgtcatctaacatatttgaatttgtattacttaagtttggtaattctccgctacaatattttcatcatcgtcttcctatacgatttgagaatctaacgtatttaatcaaagtgatagtctctctttcaatccgtgaacgaatgcccaatagattttttgggatcaggacaaaaggactggcctaatgcttggggtccacgtaaaatttttccacatttgaagtttcaacaagttatgagttgacatgtctcctctgtttttatttttgcagcttctcagaaatttcggttcattatatatatgcttggtagaaccaatgtttctttgtgcattaccagtcctaccatacacttgcaatctgaatacagtcatggaaagaattcctcttctgatcagtatgatgatcaaagttctcttaatccattgtttgattcttatatccttaattattacagctgtagcagtcaacacaattactattaccacagac

SEQ ID NO: 83284 - DNA, 381 bp, Citrus sinensis
  Intron number 1 from transcript orange1.1g019042m (locus o range1.1g019042m.g) derived from phytozome v7.0 (chr-ID sc affold00795; pos 56943 to 57323)
agccttcgtttgttgcctccttcaaccctggcgaggtcagtttcttcaattcccacctcttggtttcataatcttttatggtcttagaggtgttttagggaaacattatggttttggtttgtgggcatgaatccttgaagagagtatgatgtgtcggactatgtatgcaataataagtataggggatcttgttaagagaagattctcttaatgagattaaaacttttgtcttatcaaaacatatgtttagttatgatatcatgttagcattgtttctgaggatttgattgcttgctttgggaaagggatgttgaggttacattattcagtaatgatttttttttttttcaaatgttcaaattatgcagcccttgagcggat

SEQ ID NO: 83285 - DNA, 735 bp, Citrus sinensis
  Intron number 1 from transcript orange1.1g038309m (locus o range1.1g038309m.g) derived from phytozome v7.0 (chr-ID sc affold00002; pos 1470237 to 1470971 reverse strand)
tggctatcttcactgtgttgggaattcctcaagctgtaagtgatcaattaactttttcttgcgcacataaaaagaaaaaagaaataataataaaattaaatattaaattcttgctttattttattagttttggtatccctagtcgataattgtatcagtttgaaaactttaggattctgatgtccgctttattgacatttgtgtccggtaagttttcaaatagttgccgcctgcatgtttcatattttcacttttggcagcgaacatcactgagtctgcaaagtccaatccattacatgattatgttttttctttttcttttttcttttttcatttttcattttttcattttttagttataaaattgtatatgctaacaatccaaagatgaattgatattatcatcaattcttaatttctgaaatttatataaactataaaagcatagtgaaaaatagattcttttgttgttttgaattggacaggtatttaatgcatttaatgcgctcttataaatggactgagcgcctcttattactctttatttgaactgttgttcttatcctacaatcctttcataaaaataaattttatttttagagtaatagagagcataataccaaaagttgaaagtaaattccaataaatggttttaaaatattgtcagaacaacttttattgattgatttatgaagtactgtgagtgtgcagattactttcagcgttccgtttgct

SEQ ID NO: 83286 - DNA, 784 bp, Citrus sinensis
  Intron number 1 from transcript orange1.1g011820m (locus o range1.1g011820m.g) derived from phytozome v7.0 (chr-ID sc affold00019; pos 774512 to 775295)
tttatccagacccctgtgggtggactcctatagaggtactgctttttaacctctattaattatctgcagctgtttcctcgcttaatttccaattggtcgctgccgcctttttctggtgcgcttgtagcaaccaataaagattggccagttctgtttgttggaatagtgcactttttgacatttgtgtaatcttctgctatttttttaattaaaaaatatagaaatgttttagacatattcaagttttggcattagtgatactcttatcattcttactaaatatgaaaaagaaaaaaaatacaagaaaacgactttcaattgtttgatgcattttgatatgaatgttagtttcataataagggtgaaaaaatgtagaatttttcagaaaccaaatctagaatgggctttaaaattttgtcaaacaatatttccaaaattggtaaatggcagaattgaatccttattgcacttttcagctaaaatcctgtatcaaactttctactgaaaagtcttacatttattatcacattctacagttttaagaaccccctttttttcattttcattaaatctcaacggtccaacagaaagttgtttattttattggcatttgagtgttaggctcacaaaaggcatatttaatttactttcacacgttgaaaataacatagtacaaaattcctatatagactgcaaataaatgtgactaattttgatataaggtctgaatgcgatatttcttgctctgattttcttcaaatgcagggtgtctcgtgtgatatct

SEQ ID NO: 83287 - DNA, 1022 bp, Citrus sinensis
  Intron number 1 from transcript orange1.1g004853m (locus o range1.1g004853m.g) derived from phytozome v7.0 (chr-ID sc affold00128; pos 70680 to 71701 reverse strand)
cgttaaaaccctagattcctccccattgtttacaggtacatgaattttctttgatttgttttcgtttttttttatagtttttgaattttatctgtaaataaaaatcatgccttttttaaaaattctttctacgcgttcagatccgttcttgtttctgtttccatctctgttcgtttttgtttctaaatttacgttacttttcgtgctttagttttggaaatttatttgctttttgacatttgattttgatttcttgtaacgctttttatttatttactgttaaattcgcacaatgtatgaacattagcctgtgaaatagtattagcaatgctgcatcatgtagcttttgaatctgttttgtcgagttttgaatatgtaaattggggattttttttgtttcttttttatgtttcgatgggattctaaaacgggattggagtttttttctttttcaatttttaatttagttggctgtgtttctgttgcatgaaattatatgatagataggaaaagtagttttatttttttttgatggagttatattcttattgaagcattttttttttttaaatgaagcttcgaattgtcaagtttacagctctacagtataatctgatgtgcttgctctcttgttctgtttcaaacacgagctgcattgcggctgaggtaaaagaaaaagaataaaataggagagtagagaatgaaaatttaccatggtcgcaaatgagaaaacagttaaaacctttatttattttaaacttttttggtaaagtggttgagaagtaatggaattttaatctcctatgttttcatttaaagaagataaaaattagctcaactatattggaattgcttggatggagtatacattattggtgtattattacagttgatttaattatttatgttttaaaacttttttccatattgtatcttctctgtaatttatgagtgtgccaaggcttgaatactcattcacccttacagggaggcttgctaacaaactacattgaagctttagg

SEQ ID NO: 83288 - DNA, 929 bp, Citrus sinensis
  Intron number 2 from transcript orange1.1g045444m (locus o range1.1g045444m.g) derived from phytozome v7.0 (chr-ID sc affold10057; pos 1022 to 1950 reverse strand)
ggtggcaagaagaaagcttggaggaagaagcgcaagtaaaagtttctctcatctttaattgatgttaattgtagcattctgtttagttgttttgatgggcgggactcattgttcgcgtttgggtttgttaatttttggtatgactatgagctatatagcagataagatcatttaaagatgcaccaactttgattagtgttgctcaaaaagttgtcctatgtatttaagcaatccataaactaatgttactgaaataatttttccttaaggagagctcttttaggccatcaagttgccctgtctctcgcaattttaagggtcatacagtctttagctaatcttgcaactatccattttttggtattccctcactgtattgtgactgataagagcccaataatatgattgttatcattttggaaggttttcattctatttgtgtataggttgattttatagtaatcatgaatacttaggctagttattctggccctgggacgagctgtctttggacttgggctgagaagaaaaagaaagcctaatagggattctcctcttcggatggagtaagaggctcctactacaatattacatattgcctactttatgggtactttacaggttacgggtgaagtgagagttgttggtactgatccatgtaagacatttctcaattagaataattctatgtatgaatattcaaaacatacctgtctgtattactgacaccaaaaagggattgtatgcctgacattttagaatatatggtgtatacaagtggcctttccagggaattgactgatcattccttgtggcctttgttcattgttgatagatacaatttgcactgttggtgcttgctttataatctcattttttttattgtttattaaggtacgaacttggtcgtcagcctgcaaataccaagc

SEQ ID NO: 83289 - DNA, 225 bp, Citrus sinensis
  Intron number 2 from transcript orange1.1g036672m (locus o range1.1g036672m.g) derived from phytozome v7.0 (chr-ID sc affold00152; pos 153645 to 153869)
aaagtctatctagcgaataaggtgagattaataggaatgcaacatattaagagcggagagttgcttgattgtaacatggaaacgatggtgggaaatgaatgactttgtttgattagcattgaaatcactcaagagtaatcgggaacttcatttgattatcataataagtttgtcaattgcttcatttttcttttctgtatgcatttatttgatttttttatgtag

SEQ ID NO: 83290 - DNA, 780 bp, Citrus sinensis
  Intron number 2 from transcript orange1.1g022271m (locus o range1.1g020013m.g) derived from phytozome v7.0 (chr-ID sc affold00216; pos 70599 to 71378)
aagctcatagtgctggagtcaaagttgtcccccaagtgagtcttgtcttctctaccataccatagtgactttattaatcattacaaatgttttaatttaggcacaatgacatagttagctacaccaatacacaaatataaatggaaaatctagctattagacaacaccatatggcagtgcccactagatcattgctcattataaatacggacttgaaactacatatgattgtcaccttgatattcttttgaattacaaatatttttccattggaggttgggagttttgacgaagcaagaaaagcagttaacgcaggtgtagatgcaattatagtccaaggacgtgaagctgggggccatgtaattggacaggtatgatttgtttgttgtttgaaaaggatgattgcacttgcaaattgaaatttttgtttggattttatagcttcttaattccattaagaaattatattccatatattttgtttgagattaaagaaacaaatggccatttgtctgtgactaataaaagcaactatagatgagtaatgatgaagcaactaggaatcaacaataaaactcagttattctctcattagcaggaatggtcattcttctttccctgtgacggaaactattattatccatagatctaacctattacttggtttgtaatttcatgcactagtctgttgatgatgtgagtagctattacctgtttcaagtagcagatgcacagtgttgacctctgtatctttgttgtttgcatttgatcatgcatagg

SEQ ID NO: 83291 - DNA, 711 bp, Citrus sinensis
  Intron number 1 from transcript orange1.1g014366m (locus o range1.1g014366m.g) derived from phytozome v7.0 (chr-ID sc affold00018; pos 169044 to 169754 reverse strand)
cactactcaatgtcagtaactgctatttatgcatatgttcataaatatagtgtgttgttgtgtctagtgagaaacttaaagtttgaattctaatgcattgattctataactatctgcacaaagaatagagcagttttattttattttattttttttaggtagctctttgtagtcggaatttgactaaaaatgaatattagtgtgggtgtgtatatataagagagagagagagaaagcctgaaagcataaaagatatttagagctttatgaagagataatttgctgaagcaatatgttaacaggatcagaaatttatgtgtacgaagtttttggatttttgggaaagtatctggtggaatcattgtgtgtgagcagaaattagtgggggaatagttaaatgattaaagggttggttgaggataatttatttaatggatttttgggtaaattttttggtgaattgtggggagtttttaagacttctgactagaatttagctatttcaatgttgttttcctgccacttgtgacttagtgatttattttgtatgatggattttactatttgtgtgtgacatggctgtggactaatttaattattatacaaataaatttatgctctgtgagatttctctaatttggaacttctgatttgtaaagtttaatttgtatgtcagacaattgtgcctagtgtactgcagttatctgcaat

SEQ ID NO: 83292 - DNA, 602 bp, Citrus sinensis
  Intron number 1 from transcript orange1.1g013989m (locus o range1.1g013478m.g) derived from phytozome v7.0 (chr-ID sc affold00011; pos 1517157 to 1517758 reverse strand)
aaccaactcctggtcatccaattaataagcatagtcaattgttttacacttgctatttctagatcatacgtatggtattatttgatctgaagaaagatatatttttaatcacattaacatatatgtctgtagtcattttttcaaaaaaaaaaagaaaagaaaaaaaagtagtaataataataataatttgttgacattctgcacagtatgaaatcaagaaagaaacaaattagcttcacttaatgtctttttaactaatctgacacagaaaattctgtgagtttgattaaatcaaagaaatgacattggataggatgagttggtggaataaaatggtgtacaaaatataattacacgagatatggaataaaattgtataaggaatatacatactagtcctatgttagtagaagagtggaaacaaaaatattgtgattgcagatgtgtcgtaaagtttgtgactcaaattaatccttttctgatattattttatctgctttgataatgactaaaactgatgggattttcatgttttcagttaatcatgtgtttgaagttgttaattatagttggtttaactttctagggaggagtaggtgaaa

SEQ ID NO: 83293 - DNA, 217 bp, Citrus sinensis; identical to SEQ ID NO: 80067
  Intron number 1 from transcript orange1.1g027298m (locus o range1.1g024847m.g) derived from phytozome v7.0 (chr-ID sc affold00007; pos 2501676 to 2501892)

SEQ ID NO: 83294 - DNA, 276 bp, Citrus sinensis
  Intron number 4 from transcript orange1.1g032236m (locus o range1.1g032236m.g) derived from phytozome v7.0 (chr-ID sc affold11506; pos 733 to 1008)
cgaagctagatactcaagtcaagatctatcgtgatgtaagtttcttgtttgttttaacttaactgatatttgcttagtcttcaaattcaacttgtgctgcattttctgtttagtaattgggaataaatgaactcagaaccagctttgtgatttttatttgattctttgcttttgattagatagctatatttgttcattaggaaggatgatctaagctttttagcttagttgttttcttgatgaaatgcgttgtacttaatgcaggaactgaccgat

SEQ ID NO: 83295 - DNA, 555 bp, Citrus sinensis; identical to SEQ ID NO: 78371
  Intron number 1 from transcript orange1.1g031107m (locus o range1.1g031107m.g) derived from phytozome v7.0 (chr-ID sc affold00153; pos 199224 to 199778 reverse strand)

SEQ ID NO: 83296 - DNA, 864 bp, Citrus sinensis
  Intron number 1 from transcript orange1.1g008154m (locus o range1.1g006091m.g) derived from phytozome v7.0 (chr-ID sc affold00127; pos 102202 to 103065 reverse strand)
gttatcggttttcactttattcctccttcgggtatgttcattttgctttgttttcaattttgcaatctttgaactctttgtttttttttttttttcaatggcttgctttttagtgtttttcgaatttcttgttcttcagttttggaatctgctttgatttgctaatcattttgtaatattcaaacggttgctttttcacttatttcgtcttacttttctgattatgttctccttatttgactaattgactttacttattagcagacaaaattttgcttttttggagtcattttcaaatctgaagttcctgtaccagaatcttaaattttgataatggacaatatatccagtaattgaagcctagcacttattatccatggagcaagttactccgactagcttactgagcctcatctttatttcatatttagaattgaaattcattgggcaattgcctaatgctgtgggcccaagtgtagccccacaggaagattcaagaggccaacaaagggactgatcagtcgataattgggagaaaattaactacaacttcatggaaaaatcagaaattcttttaagatgttattgaattattttgagttgttgaaatttttgctttacagaacttgataggtatagatattcagagacttgtttgggaaatacaagattttgtattggaaggttgcacccaacatatacagtgaacttggtgtaactttctggtgaattttggcagcttccagtccttctgagtttgaatttcctcttgaatataccgatctgcattttattgacgtttgttgcggaaactaaagaactggaaattctgattgcaaatataaacttgacctacaggagacc

SEQ ID NO: 83297 - DNA, 687 bp, Citrus sinensis
  Intron number 1 from transcript orange1.1g045599m (locus o range1.1g045599m.g) derived from phytozome v7.0 (chr-ID sc affold00009; pos 271464 to 272150 reverse strand)
caaaaggcttttggctgttggtgcaatctctccaggtattgtattcttcctgatcctgctgtgatttttctttttcttttttaatttcttgggggaaaatagtgcgggaatcccgtctgggggttttttaatatatggtattattgtatttgtatgggtttgtgttaatttttgaagcaatcataaaggctagtaaagttcagtttttttttctttcagaatcattgagtaatgcatattttttctttcccacaagcagtattgtgggaaaggatttcgtggcttggcttcctttggaatttcaactgtattccttgcggaagcattttctgtttgttctggccatcaccgagaccaagtttttaactgttatgcaaatgcaatcaattcattgtattctctttttcgattcttttgagaattgatgttgaatatacttggtgatgatggtgtatatatcagttgaacttattgatcccccaatcggatttttttcccttatattttactatacatgagtctatgattttagcggctgtctgaagtttggatgcttaagattctggcattctctttgtggagttactatgtgtaccattatggttcttcaataacgtgtttctttgatttttctcatttctctgtatagcagatcagctcatactttaccttttgctacattagagg

SEQ ID NO: 83298 - DNA, 678 bp, Citrus sinensis
  Intron number 1 from transcript orange1.1g037259m (locus o range1.1g037259m.g) derived from phytozome v7.0 (chr-ID sc affold00760; pos 738 to 1415)
ctattccctgagttgacttagccgagttttgaagattactcttttattgatttatggatttcattgggttatgcatttgagtttataaacaattagttttttgttaaagcactcttgattttaaaaatatcataaatctagtgagaatgaaatattatcacggtggctaatttaacaacaaacattaaaatctaaatagatatggcagataaagaaaaaatgcagttactttcctcaattaattttatgtccaaccgaataagggaaactgaacccatttcttctcctttcctttcttgtcttctcctttccactactctcctctctaatattttcttacaactgaacatgatatagagttaaggtatattaggattgattagatttcattcaactggttcctctcctggacagtgttgaaggtaacaacatttttttttttgggtgggctgatttgtttttcaccaaataactaaaggaagacataatgagttttgtcatacaaaatatttattctaaatattatttgagattatttagataacatatttctctaccttgacaaaattagaattatgatcaatctcctcttcctaattaatcattctctgaaaccggcatttacgcgctacaccaacactaaatgatgcaaataggttgaagagattcttgaccagc

SEQ ID NO: 83299 - DNA, 217 bp, Citrus sinensis
  Intron number 3 from transcript orange1.1g028624m (locus o range1.1g028624m.g) derived from phytozome v7.0 (chr-ID sc affold00272; pos 65169 to 65385 reverse strand)
gggctggcagaggctttactcttgaggaactcaaggtttctttcttctttttcttttagtttcattttcgataattgatttgattaatatattgcttatgcattcacattatgttaattatgattcagttgatgtttctttgttattattgctttagttaatcttattctctttaccctaaggctgctggaattcccaagaaactggctccaacaat

SEQ ID NO: 83300 - DNA, 652 bp, Citrus sinensis
  Intron number 1 from transcript orange1.1g001684m (locus o range1.1g001684m.g) derived from phytozome v7.0 (chr-ID sc affold00003; pos 3310034 to 3310685)
ttgttaatatttcaccaggtaacccaatatgtttatggttctaaacttttttgcttcttcttcttcttattattattattttaaatgcaaatatggtttaagcataggattctgtgtttgaactggggaatcttcgtcttaatatggaagcagatttatttttcccttttcgttgattgtttttgtaggctcttttactctgaagatttatatttgttggctggtttcagtgtgtgtgtgaaaaagaaaaaaaaagtttttttttcattgtctgtgtgataaaaaagaaaaaaaagtgttttttttttattatttcaaaaagctaaagccttcaagagaggaaatgtttattattctgttggtcttttttgaaatcaaaaaggaaaatcaaaatttttgtttcaatatctctcatttgaccgcttttgattttgtttttcagcaataaggatgatattgttgccaaaatgatactttttgattgttttcatgtatgaatctggtagtagcttttgaaatatcacttaaactggaatgagatcttatcatacaggtgttcatgagttctacatatcagttggctaactatttctttgaactcacgtaagcatctccagaggggctttgcaggagaaacaaggtagctgttaaa

SEQ ID NO: 83301 - DNA, 757 bp, Citrus sinensis
  Intron number 1 from transcript orange1.1g015270m (locus o range1.1g006329m.g) derived from phytozome v7.0 (chr-ID sc affold00323; pos 52560 to 53316 reverse strand)
tgtatgtaatattttatataatgtttattcagctgatgtttggtatattgatcgcttatttttgttataacttcacgaaaagctgcaaataatgtactcttatcaaattacatttatgttcttttcatgtgacagcccccactctccacctccctcttttcatattatccttcttactttttgattaccattaaaattatgctgattgatgcagttaatgcttgtttcatgtgttatgctttttactctcaataaattcttctgatagcatgtgatctttgggtgccatcaaatgtgtttggaacatcttatcattgtttttattttgcttatacaatggtacttatgtaactgttccatgcatggagaaaagtttatgttttactatcactggttggatatgtttacatgtctgcgtgttgctcttcttttaaaatcatgtgctatagtgcttggccaactttttttggtactataataatgcaatccatcatgactgtgatcagaatatcattttcaccacatgcatgtgaactaatgaattttaacatgtgcaaatgcatgcttctgtatgcacttgtctcatttatcaaagtgtgtcatactcatacacgtccatgcttcctttggttacaagtctattttacaatgtggcacacaatgtgaatggtctaattatatcaattgctcggtatactcaatgttttagatttacagattttaaatgattcttacatcgcagagctgggagaaaaca

SEQ ID NO: 83302 - DNA, 879 bp, Citrus sinensis
  Intron number 1 from transcript orange1.1g006624m (locus o range1.1g006614m.g) derived from phytozome v7.0 (chr-ID sc affold01235; pos 15540 to 16418)
gatcgtcgcatcctcggcgccgctgcaaagcgaaggtaagcttgaaagctctgccttttatttggcttttcatattttgccagcttccgattattttttttctttttaatagtgattaattagtgtaattccatgttgtgttagaatgactagtctgcgagtacagttgctgctttctcgtttcttcttcatgttacacttgcagctttgcaattgacattttgtgttggatatgtgaacaatggatgatataaattgagatgctctgcctgtttgctatattttgctttgctgatattttttaattaaaaatggcatattttggaattcaggttgtaaactaaaccgaaccgaatcaaaccaaactgatttttgaaaacctaatgaagccaaactgaatttgtccaaaaactttcaaaccaaagtaaaccaaatttgtaaactgaatggagccaaactgagtttaattcagaagtaattaaaaaaaatgtgttaggttcaggaaaatctttacaggccatatataaagggctcatatagagctcagaacaataagtccccttagctatttagcactctgttgtacatgcacgatttaaccaccatgtacgaattaccataaagataaagacagtcgtgtcgtaattagtctacagaataaaatggcatgtcccacaaggcttcaaaattcagttctctgcgtatttgagaaaacttttggtgctttagatcatttgttattattgaaaaaccttgatggagtgaatccatattttaaattgtttttctttttgcaattaatagagtgacatatttatcattattgactctaaagctagtgcagggagcatctttttcctacttggtgctgaagttgga

SEQ ID NO: 83303 - DNA, 679 bp, Citrus sinensis
  Intron number 1 from transcript orange1.1g001468m (locus o range1.1g001468m.g) derived from phytozome v7.0 (chr-ID sc affold00388; pos 69131 to 69809)
atagaagttcagagctttgattaggagacgctgaggtgatcttttatttcgttgattttcaattgaatttggattttagtttttttttttttcaattaatggaatttgctttatggggttgaatgcatgtgttatacttattggtagtatcatctattgctttgtttggttgctgagaaactgtgggaaagttgaaaaagaaacagtagtattgttgttaaatatttacattttatcgaaattttggaaaaagagaatattttaatcaatttgtgctaataaaactcttgaacttgttgacttgatgaattaaaatataaatgaaaaaaaatcgttctaaatgcagataattgcatcaatattgtgttactgcaatgaatttatggtcgataacatgcaaatcttagaacacttgactacatgatgcaaacttatgatatgatttgtaattgtattgcagtcaaatgtgctagttttaatattactagctgagcttgatttttcagaaaatgttactcttgtccttttttcttcttaattgtttgcctccctctatcgatttatggaacatttctataattagcattaacatttactcagcacaacaaaaagctaaacaatcaattgtttgttatttctcatagtttatactgagttgtcaaggataaaagttgcgatc

SEQ ID NO: 83304 - DNA, 926 bp, Citrus sinensis
  Intron number 2 from transcript orange1.1g017484m (locus o range1.1g013038m.g) derived from phytozome v7.0 (chr-ID sc affold00186; pos 228793 to 229718 reverse strand)
aaaccgcatcggctctgtatgacacaccatctggttctctcctatgatcttcacaagaagatggaaatatatgttagttagttgtttagttttgtttcattagcataacttgtaattatgcaagacataaaaaaaaatttttgggactttgttgtataatgcagcggccacataaggcatacccagtggagcttgcacagttccattcggctgattatgttgaatttttacatcggattacaccggacactcaacatctattccgacaagaattaactaaatgtatggcctatttagccaaatcttaccttattttctttttcattctttttaatcatttattgctacttctaatattgtaatgaatattttcctcttgaagggaataacctactctcaatataaaatcaagtattctattagatggaaaatcttgaaaaaatttgctccgttctttagaaattggctgcccatctactttggagccaatatttacttgtttaaggtggtgtgagcagaatgaagggaagatagttacttgatcagatgtttattgtttgatagttatcatagctttgccatggtctgttactgaagttaatttgatggtgcgtgatttgctttttcaatctagttcacaatcattaacttttccttgtagctgcctctttttagcacaagtaattgaattggttaaaatgagaaataaatttgatatgacatcagtctatgatctgtttggtttagtgcttttcttttatagctgaacttatttagtcttgagttttgttttccaacttatgcttgggttcttttggttgtaaatttaactgagcgatgcttgagtacttttggttgcaactttaactcatttatttttactttcctcagataatcttggagaagattgcccagtctttgaaaac

SEQ ID NO: 83305 - DNA, 648 bp, Citrus sinensis
  Intron number 1 from transcript orange1.1g020663m (locus o range1.1g011291m.g) derived from phytozome v7.0 (chr-ID sc affold00024; pos 219390 to 220037)
ttcttcctctccagcccccggtgcccactaccccggtttattttcttgtccctttattaatttttttttttatattatccatgtaattattgcttatcctctgtacacacaacacttgcgtaattgaggaccttgctttgtttaaataattgttaaagattttttatttggcggtgttcacatgctttgttatcatgcatttaataattctcatgtatttagttgatggagccctttaataaattgaagataaagctaaaagatcaagaaaaattctaaatccaagaccagtttttttctttttctttttcttttttggtatggtcttttaaagtgttcgagttgcggttatattaacattcctgcttcaaacaatagatttatgacaaaaactttgcctggcaaaatggatagcagtaattggtataatggtacttgtctaagatcaacttactgttaattcttttttcctcttttgtagtatttgctttctgttgggtgctttggacatcaagggaaaggaatttttttttttgtaaaaattgtgcgctagtgagtttttagacttattgtgttcttccttgcccttttccaatggctacttacaatactgcattgtttgatttgagttttcagagcaactgttgg

SEQ ID NO: 83306 - DNA, 647 bp, Citrus sinensis
  Intron number 2 from transcript orange1.1g043555m (locus o range1.1g043555m.g) derived from phytozome v7.0 (chr-ID sc affold00053; pos 506252 to 506898)
aacaaccaatatttattattgaagcacaataagaagtaggaaatggctcttaaagaaggctcaactgaatctgaaacaccagtgctgaagaaactcaaagaagatctcatgaaacattgggatttgggtgatgactcaaatcaacggtccctagtttgtgatggggcgttcagttacaggcatttcctcaggcgcattatgtcttctgagcaccatgacttttgcagaaaccacgctgggatcttatttgatgcccggtcattcaaattttgtatttcacagaccattgcattaggagttggcattattgctctatcacatagatggttcacaaccatataagtctggtgcccaagcagagggaagaaaatcagcatcagtaagatctttgaagaagaacgtcattcgatttagatgctaggagagttgaaagagtggctattagtttttcaaatccaaaattgggcaagcatgaaaattttccattatgccaaaaataaatttcttaatgtatacattggaatgcaaattgggattgtgtcagcaagcaaagcaatttagctgacttccatctactttgtgagctggattctgtttttcttttatagttgcatagagtttgttgaagaagttctgcagtatttcag

SEQ ID NO: 83307 - DNA, 599 bp, Citrus sinensis; identical to SEQ ID NO: 79803
  Intron number 1 from transcript orange1.1g015603m (locus o range1.1g005474m.g) derived from phytozome v7.0 (chr-ID sc affold00007; pos 2483504 to 2484102 reverse strand)

SEQ ID NO: 83308 - DNA, 779 bp, Citrus sinensis
  Intron number 1 from transcript orange1.1g018799m (locus o range1.1g018799m.g) derived from phytozome v7.0 (chr-ID sc affold00071; pos 138397 to 139175)
atcactacaagcgcaagttctaccaacgttacatcgttcgtacactcttcctttttcaactttttccatcttgggttttattaaattatttcagattgttgtgaatttttatctccgtttttactttttggatttctgatgttataatgttttgttcttggatactgttaccattaatctatttttgattgtttgaagtgttgtttttattgtctctgcgaactgtattttgttttattttggacatgggatatgggtttgttcaaatgtttttggattgttcgtgttctatttgggatttgggattgcaagttgtgaaattttttatctggcttttagtgttttgtaattggaaactatcgttttcaaaatttgattttgattgtttcaagtcctagttttgttggaattgggaatgagatttgtcattcctgatttgctgcattgattttgtttgtttgttttttgtttttttttttccagttttgggtcctggtcatctttggtattagtttcttttgggatcagttcagtatatcataggcatttaagaaaataagtgctaatcatatttgggatggggtttttctgtaactcgttttttttggtatagaatttacatcttgggttggaagatgcttattgatgcttattattcacattattagtaaactttatgttggtttaggagcttacctctgttttgggcaatttttctccccaacttgttagttgttcttatagtgggatcttttcaaaaagcaggatcctgatcttgt

SEQ ID NO: 83309 - DNA, 762 bp, Citrus sinensis
  Intron number 1 from transcript orange1.1g047573m (locus o range1.1g047573m.g) derived from phytozome v7.0 (chr-ID sc affold01170; pos 1335 to 2096)
tctacctgtccaactggtatgcttacttccttctcatggtcatcctcttaaatattacggtaggaggtattaatatgaaattaagttcttaacaaggcttatatatagaagcctaccatagaagggtgacaagcttataagagagaagtccgtgcgctgagaaggtctttggtgcttttggagcattgctcttcatctattcagtgcttgccacgaaagtatgcatattatcatgattgtttgaaacatacaagtggcaaggaatgatgagaaaaatgagcagtattttaggagcacccaagactttttcccatgtgcttgagacggggcgaatgacgaagccatttatggaaactgattcagtctcctccaattgcttctgtgggcaaagtttgaactttgtttttgcaattacatgctggcttttcttgttggttagagttagttttggttgctgttttcgtcactaaaaattcagaatattgattatttttctattggcccctattgcttatggattcttttactctgttttcctctttttgactgattgcatgttctgccagtacaagtgttagaattttgagcttgttctatctagtctgaatttgaggcttgattgaagtgagaatttgtgcctgaattatgcacaacaaaatatctgcagtacatatgggtgtctgtacagtctgttgctgactcttcctttttttaccttgaattacaggcaaagttcagagcgacagactgaagcttgtcata

SEQ ID NO: 83310 - DNA, 959 bp, Citrus sinensis
  Intron number 2 from transcript orange1.1g029564m (locus o range1.1g029564m.g) derived from phytozome v7.0 (chr-ID sc affold00083; pos 418474 to 419432 reverse strand)
tgttgacctctactttaacttggccgccggtgaaggtatgaacattcattttatcaactcttcatttttcattatgatcaattaaaattggacaaaatttacaaatacggaggaaaaaaaattattggttgccaagtctattcatggtcgatggcaataataagatcaatgaactatgttaattgtgacatgggttacaattagtagttgggtttaattatgtcttaagtttaccattccgaaaaacaaaaaacaaaattgttctagaaatatttgacatatcaaatagttaatgtcaaatctttgaatttacatggtcaatatacatcaaatttcttctaagaccttttcaactaccgacttagaaggaaaaaaaaagaagaaagaaattgaaaatgtaattttctaatttctagcgaaatttgacgagtttgataacgtcgaatcttacaatttgtatggtcaaaatacaaatcaaacaccttctagaaagagatttttaaatggtttgtttatatttaccgactaattaaagatatttggggagacggcttttgggaaaatctagaatttagacttattaaatattaaaaaagaaagaatttagcttttgtgagcataaaacatatccttcaaacaccacatctagcttttgctttttgttttctctttaagtttacacattaattaaagagttctcttataaaccctttgcttgagacattttttcttctccatcagtcaaagaattatttctcctgtcacaaagttgcatgacacgtcgcatggcttataatatatattccttttatacgagtttctttttctaatttaataaaatcaacgtgcaataacgctgtttgtatatatgatcatgggatcgctgcatgtaacttaatatgaacgtggtgttggttcacgcaggagcatacttgcctgacatttgccaggctacccgc

SEQ ID NO: 83311 - DNA, 388 bp, Citrus sinensis
  Intron number 1 from transcript orange1.1g045125m (locus o range1.1g045125m.g) derived from phytozome v7.0 (chr-ID sc affold00004; pos 2114790 to 2115177 reverse strand)
cggctagacaagaggctgttgattggattgccaaggtgggttcttttaaatcaatatgatattagctcattttcttcatttttggtcctgtctttgattcggtgaatgtttaaatatgaattgcagtgatgtattaatgtttaatgagttcggtgggttctttcttttccgctttttggattgataccaatatgtgaatgtgttttaattatgtgttcttttatgcaattattaccaatgcgtatgagttgtttcttgctatctgctgttctctgtttcatccaattgtgtggttgattccttcctaataagcttttcatttatgatcgatgctaatagccttggttcaacaggttcattctcatttcggttttggacctctttgttc

SEQ ID NO: 83312 - DNA, 836 bp, Citrus sinensis
  Intron number 2 from transcript orange1.1g031639m (locus o range1.1g031639m.g) derived from phytozome v7.0 (chr-ID sc affold00009; pos 1934742 to 1935577 reverse strand)
gtgtactctcttgtatacttggttccttatctgaggtactataattgaattcaagtttgttgtatatcaatccactgcattgcgttttctttatattaatagcaaaattaatgagatatattggtgatgttcaaggaaaagcactgatgcagttggagtttaggtggtgttttaggtttgatggagtttcagtgatttaacacggcttgctattttaaagaatgataagcaaaatcacacaattttctgtcatgcaaggttgtgtaatgttagtgaagaaactttcatggtgcaaagacaaattattattattattattattattattttggttgggttttatactaaattagacacccttaccatttgaatccaaaaacaaattttattgtgttggttgtgaatttgagagaatgctaccttctgagggaattacaaactggctgtcctatacctggtgtctccccttaatcattatgttttcttcttgttgatccttcaggtcctagtcatggtatgtttgtgattgtaaggatttcagtgaagttcccatttttgtaatttttccttttgttcaaagtgtttactaagcatgccaccttcctgcattcttccgatttcaatgttaactaaaagatcattgttctttgtttgtgggcaactggtcaaggatagaattcagtgttttgaaacttcagatatttcttgttaatagtagtacatatttgtgacaattgacataagcatgtaacttcatggactcatgaatttgattacataattttcctttgattttgataggtcgaatttatcgctatccccggaggagggctggc

SEQ ID NO: 83313 - DNA, 856 bp, Citrus sinensis
  Intron number 1 from transcript orange1.1g031185m (locus o range1.1g029885m.g) derived from phytozome v7.0 (chr-ID sc affold00007; pos 2567517 to 2568372)
aggaaagagaaaatacccactctcttctgttagtgagcctgctttatgatattttggtttaggtactggttatgttgtgtttgttttcataaaaaccagacacgactagtagtgatcggttgctttcttccggtttttgtctgtaaatagaaccagttagttttgtcggtagttcaataacgcagtcacggaggataagttcggtgagataagtggtttcgaatcagtgacactgggttatttctcccaaccgatatagttatatcttattattaactagtaaaatattgctgctcattcatctttacctttcacagttgcttgcttgcttcttttttctccttattctccaaatccacacggcagtaacaaggttttctctctctcgcaatgtgaaaattatattttattatgtgtttgagctgatgtgtttgcggtgttctcgaaatttgagaatacatcttgcttgtaaattctgtgggtatgattgatacctgatgcgttattgttcttcatttctttcctttctgtggtaaaacaattcgttataaaaaattcttcctttataaagaaatgcttcattttgcatattcgattgcttcaattagcacgttctttcgccaattggctaatttttccccttttttaaaaaaaaaaattatttattttgaacgtggacaaactttcatgatactagttttttcctaatttctaatgtctttgtttcttagtcccttttttttttttttttttgcccaattaaaaacttgagattgatttctgatatattccctttgaatgttttgttcttttctttgcagtgagtgccaagttcttaaggcgatccatcttagaa

SEQ ID NO: 83314 - DNA, 591 bp, Citrus sinensis
  Intron number 1 from transcript orange1.1g048653m (locus o range1.1g048653m.g) derived from phytozome v7.0 (chr-ID sc affold00442; pos 65981 to 66571 reverse strand)
ctgtaaattccctgtccttctctgaagcctttactttattggcttagtctcttcttagtattcattaccctatagaatctttatatatacacgtactcaatcgaatacaatttttcttcttctctttcttatttcttcgctggccatttttgtgtcacgattgcaaatccttagtcaattactggccgttctttttccaatttgttcttcgtggattttattgttgaattcttcaagatgagattgaatttgacaagcagtactacttaatacaaaaagtgctcatagaatttagagatagacaagtcctttttgttgagagaaaattttctattatcacttcagtactctattgacttaaaaaagaaaaaaatattatcagttctttttgcttgttgaatgtttgttttattactataaataaataaatgtcaacaacgctggttagataaacagagagagactgtaaaggtacaatttttgggttctaaataatatcgaacttgattaatgtcgaatttgattatgttacttattcaatttgttctactggcagctgagcaaaacatcaatcatagtggacgcttcaaa

SEQ ID NO: 83315 - DNA, 531 bp, Citrus sinensis
  Intron number 2 from transcript orange1.1g012859m (locus o range1.1g012859m.g) derived from phytozome v7.0 (chr-ID sc affold00014; pos 1425920 to 1426450 reverse strand)
tgcattttttgaggctgtggagaagctcaaatcaggtgtgtgcaaatgaagaaatatttttatttcaagtatttgatgtacaattaagtttgtcttcttgctgttagttttcagggaaaagaaaaacagccgagaactcttcttttgcttggcaaattgatcatttccctactaatcatgttttaaaacttatggcctatcaacaatactcaaaagttctgtaaagggtaaacagttgtttcaatcttatattattagtcgacgcaaaaccctatgacataaaagaaaaaaaaaaaattccgtaacctatcaactttttgcctttatttaattaaaaagaccaaagtaccctccaaaaaatgtatcacgctatttgtcattgtaatatcaggggggttcttctgaagtttccaacgtaattaattttgccaaataggaggaggcttttggttaatctcccttagttgcccttaaactaattgtgtttttcattgttgatgggtacatgcagtgcttatagtgttggggttc

SEQ ID NO: 83316 - DNA, 471 bp, Citrus sinensis
  Intron number 1 from transcript orange1.1g023293m (locus o range1.1g023293m.g) derived from phytozome v7.0 (chr-ID sc affold00003; pos 3014350 to 3014820 reverse strand)
tggagactccttgtgcttgtagtggcagtctcaaggtattgtcattggtatatcatatctgtgtttgagttcttgctttacattcgatctttctatttctttgtcgatgatgttctatgctctcttccgaatcgcttgcttgttttcttttgtcttttggatggaatgaaattagtcgaactgcgcaatcgatagattggtgctattaggcctgtgatttattatttgttctagtgaaattcattgtcaattgtttgatttgttattattgataatgtttgcatcataaacaatcctgtttctcggcttcctgctgttctgcatacacactggacttttattgaagctaacatttaggttccatgattcccaagtaattttcctttccgtttctcgttctttttaacattcagactctcattcttttatatgcttcctatatatatttactagttgtacattttacccagt

SEQ ID NO: 83317 - DNA, 1017 bp, Citrus sinensis
  Intron number 1 from transcript orange1.1g010155m (locus o range1.1g010171m.g) derived from phytozome v7.0 (chr-ID sc affold00016; pos 43161 to 44177 reverse strand)
tgagtggtcttgttctggatttaaagcattaaaaggtcagtcgggttttcagtttcaactccgtttgttttgttttgttctgttttatatgtgtgtatgggtatattgcttcatttcgcatctgtttgattgatttgtttattattgtgggttagcttaatttatactcgttcaaaatatgtatatacctgtgtcacactgaccagacaattctcttatcttatgtccaacctacgtctgtgttcctatttacattctcttgcataaggctcactgttctgttaaagagaaatttggtttgagagagaaggtatcacttctgtgttcgtaatggaaaacatgtcttagctatcaaattctgatgaagcatatgatcattgaaatttgaatgtcacaaggtacagtttgtggtattgttgtaacataaacaaggctcaatttacgtccttctattttgcttggaatctataactttttttttcaaatatctcaacactaaataaggctctttaaaggatctgacttccgtaggagtcaagaatattatgattgctaatgctttcatcagtctttcttatattttcttgatgtaagcttcatatccttagaccattcttttgtatgatttctgtgtatattgtttgtcatcctttactctgattttattgaaagattcattcagatctaaaatatgttgttgaatagaatatggttggatgatgaatgttcaattgtggagctaagaattcgattgatgatcttcatttgtctatcctatttgggaacttgactctaaatggattctcttggtgttctatagacgtgctttgagaaaacaactgaggagctacgaatagtagtctctaagtgtaagtgttttcttttttaaccaatccttggaaaccattgatgatgttgttatgtcactcaactatgcttatctctacctcattaagctgtctattattttcatgaattttttatactaatataatttgttagtttcatatactgcaa

SEQ ID NO: 83318 - DNA, 985 bp, Citrus sinensis
  Intron number 1 from transcript orange1.1g018301m (locus o range1.1g018301m.g) derived from phytozome v7.0 (chr-ID sc affold00010; pos 179856 to 180840)
tttcattttgctttgcagagattacggctttcgaggtaaacttttaaaaggtttttgagaattaaatgattttcactcctttgctttatttttttttggaattattattattatgccgttgattgttgttagctaataaattattgaattacttgaattttcttttgcaccatcgggtaattaatttgttttcactgtcgatatacagatcttgctttgtagttggacgctgattgttgtgattagagaagtttctttatcacggcttatataagctctcagagagtcagaggtctaaattactccctcattacactttctcgggctcatcttcattaattatgtttatttcttaatcacggagtaaattatttggttgttgggataattgaggaaatgaaaagaaaattaaaagtagagtcctttatattttatcagcatttggttacctaaatattgttaataccacgtgtggttacacgatgatagtaatgaaggcaatggtgattattatcatagtgaattcactgtcaccatcaccatgtcatgtgtcaatgaattgataatctattgcctcttagaattttttttgaatatttaaaaaggtctaagagggaaatgaatgagtgaattaagtgatacttttcaaattaagagatgaattctagtgaatttgttaaagggtctgctaaccattttcagcccttaacacggttattcttatggtagcaactaattgaaacactagtgaatacctatagccataaggcaatgagctttcttgcccctgagattttattcttatggtggcaactaattgaaacacttttattgaagattatagttacttaattttccttcctatactcagaagtcattatcaggcttttctgcttgattgaagtttgagatttttaatgctgactgacctgctcatcatacttccacagtattccttcaagatttataaagacggaaggcgatc

SEQ ID NO: 83319 - DNA, 781 bp, Citrus sinensis
  Intron number 1 from transcript orange1.1g026784m (locus o range1.1g026784m.g) derived from phytozome v7.0 (chr-ID sc affold05700; pos 3076 to 3856 reverse strand)
catttggatatgcaagtctctgtcccacatagcttcgtcattcaatggaagcatgcatatccataaatcgtaactatttgaaggaattagtatatatgccactaactttttatttcttttccaagtctgaaagcttttaatttttttcattgtttatggttatttctggataagactcttaactagttattaaagtttatacttctattgatgctatttagtttaggtagtcaagtctcgtgttgaaaacaagaggtttagggttcgaacactactcaaatgggtgagaaagagattggattgccagtaggctaaaaaggggggtaaaaaaaaggaagtttatatttctaagattcatttaatattatagttttactaatttgcctgggtgagatttagttataaaattcacttgcctactttcgatccaacagggtctgattagtcattagagatcgataatgttatctataaactatgtatgtcgtgatggtattctagtttagcaagtagtttctaattcaaactaggtctttgtatcattgttataccaattccgttctaggtttaacattcattaaactgcttagcatttggaatggtggtattctagtccaacaatctgttcttgcataagctatgcgcaaaaatgattgtggttatttctttaacaaaatttctattcgttgggtataaatctcagaaatattttcatcactgatgaaaatctgttctggaacctgcagctatacctgggggctggggagtgtgggtcaacttg

SEQ ID NO: 83320 - DNA, 518 bp, Citrus sinensis
  Intron number 2 from transcript orange1.1g045075m (locus o range1.1g045075m.g) derived from phytozome v7.0 (chr-ID sc affold00067; pos 512417 to 512934)
aggaaggaaagcttgagcttcttgagggcaaacaggttatatttgaattgtgcaactgaaaggagtaccttctgctttaattctgctttaagtaattactcaaaaaacaatttttaatgtttgatatttactcttttccttgaacatcatgcaggatatggctaactcaggtctcatgtatttatgtcaagtcgctggagatgttaagaatgctttaactcaacctttccaggttagatggtccctttgtctctttctgccttgttcctaaattagcgtagtaaatgagtacaaggagattgccctaacaaattcaggttacgtgcccgcccttcttcaaatgcataacccttattttacttaatcctccctgctccggaggatgggcaattgggcatataggtggtcaattggtcatgtattcattattccttattctctattgacctactgattaaatcactattttttgtacttaagcaggaggtgagtgctcagctaccatatcatccatcagt

SEQ ID NO: 83321 - DNA, 858 bp, Citrus sinensis
  Intron number 1 from transcript orange1.1g008342m (locus o range1.1g008342m.g) derived from phytozome v7.0 (chr-ID sc affold00016; pos 779397 to 780254 reverse strand)
ctctttccaagctctccatcggacttggtaccactgtacgcatacatacacagtagacacccacacacacgcacacatatgtatttaatgaagagattgacatacatcttagagtccaaaaatttacgattaagtttgttttttttttccggccaatttctcaggaaccaatttttttgtttacaaaactttgccacataattaatatgctaagtttttttttttcgaaaaactctttgtatgaaaaatgtgaaggtccactttcacatattatatttattagttgtttgtcaggggtaattttgtttgttgcaacaatttgctccatacacgagtctttccttatctaaatatattttttaaagaaaaataaataaaaagtaaaaaaaaaaatgatttcaatagacagtgagtaaattggatatgtttttaagtaaattacgaagttttttttttttttgaaaagtgattggcttataatcttaatttaaaacaccttatcaagttgtttccagagttgattattaactattaatgtaataattgattctttagcatggccttatcttatcatcttacaagtagataatgattgaactttgaattgtattaaggctacgaggctgttatttcttaattaatatatgtcatgatcaaccttaacctgctatgtagtttgacaaaaaatgtgatacaaatttgtatacacgtgacggatgacacagtattaaaaataatgtataagttcgtaaattggaatacattatttgccaatcctttataaatgcagagcatatgatcaattcgttaggttattttacattttcatataccggcaggtatcggtgattgcaccaa

SEQ ID NO: 83322 - DNA, 626 bp, Citrus sinensis
  Intron number 2 from transcript orange1.1g009454m (locus o range1.1g009454m.g) derived from phytozome v7.0 (chr-ID sc affold00053; pos 215772 to 216397 reverse strand)
cagaagaaacacaggtctaggaattcacaatgtaagcattccctactagtaaaaaattagtgcatatggtttcagattgtaaacttgaattgtttagcatgaaatgaataaagctagtaggctatctttcttgcttttgaacattttccctttccttttctttctgtgataaatatgtgggttgtccatgcttatctgctttaaattaaacttttttctttcatgtcaggctagtatgtctctcttgttctggcacagacctgaagaggatttactgttttctaataatataattgaagactcttgctgtttctatctgtttatttgaatatcacagattatttaactatgtattaatttttggcctgaagccttcaatctaaagctgcctattcctgtttgtggacttgaagcttttcagtgagttaagtttcaggccaaaaagttgtgtttttggcttggttttcttaggctttaggatctttgattcctattacatcattggaatgacatgacgattggcacttctctttgcatcctaacatctctgtttgtatgattggtgaggttgaaatcttccactccagagaaatgataatatttcgtgacatgcagcgttattcctg

SEQ ID NO: 83323 - DNA, 617 bp, Citrus sinensis
  Intron number 1 from transcript orange1.1g009454m (locus o range1.1g009454m.g) derived from phytozome v7.0 (chr-ID sc affold00053; pos 216722 to 217338 reverse strand)
ttaattcctgcaacctcatctcgtgctcaatcaaggtacgatccaactttcaacttaattcgtcagctcttctttcaccagtatttactcattcatgtacagttattttgatcactatattttgcgtaaaatgttgattctaattttctttgaagtttaattgtttttatttatttatttacttgataatgtggtgatttacatttcgtgctgcgttccttgaggtccacagttctgatagaagctcaaattttagctccaaaataacacttggaatttaatccaactgtttttattctggaagtttattaactcaatataggtgccgccaaaataggtaattgtgttttaattattcattaaaatcctaagaattgatggatgctatcaaaattctgcacttcaaaatatgctgcataccgaaatgtgatacctatcttttgaacgtggttcctcacacaatctacaaaagattttgtgaagtaagctaaagccagtgtggagctaaacgtgtattttcattttgttttattacatttggatcgaataaatggcagtttatgagaaattcattagtattaaactattaatgccagcctctttatatttctaggctt

SEQ ID NO: 83324 - DNA, 410 bp, Citrus sinensis
  Intron number 2 from transcript orange1.1g029143m (locus o range1.1g029143m.g) derived from phytozome v7.0 (chr-ID sc affold00025; pos 52657 to 53066 reverse strand)
tggtgtaattgctgaaaataagaaggtactcgctattttcttttcttttcttcgttagtgaaatattaataactgtttttgattaagcaaacatggtgaaatagtctgattatactttgttagaaactgagacatgaacgtttatatagtgggtcagtttctcactttgcatgtgtatgtttgttgagattgtttagtttcagttgttatatcaaggtctgtaaaatttaaaagtttagagactaacaggtcagtttagtttatttctatcatcctcgtggaacaaacaactgcgagtgtttgtgtatattattatatactttatatgattgttctctaactttattgatttgatttattgtctggtgattttagcctgcatcgggaactccgatacctttgaaaggtgg

SEQ ID NO: 83325 - DNA, 771 bp, Citrus sinensis
  Intron number 1 from transcript orange1.1g030804m (locus o range1.1g030804m.g) derived from phytozome v7.0 (chr-ID sc affold00324; pos 75036 to 75806)
accgcactgcccgccattctcgcatcagaaagaaggtgctgctgctcccactttctttcatttttaatctctcttccccattatcccactactcatttatattcttagttctatctatcccatttttggtttcttgtattaatttatcaaaatcgaataatgcacttttcttgggggtcatttatgtagaaatcttatttttttgtactttgatagattggtaccagattgattttgacattatcctagttcacgttgtaagggcagagatattcaattatttattgcatattttgggtctagaaacttagtgagtgaagttttttcaaagtcattctaagtttggcatgaaatgtcatcggctatgcttggaatgatttgtgtttatgattgtaagtgataaaaaggacatgggacaattataaaccgttatccctttgaagattagagaggaaactgctaatttcccaaaataggtcggctcctgcctgaaccccaccacaggattatgattagaaattaagttaaagaccttcataacaaagccagctgccccttctcttatataagcatcaagtcttctgtggtgcttgtccagtacgggtgaatgattggagatgcataagcatttggccatttattgagtcctaggactgtgatatgtagctgtgagcttttattgattctatgttgacgatgatgttttattctccttgatacagttatatgtttcctttaaaatgaatgaatctctcttattttctcagattg

SEQ ID NO: 83326 - DNA, 668 bp, Citrus sinensis
  Intron number 3 from transcript orange1.1g018357m (locus o range1.1g018357m.g) derived from phytozome v7.0 (chr-ID sc affold00019; pos 486149 to 486816 reverse strand)
gagaagctgcaagaaagagtcgactgaggaagaaagtaatgttgtttctgttagttataatctcttctcacatgaattaatgaaatgatttcagtaattattcaaacttatatattttttgtctagaagcttttcttatttaaatagtgttattgtcacagtatggtcatacatatctgagtacgtttgaataacctttgctgttccaaatcccataaaaaatgaaaaaacaaaattgctgttataacagttgatgatcatcctactgttgataattttgaaattttcgtctgtttgctaatcagacagtttttacctttatcagactttatgttggctgtttgtttgcaactctgtagcttttaaagtaccatgatcatggcttcatgtcttaggtagttcatgtgacattaaataatattattttctaacaagaagaattgttcgcctctactaagttcttttctgatttagtgctttcatattagttttaaacatccctcctggttattctatgcacatctccatgatactttatctataggttcctagtgatgaatatgaattggcattagtatcttcctcctagaatctttggatggagatgttttaagttaacaaatgaagcatacttggatcatttatagggtttggttttggataggcat

SEQ ID NO: 83327 - DNA, 570 bp, Citrus sinensis
  Intron number 1 from transcript orange1.1g018357m (locus o range1.1g018357m.g) derived from phytozome v7.0 (chr-ID sc affold00019; pos 487013 to 487582 reverse strand)
acaaaaaccaggtgagctttgtctctttcttgattttttctttgtatatacgactatatgtttttgttttctgtaaatcatctgttttcttttatctgcacttaccgtgaagtgggaatctttgggcttagccttgatggtgggtcatcttgttaattgagaacctacagtgaatttggattgtagtacctacagaatttttgtagatgtacagtaatccgatttctgttgggtgatgttggttatgacgttataaaatttgatctctgggggcactatctgatttggggtatcaattcgttagtatatgctgcattcattttgctaaagaaatcttcaaacttaatgctgatgggactgataagaaaatttagctgatgtatcatattattaatagttaatccccattgaattagctgatgggattcaaagcatatgaaatttggccagccagagttgcatactaaatgatttatctatgcctaggctgttatgctaatattgtgtttttattaccctgattttgtgggattcaaatttattttggtatttggatactgctgtaggtta

SEQ ID NO: 83328 - DNA, 361 bp, Citrus sinensis
  Intron number 1 from transcript orange1.1g007455m (locus o range1.1g007455m.g) derived from phytozome v7.0 (chr-ID sc affold00009; pos 174523 to 174883)
cttcagctcttgctgccttgctctcaccgaaggtaaaaaaaccctcattacatatcatattccatttcgagttcttcttttttatttctttatttattttgttttgttttattttatttttttgtgctgagaaattggcagttttgagtttggggctctcattggtagttttttttttttggagaaggctttcattggtagttaaaaggtgatgtttttgactggggataaaagaaacaaagttcttaacatgatgttttagtgttgtttttagtattatacagaagataatcttttagatgagagtcaaattgaggttaaagtttggatattattgatgatataattatattttccaggc

SEQ ID NO: 83329 - DNA, 446 bp, Citrus sinensis
  Intron number 1 from transcript orange1.1g034737m (locus o range1.1g034737m.g) derived from phytozome v7.0 (chr-ID sc affold00598; pos 6102 to 6547)
atcagcttttgtcaccggcggtgcatctgggattggtaaaaaattgaaggcttttaattttctttttcttgcgtttaagtaccctattttgattcctttactgggttcgtgtttgtgtattgattgtgttttgtttggcacttgataggttgtgttgtgtctttggttgtttcttattgaaatttagattctttgtgtttttgggaccttctaatcattactaatccagtatacgcttatttttctcgtatacgatatatcctataagtagttagtagttactctcatcaatcggaggcttccgaagataggctaaaatgattttattcatattcaagggaagttactgaaatttgaattgttgtggtatataatttccggatgttgccaatgctggtgtatattttgcaggtagagctttgagcctagctcttgcagggaaggga

SEQ ID NO: 83330 - DNA, 759 bp, Citrus sinensis
  Intron number 2 from transcript orange1.1g023268m (locus o range1.1g023268m.g) derived from phytozome v7.0 (chr-ID sc affold00096; pos 337410 to 338168 reverse strand)
aacgtgctgtggaaacaagagcaaaaggtaaggtctgaacctagaattggctctttgtctaatgtgatagttcttgttgacaggttgagattcctgggttcctcaaaacttctatcttaagtaggttggagatatttgatgaccttgggactgatttatagggattagggaggaaggatggttgtgcacttgttatgtcatctcgttcactgttttgagatgattaattaaagatgaagcttcctgcctataatttcttgtgatgggctttgttgctggttgattgaaatatatttgcaaagaacttctctaacctttgagtttgatggatgcccttgagacgaatgtaatggatgaatatgactgttaatttttatttgctgtttgttttggaaccttctcagaatagactatagttattgggagaatagtatctgtttcaatccttgggcccaaatgggaaatttgaaaattaaagcatgcatttctaaatgagctttttgccatttgaatatataaacagtatttttgttcgttctagaaagtagttctttcaagataaaaaagtcaaaaggggcccagtaagtgggtatcataacaaccaggatttctttcatgttttcatattccagaacagaaaaattttgtttcctcaataaccatttattttgttgtgtcttttgctcagctacctaacctactaagttcaaacttgtttttgcagtcagaactggtttggagggacctggacttacgaat

SEQ ID NO: 83331 - DNA, 713 bp, Citrus sinensis
  Intron number 1 from transcript orange1.1g012646m (locus o range1.1g010375m.g) derived from phytozome v7.0 (chr-ID sc affold00068; pos 184847 to 185559)
atattggaatttcaggtaccttttccatctctttttatcctagattaatcaatatctttttgttatagagcaataagatagtaagaacttgaaatgtctgattggaaatttcactgttgcatatcttgcagtataggatcagaattataccctgtccttttcttttctttcagtttttttccctttttggttggttggttggcttaatggtttttgttcagaattacaactaattgaaacttgaaagttcaaatttttaactgcttagatcttccagaagattttttttttttttggtggttggggggtggggtgttgttggggaaggggaattagcctttgataattcggatccccttttcactttgtttagaatctgttgaattataccagcagccaacacagaggggatcaaaatatgggttctattcttatccaaaaagtaattcattgatattaatgacaatttacttcaataatgatattttagtcgtccttatcctgaagaagttatggttcaatcatattaaaaaagaatttactttttaacttctattagaaaccttgttttaaacttttagaaaatagcagaatcagctgacaaattctatttgggatggatggatgcggggcatttcttcctaactgatagttcaatgattgattggcaggaggagttacatctatggatgcatttcttaagaaattcttcc

SEQ ID NO: 83332 - DNA, 496 bp, Citrus sinensis
  Intron number 2 from transcript orange1.1g037858m (locus o range1.1g037858m.g) derived from phytozome v7.0 (chr-ID sc affold00427; pos 33873 to 34368 reverse strand)
ggtaaatgttctatttttttttctctgggttaatgtaaaatgaatgcactggcggatcaagatataggcttaggggcactactgctttttatagcaaaactcaagggggctcaatggtataagtctcttagcagattttctgaaccaatatactacctctgtccttgctcccactgtaattatttctgacttctttgggttggttacatatgttaagagcttaactactatcaatgggcattcacctgccatgtaattaattagcttttaatgatagcttaacatgatgttagagccaaattgatcacgaggtcatgggttctaatgcttcttacattctgtttgtatttatgttcatgggtttagttcttcttctcttttctttcaacattcttgtcaattgtgaaaatttgtgatatagggtcatatgtatgtgataacatcaaagtatataattacagggaggaagtggtgatatctgtcaagaatttttctg

SEQ ID NO: 83333 - DNA, 661 bp, Citrus sinensis
  Intron number 1 from transcript orange1.1g046368m (locus o range1.1g046368m.g) derived from phytozome v7.0 (chr-ID sc affold06508; pos 908 to 1568)
ttgtggaggtaaccgctcgtggtggtattgagaaggtaagtatttgcaattagatgtctgattttattctttattattgtgattgggagccttatccagctatgcgagttgtagcacagtctaatatttctatgcccttaacatgttttgtacatggcttttacccagtttggtgtcagtattagctgtctttatgtgtcacatgtacttttaacaactcagcctagttagagaggccttttggttgcaacagaaaacattctgttgccatcttcctcttccttttgttgtgtgtgtgtaggttggtctgtgtgtgtttgccatttatttgtttaaagtccattcatacaattatttcagtctatcactacattgtttattctgctctgaagtcaagatattttatttaatcatctttctgctcactcgacaatgaaacaaggtcatatattgtttccagatctgtcagttagagttgtatgcatttatgccagtgatttaactagctaagtgctgttaaaatatgcagaatttatggtttaagaattacgtaatcaaaatgtttcagttaatttttttcaatgctgatcaagagtgcaatgtttaatcctgctgtacttatactttcacaacccaattctcagataattaaggagcgaag

SEQ ID NO: 83334 - DNA, 691 bp, Citrus sinensis
  Intron number 2 from transcript orange1.1g046760m (locus o range1.1g046760m.g) derived from phytozome v7.0 (chr-ID sc affold00109; pos 339384 to 340074)
aattcagatatctcgtactttccaagaaggtactagtgcctctcatgttttggctgaccttagattgcagtattcagacttacaacattggcccagaagatcagtgttttgcttttcatttgattgataacgactgacctattattggttgtttagatgtgtggtttatgagcttgagttagtttggttttctttttaagttttagctctggttttcgggctctgtgagttgttaaagaataagcctcatttgtttactgctaatttttgttcattcttctttgtgcttattaaaagctattaaaaaatattttcctctaaacaaggaaaagaatttgccttccatttcttttacaattttggtctcacagcatcttattttaatttaatgctgtagtgaaaatggcaggtatatttaataataaaggatctagcaatagctcttttgtttcagtttcttttcaactataaatgttactgaatttgataagaccaaaaatagcattttttttttcctttcttgtgtagacagaggatgccagtaactgatactatctacatgtctgcagctgctaattaaatttaaccaccaatcggcaattcaatgttacaaattttcggttgaatgcagcagtgatctgcacaaactggcttagaccacaaggcagctcatcttgtcttatttcatagc

SEQ ID NO: 83335 - DNA, 716 bp, Citrus sinensis
  Intron number 1 from transcript orange1.1g027754m (locus o range1.1g027754m.g) derived from phytozome v7.0 (chr-ID sc affold00208; pos 176597 to 177312)
tcagccgtggggtgctttagcttctgtcaccgccggtaatcttatctcagcctgtttctctctgtttaatgttgtttcttatgcaatttacagaattgaattcactttttcgcatatgggttagatatatattaacagtaaaattaatcctaaatcaggttttatcttgtagtatgtaaatttcatgtaaatttttcagctttacgattgtcatatatttaaagatctaaattttgtttcgagattatatgacttttagattgttttgttgcattttcatttttgttttgttttaaattttttgctttgtgtataggatatcgattaagcaaggtaaggttcattatcgactgattagatacatccgttttaataagatcatctcattttgttaaactttgcttgaacaaatatctaaatagtgtcgaaagaagtttactgggaaaagaatttgttaagccacccaaatacaatttctcaccatgtctggctttgtatgatttaatcagtggacatggattttgatcttgtgttgctttgttgctggcaggtggctaatttaacttcatattaaactttctcaattattagttgaattatttagatttgaagcatcaagttcttaacaaacaccattttaataattgatcaaacaataaatcttcaaggaccaagtattatgaccacggtgataatgtttctgacatgcaggcaac

SEQ ID NO: 83336 - DNA, 744 bp, Citrus sinensis
  Intron number 3 from transcript orange1.1g040944m (locus o range1.1g040944m.g) derived from phytozome v7.0 (chr-ID sc affold06723; pos 1897 to 2640 reverse strand)
ctgttccaagtgctgtggactgtaataggcattgtgtgattatgtatctagtccacggctatcctctgtaagacttccctttttacttctaaatatgtttgcttttcatacaatttgcatacggctgtttattttctttctgtttctactttaaaaagtgtagtaatttatttcttatgttactttgaatttaggtcctgttagacaaatatgaagaagtgaaaaattattacagtaagatggctgtttatcattaagaactggcgaggcactattaaaggtttggataaaattgttcagctgggaatggattatgactgttttaatatttattaaagtttttagtgagttttttttttaatatttggtaattatatcagctctatctgctcgttggtgtgtgtaagtgaatcaattacaaaatccagaaactgttttgaaactatcattggtcttgtagtttgattggcagaacatggtcttattcactgtgacgtcaatgaattcaacattatggtatgcacttcaggcttggtctcagtcttctatttttagttttgcagtgtgtttgtcattactaattaattgggtttatgttttctgctatgtcgtttcccttttattttcctattgggttttatgcatccactggaagatgttgtaatacttaatgccttaggcttgctattttagcttattggcaagtatcttactcatcttttaatatttttaccttttagattg

SEQ ID NO: 83337 - DNA, 864 bp, Citrus sinensis
  Intron number 3 from transcript orange1.1g035537m (locus o range1.1g035537m.g) derived from phytozome v7.0 (chr-ID sc affold00007; pos 1524238 to 1525101 reverse strand)
cttgccattaacgaggtatacctcttatttttttaacacatttcacagtgtgctctgttgcttatttggtagttgttttcattaggaagtcagtagttacttgtgtgattatttattgttgttgtgctttagccttttttggccattgttaaaattctatcgtgcatctttaatacacctttatagttaagtacatgtttattcgtatggcttagaatattctgtaaattctctgttgaaataagaattgttgccaaattactttgatctcttgtgttgagtagttttatttggtagttatctggtgagaatttgatatgtgatctgatcatataaatcttgcaactgcaaactaaatttttctgaaatcatttatttgataatttattatggattcttatttgactgcttatctctattcacttagtgattcagtgacttactgattaaacctaataggataaatgagcaattgtgttggtaaatgttgtgttttgtgaattagattctcaatttaataggcttcttgattggatcacatgtctttcaatttgattcaagttgttctgtttatgtgccattattaggtcttcatcccatattttgagttatgcctatgcatgtgtaattttgattagtgaagactgcaattttaatgcaactttagttgcttcttatcctgtagttgtttggtgcattaaatctcttgtatctaggctgaattcttttgggcttgattagttgatgatttcgggtttttgctattgaaacattaaaatgtacagatttcaagggatttccattaatatctaatagtaatctcttgcagatttttgagaagaacccaaccaagatcaagaacta

SEQ ID NO: 83338 - DNA, 393 bp, Citrus sinensis
  Intron number 1 from transcript orange1.1g035537m (locus o range1.1g035537m.g) derived from phytozome v7.0 (chr-ID sc affold00007; pos 1525345 to 1525737 reverse strand)
gtcactttcagggtacgttattgctctcacttcctagatctactgataacctttaattatatgagcttgttttacgatttaaatttgttctcagatgaaaaaataaaaagctgcaattttttaggtgattgtaattgattagttagtatgccctgcaaaaattaaatttagctcttttgtaggccaaaaggggagtagagttttgagctatttggtagaactcttcattttgcataagctgtaattaattgggggcttcatgtggatcatatccgtttgttatagctatgttttctttagagttattagggattttagggtgtttgttgatgggaattcgttatgggttgttgtgcagtttcaccagtatcaggttgttgggagagctcttcc

SEQ ID NO: 83339 - DNA, 643 bp, Citrus sinensis
  Intron number 1 from transcript orange1.1g046733m (locus o range1.1g046733m.g) derived from phytozome v7.0 (chr-ID sc affold00011; pos 620957 to 621599)
cataattgtctctgctccaaattcaaaaacgttaggtgggtttctctttctcctttcgcgaatttgctgcacttttattttgaatatgtagcctttaatctcaaaattgttcaaaatattggtagaagcacttctcgtgatatgaaaatttaaagttttttttctcctttgtgcagtgtaaaatcactaaaatcatgaatctacatgaaagaacaataattttttttttcttttcaattatactagttttatattccccaagtatttttacatggcgtctgctagaaagctgtgataaaggtcaaaaacatgccacgcgaggagcgtggaaaaagttatttgtctttatttatttccttttttttcgttattttttcagtcaaaaaattgtcttggtgataggagtaaattagttagttaaatgaaataaaatgactcaagtcattgaaattgatgcaattcaattctaaattcgtttgcgttctctagctcatattggcttttttagcagtacctttcattcatcaaattcactctgtattccagaaactaagaagatttgttgaataatttctccactgaattctttctgcccaagatgatgacaggggaggcactgaacttcttctcaaagtacaacaag

SEQ ID NO: 83340 - DNA, 813 bp, Citrus sinensis; identical to SEQ ID NO: 83248
  Intron number 2 from transcript orange1.1g032660m (locus o range1.1g032672m.g) derived from phytozome v7.0 (chr-ID sc affold00209; pos 1080 to 1892)

SEQ ID NO: 83341 - DNA, 546 bp, Citrus sinensis
  Intron number 2 from transcript orange1.1g004841m (locus o range1.1g003927m.g) derived from phytozome v7.0 (chr-ID sc affold00011; pos 2243612 to 2244157 reverse strand)
atttggtttctgcatttgtcaacatcttattacttgtaattcataatttttttttagcatttttatggtattgcttctttttttttttttcaaaaaaatctgtttacagaaccatctacaacatgtgcacgcaaaagcctccccatgattactctcaacagctttatgacaagtaccgggagtcttttgaagaatacatatcttccacggtaagaacttgatattgttgcaatccaaatatatctgtcaaatgtactttgcttatagcgtctgagctaagtttaatttgtctctaaggtttgcaattactgaataatatttgattacaaactgcttctttggctgatagcattgtagtaaaatatgtttttccacatagtaaatacgcactacaacagtcatgtttttgtaattagcagtatgatataagcatttcatgtattcaataattgcatactttgtagcattttttcaacatttctttccaacacttctgagacacttgtttgtttggaatccaggtattgccatctataagagagaagc

SEQ ID NO: 83342 - DNA, 474 bp, Citrus sinensis
  Intron number 1 from transcript orange1.1g017702m (locus o range1.1g017702m.g) derived from phytozome v7.0 (chr-ID sc affold00457; pos 114337 to 114810)
ccaataattcaacctaccaggtatatgatgtatataagtttaatatttactagttttccaaatttctgttcatattacattgcatcaagtcgatgatttgagaaggaaaaaaaataaaattaaagtttcttgatttttctcttcttttttttttttttgatgatatgctttgtttttggattagaatttaaagaattaatgaggctgattcgtgattattggatgttttggagatcattaaacatctatgcagttgaaatttgatgaaagccgacagaaattatgaaatttaatttgtgtaaaatgctccaatatgcctaaaaaacttgtcgattgtgtcaatatttattcttcgaactcgttgacaatctattattaagttattatatgcatacaagaaatcttttgcaactgatacaactatttaaggtgactgcagagaggagttgtggacgctgcaaaggaattaatcag

SEQ ID NO: 83343 - DNA, 370 bp, Citrus sinensis
  Intron number 1 from transcript orange1.1g004862m (locus o range1.1g004862m.g) derived from phytozome v7.0 (chr-ID sc affold00068; pos 231887 to 232256)
tcctccgctcttcccctgccgatttcctccctttggtaatccattgattttcacttttcctctcatttcacattttgatatattattttggtaatataaagaaaaaaaacaattatgttagtcagatcgattcaaatttctaattaaaaaaaaaacagcctaattcaaaattagttgtactaattaaatttgtgcgaaaatttttcttttttaatatgatccgggaagagtgaacgcaccaaatttgaatattttgttatgtattttgtaattgttggaatattgggtgattaaacttgtgttttatttttcttttttcccctttcttttttaagtttgagacagcggcggcagaggttttggcgagttt

SEQ ID NO: 83344 - DNA, 584 bp, Citrus sinensis
  Intron number 1 from transcript orange1.1g047160m (locus o range1.1g047160m.g) derived from phytozome v7.0 (chr-ID sc affold00183; pos 181317 to 181900)
tctaaaaggcaagagtcaaaaattagtaaactatctaggaaaagaaaattacgattgcatctacatcttttcattattattgttattttattttattttttgtagagagattgttttttttttttttgatttatagagagattgttgaaagattacaaattatatatttcaatgcataattgataatatcactatattatcacaggttgtagaaatgaatagtactgttacgtagtaagtcttatttatgtaaggacgaaaataaataaatattttagcccttcaaactttttagattaagcaaaaaataataataataataatttaataactaaaattttttataagctaaaaaaataaacagaattaatggcttaactgaaacagttatcaattgaaaaagattacgcagcaaaattttttaatatagacattaatctataagttcagaaggctccttgccaccgcctcggcccccaccatacattaaatattgaatacgtatatatagatatctatacaattgcaaagaattaatgtttctaaaattttgaatcatattattgtaaatagcacagagtact

SEQ ID NO: 83345 - DNA, 910 bp, Citrus sinensis
  Intron number 1 from transcript orange1.1g027898m (locus o range1.1g027898m.g) derived from phytozome v7.0 (chr-ID sc affold00121; pos 331428 to 332337)
ggtaatcttctgatttcagccaagtattgcatgagtgattgatgactgatctgaggcctgtgtgttagctttgtcttgtttggatcctgaatgatgattttttactaatacagaagattttctgttttactgttgtgttatgagtgagtatttagctttcaattaatgaaccacacaatgcctgactgcccttgtgatattgtcaatcaacattcaacatggatttcgtcgaccgtccatgtttgctgggaaagcagatcacagtatattgattgaagggagattttaatgccaagtacatatgcttaatggtttccacttaagttaccctgcttaggtttctgcttttcagcctaagtaatttcttatgattcggttctttttctctaatttgagtttctaaacatttgtgagacgactgtgttgcaacagactctctgacagtgaacctttacttatttatactgaagaatcaactgtctattttcagttaaccaagaaaaggaactttgtaagttatgttatttatggtatcatcctttgtaattttggttttctagtatttttgaccgcattagcatgcgtgtcagctgggtgggtgtgtgtgtgtgacattttagtctaaccggaaccaaggaaataagacttgcaattactttagtcaacttaatcacttctcatttggagtagggatatttattgattttatcttttggcaatgctttcatttattcctgcttttttctttttggcggaatgtgtaacaagaatactggggttatttgcatcattcactatatacatatgctcgtgtttcttcatctggttattagtgtcgccattctcattttgttgtatttgacgtcattataatttgatacctgcaggattcttgttattcctctcatta

SEQ ID NO: 83346 - DNA, 901 bp, Citrus sinensis
  Intron number 1 from transcript orange1.1g036283m (locus o range1.1g036283m.g) derived from phytozome v7.0 (chr-ID sc affold00027; pos 1009524 to 1010424 reverse strand)
aagaggagaaagatcaatcagccgcccccccgccggtaatctttcacaactctctagtttttggttttgtgattgaattgaagaatataataagaattcgaaaaaactgacttaaagtttaattcgattctattttgttacattgattttttttgttttcatgaatatgtacaaacaagatcgaaatagcttatatggaaagagtgtaagggcatgaatttttaagccctttgatgagattggcaaatacttgagacagtctttgtgactttatgatcatttttttcttttttttccccctaatatcattatgtacgacattccaccactcaagggaagtgattttgcctatatatatatatatattagaaatgttacaatcgaggattctggatttgttgaggttggaaaactattaaatcatatggtttaataacataatgatggtgaacacattatagcagacttgaactgctctttttatacgattgcaatagtttctggttcaaaattggtttaaacaattgtttcaatccagtgttaccagactttttcgagattatatagttcaagctaaatttacagagttagaagttgtctctagatcctttggaattgcatttactgttaaacatcgaggtctttacatcattggaatggttatgggctatatggattggacgttctttgcttcatgccatctgctatgtgggaaaaaaactttgtttcgcaaattaattatcaatttatcggcagcgttcctctacactggtgccagtaaactgttttgtcaatgtcaggtttctttccttgtacgtttgatgccgacaatgcaagttcttaacaatgcctttccctttctgcaggattgactcttcatctaccgcagataaaaccagag

SEQ ID NO: 83347 - DNA, 762 bp, Citrus sinensis
  Intron number 2 from transcript orange1.1g034883m (locus o range1.1g034883m.g) derived from phytozome v7.0 (chr-ID sc affold00004; pos 846450 to 847211)
agtccctcctcaaactagcgctatcatcaccaacggtaaatcttatttcgtgttactttaattctattgatattcatagttatatttacttttattttgtatgtgttaataatatagagattacatgttgttaatgattcctgattcctcgtattatatttttccctttcttaaggttcaaggttgtcgatttgatgttcagtagattggtttttattcaatttctgtaaagttttatacattagcgtgattttatcgatggtatgtggcccctgcaaataggaaattgatctgccggtgctagtgttttatttggcatttgtaatatgaaacaaaggctatttacggtgtgtcttctgtaatatgggggaggagcttcttttggataaaaaatctgttgcaatgatactattcttccatctgataaccctgaaaagcataagagaatataaacataatggacatttgaaaattttgatcaaggatgtctatttggttttttctggttaccctttgcgattgatgtgacctagataaacgcgattgatgtgacctagataaacattctagttattttttatctccagtaactgaagattttcatttaacaagtctaggtaatcaaactcagtaaggtaagatttgcacacctgtagttattattaaaaatggattttcaattgtatagtttgagattttcaaatgttttcactgtggttcttctaccaatctcactcaaaattcgttttctgtaatttgcag

SEQ ID NO: 83348 - DNA, 739 bp, Citrus sinensis
  Intron number 2 from transcript orange1.1g031701m (locus o range1.1g031701m.g) derived from phytozome v7.0 (chr-ID sc affold00280; pos 149191 to 149929)
cggtcctagtcagcctgtttgttgtaggtgattgggtacgtaacttgtttctgatttcttttgtttccaaatgtaaagacttttcacataaatcagattcttgcatattaccgcatatttgcaaaattctgctgttatcatttttcaaatatctgcttatcatcgtattgtctttatatctagttgtatttgtgttgttcctgattgcggacagtaatctccctagtataacctcctcatgcttgggatgatgaagtcctaatatctaaactgggaggaggaagagagagcacaggaaattgttacaacaaagaaaaaaaagcaaagataaaaagaaaaactgtggaatctgtttaaaaacactgttggtttagtaataacttaatctgagaattgtacatggactcatctgtgtccgtcttttttttttcataaaaaattttgaaatatgatatatcaaggctgaaatgacattgaattattctaaacacgtagattgtctctcctttggcatctcctttggcaaaacgggtgtgagattggtcttttgttgaataatagtaatgcctactatgtcatgtagttcttgactaaaacctcaacggaaactatctacacgatttgagagaactgatgcaacataaccatgtatattctgctatttttctgctttgtagatttgacattagacaataattggtgtaacaaatttatagttcaaaacatgcaggtcacggct

SEQ ID NO: 83349 - DNA, 523 bp, Citrus sinensis
  Intron number 2 from transcript orange1.1g008449m (locus o range1.1g006319m.g) derived from phytozome v7.0 (chr-ID sc affold00623; pos 55777 to 56299 reverse strand)
tgattgagatattatttcaagaaggattaattaaggttggtagcaaactatgtatttacttgggtgacagctatagatttttagcatgcttagagagtggtgacgggtattgatttattttatttaacttgagtggtttagaattagatattcttgggttgttaaatgttcatagcaatttggatgtcactttttccattcttaacctttttccaatttgattttatctggttgttgatcctgttcttctccaaacaccaatgactagtgtgtaatattaatgttgaataagaaagctgaagtttgacttatattttctggacttcctaccttaaattaattactcatatgaagatttaaatttattcttagctataagaataatgtttccatgtcgaataataagtttagctctttcatctccaattctaacttattttcccaactatttgaagttccaagaggactgaaattttttctttagtgtttgtttgccacagagaccttcagcataggtttgaac

SEQ ID NO: 83350 - DNA, 799 bp, Citrus sinensis
  Intron number 1 from transcript orange1.1g017176m (locus o range1.1g013784m.g) derived from phytozome v7.0 (chr-ID sc affold00003; pos 4277479 to 4278277 reverse strand)
tcccgccgcgcgtatcttccttcacgcaagccctagtctctttctctcctctctcttatcttttaatatataaatattttcttatatagtttgtgttcattcgcttcattgaattcacatttactacaaactctctttaaattcgtatatgttaagatgtttatggaacttcttttgtgtatatttttcaattaaggttctttatatatatcatatgttgtatagtgttcttctgttcaattttattttttattttgtattcaaatctctttgcttacatacatgttaatgttagttgttatttggatgtttttatgtgggaaattttgtgtgcttaaagtgggggaccaaggcttcgtttgggattcttgttcaagttcttaatctatagttgctgtgactgtataagttaatggtggttggtagccatttgcggtccaataaaagcagttatgatttcaaacttaagtagaggcacaacagttacaaacatatcctagaacctagatcttttaagtgaacaaattccaagcatcttttttagtgtgccctgatgcctttggttactgcacaagtaaatcaactttactccatggactcttttgcaaggttatacttgcttctgtataatgtagttttatttaatggataggtacctaaaggagaaggctatgtatgattagagggatggtgaagtttgcagggtcttctttgatatcttcatttactccatttgattctgttctcctgaaaaaacatcgcagattttcagtaaatagtttcttcaagaattcaaata

SEQ ID NO: 83351 - DNA, 739 bp, Citrus sinensis
  Intron number 1 from transcript orange1.1g000380m (locus o range1.1g000380m.g) derived from phytozome v7.0 (chr-ID sc affold00068; pos 219153 to 219891)
aagactgacaaagatccgaaacagattgctagaaagtatgccattttgtggttttattccgtgggctggttctgtttttgttgtttttggttagtttttgtttggttgctcagaaaagtggaggaaaatacaagtggttattattattttcttgacaatgttctgcactttttacattatttgggaccaagtagatgcttttactactttcttcggtgggtttgttcttctttgttgttctgattagtttttgtttggcttgtgagaaaagtggagggaaacataagaaaaaaatgaagtcgtgttattttatggagattatgcgggatcaaggagttgctttactacttttgctcagtgggtttgttctcttcttgttattttgattagattctgtttggttggtgagggaagtggaggaaaacaaagaaaaaatggatttttaaaaatttttttgacaatgttgttttgattttagagattatcagaaatcaatttgttgcttttgctagatttatgtcagtttggtctgcttctgttctttggtcatcttttgcttatttggcaagaaaattggggaaaacacaaggaaagcaggcttaatagtttttcatctttcttctttatttaaaacatgaattttctttaggagttattttcttatgagctttggggtgaatgtggcttacttctgttttgttttctttttcctctttcttctcaggtatcaattggagct

SEQ ID NO: 83352 - DNA, 764 bp, Citrus sinensis
  Intron number 1 from transcript orange1.1g037534m (locus o range1.1g037534m.g) derived from phytozome v7.0 (chr-ID sc affold10812; pos 826 to 1589 reverse strand)
gagccagggggtcattgtcaaagtcccctgtctaggtaaagttcttctttatgattcgtcaatgcatgtatatcttgttggatattatgccctccgaaatcttctctcactcctgaattgactgtcttgactagtatttttgattcggttttatgaaaaatcatttggtttgaatttgtattattagaaaagttttactacctacacttccacttgccttgcatataatgtgtacaacctttaatagatgttgtcatatattatttcctttcagacccactttgcagttttttttacttttattatttcactttttttctctattgatatatttcttgtcatcacttaattcatttcataatatcctaaacttaatggtggtactagatgtttaaaatgttttgttctccttataaaattgttggatccaatggaatgcaatcatctgtttaaccttcaaacatacttctttaaatctccttagtaaattcatttgagtcttattcttttgtcagtttctatagtggagaatccttaagttttactaccatgtaagatgtgcgaatgaagatgatgaaaactatatcgttattgaagtttggctgtcttcatcaagtgtaaggagattctgtcaacaatcttgtgtgtgtcagagtcacttaatctttaaatatctagttttgtgttgcccattacttttggcaaacacaatgttctaaggtgacaattgtaactgtgcaggttgtgggggaaccggtaatatt

SEQ ID NO: 83353 - DNA, 779 bp, Citrus sinensis
  Intron number 1 from transcript orange1.1g045112m (locus o range1.1g045112m.g) derived from phytozome v7.0 (chr-ID sc affold00014; pos 181548 to 182326 reverse strand)
ccagtaaagaaactctagaagctctctatcgccaagtaatttctgcgtttatcgtctataatatttgaacatttttcttcttttttgtttacttaaattcctcaaaatattttaatttatttctcttttatgtatctatataacattttcttgttgtctattgaaatgaaagtaattttatctcgagaattaagtgctggtaattcaggctagatgtacatgagtaggcctttgtgctttcaaaatcgagcagaagcgcaacagtttacaaacatactcttaagctcccatttggttttaatttttcgacagcttagctgcaaatttgtttgttaaatacttgcagcctgggttgggcaacactgttgattatttttcacagttgtttgctgaaaaaataaccttgaaaatagcaacaaataactcctaactaaatgactaatgatgtttaccaaatacccatcaactctcttcacagctaaaccttgcattgtacagcagttttggcgttttaagccagaacaccaatattaccaaacagagccttagttatgtttcaagattctatttactaaaggtttctgttgaagctatagttttactagttacttagaattgtgttaaaattagttcataactactgtttttcggaatttcatggatgaaatatgatcctacagtactctgtttttctttagagttttgttcctttatttgcaacgtgtagcaatagttagaaactcatttgatatttgtggttgatcttgtttaggcaaggg

SEQ ID NO: 83354 - DNA, 460 bp, Citrus sinensis
  Intron number 2 from transcript orange1.1g018271m (locus o range1.1g008597m.g) derived from phytozome v7.0 (chr-ID sc affold00009; pos 70571 to 71030 reverse strand)
aaggtatgcactagttcacatttttgtttcttgctttgattgagattctagactcaaaatgaattcagttatatgtaaatcagtagcttatttaacatttacacacgagaagacaagattctggactcaaaatgaaaaaaaaggacttgtagtaatacttccagtgctcctaaggaattgtgaatttttagatcatatccgctagcttacttagatctaggaaagacttacattttcgcaactttcaatttactagcttgtaagtaacgcagcaatggtttattttttggaatacaacagaatacctttttttttttttctcccattgtccactgtccagggctttcttggtctaggtggggcagcattaatccaagcttatgacactatatggaagggccgtccaagcacttaccttctgattcttgcactgctgccaacttttgcgtctcttttgttc

SEQ ID NO: 83355 - DNA, 390 bp, Citrus sinensis
  Intron number 1 from transcript orange1.1g009984m (locus o range1.1g009984m.g) derived from phytozome v7.0 (chr-ID sc affold00005; pos 1861111 to 1861500 reverse strand)
ttcagtaatccgtttgggtatgtatttatttggtccattgtttcgttaattattcttgataggttcaactgttcatcttgtgtcatttaattattcatggatcaagtggattattgaaatgtctctttaaattatcttacttttgaatataacgtacaaaataattgagccatgagaacgaacgatatttgacttttccaaagttggttttttttttcttgcgtgtttgaaaggttagaaattgtgctgtatttgtacgtaagcgttgtcactgtctggtcctgtatccgtcattaaagaagatgaatgagcatcaaatttgtttttttatataaatttacttatcactttatttatttattgtgatgagcagggtgggttcgatactaa

SEQ ID NO: 83356 - DNA, 447 bp, Citrus sinensis; identical to SEQ ID NO: 82869
  Intron number 2 from transcript orange1.1g028725m (locus o range1.1g028629m.g) derived from phytozome v7.0 (chr-ID sc affold03867; pos 554 to 1000 reverse strand)

SEQ ID NO: 83357 - DNA, 738 bp, Citrus sinensis
  Intron number 2 from transcript orange1.1g010453m (locus o range1.1g010453m.g) derived from phytozome v7.0 (chr-ID sc affold00060; pos 462629 to 463366)
catagtgaagctttttgacagtgttgagaaatgtgagtgtagcctttgccttcaatttgattagaaagtaaatgattgtatttgcttttaactattgtatacttttatatattttgaatttctaataggagaagtgtcctacaaaccttagttccaagatctgtgaggatcttggcacaaaatcagagtatccacttccttctttggttctttgattattggagaggaactatttgtaaagagagaaatgtttacaagataatatgcgcaaaaactgtttgtaaagagagcaactttagcaggataataagggcaaacattgtataagttaccaaatgctgtgttggaaataacttgtatagaaataacttcagatggaaatctttgggaaacagaggagaaataattggggtggaggattttggtttggatcaaagaattagctttggaggaaagttgtttaaagaatagaatgtccttatcatgttcctatagtatgatgatatgaaattccacatttaggtctttttccccttcttttctttctgtatgcagactgtgctgcccttccctgcatagagtatatgtgttatttagtttgactactagaaactccctaccagaaatttctcagttctctttccaaaaatcatgatttttctttggtagaaaattttgaattcattgttggatattccattctgtagaaatcttttctaatttaatttcttattgtag

SEQ ID NO: 83358 - DNA, 881 bp, Citrus sinensis
  Intron number 1 from transcript orange1.1g047555m (locus o range1.1g047555m.g) derived from phytozome v7.0 (chr-ID sc affold00430; pos 78635 to 79515 reverse strand)
gtaagcagtttgctgctgaagagatttcggctcaggtataagggtgttatgaagtttttgtgtaatgggtttgttgaaagtttcgattttatttatttatttatttttgcgttgtttggcttatgatggaatgatgaatttgtgtcatgttgctgacatgtggctattcaccacatagccatgcgtttaaaattaagcagaagtgaaacagtaactgacatactaaaatttactgctatcctattgttatgggtgtagacctgtagttgaagttggaatttgggctcatgatggtatttttgttttacattgggataatgtgatgtggattttggatatgagaatgtttgaattgaattttttttcccagggtgggttggagctttttagtttctagaatgtaataggaaaagaaagaaagagttgatagttgcataggagttaatttttcttttggggatgaattagggtttttgggtgggattgatgagctcttttttgttttttttcaaattttttgtttgttctcatatttatttctgtgacagcattttcttctgcaaggaaaattgttataatgcatgtaaacccacttgtgcataatcttatagtacttgctatgttgttattctgcaatgtgcaagatgcgcttacctgcaacctgcgaggaacttcttaaggctcaaagaaacaaatatagttattctttattattatttttttgaattacattgaagtagttcattctaattggtcaacttgaaattgcaccgtgcatttgtcttccttttaggtgtattaactcattttacatatgtagagtacttgctgatggttaatttattctgtttttctatatcaggtcttgagaaagcttgtgg

SEQ ID NO: 83359 - DNA, 562 bp, Citrus sinensis
  Intron number 1 from transcript orange1.1g030816m (locus o range1.1g030763m.g) derived from phytozome v7.0 (chr-ID sc affold00070; pos 463655 to 464216)
gtactgccatactgcggtcgataattctcaaaggtgcgaactttttcacttgacgattattcgttctgtgttcgttttaacccgtttggtctcctagaaaacgcgagaaagtgattgtaaaatttatcaatttttgttttcaatatctgggtttcccctttcgtctaatccaacaaaaagagaaaggaaagaaactcatctttcagtttcttttaaatcattcctgcactgcttgaggtgaaaaagctagggtttttgtttttttcagttgcacataatcatgtttgtttatacgaagaataattacagttatttgaggaaataaaggatctgatgaagatgggtatttttgttttcatttatttttctcatttcagctaaaaagttataaattcaaatagtagactttctgcgggaagaatacgttaatttgggtttatttgattgacaatttatgattgaaggaattagtttttgtctgataaaccaataacattggttttgaaattaagttctaatacaagcagctacgtttgcaggtgattttctcctcacagtcaag

SEQ ID NO: 83360 - DNA, 246 bp, Citrus sinensis
  Intron number 1 from transcript orange1.1g009996m (locus o range1.1g009925m.g) derived from phytozome v7.0 (chr-ID sc affold00016; pos 109544 to 109789)
gcctttaaagaaaccagaggaagaacaggtagaggtgagctcttttggcttgacgtagtttaaaatctgatatgccagttgatttgttggtttttgctttttctattcaaagaactttaacccctttggaataatgttgaagctgtctcttctgaaatgctatgtgctcccttgttttctgttattgaaactgtcattaattgattttcaggaattacctcgcgaaccttttatccctcttacaaa

SEQ ID NO: 83361 - DNA, 748 bp, Citrus sinensis
  Intron number 1 from transcript orange1.1g035978m (locus o range1.1g035978m.g) derived from phytozome v7.0 (chr-ID sc affold00023; pos 253169 to 253916 reverse strand)
tgagctggattctgtggagcttgaactggataaaggtaatttcatttagcaatgtacggacacacacacacacatatagtttttgtgcttaataatcttcctagagaaacttatttgcatgtctggtcatgaaaagatttcatgctttcctcttagttgtaatgtggttggaatttctagggcaataataaggtggccactaaagtgattatttaaaccaagctttttttttttaattctttattctcaattcatacagtagatttttgcacctactattattgacagatcttagtcatgatgttctgatgccaacactgtaaacgtaataaggtttagatttaaaaagaaaaatgataaatactgaatcaatttgaagtcatattgttgaaaattcacatttgataatttcgatgatcttaatgtatctgataggcaaagccaaccgttttattcatgacttgctactgcaatttattctttataaacggaaaggtgaaagagaaaaatggaaggaataccatattatggttggtaatgatgtaaacaataattggatttctaatttcttttttttttgttaaataagcacagtgcctcctaagttgtatctgcattctgcatatattatcacttgagttctttcggacttgtttctgttctctgtttgaattggcattagttgctcttagacaaatttctataactattgagctccattacaggtggttttgccttaaagaaacaa

SEQ ID NO: 83362 - DNA, 263 bp, Citrus sinensis
  Intron number 1 from transcript orange1.1g025421m (locus o range1.1g025421m.g) derived from phytozome v7.0 (chr-ID sc affold01220; pos 23655 to 23917)
gctcgtaagtattctctctatctaatctattctttgcttggttaataatacatcatatgtctcgtcggcctcaaatacaactaactcaaactcatgttagaacagtgcctaaacgccgaacaagctaagaatcaatcaatctatctatctatccttcttgttttttctcacattttaatattctaccatataacttcgtgcgcgtctggggcgtgtctgtgtgtttagtctcccaggtgactacggattcgacccacttgggc

SEQ ID NO: 83363 - DNA, 663 bp, Citrus sinensis
  Intron number 1 from transcript orange1.1g018623m (locus o range1.1g018623m.g) derived from phytozome v7.0 (chr-ID sc affold00023; pos 1123379 to 1124041 reverse strand)
ccaccagcggaggactgaatcaacaaagaacaggggtaatatatatatatatatatatatattttattaaaattttttaaaagagatttgcggttgaggaacagggaataaaatcattgattgaaatgaggtttatgttattcttaatttttcttttttcccccctgcaaccaatgaaacttagtatactaacttctgttgttttatttccttatatgcttttgtgaagaaaatttaaagtattcttatgagttttagtgttttttttttacataactcagaacactagatgtgtgagggtgcattaattcctaaatggccttttcaattgaatgctctgtacatacatatatatatatatatatatatatattgaatgtagtttttatggctgaagtttattgcttgtgtcatgtaatctactgcaatatccaagtcatcattattggtgtgatatatgctaacttatttgttgtgatattagttgttggtctacgcatatattctttgattttgttataggtctgatgctgactggaatttgtcaggatgttgaataattgcatagatctagaaaacccatgatcatattattatgtgtggagggtggaaatgttggttataatgcaaaatgggttgcacatttttggctgcagattactg

SEQ ID NO: 83364 - DNA, 471 bp, Citrus sinensis
  Intron number 1 from transcript orange1.1g003974m (locus o range1.1g003974m.g) derived from phytozome v7.0 (chr-ID sc affold00588; pos 15729 to 16199)
aagctctcaagagatatcctgatagatacaagtactcctcaaaggttgatttttttttttttcatttttgtcctctttttttctgtaagtgttttttgggttgtgtttcctgaactttgtttttgtgttttaagggtcataagaagaagaaagttgctgcaggggtttcctctattgggtaacttttttcaccatcctttaatgataatttattacttttttatttacttttttttttgaatatttgaaattgtattaggctactctttatggggtatgtttgtgaattgtaactattgcttaattttgaaagcacagcagcataattttactttgcttagttgcttttgtttacttagcaccttcttattttatccaatatcaactttggtttaaaagccacacagccacaatcctaaatatacccagtcttgtgttgattttaatcgttttgtgggcgtagagctttga

SEQ ID NO: 83365 - DNA, 227 bp, Citrus sinensis
  Intron number 4 from transcript orange1.1g013290m (locus o range1.1g012048m.g) derived from phytozome v7.0 (chr-ID sc affold00046; pos 225134 to 225360 reverse strand)
actcttccaaatgtgagttttgattttatcttatggaatcatatcaaatgcacattttaatctactgtattttgttcttctaggtgtttctgatttccctttttatgtgtttagatgatgggtttaggcttacgtaccttggttatgattttcttgcgattaagaccttggtaaatcgtggggtgtttacagctgtaggacgtcaacttggggttggaaaagaatct

SEQ ID NO: 83366 - DNA, 669 bp, Citrus sinensis
  Intron number 1 from transcript orange1.1g024897m (locus o range1.1g024897m.g) derived from phytozome v7.0 (chr-ID sc affold00406; pos 38647 to 39315)
cctataaatctgctcaggtttaatctatttgcactgcgtttatttatttttttattactttgaaatgtggagtatttgttgttttgtgttttaaaattattttagatgctgcattattcattttcttaaggcatgtttgatctaaaattttgtttgattaggatgggcttgtatactgtgactaagcaaaaaggatcagaaatgaatgctaataaggctatgttaagagtttcatttatgcagcaataagcattcatcttattattgaaattactgatggctcatcactaaatgcaggatcctaataacttcatttctttcctccaatttttttgtgctctatttacaattctatcatgtgcggtttgatgcccttttactatgttcttcattttggttctaacgctgtattgaaaaatattttctcttgttgagctctcttgtttattttaactgtatgccgtgacaagtcgaagtataatacccatttattattgttattatttctgtaaaccttattttgtttgaaatgtggtgcatctttctatctgatttctattaatcttagaagttaatgttatgtgtaaaatatgtccatctatttttcttagttgttgccttttgattttgtgtctttattgggtatattatttgatcaggatatcgcaa

SEQ ID NO: 83367 - DNA, 984 bp, Citrus sinensis
  Intron number 1 from transcript orange1.1g033091m (locus o range1.1g033091m.g) derived from phytozome v7.0 (chr-ID sc affold03164; pos 797 to 1780)
attggtggaggaagttttgataatttataaaggtgaggtccagcaaaaagttttggaaattgttgatgtctctcctgaacaagtcagaaaacttttaatttaagctatttttctggtattgtggttgcttttatgtgaaattttcattgttggcctttagttcgttcaaagaagtcacatctgacatttgaccgcaaggttcattatatcagcttttttaactctgttttttcaattttattcttgtctatctgttataatccaaatgtctattggttataataaagtggtggattggagggttactgtaacaacccaaatttattcgaagttgaatttatctatttattttataactacatatgtttattttattattgttgttatcaatgttaatagtccaaatgatttaactgatgatttataataataactgaagtatactacttataccacataggatgaacaaattcctttaatgctttcttttggaataacttgaaatagtccaagttgcatctcatgttcaaaatgaatgaattattatcgttttaatatgtcagaaccttaagcctcatatttatcttttgagttaaataaatgcatcattccaattccataggtttggccaattgagtctggtatgaatcgtaaattctgaagccatgtttgaattagagtataattatttttatactatggttatttcattggttgaacctgaaagtagaatggttctcagcttagatatgaacggaaatggttgtatttgtttggagaaaaagatgggactgttctactttgtggtaattttttttaaatttatatttgctatgggagattatgtgactggtacaatacagtagttctacatgttctataattagtacatgatgtattgtttctcacagccccctcctttgttgatgattaacttgtaacctttgctgatgattaacttgtaatgtgcaggcatatacaaac

SEQ ID NO: 83368 - DNA, 578 bp, Citrus sinensis
  Intron number 2 from transcript orange1.1g041788m (locus o range1.1g041788m.g) derived from phytozome v7.0 (chr-ID sc affold01844; pos 16107 to 16684 reverse strand)
taatcactttgagagtgacgagttcaaggtaacttatcttttgttattaattttaattttgtagaagttatgaatgatttgtttttaaaacaaaaatcttacatgaaggaaagagcaagaaaaaatgttggtaatcgcaaaaaactcaagtacaatcaccgaggtggatcattgtcatttcttggccatcgtgaaaaaaaagtaagttaaagattgtatttacactctaatttggatggtcttacactttctagtttctgatttatgttactatactattaggcaattgttatggaattctagaatgatttgtgtatgtgttaatgcttgagagtagttgataaatctttagacaatttttttttctggatgatattgctgatggtggcctataatgggttgaaattaacttttgaaattattagctgcagattagtatttgtggtttgatgttgattattacttgaataatgatttgtgtttctattctacctctactaaagtgtagatacttgtcttaatttttttttaattttgttgcataataaactagaggaaagccactggagagcaaccta

SEQ ID NO: 83369 - DNA, 243 bp, Citrus sinensis
  Intron number 1 from transcript orange1.1g036733m (locus o range1.1g036733m.g) derived from phytozome v7.0 (chr-ID sc affold00036; pos 328640 to 328882 reverse strand)
cgcgtacttgagcttatcctcaacatactacaaaggtgggaattcttttgaataaaaaaaaaaaaaaggaatctttttgaaattttggaagataaatcacaatgtttatttgtttgaattttataacaaagtttattacacatgatgcatcaaattatttatattctggaatccttactagaagtttttgtacatcatttgttcgttacatctatttttttcttcttattaggaaagacacca

SEQ ID NO: 83370 - DNA, 897 bp, Citrus sinensis
  Intron number 1 from transcript orange1.1g038814m (locus o range1.1g038814m.g) derived from phytozome v7.0 (chr-ID sc affold00168; pos 48241 to 49137)
atcaactggtaaagctttgtaagtaattttcggttcctaatttcaactcttcaattacttttatgtcaatcggaaagtaaccattaaggtccccattcttgctttgtgcttgtttaggattttaatcaaacactcttacagtcaattgatcaaactcaacgcccaactaaaggtctttatgatctggataatagcctctaattctcaactttgtgtcttaatctttcaagtttacaatttcacttattttataaattttctcttgaatttttattttatctactctgctttttcctttcggcttaggtgtatacaatagtaaagacaaattacaaatgacagaatctcataattagagataatggagctgggttggatctagatttttaggcatacagacgacacaaataaagacgggcaatagcctaagatgtgaaaagcatgcttaaggcttgcaataacttttattgttttcatagttcataattattttgtaatattcttttatttgttacaaattctttgtttcttccactgaccatccgagtttgaataacgagaaaaataagaagctagaaaatctatctagattttagcctcccttaaaaacaatctgccggcactagatctttgtggccttatttgagcaacatacattcatggaagcaagatttgtataaagttgaatttcaaatgagaattataattattactgttcttttggtaataaaaaaataatgtagacaagagatttctataaatatgtctttacaaccatttggacaaagaagaaaccgactgttataaaacccgttggacactttatctaccgctcacccaggacatatttgaaaaaatgcaggtaaaatttgttattggtgggttggcccaataccc

SEQ ID NO: 83371 - DNA, 580 bp, Citrus sinensis
  Intron number 2 from transcript orange1.1g046884m (locus o range1.1g046884m.g) derived from phytozome v7.0 (chr-ID sc affold08983; pos 486 to 1065 reverse strand)
gcttggggagatagcaaatcgtgctattggagtaggtggatcttgtcaaaagcagccatctagatggtttgaaacagccatctagatagtcagtatccatgttgttcaaagaagaggaattttgcagcaagttggaaaggaaaaggagcacacgggtttgacatttgaaagaagaaaaaagaacgtaaaaataatatagaattgctgcatagtgccaaagctttctctataaataaaagcgaagagaatgagcaaaggcattccatttagagagcaatttagggagttgagagagagtttaagagcttatatttataagctcttgttatagtgatttgagagtttgggtgtattggggttttgggtagtgagctaaaatactacaatacttgtaactccttttcactagtaaaatatttccttctatgttcgcctgtggacgtaggctaaaagccgaaccacgtaattttcttgtgtcctctattgtgcttgttctttattgtttctaccaatttcaacttagctgtgtgtctgctttacccaccaatttcctaacagatcttctcatcgcaacatagaa

SEQ ID NO: 83372 - DNA, 326 bp, Citrus sinensis
  Intron number 1 from transcript orange1.1g017448m (locus o range1.1g017448m.g) derived from phytozome v7.0 (chr-ID sc affold00880; pos 17485 to 17810)
gggccgttcaatctctctcacaggttttctgtatatataaactctctctttctcttcacacacagagaaaatttagagatcaatttcggatttatttgttaattttttatccctttttttttggtttcttctaatcgtatgagaggacactgatttttttttaaagaatctcggttcagtgggagaaaattttagtcgtaattaaatgtcaattggatgtagtttattatttttttttgagatttgattttgattaacataaaatattggatttgttattaatttttgcagaatagtgttggctccactcacaagaaatagatcat

SEQ ID NO: 83373 - DNA, 793 bp, Citrus sinensis
  Intron number 1 from transcript orange1.1g046205m (locus o range1.1g046205m.g) derived from phytozome v7.0 (chr-ID sc affold00034; pos 249616 to 250408 reverse strand)
gccagaagcctggaacttctggtctccgtaagaaggtaattgattcctgattattgattttgtgtcggatatatcggtattttctatgatttccgaaatcaatttgttaatctaatcgaatctgatcaacggttacggtcagctgatttcatgcatagtgttgtattgaatcagagcttagttgagactgataatattttgttaaagattcgtgtagattcaattgtcgctggaacttttacagtgctgaattatttgatcaattgttttcttttttttcttttaattaaagttgtcttggctcttgtacttattaattactattcagaagagctaatgcattattattcagattttgtgtttcctttagatctaatctatacttcattttttttttggcttataaatttgattatgtaatgaagtatctgctggcgctggtgtttgatgacgcttaccagaagattgtttttgcatgatctaattatttgttcggtttggtattggatctgtttgccatacattatccatcatctctgaaattgttttttaatttgaatgagttcatgttatgaattttaaggagccaatttaattggataattaatgaagatatcattattagacactactcaattagaaattggatgatgtaagatgtctttttatcttccaagaatattctctttcatagcatgtggttgtgaagggggcctttttctttttgattttaacttatattggctgaatctttttaggtgaaagtgtttacgcaaccaaattaccttcacaa

SEQ ID NO: 83374 - DNA, 794 bp, Citrus sinensis
  Intron number 2 from transcript orange1.1g004732m (locus o range1.1g004400m.g) derived from phytozome v7.0 (chr-ID sc affold00609; pos 63294 to 64087)
ccaaaattggccgaactgactttcctccaagatatgtaagcacttctccattccaattttacccttcattaactgtaaatttttccattagacatttacatatgttcattttgttatatatataattaacgaaattaattaactgtctgacatgaacagtgatctcactctcaactaccttagtggcactatcccctcacaatgggcctctctgccacttcttaatatgtatgtcatactttttcttttctttattatatagtgtacttatgaaaattctctaatgcggagggtttttgctgggtcttactaataagtcatttcatttgtaacttacatcaattcaaaatcagttattaatcaaaatgaaaagtttgttatcaaacacttaggggtcttgagaaactaattttgagtcaactgtaagttacaaaaaaataacttagcagctgtctattttttgctaaatcatatataagtaactacgggagattgataacatatataataaagaatttgagatgaacctttaatatttttttaaacccttacttatcaactaaatcttttaaattaaatattttttaaaatatagtatcagagttaatgtctcattcatcccacctgcaacatccttcaattcgtagctcaatttctggttatcatgcttcatgaatgtaaacgtgatgtttattttaaatttagatgaacggaagatattttacatttaaactaacacatatgggattcttgtttcagttccctcatagcaaaccggctaaagggtccaatcc

SEQ ID NO: 83375 - DNA, 999 bp, Citrus sinensis; identical to SEQ ID NO: 78447
  Intron number 1 from transcript orange1.1g029534m (locus o range1.1g029518m.g) derived from phytozome v7.0 (chr-ID sc affold00005; pos 207437 to 208435 reverse strand)

SEQ ID NO: 83376 - DNA, 1001 bp, Citrus sinensis
  Intron number 1 from transcript orange1.1g005108m (locus o range1.1g005108m.g) derived from phytozome v7.0 (chr-ID sc affold00260; pos 14340 to 15340 reverse strand)
agggctcatcaacgtttgggttctttgcttgtaaggtgagagtctgaggaaagttggtttggttaggggttttgtgcttgtttttgtgataatgttggcttgatttttgaggtgtttgtgtaatcttgatgatcttttgatctacatttggtcatttttattgatgttttgagctacattggcgagaatggttgatgtttgaaataaatctgtgcttttggataatttgttgattgtattgatattgataatgcctggtttttatctgtgggaatgtgtggttttcattgacttaagctgaaatggttagtcatatcacgaatcttattccgttagatgttgagtatgatgaaaataatttgctgggtcaatgtgagtaaagcgatggttatttgttcctttctatgttgttgtgtatggctgaatggagttagttttggcttttgcttttgagtttattgctaagatgctggatttgcagaaactttggcattgttggtgggttaatagaagttctgttgatagttgatgtgctttggctaaaagttttagtggttatttgttggattttaaggtctggttcatgtgtcggtgttagctaatgacacttttttgtcttttgctcttgtaatactcacatctgcgatcttaatctaatctactgtttttcttttcaatccttttttcttttgttcgtagcttgactgcacaaggttacctggatttcttatttaaaaggcttcgttcttttggtgactctggttctcattatgacttcatgatctctcatcttttatggcaatttgatctccattgtctcagtctttggatagactatctgatttgggttcattgatctcagtcttgttcttgttatcgtagtttagcctagttggatctcggtttcttcatcaagccctaagctgcacaaaatcaaattcacataaaagttttggctgcatctttaactgcattttgtcacaggttagggcaagttgaaa

SEQ ID NO: 83377 - DNA, 591 bp, Citrus sinensis
  Intron number 1 from transcript orange1.1g026406m (locus o range1.1g026416m.g) derived from phytozome v7.0 (chr-ID sc affold00016; pos 877779 to 878369 reverse strand)
gctggtctcttaccgtatactatttgctactgcttactaattcatttgtttatttgttctgtgaaaagtgacaatcatgaacatactaagctcccatatttcaatttcttacgatattggtggaatctgttattgattatgcaattcactttggtacgtatatattttagtaatcttttgtgcaaagatttgctttttcgaatttaaacatgtcccggatgtcgtgaaaaaatgactaaagtatttcaactgatgttgtttacattatggtgagtaacattgtcacgtaatgattcatagttaatccacaacatcaattttcttttctcaaaggtgttacagaattatgtcatttgtttagttgctcactagaattgtgctgcgtagttcctcactagattattttatgcgtgtggatattaaaaaggtgctggacttgtgaaccgggttgtctatttggctgttttagcctaatacccccttttatttttttaagttgaaatatgttgtgctgtgttctgattcactgtgagcatggttctctgtggttatgcagggacaagattacatatttgttagggagtttgtcgc

SEQ ID NO: 83378 - DNA, 707 bp, Citrus sinensis
  Intron number 1 from transcript orange1.1g006850m (locus o range1.1g006850m.g) derived from phytozome v7.0 (chr-ID sc affold00074; pos 114659 to 115365 reverse strand)
agtttatcaaggtttgatttctttaaatattgatttcttaaacattcttttaatttggtttacatattgtttgtttgaatgaagacattaattttaactatgatatgttctgcccatgtgatttaatataagctgcttgattaatatttatgtttgcttgcactaacttatttgcagtgttattgaatattatacttcagttacttttctgtgaactcaacttgttgcttcttttggtcagcaagtatttgtatgtgctactgtatatatgtgggtgggaaggccccaagggtttggtcgagtggttttcaagaagctttatttatcttgccacagggttggaatcttagcagagataaagggtaaaatattgaatttgtgctttgcacacacctttaccttttagaagtataaatatgtgggtgggaagaatattctgtcctctaaaaacttcttttacttctgtttctttgtcattttccgtttttgatcacatagatggtaccatgtcaattatttgaattgatggtcttctttatatttttccttgtgtcattgaataatgattcaatttttagttctgtggctactctccttgaccaatttcaattggtgggaattttcaagttattcttgagttgagttgttgatttagaactatcttcttctcaggtggcagcacctccagtgactttggggagggctgc

SEQ ID NO: 83379 - DNA, 426 bp, Citrus sinensis
  Intron number 1 from transcript orange1.1g011168m (locus o range1.1g011168m.g) derived from phytozome v7.0 (chr-ID sc affold00036; pos 773791 to 774216 reverse strand)
acgtccaaagtccaaacccctcttctttttcctctgtaagttcctcgttcttgttaacgttttctgtaccgtcttatcttttggcaaaggatatacacgtgtcagtctttggtggataaatgatgtaatatttttgctttttatcttgttcatgcttgttttggttggggtactaaggtttgtgatgtgggttccttggtttttgatcattggtttatagtttaatgacaaacttgtgtgaatgcattagttaagtttgctttcttctttttttttttttttataatgataaattaacaattagagaaaaatttgtagctgattagtgatcatgatatggatacaatctcaatatgccatcttgctattattgctgaaacgtttgtaacagcatctgcagtattatctatatacacagagtttgga

SEQ ID NO: 83380 - DNA, 1026 bp, Citrus sinensis
  Intron number 1 from transcript orange1.1g022820m (locus o range1.1g022820m.g) derived from phytozome v7.0 (chr-ID sc affold00007; pos 2293769 to 2294794 reverse strand)
ctcagataatctggttttggaaggtatgtgcttgttctattgctttctccataaattactaattcttttgtgccttcttcacctattcacccccttccttgctcaattttcccatcatatatatatatatatatatacacctgcaaaaagcattttgcgatgtagattgtgtaccatatactgcaagttagttgaatcttctttgtctgtataaatcgctactatcagttttttttgccctcttctgaagttaattcttgaaatttttattgtttacctttctcccctattatgtgcataggctgagtggtaaatggaatcttcttctgcatgttacagatctgggttgctggttataccttctaaattctaataattttgtaccttctaaacgggtgtcagagaaattctagacttcatttgcggatttgtcattttaccatgtacatcatagaggcatttacacataaaattatattgatgtgggctacaagcactaggataatagacttgacatcgattctatcacattagcttcatcttcatcgtgtttgcgagtgtgaaattaatttactttaatttaagatgcttaaaaagtatagatgtgacattttgggtcaaggaacatcctgcagtatcggttgtttgcctctttcccttgtagaggtgggtaggtgcattggcatgcacactagaggattgccaatccattagtgtgattgacatgtattgaggattgagctgtactacacagaaagctcagttgattattctgatcaactagtcacaatgaaaaatgagaattcaaggatggctatagtgacaatccaccaagcatttttcccttcttgtgtcatcatgacttgaatgacaagaaaggaaaaagaagaaaagccaaaaaatattacccatctttgctgtatttgatctttgaattttcagcaaattgagaaacagcgattgttattaatatgttatgaaagtatgatcttttctggtttaaaatatgttcagattgttggagaa

SEQ ID NO: 83381 - DNA, 430 bp, Citrus sinensis
  Intron number 2 from transcript orange1.1g041102m (locus o range1.1g041102m.g) derived from phytozome v7.0 (chr-ID sc affold00003; pos 1758873 to 1759302 reverse strand)
gggtaagcttacgatcacagcttattaagtgctagaaaatactcagatttttttttttttaaattgtagtgcaaaatcatttgaatctactgtttgatgtctaatttatattgcagatggagtgcttaatgtccaaacaactagtaagtttcactattttttggtaactttgctttgattttatagatattttaggtattcttcattgtgcccctattgagcttgcttatgatgtgcgagcacacaagcatgcagatgttgcactaatcagctcaacatttatgaagttttgccatggtcaatgttgtttgtttattgtaggtgttcagctactacagaaaaattaatttgatttctgacattcttttacattcttcattagcattttctttcagcattactaacatcttttcgggagattgcagacatt

SEQ ID NO: 83382 - DNA, 187 bp, Citrus sinensis
  Intron number 2 from transcript orange1.1g012284m (locus o range1.1g012284m.g) derived from phytozome v7.0 (chr-ID sc affold00538; pos 53087 to 53273 reverse strand)
tttgtgaaccacacaagctaccttgaccggagagagtatgatttgatttattcacgtttcatatttgtatttctgctttgtttttttaattatttttcttgtcggccgctcacaatgaagcaattttttttaagtaaacgaaggttagtgatatgagtctggtttgtttttttgtagttcgagtaga

SEQ ID NO: 83383 - DNA, 858 bp, Citrus sinensis
  Intron number 1 from transcript orange1.1g045648m (locus o range1.1g045648m.g) derived from phytozome v7.0 (chr-ID sc affold03312; pos 1790 to 2647)
aagattgaggccaagcacatttcttgtaacaatatcacacgttactccatcccatgagcagcaatcggttccttccttccaagagattgtcttaggataagaaattcctaaacaaaaagaggaacgtgctcgatcattacgaacatatgtgctatttttaaattgaagcaaagctaaactttgttcctgagggcataaatgaaatgatgatgaaaaattcaattgaaaataaccaaataaaaaagacaaagaagaggaaaaagagaccggggacttgattatgccatgcaaacctcttcatcatttttaagtgtttaatataaagacactgacaagtacttacatataatatttgaggtagatgacatgaatttatatgcattccatggacagagtatctttggtctttaagggcctgtttggtagcatttttgggccagtgttttcattttcattttcggattactgatataatatgcgtttggttgatgcgtttggttgattgaatccaaaaacaaattacaaaataagaaatccaaattcactttttataactagtaaagtaaaaacatgtttaacatgttctctgcttattacaaaaccgaactcaaaaacaaattaaaaaataaaagccaacaaaaaatctcattcacgaactcacggtgctctctctccatcctttcctgatctactcacagtgtcctctctcccccctttcttaatctgctcacaacgaagctctctctctctctccttatctttgccaatctacacacaacagcaagctctctgtcattttctctccagatctgatctttctcagtttgcccatctcggttgctgcacttcatctctggc

SEQ ID NO: 83384 - DNA, 496 bp, Citrus sinensis
  Intron number 2 from transcript orange1.1g003726m (locus o range1.1g003726m.g) derived from phytozome v7.0 (chr-ID sc affold00016; pos 367403 to 367898 reverse strand)
aaagttctgcaatctgcccaggtgaatctctggctccacttaaataataattttcacagaaatggtaaagataaaatctctttaacttctatactgtaattgcagcttgctaccaaactctaaacacttttgagttgttgttgccttaattgtgcttctctattgtaaccttttggtgtctctaacgttactttcctttgaatgtttttttaatgcaaggcaagtgtttctccaaaaaaaaaaacatttttagtgcccgtttgtgccaaatctgtttctcactttttgagctcagatctgcaattagacacagaactgtttttttttttcagtacctcttattgcgtctgttgtgtttgcgttcccattcagcttcagttgtttatgaattcccaaatacatttgcggtggtttttctttcattctgttcttctaatctcattgttgatttgttcttataggaagccattattcttcctccatttgtggttttagc

SEQ ID NO: 83385 - DNA, 484 bp, Citrus sinensis
  Intron number 1 from transcript orange1.1g041918m (locus o range1.1g041918m.g) derived from phytozome v7.0 (chr-ID sc affold00026; pos 572897 to 573380 reverse strand)
gcgctcgaagctgatattcagcacgccaacacactgtaactctctcaattcctggattttttttttattatcgatcaaattttaaattttattttctaagtactttttttttttgtttatttaggtgtctttatatttgttaattaatcacgatatcattttgctcttcaaacatgcgcgttttagatttttttttttcgttcacttgcgacattattattcaagtaaaaatcgcaacttttgttcttataaaatttggttctttgaatgtttttgacgcataaaaagtattaattgtattcatgtttaaaatttaatcttttagttgaaactttgcattaaaggtacaatctcggttgattttcacctttgttaaacagtttttagtatttggagttattggttttgtatatttgctaattgaggattgtgctttttgtttctcttgttattcgcagggcattagattacccgagggagacgg

SEQ ID NO: 83386 - DNA, 772 bp, Citrus sinensis
  Intron number 1 from transcript orange1.1g040924m (locus o range1.1g040924m.g) derived from phytozome v7.0 (chr-ID sc affold01430; pos 23711 to 24482)
aagtttcaagaatgattgaaaagatttcaaaattagttgttgcttctaagcccgtaaacttaagtgaggtaatgatgtctcttactagcaccattgtagtgattgaacgtgcttatagccttgcaagtgacaaccacttcccaggatctctaaccaggttttaacaagttgcacaatgagaagattaaacccagaaagaatcaattgacacaagaacaatattcagtgaaacaaaggatcaggaaactaaagaaaacagaatcaatcacagccaacacaaagaacaattacgtggttcagttgcaccaagaatggcacagcctacatccacgggagaagctttctggagagcttttattgaacaacaatggaggagcttttacacagcttacacacaagactacagagagcaatttttcactctccctaatctctctcttgacttgttttctcacacaattgaatcaaaactgttacaccagtcagttttatagctaccagaacaacaaaccagcaacccagaatgcacagcttgttgacacgtagtataacggctttaccgaactggcttaagcgagatcacgtgaccatcacgtgtatcacttaaagtttggtttaaacgacatagatacactgccgttttgaagctcggtattattaagcaaacaaacacgtgctctccccgtgacctttaatgcataaaatataacgcaccaaaacgctgacgttttatgtagtttgattcaccagcaagcctcccggccattatttg

SEQ ID NO: 83387 - DNA, 764 bp, Citrus sinensis
  Intron number 1 from transcript orange1.1g031289m (locus o range1.1g025518m.g) derived from phytozome v7.0 (chr-ID sc affold00024; pos 224290 to 225053 reverse strand)
atatcgtaagctttcgcagtttcagtatttgtcgctatcatttttcttaaattcataataatttgtaatttgactatcaggttatcccttcattacggcaaatgggaattggccggatgatagttcaaagaatcttaaggtttgttaattttcaatataataaatttctttctttctttctttttgtctgaaaaatgattcttttaaaattattattttggaaattttgaattaacaagcttgtggacattgagcattgatgcccttactctaattgatgctattttgaactctgccttttcatgtgttttctcatggcatatgttttccaggacacacagtaatacaaaatgtttcttcaattctttaagcctattgattactaggagattctattcatacaccttgcttgtccgtttatggtatcttagtaatttacccatttctcctcccagaatgctcacaagtagagagatttatgacatagcagccctttgctcagaggaggagaggtatttataacttatctttcttgaatcttgaaatcttaatgtttctgtctagatgtgttttctatgttattattaaatcttttttgaatatgcaagcatctacttgaaatttaccctagtatccttttactctgtcaaattgttgaggctgtagattgcttcatgtctggattactcaatgcaattacatggaaagacaaataactgctgatcatgatctatatggtctttcgtcaggctcttctttgaagc

SEQ ID NO: 83388 - DNA, 634 bp, Citrus sinensis
  Intron number 2 from transcript orange1.1g021241m (locus o range1.1g021241m.g) derived from phytozome v7.0 (chr-ID sc affold00280; pos 112982 to 113615 reverse strand)
aaaaggaggtaaacacactgtattattcttgcaaatttgttgttgttcatcctatgtcattgtcactacaaaacgattttcatcaccccattttcctataatctttatgagatatatttatagttatatatacttttttacttttctttgggtactctgctcagcacctatctatttttgtttctgtttactaaagctagacgtccgccttttcttttcttttttttttttttttgaatctctaatgcttactatgttgtatttcatgttgattgtgactttttatatgaattaatgcaaaagatgatttgtacatcatataacgatttcactgcaagtgcttgagatcagtttctccataatttgtgttcgccatgattaaattatgattgtccattctcatcccacaaaaaaagtgtgttgttctttttggggggggggtgttttttgaatgtgttccaagagctgctatcttgcttcttactattgtgatattttatagttgatggtgagaaaatgcttaactattcctgttgggggaaaaaagcactcaactgttgcaagcactgtatttaattctgaccttatctttctttatcacagattggtttggtgctgaagaagttttttgaag

SEQ ID NO: 83389 - DNA, 659 bp, Citrus sinensis
  Intron number 1 from transcript orange1.1g033020m (locus o range1.1g033020m.g) derived from phytozome v7.0 (chr-ID sc affold00405; pos 76305 to 76963)
gttaccttcaacttccaactgtaatagcatcttgggtatgtatttggtgaactgccttatgtttggtttgaatcagctttattttattttattttcagctcgtggtttgattcattaagcatgtgtgtgcataaattgtttaaagatgccgtgagaaacaattgaaaaattggcataaatcttgttttcaaaggggaagaagaataaaagagaagagattgattaggttaggagaaaataaattgaagttggcttgaattcaacttcagtattaacgaaataaaaggttaactaatcaataaaagctaggacgaaaataaaagcttctaagattaacaaaataaaagagaaggttaggtttttgtttatactaggaatcgttgtgtaatgggggcgcgatagagttaggagaaaaggttaggtttttcttctttttaatttccatgttatgcttgtgctctgccatcaaaattcaatgtttcagattaaagttagggttttgagttttctgtagcattcttttttaagaaattattgctgttataaaattggcataatttagttatctgtgtagtgagttatattctatttgaatttgattgctgaatcgaagttgattttcggataggtttcaaaggaagaaacttagtacatataag

SEQ ID NO: 83390 - DNA, 646 bp, Citrus sinensis
  Intron number 3 from transcript orange1.1g037140m (locus o range1.1g037140m.g) derived from phytozome v7.0 (chr-ID sc affold00044; pos 590104 to 590749 reverse strand)
cgtggacattcctggtggcactaaccccgctcaaggtgaaaacggatagctataacattttttctttttattctttccatggtaaagtttatgcatgaaaaagaaaattgttcttgaaaccatttctttctttaaaattttccggaatattatttttgttattattgttcctaattttgggttatttctaaatgcatgcatgcatgcaagttagtgcaaaaatttctcacgcgttacatcacatcgacgatattgtgcccattttcttgaagtaagccagtacccaacgggtgttaaacattagtcactagccgcaaattctctcaaatgactgatacaactcttctgtgtgttgcacatcacacgtgtcacccatgaaattatccccaccacgtgctgacgaaggattttggagaacgtccagtggatggcgccacgtccaggccacttgtacagatgatgagtgttattactggacactcgtctggcttctctgtctccacgtggcatccatgtagagacacacgagtcaaccaagagtggggaaaaaataaagcaaattcggactaacgtaactttgtaatatgtttcgatgtgttaaattttactgtctaaatattcattgcttgctgtttgtaatgtaggg

SEQ ID NO: 83391 - DNA, 867 bp, Citrus sinensis
  Intron number 2 from transcript orange1.1g021997m (locus o range1.1g019889m.g) derived from phytozome v7.0 (chr-ID sc affold00044; pos 104870 to 105736)
ttatttcagctggcttaccacgtgagttggtgtgtttgctggtggttgcatttattaattctttggacagcgtttgattttttattattattattattattattattattattattatctttgtaacgtttttcagttggatgtcaaagctgccaaaaaagccatacttgatggtaaaaacaaaaaatgatgaaatcttttcatttttgcttcttttgtttattaattttacttgaactattttatacattttttttggggtttgtaatgtaggttttcggaaaacggatgaatctcttcttcaagaaagtgtttcaggtaaaatggaatacttgaattgccaactcttaaagttaatgtttctattctttcaagcaatgctaattggttgtgtttaagggatcctcagagcaataagttgtgtatgctaatgcctacctatgaaactgatgcacatgaaaatttagagtaggaataagaactatggcttcacaaactgcttggtcgatgatactatatggtgcatttgaagtgatgtgggaaagagtcatgtgattggagtaattggtctaaagattttcattaatgttactagtaaataaactactttcaccttataatgccggcctctcaatgccttgtaattctattctcttgttatgatttaattatttagttttgatacatgtatgatataaacttcatatggggtttctcattattacaacataagatgttttaactgtcatccttttcactatttttcttcttttgtaaaaaatgtcttcttcctatttgttatcaattatagatactagaaaacaatgagtcacttctcgttgctggtttcacgctcttattaggagg

SEQ ID NO: 83392 - DNA, 773 bp, Citrus sinensis
  Intron number 1 from transcript orange1.1g043283m (locus o range1.1g043283m.g) derived from phytozome v7.0 (chr-ID sc affold00194; pos 260647 to 261419 reverse strand)
gcaagctcttctgcttttctgggtcagtatatcttaaattcttattgaatttgagctaactgaagaataaagatgaaaacttattcacttgtgaagcaacaaaaatagagctgtacgatatacattgtgagtttttcttttcatgacataaatgtgcaggccctagtgttggttagataatctgaccagtgaagatttagctatctgaaacatgatcacaagctatcacttatagcgaaatcttttctggtgtcaatgacattccttgctgatttaagcaacatttcttgcgattaactcacaaaaagtgaattaacaattacttttgatttaacccagtttctactctgtttttatagaactggttttggaaacgtggatgtctatgtatgagactcgtggaaacttgggaccttggtgccctctttgtgaaattatgatagcaatgcgcccttagtatatatatatatatatatatttttttttaaacttccattaggacttctccaaatggagctttgtaaggcattcaatcttaaatgtcttcaaataaatcaactaatacaatatataaaatagtaggcttcttggtaatggaaatgaaaaaagggcaatctgactgcgttaactagaataactaatgtcctgagagttagacaactgcttctttctggttgactactaaatgattattttagtcaattagtttccttctgatcgttttgtctgtggaatttgatgttttcttttgaattgttatcatgtaaaccaga

SEQ ID NO: 83393 - DNA, 612 bp, Citrus sinensis
  Intron number 2 from transcript orange1.1g021498m (locus o range1.1g021498m.g) derived from phytozome v7.0 (chr-ID sc affold00197; pos 104599 to 105210 reverse strand)
gtcattgatctgcacgctcaactcggcaacaggttcaatcagttttcccaataatctctatttttcattattttccattttcggtttatagatttatcctttctttggttaagtttttcttctaccgactcttgtgtcaaaagatgacggcaaaaattaaattagagtcacaaattgatgtattgagttatgtcattagaactttgattgactttcctaccatttcatgagaaccacacgactgtcgaaattgaagaatgagtcccatgcactagttggcctttttttttcctaacttatcatttatatattaactattagctgtcagtccccactagccattgtctcgtttttttggctgggattaattgatttttctttcaaaatatacataagccaaatttgtcctccagcagcacaatttgcataattttttttttcttttgaatttactgctttgaaaaaaatttctgatgacatggacttttctagtggtcataaaaaatcaattttttttctttggtgtaaacttaatgttcatagtgtttacatacaagatgtaaccaaacaataaaattaaaacgtgtgtatttttttttctcttatttacag

SEQ ID NO: 83394 - DNA, 527 bp, Citrus sinensis
  Intron number 1 from transcript orange1.1g021498m (locus o range1.1g021498m.g) derived from phytozome v7.0 (chr-ID sc affold00197; pos 105274 to 105800 reverse strand)
ctgctggagagctgttcccaagcttgcaggtctctgattgatcatcagctctttcagcatatatagactcatctttcgcagcttcattttgagctctttctttcatttgatatttcttgaattttgattctttgcctttcattctttgttgttttgtcgaagagtgggtaataatatattttcttctttaagggaaaaagaaaattaacccacttagattaaggagaagggctccttttatttccatttttctttatgataattttaatctttggctttggaagaatggacatgattgatgttggcacaatgatgaaagacgactgaatcattgtcaacaaaggctgatcactgaaattgttttcattgttttcttaaaacaaataaatgtcaaacaccaattaattatttgttttttttttatttaaccagatatatttactctaaattaaagtcttaaatattgaacggagttatgatgggtgattgcaggtttgttaaggtgtggaaaaagctgccggcttagg

SEQ ID NO: 83395 - DNA, 798 bp, Citrus sinensis
  Intron number 1 from transcript orange1.1g011028m (locus o range1.1g011028m.g) derived from phytozome v7.0 (chr-ID sc affold00162; pos 14161 to 14958 reverse strand)
tttacagtaggaaattcactagagttgctttgcaggtaacatatattagtattttattttcttcatttttttttcatttttttaaaccctagtaaaatctcgggtttctaattttaaagaaatttggttatttgcttttttattttaaatatttggctttgccttttaaacaatggaagataaaggtttatttttgttagtttaaataaagaattttgaagtagctttgtttagcatgattgaattttctaggcagcaaaacagagattttcctggaaactcaatccataagaaaaagagatgagaattaaaagcttgactcgcatgccaaggataaacttttattagtttagaccagttgataagtttatttatgattctttttttttttggttgattcaactattgagattaaattcattagtatgttactaatccatgcttaatatcgcattagtaacaatcatgcagcaataagatccataaacttttatcgctgattcaataggacggctaagtatctctgaggcttggcagtcatgggagtacgcttgcaagtataaaatccaatatttagttttacgaatcaaattattgtataaataaataaaattggtgtaatcttaactcatatgtgtatatttatttaagtaatcatgcaagcatgtttaaaggtgtctggggatcctgaggattagaatttctattgatttattaattaatttccttgtttttatttaatttaagcttttagtgattttagtttccagataatttattgaaggattcaataagaat

SEQ ID NO: 83396 - DNA, 973 bp, Citrus sinensis
  Intron number 4 from transcript orange1.1g015707m (locus o range1.1g015707m.g) derived from phytozome v7.0 (chr-ID sc affold00065; pos 237069 to 238041)
tcagcaggactccattaccagccagctcaatgtatgtcgttcttcatttcactcttcttctctgctctgattcataaatatttgatactgaaaattgaaaaattgaggcggtctggcgatgagtactgttggtatttgttaagacacattaatcgtgttttggtatctcatcttaatgtttaggttgccttgttaaatcttatccgtatgggggataagaccggtatgcccatggtgcttttagtctttttgagtacaataattccacctcgtagctgaaagtataatagcacccagaagcatttcttgactcttgagtcaagtgaaataatatttgttaactcctatctgctagaatattatttttggccatggcgtttggaaacacttttcacccactcttggttgatcaaaatggaatgtgttagaggtgcattgagacttttatactacctggtctgcacatattttctaattggaaatctgttctttagcaaatgtggtgaatggtaatagtggagttctgatgcaagcctctgccaattcatgtagaaaagtctcctctcagtggaaataattcagaaaaatttggcattgcagattagaataataatcttggcttataaagcactgccagcatgctttgtttataatacaagcatcacattcttgttcatttctttaccaataatgacaattctatagaagctttctaacaatgccactttattctgttttgctttcagcaaattctcttccagtaattgaaaatgagaaaaaaaattataataaaaagagaaataagattttctaacatcaatcaactgaaacaatcgagcagtacttttatcgcattggttaggcaatggcagaatggacagacatcataacaaattttggttgattaatttgttctttgatcctctgttattttataataaactcagttcaaaatttttttctctcttgcaga

SEQ ID NO: 83397 - DNA, 626 bp, Citrus sinensis
  Intron number 2 from transcript orange1.1g026646m (locus o range1.1g026646m.g) derived from phytozome v7.0 (chr-ID sc affold00064; pos 543633 to 544258 reverse strand)
ggcccaaaggaagttgaagctggctcccgaaaaaggtaaaaatctcttcctctctctccctttgtgcagtttgatatttcagactaggctgactttatttacagtgcagtaagtagttcatgcttcaaattcgggttctgtaaaatcaatagtatggaattatggaggttaacaatttgtgtactgtgacagatgatcggtggaaatgagaaaataatttagctagggaagtatgagatttgtataagttttagccttgatgtcttggagatgccattgacattaatggaggctgcttatgccagttgggctactaacaaggaacaagtcaaatttctgtatttttcatatggaattacatataactgtttcagagtaagctaacctttaagcacaattgtttaaatggatatagaactacttacttacagtgctacttacttgtgaatcagtgtgagtacatatttacgtatgtatgagtttttgtgattgtactaacaatagttttttttgagtttaactgtaattgcttagatctcaaggaatttgattattcttgatttttttaatcaaatctttgtcccttaatttatttgtaaataattttacaggttgaggtctgaatc

SEQ ID NO: 83398 - DNA, 450 bp, Citrus sinensis
  Intron number 1 from transcript orange1.1g026646m (locus o range1.1g026646m.g) derived from phytozome v7.0 (chr-ID sc affold00064; pos 544261 to 544710 reverse strand)
gccgcccccgccgttaacgcgtcctctgctgcaaggtaagcttaagccttttttggtgaaacttcgtttttctgtttggttattgagaaagtaataacagaacataaaaatacatattgattcttgaatttctggtttttttttttttttgttgagagattttttctcattgtatatgcttattagttttgttggacaattgacgaatattagagatgaagaattaacttttcatacaattagcaaaagtgaaaatgagcacttttgatttgatagagggatagcaattcgatcattatagcatccaggaggaggaacaaaaaataaaccatgtaattttttgttttctagaataattgtgtgtgtgtgtgtgttttttttttctcattctttatttgtacgtgctgttgatttccagtgtgacgattgactgctcatttggtgattcag

SEQ ID NO: 83399 - DNA, 894 bp, Citrus sinensis
  Intron number 1 from transcript orange1.1g039069m (locus o range1.1g039069m.g) derived from phytozome v7.0 (chr-ID sc affold00285; pos 215717 to 216610 reverse strand)
cattttttcgttttctctattcctcctggtatgttgaaagaattcttgccatattctcattgtgcttgaatatctaagtgggctgtcaaaatcatttctgtgataattttcctatctgtatcttttgtcatattctgaacattattttgtttcgtaaaatgatgaatataattttcagaggatttgcacgttactgatttattgggtcctaagattccttgaaaatgaattatcatggtgttgatgattcaaaaatgggtcccagattttcactgcagtaactctgacatttgattttgttcctgtttgatattatgttcttataatgtttatcaataatagttgatgcaacattagagtccctgtgaagcacatttacgcttacattagtcattgtattttaaaaatactcagtgcatctagtttgtttattctgttttaattcttataaagactatttcctgagaaatagctttcaggcatttgactcaagctatggtgagtttgattttccagctgaactatcttctggtctgtggttctacctatagttcttccaatgtcataattgtccacattgatggtaactgaggcttgaaacacaaaagaaatgactcggtatctaaactctggttttgtaaaagaacccttggacagaggaaagagagtcttacatggtttatatgcttgttctgaaagagagaaccttgtttcttgatttgcatgataaatggtagttgatccaatttttgctttggtagaacaagatggtccaagttacctttcagttattttctgcattttcaaccgtcctggcttaccttgtttgacttattgattcttccatatcctaatgcagctttgaagaggaagatttgaagaagtttgttctcc

SEQ ID NO: 83400 - DNA, 973 bp, Citrus sinensis
  Intron number 4 from transcript orange1.1g030845m (locus o range1.1g030845m.g) derived from phytozome v7.0 (chr-ID sc affold00022; pos 1366903 to 1367875 reverse strand)
ctagatacaaggctgaatatccaatctttcaaaaggtacactatctggttttttgcctcctgtggctctcaatcttgtcttgtttccaaaataaacatttttcttttgaaggtccttgatatagttatagaattatttgatgactaatcattaaattctttattgggatttgattctttttttttttttttccctttcccttctgaggatgttctgtttttgttaatgacttgcaaactgtttttttttcttgttctgaagtctgttatttgagtatgtgctaaatgtgttggtaaaacattgttgtttctggtgagcaatgattcactaaaagcccaatgatcaaaccttactctgaagtggggactagaaaaagtctctttgcctttaaagcatatcaaaattttatttgatggaagaacaagtagttggttcataatgaaatccattcaacttttgcatcagagaagaggttctaattatgccaaatcacgagagttacagtagtcatgagttttcaccttgaaacttttggtatgtctactgtcgaaaatgtattatgattttagttgatttcatcttttgttagttacaagttcagcagttagtatttccttctacattgttgacaactaattttctacttcagatctagaaaattgaattctcttattcattctttctggctgatgttggcctttagtgaggaaaaagctcaatcattgttttttcaagaaagtctactgtttttgccatatctcttattaggttaaagtatttccagatatgtaaaaggcttttcacttcaccgtatgttattatataaaactttagctagtttgtacaccgatagctgtattttctgcacttactcttcaagtctgtttagtgctctattctttgtcagaaagtacctctgttttctggtaattgatataatatgttcatttccataatgtttaggtacgcgtca

SEQ ID NO: 83401 - DNA, 653 bp, Citrus sinensis
  Intron number 1 from transcript orange1.1g033478m (locus o range1.1g033096m.g) derived from phytozome v7.0 (chr-ID sc affold00010; pos 2152834 to 2153486 reverse strand)
cattcctccgccgttaccggtgccttcaccttccggtcagttaccatacccattatgtagttctgtttatgtgcgtatttatgtgaactggtgagatttatatataatttgtattttatttttaaataccccgaagaaaaatgtttttattgaatcatcagccggaagccgttaacatttaggtatagtgttgtttactttcatttgaggttctggcttgtttaaagggttttggcttttgtttctgagcaattatcaaatgaattatttcataaattattatcaaattgtcaactgaagaaaaggaaaaaatgaacttatggttaaatattgcaaaaaatattctcatggaaatattaattaactaatttatccaatgatacataggttgtcaatacaggtgtgaataagatatgtgttttaagttgaactttgatttgcttttctattgcaagaattcaaggtatttggtgcatattttcatgtttgccctgtgtggtacaacttgagggttcaattggcatgccaacattcctttctccgtgacttcaattatatctcctatcacattgagtatgatcaccagtgaaagttttaatccttacacgcatttaaagtgctgttgtttgtcacattggtatagtagttgccaa

SEQ ID NO: 83402 - DNA, 877 bp, Citrus sinensis
  Intron number 1 from transcript orange1.1g009398m (locus o range1.1g009398m.g) derived from phytozome v7.0 (chr-ID sc affold00534; pos 60544 to 61420 reverse strand)
cagagatagagggttgaatccgttcattggtgctggtaagttcattgcttgtttagttcaatttcaagaattttgtttttaaatttacttcctgtaatgatcctgaaatcaaacttgcgagccatattagataactgagttcctataatatacatgagcatatgtaaatacaataatgatccagtgggcaatgaaactcacctcgtactatcacgtagtgctgtcctaaacaccttcatcggaggtgtctgtttgttgtgtatgaatttcttatagaacttatgagcagcatcactcaaaatcgacaacttcaaaaccttatgatttagtgggtgatggtactcacaaagatgttggcaatcaattattgtttgttattataatactccaaatttttcaggtttgaagtttatttgtgtaaacataagatcatagttgggagagatttactatgttacaagttcaagttcctatatgatctagtgttaaacctttagtcttaaacactcgtagatgttagtattggagcctctatctaacagttaaaaaattttggtcagtctcgtgaatttgtgttacatgtgaaagtttttcttaagccttaaaccttaagacactaatcttatgttaatgttgagatgtgacctactagctttaagattttaaatcaactgactcactctgggcatcattagtgtatttagaatcccaactatgaggatttcttagcatggtcttgttcatagaagtccttgttggctgctgcttgtgtatgaagtagcattacttgaaatctttcagctgctaattacactaggttaattgtctttccatttgtcttgctcagaagacgacttatctaagcttatcagagagg

SEQ ID NO: 83403 - DNA, 850 bp, Citrus sinensis
  Intron number 1 from transcript orange1.1g000271m (locus o range1.1g000271m.g) derived from phytozome v7.0 (chr-ID sc affold00255; pos 61156 to 62005)
ttcttgccaagtggtgccagcaggttagcgactaatgagttggttggttagttagttagttatttacttagttgctgagtcattcccagtcaacccggaagaattttgataagctaggttaggcttaaaattaaaattaagaattttgactagtgggtgaaggtaaattctgagtgatgtactgtgaattcaggctgtttaattggaaagtttatatctttaaatatggaaatttgaattaatacattgttttattggtttcgctttgttgcttcttagttaatttgtcttagaagaaaaggcaatttagcctttttaaggctggttgatttatttgttctttgattggctgttaaaaagatggcaaagatgaataattgatgcaattttgaatatatctgtgtgttgtgaatttgttttgctgaagtggttgggtgtaatgtttttgattcgtgtagcaagaagttggtttagtttttgctcttttcagggtcattatatttgaaaagagtggaatcactgaccgtgttttcgctgctgataaaataggagcatagggaaaagttgggaattggaatcatagatattcttcgttgcttaccatagaaaattcttctttgtttaccatagaaaattctttgaatcggtctgcactcctactggtggcaggacagctttcttgttgaatgctattaacgttccatagtttggattgtttatttattattttttaagaccttgtggtttgttcagtttccaagcagttggaatttggcaaaatgttcttttacttatttatattctttgaactgcaggttccattaatacattattctcagcaattggcatc

SEQ ID NO: 83404 - DNA, 1034 bp, Citrus sinensis
  Intron number 1 from transcript orange1.1g045751m (locus o range1.1g045751m.g) derived from phytozome v7.0 (chr-ID sc affold00046; pos 256777 to 257810 reverse strand)
ccatctggtgaacatcattgtagaagaagaagaaagtaattccccagatcttcatgccatcatggaagaaatcaattcttttgcctatgaatctgagaaggtcgtcgacacattcatcgtcagcatcgctcagcaaaagagtcagagcagttccaaggagatgtgtgatgcgctggtggaattccgaagcaaaatcattgatatccaacaacggctgcaacaagttcaacacatcgacaccggtatcgttgagcagatcaaattcattcaagctgatactggtaactcttctgtatctccaatgtttacgaagagggacacggtgggtctagatgatagaatggaggagttgttagatttattgatagagggtccacctcgactctcgttggttgccgtacttgatagcattgggttggacaggactgctttcgttgcagaggcttacaacagcagctttgcgaagcattactttgattgtcttgtttgggttccacagtcttttccctataattttaaccacatattggatgaccttattaagtttgtgatgccttcatctaggccgagcgaaattctggataaaaattctgaaatgaaaaaaattattcttcgcgaatatctaatgaacaagaggtattttgttgtgcttgctgatgtgtggagcattgatgtgtgggacaacattcgagaaattcttccagataatcagaatggaagcagagtagtaataacggtgctggatagtgaaatcctcacctattttcaattggaaaatggtgaggatattcggcttgatttagtgcctgatggaagaccattgagaggtacgtaccaaggttggcctttccacatcttataccatggaagtttgtcatttgaagaaaatgaaaaggaaacaaaggaaaaaccactcaggttacaacttatcagatattcctcgttacctttttacttgaaactttgttgtatctacttgtatgtctttcctctttatagtgatatatcagttgtggatagctgaaggtttcatt

SEQ ID NO: 83405 - DNA, 883 bp, Citrus sinensis
  Intron number 2 from transcript orange1.1g012170m (locus o range1.1g012170m.g) derived from phytozome v7.0 (chr-ID sc affold00004; pos 2022747 to 2023629)
agaatttcaagtaaatgattcaatacctgcttaccagaattcacttttctgttgtagttactatcattacatgttcgcttcattctatggtatattcttttaaagtttgaggaattggagttaaagttcatgtggtccaaacaaatattcaggaaaggaacaagacatccagattggcaatacagtgataaagaatgcttgtatatatttaagtggagatgatacagttgtccatatgcaagattatgttgacaaacctgcttcaaaagatttttttttgtctctattaaggagtattagaggcttcagtacgtgaaattttgttatatgaattatgatatcaatttctttgtttagttgggactaggcaggtattaccttacataacaaatacttcagcctgtatgtgcatccggctttgataatgttgatatgacaaggaaaagataaatactttcgaacttataaagatgtgcatgttttgatcttttatgaatgagttccaaattctacctcacacttacgaatatgaatattgttacaataaagtttggaacttttaatgctttcatggattgcttaaatctgcctgggtatataacaaacaatgtcctaaccacagattttttatgatatatctgaaatataaaagttcagagtgcttttcttcatgttgcttaactgttgattagaacttggcagaacatatgaataaacatgtgaattaatggcttattgtgttggaatttttagttgaaagtcattttctctctctccctaggtcattagcctataagctgaaaattttggcccatggttatgaattgacacatttactatttctgcaggtcagactttgtctggtttggctggaagtcctgct

SEQ ID NO: 83406 - DNA, 547 bp, Citrus sinensis
  Intron number 2 from transcript orange1.1g009578m (locus o range1.1g009578m.g) derived from phytozome v7.0 (chr-ID sc affold00126; pos 317781 to 318327)
tgttttccctttaacaagtctgcaaattgggtatggttttatttattctttgtatttattgaattcgatcgttgaacaatgattttattgagttaaatttggtggaaatgccgtattgatttgactgttaattgtttactaaaatttgaactgtttcattagcaagagaatagctcgcagggccccgtgcagtaatattctatgtggattttgaaactgggaattgtagtcgatttacttattaactaattggagtggaaagttaactatgatgattatttggtttcttcttgtttcattgaaatttttttgagctaattgacattttccgggaaatcaccaagcttaaggttgtatatattttgagagtagggattttatggtcatgttaaagcttgtgtttggctatatggcttgatttggttgttaataatggaggattgataatcatttgttgtctacttttggcttgcctgaaaaatttatgcattttctgctatttatccctgcagagacttgcaatcatatctttcagatcttagtctct

SEQ ID NO: 83407 - DNA, 633 bp, Citrus sinensis
  Intron number 1 from transcript orange1.1g026798m (locus o range1.1g025276m.g) derived from phytozome v7.0 (chr-ID sc affold00009; pos 824468 to 825100 reverse strand)
cttttctcgtaaaggtatttttcggatattttatgattattattataattagtttttgtctttctttaactaatgcttgtcaacttatattattattttgtcgtctcaaattcaactgccactccaccgaggttctaattaacttcatttttttaatttctaaagcttcttcttcgagttttcgcttcttttgtatcaagtatttgcattaaatttctgattagtgagttagcaaagtcgctgacttttctttgaatttaaatttcttagcgctggtattattaacagtaattcattttacgttgtgtaattttaagcttcagtgtgatttgatgtcactggtaactcaaacgagggctttatgatactgagcttactcgtatcgtatcattcatttattatgatcaatctgactccgtgactcattttatttgaatttcttctatttcttttagcatttcatccaaatattcgtgttagataaactctctctctctttctctctctttgtctctctctctctctctatgacatcactgtggtatgttgaatctctaacgacatttttttttaatatattttttagttttggcttcaggttcttcagttgaagcttgggctaacagtcgttca

SEQ ID NO: 83408 - DNA, 450 bp, Citrus sinensis
  Intron number 1 from transcript orange1.1g004071m (locus o range1.1g004065m.g) derived from phytozome v7.0 (chr-ID sc affold00009; pos 1150153 to 1150602 reverse strand)
tttcctcatctaatcagcagacagcagataatgtattacgcaatacgcaatcttttcatttactctggaaatttcataattaatattttaatctgagatcaattcagctgtggcgtcgatgtcgtaaatgttttatctacgatcaatcttttgctttgtcccagtcccacgttaagcaaaattagctttatatgaaatccaatgtaataaattgctgtagttgttcatctgattaccacgtaatatgccagaaaattgtattttgtgattcatcatatgctagatttggattttgttggactgatgtactgatcttcgctccgcttcagcttacgagatggtgggtgttttgaaacttttatcttctgattccaatactcaaaaactctaatgtgtttgtttgcttttgaagcaggttgaaactaaaagcccgcgtcaggaatttcttct

SEQ ID NO: 83409 - DNA, 1059 bp, Citrus sinensis
  Intron number 2 from transcript orange1.1g023736m (locus o range1.1g023736m.g) derived from phytozome v7.0 (chr-ID sc affold00019; pos 20475 to 21533 reverse strand)
ctgctctgctgtacgctgaggatttctacattgaggtgattaattaacagtgacctttttgcatgttgttctctatattatcattttgtgtgtgtttattttcaagctagaaccaacataaaactcattttcaaaaaaaaaatatcaacataaaactcataaaatctgaatttagatacatactcggattatgtgcgaaaaatcgacaaatcaaggttgtgctactgaattctagttagaggatgatcacaaagctggaaaatccccgcagatcacgttgcaagaaccctctaagcttctcttggctcgaattctctcaaattgcactctttagctcaatggcttgtccctagcttgtctcttgtacctttctccatggatttactctttatttatagcattccaagagtagtgaatcatcactaaataaggttaaactattgttggagtcatcttccactcagtgatcacttaatatcttaggatattatatcattccactcaaaattgatcacttaattcttggtctcctcatgggtgacctcaaaatgatagaacactaatgtacatgtatatctatttacatacacatacacatacacatacacatacatatacatatacatatacatataacttctttgctaccaattgtatattgtgtactgtggctgttcagtggaagatactttttttgtgtttagtgcagtactatcccctttgcaatgttagtttaccttgtatccgataaaacatcatgtgggtgctgtatttagcaaccatcaaacatgttttgctggagatacataattttatattttatatctctgtctcagtttttcattagatttaccaaccaggcttctcgagacaagcctgtttagatctaaaagtgatttataggaatcttatatgttgtagatgattgaatgcaagatgcatctacggaccaaaaacattacagtttcatccaagttctttctttcatacttcctaattgtgtttagatgtaataatggctttgatttgatcagaagtggagcggttttcagttattca

SEQ ID NO: 83410 - DNA, 424 bp, Citrus sinensis
  Intron number 2 from transcript orange1.1g007890m (locus o range1.1g007890m.g) derived from phytozome v7.0 (chr-ID sc affold00321; pos 33764 to 34187 reverse strand)
gagaaacatttacttacaagtttgttgttgacagggtgagttttaatttcggatcttgaatccctccgttcagcttcattaatttcctatggtcaaagacaagcaaattagaactaaagtactcttttaaacctttgtacctgataacgaaactttaacatggtaataaaagcccgacgtctcttggtctatatcatatgcaagtttatgcttttgggtcaagtggcttaactgacttgacactcactgtatttgcccttcaagacacctttatactgtttttttcttccccctctttctagttgaagcattaatttgttattttccaggttgttttgtcataacaagtatatgtaacaactaagagccaattaattaatttctttaattttgaatttactgtagcctggaacatatttatatc

SEQ ID NO: 83411 - DNA, 674 bp, Citrus sinensis
  Intron number 1 from transcript orange1.1g013818m (locus o range1.1g009233m.g) derived from phytozome v7.0 (chr-ID sc affold00004; pos 530428 to 531101 reverse strand)
cactgtacagaccagcgaagattaatactaaaaaggttttattttttatttattggaacttttaaatgatttattttgtctgggtagtttctaaatttggtgggaaagtcagtttagttagttaatgctttagtttaatatttagcgtatgtttgtgctgctgaagcctgaaagctcattattcatgtatttataaatgtttctttgttaagtttacgtgggcagttgctaaactgatctttttataatgcgtgtttgatttgatttttagctgaattcatctaggcgtttacttaacatggagcgaagttaaactcagtaattggttccatagcgacaaaataatgatagaacatatgatacatttgtaattaaaccctgtgctgttattctgatcctgctccctactaacaagaggaatatttttttttaaatctttaaatttggatgcctcttattggttgagcagcttgaaaatctaattgtttctcttcttaaattttatctgtttactaaagtggctttttttttttcttggaaacgacttatatattcatttatcccaaggagataagagcagttgttaggttatgttccactgtgataagggaaaatttatctgtggtaatgtttaatcaggatactaattggtgagtggttttcagagtgttcga

SEQ ID NO: 83412 - DNA, 671 bp, Citrus sinensis; identical to SEQ ID NO: 79973
  Intron number 4 from transcript orange1.1g008869m (locus o range1.1g008790m.g) derived from phytozome v7.0 (chr-ID sc affold00035; pos 137555 to 138225 reverse strand)

SEQ ID NO: 83413 - DNA, 412 bp, Citrus sinensis
  Intron number 3 from transcript orange1.1g022676m (locus o range1.1g022676m.g) derived from phytozome v7.0 (chr-ID sc affold00121; pos 357661 to 358072 reverse strand)
ggtggtattgttgcaatatctttgggtgagtttctgtttttgagaacacaaatgttgcttttgagtgatgagaacatattttgaatagtttggactttggactaacgtttattgtatgtttttcggccattacatctttgggtaaatttcattgatattaactattcaaaatatgaatctgaaaattttcttaattttgatacattttaggggaattttcttatgaatctgaaaattcatgtaggttacttaatctagctctagcaaacttaatctagctccagaagatgcttaaaccattgaagtattcatctattctatgagaaaaccatgctcctgcatgctcatatattttctgaattaccttgtatgacatatatgttttgatttactcatgtaggacgcatctcta

SEQ ID NO: 83414 - DNA, 682 bp, Citrus sinensis
  Intron number 2 from transcript orange1.1g016934m (locus o range1.1g016934m.g) derived from phytozome v7.0 (chr-ID sc affold00019; pos 106075 to 106756)
tgagcttcctgctgaaggattctccccagtggcaggttttcttttactgatttctcttggtttctcttttttctctttgttttgcctgtttcctgaattatcttcccattactgtgtaaaatattggcaatggtgactgtgaggttttgcaattttttcccccaaatccaggtaatattttgttctttaaaaaaaatatatatatactgaatctgcttttatgaaaccaattgttaattaatcaaagtgtctggagttgttgcattgctttctcggttcccctaccatgtgctgtaagttctttaaactggttagaatgttgacagttgtttgtaatgttgaactgcttgaaggtttatgatctctacccagtactttttgggaactgttgtgtaatagaatggaaaatttagtctattatgtgatatgaacctttagtctgtcatttatgaatggcaagtatagacaccactccattttcctaattctaaatgatactccaagtgttgttaagaactgcattattcaatttagcattacagcttagttttaacaagtcttacataatcttttggaacctattgatgaactattggtgaatttatcttttgaacatgctagttacgatttctttattatgacttattgttgccaggagggatagtagctttgggaaagtttg

SEQ ID NO: 83415 - DNA, 767 bp, Citrus sinensis
  Intron number 1 from transcript orange1.1g019848m (locus o range1.1g019848m.g) derived from phytozome v7.0 (chr-ID sc affold00004; pos 1315489 to 1316255)
cggtttcttcgctcggttcccgtctatataagtaggtgcaatctcgcctctccattttctccaaattaatttactttcttattgcattttgcttttaatcaatttcttgtttctgggttgttgcgtttttctcttctttgatcatgtatgtttgttccatgtatttgatttgtttatatctcgtgtcttatgatattgattgattttttttttaatatttatgagttcttgctctttaatcattacgtctttgaatttcgttaatgcgaataaaacatggggtatttctgaactttgagcttctaatgggtatctttaatttggatctgtatatatttgattctctgtttataactggttttttacatttttttttctttttttgggtggcggggaaatctgtttatttgttaaagcatgatgtttttaaattgtaatcatgttttggaatttgttgcataccacatgcatgttcaaattttataggagctttttgtgctgaatgtaaacgttgttgaatgtagatgcaaagataccgtttataatgtgattgtgaccttgtttgctcggcatttatttaaatttaccttttccttttcttaattcaccttcttttcttatgtttgaccatgaaaaagatatttctgacgctcatatgctgcttgagttaacactgattggtgtataatgtttttccattttactgcttgaaatttactttattatttgctgcaatgtaatctgtgtctgtatatttggttttcaga

SEQ ID NO: 83416 - DNA, 917 bp, Citrus sinensis
  Intron number 3 from transcript orange1.1g014079m (locus o range1.1g014079m.g) derived from phytozome v7.0 (chr-ID sc affold00036; pos 415146 to 416062)
gttcagaggaagccttgagaatcacttgtttcgaagtaggcatttgtgttatttaccttcttcttttgctttgagagcttcaatttcctaatttctacaaactttttgttgcgattcttagactgggtagttaaatatagtgcccgcttcttgtatgagagctctatgtttagaaattgtgtgccttttgcctataatccataattagagtgcaacactttgattataccacacagctaagattgcagtctcaacaaagctgaggtctaacagagtcacccattaactttagaatgctatctacttgattcacatgtaagataccaatcaagacttttgctttaaattggacatccttcaagcatcatgaaagaataatctcatcaatttaggtaatcctatgtgacgtatgtttcatagattgtaaaggtttcaggctttaccatcttttgtttgagacagagactgatagataattcaagtttaaaaaaatggcgggtacatctaatgaaagactaacgtattaaaaattcgcgatgaggtgttagtgtcatttgcctagactagaactttggtgacctgccacgttaaatggtttaaatgaaattatactttaatgcttcatatttgaaattggggtcattgtcgtattcgtcttgtgagatatcatttcaaaatagttgcattgccctgtcatttaggtaacacatattacatggtagtgtgagagatgctataggtgatctcttatctttttttaatagtttattgagaacgtcgctgctggaaaaaaaacaagaaattaacttttttgttatgaggaacttaaaaatttctacttagttttcgaataatattttctaactcaagttgatatggtctttcctggggtatttagaggcaactgtcccactatc

SEQ ID NO: 83417 - DNA, 216 bp, Citrus sinensis
  Intron number 2 from transcript orange1.1g048485m (locus o range1.1g048485m.g) derived from phytozome v7.0 (chr-ID sc affold00028; pos 305369 to 305584)
gatttggctcgtggaaggcataatcctctggaaaggtatttgaagaaaaacagaggcatttctacttggttcaaatgggtcatttctttttctatctacaattttcacttttcactgcaaccactaatattttgtttttattatctttttcttttctttccgggatcatgtttgcttccagcattaactttttcaaggtaataaaatctattttga

SEQ ID NO: 83418 - DNA, 935 bp, Citrus sinensis
  Intron number 1 from transcript orange1.1g046177m (locus o range1.1g046177m.g) derived from phytozome v7.0 (chr-ID sc affold04909; pos 3282 to 4216)
taccctcccattcatcaggtttgtttatgtcatatatcccagctaaatattttggtatgctcatgaatctatgtaaattaatttttgaaaaagctcttagataacaaggttgaatgtgttttatcttcatgaagtctgcttctaaaataccttatcccttgccatactatgtgctgcagttgtcacagtgttatgtttatttatcctataaaatcatcttttgacattttgttgattcatcctcttaatttttccaattgttgcatcacacaagtcaaggccagtatcacccataatctagccgtctaaccatgcctatcttttccctttgttgctatcagtagcaacgatcgagatatatatgtatggatggatggatggatgtatattagaagtttaggaagatagaaagaggttaatgaagatgtgaattgatgtaaaggtttttatttgtttgttgccgtcaggagacatggatgttcatttttctaaatgtaaaggctacggaatcactggaatcaaactgtaatttaggcattgttcatgatactaagttcatgattacaacttatcaatttcttattagtttcatcttgcaattgctggctacatttgctaacagtggctgacacccatacagaaaaaagtgtgtatttatcaacttagtggaaatttgacttgccaagtgcactgcatcaacaggaacatgaagttgctgtttttgttgtgtcaaacatctgcttgttctttagaagactttttagttaacagatgagcttctagaggtgcttccacatgcaaacacatgtcaaagcaaagttcttctatactgtatcttgaatgggttttgaatttaatttattgcagttctggtctttgttctttcttaatgcttgctttctctccattttcattattctcattgcagtgttcaa

SEQ ID NO: 83419 - DNA, 602 bp, Citrus sinensis
  Intron number 1 from transcript orange1.1g012053m (locus o range1.1g012046m.g) derived from phytozome v7.0 (chr-ID sc affold00233; pos 112691 to 113292)
agacagatctcaatcaccactcgagagccgagacggtaccgtttctttccctttctctctcttttcttttacccgtttcttttctttctttttttctctttttcaaaagactgacttttactgatttgagttgcttttgttttgtgttcgtattctctgttattattattatttttttttgtgtttatacgtgaatttgttgaattttctcaattacgttgatttcaagagttcaatgtgagaaacattatttagaattttgttcgcaattgtaaaagatctaaagtggtgatgattttttttttcacgatattcattttttaatgaagaagaattggaaatttcgagtccttttaaaccgcttacaattgtttcttgcttttagtttcaatatctattatctaggcggttcaaagaaacatctttagaattcagtaacagtatcatatcactggcctccagctgtccagcatgtaattaaatttcccatttttaaattttaatgtttcgtggctacaataaaatcaattagctaattctgattgttttattcctttttcaggttagtgcctcggattttaggtgccggatttaatattttg

SEQ ID NO: 83420 - DNA, 866 bp, Citrus sinensis
  Intron number 1 from transcript orange1.1g036631m (locus o range1.1g036631m.g) derived from phytozome v7.0 (chr-ID sc affold00332; pos 144477 to 145342)
gctgtgttttggaagattggttgccagaatactaagtgagtttttgttctttttctttatcagaaaagattttttttaactttttttttttaagtgtttatctttctgtgtttggttgctgagaaaatggagggaaagtaaagaaaaaaatgatttctaaccaaacttcaagttggatgatgaaattatgattgtttggttatttggttttcttagtgattaaacagaatagatctagtattgacgttttttagttttaatttcatttttttggggtttatttttggtggatttgtgacggtagcttggttcttggatactattgacttattacaggctgattggatactgttagagtgtgtattggattattgacatgtatcctttctctttttggaattttgcgttttggtttattctgttttgtctttaagaatcttagtagaaaagttgatttgtagtagattgacaaaccctctttgtattcgactggttttctgtgtatcaaaatctattgattcagtatctaccttcttttgtttgattctattcgtttgtatttgcctgttttcaagcaaagtaaagttgacattttttgctcttcagctactgaatcaatgtgctgattagttgctttttgtcatgctccttttggtttcttagattacatatagttaaaataaggaaaaatagtaaccctcacatcatagtctcctggaaactgtttgagctaattgaggttctccttttcttctttttttgaagtttattgtgtcgagagttaacagtagtaatttaatgccttgtatgtgtttatttctcaacaacatatgttcttttgttgttaggttattaatttgggaaga

SEQ ID NO: 83421 - DNA, 917 bp, Citrus sinensis
  Intron number 1 from transcript orange1.1g037683m (locus o range1.1g037683m.g) derived from phytozome v7.0 (chr-ID sc affold00338; pos 25390 to 26306 reverse strand)
aaagacgggtattttattttactttttcttattaattctctccattttttttttcttgtgatgctaatgttgtggatcttgataattgataatttatttattctattttaattctaaattcaaattttatttgagaatgttatgtactaaataaatttattgagcatgatttcctcgacaactttttgctatcgttatttggcttcccttgagagtgagtgttggattaattgtgctaggacccttgggttctaactaaaaaattaaagaaaaagatagagaatggttgatttatttattgattttttttaatttgtcagaagattgttttttaatttgattgcttgaatgcaaaagacattacgtatttagagggttctagagaaattataacctacaagaaaacaaattaacaatggaaatcttgaattaaataggaaaataataacgctaaaattaaagtcctaattctcatgggattctaacaattgtacatgttttggtgatttttattttgtgataaacagattttatttggcatgaaatattactcatgtatttccgaaatccaggaataaaatacaatcacaaaaatagaatgtgctgagggatgaatgagaataaatgggaaggaaaaactaaggcagtttacttcaaacaaactcagaaactattaagttacaaccttccttatgtaactcaattaaaaaaaaaaatgttaagactctatgttaagactctcttctataatttaaattaaggtgacgaacgaaataaaactgctagaaaaccactcagtcaggcctatggggacactaaacctatattatacaatgcactaatgttacacaattctacacacataaattttataataatttgttgtctcttatgcatggacagataaggtacaaaac

SEQ ID NO: 83422 - DNA, 896 bp, Citrus sinensis
  Intron number 2 from transcript orange1.1g000727m (locus o range1.1g000727m.g) derived from phytozome v7.0 (chr-ID sc affold00036; pos 374458 to 375353)
gttctacttcgcctcattcacttcaacatgtatgtgcagcgcaccattatcttcctttaacttgcctttagttttgccgctcttgagtatgttttcagaattgaatcatgaaattgggtcgtcatgttatagccttaaataatgtagtaggtatctgtgccaggcatcaatcaattttatgattatgtttctttgcttctcaattatgcactttgcattctattggtaaataacgtaaagagacctgacagtgtgctttattcaagttcctcaatcaatgctacctctggtttttaaatcatcaattttggtagtcttggaatcccttaatcatttatatatttaatttatccccttggcgagcagtctgcaacggagctgaaatttgagttctagaacagtagaagagatatgtatagttttctgttgttgtatatgatcaatccatacttggctcaagtgggcatgtgaagacatttatcatttttttgccaacttttatatgatcaatccatacttgctgtaattccatgatacatagcatgtgctttgttcctagatttgtttgaaaaaaggttgatctttctgctgcagttcttaggagcttttttttaaaaaaataattcttatgggaaatctatcatgaagtgtttgttgatcattgtagtagttagattgacttgttttttttttttttaaaaagggaaaacttcttgtgatggtgttgtaacttcaattgcctattattactggcaattcccttggcgttggtaccttgttctcaacttatctttcccagaagtattggatacataaatctgctggcttccacaaatgtgatctgtattgtcttctctttcttagttggttctgtttttgtaggcctgaaagtttca

SEQ ID NO: 83423 - DNA, 965 bp, Citrus sinensis
  Intron number 1 from transcript orange1.1g022218m (locus o range1.1g022218m.g) derived from phytozome v7.0 (chr-ID sc affold00114; pos 57074 to 58038)
ttgataatctctctcagagaaagcttattcagcaggttcatcttatttaattttctactgacattgttgaaaaaacaaaaaaaaaagtaattgaattttctttgtcatggagaaattgttgatgaaaataagaatacagagacgaatatgagtactaattttgatttttcattttttaattttcagttggattctgaagcattgaacttgtagtcattttgattgacacttgggaaatatcgagtctttgtttaggatttagagcatttacaggtcttaaactttgaatcatctgataatattttgtcgtttaaaacaatttgttgataatcatctgtctgtaaagtgtactagctccagctagttgctgggcaaatgactgtagggtgacatgcaatggtagtttcgttcttcataatgatcttaaaaaggaaagaaacatagatgttatgaagtagcaagttgcagtagaacacatgaggaggtaatttcgtttcctgttattctcggagcacaagcaaattgtataagctatactatgaatgtgaagtcataaagaggtcgcataaaaggattaggtaagtggtggactgggattagaagctcatttttggggaaatgaggttagagaagctttgtttaacttcttactttcacttttatattatcaatgccaagagtttgctaactagcttaattaaagtgggagagtgggagtggtagtaacgaaattttgtttgaattcttgctgtattcgtaaattgatgccggtttgataatataaaaggtagatagtgacatctgataaatctttaatcatttctgaagtttgttttgaaagatcccttaatgtagagtaatttctttcatgatttaagattttgctttctttttgacaaatcttcttcacttttctaccccttggaacagagtttaagcagaaaacttgtacatatattgtcggg

SEQ ID NO: 83424 - DNA, 563 bp, Citrus sinensis
  Intron number 2 from transcript orange1.1g028092m (locus o range1.1g021901m.g) derived from phytozome v7.0 (chr-ID sc affold00182; pos 184451 to 185013 reverse strand)
gggcagacccagttgagcttatccacttctttcaagtgagtgccaattaagattttttctttctgtttgatttctgctttcatggggagaaatatttgtactgatacgagcttttgagctggcaattgttgtgtattcatttgattttccttatgttgtttgcttttgttgctagcttgttaaattaaataaaaaatgttcattggtcaacgtatgtttgtggtaactgtattttatgttgaacatcaacctcttttaatctaagaaaagctttgacattttgcaatttctctgcctttatgatcttattgatgtggaagctgaaatcagatacttagttcggtttagttgcataattaaatagcaatttaatgtgtataaaggaagagttgccaatcttttatttgaataatactttgttccttgggtgtgaatgcaccgggttctcttcttataaatgatggcactttattgagttttctagcaatctaagattacttttgtaaacttctcttggtaatgtttcagtgatttatttataggacaagttctgcatattagga

SEQ ID NO: 83425 - DNA, 725 bp, Citrus sinensis
  Intron number 1 from transcript orange1.1g005373m (locus o range1.1g005373m.g) derived from phytozome v7.0 (chr-ID sc affold00046; pos 404205 to 404929 reverse strand)
gcgctggagagaacttggatcggttagggtttcaggtgagaaaaagagtaaaaaatgaaacttctttgtgttcttgctggattaagatctgttgtgtttttgtatttttagatggggtttgaataaaatggggtggggtttcggtaattatctgatttcttgcttccgattatatagtgttattgctttgttctgaagataagagctttttgacaagtgagatatatactgatctttgtagctccatcattgtcattttgtgtgtttgtgattgcttaattttgaaggttttcttgtggttctgtgagaaaagaagaaaatgataacagcattgtgcttcaatttttctagcaataccatggtcatgattttgtcgttatggttgtcttctgtagctggctttatactttatgctatttttgaattatatgactttatttatcagtatctatgattcactcggttccatattggaaaagctatgcatttgtttgaatgatttgcgggaaactcatgttgcgtactccatttcttttggggtgtatttattataaatttgtctgccgcataagtctatgtaaagacgttacacgtgtttgtttgacttccaacatcttcgtatctttttttctctgcatcttgttttgtgttgtccgtttctttaatatgggtatttcaattgtagagattttattgttatgcttttctgtagcctggtgcagcgc

SEQ ID NO: 83426 - DNA, 607 bp, Citrus sinensis
  Intron number 1 from transcript orange1.1g004163m (locus o range1.1g004163m.g) derived from phytozome v7.0 (chr-ID sc affold00003; pos 2996938 to 2997544)
tgaggccattgtccaatctgagagtcaagaactaggtaccatacatattttaccttattatgtttttaaccactgtactaaagcttaactatatatttaattttttaaaaaataataatttaacagctaacaactaataattttatctatcaactatctctgattccattccacaaaaacttttggattaattcaaacctgcccttatattgttttttgcagcttacttgtgtctaaaattttggtatgattttcaagaatggtatctttgagtttgagagtgcaattggtggctaattattcttttgtgtttgactgaaatagataaaaagtgcctctttaatgtagacaatacttcgtatgttagttaatattgttccttagagattacaaacatagatgaatctattcaatttggtcatgtaaagacataataattaaattgacatataacatatttactttcttcctctcctctcgatgccaaatgatcaagagtgatatacaatctgttttttgttaatttatggtaatgttcttaatcattgcatatatttcatgattgaatacagcagaatcaaaagattttcagccacgtgctaagtac

SEQ ID NO: 83427 - DNA, 394 bp, Citrus sinensis
  Intron number 1 from transcript orange1.1g012082m (locus o range1.1g012082m.g) derived from phytozome v7.0 (chr-ID sc affold00190; pos 227183 to 227576 reverse strand)
caaaagtgcttctaaaaagggttctttctttataggtaaattaaccatgcacttattttttatgtttatttggagattttgcttgttttctcatccaattttgcatatttgctcttctttagatcttgaaaggttgaaatatatgaaaattaatgagggtttcaattcaagatttagaaggtcaatgttattatttcttgttcttatttaaatctggattttgataaatgcttataactttactaattgttttctctgtcattaaaaggattgactaggatcattgtttgatgtggaatttattcgtgttacatgtcatgtaaagttcctcaagtgtctgaatgtagattttgatgtaattacaggtgaagaaaacactgaaaaattgagtctg

SEQ ID NO: 83428 - DNA, 490 bp, Citrus sinensis
  Intron number 2 from transcript orange1.1g039536m (locus o range1.1g039536m.g) derived from phytozome v7.0 (chr-ID sc affold04007; pos 1193 to 1682)
gaggaagctagtagataatcaacttttctttttcttcttctcttttttatgaaaaacaaaaaaaaaaaaaaacaaaaagttctttagaattctttctttctcctttccagattttgctgatgtggctaatcagaattttgcttttctctttttactgggttcttttcgacaattgaatctttgtttgtgtaaaaccatacatattattgtggacaccagtttattttcagattcaactagctagaatcataatggagtaattaccgtatcttgaatatattattattattattattatattatgctcaacttagtggactccttcactttcactttctaatcattaaatttaattcttctcattcaccgcattcatcaaaattcttccttcttttttaatgaatgctatcgaatttgagttttcttgtttttattgtctctcaatagttttaatctgattaatgaatgataccagtggtggaaactaagg

SEQ ID NO: 83429 - DNA, 861 bp, Citrus sinensis
  Intron number 2 from transcript orange1.1g047971m (locus o range1.1g047971m.g) derived from phytozome v7.0 (chr-ID sc affold01047; pos 36372 to 37232)
atttgttgctcgacgctgaacgaattgtagttgaggtgtgcgcttagtttcttcagttactgagggttcaattttgaatctttgtatttaattatacatttaggtgaattatgaatatttgattgcttgttgattcttggtaattaaataatagttaaatgaggtttgaggacctgtctagaaattgttatacagattgtgggagtaatgatgagtggtcaaatcctttttatgagccaaatggcattgtgagaaatcctttttagcttaacgagacaacgatgatacttgttaaaggttattggaatctttgtctctgtcgtgtgaatattttgttttattttacacgtgtttggtgtaatcaatcctgacagatcatgaattaaactgtatgtttatggtaggaacatataaaaattgcctttccatacaaatacatcaagtgagtggttggatttcactaagaatttgttacgatataaattaagggattatatactaaatccaatgcaaattgtggaggtaacgcgtgatatcttttatgagccaaatggcaatgcgtgtccttttaagcttaatgagacagcgtgtgttgcattatataaggttatcagaatccttttctcgctcatggtaattgttcttttttttttcatattacacttggttagcctaatcaatgtttactgattatggagaaaactgtatgtaaatgttaggaacatataaaaactgtttaatctataagtacagtgagtagttggattttgctaagtatttgttacagtttaattacttgattgttcttttaaattatatgcataaggtgttaacttacttttggattttgttttcagggat

SEQ ID NO: 83430 - DNA, 515 bp, Citrus sinensis
  Intron number 1 from transcript orange1.1g008944m (locus o range1.1g007148m.g) derived from phytozome v7.0 (chr-ID sc affold00025; pos 954673 to 955187)
ttgcttcattataattgagccagtagaccattgtttgtctaacttgttctctgatattgtcattgaaactcaattttacttttgaaaaaatatgatgcgactaatcaactattcatccctgtcctaggactagactggattaccaacatttgaagcttgttaattgtctgttggttgaagtgtctcaaagaaatactgtaaattaattacatactagtttgttcttggcttttaaaaatataaaatttgtttaactggatatggtgtgcgcctagatatttactagtatgatggaaaacagattttcacttgatgatcaatttcccttaagatgacgataatttagctgctctgtttgaagtttttaatggtactaaatgtattgaaaatttgggatattgtagtttttttctgggtattactgcatctcattaagatgagtgactgtttatgggcttcacagtactcttcttggacagtgtgcttagcaaaatgttattgccgcttatgcaggt

SEQ ID NO: 83431 - DNA, 633 bp, Citrus sinensis
  Intron number 2 from transcript orange1.1g045092m (locus o range1.1g045092m.g) derived from phytozome v7.0 (chr-ID sc affold00183; pos 21166 to 21798)
gttacattcaggtaatttgttttcaatctttacacaattcagtttctgtatgaaaagttaagttgattgggtatcattattgcaggggaatctggagctgaaggatttcgatattagctggtagtgttgtaaagtaattttgaaaacattttctgcttttgtgacaaacaataccatggagactcgtctctataggactggaaaagggacaactactatcccttatatacaggagtttatagtcctcttttatcagctatttctctttacattcctggtaggtttaatactaacacgaggcatgtttcattgcaagttcatagattttaaaaaagtcccctaatgttatatctatgtgaattccttgtattaagtgatttgttttttttttcaagcatatatcatatccccattaataaatggaagcaggaatagtacaaatgtaggcacagtactcggcattgtggcagtagcagcatttattctaatcttaattgttagtgtcctttggtagaagggtttttttcttccaaaagaaaacatacattggaacaaggactttaaaatgagaataaaaaacaaactttctttccaatctatagttcgatttgtcaactctttttcagaatctgc

SEQ ID NO: 83432 - DNA, 611 bp, Citrus sinensis
  Intron number 2 from transcript orange1.1g003422m (locus o range1.1g003392m.g) derived from phytozome v7.0 (chr-ID sc affold00237; pos 187379 to 187989 reverse strand)
ccgctcaggtgagtgcctatgtatgctaaaaactttctgtttacgtaaactcaagacctatgaaaattagataattagttaatgtggtgaagctttgattttttttggggggggggggagggtcagaaccaagataattatatagatgtagaaaatgtacgtagaggagggacaagaaacccacaaataaaaagcgaaaaaatccctaagcctaaaaactacaaatcctataggatcataaattctatcaaatgatattacaccatagtggtgaaactttgagtgatcgatactcacttggtatgatatatagtctcagctttcctaagttgtttaggggtacgttttgattgaggtgttgtggcttttaatccataactgcaatgaaatggaatattaactcttaaaatataaatgaatggttgtttggtaaataaataaattttaattgccaaataaaaggggatgtttaccaaactctttagctgttgtgcttacaaatttaagaagaagcacagcagttgcgaacataccctatattgatctttgccaaagtggagttttgagtcattatgtgtattgatttgtgacttttatgtgaagataaaaaa

SEQ ID NO: 83433 - DNA, 402 bp, Citrus sinensis
  Intron number 1 from transcript orange1.1g028762m (locus o range1.1g028762m.g) derived from phytozome v7.0 (chr-ID sc affold00091; pos 316820 to 317221)
tcctcgctgcccatcttgaagagcaaaagctcaacgtaagtccgtttagttcttgaagttttgtttttccgtgtgaaatatctaaataggtcacttttaataattttcttttctttttggggtcagggaattgaatttcttagataacctatttgatgctgaaagccttgtagatcttgttggattgattggactcaatgagggttttgattaatttgcattttagattccatacttagttgtttttcctagtttatgtagattatattggacaccgtttctatgtgggagataagttttcacttaattgagtaaatccctaatcctccccggtttggtagatttacaaactaaacctagaacagatgttgattgatgtggcataatatatattgcagcccg

SEQ ID NO: 83434 - DNA, 892 bp, Citrus sinensis
  Intron number 4 from transcript orange1.1g021113m (locus o range1.1g021113m.g) derived from phytozome v7.0 (chr-ID sc affold00019; pos 1325059 to 1325950 reverse strand)
ttcctagagattggtaagtttatgactttaaatatatcactcagatttcaatcctcgtgttcactttgcatgcttaacgactgtttttggattttacagctaaatggttatttctgatttgcaaacatggtattggtaatattatcatgggattagaaattcacatcttagttgaagttgtgtcttagaagctaagtttgcatcaacttcttttttcttgaattattgttcatcaaaatagcttcatttcagcagcaatactgaagttgactttatttctcaagactgacaaatatttgatcattctactattactgttatggcaacatccgtgcgaatatatagttttttttttcttaagaattagtaattgaaagtgaaaagggggggaccctttgtcggctcatagtgacaaatcatttcatcccttccagtttgcttatggttatatcaggacacgggtcctgatattcagttttgctcatcttgaaatatcaaatatgaccataggcaaatatagaggaaagaggagatttgagtttgggaagcagctactgttaatcctttgataagaccattctgattatgattcttggagagaaataaagaagatataagataacatggcatagccattctgttcaattatctcactatgatgttgcttccactgctttgaattgacttgattaattgggttaattaatgttgcctgtaaaaataactttcatacctttttatcttttaaattggtctctggtagtgcatcatgttgagtctccttaaagtctttattgtatggcaatatgtatttgaaacttctctttatacttgagcgaatgttctgcttgcttcaggtagtacagaagaatactggaagagacaggacgct

SEQ ID NO: 83435 - DNA, 644 bp, Citrus sinensis
  Intron number 1 from transcript orange1.1g007286m (locus o range1.1g007073m.g) derived from phytozome v7.0 (chr-ID sc affold00528; pos 85268 to 85911)
attccactctgaaaaggtacttgtgcaaatttttaatctttttcggttctcatcttgatttgttctttgccaattcttacactccacatgatcttgctttctgtgtcggttgatttcttgtttgtttaaggttctgagttttgtttgatttatgagaaaatgatgaaaaaacaaatgaaccttttgatttctggatgatgcccagtaaagcaaatacagattttgctttaaaaggtgggcaatattgattttttttttcttttaatttttggatgattcccatagaagcaaatacaagctggtgaagacttagtttagtttacttttccaagaattatgctcaatttcttagtatttaagtttgaatttctgctttatcagctttcgggaccccatgtgcctgggtgtttctaacatttgtggcaagagaagcttgggcgacggtatatatagtcttgtaatttgatattgttcactgctaaatccgttataaccaattttgcaattacctaaatgatggtagttgatggttgtttctttaatttgtcttttaactgtcaagttatttctattaagaatacgctcacctattatgccccttgtaaattgcataatgacagctaaagactggtcaaactcttgtg

SEQ ID NO: 83436 - DNA, 778 bp, Citrus sinensis
  Intron number 2 from transcript orange1.1g010529m (locus o range1.1g010529m.g) derived from phytozome v7.0 (chr-ID sc affold00023; pos 1095019 to 1095796 reverse strand)
atactcttgctaagcatttattccattgtgtgtaatctttttctttattttgttttatttcttgttttgttgcatagtgtgcatccaagattgtattcttttgctcttactgcatttgctacattcatggagattcggatggtttgctagaatattaaagatgcatcagtaactgttttcttgtttgggtaagtcttaatctgttgtttaaacttcaacttgtgttctctggaatttatcacatagataattgcttgttttcaatcttaaagattgatagtttctcagagttctgacatataaaatccaccagtgaagtggcgatgtaaatttataatatgaattggttgatgctgatgggcacaatttctttttgcctctgttaaatgtgctctgagggtaaatcatattttcctcttcagttcacacacttaaacacaaagcagtggatgctttgattaatctcccaggtagtatttggtgaattggtttattaattgaagaatgaattgaactggtataggcctatcattacaaactggttcttagtgcataatgctagttgttatcatcttgattacgttccaagtgagagcattctatcacagattattgtttttgatttctcttcagtcactaataaaattagaatttcctctagtggatatgctttcagattgagaatgaatatatacatttcctcttgtggttggtttcatttagcccttcttcataccttgcaggggaaaaacaaaccattgagtggccactgcgttta

SEQ ID NO: 83437 - DNA, 888 bp, Citrus sinensis
  Intron number 1 from transcript orange1.1g029375m (locus o range1.1g029378m.g) derived from phytozome v7.0 (chr-ID sc affold00661; pos 53161 to 54048)
tccttttacgtgaacatcgaaagactcgtttcaaggtcagttcctttactcttctttcatcaatctttcctcatttaatttgatatctatttttttaatcttcaattatttatttgtttttattaattaatgcgccgtgaatttgggatttgtgatttgctgtctgggtttgtttcgtttagatctgtggttgaagttccctttttatcttcgaagtaaattagctgtcaaagaaagaatcaaaagaaaaaccctcgcttctgtttggtgggcgagaaagcttgggaaaatgaaaagatagaatcttgcatctttcttttaggtgggttttcgttttttttgtttgtttgttttgttttgggtatttctttggatctttggttgatggaaatatatagaggaatacggctaatgaattgcattttaagtaagtctttgtaatttttcccctttttttccccactttgttaaatttaagaggtttttgttttcatgggctttttattatgattattatttatgggtttctttaagtaattaggtatttggtgtatttacttgtgagatttgggcaggtgttcatgagtgttaatatgtgatgctatcataaatccgtatctggatctctgatttgaagcttgcattgaatgaataaccatggcggcaattagcgttagtagtgcagaggtgttcatcattaatgcttaaattgggattagacttgaagctattgtagtcactagggttgtcattgaagtttttaagaagcactgctattcattcagttacatttatgcatctgttatatctggtgatctctatgcttacgaatatgtaattagattggactgtgctatatatttgcaggacttttcatacttagattga

SEQ ID NO: 83438 - DNA, 792 bp, Citrus sinensis
  Intron number 1 from transcript orange1.1g018326m (locus o range1.1g018326m.g) derived from phytozome v7.0 (chr-ID sc affold00056; pos 257820 to 258611)
tcttgcttcaagggcaaatacgccggtaattttactgctgttttttttgaaaaaaaaaaaatcaaaacgtcgtcgattcttatttagatctatcatcactcgctgtttctttagttggatatcgtttacttcgttatgatctatgctacttttaaccgtgctgtttgttaaatctagaataagtggatcatttgtagcctgtttcctttagatctaattattttttctgactcgattgttgattattttgaatttaattctagatctattaattattattttagcgtagctgtttctgctctgtgtatggtactttccacgtgtggatgcgatataatctggacggttcagactgagacctgcttttgtattcttttaattcctgcatgattgatttgatgaagttagatttaatctctgtttaggtttatttatgaaaccagttttgttccgatgcagcaatataatctttcctcagtaacttcctacttctttctttggtgcttgtatgtagatatcagtgtgcgttgttgtgtacttcgttgtgactcggatcctgagttttcttttatatgttaaaaaatgaattttagctttttagtttttaaatcgaatgatttaagtataatagaattttaagttgtttagatatcaatcatatcgttttgaagaatgcctaattattttaggtggagtagcttaacattcctgagttttatttatgctttagatgaagttatatgtgactttctggagatacttatgctttacatttttttcgacattctgcag

SEQ ID NO: 83439 - DNA, 714 bp, Citrus sinensis
  Intron number 1 from transcript orange1.1g047983m (locus o range1.1g047983m.g) derived from phytozome v7.0 (chr-ID sc affold00706; pos 75880 to 76593 reverse strand)
atcttcttttaagtgaaagcgtctatactactgttgtaagcctacaacaatgatcatgatctgttttggttttgtactttctcagattgttgattccattaagagctttctcaatatctcctctgatcctgcaacattcattcaggtttgtgtttatgatacttttatcaaagaacatgattatattgaaatagagttacaaagattcatcctgcacttttataaaattttaccataagtaattaagatagtgagtaacaattatctttcacactcttaagtctcaactttatatttttgttaaattaattcttcgattttatgacatgcattaagttaagagtttcttgaaaatgtcatgcagcggtactagtgaattccatcacagtaaattataagttcataaattagatagtgacaactaatttcttagtgtgtgtgatgggtaaaaataattaagcactctagatttttatttttacgttttttgtaaataatgcatcaatgggtactcctctccgctcatgtgagtagggtatgaagtttgaaccccagacttcttgtgccacccaagggaattttctagttgaaccaactggcaccgataagcactcagatttcacatattgtttttcttgattttccttatgaaaatataacaatgtgctttatgcatcagggagcagttcctcaaatccttgagaaaactgaaga

SEQ ID NO: 83440 - DNA, 792 bp, Citrus sinensis
  Intron number 1 from transcript orange1.1g039094m (locus o range1.1g039094m.g) derived from phytozome v7.0 (chr-ID sc affold04864; pos 3198 to 3989 reverse strand)
gtactagaagaggagtgcaagagaatagaagggtttaaaaataataagattttgactttaaaataacagggaatgcctgacctctcttatttttgctaagtacttgtgaggttaattctataagctaaatagaaaaataaagcagaagatggtgtgtggcacacaactaataaagctatatggtaaactatttgaatggttctgagtagatttggcaatttaagggtttggaccgggctttgccaagcccaagcccaggcccaagcccttatacttcgtaaagagcccaggtcctctcaaagctcgcccacagggtcgggcataggccttgacgggcctgggcttttaaactaattttaaataatttttttaataaaattataaattctaaaaacataattatccaatacataatactacaataggctaaaaaactgaaaaataattctccatttacaaattacaaataaatttacaattgattgaaaaacaaaacccccaaatttgcaaaccaacaacaaaactcgaaatcattaaccaagcacaatattcttcaacattttctacattaatcaacaaccatcataaattcttcacgatattcttcacaactcaaaaataaaaaattcttcacaatactcctcaccaaattaaccaattacatatatttagacatgatattatacaataaaaaaattaaagcttaattgaggtggaataccgaagttggtgctggcttgttggtttaaatcgtgtcggcactggtttgggtcgcgttggaacagatcggtg

SEQ ID NO: 83441 - DNA, 794 bp, Citrus sinensis
  Intron number 1 from transcript orange1.1g045030m (locus o range1.1g045030m.g) derived from phytozome v7.0 (chr-ID sc affold00371; pos 75471 to 76264 reverse strand)
gcaaagttcttactgatttaataggtatgtgatcaaaagctcgcctatttatacatgatgctggtattttccaattgattgtatatacagtatccttattacactgtgacattcattatttattcatatggcatcagtttgtaagagtagaattatttaatcaaatttcaaggtaacttgttgatttttttttacaacatttgtgagtatagaagataaggaaagttaattaatacctaaaatttgaattagaatcctcttatggtttgaggttcatgaacttttaaagattctgaacaacatgtcttttaattttgttctaaaaagataataaaatcacgagggatcataatccaaaaaatttagagctctagttttctctgaaatttttcataaaactctctctaaagaaactattttcatcaaatcaagaagacatttgagtaaccgacataaaagtatatttcctagaaactcaaaagcaagcagggatagggacagaaccatgtcgaggcctgggaggcaaaagtaacactaagatatctttggggttttagtgaaatttaacccgtttagtgtgaatgttatgtttgccccctcaaatttctaattttatgttttggccttcataattttattgttttcatcaccgccctcgccgaaccaaattaaatcctggcaccagcagtccagcactgctgcataggaaggcctcaaatagtattttatcatagtttaatctccctgtcttctctacagctgaaggcttaggaattaaagagacagtgccggct

SEQ ID NO: 83442 - DNA, 592 bp, Citrus sinensis
  Intron number 1 from transcript orange1.1g032391m (locus o range1.1g031477m.g) derived from phytozome v7.0 (chr-ID sc affold00050; pos 287282 to 287873 reverse strand)
tcggggctggccttgctcctcgtttttgatccaaggtaaatgtatccctcacattttgaatcatttttatttggatattaaacaattttatttaaaatgcgaccaaatttgttaaaaataaaaataaaaaattagggtatgtttgttattaaggtgaagtgggtttaattgactgttacttaagaataaaatcactaggtatcatgtatcagttgtggcgataaccaaccgtcttttgccatcaaacagtagcattttggtctagtagatggcccgtctatgaagtattctaggttattggggttgacgagggtcttgagtttgtttgatggtattaagtaatttgttcatggtgctgggatttgttagcatcacgtggaattattagaaaatcctgaatgaatgcgtatgttatgtattagctgatgtcataaaacaaattcaggttcaaagacaagtacatcttgacatatgaatgttacagaagagcttactctgcgatcgcttggcttgttataacagcgtgtgtttaataattttttcggttgatacatatgaagactatttttgatcctttgtttttcacctgcag

SEQ ID NO: 83443 - DNA, 433 bp, Citrus sinensis
  Intron number 1 from transcript orange1.1g011567m (locus o range1.1g011544m.g) derived from phytozome v7.0 (chr-ID sc affold00074; pos 522247 to 522679 reverse strand)
ttaagcatctccgatttgcaattcttatcaagcaagttcgtctctccctcatatcaaattttacatgcgtttctagctcgatttattgattaatcttcaattttatatttaggtgtattaaaatgacgcttttcgtcatctgaattcggttcaaatgtcgatcaagtttgaaatcagctgcttgaattgattaaatttgattttttttctttatgctggatcgaactagcaagtgttgaaatttgcacgtaattctctcaatttatatatttttctcaatggatccgagtcgacgtgtaccttgttacattgacttaatcttagttatgttactttctgtttaattatgcttttggatgctaattgtggatattaagaagcaagatgcttgcagggagcaggtgtctgcgccgaatattgattgtacattagc

SEQ ID NO: 83444 - DNA, 974 bp, Citrus sinensis
  Intron number 1 from transcript orange1.1g040533m (locus o range1.1g040533m.g) derived from phytozome v7.0 (chr-ID sc affold00019; pos 1254493 to 1255466)
gattactaggcagccccactgatttcgattttcaggtaccaaggaaaaaagaaaaaaaaaaaaacgttttcttgatttttcaagtatcttttgttttgtattcttgttggcgttttgaatttttttaattatctgtttcgttaattttctccctattttcttgttgtttggccttctgggtacttgttaaagggagatcggtttatacccaacagaagtttgatgaatcttgatcaagctcacggtttgttgaccaacacaaccaaagaatttcggaatcccaatttcaatgtaagttcattctttctttttatttgttttcaaattcttttatggtttctttcttgggaattctttaaacgggtgcccaatgtttctttaaaaatttgtcttgaaattcgtatatggatcaagttgtgtattttgaccaagatttctggggtcgatttcatatattgtagtttagttcttgtgttgatcttactgtgtgatgttacctgatttggttttggattaacatttttttccccttcttaaatgggggcatgattaatggagtataattaggttaacgggtcctgtctttttccttgaaataggacgcatacagacagaaagtggcagagaatttgaatttggattcagaagggaaaccatttaggatgctagtttttaggggaagcccaaaatcaagaagaaagtcatatcgtctcattgatgaattgagaagggaggatgcagaggcattgagaaacagtaccgagcaaatccaacgtcgtcgtcaattgcccaaggtactcatctatttcaatgatatcagttgctaactaggaaaggagtcgaacaactatctgatgcagttgggatcatctgctgtcgactcaccagcctgaacttcatggtagtaactgactgtactttgattaatggcgtgtgcagaaagaagctaggattctggacgcaccaaatcttag

SEQ ID NO: 83445 - DNA, 544 bp, Citrus sinensis
  Intron number 2 from transcript orange1.1g041958m (locus o range1.1g041958m.g) derived from phytozome v7.0 (chr-ID sc affold00027; pos 117065 to 117608 reverse strand)
atttagttagacagacttggaagaaggtaaatgtaaacagagcttatgaagattctgttgagtttgaacacaacagaagccaaaaagaaaatccaagaatgaagcaaagaaccaagaactcacttgcaagatcataaacctgatcttaaacaccaacaccaggcaccacaattcaaaggaaaaactagcactcttttattactcaaaatgattataaatcttcaagtcttgtagaagaaattacaagcttttcaaagaactcagaatcactcaaattagatgaaaaacgaaagagaaatgttaacgctaacagatgtcatgaactagctctgtttataaagcatacaacgaggattcccagaggctgctcaacaaacttaacgaactaatgaacacgtcagcattgaagttgcatatcaaccctcaaacttaagtcaatctgtacaaacgacacataagtcttaactctttgcatttaaccccttaaaacagaaactgattcttcacagattctcccctatctcaaactacaactgaactttgt

SEQ ID NO: 83446 - DNA, 737 bp, Citrus sinensis
  Intron number 1 from transcript orange1.1g017956m (locus o range1.1g017956m.g) derived from phytozome v7.0 (chr-ID sc affold00007; pos 2535562 to 2536298)
tggtttgatacggaggacgagtctaggtacgttattttgcgggtattttttataatttgggaacaaaaaagaatgtttctttttccagtcttttaatttttattcattttatatggtaaaggttataatttctgttaatttagagaggaaaaggtgtttgcttttgtaaagcatataaaggtagaaaggcagccaaaatggtgtacgagagagggaaaaaaagaaaagaagaaggcatttttagataattttgatttttgaacgtgaaaattggggaaaatggggagaggacgaattttggtttatttgagttatttttaagtttagttaaagtgtggattggtgccaaaattgtaaatagggttgtgagttgtgaatgtagtagtttattagtattaggggtgcaattgtggaagtgtttgttttttggtttgaagatacatttttaagactgaaggcaaaaggggtttagctatgaagtggggaagagagactgtggatggttgattaactgttttatgggattgttattagattataataattgaattttattcattcattatgtgagttgactgcaggaactacttccttgtgtggttgctctctctgctgtattatagtggcctataaataataaattctgttactagtatcttaatctcatcttcatttcttgaaaagtcaaattgaatgattcttctctgtttccagttcatcttcagacagtgatattc

SEQ ID NO: 83447 - DNA, 900 bp, Citrus sinensis
  Intron number 1 from transcript orange1.1g000317m (locus o range1.1g000298m.g) derived from phytozome v7.0 (chr-ID sc affold00002; pos 1543325 to 1544224 reverse strand)
agattgctttgacagtaagtcatgcttttaatacttcccattttttttgtttttgacttttttttttccagataacaaagagctcaaagatggtaattttgttaatgtttcggtgggggtgaaatctttgagattttgttttgtttgacatttggtgggatgctgaattttttttttttgacttttattgattttatccgattttttagatcatttatctgtatataatctgtgttttttttttcctctcttgatcgtttctgtgttctttgaatttttagctcggtacattttgagttggtaaagttagcaaatttttttttaaaaaaatttggataagctactaaactcatttgttggttgtttttttttttttttttcaattttatcttcatttaagtcggtaaaaaatttgaacttttgttgggttctgttcatttgtttatgcatgatttatcattttccttatattttgaatttgtttgtacactaatgaataaacgtgctttgatcttcatttctgagatatgagttgttaagaattgtatattgtatacaaatacaggtgctttgaagacttagtcattgatcctgagtttctgaggcttgtttatccttgtgagtgtgctagtgaacaaatactaaataatcgaagattactttttttccttatatatattcaagcaaatataagcattggaagtgccttttatgtctagatttggttctgaaaataatgggttgttgtaacctgtagtgtattttcatagaagtaaaccattttggattttttgtttataagttaaaatttttatggtttatgcaaattattaagctgaacaagtttggacctctctcagattccaattgctggagttatatttgtatctgatgtgtagc

SEQ ID NO: 83448 - DNA, 525 bp, Citrus sinensis
  Intron number 1 from transcript orange1.1g004908m (locus o range1.1g002168m.g) derived from phytozome v7.0 (chr-ID sc affold00557; pos 59161 to 59685)
tgactttcttcgatcacaaccctcaagaagagtaagtctatatgttcataatttcaatttgttcacagggaaagatatcttttgtttatgaaagatttatcttgatagttaagtcttatgagtgatcatgaattgatagaaagctgaaaagtggtaaatcaggtttacaagtatagcatttgcctctctatgccctgaagcaactattatttttcaaaagtaaattacaaaaagttgttgataactagaggacatgattgatttatgatgctcaaagttggacttggtcttgaataaaatcttttcttcaatatgtgctaagtttgcaggagtgttagaaagaaattaagctatattttcatgttgttatgcatctgtccatttttcaattgtcctcttgaactttgggaaagttttgcagaatggctttcagtgtttatatatatatatatatatcttttgctcattctgaaatggatttacatttttgttttggtctttttcaggaacagtggcctaattcac

SEQ ID NO: 83449 - DNA, 852 bp, Citrus sinensis
  Intron number 1 from transcript orange1.1g045433m (locus o range1.1g045433m.g) derived from phytozome v7.0 (chr-ID sc affold03931; pos 5172 to 6023 reverse strand)
gtccattgcatgtacggcacgaggcacatgctgtgctcaacacacaacatgtgccttgagcttctcattattttaaacatctaaatatgtcttgagcttctgaatcatgcagcaatatgaggatgcatgacttctgtgagaatgcatacatgagaaattgattgattattttccttttcatagtactaagctaaaaggattttgggttaatacaactgatattttaaagttaaagaatgagatgtgaaagaatgtaaaatatagaaattgcttctggttacaatctgcaaagttgactagaagttcaagtatttgcagttttaacttgaaaagctatttgtacatgtacatggtaaagtttattggttacaaatagcattttcaattggaagatatgatgctagagggaaaaatggttcttctttacaatgtgtaaggtaaagtgagcttatatttgagatgttccttgtatgccaccttctatttgggagttgcctatgtagtatgggtgtctcgtggttggagggtgatagtattcatgttccttgaatcgaaagttagcataaacaacaaattcaaaatcagcaactgaggcaataaatagtatttagatattttactttcctgtttattcttcataaaattgacaaatagagcaattaattgcaagcatgggcacacttccccacatgagcttgtgttttataagtagctgtcctttggtgcatctctgttccttaaatttggttcatctctattttttggcaatcccctatgagtttgtttcacatgtcatattaatttcgttgacctgcactgccttaaattattgtcctcgtacaggagcttgaa

SEQ ID NO: 83450 - DNA, 551 bp, Citrus sinensis
  Intron number 1 from transcript orange1.1g046405m (locus o range1.1g046405m.g) derived from phytozome v7.0 (chr-ID sc affold00002; pos 3946910 to 3947460 reverse strand)
ttcttttcatttaccatcagccaactgatatcaaggtgatcggtttcttttcatttttcttttctcatatttccgaatcctattatgcttttgattgcatgttctcattcttcatagactttattgaattcttgtttgcatgtttggtctttgaccagtatttgctaggttatatgcctgcgtattccatgtagtgtcttctatttataattatagataaatcaaaattcgttctgaaatatagaaaagtgtagccttagatgagtttagtagcaaagaatttagaatgacgaaatttggtatcaatatagcgatatgctttccacattataaacatattggttctttaggaagtgattgagaacattgcgagttgcttgcttgacaacacgtaaaagtgatgaattacatagcttaaaaaacttttaattagatgggaaactcagaggattctcatttctgttgaatcttgtaattgatgctggttggcctaatttgcagttgtttttattccaggatcctgaaattcaacctttggctgagcaagactc

SEQ ID NO: 83451 - DNA, 726 bp, Citrus sinensis
  Intron number 1 from transcript orange1.1g020229m (locus o range1.1g020229m.g) derived from phytozome v7.0 (chr-ID sc affold00117; pos 12951 to 13676)
gactctcaatttctctgctcttctttctctgtttggtacggttcccattttcgttatgtcttctctgcagtagcgtttttacgccgttaatcatgaataagcattgaacatggttttgatttccgagcttttggatctaaaaaacaaaaaaaaaaattattttgtaaaaaactcactaatactgaactaaaatctggtcattttctaaaaaataattaactttaaaagaattttgaacttgatttcattttctaatggactggtgagtgactgttagtgttagatctagtgtttggctgccgtgattttgctagatctgaacgtgaatcaatcagatctgttattaatcttttccgaaaaacaatttgaactctaattgttactgttttggaatctatttttagattcttctttttcagaatctatttctaaaagtttttgttttaatccttcaaaaatgactgaaagtaaatatttgttcatgtgattacagaaagaaaaaaaatcatctcaaactcttggattattatcagcttgtttcaactggtatttttatttttatttataaaaaaataataatttaagattttatgctctgataagtgtacttgatttcatttgatttgagcggtaatagcaatgacccatccatttgaatgaatattttcttgatttaatgaaagtgactgattttcgattcattgatgacgtgattatgacagtaaa

SEQ ID NO: 83452 - DNA, 669 bp, Citrus sinensis
  Intron number 1 from transcript orange1.1g011990m (locus o range1.1g007124m.g) derived from phytozome v7.0 (chr-ID sc affold00661; pos 37555 to 38223 reverse strand)
tctcattgtttcaaggagataaggtgagaaaggttctgtgacctgtttaactagatgtcgaatgtttgttttgtgtttgagagtcttgattcatgatcataattgcagattgaatttatgattgtttgtatgaatatagagtccactttgtgtttttcattttccattcactcatttgttggtcattagcataaacgttagcgcataatttgttggtatttagtatgcggaagtagagaagtgatgagggaagctaggaacttggcttgctcttttgtcagtgtggtcttccttctacacttggtcatttgtctactttgagcatccttgaaatagctagacatggcattggttggattaatgctaatcgttaagaaagtgaatcaactaagctaattttagaaatgatctctatcaaatcctgtaaactttatatgttagcttagaaatctattttctttgtttcattactcattacttgaaacaatcactgagcccttatttctattcttttcgtattagtttgatctatctttttccccaaaattatataaactttatatgttagccaagtgtggactctgatgatgtttacttgacggcatgatcaggtgggctatgatgaagctttgatgaggaattatgttgactgaaacataattttacatc

SEQ ID NO: 83453 - DNA, 911 bp, Citrus sinensis
  Intron number 2 from transcript orange1.1g025255m (locus o range1.1g013023m.g) derived from phytozome v7.0 (chr-ID sc affold00007; pos 222071 to 222981 reverse strand)
acggaactgtcctttttgcaggtacttcctgaacgtgatattcaacattcttaacaagaggatttacaattacttcccatatccttagtgagttcgcttcgttgggttcacacttcctatttcgttttgtttgacgatgtgaattttatcaaaaacccttttccgttttacgtatgaaagtttgttctgtgcagttttgtgtccgttattcatttgttggttggggtggtttactgtttggtgagctgggctgtgggccttcccaagcgagctgtaagtggacctattaaagcccactaatttgtgccaattgatcactagtatttcattgagatcgatttctttgattttcggtagactttccatttaccacttgccatattcacagtgtttgacgatgtatgaactgctgctggttcgattcgattcatatgaatgaattaattaatatttgcttagccacgtggtgtttgtgtatttcttcttgcattaccaaggtcattggaaatgattttgattttgagagttttattgattacatatcacattcatgattaaacaattaataaaaatgtaaatatttaaacatgtcttgatcacacattacagtagctgtgcatcagcccatgtgtagcatgctttctggaagcttaagaggaatttaaatacttttgcatgccgagcttggaaaacaattgcaggtagaaactgattaatcatgtcagacatatgtttgatttaaaagactgatattattattatgttgagtcataaattaataatctttattgcaacgttgagttctcaattgtctcattgcgattttctcccagaaatgtgtactcataatatcacataactgtattttttgtgtagcctattgattcaaaactcctgaagctcttaatccc

SEQ ID NO: 83454 - DNA, 742 bp, Citrus sinensis
  Intron number 3 from transcript orange1.1g029582m (locus o range1.1g029582m.g) derived from phytozome v7.0 (chr-ID sc affold00019; pos 1715258 to 1715999 reverse strand)
gccgccggcggttgtgtttacccatcaactggcaggtatgcttttatgtttttgttctcttgattgtcttgctacccagttgaggttgttccttgtgtgtgcgtgggatgagaattgatttcctttttggatgctggtcagttgtcccgttctagatctccttatcaagaccaaaatacgtcatgaagaaccacagactgattagatttcatcatcaactgtcttaagaatccgatttccaacaatctttgctttttaaatttcttacttgcgagcatcagtaaagtagttaggacttttgctttaggatttcatgttatgaacaacctttcactttcgttcacccgcatgttgcaataattgtgatccacaactgggttttgcttgcatgtgcatcactgtatcagcttttgtgtaagatctatcactcgtctctctgtctttctttctttttttttaaaaaaattggatgattgatttgtttgcattaatttgttcgcaagtcagaatgtttggcagctctgagctgttctgatgtcgacatttcattagttctttgtcctctttctccccggagatattgtttccgcatcttagctttgacatctgttcctgcatctcactcagtaccgtttccgataaatgtttgctgtaataatttctattattttttatttcattttactaaagtcttcttttaacaacagccccgggacaggcacaggcacaggcacaggcgcag

SEQ ID NO: 83455 - DNA, 595 bp, Citrus sinensis
  Intron number 1 from transcript orange1.1g002062m (locus o range1.1g002062m.g) derived from phytozome v7.0 (chr-ID sc affold00138; pos 278436 to 279030)
aaacgccagcttcaaaatactgaaaaaccggtaaatatcaagcatatttacattttctgcatgtggaattcttagtcttcgccatgctttggctttatgattggcatatttacaaatctactgtttagttgttgaatttctgacagatgaataattaatttagataaacctaaagcgctgaattgtgtggatgcattctaaaatattttccaatggtgaactttcagtggatcggttacatttgggattaaggtgttatagttattgtgaaatggaatcgctaattttcaaagtaaggggggttgttagtacttacagctgtcaaaattagccccactttagccaccgtactgtcaaaattaagcagaagtacaacagttagaaacatactttcagaagctctatatatttgtgaacgtagttgcttttgtattgtttcctttttcttttttatggggttcccgcgatgaagttaccacagttgtactctttaatctattattcatatgacaaaatttgtgcgtgcgttggatggggattatatttgattacattttgatcttagatgaatctacttttccatttgtagctggag

SEQ ID NO: 83456 - DNA, 947 bp, Citrus sinensis
  Intron number 2 from transcript orange1.1g011338m (locus o range1.1g011338m.g) derived from phytozome v7.0 (chr-ID sc affold00078; pos 397831 to 398777 reverse strand)
acatctttggtgagaaaatcttttgttgtgtaatcgtcttaggtcaacggctcctctaaaaaataaaaaactcaaaattctcagctatgcttctaagtctttcgttaacaacctccaaataactttcatgacttggggatcggtgacgaaaagcttagaagtgttatcgagatatcaggaattttgatgaagaattggggaactatactatagtaaccctcaaatcttatttttataatttctattatctttgtgcccttagagttaacttgttagtaccactcgccctttatccaagtggttatggttgtcttcctcacaatttgtgagggcagcaatttcaatccccacaaaaatattgtgggagtaattcatcatttaaagagtggagtagacattcccacaaaagcattataggataattccttcctcaattgaattattgtgggtgtaatttctcctttaaagagtggagtagacattctcacaaaagtattatgggataattacatcctcaattgaattgtataattgagtggaggcagtcttttcccttacaatatgtgagtggaatagatatttaattgagtggaggcagttttttctcttacaaaatctggacaatacttaattagattaaatgtaaactaatcccatagatcagtgtccaaaaaaaaaagaattaacttgtttagttttacgttttgtaattaccaaatgcacatattttcactttttttttagtcttatcttctttgggtttaatctacacgggtttacctttgggatcactaaaactttttttactgttgttagaggttcttaccagacagtatgagactttggaaggtgcctttatttatgattatatattttggttttatttcttcttatagttatttgttacaatagatattcccctggatctgctgcaacgctacagaaaa

SEQ ID NO: 83457 - DNA, 723 bp, Citrus sinensis
  Intron number 1 from transcript orange1.1g008595m (locus o range1.1g008595m.g) derived from phytozome v7.0 (chr-ID sc affold00005; pos 647486 to 648208 reverse strand)
aagtttcgttggggttgttaggtgtcatctctgaggtcagttattatttttttttttacaaattttttgttgtgttatgttttggatttgacgatgatactataatatactgtttttatggattgtatagataattatagttgctttataaagggataaattatcatttaatgaattaatttttttatacaatattgtcctatattttttaaataatgttaaaatattttgtccgtccttctaccatttaaatgttatttttaaaaataaaaaaacagtgagcaatgatcaaaatgtttatcattcctcattgaatgttaggctttttatttttatttttttccacttaaaaaagtaactaataataggagtatccctaccttccaaattatgtttaaaatatggggagtaaataatcaaaatgaggcataacccggcaaaaggataattaattaccattctaaaagtggaatcaaccaatgtccacaattacaaatatacttttttcttttctttttcttttttttttttttgaaagtcaatgtcatgtgttcaaagtttgctttttaaaaaacacacctttgcttccaagttaaaaaaaaaaaaaggaatcaatgaacatggttatgattaatactgcctagtggatttattgattgaataaatatgcatgtgaaacaaattacaggtaaagctctcactggaaccgggattcaaaagaag

SEQ ID NO: 83458 - DNA, 517 bp, Citrus sinensis
  Intron number 1 from transcript orange1.1g039298m (locus o range1.1g039298m.g) derived from phytozome v7.0 (chr-ID sc affold00007; pos 1543398 to 1543914 reverse strand)
gccttctcaatccatctcgtgttttcgcaggcgtaaatacatatctcaatccaatttattcatttgtttatttttttgcatcttcgatctttttttttttttgtcaaatcgcaaaatttacgcttgatctgtatattagtttctctcgtggtatacgactttagaaaatttaattccttttcttttattgtgtctgagtataatgtaattgattgtttcaaatttatatttatggcagactttccttttgtcaatgtctttttgtgagatgatttgattgtatgctaatggagaagcaatcttctcttactattagaaagcctgtattataagtgtttaatggaaaacatttttgttaatggcgtttctttagtatcttaaagctagaaaatttgtttctggttatgtgtaatgtaaatgctaaactaaatattccacggactttaacatgtttagtgttcacaatgtttctgattctttagtcgaggagaaagaatagggagcctaaggaagagaa

SEQ ID NO: 83459 - DNA, 598 bp, Citrus sinensis
  Intron number 1 from transcript orange1.1g036208m (locus o range1.1g036208m.g) derived from phytozome v7.0 (chr-ID sc affold00014; pos 449574 to 450171 reverse strand)
aaccccaccaacactgtttttggtatgttccttaactcccgttgaacctgataccactgattctgtttgcgattagttctttgatcattctttttcaaactgatctatttggcgggggagaaaatagaattcaaccgaaaattcatgagaaaagaataatgtagataaaataggagaaaataaaaagaaagttactccgcagtctattgagtttgtattcaattttatgtgtattttatatccatgcacttaaggtatcattgtttctgttttagttctttaaccgttcttgttgaaactgctttctttagccggcgagaaaataatgtgaggttctaggagttatactctgttctactaaaaggagaattttggggggaaaaaatctgtgaactctgaattgcatcccgattttatttatttatttatttttggttttcaaatatgcataatttacttgatttaatggttcttaattgattctgtttacgacatgtgatgaacatagcagagcattcttagtttgtgacgctgaaagaaagttagtgattttagaattgtatgctgactcgtgttttgtttgtatggtgatatgcag

SEQ ID NO: 83460 - DNA, 268 bp, Citrus sinensis
  Intron number 3 from transcript orange1.1g029389m (locus o range1.1g029389m.g) derived from phytozome v7.0 (chr-ID sc affold00019; pos 1431750 to 1432017)
tcctgtttgcagcaaggtatttatatacttttgtttctttcatatttttgtcttttgattgcttcgagttgcccttgcccctttcccttgtgccggaaaaacaaaatttgaaatttccaagactttgataatgaagaaaaacaagtatacaagttaaagataagacagtttactagtgaaacaacttattacactagtgcttttcctcataacgtagactgattttataatgcaactgaataatatcttgggttgcacactgtaggtg

SEQ ID NO: 83461 - DNA, 648 bp, Citrus sinensis
  Intron number 1 from transcript orange1.1g039605m (locus o range1.1g039605m.g) derived from phytozome v7.0 (chr-ID sc affold00310; pos 75896 to 76543 reverse strand)
agcaatctgttagccctggaggtgcgtctggctcggtggccagctcttctctgccatggtagataacgcgtttgctgttggattagaagggaatttattttattatttttaataaaataagcatgaaattactgcattgaaaatcattcatttgtagtttattctctcatgttgggtcctctatgtctggcccctcaagaaaattaactttataattgtttatttcatttctctctccagggactttacttattttatatttttgaccttttttttaatttttatttttaactatcttacagacccaagataatatatttcttcgttttgacctcctacatatttcttcctgtaaatattagggttggaatagtttattccatctttgtttttgtcataaattactcaatggtactgctaaaatttgatcaatatcttgactaataaatattatggtttatggagagccatgaatgttatggactaattggttaatgagaagtcagaatttgattttactgcttttgttaaaatttagcttccttgacttcaattgaatgtgaatgaactctgaagttgatactaataaatgaattgcttgtgattgattataaaaggtagtgcgcaagccagcccacctctttcttg

SEQ ID NO: 83462 - DNA, 522 bp, Citrus sinensis
  Intron number 2 from transcript orange1.1g037660m (locus o range1.1g037660m.g) derived from phytozome v7.0 (chr-ID sc affold00080; pos 302668 to 303189 reverse strand)
ggctcttggtaaagttcttatatcctttttcaaaaacttgttttcacagcatgttactagattatttctcaaagggtaaattctccttcattctctagagtttggactaattacttaattttcaagtattacattaaacatccatagaagtactttcagagctgttgaatctctcttttcaagggtaaagtggtattgtttttgttctatataatgaaaatctaatatgaaacagataaaaattaatgaatacttatgttttaaaagagaaagatatagaacaaaggactttttttaaaagcagaaacttggagaataggcttatacactagaattaaggaaacattaagtaaattatcaaattttctttcaaattcaattcttaaatcctgatcaaaatgtgaaattgatcaatttctgctgatttttaatttacgaaacatatttcttttcaataataatgacccaaaacatgaccaaactagtaggccctgattagtgttaatattgtgtaagccaggc

SEQ ID NO: 83463 - DNA, 900 bp, Citrus sinensis
  Intron number 1 from transcript orange1.1g020898m (locus o range1.1g010848m.g) derived from phytozome v7.0 (chr-ID sc affold00501; pos 78300 to 79199)
acactggtattttttaaatttttatttcttttctttcttttctttaatttttattcgttaactttcttctgtagatgttacgttggtgtaaatcgtgagcgagctattaacctttatttaaataagatattatattttatgtcatgttgtattgtattatattatattattatatgataaccatcattaaaggggattgaatatgtttattcgctagttttgcaaggtataaagtttgattatgatggatccatttttccttcaactgctgatgacttttagctgctgatttttttttttttgggaatttatcgtatatatttgtttgtaaaaagattattagatttggtccttataaaattctttttttattattatatgcgcacaaagttttttaaaaatcatttggttaggggtttcggtttacagtaactttttttaaaaaataaaaaataatagtaaccccaaaaatagtaaaaaaatctaaaaacgacaacttttttataactattttctgtgagattttctccaaattatatttaaaaaatctaattgtatgctaatttctaaaaaataattttggatggcaaatcaagcttcccctgagttttattgttaatatatattttgtcccatctctttatagttttaaaaatggtcaacctcatgttctatacaaaatacactgaggaatttttgttcaataaataggactgcaaatcaaattctccctgggtcaataagtcatcttttgctctttgggcaatggaaattgtctttagcattgttattttaagtgcactttagatatcattttggcctgccctacaagaataaaatatgctccacatgatcctcttagcactactgctgatttatcaggagcaatatcagttgttt

SEQ ID NO: 83464 - DNA, 838 bp, Citrus sinensis
  Intron number 1 from transcript orange1.1g003828m (locus o range1.1g003828m.g) derived from phytozome v7.0 (chr-ID sc affold00004; pos 135970 to 136807 reverse strand)
accatagttgtgatcctaactgccgtactgaaaaggtgaacatccatttgagcatctttttcatgcagtatgtatgttgaaattatatttttagtttactatttgttgttatctcgttgaaaatagtccacatccacagtggcattatggggaaatttttcctatacttattgggatttttggttcttgtgagatactgattatggttctgtgatttcactggatttgatttgctttgttctataagaatagttcattttgtggaataaagccaactttgttcttctttaggcattggttttaaaagaatctaaagacatttctctccccatcaccttaaagaaattgtcatgcattctgtataaaatttttttggaattttttaaaattttttgtgcatccatttcgactgttcatttttggcacttcactgtgcctctttttgctgtctttgtctcatgtgaacttctggttgatattttgttcttcagttgtatttcattttgtttggtaatatcatgctgtctttcttatggaaagaaaagtcaactcataagtaccaaacgttggataaaatattctgatatcatgaaatatcaattgtaacaaacatgaatacatcaattataaccaattattgagagtgagccaaatgtcattagacatattttttttttttgaaatttttgggtttcttatccttatcgtgttaatatggcttcccattttattgaaatctccattctgacatcaatgcatttgatgtactcatgttggtgaagctttaatctaacagtgttcactgttttgtttgctatcgtggtacagtggctggtga

SEQ ID NO: 83465 - DNA, 875 bp, Citrus sinensis
  Intron number 2 from transcript orange1.1g044998m (locus o range1.1g044998m.g) derived from phytozome v7.0 (chr-ID sc affold00010; pos 864527 to 865401)
attgtcccttcacacgcttcaaccgtggcctcaaggcaagagcaaagattagagcattgatcacagatcttgtacatgaaaggagagcagcattgaagcaaaactctgcttttctaaacaagatttcatgacttgtttgctcagtatccaaagcaagggcaacccaacagtactaaccgatgaggaaattgtagataataccataatcatcatgattgcagggcatgacacatccagtgcactccttaacttcttggtcaggattttggctagcgatccatctgtttttgccaacattgtccaaggtctgagatgaattcatttttcatttttctccttaagatttggtccatgcaagtgatatttcaactatctccagctgttttgccatagtgatcttacacgtaatgcataaacttctctgtagcaagcggaaataactaagagcaaggctttaagggagctcctcacatgggacaatcttaccaaaatgtaagtacacttggagagcagcattgtagaatttaaggatgacccctcctttgttaggaaccttcaggaaagctgttagagattttgaatattaaagatatattatccccaaaggatggcaagtatgagagaatacttcctatcttttgcctcctcttctttcccacatatgttttaggtacttaaccggcaatttgctcaccaaaatatgccactgatatcattttccacatcagtaacacacatggatgaccatatcttcccagatccatcagtcaaagtttggtcaccatctcttcccggatccatcaaagtagcgctgtggcattcagatccatctctacccagatccatcaaagtagctctgtggctttcagaggagg

SEQ ID NO: 83466 - DNA, 650 bp, Citrus sinensis
  Intron number 2 from transcript orange1.1g012192m (locus o range1.1g012192m.g) derived from phytozome v7.0 (chr-ID sc affold00060; pos 426377 to 427026 reverse strand)
tacaaactggagaggaaattgctgtcaagctggtatgtcatttatacttctagatttacggatggtgtttggtttaattttatttgctgctgtttaagtttgatgatgatattactttacttttagtttttgatgatgatgatgatgcatgggtagcaatatgaatcctatttcatctttatctctgactctttttggattttattttgtttttgaggtactaatagtccatttagaacgttgctttctgtcattaccaacaagattcatcaaaattgctactaattagttatatgtaaaagaaaagccattctgtttgtttttttaaattttaatattgaacgcaaccattaggagattgttattttacttcaaggaaaattctgtggctattttagcactggatgagctttgggggggggggggacttgttatatgtttcatgtgaaatgtccttaagtcctatttatgttatttatgtgaagtgtaaaaagcaaagttgatgttttcagtggtgaatctcatctatttgtgtgctatcttctgtatttatccttttccttttctggtagggggatcctcaccttttctatcgtttgtgtttttaaattttaggaacttgtgaagaccaagcatccacagcttcatta

SEQ ID NO: 83467 - DNA, 780 bp, Citrus sinensis
  Intron number 1 from transcript orange1.1g041332m (locus o range1.1g041332m.g) derived from phytozome v7.0 (chr-ID sc affold00026; pos 792698 to 793477)
cagaagaatttttggagcagggaatatctcagcaggtactctccttgcatgcttcgtaaatcttgctgctgtaccattacttgttcttagttttatctccttcaaagaatttttatgttatgcagtcgttatgttggtgtcttgtggtgtaacttttggagttgtggttttggggatggtgaaagtgtcaagtttgtgtgtcctctttgtcagttttcatttggactaaaggagcgttgagaaagtgtactatgaatgccgaaggtgcataggaaatttcatggagtcacaaattctcatttttaaatctgtttttgggtaatattgttccttcattttgtaatggccttttgatatcctgactgacatgcctaaacagactaatctgataaacgcgaagcttccattgtttatttcatttctgtaatcaattggaatcttctcaaaggtttttttttttttttttgtgcgtgtgttatgaagccggaaaatttccttaaagttaaactcaaggatcaatattgggatacaaaagcatgcctctgccatctttgatgtagttgatgtgtggaagagtggcagtgatgatgagaaagttgaaccaccaccccccccaacacaacatgtttttatatgtttaccaatggtcattatgttgagcaattatagatagccttgaaatgtcctgctgtctaatcatttgatttatgattaacatactgataacgttgatccactgtatcagaacttcaagcgggtatcctgtacaactgtggtttc

SEQ ID NO: 83468 - DNA, 691 bp, Citrus sinensis; identical to SEQ ID NO: 79030
  Intron number 2 from transcript orange1.1g030734m (locus o range1.1g026883m.g) derived from phytozome v7.0 (chr-ID sc affold00003; pos 3864756 to 3865446)

SEQ ID NO: 83469 - DNA, 827 bp, Citrus sinensis
  Intron number 1 from transcript orange1.1g004063m (locus o range1.1g003487m.g) derived from phytozome v7.0 (chr-ID sc affold00109; pos 122069 to 122895)
gcgtcggctcaggtgttgccgacctcacgtaagcaagagcatttagaagctggcaagcgcaaggtacctttcttttttccattttgtattttgcaatggcgatgaatgttaaacgctgcgtattgattaatttgattggggctgttttgtcgttgattttgcacaaaatgtatcatattttattgttgcccctaacgaccaaattatcacaattgtttttttttttgggttgcaatatgactctagaagtgtttcactactggatttagccttatgggtgagttaatttacccacgttttgttttgcatagagcatggatgttaatagaattcaaggtgcaagtgcaagtgcaagggcagtttgtttaaatatgaattagtcgagaatcaaataccgtcaatgttacacctctaggattattctcaactttcatcaaagtccgagaaattataacaattattattgttctgtagattacagtaggtaccagtcctcccttcaatgtcgtgctttgtgttttctatgcgagctttctccagttttctggtcaaagatgaaggtgcttaaagtttcattgtcattctaaagcagcatgcgtaatttttttttttttttgggtttaatactcatgtctatatgtttttgcatgatatcaaaggtgttttcattagatggattagaattttcagtagttaacctcttttaaaagttgacatgttctttcctttcctcttgcagctagaggagttccggaagaaaaaagcagcagagcgagctaagaaggcatcatctgttagtcaacctcaggcttctgattttagcctac

SEQ ID NO: 83470 - DNA, 377 bp, Citrus sinensis
  Intron number 4 from transcript orange1.1g017219m (locus o range1.1g017219m.g) derived from phytozome v7.0 (chr-ID sc affold00016; pos 720994 to 721370 reverse strand)
ataaaaaactaaacctgagagtggattcgaaacaggtattaaagcctcaacgtcctcggtatgtggttgatgctatatcatagtggttgcgccaattatctagcggtctttatttaataattttatgcgtagaaatctttctatcagttttgaatgcttgtaggttttggttttatctgttgtccttccctgtaggaaggaatcatagtacaatgttattcttactctgtctttatttgtatgaagtgcatggatgccttatcatttctttcttcacctgataatctgtttttgtaatttctgttgctctttagtgtagcattttctatatgttcattctgttctttttcttatttaattgcctgcagccttctagt

SEQ ID NO: 83471 - DNA, 484 bp, Citrus sinensis
  Intron number 2 from transcript orange1.1g017219m (locus o range1.1g017219m.g) derived from phytozome v7.0 (chr-ID sc affold00016; pos 721667 to 722150 reverse strand)
gtggatttgtatataatacttcttagatattcaaggtaagaaatgcaaaatattaatgctatagcctctgtttgatttttgattttttgaaaattttatgaatatgtcttatatgttttatactgtgttcaaattatatccaagaagtttgaattttatgtcacagttcgaaaacttgttggatcattaatacttggggcaaaattcacatacttaagcttagagttctcatcttctttggacctatcaactccttgtatagagaattgctgaaagactagaatattcttaactctcggtacagaaagtgttggataattaatgcaaaatttttggcaattttttatctggcaacactgtaaagagagcacgtagtgcatggtttaagaaaatgcagatgtctgaacctgataactgtcacacaaaacttattcttgatcttttcacagtttggtgtcagaaactataccattccatcgggatt

SEQ ID NO: 83472 - DNA, 710 bp, Citrus sinensis
  Intron number 1 from transcript orange1.1g004589m (locus o range1.1g004588m.g) derived from phytozome v7.0 (chr-ID sc affold00049; pos 430840 to 431549 reverse strand)
agaaactggacgtgaaaatcttgtattttaaactggtatgttttttttcttcttctgggttctctttggtttcaagttttctttgatggttttgtttaatattttgatacagaagattaaagagcttgtattttacaatacaagagttttgtttttatttgtttttgtgggtgttgaagtttgtttcttgtgttatttatagctgttggtttgatctttcgtttagtaatttgattgagttttgtgttttcattggtggtttacttatttgatagcattctgttttattaaaatactttaagaggactagtttctttttcatttcgtttctgggttcttcttggttttatatttattttttaatttgatcgatgttttctgatttttttttcttttgtggtaaattagcaagaaaggattagttggttatatatttaatttttgtggtttatatttactatgagtcttattgggttctttgtctcattgtatttgtctgattttttgcatttggtttagtgttattgttaatgcaagctaagccacataaactggtggcctcagagtggttttttttttcttctttgttcttctttataagaaataaatttgttgtgggatctgaatttgggttgctgatagtgtggtattggtttctggaatttgaatttgaagattcttgttggactcttgacaattcagtgtcattc

SEQ ID NO: 83473 - DNA, 903 bp, Citrus sinensis
  Intron number 1 from transcript orange1.1g016654m (locus o range1.1g016015m.g) derived from phytozome v7.0 (chr-ID sc affold00003; pos 4157817 to 4158719)
ctttgctgaaatttagttgagcgtaatttttatttgtaagcttgttcagatcttattattagtcaatgagattaaatagatctattgttatctcttgtatgtggttctatgatttttattattttgtcattttgtgttttttgtgtttcattctttcttttttttccaaaatttgtcacagattgtctttaaatttgttaattaattagttatatacttgtctagatctattttacacaatatttgatcgggaagtttttgtgagtgttagcgtgactaatcaaatatgctgagtgctacatttagaattttctcaatattcatagtttctcaagtttttgttatgttcagatcacaatcatgcggtcttactgtatggaggattcagatctgtttatgcttctgttgttttcttgtcgtgataagtttggtgttcggatgttgcttttccttacgtcgtaggcaatagtgctacttttaacttgggaggattcagtcataaaattagatagatgatatgtatttgtttcccatatcacaagtgctggtttctagatcatcgtaggttattgttagcacaacaactagacacacctttttgaaattttacattaccttttatattattccccagtcaacatttgagagcttatttgaaaatcgtgataatgtatctttcaatgattgcttaacgggttcttgttcactctgatattttactccaattaacattcttgataactttttgtaattgctaagaggtcttttgttccgcttatgaactattttagcacatttacgattgcttgttggtgtgttatgaattgatatgcgtaggtttctacattgtatcaacccaatttttgaatgaaagtttgtttcaattctgcaggaaaagtcaca

SEQ ID NO: 83474 - DNA, 626 bp, Citrus sinensis
  Intron number 4 from transcript orange1.1g010123m (locus o range1.1g010123m.g) derived from phytozome v7.0 (chr-ID sc affold00022; pos 1342715 to 1343340)
tcatttgttatcccatcgcgtatcctattggaaaggtaatctcataattgatggttgaattttgaattttcttttacagacttgtaacgccagatgacagacttgtataattattgcacttgggctcagatgtttattggtaatagcagcacaaatggtataagatttactttttttaaacaagtattataaggtacttgtgaagcctcatcagaagatgataacagaatgttattcaactcctattctggatggggacgcttttgagcttcgaacaatatgaattgttattgacgtatgccatgagttgccaaattgtgattttgttctatcttcgtacatataacactatgcataccattgcactgtgctccttgaccactttcttacgtctaatcaagttaagttattcaagctgcataattgtttttttgctacatttcaagaggaggtgttaggtggtgctttatttgtttgggagattgctttgttgcataatttgcataatttgcataatttgtcattttacttgacattgtaattgcaccattccatgtcccacaaaaaagaaataaggtgttgcttttattgagaatctttctgactcaaaagacatcagattcttg

SEQ ID NO: 83475 - DNA, 715 bp, Citrus sinensis
  Intron number 1 from transcript orange1.1g013287m (locus o range1.1g013287m.g) derived from phytozome v7.0 (chr-ID sc affold00498; pos 26665 to 27379)
cggccctgtcttctctcattcctctaatattcttggtaattttattgtcaatttatgttcgtttgatttggatatctttagtattgtgatttcttctttctttttttgtgttttttggttctgtgtatctttaatatgattcatataatgagtaattatatatgttatggtaaaaaaaaaaaacttagatttttttttttgttggggataaatttggggaagcattttgtgtttgtatggctagaattcggtgagaataagaaggtcatgggttttctgcaattcaaaagtggaaaaaaaaattgaaaatctgccgaaactgaggttatttgtgtaggggcagttttggttttatgggagtgtttcgatttaccaccgtgaagtttatgtagtgtttgccttgctttgtcttttgagttctcggggagattttccaagaagagtctagttgattactcgacatgatgatttctttgtctatttctcatgatttgtgcggtagtaattgcaaattattgaggaggcttctatgttacagtcttaacatttcatgtgaaaatacactttttgattcattcttcgtaattgtgtttgttaagaaaaagataaactccgattatttttactattattgttttgtccctcttttcttgagtatttgattatgatgaaaaaatgtattcttccttgagcctctgcagctcgggagaaagcc

SEQ ID NO: 83476 - DNA, 652 bp, Citrus sinensis
  Intron number 1 from transcript orange1.1g033870m (locus o range1.1g033870m.g) derived from phytozome v7.0 (chr-ID sc affold00688; pos 37773 to 38424)
ttcactgaatcttggccgcaagcaagtctcaacaggtacataatattaataagtctctctgatttcctccactatacaatctttacaattgaaattacgacgaccctttactgcaaatcagatctacttataataaaattcctatttttctgttcggtctctattgatctttttattttttaattttattttttcgcccaatcacatgtaatgataaatgataacttgctagtttggatctaaaatttcttcgtttatttgaaattttaaatttcttttatggatcgataaaaatttatatcaattagtcacttggatctgcaaagatgtctatttggtttagggggagaaaaaataagtttgtcaatttcaagagcttcgttgcagtttatgtggctgattggaagagattttgattacaatacaaagctttcattcattcactcattcatgacagttaaagttaaaattcccaagaaaattgagatatggctatctgttcattttggttttactgtacatttaggtctgttggagtataagatatatagtgcaaagagtattaggtatcgctatatatgttgtttgtattgaatgttcttgcgtgattacgtttgtgtggagtttaattttgttggagaatcaggaaagc

SEQ ID NO: 83477 - DNA, 371 bp, Citrus sinensis
  Intron number 2 from transcript orange1.1g033870m (locus o range1.1g033870m.g) derived from phytozome v7.0 (chr-ID sc affold00688; pos 38481 to 38851)
agaagctcaacacattgttgccgctgccagaagtaatcatagtatccttattcttgttgaattgtcgaaccttctgtattttgatggatctgtgtttattcatgcaaactgtttgcccaattaatgtgatttagagttctttttatttcttataacaaaattttagcagcatcgcttgtattgatctcttttagttctatcatttgtcgcttaaatcttttcttcttcataaccatttgcaaaacatctgagcttacggtgatatgtatgcccaaaatcccctgtcttagacagtgcttttcttgtgtttattttgactaaaaccgataattagacattatatttgaattttattttattttaaagcaaaa

SEQ ID NO: 83478 - DNA, 959 bp, Citrus sinensis
  Intron number 1 from transcript orange1.1g006046m (locus o range1.1g005878m.g) derived from phytozome v7.0 (chr-ID sc affold00141; pos 297714 to 298672)
ttcaacaggtaattaattttttttaattaattaatttcttcgattttcttttctttcattttttttaaagttgtataaattagttagaatttttttttttttttgtaattgactgtgtgaactgtagtagatatagtttttgtagctttcttaaccagtggaagtgatttttggggaagaatattatcagtgcttctcctaccaagcgcttttggaagaagcacccttacgttaagtaaaattgcattaagatttttgtttttcaggtagaattgctatttatagttgattttgcttagaatttaagaattagagtactggaacattgtctttaattatctgccattgatggtatcgtgctgctgttcaagtttttgataagccaatattcagctctaatagaggggggggggaggggggaagacagtagtcagagctttgttaactatgctgttgaaactgctgtgagttttgaacagtgtaatgtgtatggtaatttttggattaaagtgcttgttaagtgtatagtgtctgtatcaacatatgctttgggaaaaaaattgctgaagttgtaaatttatttattttttaactttttcatcactcaatttcatgcaagtaatggaatagattatgaaataagcactatgaaaacattttgacaaagcattttttggtacagattataaaataagctactcttaattttcgcaaaaagtaatccctaatgagccctttggttagtaatataaaaaacaacttatcatttttgaattccataatcactgcacattatacttctttgtaaatatgaatttaaatttgcagattcagcttgctttacatttctttgcaataccatttccgttaataggcaacatgcttctttgatttattctcgtctgtctctcagtatgtgtgtgttttattttagtttatatattttttccagaaatcgt

SEQ ID NO: 83479 - DNA, 808 bp, Citrus sinensis
  Intron number 1 from transcript orange1.1g047343m (locus o range1.1g047343m.g) derived from phytozome v7.0 (chr-ID sc affold00014; pos 1173689 to 1174496 reverse strand)
agcccgaaaaggaatcaaatcaaagggtgaaataggtaaattcaacaacctcaatcacgtgatctttgtctttactaccatcactctccaagacttcccgcttgccaataatttgaaattgagtcaattgacacccctcataacaaaacacaaactgatgaaaaagaaagatcaaagaaatggaaccagacgatctgtcgtttatagagatctcaggcgaagatgattcgctattgccgctgcagcacatctcgaacgacggcgtttcgagtctcaacaacacttatctcgcttgctcacctctccaaatccccagatccgcctgcgccgttaatccttctcctcttgtctctccaataggttagagtttccaccactcaattaatatcgacacccgaattgcgatttatttatttttgaacaatttgctctcttagtgttttgttaattatttatggtttacagtaatgttattgctcttattttgcttcgcgaattttgtcttctttctcttttactaaatttatgctctaccctatgatttgtttttttggtgaatgtgtattgacagattgataaaaatgcatttaggaagaagttttagaaaatgctttagaaatcatttatatattttttattttttataaaaagaaaagctcttaaatgcgtcattgattaattttacatagaatggtttcaggacagatattttgttaattatgacttataccaaaattgagatacatttgtgtaaagtgtaaaaatgaatggcattattctgttgcagtgggtatcacaggcaactggg

SEQ ID NO: 83480 - DNA, 688 bp, Citrus sinensis
  Intron number 1 from transcript orange1.1g015909m (locus o range1.1g015909m.g) derived from phytozome v7.0 (chr-ID sc affold00189; pos 126803 to 127490)
caacaggattaaggctgagactccttctcatactggtagttttctagttctatgtttgtgttgttagctgtttagttgatgattgttaaataaatatgttgtttttttttttggttaattgtattgatctggattgctgaaagcttctattttggggactgtttctattgattgagattaatacatacttctatagtaattgtttttgtagatggggttaatgggtttgtttaagaatgttttaattttctataacgtccttttgtgagtctattgggctattgtaatgaattttgtttttaggtattacaagccttttgttttcattggaattgaagtttaatgcagtggaattttgttttttgagactttattagaagatttcctgcaatataattgctagtcattattgttgtaatgagttattattattatttttgagagcaaagtaaacctttcatttagggccaaaaaagccaataatatacctgtcttaagaacggaaatacaatgtcagaataggctcaaataaaatacttaggattttctaagcctcgagccttgttcactacagatttttcctttataaccgaaatgaaatgcagttccacacattaggtcgaatgatttatgatgttgaattgcttttctctggaaaaacttaatccttgtgtctgttcttttgtag

SEQ ID NO: 83481 - DNA, 315 bp, Citrus sinensis
  Intron number 3 from transcript orange1.1g046606m (locus o range1.1g046606m.g) derived from phytozome v7.0 (chr-ID sc affold00011; pos 2075300 to 2075614 reverse strand)
ctgttccattatctcctaggaggtgtcttggacaggtatgattatctctctctttttttttcgggtgtgtttatttgtatcattgcattcatagtcctcctttgaaaaatgaggttagtataatatctttatgaacttttttcaccagaactttctgaaattttgtcacaaagctttggtttactgaatactaaaaccaaatgggtctatctgtttttaattcttcaaacaggggaggtgtatgatagcattccttagttatgtctattatttttctttctcataagttccgtttaactttttgatcctttcaga

SEQ ID NO: 83482 - DNA, 995 bp, Citrus sinensis
  Intron number 2 from transcript orange1.1g042053m (locus o range1.1g042053m.g) derived from phytozome v7.0 (chr-ID sc affold00413; pos 100409 to 101403 reverse strand)
catattttcactagtcagaaactcgataccaatcagacctccagcgcaagaaaatcaaataccttctggctgatcccaatgagcgagagtttaaagatatagattggggtataaatggctatgggtatccaggaaagctatgcaagttatatagaaccgctttgataccaactaatggagcaaggcgagcgaaagtagaaattggtagggtaagaaacctagatatcgttctagtactaaaccaagccaacacgattatgttacgccctatttgaagagtgattagatctcattctaaccaaacgattcaatgagatttttaataacgcataaagcgagattaaatgacgatctaatacaaacgactctataagagagattttgatagataatcccaaagagcattacaaaaaagggattttattgaataattgtatctaagttatgaaaataattataagacctctctatttataatataggaaacctacttccctaagttaactggaaaagggaaattaaataaaaattctaatagaaaaaaaaatattaaatcacataccataatagactccaattaaaatagaaaaccctaaaataataaaaattctaaagtcctaagttaacctaaattaaagtcctacatcagcttgtttctagtaatatttcttcttaatttctagtacaaattacacgttggcaaaaaacatattaagcacttgtatttggtaatatttctctttctttctctttttctttttcttaaattctagtataaattacaatttaattaacaaagtttataaaacaggatttgtttgctgcagggcctaacacaacttcagttacaatggaatgggcaatggcggaacctccccaaaatccaaaggctttatctaaggtaaaattagagctagaagaaacagttggcaattcacttattacttccccaaagccttagaagatagagaaatcgcgggcttcatagtgttgaa

SEQ ID NO: 83483 - DNA, 576 bp, Citrus sinensis
  Intron number 2 from transcript orange1.1g020593m (locus o range1.1g020345m.g) derived from phytozome v7.0 (chr-ID sc affold00134; pos 280064 to 280639 reverse strand)
gggagtcccttttcttttcgagaaggtacctattgttagtatatcttgctcttaccattgtatcggttttcttgttttcattcaccattcatgattttgtcattaaacattacttctatttgtacattacttctattcgtaaattgatggatttcagggttgttgggacttagggatgcactggatatttgaagttgataatttcctgattgtctagctaaattcttcgcatggaaatatctaaaaattatgtatacattcaaaacgaattattctgtcggaaacataaaatgagcactttcttgaaggaattttaagttgaaaaaacaaaaaatatttattataaggttctgtgaaatagaatagtagactcattttctttcctttgtcatattgtgtgtgaacttttcaatttttttgtttaacttaatgtgttttttcaagatccttccaagtttatagtttgtgaaacatggcacatcacattctgattagggtgtctttgccatatttatgcctgatattaattttgattccgaaacttttatcaatttattgcaggttcttttcccactc

SEQ ID NO: 83484 - DNA, 371 bp, Citrus sinensis
  Intron number 2 from transcript orange1.1g006138m (locus o range1.1g006138m.g) derived from phytozome v7.0 (chr-ID sc affold00022; pos 821062 to 821432)
gctggtgtttttcaagcttccttgggactgctaaggtaattaagggtctttgatattaagttgttggaaatatactaatttgagcagagagactttcgttaaataagctctttaaaatgacatagaaagaggttaagagaaacattcttatttgttataacttatatctatgctggaggtcttgtcttttgctatttgtctcgatatataaataatgtgttttacactaacgccattctagagactctgattgatccatagatttcattttcttggcgaattatcaaatgaggataaaaatgctaaaactaatatatataaatattcttattgcaactgcaggctagggtttatcgtggactttttatcgc

SEQ ID NO: 83485 - DNA, 691 bp, Citrus sinensis
  Intron number 2 from transcript orange1.1g034259m (locus o range1.1g034259m.g) derived from phytozome v7.0 (chr-ID sc affold00005; pos 605736 to 606426 reverse strand)
cactgattctcagagctggggtttggtacctcaaggtctctctctcacactcgatcatctctcatacgcaaaaacacgcatgtgcatttgtttgatctgtgtaggcattttgtttatttgagtaaaggttttattagtaaatttttttaaatagagcttttattagaaaatgtctagttgtttggttgttgacgaatgcttttattaaaaatttataaaatattttaataggtaattttttagagttatattataaaaaaataaaataagattgttaaataaatagaagatattttagatattttaatattttaaaaaaattaatttctactcctaaaaatttaaattttgagcatttattaatagaagcaaaataatttatttaagtttcaaaagttttaataaaaaataaataaattatgataagaacttatgaaattaaataagtatttatgactattagataaggtataccaaatagtcacttagtctggtgacttgtaagaaaattgtctgatatctaatacatacacaacatgacaacagaaccaattgacacttccatctttccttttattgagatggttgatatggtgcggtgataatctgatattttgaaattttttaattatcgtcatcatcagcattcttatttgtatttttcatcttggcttatgttgcaggaatctcg

SEQ ID NO: 83486 - DNA, 789 bp, Citrus sinensis
  Intron number 1 from transcript orange1.1g031961m (locus o range1.1g026211m.g) derived from phytozome v7.0 (chr-ID sc affold00005; pos 2021040 to 2021828)
aaagaaaaaggttaggacacgtccatactgtgcttattacttttaggttgtttaaatttttgcataatatggacatgcctacatttcaatgtgttacacttctgcttaaagtttactgttctctttgtgttctgttggaaacttggaattcaaataatttatttgatagttaatagatagaactagagaatacatgaattcatttttctaatgatgagatttttaaaatgtggagttaaggacgtggtttcttaaattattggctactttaaataacttagcaacagaaagttcatggtttgcactcatgatagagaattgaaggggtccaggaataattctcggtagagtttaatttgatcatctttaatttgtcttatagtaaatttggaaggtgattctcctatgatttgtttgatttgatccaatctgggtatgaatatggatatttagtagtcaacattgatagcttatggctttgctatttccatcaaaatattcaattctagtgccgtttcttgtctttggtgtgataaggaaacaaattcttatgtttcggggcctgaaatagctcttaattatactgatgctttgattggtttgtaacgtaaatctggtgctgaagttatgcatggtttgcttttgctcgtcaacatagttagttgaatattaaggagggggttatatttttttcctctcattgtcgcctccctgaccttacatgtcaaagtatcttgatgcaggatatttgcaggatctagtgtacaagctgagcaaagttggcgaagc

SEQ ID NO: 83487 - DNA, 598 bp, Citrus sinensis
  Intron number 2 from transcript orange1.1g044244m (locus o range1.1g044244m.g) derived from phytozome v7.0 (chr-ID sc affold06682; pos 1630 to 2227)
gaatataaagtatgtttatgcgatccatttgcatcatattttattttttatctgaatgctattaatagttttcattctttctaaagataggaacctgtgtagtaactattttatactaacaatagaagacgagaaattttctttatggtgaatactatggatgcatcattggtgggggatattttaatccctattgtctaccaaaaattttaatcatatggtgtcttcatttggacctagttgttgatgcagtctattgatattaagcgagtgactttgggtatctcactatctgattatggtttttagccgttttcttttaaaaatttcctattaagtttggtccgcaatcttgtgatttttttgcttagaaacaaaagattatattaagaactatttgagatatgtacaaggattgatgggactatgaatccaaaaaaatgaggaaagattgatggggctataaatccacaaaaacgaggtcaagaagtctcattctaaataaaatactcaaaatatcttaggataattctatttggttcaattgtgtacatgaagttaagttcattgaagatagcttggcacttcctgggtttct

SEQ ID NO: 83488 - DNA, 702 bp, Citrus sinensis
  Intron number 2 from transcript orange1.1g047915m (locus o range1.1g047915m.g) derived from phytozome v7.0 (chr-ID sc affold00018; pos 226214 to 226915 reverse strand)
aattcttgagccacctctttctaatcaccgtttcggtaagttgattaacaattagacctaaattaacacgatttagctctgttaatgatctatctcttcgaggacaaaaaaagattggctaatttggtaacgaattggtttcaaaactcagtgtttctgtacaaaatatttttgcaactagtcggtaacaaatcatgatatttattatactgtgagtagcaaaagaaaaattgtacactttgaggttttggtctgcatacagatggcccatgaagagtagggtaccatatgcatgcatctaggtattgaattcaatttaattagtcatgtacacatgaagccccacattttccaattcttaagaatctgcaattcgccaaggttcataagcgtaattaataccatatgcagttaaggtaggattgaaaaacctcagttttaataaagagtcaaactttgtgggtacagcttcaaatttcagcatatcacatgactctattcattttataataatataattgtgtaagggcaggcatctccctccattaatacaaactaagtgtgcatctggtcataaatgagggtagaggactagatgggatgtggtcgtaaaagtttggagacttaatacaattaactgaattaagtgtgcatatggtcattaaaagttttatttgtgcaggtttttatcactcagcaata

SEQ ID NO: 83489 - DNA, 766 bp, Citrus sinensis
  Intron number 2 from transcript orange1.1g021656m (locus o range1.1g021656m.g) derived from phytozome v7.0 (chr-ID sc affold00091; pos 320619 to 321384 reverse strand)
tgttggtttgggtgagggttggaagagatttactggtatagatttttatcctgcatttgtctgcacatttgtcgttgctttctactgtttacatttccttattcactttcactggactgctttggcacgtatgaatactgttttctctttccagaaatggagaagtcttgaatatggtgcttccaggatgttttgtgcatttttgaactgacgatttgaaactgatatattttctttattgacttcaaaaactttcagatattagtaccagttacgatttcatttcttttttcggtataaaacagttattgaagtacatttaagaggtttatttcttaaaattcaactactgcacataattcttgtttgcaatttacagaaacaattttcttttttccttaaaaaaaaaatatgttatctaccagatcctatgatttttggttggatttttttgtttttttacatcattctgtcaattgaatatgatttacaagtttattttaaaccttcttttcttgtagaagtaggaatcatgacattatgaatctataatcagagaaaccattttgttgaatatttttatataacttctcaattttttttaaaagttatcaaatagcctttgatgatgaccaaaggtttatattaatatgctatctaattgatttgtttgccagtatgccaggatagtagctacgtggaattctgggtgcaagttttagtttttgacttctgagactttttgaagggagaaagagaggagagg

SEQ ID NO: 83490 - DNA, 901 bp, Citrus sinensis
  Intron number 2 from transcript orange1.1g027050m (locus o range1.1g027050m.g) derived from phytozome v7.0 (chr-ID sc affold00061; pos 338545 to 339445 reverse strand)
ctgccaagagaaacgacctgagctctgccaaggtattatcctttttttttcgaattttaatttgttatgctttgccattacattgtgttcttatggaaaattgattaataagcatcaaacaggaaatgctgaagtgttagaaaaagttcaagttaattgccaaagtaatgtgacctttggattgaagtggagttattattattattattattattattttatatatatatatatatatatgtatatgtataatagctttttttttcctatgtaggaaacttaatatttaagagtttacaactttgcaaattaagtttcacagtataggctactgtgagcttggacattacatttcactttcactttcaagatgaactttgctgctgcattatggtgtaaatctttgattgcttacacacacacacacacacacgcgcgcgcgcacacatgtaatttttgttttttgtagaaaatacttcagctttgtgaaactaggtttgtttggtttcatggaagttgaaaatcattaactgccatacttattcaatcgagagtagctggaccaaatcatatactttacactataatttgtcacctataagatttgttatgataaatctcatgatctggaaagaaatgggtgtatttcttgtatatttgcaatcttgtaagtgttatgagcttaatgggttctgactgacggtcaactctagtgtaggttggacatatgatctttcttgttactgtttattagaaaaatgttcctatcaaaagtattatattgtcacttataattagaaaaaaattatgattaagatttcttgtttctaataatttcagtttcttcctcatattctctgtttcagtctctggctcaggaacttgtcagatctagaaagac

SEQ ID NO: 83491 - DNA, 394 bp, Citrus sinensis
  Intron number 1 from transcript orange1.1g035689m (locus o range1.1g035689m.g) derived from phytozome v7.0 (chr-ID sc affold07509; pos 436 to 829)
ttccacgatattctaatatttaacacaggacactggtaaatttcttttctttatgctactgtttacactttcaaattcctatagattggtattcaattgatgtttcgctaaatagtgggatcaaatgcatgactatcatgattgacacctttttgatatctgttttttcaagttctctggcagcatttggaatgtttctgtggcaaatagtgaaatgtaatctatacttcctcgaccacattaaacagtttcccattaatgcccatttcatgtgtgttattgttgtttttgctcttattatgaccgtgcaacatattttgcttatccattgtacttggaattttggtttttttacataggtggtgggctcctgcaaaatttgaccctgtgaagt

SEQ ID NO: 83492 - DNA, 364 bp, Citrus sinensis
  Intron number 1 from transcript orange1.1g023059m (locus o range1.1g023059m.g) derived from phytozome v7.0 (chr-ID sc affold00418; pos 112641 to 113004)
gacttgggtgtagggttttagcagagctgtttcaggtccgctttttcttctctttaattacttagtttgtgttggcacaagttgattcttgatttccgttttgaattcttgttttttacatattcgattggtcgtttcctctgtaatggtcttattaattttctttagttactatgcttacactctgttttgctcgtaacatattgtcactctctctctctctctctctctctctctctatatatatatatatatatatatgagttgagttctttgatattgagtttgttgctattcttgaattgggagttttgtatttgttgtggtttttttctactgactacataccaccgcttaggaaaaa

SEQ ID NO: 83493 - DNA, 806 bp, Citrus sinensis
  Intron number 2 from transcript orange1.1g023059m (locus o range1.1g023059m.g) derived from phytozome v7.0 (chr-ID sc affold00418; pos 113152 to 113957)
ttcaaccgcatagttggtgtcaaagataaggttattactttcatttttatttattttataaacagttcatacatataaaatgtcgtcggcaaattttgtttatacttttgagttttttgagaaagtgttagatatgcaagaccatctttagatttgtattgcccttgattgtttgtcgtggtggccttctgattgtactacctatactttttgttatttcaaagcactggtgcatcatggtttgtgtatgtatttttgaaaatgtgcttgaactctgatagagacacaattaaaattttttgcttagtattagcaccttcttctctggagaaagtgattggtatggatcatcatcatgatcattatgctttaagtgtgtattgccatttcttatgcgctgcactatcttttaatttaggagcctttagaatttgttcacctatttttctttgtttcgaagagaactctcattttattttatctttcatttttgggaatatttgttttcctgttaacagctccttgagatggattggccgtgtttattctggaaccattttctttctgtgataataaaatagagtttcttatctgagtatcaattgtaccgttgacctgataatgttgtctttgagcttaacatagtttgttctttatatatattaggattcaataactttgtatcttggcatcacatatttctgataaattccttactttcttctgtattttctgcattgtgtaatatataccattatattgaattctcgttgaatgtgcaggtttatcccgaggggacgcatctt

SEQ ID NO: 83494 - DNA, 579 bp, Citrus sinensis
  Intron number 1 from transcript orange1.1g048469m (locus o range1.1g048469m.g) derived from phytozome v7.0 (chr-ID sc affold00016; pos 740967 to 741545)
aaatcacccatgtcttttggttgcaattcaagtgcttgagagtgaagaagctaacgtcaaggtcaacaaggtcatgttagccaatctgcttatactgcgtttacttcccatgaatgggaatcaatgaatcggaatgggtttcattaccctgtttatcttttaaactaacaccaagaatcggaatggaaataatgaattccacaaaaatttggaaaataggaatgaaacatggggctctgattgctgtagggagagttgggaatcaaaaccccttactctaaagaggcgaaattggcccaataaactttaataattctaattttatccgttaaattaatacaaaataaaaaaacccaaaaatcataaaaaaaaaaaaaaaaaaaacgaaaaatgcatgtactcttaaaaaaaatgatattattattattaatactaatattataataatattcttcattctgattccaacttatttatatttcagtccatttcaatttcagcctataattactaagaagttaatgtcttaaaatcatctctgaatccacggcttacccatgttactctccaaaaaggtcc

SEQ ID NO: 83495 - DNA, 758 bp, Citrus sinensis
  Intron number 1 from transcript orange1.1g038406m (locus o range1.1g038406m.g) derived from phytozome v7.0 (chr-ID sc affold00002; pos 3196122 to 3196879 reverse strand)
tcgtttctgcaggagcttggcacgaaactcaaattgtaagccattttctatcatgctttggaactatgttataatttgtgtgaaagtcaatcagagaaattttcttcttttttcagttcttaggcacacattacattttgttaaatgtctattaggattctgtcccataaaaccaggcatttaggttcatagtagaaatttctctcttttctatcagaaagtgaaaacatgcatgcttttatctgaaactagttattattattttatatatatatgatttcaagtgaatttagtttcatctttgattcctggcatgtttgtggttattgatcaggttcattctatgcttgtctcctctgacattcatattgtgtggcataacactcttcttctctgactagatgaaaataaatcttttgttgtttctttcagctgggtagttttatagtttcctgttatgtcctgtagaccccctacatgttgaatgagggctaaaagccattacgctttcgtgtagaaacaacaaccaccccccccacaaaaaaaaacatgagataatgaatatgctcttacaatgaatgagctgctaacagcttcctactagtccttctacttgtttcatccaatgattgaccctttagaaaggatttatgattattgttttgtagcgtctccatagtcttattagctaaattttctgtaaagagtttcacagtgcagtacttactttcaggcctcaggtgatagtggcgtgtgca

SEQ ID NO: 83496 - DNA, 777 bp, Citrus sinensis
  Intron number 1 from transcript orange1.1g038830m (locus o range1.1g038830m.g) derived from phytozome v7.0 (chr-ID sc affold00789; pos 8827 to 9603 reverse strand)
agttagagaaagaggtaattaataatttttcttcaattcaaatttttttctagcacatgattcgaatctagtgatgatcagaactgtgttgatttttaagtaacgtattgaatatgtgaattcgttgcaggttaagatttaattatgttaaagctgatgcatattccgcataataatcaacagaaggccacgtagagctttgctgattattttctaaaaatcttgaaacacatgtatatcactaattatatataattaattttagatgcatcatttagtttatagttttgttattgttatttttattatttttaatcgaccaacaatctatagattaaaaaaaagctagtctacagcgaaatgagttgagaaatttattaaagagagcatcataaccaaggctcatattttgatcaaataaggagataaaaatttcgttttccaaatttattgtcttaatagtaattatttcactgttttattatcactttgtgcttaattctgtttgttacgggaacaaacatattacgtaaatatttttactgaataaacaataattatgcctgatcactttgtgaaaaaaatctatataaagagatcagatcaaattaaatctaaatcttatgtaccctcgtataagtgggatttaaactaacaaaccttatcccataggattttactagttgaatcaactgtgaatgataatttttcttttgacgttatttgatatctaagattttacaatttgtagtggaataatttcttataggtaaccga

SEQ ID NO: 83497 - DNA, 949 bp, Citrus sinensis
  Intron number 1 from transcript orange1.1g038580m (locus o range1.1g038580m.g) derived from phytozome v7.0 (chr-ID sc affold00394; pos 92100 to 93048 reverse strand)
ttataagcgtgggaatctggctcagtgtattagaggtgagattctcagcttttgttactttcattatctgtttggctcctaagaaagtggattattatttttttttcccactcatttcctctgcaaccaaccagaaggctatgatttttatcatctgagtaatgccttggattggatagtttctgttgtttgtggcataaattagaataaaatgatcaaatcaggataatattgcttgatctttactaaaatttagatttttttccttttttttggtagattgctcctgcaagatcttagcattttgggacattttatctctgggattttgctttgattttccaagcaagattgattgcatattttgctttatctgggttctttcctcccccccttatttttaatacaaaatctgtaacgtcaattagctagtggttgcttattggtgttcattctggcatcttttaactactgccaaatcatgaacttaactcagttgtttgcttcatttagatttctagttatgatgtatgtagcatttttgaagtctatttgtgtcttcttcgtagcatctttagcctgagttcataacttgattcagactgatttgtcttcattatttagatttcttcaatgcttatagtcaactatagatggtctctttgttgcataatttgcagtgtcggtacctacatatgttcttttcccttccctttcacctttatttaaaagtgatggcacttgttcaaattattttcctccatcttttaaatttttgctgaaaatggtaaggtttaaaattaaaatatctaaatgcctcttgagtttcaactttctcattcattgccaagtaagtgaaactacttttccactcaattttaagttgccatttgttacatattgaaaagaccttttttaattggataggtggaagtggtgaggctcacaa

SEQ ID NO: 83498 - DNA, 738 bp, Citrus sinensis
  Intron number 1 from transcript orange1.1g005949m (locus o range1.1g005941m.g) derived from phytozome v7.0 (chr-ID sc affold00243; pos 41256 to 41993)
gggtttgactcgtcttcgttgatctgatcgactttgtgagtcagaaaaagaaaaaaaagaaacgttaattctttcttttcagttcatgattttcacataatgattgttatttatgtcttcaattttgcgttttttcattgattgaactgtcttctgatctaggtatggcttagttttttgagatctgtgatcaatgttgaagatttgtttatcccttttgattggttattgccatttgttttagttgcattgttgtgcataattggatctggatcttgtgtgatgatcatagaattttgaactacttgttgagatcatagctttagaagttttctatgaatgggatcgtttgaattattcatggtgattgtgatattcaagtaaagatctgattttttttttcctttcgtcttttgtattttactatctccagtgttggatctggtacttaggtttaagttcttagtatcattcattgaaggctatgatgtgattattttgatagtgcactgatcttaattttttgtttaattttctcattctgctgttattgtgtgatctgcatctttcttctttattatttttgtgattgtgatctaactttctattttatacatctctataagaagtttctggaaacttcttatatatttagtatgtgttcatttatttgtagtttgtgactggtggttttgattttaatttatgtactttttattatgtagaagttcatttgca

SEQ ID NO: 83499 - DNA, 1029 bp, Citrus sinensis
  Intron number 1 from transcript orange1.1g032056m (locus o range1.1g032059m.g) derived from phytozome v7.0 (chr-ID sc affold00128; pos 89934 to 90962 reverse strand)
tcccgagtgtgacggccataaatcagctgcttgatgtaggtttgggtttctaaaattcaatttttttaaaaataattaattgctgttacattgatcaattttagagtaaagttttaatttttattatcggaataaatagaaatgtattagaaagtggtaggaggggcaagtttgtagtttgacgagggaactgaaagtcttgtcgagtgaccgtagaaggaaataagaagtggaaatggcaaatcccaaatcccaattcagtggttttaattcaagcgttattcgtacatgtactggaactcttaagtgattgtggtattgatgaacgagggagtatgataacattgcattgtgaatttgatgctgttcagagaacagtacaagccagagttgagcgtaataaatcaaactcttattagatcatagcttctaacagcttcatcttcatggttctactttatagttagtaatggggagagttgttaagatcctttttagaaaatatgaatgcgtgtttatgcctgaatttggcggctgaaattgatgttgagttgcaaaataacacttttagtattaaggccaagtaaattttatcgcaataatgttgggcctggaaactctagttcttttctgcagacaatagagttttatctgctgaatgcctcatgcggagactagagagcaaccgtttcttcttacaaattttaccacgaggtccaagacatgcatattaaaaatagacttcctatttgatcttgttagaaatgccattgtccgttctgtaggatagtaagcatagtacacattaatactttttatacaccaatatgcttaatttaactcgtaattcacattctacaatgctttcgtctgcatcatgcataattttacttggttatgcataattcacattctagtcgacttgttatggtgttgatgattggacgaaaaattctatcaaactcgcgtcacgaattttcatatttctttgcagggcttgctgttagctgcaggaaataatattatatt

SEQ ID NO: 83500 - DNA, 716 bp, Citrus sinensis
  Intron number 4 from transcript orange1.1g026966m (locus o range1.1g026966m.g) derived from phytozome v7.0 (chr-ID sc affold00023; pos 555953 to 556668)
gttggtgtgctcgcaaattcaatcaaggtatgcaatggcttcaagcattgaagctaattgagatgctaaatgcatgtcttctgagtgtatgtggttaatttgtgtgaacttggagttcttttattttgttgttacaaaaaaagtaaatggggctccttactttttgtcaatttgtaacattcaaagttatagttgtcgtcaaaaaattcttgttgccttggtgagtcctttttggtttcttaatctatccagggctagacctacattgtaatagtgagatatgggccattgtgttttgtttctcaaattggagtaatagccaattttctattgcttttatgatctagggacttgcttttgaatttcctttgtgcattatgttttgctctagttaactgaagagaaccagaaatcctgaagttatgcccttttctcttagaaaactcggtctattaattattgccaatgagacaggccttgttatatccttgattgaaggtttcttctgtattgcaaatactcgtattcttgaaattctattcccagtttctttattccatttgacaaccagtttgtaaattgttcctaaggttttgtaatactatatggcatttttattttttgaagagcagaaactggtagctaataataactaatacctatgacttatttatcttcttcttagttcagtttcgacctttggagctgtattggac

SEQ ID NO: 83501 - DNA, 744 bp, Citrus sinensis
  Intron number 3 from transcript orange1.1g039862m (locus o range1.1g039862m.g) derived from phytozome v7.0 (chr-ID sc affold00014; pos 257109 to 257852 reverse strand)
ccgggaaggttgcaacccctgctcaggctcaggaagtaagtttgggtttatgtcttatttaatttgatgtttcaatggcaatgatctttgtgctcataagaatgatatgactatccttattggcttgctatcaacataaattatgttggattgattatgagtttttttttcccattttccaaggaattgattatgagcttgtttagtgtttttgtcagcatatttccacatgttttcactatgtgtattttaccgtaggcagggcacttcagaatttgtctatagccgtggtaatttgaaacaagtaataataaagtagagctatttcagatggttgtcatcattttttcaccttatagattcatacatgtagcaaagaattatatttgtttctcaatccatcttcagactcccgtgcttgtgctctcttttgtacatcttcctgaacactcgcagaaacccacagataattatgctcgtgtcatgaccttttcagatggggaaatgcaaaaaaacctttttctactttgtgtttacaaattgagtgcaagtaaatagacgttttcagtctatttcagttgttgatttatctctctttgcctatttcagttgttgatttatctctctttgcctataaaacttgtagacataattgctttctgttttgcttgtgaagatgacattctgtcaatttttttgtaattatttttctcacaccatgttttaaatatatgcgacaggtcc

SEQ ID NO: 83502 - DNA, 857 bp, Citrus sinensis
  Intron number 1 from transcript orange1.1g040456m (locus o range1.1g040456m.g) derived from phytozome v7.0 (chr-ID sc affold00004; pos 952741 to 953597)
attaaaaatatcccaaaccgttttaagtcagttctctttcattgttctcttctcttaatcttggcttgatgactactttcttgtttctcttgtttccgctagcagtattgtgtatgtgaacatctggtttattttctggtgaaatctctcaccttctgagttaattgggttgatatttttaagtttctttttttatttattttttattttttatttttttattttgctttttgtttgttcttctgttacactcctagcattaaacaaaaccctgtgtatgttgatgctcggttgcaggtgttgctttttattgttgtctttcactctttcaattaagttcattcttcttgtattaccccaaacactactacctttttttttttttttaatttggtgttttactttttacttttcctgagacctttgttgcatcaaataacgactgtaaaagctgatcaagagatagtaatggtcattgtttaggtagcactctacttcctcttttgtctttatctacctttatttatacggtagatggtagtaatgtttaatcaatgaccgatcacccagtatcctttgtattggatcacattaatacacaattctcgtatctgggttcttctcttcaattcaagtcttcatgctcacgattttatatttgttttggttttcatttttaagtctagatttttttcttttttttccccacctgaaaggatccttaaaaatagtttaaacaagaacttgtatgtaaattcatacgctataagtaacaagcctatctgtcgacttgggtttgctttctctcacgtttatttttacaccaagatgtttcctttggataatgagcaggaggc

SEQ ID NO: 83503 - DNA, 839 bp, Citrus sinensis; identical to SEQ ID NO: 80072
  Intron number 1 from transcript orange1.1g001060m (locus o range1.1g001060m.g) derived from phytozome v7.0 (chr-ID sc affold00060; pos 174213 to 175051 reverse strand)

SEQ ID NO: 83504 - DNA, 843 bp, Citrus sinensis
  Intron number 1 from transcript orange1.1g046651m (locus o range1.1g046651m.g) derived from phytozome v7.0 (chr-ID sc affold00586; pos 70816 to 71658 reverse strand)
gcggtaagtttcttcttcttcttttcttcttttcaatttttttccctttgaaaacccagatgcaattcttttttcttgaaattttcaaaagaatttttgtggacacaatatgctgtcttgtaaacgtgtatcgggttgtgttttcgcttgatttttgaagttttacaaatactgcggctaaagtgttcgaaaaaaaaaacaaaaaaaaatcactttactgttggcggctaacgtgcaccaaccactcattcacctacccatttatatttggtatccaaaaccttcaaggtgtttgatatatttcaaaatgttcgttaaatgtggtaggtcctatgtcgttgcctctcatatgttggttactagcataaatcaaggctctgttgcgtgtcatattggaaaatgtttgaagtactagaagatagataaccgtgacttatgtgtctccttgtttgttttaatgctctgttgacttataactgttcagggagtaatgagtttactgttttccttcttttagcattatcttgaagtcagattagtttccaaaagcaattctgtttgaccaccagattagattcttggcagctaacatcgtcattatggtcaagtcagtgagattatgtctttcctgtttggtatcattttttaagctgggttctattcaaagaatcattttgttgggtccgctagaaaaatggtgacaactctcacaggaaagatggttgttcattgattgatttgttcaatctttgtgatcataaatgttaatacaagccaaaatgatcattgttttgacacctttatgttgggttactgttccagtgccccctgttgtggtgcgca

SEQ ID NO: 83505 - DNA, 744 bp, Citrus sinensis
  Intron number 2 from transcript orange1.1g039798m (locus o range1.1g039798m.g) derived from phytozome v7.0 (chr-ID sc affold00500; pos 23989 to 24732 reverse strand)
tcagtggcggggttagaggcaaaaaagggtggctggtatgctgcgtcccttctgcttaactatatattgccccatatagttcctctctgatatgcatttgttgcaattgtgtttcttttttagatgtttaatgttttgaaatccattgttagttaagtcttgttaatgacatattttagccaagttgaagttctgttgttgcttgccataacatttcatattcctagagaagtctatgctgcagattttgttacttcagaacccctgattatgtcttacttcatctcatgggtgcaatcaagagttgactaggaataggtcttaactcttaagccaattaagtaagccttcaacctttggaacagagcatttgcacagcagccatatcaaattggtgtacttgtcagtaattaaatgtctaagctttacctatgaaatgacggtatattaatagaaatgtgagcaataatagctttgatgcatctctgctatatatattgtgcgtgctgctgacttttgtcttgtaaacaatgtgactttattgtaagtcttggaagagatgatttactgttagtctgtagaaactttcaagttttaattcaagatttgcttaagccaccatcattgccgttttcttttttttttcagggttttccactcttgacatttggttcactggataattaggttttgttttgctgttttgcaggcaatacaggagacccttttgccgcctgctgtgca

SEQ ID NO: 83506 - DNA, 489 bp, Citrus sinensis
  Intron number 1 from transcript orange1.1g005548m (locus o range1.1g005548m.g) derived from phytozome v7.0 (chr-ID sc affold00004; pos 3837130 to 3837618)
tgtcgacaaaccctaggctggaggattatttatcggttagattgaaaaatttttggtttaatgattgaattgtttgtttggttggtgataaagtgcaaggaaagttagagaagtgaaggataatgtagaatgtcataaatgctacttgcaaagccttgaggaaaagctcatatgaaaaaaagttcaatattaaaaaaaaaagaacatttttgtttatagcaactggatctttgaaaaaaggggcttttggcactgtaattattattaatataggccgggattttagtggagtatcttagtattttgatgattgcaatgactaatttgggtaatcttctgtgggttgacaactatagaattagtaaatgtcattttttattattttgctggttgcttgagtacttaatattgtttttctaagcattttcttattaactgattttgtatattgcaggttttggcattaccattgccacatagacctctttt

SEQ ID NO: 83507 - DNA, 570 bp, Citrus sinensis
  Intron number 2 from transcript orange1.1g009897m (locus o range1.1g009897m.g) derived from phytozome v7.0 (chr-ID sc affold00002; pos 4499214 to 4499783 reverse strand)
tggcagcagaggttgctaatagaagtaaaagcctttgcttctcttttcaattattactgtaatggattatgttctttaggaactaaagaacttttgcgctaatttcattagattcttgttaactactttcattgtcaatccagctaaatcattgataatacaaatcttcatcattgaaaaattaagacatatctgtttattatatatacagttaaattttttaataaaagatcccttacataaagtaaggaataagttaaaagataagaaaaacacacacttaatgtaatatattttgtcttttaatgtattgaaatttgtgtttttctatcttttaatttatccttatcatattaaagtaagagaacccttgctaaataatgacttgtatatatgtttgatgatataagagcagatctttggatatgataaatagggccatcatgaaagaacttaatgagagatgtaactgtccatctaggatcatatctttcaagcagggatacctgaatgttctgtttgattatcatatcaggggtgagatacccgtgtactctgctattcaagaca

SEQ ID NO: 83508 - DNA, 300 bp, Citrus sinensis
  Intron number 2 from transcript orange1.1g043341m (locus o range1.1g043341m.g) derived from phytozome v7.0 (chr-ID sc affold00604; pos 70769 to 71068 reverse strand)
ggtatttatgatctgttgctgcttttatttttttcatgttttaatgcatttgggcatttaggtggaaagaaacccttttgaatatgttcagagtttattgatttcttttggtgttgtagccaatagtttccatatgagaatggcatgattgtccaatctttgtgtttctcttttttaatatctgtctttcaaaaataatcaggctatatttcttagcaaagaaaagaaaattataagttgactaagaatgtactcacgttttaacttttatgtaccataggtcaaaattgcaaggaactt

SEQ ID NO: 83509 - DNA, 701 bp, Citrus sinensis
  Intron number 1 from transcript orange1.1g043341m (locus o range1.1g043341m.g) derived from phytozome v7.0 (chr-ID sc affold00604; pos 71205 to 71905 reverse strand)
ctctacagcagccagcactcgtcctgctggctttggtgcgtgctaattttaattatctactttgagttttggtgctttgcttttagtacgtactgtgaaatatgatttttttttttaattttattatttttttcatcaactcttgtcgctgctttgctttggtaatgtgaatggttgatgtcacgatttttcagtttccctcgaacgttcaatcgggccgtcccgggtcgggttcaaatcccggcccggcccgccgcatactgtgttctcgcttgacttgactttactcttctctaatatccatgaactgataggttctgtcggattagaaattttattacgcagtttgttaaatagtgtatgtaattttcattggtcatatgagtctcctgttttgtttttttaatttttatttgtaatttttaagaatacatattcaacttacttttttcttttgtagggtctaatcctgtgggctgtagcgtcaatgttacatttttgataaaaccccaagtgggaacaaaagaaatttccactaacccaccattccctttttcaaagttctctctctaaaagtctatatatgtagatgcttaaatctcttttaacagctaagctcttgtgatttcggtcttacatgacagctgctttgtttattgttcctgttttatcttgatattggtgttttgatagtgcaggtg

SEQ ID NO: 83510 - DNA, 689 bp, Citrus sinensis
  Intron number 1 from transcript orange1.1g003070m (locus o range1.1g003070m.g) derived from phytozome v7.0 (chr-ID sc affold00050; pos 425944 to 426632)
tctggtgggcttggtttgagtcttcattcttccaggtaactatctcttgtcttaaactgtactttttttttaataataaatttattatgcatgttggtaaaatggtaaaaatatgtaaattcttcattgttcgtcgtattctaaagctttgattttgtacccgttcttgtctctaagctttcagtttatggcctgaatgaggccaaaacaactgtggtctgtgaaaagtaatggttggtgagacagataggaatcactgccccccctatgtttttactttgttttgtcagcatgtagctagcctctgcatatttcagatttctactagcagaaatcaacagagagaagagagagaataaagacgaaaaaaagagaaatgttttctatgtttaggtgttttgacagaagtgcccttcataaatcataataaaaggacatgcgtacacttgataacatcaaattagacatttaaaaagtcctcaaaatatgtttgtttttatatttatttcagacttttgtcctatttttgtatttagtaagagtgattttgcagttggacataagacctacttgcacataaagtttgtcaatcaacttgcacatagagtttgtaaatctacttgattgatgttgaagttatggttctgcttccagtgtgcacgaatcaaggctaacattttcccagaatc

SEQ ID NO: 83511 - DNA, 826 bp, Citrus sinensis
  Intron number 3 from transcript orange1.1g032938m (locus o range1.1g032938m.g) derived from phytozome v7.0 (chr-ID sc affold00007; pos 1562393 to 1563218)
gtgcgcaagagaattgaatacatctctgctgagttgtacgtttcttcttacttggttaattggcgattctttgcaatatttttactttttaatatatcacacttagtttcatggaagtatgaattaagatagattaagttagggtgcgtcttgctctttgctgattcttcaagttgtcttatctgggtttgaagaggggtgatgtacgtggcatatttgttgcaaggcaaaggcattaccatctttattgcaatttgtattgatgaattacaaggatgcaaaattgaatcaaaaagcttttttttcttttttttttaatctttctgcatatgatttattggcttgttgttttcctgctttatattgtataaaaacttcattttcaactcttaaatccttatttctttttataattttactgtcatatttgtttggagttagatacagattttcaatatttagctttttaggtatcgttcttgtcttacattaaccttgggttactgttgggggcagggactaattaaatttcaggttttatgtgtgaggtgcatggcagttaaagaaataattaaaggatttcctattttggccacaatctattagttgtatggttttggtggatgttcatacttcacactgcatacagattaaggttcctgtccaaaaaccattatctcaacaatctatagttccgtggattgtcacgttcctctttgtatttttcactcattatcattgatgttattgcaattgtttggtataaatggtatggtcaatatatccttgacctttaaactgcgattctgctctaggaagcgacttg

SEQ ID NO: 83512 - DNA, 578 bp, Citrus sinensis
  Intron number 1 from transcript orange1.1g020029m (locus o range1.1g020029m.g) derived from phytozome v7.0 (chr-ID sc affold00004; pos 3539021 to 3539598)
ttcttaaaagcgtcattgtggtgagcaccattactctttcattcatctatttatttgtgttttacaatgagtggtgaatttgatcactaccgacaaattcaacatccaaggtgttcgtagtaagatagcgtataggttttacattttcggtgggagttaacctccaataattgctattcatttccaagtttataatggtgataaatgcaaaagacaacgcgatcgctctttgttagtttagtcttgatttgaatacacgaaagggttgactttctagccactttagatcgactagagttcaaatatcatacattcttgcgatagatttgttcatttcatcatacaagttttaagttctggtgtaatatacgttttaggcctctctcgttttggctgcattggtgagctctttggagttactctgtttttcttgttctgtaatgtaatgtaatgtaacgtggaccgttctgttatttatgttcttttaggtgatacaattaagtactctcagtgcagaatgtcgaagacatcggtactgaggctttgattctaactttgagcaacctatttttcagcta

SEQ ID NO: 83513 - DNA, 778 bp, Citrus sinensis
  Intron number 1 from transcript orange1.1g042033m (locus o range1.1g042033m.g) derived from phytozome v7.0 (chr-ID sc affold00071; pos 71550 to 72327 reverse strand)
ctgttcaatctgccaagtctctgcctccggaatctgtaagtttttttctactctttaattccttcatcacatacgcattaactttttaagatctttgttttttaaactaaaatcttgagatcttttactaataccgcctcattaatcatgttcctttaggaaaatagttatctgttttatctcctttcatcctttctttaatataaattagaaaataaattttagcggctgaacaaactgccacgctgaaaaaaagaaaccaaacaaggaaccaaaatgcaactagcttagtctagtggcatttttcttaaaagttttgcatgcttgctgacgcttgatggttggtcctacaacataacagctgggtttgaatttaatattaaaaaaaattaattttctctttagaaagatagagaagcaatcacaatccaacttgaatattctcaaataggaaaaacaaaaattgttgtgaaaattcaaagaatcaaagattccccccacgcgattaggaaaatgggaaatttcttagcacatcaagtttgagtcatttacaccgagagagagagagagagagattgaacccgatacgtctttgtaactcctgtccgcccacctcataattaataaaaataaaagaaaaagtccaaaccttgcagttattgcaagctgtgaatttgttgtcatttggtgtcaattgcatgccacaaaacgacgttcctaatttttttatttttttgtaacaggctagttttgtgatagcgaagatctcagcaatttg

SEQ ID NO: 83514 - DNA, 625 bp, Citrus sinensis
  Intron number 1 from transcript orange1.1g010912m (locus o range1.1g010912m.g) derived from phytozome v7.0 (chr-ID sc affold00034; pos 941584 to 942208 reverse strand)
cttcctttgcttcagtttctggtttcagtgttctggtaagtggggctttcttgtttctcttcaaaaatttattggaaattggtgtctttgctgtgatcatgagtttgataagccttgcaaaatacttgggcatttgtaagttctgaattctgataatccgtggttacgatatataataaagttccataattatatacaccgaccaaaaatatgtcagaagtgcttatatagaaagctatttttatcctatatttgaaagtgcttttaaggaaatcggttgtgcgtaaaaatttaaaaactatctggcaacatcagttcctagaaaaacactcaaacctatgcttataattctaaatattattttctctattccagctgaataccacaaatatgcacttttcatcgcacaaagtacgagaccactttttgatgttttcaaaagctcttggaaatacacctataaataaataattggtctcaataataccttgccttgcacacgtatccccatcttttataatcctttgcagaatttaataacactctttgatgactagaatcacttcgcattgaagcgcttctaaactaactttttgtttcaaaatatttcaccatgtagctgggg

SEQ ID NO: 83515 - DNA, 520 bp, Citrus sinensis; identical to SEQ ID NO: 78684
  Intron number 1 from transcript orange1.1g021801m (locus o range1.1g012917m.g) derived from phytozome v7.0 (chr-ID sc affold00322; pos 134956 to 135475)

SEQ ID NO: 83516 - DNA, 847 bp, Citrus sinensis
  Intron number 1 from transcript orange1.1g020781m (locus o range1.1g020781m.g) derived from phytozome v7.0 (chr-ID sc affold00482; pos 90515 to 91361)
gattttggccctggaagcaaggtatggattcctctgtcttgatctacattgctttctgctaggtttaatctcttcatcttctatttttaattggacatcattctgatcttttagttgtgttctttcctgaagactgattaagaattgtttaacttcttaatgatttctttaccagacagacatcttctaagaagctgtccacctttgaaggcagattaatgttaagacattacagtagcttcttgattttctttcttctttctgttgagtttctttttagcactgcattagatattgattaaacatttggattctgatcaagatttatgagcttgttgtgaatgcgcattgtccagttgtttcttgataaatcaggggaagaaccaaattatttaatattaaaaaaataagacacctcacacttgtccaacatttagaagtaaagacttgaacacgtgattcatctttaggccatacagaaagtttcttaatggaaaaaaaaaaaaatgaagtaatacttctattaaaaaatcaaaagaagtttttggtaagattcaacaagtttaacctgcttgataacaaataaaaaaaaaattaacaaaacacacacacacgcacacatattgtagtgatcgagtttagaatcttagactttgtttattttttcagaccttaataatatccagatcttaaattagaacatttctctctctctatatggattagtattatgtagtaacatattacttgttgacacaattaaactcctgatattctaaatttctaatcgcaatttttccttttgttgtcagaaaaacaagaacaaaaaaattgctaatcagtccat

SEQ ID NO: 83517 - DNA, 701 bp, Citrus sinensis
  Intron number 3 from transcript orange1.1g031269m (locus o range1.1g027973m.g) derived from phytozome v7.0 (chr-ID sc affold00237; pos 135441 to 136141)
cagtgattggtaagttgttgtgttttgtgaagttaactagccctcttgcccttttgcgtgttcttcatccattacggtgtacacaaaatttgatattttaaaacaatttctctcgtgaataattgaaggttttgattattacacaaatggatttctgtttttcatgttttctacctttcaactttctgctgcttgattttgtatttgttagaaacttattttaggatgctgatgactacttgccacaccacaatctagtttttttttaagttggtctggatatgtcgagaaagtctaggaatattttccaaattttgcttattgttcattgtattctgtctggttatatcctgaaatgaagggttcagcaaattggaggagagagttgggcttcaactattcacttgtgaagacctctaggttctcatgtattttgtcattagcttgtgtttaaatagaagtacaaataatcctggaactttaacttcttactatgtttgaagtctacttttaactcttctttgtctgtattcatttctcagatattagaacgaactatctgcagaacgattgctcccaaaaagaaaaaagaataaaataaattgtcatttcttttataaatggtgttgtttaatagtcttaataagatgcagtttgcttgattattaaatttaattagctgctgtgtaaaaactttgcag

SEQ ID NO: 83518 - DNA, 570 bp, Citrus sinensis
  Intron number 1 from transcript orange1.1g017828m (locus o range1.1g017824m.g) derived from phytozome v7.0 (chr-ID sc affold00004; pos 2746542 to 2747111)
ttcttctccggcaagtgatcaacaaaaccaaccaggtgaggtcagcttttttttttttttttaaattttttttcagttctcccgtctcgttggtctatgattactgtaactgagtgatttcttttattttttctttgatttttctatttctggtggatttcttgttagtgttggtgctttaattttttttttaatttaaatttctgtgccttgctttgctgctgtttgcttgtaaagaaaattaaagcaaagaaaatgtgcaagtcttgtgtaaatgatttctgtagttagcttccgtacatgacaacagtgaaaatgctcaacgctgccgtttcatcctttcaaaaataagatttttgtatttttcaggaacctaatattggaccttctcttttcttttcttttcttttcttttctgcatgcatttatttttctcagcattattggttgcagttacctgtagagttcaactctgttcgtaattttaattttagtttcaataagttgtttgatttgtcttttagttacgtgcaatctctgtttgtagtgtgtagaaacttatttaacaaa

SEQ ID NO: 83519 - DNA, 631 bp, Citrus sinensis
  Intron number 2 from transcript orange1.1g017828m (locus o range1.1g017824m.g) derived from phytozome v7.0 (chr-ID sc affold00004; pos 2747161 to 2747791)
tgcttagtttttcagagctccatttttaagctgaggtttgactttttaaagctttgtaatttatgactctcttgtttttctttgttattaatcagcacagttaatgcataacgatcatgttcaaccctaccacgattcttttgaaacacatttagatatataatttgttggattttgagttctttttaaagcaaagcaggactaagttagaccttagtttacatcacatgtgcttcagttatcctttctgcccatggatgatgtatctgttagttttgtactggtagaatctcttcttgtgacttagttgcgtttggcatattctgtttggaatcatatgcagcataatttgttatataaagattgtttgattgtgttggaaatttcaatattgatcattcatttagtctacgttccattgattgctttacaagaatagacagctgttattgaatggaaaactctttttgagtaaaatatttcctaaaggatcatattgctctttatttctgtctttcattttaaattctgggtgtttgtgtttagataaacttctttgaacgtccaagtgtggtagatcttcttatgttaaacaggttgtacggaattaaagtatcagattttagatttt

SEQ ID NO: 83520 - DNA, 809 bp, Citrus sinensis
  Intron number 2 from transcript orange1.1g042772m (locus o range1.1g042772m.g) derived from phytozome v7.0 (chr-ID sc affold00023; pos 1461765 to 1462573 reverse strand)
ttatcacagatccaagaattcctgataaccccattgtaagatactaagatttaaatcttttttataatattttttccctgaatacgtaaataatcaataggaaacatttcagtataccttcctatatgctgctgaaagaatataagttcaattctatagtcaaatgtgattttcattttttctcttctgtaaaaatagttaaattagtatctgtcttgcacatatgtccactataacaacattagtgagaaacatacctcctgatccacttgtggagctacgtaagcatgataccagaaacttccattcaaacccagcttcacccaaatgcttaacttctgtcattatcgattaaagaaagccaaggaagaaatgaataaaaggaaccaagtcgcttcaaatctggaaagatctgtcttcttgaatagctccttgatgtacactttattcattttgtagaattagctgtgggaaggctaacttcgttgctggttatttgctttcttagccctgtgtatgttccaatagcaggtagaaggttctgtagcacaattactgatactcatatccttcaccaaaaagcttttccatccatattaaatttgggttccatatgactatatcatatgtaatatgttgttaatgcacttagacactgcccctgaacttggtttcatgatttttactctgcaaactcatcccttttgtaacatgcagtttggacatcatagaaattttacctcggatgtgacttttattttactttgtgtgcagatttttgcctctgatagctttcttgaattgactga

SEQ ID NO: 83521 - DNA, 662 bp, Citrus sinensis
  Intron number 1 from transcript orange1.1g025547m (locus o range1.1g025547m.g) derived from phytozome v7.0 (chr-ID sc affold03509; pos 5759 to 6420)
gacccgagcaatttatcaaacagtatagggaccaggtaaaatttaatttgattatttatattgtttgtttcgtttcattgtcgtttgcttggctatccgtttactgctacttaaggtttcattgaatctcagtgaaggtttctataccgtatcgtttagtgttgtttgagagagggtttgttcgggaattgggaatgttttcgttgaattgggtttgaagtgctttctcgagaatcaccttctatagcctaaaaaatgcttttcagtaaaggtgcttttcaatccaattattcttggaggaatcaatcccgagttagtttttgatccgaaatagctttcaacagattcagctccaaaaaacctcccaattgcaccacgaaacgcccagatgaaaagaataaaaatttaccagttgaattgttatatcgtgtttaaattgatgacattgtgcacacactggctgctgtgtgagtgttctcatagtaggtctgtctagttctttgatgcaggtggcatgttcaccatagatagataaactgttggacagttctctttgttgtttttgtaatattcagtattatatgtctgcttttgtctgttacagtctgttatgaataatttactaacatgtattttctgcataggaattggaccttatccga

SEQ ID NO: 83522 - DNA, 1015 bp, Citrus sinensis
  Intron number 1 from transcript orange1.1g032314m (locus o range1.1g032314m.g) derived from phytozome v7.0 (chr-ID sc affold00113; pos 309378 to 310392)
caagacccttatcctcaggtaacacaacctgtcccttaattaaaatcatataaatatatgcttgaatattgcaaagaataatatgttcttaaatcttaagttatgtgatgttaaggctaaatgcgagtgcatcttcctcttcttcttcttttatttttgcgaaaatgaccttttctctttatagtatttagcttttatcaattacccccccagctttcataataccctggtcattatattacttccttaatattaaaactttcattgaaaagtccatccggatcagaaaaaatatatatcatttttccttttaaatttgatatcaaaagagataaaaatattacaaaaactatagaaaattttagcaaagttgaaaatactttacggggaaggattctcccttttcttttttagtcactcaaaaatggcacctgtttaaccttattatatgcatgtttcagcaaaccttacttgctagttcgtcactaattaaaatcgatgacgctagttcttttttgcctccatatttcttttccattctgtttatagatatttcaatttcaatttcgacttgctattctgagctttgcatctcaaaatggagagaaaattctttgaagcggtataccaaaccgctcacaatgtgtcgtttagcagagcaatgagtttcattatgtggaccataaatctacttaaatattaattaaattagaagaatatacagtcctaatccaatagcggtccgcttctctgccaaatggcagagcacaatggctaagtttacttttttcctcaaattatgtatagaaagttagcataacatattatcaaagaaaaaaaaaaaggtaaaaagttgggataacataaggcttatacactacactaactaaaactctctctccctaggcccatcgcatattgcacttcatactagatagtttttttcttaatagctaatctcctcttttcatatgccgcaggcgacctgggaaggcctgtaaacagacgacctcca

SEQ ID NO: 83523 - DNA, 903 bp, Citrus sinensis
  Intron number 1 from transcript orange1.1g033587m (locus o range1.1g033587m.g) derived from phytozome v7.0 (chr-ID sc affold00123; pos 175762 to 176664 reverse strand)
ggtatgcgagctttttttaattttctttgatgggtttgtgtttgattgcaatgagatagatggtttgcttttgccttttctttttttttgggtgggtgaattttgtgtttgtatatatgccgtttattgcgggattgatggttaactttcctgttgtagtctatctgttgaagtaattgctatactaacattcaggagaattgcaatttgtgcatcttataagtgaagcagctttataaatcatgagaatagaatttatcgagtgttggcatattggcagtaatttgtttcctcttaagtggtgctatctatggaagaaagcttgtaaaataatgactctgaaaactcatgttagcttaaaaagtaatcgaaatcttttctaaatcgtttggatatttcaaaggagattttgttggtatgattgatgtgggacgaggatagtattactctgtgtacactgtctttaatttgaatgacacgtgttaatcaactgactagatcatagatgattgtaggagcttaggaaaatcatgattttcgtagttaaaagataaaagaacaatacttagcagcttcctcaacctgtggaaagattataggggttgtgaattgccagtatatcatcatttagattgttaaattgtttctccagttgcggctagaaattcattaaaacagcaatttcgcctcatttcccgcttcttccagaagtcttgattttctttgatctcttgaaattgcttttgagttactagacacctgttgatgcaattctttatgttttctttttgctggaaattgcagtaagggagtacatttctttcttacataaccattagccactgtaacatggtgtagttctggacaggaaacttacagaaaaagaggattgctaagcttgtt

SEQ ID NO: 83524 - DNA, 708 bp, Citrus sinensis
  Intron number 2 from transcript orange1.1g035320m (locus o range1.1g035320m.g) derived from phytozome v7.0 (chr-ID sc affold00229; pos 196959 to 197666 reverse strand)
gcaacattaggttagcggagatgaaaatgtagaaattcaatgtttttctgtattctcaaaattgttaattattttttgttcacttttctctccttagaaaactagtttagagagcacttagaaattagcaacattagatatcatgccagttttgccctttgatgctttatgctgtaattttctttctaggcgtaatcgtattgactgtaataccaccaatttaacttctatatctagggatagacatgttcataaatagggtgatggaattttaattttctattgaactataccaagtttgctaggaaatagttgtaaatagcatgaatatcatatataatttcttttttagtacaaaagcacttaattttttacccaaaaaattaagaaacatggatgccaaatcactatcatttgtttaataaatgaatacaataagaagaaacttcatcaaagtaatgaaagagagaagaagaaggacttgatcagagtaatgaaagtaaaacaaatgtctagagactagtcaaatacactgaaaactttttttttttgtatgtggaattaattgccaaaattaatttctttttgcaaatttaattagtgttgattatcttatctttctttacctgatcttttatattaaaccacttaacctcatactttgtgacaacagaacaacggcaacgataattataacgagccttctga

SEQ ID NO: 83525 - DNA, 559 bp, Citrus sinensis
  Intron number 1 from transcript orange1.1g024465m (locus o range1.1g022480m.g) derived from phytozome v7.0 (chr-ID sc affold00433; pos 1138 to 1696)
ttttacgaacaaggaatttgtctttcgagaaaaaagtaagtaaatatttttctccttcttcttcttcttcttcttcgtttctcattttattttgtgtcttgattttattcgtaatttgattgccttagaagtactttttggagaagcactttctggattcttttttaaaagtgtttctttttttttttaaactaatgagaatatcgtttatcatgagatcatcacttaacgaggattttctctattttttttatttaagcataaaaatgaaatttaaaatttatataaaaaaaaaagttgtaagaataaaagattaatgaaaatctgatagctggattactttcaggatgatgctgttctagaatatataagaatattccgtagaaaaataatttactgtgctttttttttggtggcatctttttataatttgaagaattgcatattaatactaatgaagtataagtgctgatttgttgtggtttatgtggattgtgatgtgattttgttttttggatgcttagtatttcttcaattgttaagcaggaatattttgttt

SEQ ID NO: 83526 - DNA, 724 bp, Citrus sinensis
  Intron number 2 from transcript orange1.1g039565m (locus o range1.1g039565m.g) derived from phytozome v7.0 (chr-ID sc affold03693; pos 1701 to 2424)
cgatcagcaaggaaaagaagaagtttgttgtcccggtagtagcatctgttgcttaagtttttgttgtcttagctacattaattggcttatggagccttaaaagaagaaagcaattatcaggttgcaccatattattggtatattatatgtcaattaccatgtaaactggaaatcatttttaaacccacaagttcttatatagcgtgttagaatatcatcaggaggaaggtggatgctaattggaatagctctacgagtccttggagctgagccgtcgacaattcacttactttgaagtcttggggtgaccaacaactttgagagggttcctcataagggaggattcggaacagtgtaccatggccaattggtcaaatctgaagtagccattaaagatgctctctccatcatcatctcaagggtacaagcaatttaaacctaaatgatgctcttccaagtttctgttagacatgtaccaatagtttagtgccatgttggtgcccttatcacaatacccaaggagggttttaagtttatggggtgagctctcaaaagaagcttgacctatatttaagaaccatatcttaatttgttatccgacaaaagtccatatcatagactgaaaaatttgatttgattacaatgtttttaatcacggctgtaagtcaattaatgtaattcaaatgcaggactggaatatctgcaccaaggtcttaaacatcca

SEQ ID NO: 83527 - DNA, 582 bp, Citrus sinensis
  Intron number 1 from transcript orange1.1g019491m (locus o range1.1g017385m.g) derived from phytozome v7.0 (chr-ID sc affold00017; pos 1296530 to 1297111)
cgacgtccttaatagtgactacgccgtcgttttcggtattatttataattttcccttttgctttgtccttgtggctttgctttgatttaaaacttttatcattagcattaagcaagcattctattttttttttcttttttgattgataagcaaatttaattcaagcgaagaacctcataaaacaagctgtttacataaatttaaatttaattctttaggtgcttattggaatgggagtgccttcgtagaaagaaactaatgtattttcagctgatacctctttctccccgaaagtttctttgaaagtgatcttgactactgttttatcaacagagctgaaacgtaaagcattcttttagaaactttttccactagacttggaaaaattatgagtaatgctattttcctgccattgaatttttcttagttatggccattgcgagttacatatttggaaatgaattttggtgatgtttacatataaagttttgtttggacttgctaggtgttccccttccatttattggaatgtttgcatacgggttagttgcagtgcttggtttactgttggcaagaaagagt

SEQ ID NO: 83528 - DNA, 615 bp, Citrus sinensis
  Intron number 2 from transcript orange1.1g014452m (locus o range1.1g014452m.g) derived from phytozome v7.0 (chr-ID sc affold00772; pos 1043 to 1657)
cagaagagcggatcgttgtgatatctgcacgagaggcatgaaacttaaccgtatttgattatactcctttaggactttgtggtgcgctgcaattttcttgcagatggggtaataagggagcttttatgtttgaaatttggaattctggaagttatattggttaatttactgagaatgtttttccttgtgtcagaataataagtccactaaattgactcgttgtgactgttcttgctttgttgaacacctcaatagttgcccctttggtgctgctctgtttacagggttagtaataaaataaacatgccattgaattatatgtggtaggatgggaccagaagatgtggagctatcatccaacagatcacacctacatttctttttaatgagttctagatagtgtttatatgcattgtgtcctcggagcatgtctcctcttctttatttgaagttacaagggaaaagaaagaatccaataccttctcatatattacaatgtcaataggaaaagtcgtcattgaaattttataggatttataccttaagtaatttgatttgaatctatgctttcctttaacattttcaatttggtttgacccactgcagaattcagag

SEQ ID NO: 83529 - DNA, 794 bp, Citrus sinensis
  Intron number 1 from transcript orange1.1g029760m (locus o range1.1g026301m.g) derived from phytozome v7.0 (chr-ID sc affold00034; pos 662178 to 662971)
aaaaaaaattctcaacttcccgattaaattctctggtgaggcaaattattcacctctactcttctttgctattgtttgtatctaaaatgatgacccttttgtgctttaaccatttcgttttatcttatgcatttgagcataattttttcggcagcagaatttctcctatacataattagttctactcgtttaaagaataaatctttggggcttcttttgctttctcgcgaataagatgttctcgggggggcaaagtcagattgctagattaatttacttgtggattctgttgtcagtgtactgagttctgcttttagtagctatgtgttattaaacttttatgctgctgatagaatgtataattatgagcgtttaactgcggtctggtttcaaagactggacacctagaagtatactactggatagaatgtataattatgtactatccatatgtaatatgttttggaataattaaaatgatgtagaatttagctgtttatgatgtaatgtacactgaggctagctactacttgttgatgccaagtttaaaactctattcctctatgtttcattttggacagtcgctactatttggttgttgatctaatttcatggaatgtaaacatttgctgtatatttgtccaatatatatgtattaaattctatctgtcaaggcatgaatgattttacttttattgctttggttaaaggtaacatttttttccctttatttcctggtttattgatttggcagagcagtcattcctgtggacaggttataattgaagctctgt

SEQ ID NO: 83530 - DNA, 522 bp, Citrus sinensis
  Intron number 1 from transcript orange1.1g005300m (locus o range1.1g005300m.g) derived from phytozome v7.0 (chr-ID sc affold00337; pos 148433 to 148954)
ctctccagattctcctctcctcctctttctacccggtacgcctgtcattgtttgttgtatttttactgctctttggattttactacagttgatgaagtacaaaaattgtctagaataagaggacaggtgtcaggtttttagtctgccatttagacattgtcacgactcacgcgtgtttggaggttggggcaaacggaaagctgctgtgaaattaaaaacttatgaaaaagcaataacagtaattttattcacggtacatattttgtatctcaattgtatttattgtgtgctcattgataagaaccataaagctagtacattagtcataaaataaagtcaaaaaaaagaaactagtttcattaccaacgttattatatatggaataatattgaagaaaatttaagaaatttagaaattgtttaaatccttctggtagtatggtccccttttttttttgggtccgtaataagagatatgaattttgtagggattgacggtgttggagtaggacttacaaggcag

SEQ ID NO: 83531 - DNA, 638 bp, Citrus sinensis
  Intron number 1 from transcript orange1.1g033068m (locus o range1.1g032037m.g) derived from phytozome v7.0 (chr-ID sc affold00007; pos 2523073 to 2523710)
gcaaacaggtagcagaaaccgttgcatttgcataggtgagttcccactttcctcgtaagccgccagatgctttctaagttgccattgtttttttttttttttttggtttcttctgatctgttttctttgtatttatttgatttctgggaatgaaattttaatatcgtattagcctataaatataaatataggcgctaaattgaataaataatatgagtcctaaagattataactttgaatatgtatgtaatgctaatgtaatgcaaacgccattactaataattctctgtacattgtcgtgtcatgtcatgtcatgtcaagctttccggtactactcgtgttgttcttttttaatccaagaattttcctggaagtttccttggttggtgttggtggaatatatataaatcaatattgctgtccatatatggcatgccattttgaaacttctctaggattttcaatacttgtcttacaattatgcattctctatactatggagggtttgaactcatctgtaaattcaacggttggtgtttttcctctgattgttgcttttctattatcttgatatggtttgcacatgtgcctgtaatctaagtcttctgtggtttgatttgatttcagctactctgaat

SEQ ID NO: 83532 - DNA, 691 bp, Citrus sinensis
  Intron number 1 from transcript orange1.1g015994m (locus o range1.1g015994m.g) derived from phytozome v7.0 (chr-ID sc affold00003; pos 891951 to 892641)
gtgatccctccaggtcttctttattgctttggttctacaatttgtgatttaaatgcatttctggcatgtttatgtgggaatttcatgatatgattgtcagtacctgcaatatgcaatatttgatcttgatattgttgtgccaaagttgaaggatacatgatatattgttttgctgtaaaacccctcagagtgtactctgttttaggtactatatgctttgttctcctggaagctgaaacttgtacaattgctggtgtatatgcagagaattagatatatcaatgttggctgaaattttttgaggaatatggaacttaggaaaactttataagtgattaataaatcaaaattatagagggaaaagggaagccttacaagattttgtgccgaagctaaaacattaataaataaataaaggttagcatcaaagatagcagggaggaaacatttgtatagattattgatcttcttagggaaatttttggtattacatttcatggactgtattcctagttaaataggtgccaattacatgcttatatctcttgattgttcaaaacctcagttgatttgctttataccttattcaattgatttttaatttccaattcatttctgtttaaacaaaaactaagttagtcctgttatcaaaacaggtgtgttctccttggagtaagcagtggtgcaaaca

SEQ ID NO: 83533 - DNA, 752 bp, Citrus sinensis
  Intron number 5 from transcript orange1.1g013862m (locus o range1.1g013862m.g) derived from phytozome v7.0 (chr-ID sc affold00337; pos 144707 to 145458)
tcttaccctgtcttatttgttgagcttactgacaggtccgctcctttttgttcctcattttatcatatcctggcaagtttgttttttagaaatatattttgctttccactcaggcctcgaatgggattactattgtcatgcacttgaactattcagaactttgatttttaagatgtgacaattgaattggagaacactggctaaattggatttaagacttaaattggattcatcataataggatgcctgcgattgaggttaaaattatcttgaaattcttctacatgttggaactgccattaaattagattgttcatcacttctttctgaagcaggtcctcatttatccttatactatctaagaaccattaataataagggattttggtagatttctgtagttgagattaggtgcttttagtcttttaccttatcaatgcaatgagatagggggttcaatgtggagagttaagagctttcttgtctagaaaattgtgggagtgctttcaaaagttctgtttgctacttttctgcttctacaaggaagggcttgaaaatttaatactacttcctgtctatcctgactgaaaatgcttctggaaactgaaatttgagtcttttttctctatcccactcaactattttaattatggctaacgttagaggcatggtataattaacaataataaaattgagtgccctcagtatttttctcaattgattccagtatatgttcaggtgatcctttgaag

SEQ ID NO: 83534 - DNA, 911 bp, Citrus sinensis
  Intron number 2 from transcript orange1.1g033367m (locus o range1.1g033367m.g) derived from phytozome v7.0 (chr-ID sc affold00359; pos 140998 to 141908)
gagacttaaagaaacgcagcagcaaaaagagaaaggtgcttactatttctaacaagccttgcgtgtagattctagttgctggtcattgtttcatataaattgcatatgtgactgatatgataatacttatagcacggatttttttaattccttaacgataagctaagggaacaaccctctatgctcttgccttcatggatgttttttgaaactagaaacacatgtttcagtcttctgttctaaattagtttcctggtaaaagcttttacatttattactagacagtggcctagtggtactgttttttggaggattaaaattgcttatccatttactaaatattgcatcactgatgcagtccaaaatacgaaacaaacatattctctttgggaggttgagcaagttagactgtttcaaataattggaccatagttgagtaccaacatgcatcgctcctagtattgtggggtttgtgctttcctcaagtttgacgcccctcgctccttgtattgtgcagtttgtgcttttttcaagtttgtattcattcgcatcatatggtgtttaattgtggtacactgttgtcaatctgaattgcttaacatatggtttaatatgtaaattttgttggttttactggtaagctggtgtaccatctggatatgtggatttgtttctcgcttataactgtcttttctttgcaatggaattatgcagtatcctggatttactgttctctttggattgtgtaatcactagccacatgttctaatcttaggcttttgattttttatttttcattttctatatatttattatttttttaacaaaaattacagttatagttagatcttctgactcaaaatctttcctttgcagcattcaaggcggagatcttctgactcaagttcctc

SEQ ID NO: 83535 - DNA, 481 bp, Citrus sinensis
  Intron number 1 from transcript orange1.1g034532m (locus o range1.1g034532m.g) derived from phytozome v7.0 (chr-ID sc affold00003; pos 517819 to 518299)
acatttccgctctccacttgactcttcgtatcacggtaagtgcgagccttcaaagccctctccttcgcgatttttaattatagtattagtggttttgtgattgtattaacaaatttcattatccttggaacattttgttttgaataactctgtttgattgatcaaaacccgtcaaggaaatgccgtttcttcggccatgatttgccctttttgggcaaattatcactatatcgctgctctttctttgaatttgaattacatagtttgttttttttcattctcttcagcagcaaacagatccttagggtttcggctgtaacttaatattttaagatctacatgattgaaatgaggtttttgttgtctcgttagagtatagcgattcaattaaaatatttttttatcttgaaagttttcttattttctaatttctatcatagtggattttttttttgggtgatttttaatggttcaattgtag

SEQ ID NO: 83536 - DNA, 895 bp, Citrus sinensis
  Intron number 1 from transcript orange1.1g035467m (locus o range1.1g035467m.g) derived from phytozome v7.0 (chr-ID sc affold00284; pos 216948 to 217842 reverse strand)
ggccctgatttctcacggctccctcgatcttaaaggtcctttttcttggggaaaaaaaattccgctctctttatttattctttgaaaattttaattaagggttttaatttgatttttggggtgtgttcgttgttgattgctggtaaagctcgggccttttatgttttagggtttttttttaaagaatctgtgtttgttagtgcttgagatgtcagcaaaagcactttcaaattgttggaagtgcttttgtactaaattggtaatgtttggttgaagtgctttttcaggataaggacctattggagcagtacttgatgtttgtttttcacgaaacagtagcttaataacttacaaattacttgtgttttctaaggagtgctttcgagctctgaagcactttttagaaaagcactcccaaggaaatcgttaatcccattgccattggattgagtactctgttgactattaatgaaaactatctcatcctcaactagtgatttttaatgattaaaacgcacttataattgcattttgttctgtgtcagagtcagatcagaaatcatatctttcagacttgtcatgttatgaattagaaattcttgttagttttctttgcttcatgttgaatggtggagaggcaattcggctgctgccctgtaacgtggcttaaagtgacttcaggaaacgaaatcagaactctaaattcatatgtgtgacatgaaatcaatgttatggagtagataaaatgattacatgactaaagagttttggtgctttgtatctttaatgaaatttggtggttttcttcgtaattttcctgtatttcttacattcttgtcatttgaatgctgcaggagattatgatgacaatgaggaagtcttgaggcagtttgat

SEQ ID NO: 83537 - DNA, 646 bp, Citrus sinensis
  Intron number 1 from transcript orange1.1g048762m (locus o range1.1g048762m.g) derived from phytozome v7.0 (chr-ID sc affold00001; pos 1992137 to 1992782 reverse strand)
ctcagctctatctctgtccttcctcctcacgcaaggtttcatacattttctctacatcccttgtattaactaactgtgaagtaaattgtgattatcgtaattatgcatcttatctactaaacttttgtaaattttttcattcatttgaactcgattttattgttatagttcagttaaggttactttaaaattttccttgaattcaaaattggatatacttttcctcaggtaattatttgaagattaactagcgcgtctgatggttcataaaaaaaaatgtcagaaaaagtttctaatcatggagatttagttttactaagctcagtttccttatttctattattggcttgcgatcgatgttgttacggaaattctgcatttgaatttttttttgttctcttgccaatgattcacaatttcgctgagataatattagagaaggagagctagtataacaaatttattttgctggaatttgggtgttcattgattcataagcgatggctgcgattttatggccaaaaggcgatgctgtctcattttgagttctgtttttttcttacgattttacgggaattgcataatgcaaacattttggtgataatatgaaggagatcatttggaccacaaccatcacagcttcggt

SEQ ID NO: 83538 - DNA, 789 bp, Citrus sinensis
  Intron number 1 from transcript orange1.1g038743m (locus o range1.1g038743m.g) derived from phytozome v7.0 (chr-ID sc affold00097; pos 302318 to 303106 reverse strand)
cctggagatcgaactgttgtctggtcagctaacaggtaactaaatacaaagacatttattaataattcttcatatttgttctttatgaaactttgtcttaattataatatttccattgtatattcacgtgtaaaagcgcatgatcacacgtgctctttaggtaacgcgatagattcataatgttcaaatttagccacatagcatgtatgattctcttccacagtgctatgaaaagagaaatgctacttttacccaaaagaggaaaggaccaaaatgcccgcaaagctaagtaaatgacttgtaagggcatttggatcttttcaatattctggacatttcgatcactgttcaggcaaagtaatattatatgatcaaaagttttttaaatatgagagtctagtttctcaggtattggcgtcttataaggtattgatgtctataatactgaagaaagactcccaaaatgtatgtgtgtaaatttaaataaattagaaaacgtatttgaatgtacctttttctttttcttttttggtaattgatgataatgaaactcaagactccaatgtctctaattgatcaatcaaacattaattaatttgcactattgagcttgtatagctagcttggcatgcaatcctactaggttactggttcatgacttagaaaaggcacaatacattttctcatctctagtccttagcaggtaaacaatatgatgtgatgacagtaagccaacgctttgattttctcttcgttatcatctaaatagaaactttccagtcactaaag

SEQ ID NO: 83539 - DNA, 972 bp, Citrus sinensis
  Intron number 1 from transcript orange1.1g021914m (locus o range1.1g021914m.g) derived from phytozome v7.0 (chr-ID sc affold00122; pos 143364 to 144335 reverse strand)
gcgctcttgcaagattttctgcaacattttctcaggttaaagatactcttctaaaatctttgccgattaatttagttacttatttttcttgattctgcgttctgggttttgcttgattttagattctgctatgtgggtttgtttcaaaatcttgtcttgtcttgtgttgtttgtttgtttgtttcttccttgttatcatcgtacggtcggtttctttgagatcaacttgctttctcgttaatcaaacaaaatccttttttttttttcttgaaattagagaatttgaaatctttaggtacagctattcagtatctctgtggttttttttttttttcaattcatttttaaggcttatggttgttctccctttggatcttctgtttggttctgagaaaaattggaggaaaaagtttcctgttttattttttctgttgaacggtcgctcaagtgacatattagtctaacggtcatattatgttcattcctgtagatgtgttgcatatttatgaataatttttttaaatctcttatatcctcttttttcttaaaaaaaaaaaaagcctatatcggtatgattattttccatagcctttttttttggtcaacctaaatctttaattagatttgtaaccttactgtcttcctctcatttctttttataaaattttactctaatggaaacatcttcttctggtttattttctcgctgatcttgtttttcttatttgaattttgggtcgctggttttttttttttattggaactagttctgataatttgttcctgaatcacgcctactagtctgtattatggaactcaaatgttatgcaaccttattcagctaaacttgttgattattgtaattatttgaataacctcatcacaatctcacagaaatgcttttttttttgttttttttccctttttttattttcaggaacattgattgatagatcgatttctcttcagttt

SEQ ID NO: 83540 - DNA, 783 bp, Citrus sinensis
  Intron number 1 from transcript orange1.1g021164m (locus o range1.1g021164m.g) derived from phytozome v7.0 (chr-ID sc affold00054; pos 464919 to 465701 reverse strand)
cttataatccatttacattcacttcttggcaacaggttcctcatctttcttgcttagaatcatacggcccgatatggctataactctttctccattattatatattttcactattttatttgaatggtaattctggaaggaaacaagtaaatatggaattgtatactatttattaaaagaataaaataaaggtctaactttgtttctgatccctttcatgctccacatgacactgtaagtaagactgtgagagtctaatttgtatatattgaattgcaaacaattactaatactattagttagtaattagtgtactctttcacttatctcccgtttatatttactcttacatgattggttaatttggagacatagttaggaagaatccaacaagtgatgttgaatgcacaaaagcaaacgcaatatgcatgatttttattggttgctgcagttgtccttcaattaacttggagctgaaggcttcatttcaaaggaatgtctaattaagtttgcatgcataacgaacaccttgcgttagatcaaagctaaacaaataaatgacataactattctcctacgtctttgtctcattggtccttggagttgaagacactcttgtttccggacattaatttcttgttacaatttttcacttccatgcaaaacgtaccatgcatgcatttgcattacaacacaaagtcatctttattacttggtagctgaccccttgtaatttatttatgtgtaggtggtctcaaattgcggctagattgccaggacgta

SEQ ID NO: 83541 - DNA, 595 bp, Citrus sinensis
  Intron number 1 from transcript orange1.1g002903m (locus o range1.1g002089m.g) derived from phytozome v7.0 (chr-ID sc affold00421; pos 106285 to 106879)
cttttggatcggtttcttgatattcttcaggatttgcatggagaggatctcaaagaaacggtgtgtcattttctcttttgaccttttgtcaatttattcttttgattaatggttgactttcattgttgcccatgtgaccaaaagtttatatttttaatgattgttgattgattcacggtttggagtgtgaaaagtgtgagactgacgtgatttatgactttttaaaaaaaaaaaaaaaaaagggtttggtagctgaggttttaattgatcccagattgcagttttgttcagattgaaaggatcagtaagaatcacagtctatgatgataagtcaatgtgtttgttgttggtatggattgaatgttttaatgttcgggtttaaaatgcgagctcttgtttgcaaacttggagctgtttgaattgatttagagccacatttggagtgttcaaggggctctatggacctgtggtcaaatggtcctcggatctctcttttgatatggaagatttatgcaataattttacagaagatatggtttgtctgattgaattactcagactaatgatgttaaggttgtgtaggttcaagagtgtt

SEQ ID NO: 83542 - DNA, 670 bp, Citrus sinensis
  Intron number 2 from transcript orange1.1g015114m (locus o range1.1g015109m.g) derived from phytozome v7.0 (chr-ID sc affold00008; pos 2304214 to 2304883 reverse strand)
gcagagaggctctctgttatttttttctatctctggtactttcttagcatttacaactaaagtccctgttattgttgttatttttgtttttgtttttgtttttgctttaaaaggcctgttattattattatttttattcttctgctgttcttgtgctagctaccctgctctctattcccagttgtccactcgttttatcgcttaggatcacaaggttttccgagatgcgattttgttgatcggtggttttgaatcttaattccgttgatttgggtttgttctttcaaaaaaattattcactttttagttttgttttcgaagtattgatttgggaaacgacccttttcttggcttagtttgtaaatctatattttttaattttctgggcagacatgctctgacataattatagtctatgtattttttaaaattcttgttcaatttcgatcctttttttttcccctttttgatgtgttcttttggttggtttgttctctggatctcgactgttttttcatctctgagtatcaaaattttaatccttttctttcacatgtaaaaaatttcatattttgttaactgaactgatattgcttgcggatttactcacaattgcttgcttttttgttttgcagctcacaagggggtgtattatacttgatttctgaca

SEQ ID NO: 83543 - DNA, 554 bp, Citrus sinensis
  Intron number 1 from transcript orange1.1g017197m (locus o range1.1g016790m.g) derived from phytozome v7.0 (chr-ID sc affold00084; pos 160886 to 161439 reverse strand)
atttgttaacaagcatctctttccttatctgcatagtgagttttgttttgttttattttttggttttgattggagctttgtgtgttttgtatgatgcattttcatgttttttgtgtaatgttcatgcaatcatgggttggtttcaaaatttgatcttcttttttgaaaattgttttcttttttaatttttgatggggtcattaaagctattgaaaaattttgcttttcagtaaatagaatgagatttttattttatttggttaaattttgtggaaatagaatgaatttgaatgcagaggaagagaggaagttggaatttgaagttcagtgaatgtttgttagtgcgcttaaatcaccgtgaaacgagcatttgacgtaattgagtttgtctttttgttaaaagtacagaaaattaggtgaattttgatattttgtattttgaagtaacagatttttgtttgtacgtcctctttctaaaattgcatgctttgaatctagaatttgcaatggaacacggaggactgtctgcagaagtgataaagaaggcgtttcat

SEQ ID NO: 83544 - DNA, 853 bp, Citrus sinensis
  Intron number 1 from transcript orange1.1g035323m (locus o range1.1g035323m.g) derived from phytozome v7.0 (chr-ID sc affold01865; pos 13611 to 14463 reverse strand)
actctgatcttgttgctggtatgtggttctatgaataattgttcacaataattgtgtttgcctcactgtttttgttttatgagatctataattgatcttgggatattgctttctagttctcatgcaagcaagttactaccttcccactgcatctcctcctttatctgctattcaagagttgcgtgccataatctggtattacctctgcaagattgtgaatcaatatattgcgtctaaatttattttatacataatgctaatgctgaataatatattgtagctcctgtcatattctactttgacgttttatattctgtttcatataaaaatcttattcaactttagttgttgatgagcaaatgtcacatgtataagcccaaatgatgtttaaaggtagcccggctaccttcagtttgagcttacaatgggtgaaaaagaatttgagactgatattttgctgtttttgtgatttttcaaagtattttagatcttgacttttgtttggacttgatggttatagattgtgtctagatttgttaagttgtttccaacacctcgtgccaaatcaaagcacaatctttctgattcagatgtctggttaattatgcttcattttttcgttaaagattggatggttgcatggattgatggagttggagttcaaccagtaattctaattttttggacttaaaatgcctttttcttctgtataaaaactttagtaagtgttattgagttgacagaagttgaatacttacaggttgtttcacactttctaaaagttttacatatatgaatttctgttttttgaattgcagaaaggaggtggaactattgatttggagccttatct

SEQ ID NO: 83545 - DNA, 890 bp, Citrus sinensis
  Intron number 1 from transcript orange1.1g016490m (locus o range1.1g016490m.g) derived from phytozome v7.0 (chr-ID sc affold00292; pos 104082 to 104971)
tgctctactcttggcgccgaaactaagtgagtttatttatttattttgaattattatttttatcatttttgtacatagaccaagttgctttctgccaacattgaaatgtatttttcataaaatacactctgtgaagtgatcagttaataattttttattttaaggacatgcataatgatgttgcatgctgtgtgatttaattggcacaaaactgagatactatgcatgccagtttctgattttctaatttggtcgtgttgatgtgcgtggagctcttacagcatgcaccaacaattgattcacacgaaactaaaacactctcaagcagctgcgtagtgttgtgtgtgctcacttgtcacatatattgactacatgattgaaggaccaacgaaagcctaaaaatccaaaatctagattttgctgtcaagattgcgcatgataaaacaattcatattagttgcgttgaatgaaaattaaacaaactaaaagagaaaaaaaaattgatggccctgagactgcaagcagtttactttatgtcccgcaagctaccttctcaatgccactgcatcgcttctcctagatgcttgatgctttcttctcttcacaccaaaactatgtaagccttcttaattttttagttaaatttggtatcatatatggtagcaaattaattaatcaagggtcatattggagtattttcaggcaagatctcagtttgcttagatgggtctttgtctttttgtgctcgcttacactttgtcttcttttgtatcggaaattgtgttgagtcatagaaatagaataattttcacttaggaaattaaagttctgcactcaaaatgattcttcaatttggtgatcatcatcacagggacgtcgtgacgcattcc

SEQ ID NO: 83546 - DNA, 460 bp, Citrus sinensis
  Intron number 3 from transcript orange1.1g028020m (locus o range1.1g028020m.g) derived from phytozome v7.0 (chr-ID sc affold06295; pos 2201 to 2660 reverse strand)
tcgctctaaaatttcttggaaaagagtcagaaaaggtattgaaacctagttttgaatattttgtagattacatgaatggccctttttgtttcaggaggacttctgtttagtcttatatgacacttgataggcaccagtgacttgcgtataaggcccctagttttggagcctgagtcaaatgttcctaatgatagaatttcccaatgactaggtgattttgccgtctataaataggccctgttttaactcaaataaatgtccttgtccttactagaatttgaaataatttggacagttttttttattgctttctaataaagaaattacgttttctttgtttcattttttctatatttctgttttatttccatgtaataagtaaagaagagaaaaataaaaaagctcatgttatcggtttcatttcattattcatcaggaaaagatagctggtgtaaagcta

SEQ ID NO: 83547 - DNA, 665 bp, Citrus sinensis
  Intron number 1 from transcript orange1.1g047577m (locus o range1.1g047577m.g) derived from phytozome v7.0 (chr-ID sc affold00089; pos 295610 to 296274 reverse strand)
gaggactggggtaatttttcttgctttggatttttattcctttcgctattgatgtcttggctgagacagcggtaacgagtattctaattttaaaaacaatatttattgtttaaaacaatatgtattgttcttaaatttatgtattgctatgataattggtagaagacactggaaaagttttaattagttagcaggcaaagtcgtaattgtaacaagggtgttatttttatcgatggtttcttgaagattacataaacaatctgatgtaggaatttattcatcttattttacttatttgaaatacattattggtatcacacaggttattaggcttcaatttttaggtaatacatctcaatatactgtctctgttcatttggcaatacatctttctgcctttcatgtgaacccttgaacatatcttgctttcgatatgtatattggtcagcaactgcactttgacccttcagtaaaatttgcttcgtattttttttttttggggcatgcagttacattggtggagcatgcattgaactgatattttctagaactttattttgggaaaaattggatgccatcccattttctgcttttgaactgcaatgcatccacctgtattcttaaatttgacttaattcttaatatgcatttgtgcatttcagagg

SEQ ID NO: 83548 - DNA, 827 bp, Citrus sinensis
  Intron number 1 from transcript orange1.1g004306m (locus o range1.1g001876m.g) derived from phytozome v7.0 (chr-ID sc affold00097; pos 59404 to 60230)
aactcggcggcgatttgagttgaaagaagcggcaggtatataataataataaaaaaatcgtaagcttttttttattattttgtttgtggttgtttttcttcaaaacagcggagaagcttctctcctgaaaagatctaaatcggctttgattttgtaattcatcggctgccgaagattaaagttagggtttctctctgaagaggataatgttcacatgccgaagcgacgatttttatgtataggggttcttgtatcggcgaatccgaggaatcttttacattaatctcgtgtcttcatcgatgacctcggcttgaataaaatctggatgctaatggcgcagatgaattttttatctaaaatttctttataggagatttgaactcctaatcttttgtttacatgattggatctattggttgcggatgatatatgcatctccgaaatctcaaagcttttgatggatctgaggactttgcgaggagaatttcgaaacaacagattcatagatgttgatttttcaacttagaagcctgtgattagaaagcatcatctgaatatttaatcttttttatgtctgttattatatcctcgtgctctggttcctagtgttggaacctgcttattgaattgaggaaatcatgatctgccttgcttatggaggcatataccgccagtcttataatttcttatcagcgtttgggcttgataatatgttatctattagctggactagctgttaatgttatatatcgtcttctactttaagctgatctgaactttatattattacaggttgtagtagtttgcagatctgagaattcttgagt

SEQ ID NO: 83549 - DNA, 915 bp, Citrus sinensis
  Intron number 1 from transcript orange1.1g045265m (locus o range1.1g045265m.g) derived from phytozome v7.0 (chr-ID sc affold00403; pos 22107 to 23021 reverse strand)
tcctccgtttgctctactctgactgctttgtaactgtatgtctctttatcattttttcctttctaaattttgccctttttatttctgatctttacttatcattttgttttaactctagagaattttgattagaaattgctttttactagcttggttctttcttcagaagcacttggcagtttttccgggagaagctgtttaaggaaatactgaaatgcttctctattccaagcaatagcttcttggaaaagaacatgatatgtgtattttcattgatgctcggctgtataggaacttgctatcgcttattataagctgattttacgggaaaatgatgaaaactcttttagtaaattagtcatttctctcctcacttttcaaaactcgtcaaaattttcctgcggttaaaaaaaaaagggtcaactttcaattatttatttctactattttatctctgaattgatgaaacccacaatcgattgacaaaaacttctaagacagaaattaattgatgaaaatttcaaaagacaataatttttttttaaatactttagaacatgagaaaaaaaaatgattagtttcggcttttgataattttctcctgattttaccaaaagtatgcgctctgaacgtggtttaatgctaaagcaaacaattaatcttactggtataagttacaggtggcctaaacatttttcagattttgccccaattattaatttcacagaacatggccttggcgtcgccggcaagcatgcccagcaatttctatgtttctctttaataacgtaactatgctcaggataatgtgctccatattttatgtttcgtgctatcacaaaaattttacctatgcaattgaatgttaaatttatggtgattttacgttgatatcgtgatttgctaaatccaggg

SEQ ID NO: 83550 - DNA, 286 bp, Citrus sinensis
  Intron number 1 from transcript orange1.1g040837m (locus o range1.1g040837m.g) derived from phytozome v7.0 (chr-ID sc affold00052; pos 70635 to 70920)
gatttgaggatattgctcaagttgttcataacaaggtaggtaaagattttgattcacctttcttctccaagttgggtttgaggatattgttctagtagtttcaatgtattcttttttttactcttcaatggacatgcaatttcttttttttcttttttctttttttttggttttttctcttctgggtatgtggagtatagccatgacattgtgtattatgtattattattcaatcaaaaaaaaaatcgaaggtgttgatagcagcaggggtgtcagcggcaatagg

SEQ ID NO: 83551 - DNA, 1018 bp, Citrus sinensis
  Intron number 2 from transcript orange1.1g043763m (locus o range1.1g043763m.g) derived from phytozome v7.0 (chr-ID sc affold04493; pos 4448 to 5465 reverse strand)
cccaggcttcaaagccagaatttgatcgttacaaggtattttccacattgtttattgtcaattcagtgagatcaattgacaataactatggaacaaagcttcttccctttcatttgattctttttcctctggtatgactgatggtgtctaattgactgttttatcaaaatgcatggcatttgagctgccatccaattgcactaagcattataatcatcaccaattaatccactgattcaaaataaataagattacaatgggaactccttttggagaacatcaagattccatgaatcacagtgttgcaaagagtatgaatgcagtttctatatcgagatggccattcatctatatacaatattaattttttttacatgtgaatagtataagtacaaagagtatgaatgcagtttctatatcaagatagccattcatctatatacaatattaatgttttttacataacacaagactctgttcatactcgtatcgctgtgtcagtttcatagcccacatcaacattaggacataatttgtacagaatactctatgcaacagttaacacacatttgcatctctggaattgtttctgtatgaaacgaaaatgacctagcattaattagtgaaacaaaatcacatcattttcagacttcattctatattgtgtgttatacaagtattcctgtgcacaaaaccaaggtgctaaataacagctgatgctgtaaaactcccgaagaactacctaactcaaggctgtgttcgtctactttgtctcaattttccaagaatcggggtcatacaatttatgagtacgaggcacaatcaaaccggataactagtttgacctttgtaattgtcaaattcaataaatagaaaaacttcaataccaatgattttggtgttgtgggtgtatgaggtgaagaaaatagtgtaattacatgagtattaaccatcgtgacatgctaactttccttttttggcaggcttttacagaatcgatcatagagcacaattataa

SEQ ID NO: 83552 - DNA, 957 bp, Citrus sinensis
  Intron number 1 from transcript orange1.1g043763m (locus o range1.1g043763m.g) derived from phytozome v7.0 (chr-ID sc affold04493; pos 5438 to 6394 reverse strand)
ttgcaacagcacctttatcaatacaggaggtaattctatttgagcttaacaagcattatttctcctttatgcttttgtggaattggcatattaactgcttgccaagcagtataaatgtagtacattctatagcttcttccactgtatctttagttgcacaaactattcttatggcagaaatgtagtgtctcgatagttggccctacttggataaagtggttatgcccttataatatgctgtctcagttccccagttcttgactgttttataatatctctgaagtagaattcattggtcaattaggccaggtgttttactgagaacctgcaaactgtgctcggttccctcattatctaattcaatgtatcaacttcattgtatcatactttaattaaaaaagaagctacctaaacagttatatgaaatatgttttgctgattctaagtgaagaattcaaaatgtatgaactgatcctcagtcattaattccaatttttggtataccaaacattcgttttcagatcacaacacagcctccttttgacagttatggacctaattgataaccttttgtaatcggaacaaattttggtgacttcatccagattaagctctgacgccaagtagaaattcctttgctttttgtaaatcccatactattaatccaaattctgttcttattacaaaaagagtaatggaacaacctcatgctgctcatctattttttggaagggaaggaaaaagatatatttagtatcataggaaaaagatatatttagtatcatcatagatgtaatactttcttatagatttccgtgttaacaagaagatatatcatgtttgctacgagatgtgcacaatttgtttgtatggtgaagagcttgccttgccaaagccctaacaaatctttttccttaaacagatatctgcccaggcttcaaagccagaatttgatcg

SEQ ID NO: 83553 - DNA, 799 bp, Citrus sinensis
  Intron number 1 from transcript orange1.1g048307m (locus o range1.1g048307m.g) derived from phytozome v7.0 (chr-ID sc affold00031; pos 914487 to 915285 reverse strand)
agtttacctctctctattcgccaacagcgagctctgttgaaaagtcatgcacgtgtcactcaaattaaaaaaggcatgtaaaatttcaaggatccctttatgctatatttatataacttacaaccttctcacatgaatagtgagtagacccacaccactcactattcatgtgagagggttgaaagttacatgaatgtaacttagcattagccaaatttcaaaggactaccaaacaattaaagaaaaaaatgaaaagttggcaaatttgtcaaatttgtcaaattgacaccattgacatatttgcatgggttaggtggaatagtgtttgggttaggtggaatagtgtttgggttaggtggaatagtattaacttcaagcctataaatagagagagtttttcatttgttaagcatctcaaaattgttaagtttttaagtttttaagcttttgagagaagtgagagaagtgtgtctgggaaatttatctttcctgtagagtgtgagagtacttggtatatttgggtttctgggaagtgagattcgttactcaaatatttgtactctattaattgttaaataaataattattctttcttgtctccgtagatgtaggtttaattaccgaaccacgtaattcttgtgtcctttatttttctataattatttggtgtgcttgatttcgcattccgcgcacaacaagctcctcttacatgccaatgttgacacattcgtcgtctctcgatcagctgtccccattttttgtagccatagcagtctccccatttttgcaccaaccgtgg

SEQ ID NO: 83554 - DNA, 519 bp, Citrus sinensis
  Intron number 1 from transcript orange1.1g034413m (locus o range1.1g034413m.g) derived from phytozome v7.0 (chr-ID sc affold00013; pos 1763200 to 1763718)
ctttggagcaagttttgcctatcaagtaggtcctttttttttccctcccccgggtttcttcatttttattttgtgttttttatatatatttatttatttttgattgtgtgatttttctttttaagggtaattttattgaatggtaaaagttttgggaactttaaagatggcttttagaaaattgaagatgttggggcttatacattaaaacctgtaattgcagatgctgaaaagctgcactttagaacattaatttttccatcttaagtcagatttccatttattagattgtgatagattgatgcattctttttcaatagatatttaggttgttataactagattattttgactgctgttgatggggggtgtttattctaatttaccaaggtttattttaccctatcaagcccaatttactagttcttgttatacttactttggtgttgttttctatggttctaaacttgcttcaatttttcgttccacatatcaggagaggtatatccagtttttata

SEQ ID NO: 83555 - DNA, 418 bp, Citrus sinensis
  Intron number 2 from transcript orange1.1g012332m (locus o range1.1g012332m.g) derived from phytozome v7.0 (chr-ID sc affold00069; pos 578086 to 578503 reverse strand)
cattaaaatttatctgggtatcaattactttcactctaatttcatgtagttgctgaatctttttattttgttttgtgaattgattttctagttttggaaatttgttaggatgatacattttagaagacttggttactggactatttgaaattgtgggatatcttgtgttgttgagttggagcaatccgcaaaacttcacatttgtttgataaaatatggataattttgtgttcttgcttggttcagagcataagtagctttggaataaagtgttactcatttttgtcatcattgcattatttttctatatgctctgcttattacgttttttattcgttgaattttgatttagaatggatgtttacatgatttctgctacctagtgtctagcaaagaggaagtaggtgtttcagacagt

SEQ ID NO: 83556 - DNA, 688 bp, Citrus sinensis
  Intron number 1 from transcript orange1.1g043330m (locus o range1.1g043330m.g) derived from phytozome v7.0 (chr-ID sc affold00042; pos 491825 to 492512 reverse strand)
cctgtatttgtaaggttattctattactcaatcttctttacttgggttgaacttattttgcatatgcgtttcatttaagcgtagttttcagcttcaactttaagccttacttgcaatgcagttttatttggctttcactttccccagaaaatagaaatttttagaatcataaaacttttatggttcagtttgtttccttaaccaaatgtgacgagtttcagcagacaagctaatgcataatgacctgagaaataaaccgggtcacatcaaagctaatagataatctcaattccacaataaagatgcttattgaaccgaacaaccaaaattttattgttaccagaccttcacaaagaacggaactggaaattggcaaatgagacttcattttggtgctccccagacatacttcaacgctatattaatttgttcatttatgaagcaggcccacttccccaactttttctttccctgtcttccaataagtgaagacagaatagaggttctattattgttcttgcccattaaatgtttcttattgtttccatatacatatgtatacatgatgataatgatcatgacatgctaccattatcagtcaatgttattttatcacatattcttccaatatgctttgtttccacaatataagaatgacccgtatactatctttcaccaaatttgcagc

SEQ ID NO: 83557 - DNA, 270 bp, Citrus sinensis
  Intron number 1 from transcript orange1.1g047888m (locus o range1.1g047888m.g) derived from phytozome v7.0 (chr-ID sc affold00001; pos 5233905 to 5234174 reverse strand)
ctaacggcaacgcttgtgggtgtgtcacgtgtgcgcgagtttgaagttcgaagaaaacaaaaaagcaataggggtccgtcggttgacatttgttgattgaattagccaaccccaatttacgctccggtaataattaattaattatttatttaacgtcacgctttaaataagtagacagcggtcccgctttgaataaatagagagcggtgtggccgagatccaaagagaaacaaggaaactcgctctcgctcgcatattattatgttagtt

SEQ ID NO: 83558 - DNA, 903 bp, Citrus sinensis
  Intron number 1 from transcript orange1.1g020578m (locus o range1.1g019952m.g) derived from phytozome v7.0 (chr-ID sc affold00029; pos 620913 to 621815)
aggaggctttgagggctacggtagcggttctggtggcaagtctggattgaccggagcactgagttagcatttttttttttaatgaaatttttatctttcaattctatgttgtttctacttggtggtgtgatttaaaattttagagttatggcgtgccatggtgccatttgttgcattaggatcattattaattgtgcgtttgatgaagtttgcaactttttgaaacttttgttctagattcatgcattctaccttgatttcgtgattgctgtttggcatacctgcatctggcatcattgaaagtgctcagtgtttatgcataaaagtccttggtaaattgtttcctgagcgttatgcttagagttccagtttttgttataaactaagttcttatgctattagcttcttcagaaccgtaaccaaacctatgcccaaaccaaactggcagtatttttacttgatattacctatttgttattttatgccacaaagtacaatgccacagtacttgtagtagctaagagtagagtttgttgtctggccttcatatcgggtttcagaagttctcttccattcttggtaacctcatcttgtatgcgttatttggaagttagtcaatttggattatgattgttctagtttatttgttttcatgaattcaaggaagtttcgttctttccattgagtattcttttgtcctactaatttttgcaatggcttaattttgtttgatgagtttgctatggagaaggtacttttgcttgaaatactaatctgcaatttttatcattttccagtacgtctatgtatttttcaagtaatgtgtggggtctaataaaatgcttcctccttggcatatcatgtccagttcctgcagagaagaagggagagggaagatcaagg

SEQ ID NO: 83559 - DNA, 491 bp, Citrus sinensis
  Intron number 1 from transcript orange1.1g020462m (locus o range1.1g020462m.g) derived from phytozome v7.0 (chr-ID sc affold02590; pos 738 to 1228)
ggaatcggaagcagcgattcaggtttagtgaacaggttgacccgacccgtttctctctcctctgacctgatcgcgcacattctatctctcacttaattcagttaatccggttaatgactgaatagctttaggagaattaattttcggattaatggcaaaaatactcttaatttatgaagaaattaagcgttgttatgaaggcattaatttttttactgtgaaatcttcctaaaaaaaaaaattagtctttagaattgtaaatgtaatgaaaattggtcttttggataactaagatagggaaagttggttttaggataattagatttaccaaattagtccttagaatagtgcttcaaacgtgtcttaatgaattttgcaaaaattgttatttgattatatttgattataggccaaatataggccatttctgaatatttacctatattaaaagttttcattattatttgatttatcttctgtattctcagttg

SEQ ID NO: 83560 - DNA, 1017 bp, Citrus sinensis
  Intron number 2 from transcript orange1.1g034385m (locus o range1.1g034385m.g) derived from phytozome v7.0 (chr-ID sc affold00536; pos 57971 to 58987)
cggttacggttggcttcctgaaggtagcctctcttcacgctctcaaaatgatttacgcgtttcggatgctttatctattttggtgcattttttctgattgtttttcagaaatgaaagcattagattgagtctttgagtacatggatgggattgattaattgatggatgggttttcaccaagagttgcatactttttgtgttgataatagatagataaaagatactgatgcttttatccttgaattaggcaactagggggcctgtgttaatgatgatcttttcgtcctcttaattttccggtaagatggtgggctggcttaaaaaaccataattatgtcgaattggcatgcaagtagataaaatatgttctgatcagcagatgctgtttatattaattgcatggatatttttgtgatctctcctttccttttctattttaatggggtgagatgctggccaggtacctaggtttgatggcctatgctcatgtcctagacaatatctgccattctctttctcctgtgttgtttttaatgagtggtgtgtaatattcttcgtgttgtaggccaaaacaagactagatgaagttcagaaagcaaagatggaattgacttggatttgtatatatttttcaagcatttaagctacttgggactggcattgtctgtagaatagggaataaggttgttatttgaaaagaacaattgaacataacgtaacttgatgatttttggaaaaaattgatgcactgcaagcttgtttactggttttgtttggcaagcattgtccattgcatgtaatatggtttgtttcccctcaagcttcattagatgtatggctttctcctttgagatgtctgaaaagttatgcatgtttttatggttgtattgatgtgatagctagaagattaatcaagtgtgcttgcaattatgaatattttatttgattgaagtgcatttcaattaggatcattgtgataattaagcacactaataaattttattcaatcagcttgca

SEQ ID NO: 83561 - DNA, 779 bp, Citrus sinensis
  Intron number 1 from transcript orange1.1g048310m (locus o range1.1g048310m.g) derived from phytozome v7.0 (chr-ID sc affold00092; pos 474809 to 475587)
aaaagccttgtgtcacaggtgcgaatgattaccggaattctattattgctgttgctgagagtgcacaacatgttccttccagctttaatgttgcaggggcttcaaatgctgatgcacaattgtatactgatccagaatatcagttgttatctggaaacaaccttgcggcacctgccatgctacaatttgcgaagacgagaaagttatctattgaacgttctgattcgaggaagtaagtgttagttctcttttgtgtttaaacattttattttcatgctggaggcaatttccatttcctttctgtttttctttaaatgttttgagcttggtacttctgtaataatggtcataatttgcagtttctaccagtttagtgtttaaaattttgtacttctatatgttaggttgaagttgtttaactagtttttgtaacgtggttttaaaagttaactttagcagcagaactagctacagagttgccaatgatatttttcaatctctgaattctttatatcctgcttttaaggttcatgctttgaactaacgagttctgaatctggatgtcaatttagtttggatattttgtgaggatggacactgctcatttatgggagaaatttaaaatattatctcatcgtctctatattttgtaataagtcccaaattggtcgcatgtgaaagtgcgaaagtgggttttaatgtatcatttttctcattcttttcagccgtaccctccttcaaaagcgacagttcttccactcgcatagagctcaggtagc

SEQ ID NO: 83562 - DNA, 719 bp, Citrus sinensis
  Intron number 1 from transcript orange1.1g039045m (locus o range1.1g039045m.g) derived from phytozome v7.0 (chr-ID sc affold00069; pos 234357 to 235075)
gcctcctcaattacaaaggcttcttggcttgccaggtacaattaaataatcttagcttcaacttctaatttaattcaatgattaaagtattagttttttttttttgggcccttttgccacatctcacctgtgttgattgattttatggcggctaactgcaatagatggatgacagaagcacttcgggtgctttatttctttgtgcttttcttaaaaaatgccttttctaggttaataaaagatcttccagtgcttttcaaagaagcatttgattagcttcttctaaaaaatgcattttctttctctacaagaactctcatgaccgtaccctaaactctgcgcaaataaactgagtttagactttacgtaaacacatgctctgcagtcgctgtatactggttggtccattttccatctttaaggaaaatgaagatggctaagtgttgcagatatttttcccgtttatgggtatgtgtaaatgacaattccattatactagtgtgattgttcatgaaatggattgttaatgttttctaagtttttttcttataatgctagaatggtacatgtaacgaatttttctttggagtgacaaaaaatggagaggaaattggatctgtgtcatttcttggtttatagcttaattcaatgttaactgccttttcttttggatttttgtattaggctcaccgagtagcacacaagctctggactcagtc

SEQ ID NO: 83563 - DNA, 584 bp, Citrus sinensis
  Intron number 3 from transcript orange1.1g022371m (locus o range1.1g022123m.g) derived from phytozome v7.0 (chr-ID sc affold00092; pos 162795 to 163378 reverse strand)
cttatattcaggtatttcttttctatttttgctttgacgtctctggctcatttttatatactatcttctctctctctctttcattacacaaacagtttgtttatgtattagataattgaaaaagaaaagcacgtaaggtatctgatcatactaaaacattagtttattagttattatcaatttaattggctggttctgtgctgcttttggtgatccatgcatctgttttagtggtgtagtttctctaattttctatgtaattgttgtttttggattatatgatatgcttttgagaactgattgtgatattgaattgtaaagtgtttgtttttggagttttttttttcattttttttttgggtgcattaaatgtcagaaaaaggtcttgacattctgtgattcaaatgcttatttcttttgacttggtaattaggtgttaatttcttctatttttaagttgtctatcttcaatcccattttaacttagaggcataaagaggcagagtcattaagattgatcattttaaataattgcagtctcatagacaggcagcaaatttcaagaataaagcatttccgcatta

SEQ ID NO: 83564 - DNA, 329 bp, Citrus sinensis
  Intron number 1 from transcript orange1.1g028790m (locus o range1.1g028788m.g) derived from phytozome v7.0 (chr-ID sc affold00013; pos 1383830 to 1384158)
aaaatcgcccaatcgggacctgcgttcaagttcaggtactgcttctgcaatttaattcattcattttcttttagcttaccttgtttctaattgcactgcatattttgatttttatcagtatatgtgaaattttacaactatattcgatgcgccgtgaatattaatctactgcatataattcttgttagtttctttgctacttttgggtaatttaagatggttttggtttaatatttaattgaaattttaatttcctctcttattatatgttccggagattttttacctgtttacaactcttgaaacgtctcttcgtgaagcaatatctt

SEQ ID NO: 83565 - DNA, 805 bp, Citrus sinensis
  Intron number 1 from transcript orange1.1g048564m (locus o range1.1g048564m.g) derived from phytozome v7.0 (chr-ID sc affold00015; pos 88648 to 89452 reverse strand)
aaatctggcaatatatcagacaacacgacctccaggtcttttctttattgcttccttctttgccagttgccgctgttcaagttctttttggcttttcatcgaacgttttgactgcattgtaataattgaaattgtgtgtttcttgttttttgtttagcttgtttaatatgctgtaaaaatagcttaaaaaggtcttgtgtgtgttaattgttaattctggaaaatgaaaatattaccttgtttctggtcacgaaataaataaagaaaaataaggcaacattctcgaacaaatgtatcaacgaggcgcaccttgacagaaccagcagcaaaactatattgttttacatattttggagttattttgctgctgtatctgtcagcacactgtcagtaaactgtttggaagcaagactcaatattttttcttgtttctcaccattaaggctaattctatatttgccaaaaatcagtaaaacaaattaatcaatttcaaagtacaacaacataatcatactttttattagtaaaagattacattaagttccaagtttttcttttttctttggtgaagctaggaactgtgctaaagcaagtactcattgtcacttccattgtctaatctatgatttccaaaaaatgtttgatacttaaacaaacttactagttacagagtgcaattttgtttgaaatagcaatttgttgttataatcattcattcttgtctcaagtttcagttttatggtaatataatttctttcacttgatataatgctttgtagaatcctgcaaacaagagggagattcg

SEQ ID NO: 83566 - DNA, 1002 bp, Citrus sinensis
  Intron number 1 from transcript orange1.1g021535m (locus o range1.1g021500m.g) derived from phytozome v7.0 (chr-ID sc affold00250; pos 124374 to 125375)
gaggcttaaaattggaatctgtttggattacagcggtgatgattgattcttgaatatctctttttgcggtgatgattgattcttgaagatatctttttgtggtaagttttttttttgaattaatcagaaaaattcattcttgcatacacgtatacataattacgtatttagtacagaaaatgatggaggagtaagtgcttggcatggaatatgacatcttgatttgtcatctaatgccggctgttggtgtttgtggagattattatttaaacctctcatattgatttttaactctgccatagtcatattcagaaataagcagattcattttgtagactttttgcttatttctgcattgttactggtatgcttctgaataaattgaattagttatctcacatatttatcaaactgtttcgctgttgatctttttatttttggttttaattgatttttcgaatgggtatgtaaagttgtagtttgggtagtgaccatttgttcagctttggcagtattcatgtgttacttgtttttattttattttttcttttgtgggcttgaacagttggatttttggaattttctatagttcttggccatcttcttatcccccctttatcgtttgtctcttcccttttttaggttacgtaatcactgcttgtttcttatttcaattgcaatcggattcattatttcctctatagttcctattcttctgctcgagactttttggtcttcatcttcttttctttattcactctcgctggggatttatttggcctgaattttatttctattgtttctatttttaatatctattccgctcttcacatcagtagactatctggattgcatcactttcaatagaaattgacacaccagttctcttacgtgttgatcaattggacttccccggtctttttttttttggttttcaaatgttcaaatcatattgtatgaattggcatgaactcactttgttaacacggctgcagggtcttt

SEQ ID NO: 83567 - DNA, 794 bp, Citrus sinensis
  Intron number 1 from transcript orange1.1g048452m (locus o range1.1g048452m.g) derived from phytozome v7.0 (chr-ID sc affold00006; pos 1991653 to 1992446 reverse strand)
tctacaggcacttagtcatcttggaggatctgaaggttagagctatggaactgaatatataacttgattaatttttttttttaataattacgaaacaaataactggtctgcttctgggccaattcacaatgatcttagaataagaatcaaatttgtgaattgctaacagcttctcttttgatttgacagtgagataaattcgtcattgggttcgagaatacgatttaaataagtatttattagcagctcaaatttggttctaaattacaaaacgaatatgcatctactttaaacatttctgctttaaattaactgagcacggtgcccagttgagttatgttctatactctgtctcatttatttagcaaagggattttttctggtctttctttagtcttttgattgtttagattaaaattatttgctttgggtgatgtttaaagcttctgaagtcttaaaacagagtatatataaaagggcaatgactgtcttagtgcctgtgaaagttgcactacaaaaggaagagaaaaagaataagcatatgtatgttagaagcctcaatttattctcaaactcccaggaatcattcgtcttttctcccagaatacttgggacgttgtaactttccaaaagtttcacaaatcaattctatactaagtatccatcattttctctctttttggcttggtttttcttgattctcttttcacctcctctttgaatagtttgtatctctgagactacttgctttgttctgttgtgcagtggcaactcctaagctgataaagaaaatc

SEQ ID NO: 83568 - DNA, 608 bp, Citrus sinensis
  Intron number 2 from transcript orange1.1g019970m (locus o range1.1g013227m.g) derived from phytozome v7.0 (chr-ID sc affold00440; pos 18647 to 19254)
ttattgttggtgtttcattggctcttacgtacaaggtatctcttgcttttcaaatgtattgctttaatcagaaaacaagcaagcaaatatgtttaatatgggttatggcatgaactattcagttaccgtagttatcttttgcttgttaaatttttctggccgatagtaatttcttagcttatcatttgatgatgattttgtttatgatgcatcaccatcaataatctcataaaagctaacaagatttttccccccattcagaacttcccttgcaaagttgttgcaactagaaaagcaatactgcgggcattgaatcttttcctattaggcatttttctacaaggtgattactagatcaataacttttagacatttttttccccctaatgcataaagcttaacactattcggtattttatgcaaatatttgtcttttttgttttgtagtgtgaatatagaaaaagcctggaaaagaaatgtgttacttatgtttgagtgctttttgtcaactaaaacatgttttgtctaattgatcatgcatgcttttatttgtctttattctgcgctaaaatctattatttgtttctaccgtctaggtggctttttcc

SEQ ID NO: 83569 - DNA, 942 bp, Citrus sinensis
  Intron number 2 from transcript orange1.1g030751m (locus o range1.1g030300m.g) derived from phytozome v7.0 (chr-ID sc affold00033; pos 64929 to 65870)
aagggattcattgctgtttcttctgttgctcgcaggtttgttttttttgttgatttattgggtttctggtttttgtttttaaatttttttacttattaatattcatggcgttttttatattgggtatttttgttcaagtgaaagctagggtttttgatgttgtttaataaataaatcatgttttcctgatatactgatatgtgacacgtatgattttgtaatgagctgatttgagttgggttttgttattttgtttggcgtcatgttatttgaatgttattccgttttgtaggattagtttcagattgttgctaactgttctagatatgctgtaaaattttgaattgaatgatggagctgttccagctgggtatttactttagttcataatttacatgactgactggtgttttagttgttagaatagttgtaatatgtttgtgatatgtgtatgcaagtcacttattctaagtaagtagttacgttgtagcctcttatatggaaataactgagacatggtcacagagtgcaattgaagactgtggcgttcatggttggttgactttgccatgtggtatgcattatgacaagataggaagccgtgattgtaatctatggctattgtttgtacgtgcaccttctttcttgttgaagacttctctcacgcttgatttttctgatgggttatttagtggttcatgaatttattcccccatttgatgtatgatgttagaaaatagacatggaaagatttgaccttttatgctctgagaaaataatttgtggcatcatgtcgttttgaaaattgtgtggtgcttgagttgtctctttactattagataatggctgtttgccgaagacaatacaactgatttacattttatgattgattaaatattgtatttagaggtgcaagcagaagttaatcatacaaagaatcaa

SEQ ID NO: 83570 - DNA, 781 bp, Citrus sinensis
  Intron number 2 from transcript orange1.1g046245m (locus o range1.1g046245m.g) derived from phytozome v7.0 (chr-ID sc affold01901; pos 756 to 1536 reverse strand)
gccttttctccagcctctccaaccttaatgttaaatgaggtaacatactactttgattatgttattataaatgtgttaaacacacatatgcatccaatgaccatctgacttggacatgatcattaccagcacgagcgtcattagcatcgaacacggagcatctcatttgaggttcaatttgcattatgatgactgtgtattgaactgcttaggctataatattatagatatagagaattactgaaccactttaaaagcaaacactttgagttttcagatcaagttggtgatggatgaatgtatgcagttggctattgtttttagatagcaatcttggttgtatttattggttagctatagattggttatggtaggctgatcatataacactgcttgttctttatgaatggtttcgataacatgggatttaagtatggttgactttgttacttgaaggttgttaactgttgattgtatgaaatttttcttgtagtaggcctcttggctgtataatgtgttttgaaattgcatgccaattttcttgttgccaaaatattgaaaatggacaaagaggggaggtgttttctttgctggagagctttttcagctgtgttttttgtttcatgttttatacttttctatctatttctagattatattctttgtaatttgtccttctctccaatagcctttttcaaacttttaaatttgcacttaattaaatagtagttttgatttgattgtaggccgttaaagattgtgccaaattcgaattgcatct

SEQ ID NO: 83571 - DNA, 575 bp, Citrus sinensis
  Intron number 2 from transcript orange1.1g048624m (locus o range1.1g048624m.g) derived from phytozome v7.0 (chr-ID sc affold00099; pos 400444 to 401018)
ggagtgcaatacaggtcctattcttttctttttttctttttttttctccaaatgactcctcaattttcattctagcaaatggtttggtgaacgctttcgaattcatttatgttacatttgttggtagctagtgattccacctgcttttacttgacaattagtgattctgtttcgtagtagctgtagattaaactgccctgtaatttggttatctaggaacttaaacacaagaattgcaatgattttgagaacatttgagttgttttgtcccatcttttttcattcccaatctcttcctttatgtgataattcattagaatttcatccgtgctagagctttttatctcttaggatcttattcaaataagattcaaatagctcagaacagctatcctttgctcgtgtgtggttcctggatcagttggcatgagtatctgaacattcataagtgaaaacctatcaaatggtttctactttctctagttgcacgttaatactgaatgaactttaaatgacgttgacataataatgtttacacagtctttggggaggctctgtaatcaacttaggaacca

SEQ ID NO: 83572 - DNA, 637 bp, Citrus sinensis
  Intron number 1 from transcript orange1.1g036925m (locus o range1.1g036925m.g) derived from phytozome v7.0 (chr-ID sc affold00015; pos 63036 to 63672)
cgccaactggttctcttctcctccttcaatttcacgtatgtgttcttttttttttttccccttggtttcttgtttgtttttaagatggacccagatgatttttttattctattgcatgaatttcaagtttgcatgttatattttgatacgttttagtaaatgcttatatgttgattttttttttctgcttaagattcgcttttcatcattaaatgcgacagtaatgtaaaattttcacgagttgatcataaactggctcgaagttttgacttctattgtggcatgtgaggttgactttttaagtgaggttgtatatgttgttagtgattcagtggctatttatgtgatcaaatttgatttttgttgatgtagtgatgctgtgttttctggtatgtaagcatgctacctagtagctcttcggctaacaaaccacgtagataagcactatttgtagttttcacatcatgactatttgctagcatttttgccttacttttagtgaggttgttccttttaatggatcctgtctcaatgtattgaaattgtcctgcttttttttgccatctcatcctctatctgattaatttgtctccatatccatgcacagattctccagttgcagcttcttcttacatta

SEQ ID NO: 83573 - DNA, 1018 bp, Citrus sinensis
  Intron number 1 from transcript orange1.1g044492m (locus o range1.1g044492m.g) derived from phytozome v7.0 (chr-ID sc affold00102; pos 261889 to 262906)
gatacttgggtagagtttatcgtctacaagtttctgctttatgtgttcttctccttttaattggaaaaaaaaatgtgtttgagttggtcgtttaaaattatatcataacatgtcttctttttatttattgacttactttattgctgttgttttcaattggaaaaaaattatttctcttcgtcttttaggtaaatctatagaacatgaggatacaataagagttctgtatttatttatttttggttaagtctaggaaaaaagtaaatttaggtttattagcatgatgggtagacatttaacatgaatcaagtttacatattttttcttggtggcattaccaaattcattcatccttgtcaaaacacaaattgcttctaataattctagtgtgagtaacaggaagaaacactaaatgaggaaaaaaaaagaaaggaacaaacaaacaaacaaattctgtaaatgaaaataggctttagattatacagtatggtctggaattgtgtcccgaaccagtaattgcaaatgggaaggagatatgcccctatgcgtgtaagtcatacaattgaccagatatttttgaatgtaaaatgtttcccaattttcttaacctgttgcattatgtactctcatctgtatcttttagagatgttcataatgatttatggctacttttggatggtttgcttttatacttttcccattatttaatatatattcccactttacttaaagaaaatatttcccagttcacataatttctcaattttttctttgcttgcaatcactgtttgtttgtagtttgtatctcattttaatttatggatgatgattccaccgatgattgctaaaattttacccaatggggtcaatctttggttcagtgcttaatggttgaatctacccacttaaagctttagctaattccttcccaaacccccccccaaaaaaaactttttgcaagccacagaattttaccatcgattgttttattgtcatgaatagtgtgtcaagagaggca

SEQ ID NO: 83574 - DNA, 564 bp, Citrus sinensis
  Intron number 1 from transcript orange1.1g010182m (locus o range1.1g010182m.g) derived from phytozome v7.0 (chr-ID sc affold00020; pos 560672 to 561235 reverse strand)
agcttgtctaacaatcacctggaggtttttatattcttgctatttcaattttttaatacgctcttatgatttgtgtttattagttttttgatggatttcaaatttgagcccacaaatacaataatttatagtacgcctataagataattaatacagattaaaaaaaaaaaatgtattatacgattgcagtcattaattatttgactttcccggcttgaaattttgtttgtttgcatgtaaatgaggtattggttgaataatgtttgtgtgtgtattcacattgagacacacaaagcacgtagagaaatttgtgctgcaaactgttaaagagatgataaccatcttttctgaaggtgtagattgtaaacgtatccactatccatgcatgtccctgttttaatttgatgatctaattgaagaaatgggagctttaaaataaattagtgttaaactgttatgtccttcagttttggctttttattttaattttttttttcttatatctgagaacctttgtggggggaaataggtaattcctgactcaatagctggattagtgaatct

SEQ ID NO: 83575 - DNA, 295 bp, Citrus sinensis
  Intron number 1 from transcript orange1.1g027481m (locus o range1.1g027481m.g) derived from phytozome v7.0 (chr-ID sc affold00283; pos 89624 to 89918 reverse strand)
tttacttcacgttcaccagtctcgcccactttctggtaacaaaatcacttctgttggtccttgtatcattcttctgttattattactgcttctgtttctttttcacctaaatgactcaaaaaattatttttgaacaatatctttaattgcatttttttaatttttatttatttaaagcataatagctatattagatttaggaaatgaagaatagctagctatactagaaatgaattaatttgagttcgattatgttgaggtgtagaggttttggagaagcctaaggctcaagttg

SEQ ID NO: 83576 - DNA, 469 bp, Citrus sinensis
  Intron number 1 from transcript orange1.1g034367m (locus o range1.1g034384m.g) derived from phytozome v7.0 (chr-ID sc affold00059; pos 194052 to 194520 reverse strand)
cacattaccaaccgatctccattaagccaaattgggtaagagtgctaatatcaatagtaataaaaacgcaattattattattattattttcttcttctttcggcatttttttaaggaaaaaaaaactgtaatttgttcagtttttggatctcaaagagcatacgtgtttatgtgtgtgtccttctgtctctctctttagttgaactagggtttggtctcagattctatctctaaatttagcaaaatggcgccacttttatctgagagctgtccctctcttcccttaaacaacctctaaatatagaaacttttgccttcgcgttttgttttgggtgcgtttgattacatgctggtttattccctgctcatcaaaacttacaaagtcaatatacaaactcgagagctttttatttcatatagttattctttttcaggaagatcacagcagtaacagctagcaagcaagcgc

SEQ ID NO: 83577 - DNA, 880 bp, Citrus sinensis
  Intron number 1 from transcript orange1.1g041272m (locus o range1.1g041272m.g) derived from phytozome v7.0 (chr-ID sc affold00052; pos 451876 to 452755)
ggtcagtcaaaatcagctgaatggtcgttctttttattgccgattgaatatatatatatatatatatatatatattttgtttcccgtaatggtgaaattgcaggactggagaatgagttggttggttatgtatttggcaaaaagaaggcaacagaagtggctcacttgtaaatccttatctgcccatcttctcaactcctcatctcttattactgccatgcaactgttcgttaaaaatacttgtactattactattgctggcacttctctttttaggtcaagtggtttctttgtcatggtaatagagctaagttgtagagttcaattctcctgttgtgcagactctatatttcagttatttcaattttgatttcttagcttgcttctaggtgcatctgcatgctctcttcttcaaaatttctcttatctcagtcacgtctcatgtgaggaggtctgttgggacttggttttaataccattgttggacccttacctattagtttaagcttttgggtcaattgttttctctaacaatgtgaattgttgtttcttcagcattttcatttggtgaaatatctaaagaactctatttacaacttgaagggggtgtgcagtcattgaatttgtttgcgtttctagagtttatagagcaagatgttgcgaatatatttgtattgaacttgtgtttgttgttaaggattcagaatataaaatataagatcattactaatggaattatcgtggcaattggttcagagaatatcaatgtaaagctttcgtgtactttatagtttagtttcttgcttctttttgttcttatattgtggaaactttttatttgtgttgtgaaagcgtcatgatattcacagggtgtggaaac

SEQ ID NO: 83578 - DNA, 682 bp, Citrus sinensis
  Intron number 1 from transcript orange1.1g027686m (locus o range1.1g027686m.g) derived from phytozome v7.0 (chr-ID sc affold00001; pos 4765433 to 4766114 reverse strand)
gctcctctcagtactgaagatcccggtccttctaggtacggctttcttctttatttcagaatttatgtttccattcgtcagatactagaattgtccacgtgagatggcattaattggaaaaagtaagaatgaagattgcatgtgagaattgtttttactattttcgtcgtggttctgcaacagtaattatttgtttacttcgtttgatttaacatagaaacttactcgtcatattgttcgtttggaaacatagttagcgtcatagactcagagcatttatttggtaatttgttttattttattttattagatattttctgagttagaacttagtggattagagtattgaatgagtttttccaatcttattatgtagtcagtttagttgacatcgtgtacttatggattttcaatcagtattaatcaagatgaagttttgacatattaactgaatattttcatggagtggcgtgtccagagtgattggatagggagttgagggagcattgtgggatttttctctgttgatgacgcttgtaatatattcaggcatcaaattgtgatctttctcattcagctgtttgaaaagccacgtgctgttaaattctgcattgctgaaggtagggttaaaaaatgtgagattcttccatgtgaccatatttccttggttggtgcagcagtg

SEQ ID NO: 83579 - DNA, 762 bp, Citrus sinensis
  Intron number 1 from transcript orange1.1g043947m (locus o range1.1g043947m.g) derived from phytozome v7.0 (chr-ID sc affold02160; pos 6097 to 6858)
gagtcctaaagagctcatgtaagttatatctttaattttaaaatggataaaatataactcaaactaccatgtaattatgtagctgtctattttgagaacagtattctaagataaaagagataaaattatgtgttgatcaaagaattcctaaaagtcaaaataaacggtaagacggttttaaccaaaattttttactttaaatttcaatacaaaatttttatgatttaaaatttatgtcaaaactttaacttcaattattaattcttccatcattctaagtgtaaaaaataatttttgtgttttgtaaatcttattaaaaaaataaaactatttttcttttttggacctataaagaaatagaacatacttccagatggtagtgaaccttattagcttttaaagtcataacaagtaatgcttgctatccttggccttaagacatcaaacaaaaaggaaaataaaaaggataaataatgcttgaataacatcattttgcttagatttttcttttaagggttgtttctttttctttggctgaacagtattatggctgctttaattttttggcttcaatggttaatgcatatgaccatgacttatcaatagcaatgtacaatccttcaataaataccaaaaaaaggacaaattatctgatattgataaataatataaaaagtgcagcaacaaatttttataatataaaaagatgcggctgaatttaattaatttaatgatgttaacgctactgcagattcttggttg

SEQ ID NO: 83580 - DNA, 713 bp, Citrus sinensis
  Intron number 1 from transcript orange1.1g022476m (locus o range1.1g016441m.g) derived from phytozome v7.0 (chr-ID sc affold00054; pos 520952 to 521664)
ttctaacatctgtgcttcttctcttgattcatgtgaaaattttcctctttttagtatttgtataactgtatgatggttgtttggattttttgtttttagggttttttttttgtttttcttttatgggggttagtatctccctaagaatttacttaatgagaccatctgattaaactataccatttattttaaattcactctttattattatttctataatcaaagtgtccgtcttaaaattataaccggtggtgataggtctggtctacactaaagatattgtttaagttattatatgactcaatacaaattagtgattgattgttaataaaatttaaaacaataaagggacaaattttaactatttatagatgataaatagtaatatacaagtatcaagagattttgagcttaaagttcaggagaagatcttaatttttttttatgttgtgagcagatttgtcctatttataaatcttctttccccactttgatccttgaagcaatgatcagttttgctttgaaaaaaaaaaaaattgtaacatgaagggaaaatcaatcatttttaaagcttttgtgataaaatggctggaatggtgactccgttgagaactgataaatagatttttcacatcgtatattgtgtacattattctcatatcttgtttattggtcattgtggcgactaccataatttatatttggatgatcag

SEQ ID NO: 83581 - DNA, 630 bp, Citrus sinensis
  Intron number 1 from transcript orange1.1g036331m (locus o range1.1g036331m.g) derived from phytozome v7.0 (chr-ID sc affold00033; pos 673937 to 674566)
caataattttagtggggttattccttattcagttggtaatctcactgggttggttttatttaacatgtgtgaaaaccatctttttggtcaaatccctaaaagtttgaaaattttgacaagcctaaagagagtacgctttaatcaaaacaatcttgttggaaaagtgtatgaagcttttggtaatcatccaaatctaaccttcctagatcttagccaaaataatttttatggtgaaatctcatttaattggagagaaatcttccaaacttacgtaccttcattgtttccatgaataatatttctgggagcatactgcttgagattggagactcatccaaattacaagttcttgacctttcttcaaatcacattattggtaaaattcaagtgcaattgaaaaagttattttctctaaacaaactaattctgagtttgaatcaactttatagaggtgtgcctctagaatttggctcattaactgaacttcaatacctcgatttgtcatgaagcagtagatccaattgtgaagaagtcgatccggtcaacggtgactgagtggatgtgtcaatgtctatgtttgcctctacatctgtaggttgcgctgcatctgtgtctgcatctacgtttgca

SEQ ID NO: 83582 - DNA, 696 bp, Citrus sinensis
  Intron number 2 from transcript orange1.1g044772m (locus o range1.1g044772m.g) derived from phytozome v7.0 (chr-ID sc affold00001; pos 300049 to 300744)
ccggactgtgaatttaggtctctgggacactgctggtactctctctgtctcttaattttgtagtttgattttcatgttagccatttagctatgactgactattgacacactagttttatttaaattttattagctagagttcgttaatattctcatacttacttctggaagattggtttttttattcacatgatatgaatctgatgcaacataaactttgacaatacccagagaagaaaatattgaatcttgcaaaacttgtcactcggattgtttagaaattcaaactttctttctagtggcgacaatcaggaggataattaaactgcgatcaaagatgcttagaagttttagagagttaaggcttagtagtttttccactacaaaagaagatagagcttctgtacaattgaatagttcagataacctctcaaatgtgaaaaatctagaggtgttggaatctagacacagccttgtcaacttcaagcttttcatctgcttttgaatagcaaaagcaaccttaattcatgggattaatagtttacttttattttcaagttaatgttcagcaaatggtatgattttacaaaagtgacccgccaaaaagtggaaggataaggattatatataattcttggtttttaaataacttattatgcaggtcaggaggattataataggctgagacctttaagt

SEQ ID NO: 83583 - DNA, 267 bp, Citrus sinensis
  Intron number 3 from transcript orange1.1g040854m (locus o range1.1g040854m.g) derived from phytozome v7.0 (chr-ID sc affold00015; pos 1195578 to 1195844)
gaaacattacggacctgggactgtcaagagctaccgtaagtttctcaagtctcaaataaccgttttccattaattattcacttccaaaaagcaaaaagcacaatgaccgatgtatgtgggtagagcagagagtccaagtgtggtcaaaactcttcgaaagttacaaaagataatgatggttttatttttttgactatttgtttatttttttatttataataaagaatactactacttctcaaatcacatgtgtctggaatgaccaga

SEQ ID NO: 83584 - DNA, 473 bp, Citrus sinensis
  Intron number 1 from transcript orange1.1g036697m (locus o range1.1g036697m.g) derived from phytozome v7.0 (chr-ID sc affold00221; pos 35172 to 35644)
cgctctcctccttctagcctctcctcttcttcaaggtccgccctttatcatctccggatctagatccgtacatgcacgcccacatttcttcgattcgttccatgattttgttgatacgatcgttttgattttttttatattaattaagatctgatttgacttttttgttcgtttgtttgacttcgaattttgttatttatggttacgttttgatcgaattgtttattaattgctttcgatagcgaaatcacaattagaaagttctttctgaaaattctagttaaaaatttctataaaagtgcgtgctttttacgtatccatttgtatgctgttgcgttggttatttagattgttagaattcaacacgtgttttgttataccaaatacatgtgaataattctttttctttttttcctttatctttgtttcatttgatagttgctaagtgtcaatcggattcggaaacgggagtt

SEQ ID NO: 83585 - DNA, 486 bp, Citrus sinensis
  Intron number 1 from transcript orange1.1g030391m (locus o range1.1g026067m.g) derived from phytozome v7.0 (chr-ID sc affold00105; pos 18996 to 19481)
ggtgagttctactttgtgggcgcacaatacaaccacttttatgtgatagctaatctgtataatctacctgcaaacttatactgggaaactagtgatttcaagtgttacaattagtaggactcaaaaacttacaatataaccattataagtggtatgtttcaatcattgcataacccaaaacacgccgtaaacttgtccatccaaaaactacttttgaaaaacttcacccaaatgtgtctttgaaaacaaagaatttcatcctagtttcttttatttgtttctagtactgagcatcgtttgaagtttcactttactaattttgataatgttaagactgtatgataatgtggcatatgaaatactgttccaagattgtgctaaactatgaaattgacaatgtgttacttgcccctcaattattaatttaagtatgtttgaattttcttttcttattctttacgttacgtaggacatttggaacaatac

SEQ ID NO: 83586 - DNA, 901 bp, Citrus sinensis
  Intron number 4 from transcript orange1.1g027621m (locus o range1.1g027621m.g) derived from phytozome v7.0 (chr-ID sc affold00059; pos 186239 to 187139)
ttagttcattggtgatcagctggtccttaactgaggttagtgattctcaatttgtcattttaatctgtttacccgttgatttatgtacttttccttgttggacatttaattactagctacccactgcatgaacaccaaatctttgaaaatgttactgttcatgtaagtagggtatgtattatatgtattggttggatttagaaggaatatatttatattgatttaatgtgaagcagaaaacagagtaatttgatatcaggcagttatccttatctttagggaatctgcttcaaccattagttttggttgttatggctcttggagtctcctcagtgcaataaatttcttgacatgagatatctaaaattcttaataatttttgggaagtttgtgggtgttataaattatatagtataccatttttaattttttatatgactttctttgatatgtgaagttctctttcatcttttttatactggatttatatttcttctgtttttggagaatcgtttcttttgagaaaagcttgttatcgtgccctttgtttgttaatgaagtactttttatgctttagcaggtaggcaaaatcttatgttatgtttattcttaatttgcttgacaattgaagatgtgtgcagctcaatcaaaacaacttgtaatattgagaaccatcggtctaagcaacttagcttttttgtgaagttgtgtataaaaagtcagaactgtaatattcacgacacatgttttcattgggggattggatcctatgtttattggtatttgttgattttatgattgttcatgttggtttctgtgttaagttttatggaccagattagagtgggaactgatttttaattgcttttaatttcagattattcgctactctttctttggc

SEQ ID NO: 83587 - DNA, 598 bp, Citrus sinensis
  Intron number 3 from transcript orange1.1g048728m (locus o range1.1g048728m.g) derived from phytozome v7.0 (chr-ID sc affold00021; pos 1198325 to 1198922 reverse strand)
ggtgagttcttcaattcctcgaatagatgtatgttcattttatttaggcatgtatgaccggaaactaaatcttgccacaccccatttgagtgggctcaaacccagacccctccctgagcggttttactagttgaaccaactaacacgctcaagtagagttagcgtacattagtcaaattaatattaagttatatatatgacctatacttcacttaattttctgttgtttgattctcaattaatactcgttattatgtgattctggttctttggataaactagacttgtaacattttcttaactcattgaacaaaaagcagagtcaaattacagtttattttcaagtgactaattttcttttttttttctttttcgtggattgaaactcaatttaattaatatatgtctcaaaatatttctagcagtacgtgatcttttatatatttcagattcacattttgctaatttcgttggccttaggaagtgccaattacttcgctgaagttgggaaccatacttgcagtttcactcttttctatacgtattgtgtttaacattgtggatatttaaattaatggctgttttgcttgctgtagtg

SEQ ID NO: 83588 - DNA, 993 bp, Citrus sinensis
  Intron number 1 from transcript orange1.1g046166m (locus o range1.1g046166m.g) derived from phytozome v7.0 (chr-ID sc affold00763; pos 52862 to 53854 reverse strand)
gtggctttagatttcaatcataggttagaataatcaggaatcatcgaaacattgaatatgataccgtaccgttcatcatcttctccaaaattagggtttctgaaattttgtaactctaatgcgactagatttgtattttggcaataactttatcgatttaagtctatttttaacaaatcaaatatagttggaaagctctcgaaaagatctttccaatgacatataacacacaatgttaaatttcctagatcaaaagatatgatcaaataaagtttcaggttgtatgttttaattagggttcatacaaattaaaccctaggtcgcatatacgccattcaattccagaattttatagtgattctagctttccaaaacataaattgaacaaccaccagattatatatttcatgataaataattaacacataaaattcatgcatttttcatgaaataaattcaaccattcatacgaatccaacacaaaaacatgctctgataccattgttggaaaataattaaggattttacaaatacctttcttctcgaattaagcagtggagtaatcaagtgttggatcacgtcaatggttggaaagaaatcacgaacggaaatccccctttaatcacagtataaatgccctcctttttgatgagttgctcaaagttcttaaactttgttctctctctgctcttcacgttctcattattaagggattttttattttttatattggaaactaacatgggaagttgattttaaatcaactccttcaactccctataaccgcacatggtaattgcttatcatatgcagatcgggtcaagttggcccctcatgggcgacccacccatctgacactctgaatgcatatatttacacatacatatatttttctttccctcaaaatctaaatggccattaatgaagcctcgctagaaaaaattaacagctgctgcagctgtgagagtacttcttcatcgccaacatccagta

SEQ ID NO: 83589 - DNA, 485 bp, Citrus sinensis
  Intron number 1 from transcript orange1.1g006772m (locus o range1.1g006772m.g) derived from phytozome v7.0 (chr-ID sc affold00266; pos 91599 to 92083)
agtttcagagctccacaatttctcctcactctacggtaagtttctctctctctgtctgtttctttgcttggtccccagaaactgaaagaaaataaaagaaacaattttttggttaagaatctataataagtgttaaaagtggtaaagatgaagagggttgatgggaattatagattttgaattgtatagatttctttttaatttaaagttgattaattattgattgatcaaaattgtttttgactttttggtttctttgaccccccttttaaaacaaaattgttttaagttctgtagattctgataaaagtgggtcttagctttttgaaagaggtaagcttgtgtttgaattagaaagaatttgggttcctaatggtttagtttttgcttcttcttgtatgatagttgatcgaaattagtggtggtgttgaaatttttttttttttggttggtttgttctctctgtgatattggttttaggagaa

SEQ ID NO: 83590 - DNA, 600 bp, Citrus sinensis
  Intron number 1 from transcript orange1.1g038649m (locus o range1.1g038649m.g) derived from phytozome v7.0 (chr-ID sc affold00085; pos 152058 to 152657)
acaatcattgtagtggctggtttttgagttatttgcaaaaacaaatagaagagtcttttgaggattgcactgcaaagaacattgatttattttgatagagtgccttttcacttctttgtagattcaatttctaattagtttagagaacatattcactttttcatccattctaattggttttgttctctcttaatttttgttcctcttgatgtggtttggttgtcagttctttcttgttctctctttgctcttagtggttgtttatcctctgtcttttgtctgacagaattctgatctatgcattttcatgggtttctgttgcatttttttggacatatccatcttttttattcacatatgggagagtcctttcagttatttttgtacatgaaaggttttattctttatttctgccttttgggttcatctgtattgtaaaataaaacgcaaaactttgtttaataaaagtaaggaaacaaattactctattcatcctttttacctttttattttactattggttctagaacttacataacttccttttatttgtttgttcagttaggaggcatcaagctaattctcacgcaaagaaaggat

SEQ ID NO: 83591 - DNA, 733 bp, Citrus sinensis
  Intron number 1 from transcript orange1.1g038121m (locus o range1.1g038121m.g) derived from phytozome v7.0 (chr-ID sc affold00001; pos 2580247 to 2580979 reverse strand)
aaatctctcgttgctggaggagttgccggcgcagtgtgagtctttctctcttcttgctttactattgttattattattattatttacatttcatttgtattatctccgtgaaaattaatgaaaagttgtattattatgttgtaaagtgagtgattcaatcaatactgtatgttaaaagaaaggggggaaattttgattcttggattcttttgtgctggggatggaaatgagtttagaaggatgaacagataaatctttctagcaaatatcagaatcaaccttaaaggaatgatcttttcaattgttgcaatagtgatgtgaaatcattctgttctataaattgtttctgataagcataaagttcaattgtctattttgaaaatttcaacctcaatatcttgtcagttttctgaaatgtataaaatgaattttgatgcatttttttagtaagcactgagaagtgaacactgtttctcttagaggcaggtttatcaccatgcactaatcatgaatgcacaatgaaggttttgaaattgctttagaacagatagcttactgctgaaagaatcacttgttttcaatttgcttttaacattatcaattgactagcatatttgcatatgcaccctttaaattttctgttgttgtagtttttttccatgttgaattttcactgacctgaccactgctttttgcagatctcgcactgctgttgctccattggaacgattga

SEQ ID NO: 83592 - DNA, 446 bp, Citrus sinensis
  Intron number 1 from transcript orange1.1g011537m (locus o range1.1g011537m.g) derived from phytozome v7.0 (chr-ID sc affold00020; pos 787865 to 788310)
tcttttctacccattttggtaaatccaaagttcaggtatttacttttttaattgctcaagttctatgtatgtagctgctttttttttttggctggaaaaaagcttgttcttggattctatgcatttgttgttaaaattcaatcttcctttccattgcctgtaattcggtccaatcatggttcaacaattgtgttattaaactctctttcccttcctctttatttcccgttatttgtttgaggctttgatttgagtgctaactgagttcggagtgcgcaaaaaagctttgcgctttggaattaaatttacacattattctatttgttgctatgttcctgagctaaaattggacaaactactctttgtttttaatgttcgtgttagtgttttgtgaaatttttgcacttataggttgcggattgtggcatcagagaattcactgacca

SEQ ID NO: 83593 - DNA, 747 bp, Citrus sinensis
  Intron number 1 from transcript orange1.1g046457m (locus o range1.1g046457m.g) derived from phytozome v7.0 (chr-ID sc affold09438; pos 1454 to 2200)
agtttctcgttcgattcccttcatagtactccgtaattttttctctaattttttttttttttggaaagattgaatttcgttggatgaatctgtttctatttccatatctcatttgttttgtttaactctaccggcgttgcaatttgttcttgataaacattttatttttatttataacagtcggtgcagaatgctttcaaagtaatggtttttgtgagtgatgctaaagctaaaccttttgttgtggattaattaggcttaacagtgaaatagtgaaacttaaagtttgtgttgattggtttattaaggtccaattttattattattgctgatatatcatatggttaggcgaaggtgttttttacccttttttttcccctgatccttgtattgcaaactattacgtggtgctttaagtttgtctcggaaagaaagaaaaagattgcagagtgcattgattggtttgctgaatttgaactggttaaaaataatgcctgtgtgaaaattaaaggagcctgtggtttttctatacttgtttataaggtaggtgacaaaatgatcaattagtctcttaaatctccctaccatatcggggcatttatttgatgggtttgatttatgaactaactgatttgctattaacttgatttatttcacgaaaagaactaatttgagggtctcttgcttttggtataatgtttaattatggcaggtattggagaccagtgttccaatcaaggagtgaaa

SEQ ID NO: 83594 - DNA, 329 bp, Citrus sinensis
  Intron number 1 from transcript orange1.1g003727m (locus o range1.1g001301m.g) derived from phytozome v7.0 (chr-ID sc affold00042; pos 466479 to 466807 reverse strand)
tctttgagtagcggctggaattataagttgcaagggtaagaaaggattttatgttcttccttcagtaatcttatatgattaatagctggacttctgttgtatatccagttaaggatttttcgttccttcagtaattttactttcttcaatggttctgcattctgtacttttcattttgatcctgtctaactatagtgaaaaatgttcatgtctttttatgcttttattctataatcttgctttatttattagtatttgagtttatgaaattttcatttgaattgtattcttcaggctgtagtctttactgatatcagcttagagaaagc

SEQ ID NO: 83595 - DNA, 697 bp, Citrus sinensis
  Intron number 1 from transcript orange1.1g025217m (locus o range1.1g025217m.g) derived from phytozome v7.0 (chr-ID sc affold08189; pos 429 to 1125)
gagaggcaatccagtgtttgttaggtcagatatgtacttctggttgtaatctgttctttcgagttacgacattttggagaaattttgtaactggggtattgttttttctcgagacatgaatctatctgatgcctgtttgatgcagtctgagacagatttcatttgtgagtttattctgggaaagcttgagcaattggttttcatccaatattttccttttctcagtttaagtagtttattttctatacctaacatgaaaagtaattcttcaaggctatgcaagtgtgaactcttatatctatctgaggtgggtggtcaaagacattctattctgtttgcacatatgaaattagctcttaagatttttttcttctctttgaaaatttgctagagagttggagaaaagaataataacagaaaatgtttctccgaacttgtgcatagagactatgcacataggctttgcctctggctcagggctttgcaagtataatgttttggatcatgaaattctttatttttgctgtttaatgcaattctatccttctttatattctttttgggatagtatctatgtatttgtgctatatagttactatgaaataatttgattcggtggctaatttgttgggatgaaactgtaatgattgactatattgtaggttgcccgaggccaaattgagcgagctagtgccac

SEQ ID NO: 83596 - DNA, 492 bp, Citrus sinensis
  Intron number 1 from transcript orange1.1g033306m (locus o range1.1g033306m.g) derived from phytozome v7.0 (chr-ID sc affold00069; pos 421372 to 421863)
cgtcgaacgtttctgcttccaataacaatcagaaggtaaaatcaaagtcgtcggatgttcagattcgcaatttataatatattgcatatagaatacaatcgtggttcattagattctctgttgtcttgttaattcttagatctgtttatctaggggttgtttagtcaatttgataaaggtaattaaggcattgatttcttgtatgatctttgaattctaatatgaagattgtttatgttaaggtttcagcgagattttagaccttgttttgacttttacttcataaaagtgtttgtttttttaagtgaatcgatgaaaatgttgttgttttatggaggaataatcaaagtcatcttgatttgttgcaaggactacttatttttgggcgaaaatattattcagtcgataaatgaaaatttttagttagaagtttttttaattaaaaaaattgggtttattgtttttgtggctttagggtaagtttgggagttg

SEQ ID NO: 83597 - DNA, 969 bp, Citrus sinensis
  Intron number 1 from transcript orange1.1g027495m (locus o range1.1g027495m.g) derived from phytozome v7.0 (chr-ID sc affold11429; pos 857 to 1825 reverse strand)
taaagagagaacacaaaacgacccaaaacccacaggtactttaactttcatcccatgtacttattttttcaatttatctttcgatttacatgtcgtatgggaagtggagtgatgaagatgaaatgtagtgtgcgaactcaagaatcgattctttgttctgcttgtttgattttgcttttgttttgtaatacggtgttccaatttgtaattatattatatattttatttcggttcttggatggtattattattatttatattaatggaaaactttagcttcttcggctggatttgtgcatttatctaatcggacaatttactattttaatcaattttagcattcagtctttattttaggttatttatacaaaacaatccttccaaactgacttgggatgatataattggaagacatcatattatttttagtcttccaatcatgtcacattgttacctacgggtaggtttgtatagactgtctgtatgtattatgctcctttgttttgggtgtatttaagctctctgttattgttgagaataaactgggaaaaaaaatgagttaacattttgaacttttagtgtttatgtttagtaaggtctggctgtagtgcccattgaaaatccctatgctgatgcaagtgggctgagaatttttgggtttcaaaagataaaaaaggattatgatgagttctgttttgaggattgaaactttatttacaagtcaagtaattggtctatttgaacttcatatgcttttttccatttaccctctttttatacaagttcggttggtaatgcctgtttgggtggtacaagaggactcaggttccatgctcactcgcatcaaggtggagagggatttggtttaaatttatgaatgttaaaaaatgtttccgtaaaaaaagaggattgattatatggtttatcatttgttgcagtgacccttttttgttgggaggacttgttaaa

SEQ ID NO: 83598 - DNA, 564 bp, Citrus sinensis; identical to SEQ ID NO: 81519
  Intron number 1 from transcript orange1.1g013813m (locus o range1.1g013813m.g) derived from phytozome v7.0 (chr-ID sc affold00006; pos 1354520 to 1355083)

SEQ ID NO: 83599 - DNA, 290 bp, Citrus sinensis
  Intron number 1 from transcript orange1.1g012765m (locus o range1.1g012765m.g) derived from phytozome v7.0 (chr-ID sc affold00059; pos 85249 to 85538)
gctgttcagggtaagtttctcattatttcaattacttctttttcatttgtgattactcatttgaaatgggttttaatgttttggcctaatactagagctatttattttggctgtgtttctgaaatggatttcattcggttttcaataagaaagaagacagctttcagttctcgcataaaaatcaaattttcctttttaattcaatcttctatttttatatataaaaaaatattaatttccgggcaataaatgtagagacgggagtggtgaaggcacaagttgaaaaaaat

SEQ ID NO: 83600 - DNA, 970 bp, Citrus sinensis
  Intron number 2 from transcript orange1.1g012765m (locus o range1.1g012765m.g) derived from phytozome v7.0 (chr-ID sc affold00059; pos 85895 to 86864)
tgaacttgctgctgctactgataatttcaattccggtgagttatgaacatatttgctattagcagtttcttattccaatacttgggaatttcctatttgctgttaaggacctaccgaaataccccgggccccacgcttttgcaatattgacttcttattatcttggctgcttcatgtttcaatctagtcatcagcaattgaccctgttgggaataagattcaaatagttaggactgcggttaaagcacttccgtcagtcatcagcttatgtagaaaagatttttattttgcttacaaacgaattcaactctttcgtgtgtgttttacatggcctgaactcatctagtgaacgcaagtcaattgtgcgtgctcttgacctggaccggttgcatagcaagtaggtttttatattaaatggtagaggattttcattggttaattgaccatgaagtcaaacaggcccgcttttgtcctgcaaagatttatcaatccttttatacttttaattcaacttcattttagtatttctaattgatttttctaattcatacaacttatctgcagaggggcggctaccttttcgattaaataaaatttagccgaattatttgaaacttattatctaaaagctttaacaaaacatacagtctcaatggtaaatagagcagtactgaagaaacaagtaaaaaaaaaaggtaagatgggaccagcctcttgaccacccttggcataaagtctcctctaactcccagttgaaatggttgaaaatatagggaggtgttctctgttaccggtgaaatacaggggattttatcaatgtcttaattcatataattgccccatatcaagtttcttgacttattaaatcaattttactgtgcatctcacatcttcttggattaattgaacgatgtgatagttctaatcatgcatcacacttttgtagaaaacttgatcgggaaaggtggtc

SEQ ID NO: 83601 - DNA, 901 bp, Citrus sinensis; identical to SEQ ID NO: 81394
  Intron number 1 from transcript orange1.1g026470m (locus o range1.1g026457m.g) derived from phytozome v7.0 (chr-ID sc affold00069; pos 443736 to 444636)

SEQ ID NO: 83602 - DNA, 521 bp, Citrus sinensis
  Intron number 1 from transcript orange1.1g041819m (locus o range1.1g041819m.g) derived from phytozome v7.0 (chr-ID sc affold00105; pos 108397 to 108917)
caccctcctagctttgttcaagaacaagtcaaaaggtacaaaatctataactaattttcctggaaaattctgatgctttatcttccagggaagctaaaactcagcttgccttcacttgttaattcaagtcacttgaaagtttattaattaaagaacatcgtctgatgcaatgttagagaaagaagttttcgagtcaagtttttagtttctctaacatagtatcaagaggctaacctatgcatgcatggctgtggcatgagggctttggaccgcaagtcaaaatttttttggagaagataagaatcttaattgaaattcagcccattctttgaatgtattatgtttggactcttcagttatagaatttcgattttaatcctcttcaagttagtagtttttccactttgattttatcccatttctttgaaccaaaatctcggttctaccactgatcattgatttcaattttcaatttctcttcggtaggtttggaaatattttttcctgcagcttgtttggca

SEQ ID NO: 83603 - DNA, 974 bp, Citrus sinensis
  Intron number 1 from transcript orange1.1g035085m (locus o range1.1g035085m.g) derived from phytozome v7.0 (chr-ID sc affold04231; pos 1552 to 2525 reverse strand)
tcccaatctggcattgcagcctgtttttgcattaagttggggcttcaaaatattcacagatttacttcttgtctcaccacttctcccacaagcaaaagtcacatttttaagaatctcatcactatcatttctactagttctcctcaaaactgaaaatccttttcttttaccgtactctttgaagtaaataaacaaattgacatcactatcgatgacatctcaattattggctcatcgtcctccccaattttctccaactcttcaacttcgatgtccttttccatattctttatttctacaaaattgaaataattcacattgacaaaatgaaagtaacaaaatacaaataattcagcacaaccttacaaaactaaactaactaatgatagaaattgtgaacacaaatttaatatataccagttgaggctagacttgcaaatcaaacttataaaattatatgcctgtcgaacatgctctagatcatgttttgttgcataatcatccgtaattactagacaattaaacaacattctataactcctaaccgcaagttttaatagctagtcaatataaattaacataatatcaattaagatgtcacaaattaattattagcacaaaaaaattccagttaatgaaggtcttcagctggcctacgattggaggctgctgaaagagaagaagctgcatcatccataatttatagtttcatataaaataaatgaagaagacagctggattatcactaacgaagaaataccatatgctcaaagtccgccaaccttctggtaggttccacggggttctcaacgttgccgttacaattcttgaagctgctgatgcaataaggcagatctagccttaagaagagagtgaggaaagggcctagcttctcaataagtccttcatatggcactgaccttagtcgctcgcatccaatgcatacctgcagaaattgattgccgcaatcgaca

SEQ ID NO: 83604 - DNA, 720 bp, Citrus sinensis
  Intron number 1 from transcript orange1.1g016291m (locus o range1.1g016291m.g) derived from phytozome v7.0 (chr-ID sc affold00015; pos 996786 to 997505 reverse strand)
tttaagaacacatcaaactagctctgatctttcaggtaattgtgatccaaaaataataactttactgtttggaattagagtttagtctatttaatacttgaatttttgtgggtttttttacgctttgatcacttgattttgagaaaatagaagattttggaactggcaaaatgttaaatgtaattaagcttgctttatgcccttgtgtagatgcactatttcactcagctattgggtttccatatattatgaaaagacagcagagtcagcaattgtttaaaatcacttatctgcttcataatttttgaactccgtagaggaaaccaacatttgaaagtaaccgcgaagctgaagcctgaagaccaagttaaaatttgaaaccaaaaacaattaagagctttttaatttatttccagctgacaagcttcatgacgtgccaacttgaaaggagaaaaaattaataaatttctggctaaaacagagataataataatcctagggtgcatggagcttaggaccattatcagcattgtttatttttctgttccgttgattctttaataatataacatggatatattgtaaggatgaaatgcacacgtgtctgcttcattttcaataaatggcattatgttatcaagcgtatatttgatgaaaggtataccttgttgacttgtaatcttcttgaatcagatatattcgaagaaaaggcagaaattg

SEQ ID NO: 83605 - DNA, 972 bp, Citrus sinensis
  Intron number 7 from transcript orange1.1g000172m (locus o range1.1g000172m.g) derived from phytozome v7.0 (chr-ID sc affold00020; pos 1034169 to 1035140)
ttgcttgtggtgttagcttaattgcacttgtcgaggtaatgtgctcacggtgtcacaatgaacacttagcatgtctgatgatttgattagcccatacaagtgtaacaatgtcatttgggaaacttctctattatatggaatcagctgcatctcatctagctatggttgcaagagacatggagtttctagtcctacatgcatggttaacataaataagtggggagtttgttcaacttcgttctgatcttgggctaaaattagctgtggagttgaactttgattatcattgtgttgtatttggcggccttgtgaaatatttattgtgacaactcatgtatcttcttttttttcctcaatattatttgaattgatgctgatataatgatgatctgggttgagatcccatatgacatttttgtctcttatatttgtccttaatattgcttgtaatccttatgagtttgatgctgactgtctagcatttcttaattatgcatgatgctaacggtcaaaggttccacaaaaaatggtgggcacgcaatccaacctggagctggagttgcaattatgaattatatgctatgttatcctattcactagaggcaatacatgcaggaattctgtaatatttcctagagctgcagccatgacacctattttttcttcccttgatttaactcggaactaggaggggttgagttaatcagtattaattattgattattttgcattatggtatttcctaaaattatgttgttatataattgcttaggttgcttaggttatcagatgcttcattatgaaattttccctaccaactgtttttaatgtgaagcttttgtcttaacttgatccattgttttccaatttaagttaaatttttaatttttatttttaggcggctatacagccaatcattctgctgcatgtggtaattatttttttcgcagatacgacgactttttgtatcag

SEQ ID NO: 83606 - DNA, 871 bp, Citrus sinensis
  Intron number 1 from transcript orange1.1g017938m (locus o range1.1g017938m.g) derived from phytozome v7.0 (chr-ID sc affold00029; pos 977489 to 978359)
cataaagcaagggcaattcatctgtgagtacgcaggtatcggcaaaatggaaatgtatgttggcatttttgtaatatttgtttagagtttttgatgcttgtgattttaattatacatgtgcctagttgcatctgcttgatgattatttgatacagtaagacttattattagatttagcgcgtgccgttgttggaattatatttctgctgtgttacggtagtatggaatcataagttcatagttttagaatgggattgtgcggatgaaggaattacatttgtttatttattttgaccaagaagaagaccaccttcagttcgtacaattctagttcaatggcagtattatcgaatcccatgtttcaaatcttatagtttttatcccttattatttggattaattttgcctaattggtaggcaaattttgttcgtctaatacagcttatattttacatctgctacgtggtagaatagagtctataaccactatgttttgcatctaccatagggctgtttagcttgccgttagccatatcttccatttcttatgactaccattatatagctgcttacttttcctgagttatagctttgactctctattgtgttttctccattcaactagccattgttgggcactttgggtgatgttttttatctttctttccattcttcccacatcacggggtttatgaaacattatggtaataactgattgctttgaattggtctagtgtgtaaaacattttcagttacttggatatttaagaaataattattgtttgtttctgtggacatttgttagaaattgtcttagttgatgtttacttgaataggtgaacttttgaccacaaaagaagcaaggcggcgg

SEQ ID NO: 83607 - DNA, 506 bp, Citrus sinensis
  Intron number 1 from transcript orange1.1g025454m (locus o range1.1g025454m.g) derived from phytozome v7.0 (chr-ID sc affold00110; pos 289335 to 289840 reverse strand)
accgcttcctcgaagaatacaggttctcgtttgttttattcttttgttattggattccatttttcagattattttttgatagtggggtgtctttcttttttcccttaatttttttttcatgggatttgatttgtttgaataattttacgttgttaattgaacttgatgcattttttttcttgtaagcttcatttgacattgtgaagaatagagtagccacttgagaattaacaaaacaaattgtagctttagtggtagaataagtttcaatgctatgagagtctcaatggtttcatttcaactaaaatctttgctgtttcgagttccagtgatgcctaggcatttatcttgttgggatatattgtttgggttcaattcaactttacgggaatcttgttttgtaggttaattttcttgtggaggagttgttaagatttggctagttttatgaattatttctcatgttgattgtggtgtgttttaataggaaaaagaggttggctgag

SEQ ID NO: 83608 - DNA, 589 bp, Citrus sinensis
  Intron number 2 from transcript orange1.1g006313m (locus o range1.1g003416m.g) derived from phytozome v7.0 (chr-ID sc affold00029; pos 1020767 to 1021355 reverse strand)
agtttgcggtaaagtctgacttctgtgattatgttttattgataaataatgccgtggttcagccttactgcagtagtttctttttttcagccttttgatttctcttttctgatggggcatttcatatacagaactgaacactgtcctatgtagaggatatagtgtagttaaggcacatgtcaccgatgtcagctacttcaaaattatatagtgctggatgtggtttaagccaataagacaagaaaggggtgtggccgcccatgaagatacatacaaatatgttaacattcgaaacatatgcaaagaaatgtgcctgtaatagttttcctgtctacgtaaagtagtaaaccagctgtctatttaatcttgatacaagttttgcatgtttaagaaaatgatctttcatctttaacagtgagtccatttttagctgtaatccttttctcaagcatgacttggttttgctttcgttttcatctcaacagtaaacctgtttgcaactagaaaacattgtaatttttttgtaacttttctctaggtcgacttggaacataatcaatatcgatctttcctaggattgacttgcctg

SEQ ID NO: 83609 - DNA, 839 bp, Citrus sinensis
  Intron number 1 from transcript orange1.1g039151m (locus o range1.1g039151m.g) derived from phytozome v7.0 (chr-ID sc affold11644; pos 90 to 928)
gttggtgaagttgttttcaatacatctttgactgggtgagattattttttatttttacttttatttgctgggtttaattaacttctattgtttgtcgctgaagtggtttgaggctgtgtaaaaaaattatttgaaaatgtttttttgcagcaaattattcaacccattttgaatacacttttcttctttagctttggtggaaatttttcttttttctcattcaggagttggtaaatttgataacttggggaaagtctaagaagcaatttaagagtctagaattatggcacatttggtacttgttattatcatactatattaaacagttaaagagactgtcacaacagtatggtactttggttgtgtccagattttctgaatatgaaatcatattaggtgttagagaagctgtagttggcaggatttcttatgaattaacagggtacctgatttctggtgttgtcgtgccattattttgtcccttttgatcggtcctatgtcatagattttgtgcctgtcaatataggagcttttgattcttgtgatatggatttacagtagttgattgagagctttcgctgttaggttatgttataaatcagcagctcaatgaatgtcctatttactggttaacaacagtttgtttctggttggtaatggatccatttacagtgaaaatatttgtccaatggcagaaaaatttaatatcttcaccaaagagaatataaaaattaacatggttaacttccagtagagttgacgagctctagaaattcaccaattcgttgttgctgtttgcttattttgcaggtatcaggaaattctgacagaccctagtt

SEQ ID NO: 83610 - DNA, 681 bp, Citrus sinensis
  Intron number 1 from transcript orange1.1g007930m (locus o range1.1g007930m.g) derived from phytozome v7.0 (chr-ID sc affold00001; pos 2972737 to 2973417 reverse strand)
ggagattcggatccgagagtcgctgagacttgcaggtaaagcttctgggtatgtcattcttttctgtcggaacctttaactactcgtggcgcatgttagtctaagacttggcagaaggctaatatgtgattttgtatttttgaaacacgttttgcttattccactttggtgtcgggtttgggcttgtatcttatcagcccaaaaccggatcacccatttgtctgttactctgactctgttttgctcaaggtaattaaataattcctagtaggaagcacgattgcggctgaatacaaaatggatcgaactgtattaaaagtctaagaaatgggaacttgcattactaattaatttcttttgaaggaacaattaattgagtgccacaaatgtatttatatgagtaatgatatacttacatagttggtatacatatttatattctaactaagacgatattttgttatctattgatcgattaatataatactatagaataatgaataataagtcaactaattctttatctcgcttttgtaagtatagtattattttattttttaagcgagagagagagagagaaagagagtttgagagacgttaattcaaacctctagcagaattctgtttcctttcaattaactatgaaaagacaggtacttagctgaggcacatattcaagca

SEQ ID NO: 83611 - DNA, 337 bp, Citrus sinensis
  Intron number 3 from transcript orange1.1g043135m (locus o range1.1g043135m.g) derived from phytozome v7.0 (chr-ID sc affold00001; pos 5022595 to 5022931)
gggactatagtgcaaatcaaacagaggaatcagtagtgagttcttttattacccaaaattttgaccttttttattcttttgtttttcataaaacagaattctcaaaatgttattttgtcatgaaattatcttttggaaaatggttatgttcctcctttcagagaaaagaatatgtaatggataaccataagtgtatgaaggcaatagttctgaatttgtgccatatatgcaataatttaaatcctttatgaacttctgcaaattatgtggtctacttctgggttttctttattgattatcaggtccacgagaagcctgattccactataaatattca

SEQ ID NO: 83612 - DNA, 665 bp, Citrus sinensis
  Intron number 1 from transcript orange1.1g025081m (locus o range1.1g025081m.g) derived from phytozome v7.0 (chr-ID sc affold00284; pos 78606 to 79270)
ggtcgtttgatctgtcaggcagtccagaaggtgaggtaagtagcacgatttttacaatcctgactggtcttcttatccttttcctatgtgcatttcctacaattgagttaattattttgtttctgaggacaaaaatggtatctctttctagtatgaaatttattgaattttaaaaaaactgtcaatttctatggaaatataagggatcatatctcaaggagcaaattgttgctttacaaattaaaaaatgacttaaccacaaggaggcaatgtataatccgctctttatgttatttatgtccttataggaatgctgaagaagcagcagacctgagacaatatttaaacatataataatcaacaatcctcctttgagggttctatgtacgctttttaattaaagaatttgcatgctcaaagtttatttccagaagttaactttggaattaataatgttgtactttgtgacatctatttcatgattgccttttcctgtgcgaattttcaagctgagaaactattaggtcttactcttgtattcttacttctaagcaccttttttgtaataaataattcggtcaatgattttatttcatgtcactattctactgaattttgaattttgatcagggatcttccaatagcacagctgtataagttgctta

SEQ ID NO: 83613 - DNA, 935 bp, Citrus sinensis
  Intron number 2 from transcript orange1.1g042983m (locus o range1.1g042983m.g) derived from phytozome v7.0 (chr-ID sc affold00090; pos 267450 to 268384 reverse strand)
agtttaaagaagtgggtaaagtaatcattacctcatggattgactgcagttgttgatacaaatttgatatgagaggagcaagcttttggagccaaaatggattgtttattaagcatcatgcatttggcattggattgttgcacggactcacctgagcagagtatatacatgagagatgctgcagcaaggctcaagaaaattaaagtgaagtgtctggacgacatccatgcaaactaatgactgtaaaactgttatatgtggactggttgttgaccttctgcgtgcatacttccttgactgtgtacttgcaagtggaataagagccattctgatgtagttcttcaaattgcacctttgcagttagattttagatttataaggctgtatttactagaaaccgtagaacaataaaaccaagagtccagaatgtaagttctccaagctcatagccatagcctgtgatttaaggataagatttaacactgcaagagatgaaatattcttcaaaattctaaaagaatctgcccaaccgacctattgaatgggacgtatcaaatttcccagtgttgattggaatactgccttattaatggaagatgtaggtcaggtaagccagcgttacaattttgcccaattgtaattattacttgaactagactgtaattagactttaattagctaatagaaaaatcaagtccaagtagctaactagcaaataatatattttatgatgccgaaaaagtttagggtaattgggaaaagaaaaaagatagaaaaatttgccgggcttaatatttgacttaattgaacgagtcacaaacttagttaatcttcaatttacataaaatttcggttttagttatttcaattaattaaattttcataaaagctactctttagctgaaagttcttggttttaaagtcaagggttatta

SEQ ID NO: 83614 - DNA, 330 bp, Citrus sinensis
  Intron number 1 from transcript orange1.1g045642m (locus o range1.1g045642m.g) derived from phytozome v7.0 (chr-ID sc affold00129; pos 80843 to 81172)
ctcgtgagtgacttaccctccaagcttcgaaaacggtcagtttttagtatcttctgtatacattattgctttttggaagttcttttgtgaaagtgcttcttaaaaaacttattttgatagtttgaagcgcgttttagtttttacataacaccaacgggagttcaattttttctgtgttatatgagcattgtgagtaataacttttcatggaaatttatttctgtgtgttgtttatggaatttaattacattttagtatataagatgagaaaaagtcactctggctcttattcgaatttaattcactctggcagaagagttcaaggttcat

SEQ ID NO: 83615 - DNA, 584 bp, Citrus sinensis
  Intron number 1 from transcript orange1.1g028392m (locus o range1.1g028392m.g) derived from phytozome v7.0 (chr-ID sc affold00122; pos 417552 to 418135)
tttagctctcttccttggcttcactgggcattcaagtaagctcctcaagtcgccttttaattttcttgtagtgaagctccacaaagctagccaccattctttttttttttctcctttttttgggtttgtagacatggagatttgagatctcattttatttttatcccttgacattaaattttgagtgtaaaggaatgactttttttcccgtcttcgtgcatacccatctgttgttttttttttttaattttctgattcattttagttggtatgaaaaaattgacattttacttgcatacacggactcaaatctctcctttatatatggtgcctcactttattctcatttaaaagaaatttcttagcctgaaacttaactattttcttagttaatagaaagaaaattaaaaaaagagaagattataaaatataaaaaaaaaaacccaagttgcctttcagttttctgagtctatttttaactatttttattttgcttccttcttctacaagggttaatctttttttttgttccctcttgtttgtctgtgtgattatggtagctgcaaactggtgtgtttgcaaag

SEQ ID NO: 83616 - DNA, 471 bp, Citrus sinensis
  Intron number 1 from transcript orange1.1g035275m (locus o range1.1g034977m.g) derived from phytozome v7.0 (chr-ID sc affold03450; pos 8188 to 8658 reverse strand)
tttgttatatcaggtagagtttctcctctcagttcttagggtgcagtgacttggatattttattaatatttgcttttggctgttttgatatttatattaaggttcttgcacttgtgctgtatataactctcagataaatttcttaccaccttgttggtttttgaattacatgacttgaaatgttgggcatcaagcttgtttccacagaattctttgcaataaattcatgttctctttttccttgacttgctgtgaaacccactcctatccatgcaaatccaaatgcatacatatttttatctgtgatatccaaaccaaataaatcaataaaatgctgaaatagtgagtgcacccacacatgcggaagcagcctagtgtggccaagcacctctcattagttttacgtgatacgattggcttgttgcactcttgatgctaatttttctttcttggttttggaaggttctggtg

SEQ ID NO: 83617 - DNA, 476 bp, Citrus sinensis
  Intron number 1 from transcript orange1.1g037968m (locus o range1.1g037968m.g) derived from phytozome v7.0 (chr-ID sc affold00612; pos 187 to 662 reverse strand)
gaagcctactgcttgtgaattgccaaggtaccaatatttattttctgtttcttgttttgcgttccttgcttctaacaactcaaaatttaatttcgtgcagggacttatttatttatttattaagtagtaggatggtaactcaattttcttccctcccatggcaccctagacttcttgtaccattacaaattttttctacataaactgttgtgtgtttcagtcatcaagaataattatatatatacacacacacatgtacacacattaatgatttagtaagcgatggtgctcatcttatagtggtgtcatcatcacttgatgatatttggttaattcataatctcaacaatattcataataagtcataaaattgtgtcacgtattcagtgttcactttatggtgagtactggacgacgtaaaataattttgtgccgcttctgtattttatagatacaagaagcatttggacttgatc

SEQ ID NO: 83618 - DNA, 456 bp, Citrus sinensis
  Intron number 5 from transcript orange1.1g004503m (locus o range1.1g004503m.g) derived from phytozome v7.0 (chr-ID sc affold00001; pos 1528451 to 1528906)
caacaagtaattaaatagtcttatttattcgttcttaacaagaactttcgtttctatctgtaaacatacgtatcctttttacaagagaaacaaccttttcaaaagctatagtctaattcgatctacggaaattcttgttgtcaagtaatcttctttggttaaacaactgcttttcttgaaaatcaaaccatccagcattttaaacatacttgttttccaatcaattaattaagatacatatacacttattattattttattattattagtagtagtcgtagcagcagtagtagtttcattatctattaatttacaagttcgtacttctatattatattttattacattatatatgtgaattgcaacatccgatcaagcatgtttgtgttcgatcatctaaattgcgctatttgggtaattacagcaagcttataggggcaagatacttcaagctcg

SEQ ID NO: 83619 - DNA, 937 bp, Citrus sinensis
  Intron number 1 from transcript orange1.1g009348m (locus o range1.1g009348m.g) derived from phytozome v7.0 (chr-ID sc affold00015; pos 1469612 to 1470548)
tacccttgaaggtgttgacaagtgctcctcatttggtactttcccctcctctttttcatttctaatgcaatctttatttgatggatcttgattttattttatctggcctttttttggggatggatcttgatatgattttgaaatttgagatatatgtttgttggtttggactaattgtttttgttggggcatgattagtttgattgttaattgctatactagtttggtgttaccagttttctgttatttttagatctgaatggattataattatgagtttcttctgattggtttgtttagttcaactttgaatttaagtttagtgcaatccaattaacatgggcaggaagtgatctagggcattgacttagtggttgttttgtgccactttgatcataacttcacgcgggttagagcattttccaactttttacttttgaatacattgtttaggcttatggaatcgaaatatgtatattcttttttttattgctggtgctaaaatcagtagaattatggggttatggctgcatagcaaactcaaatgtaagttcttgagtcactgcttctgaatttaaaagaatagatgcaagttagattaaccatttatttatttatgtgatcattgtaactggagattgactaggtatctaccatgaccgtatttcaatcacttaatggaagattccccaattgatgagttttaacttttatccctattattgtattgttgtgcaaaatatgaaatttatagttcagtgattttgtgttttctcatagcctgtacagagcatatttatatattacatagattgggatctgattttttcccttcacaattcttatagtgtactttaagtggatttatgattcttgttctctccttttcttctttgcttcagattgtttaggtaggcggttgggaccaaggcttctt

SEQ ID NO: 83620 - DNA, 906 bp, Citrus sinensis
  Intron number 1 from transcript orange1.1g003094m (locus o range1.1g003094m.g) derived from phytozome v7.0 (chr-ID sc affold00187; pos 253323 to 254228)
cttgcccaagaggaagcaagacggcttggccacaattttgttggcacggagcaaattctattgggtcttattggtgaaggcactggcattgctgctaaggttcttaaatcaatgggaatcaatcttaaagatgcacgtgtagaagtggagaagatattggaaggggaagtggttttgttgctgtggaaattccgttcactcctcgtgcaaagcgtgtcttggagctttctctggaggaagcccgccagctgggtatcataaccttctcctttccagtttagcaatgccttatgttttaggaactaggatctttttggatttcactataggattactgttttaaattctgttggcctgtctcttaactgcgtgattgagcgtatcaggtgctttaatttttgatatattatccgttggaacctttgcttcgggtcatttgttattggccatattttgggcttaatccttctacatatgtatcactttgatttccaagttcttgaagccaaattctctcaaatttcaatctcagaaactcacaaaagtttatatgtgtgatgaaatgttaaaaaatcatagagaaaagttgtttaagttgattctttaaccttgaattaattatctaatttgttattgactttattagatctagaattggttttccatttgattctactgaactaaagaaaatataaattaaagcaattttttttttgttacattgttacttttgtagcatccaattcatatgacctttgtttctgatttttaaaagcaagtgttagcttcttgaaatatattattttcattttctgactaggaaacacatctaattgtcatctgaaaaatgtatacttacttgaaatttcaggccataattatattgggtccgagcatcttctcctt

SEQ ID NO: 83621 - DNA, 732 bp, Citrus sinensis
  Intron number 1 from transcript orange1.1g013740m (locus o range1.1g013740m.g) derived from phytozome v7.0 (chr-ID sc affold00033; pos 498806 to 499537)
ctgttattgcaaggcaacccaaaggttaattaatttcttctcctagtctcaatttattttcttcattaattacttgtgcgtcccctcctcctttaatgggtatgatttttctcttttgattctttaatggtacccaaaggcattatttttgcttgatactatatttgtttggattttatgggtaagtgattcgttatattttgattcagtttagggattttacttttcattaatgggcattgatgtgtttctgggtactatttctttttgatccccagttgttttgttttattaaatgatggttgataatattttcgtctgcttttgtttgctttagcgtgtatcattcattagggttctaggggtttattgcttgttctaatatcaattttcattctctctctcagtgtaaatttttttacgtagattttattaaaaaaattgattttttaattattgcttgtttaattccaaagatttgggtattgttcttaagattatcatcctgtttcttttttaaatgattctttgttcgtcaatttccaaattatggaagtttctctgaattctgacatttactagagcatctgggattattttgatcacattatgtttctaaaaccagattatatctttttctttgcatttttttttcttaggtctcatttcagtggaatgttgtttaaaaatcttctctttttattttgtttttgccttctaggaagaggaaag

SEQ ID NO: 83622 - DNA, 726 bp, Citrus sinensis
  Intron number 4 from transcript orange1.1g043078m (locus o range1.1g043078m.g) derived from phytozome v7.0 (chr-ID sc affold00015; pos 85239 to 85964 reverse strand)
tacgagtttgtgcttggaaaaagctttatattcaggtatcttttaagtcctctcttctggtaatatgtctccttgcctatttatgttcggatgattagggaaaaacctttttttgtttctgtttttcacacattgtacgtattttcattggaactgcaaaaatgttgaattcttgtactatgtcctgtttgtgataaattttccaactacatctgaattatcagctttctatatgaaattttcaagcaaagacatgtatgatagtggtgtttcaatatgagggcatgccattgtgttcttattggcaaaaagataaaaagggaaaaagtgatttatggacatgtaattagaccatttgtttctaagaagtagaaaggagggtgctgacaatgttattgttgttgcatcaaaccagtcttattgtgggtcaagtcttattttggacaaggcattaatgagaatattgtttaattgggattgaaatgttaattgaaattgcatatgaaattaagcatttttggagttcaaacttttaatttaatctcaaaagagactcaaggcaagtttatattttttgaaattcctttttgatgcttgaagcattgttaaagctggtgtagacggtagtcttttaagttaatgtttcttcattttacagcgcgataaggaagacttggccaactagttagaagttgcccaactgagtttaaagagtactatatccag

SEQ ID NO: 83623 - DNA, 400 bp, Citrus sinensis
  Intron number 1 from transcript orange1.1g028701m (locus o range1.1g028701m.g) derived from phytozome v7.0 (chr-ID sc affold00144; pos 143626 to 144025)
ctccgatattttcgcctggttcactcagtctaaaggtaaattgaaaattgtttgatttctggcgctaagagaatttgtgattgaaatttgataatttggttgattagctgacttggtttttgatataaattgcaaatttgagttaaagtttcgatttttatagtttatatgacgctattagaaagggatttttatttttccccccttttgtgattgttatgatgaaattaagtttttttacattggttttgagatttcacatgtttagtattgatattcattgaataatatcttagatagggttactgttgattttctgtttatttatttatttatttattattattattattattattattttggtctctttttcttccttcagagactctttatattg

SEQ ID NO: 83624 - DNA, 468 bp, Citrus sinensis
  Intron number 2 from transcript orange1.1g028701m (locus o range1.1g028701m.g) derived from phytozome v7.0 (chr-ID sc affold00144; pos 144086 to 144553)
gaagtattgaggaggtatgccgacctgctcttgtcatttattcccaattagctaatcccatttgttggatgtgtagtatgtcaaattcagtagtaattattttgggctgcatctatgcctctatgtgaatgtatttgaaatttttcaatgaatcttcattcaagtccttgtagctcctccatgaattatgtaggggtagttgggtcaaaattgttactttctgagtgtgaataatgctagtgatatccagtcacatttatgctgggacaagctgattactcaattgctctgttgttttagcactatattgatcttgtacctcttaagtatctattctgcaatgaccatgttcgtgcagatgttattcccctaatcatttgtagtgtgtttgtttttctaggcaggctttgccattgatttttttgatgttgcgttttctctggatctctgcaggtggctgaaagatta

SEQ ID NO: 83625 - DNA, 530 bp, Citrus sinensis
  Intron number 2 from transcript orange1.1g031617m (locus o range1.1g031617m.g) derived from phytozome v7.0 (chr-ID sc affold00030; pos 371312 to 371841)
gaagtggtcaaaagtatccgccgtggtcataaagggtcggttatttgtatttccgatatttatgcttttttctttctgtaaatgaagttaattcgggctctatttgttcctctgaatgaatgacaaatattacttgtggtattagggaaatagattttaagtcagtggccatggttatagtgtaaattagaactttcaagctctcgtttagcattgttttcgagcattgtgattcttatgcttaactgatgacaattatcaatgtgttcttttcttttgttttctcattttgtaaaagtagagagattatatgagtgttggtgtgttgttttggtgatataattaagaaagaatttttgtttcttctccagacaaaatagaaaaagaaagtgttttgggtcatatttttctcagatgttgctttgatcatacattcttgatatgtattatagaaatgacaacttacattccttcaattgcgtgggagttgtgaatgatccccttccccttctttttcatgagtgcagatt

SEQ ID NO: 83626 - DNA, 500 bp, Citrus sinensis
  Intron number 2 from transcript orange1.1g020044m (locus o range1.1g020044m.g) derived from phytozome v7.0 (chr-ID sc affold00001; pos 583185 to 583684)
ccactgtttcccttttatcaaattgccttcaagaggtaagccaagctttttcgttttcgatcttttttctttgaattgtgcggaggacgaaaaagcttttattttaagaagactatgagggtaatgacttttgactttgcagctatcatattatcattattattggtttgtgttagaaatttataataattattgtcaatgtggatattttcctgagggtttgtatgtaagtgtttgtgtttctgctcaattttgagagaaaaactgaaatgaaaaaaaaaatttcattagcagcaaatgtttacttataattgacagttattgctgtcattccaccagcaccttgatcccaaatgaaaactatttctgctgaacatgtttaaagtactttcaacacttgaacttgactcgtaattattgttcatggcattggcagttattatttactttataccttatctgcaggccaagaacgtcacttcaagaaacccaagagaatc

SEQ ID NO: 83627 - DNA, 652 bp, Citrus sinensis
  Intron number 1 from transcript orange1.1g020555m (locus o range1.1g020555m.g) derived from phytozome v7.0 (chr-ID sc affold00021; pos 169496 to 170147 reverse strand)
caggtcagttagttcaagcataatcattcgtttttgttttcagaaaacacttttgtttttgttttacgacttttggttcaacccagtacttccctgaagttcactagaatctggaccgctcaatatatgtgggtcctgaagcggtggtggggcctctagtgataagatttcttgaatcttgcaaagcttataatatgattaaggatcaagaaattaattttagaaactcgcaactttttcttgaataatttgtcggtggtattgacaaaacttatacgtgtgttttccacttcttatcgcatgtcattttcctttctctgtcacttacaagaggttggagaaaacttacatggggcgacggcctcatttaataaaatattttgatataaacatatttattttaaaattgactaattgcgacgtaaaaagaaaaataactgaaaatacatgtatttatttgacgatctaattgcggccatcccatataaatttgttgtgtctagattaaaaaaaaaaaaaaattgcccaagttgtcactaaaaacttttatcgttctaatttttgtcggaaaaattcttcatgcaatttttactttgacgatgccaccaaatgatctttcaatggaatggtgattgaacccagcatttgaagg

SEQ ID NO: 83628 - DNA, 1020 bp, Citrus sinensis
  Intron number 2 from transcript orange1.1g021755m (locus o range1.1g021755m.g) derived from phytozome v7.0 (chr-ID sc affold01986; pos 8311 to 9330)
taatttcgctattggtttttgcttctcccatgtaagtaaaactaactgtgtatgaaattcaatatttgatttatcgtttcttttgaatataaagtaaattgtagaatcagctgaagaaatgtaaactgaaagtgcatggcttttaaattcaaagtagccagctagcttgtctactctctgtgcattaaaggttaaaattacaagatatattttctgcagattaataaatcaaatttgcagcaggttatgaaaatttttggattctgtatctttttaaaatcttaagaaaatcctaaaaaatgaaggagaactacaaaacacactctggttgtttaagattttgacggtagtaaaatgatgtgactattttcagtttttacgtggaaaagtttaaaaattaaaaaatgaagataacttctttaaatttgaagtactgggaggtccactgtccccactccatcttctgtggttatcctccactttctacatttcttttccaaatttaatttagtgacacacttaatgggatcttttacaaacttttaagtagtgatgaaaacatttctctttttatattttatatagaaaaagtttatacttcaatctatatattatcctaaggttagataatattatatagttgtaatcagataatattatctaacctcatcataatattttaaaatgtacagacatcaacttttcatattgtaaattattttttaaataaaatactacgaatttataaatatatattgcagcatacagagctaaaatcttcatattaaagaatttttgttaaattgctttaaaaatattgaaatattatataatgtaccagccgggaatcgaactcgggtctgtatcgtggcagggtattattctaccactagaccactggtgctgaggaaggctagcttggtcactttattgtatatctatcataagctagaacataatttggctataataattcattttccagaaaaacattttggcaaattgtgaagaagaaatcta

SEQ ID NO: 83629 - DNA, 997 bp, Citrus sinensis
  Intron number 1 from transcript orange1.1g039639m (locus o range1.1g039639m.g) derived from phytozome v7.0 (chr-ID sc affold00054; pos 234486 to 235482)
gtgttgatctcatcattgaaaagggaattcaccaggtagtcattctttcacatgcttattgttaagtttgtaatatatggtatttactatttccacttttggagggaaaaacatcatctctcaaatctaaagagagaaaggtagtgattcataatttttcatttcttttttctgtatttaaaatttgttttttttaaaaaatgattttaaaatgcattctttgaaggggggaacttatttaaataaaaaacttataattaaaaacaacaatttttttttattattaatgcattttcaaagtaaattttatgttatttattttcaaggaaaatgttgaatatgagacgggtgtaacaagtcatttagagcttatccaataaatattttgatatccattttaaaatataccaaccatgaaaatgattgataatttagaacttatgatcttgttcaatgttttctagattgaaaataataaaaagtattcttctttttctcattattagtagactatcgaagaaatgctactaaatgcatatttcattcttaaaagcactattttgaaaacattattttcatttcaaacgatatcacctcgctcaaaagttttacttacaatcttctcttacactataacgagttttttttttttttttttaccacaaggtattctgggggggccccaactgtgggaggcacctttaagcccgtaccacaacccaaactagaagttcccgctcgaaccgagaggcacaggttctcccaacaaaagcgacttccttgcgactcgaactggagagcaaacccagtcaagccacttaaggggactctattgccagtggagccaacactttgttggtacactataacgagttatgatcgcaatagttccagcactaaaccctacccgaaccctattcaggctacacactgatgataaatggtgatcaatatacatgcagattgatcttcgtggagacatatcgggcctcctctc

SEQ ID NO: 83630 - DNA, 473 bp, Citrus sinensis
  Intron number 1 from transcript orange1.1g039619m (locus o range1.1g039619m.g) derived from phytozome v7.0 (chr-ID sc affold00968; pos 1054 to 1526)
agcctttgactattccagtctatcaggtatgtttcctcttgaaagttctttcctttatgaagaattgaagataatgtcagttggttatgcttggtatgcatgaaatgaagctgattttcattcgtctctttgattttttggggttttcaattttattgtggtgtttcttcttgtgctttgaatttttctagcgagtgcgacagcccctctttcgttcaactgttgccagccgtgattaatatagaattctatgtcttcctttttgcgccccccccccccctttccagtgccaacgattttgaaatattaattgattcccactggtggagataacgttcattaatggtctactattgcaacagtcttaggactttggtagaggaagatcaaatttcagacatcaatagttgcggtgggtacacctctgttcttgagcagttacagattattccttgtccatctctgacatcctt

SEQ ID NO: 83631 - DNA, 394 bp, Citrus sinensis
  Intron number 1 from transcript orange1.1g011615m (locus o range1.1g011615m.g) derived from phytozome v7.0 (chr-ID sc affold00097; pos 133457 to 133850)
gtctaaaatcaagaaataatattctccatccccatgtaaattttctcatattttctctctccctctctttacgttcttgtctaaatatcatcaaaacgaaaaattatggcagttttttaaatgggattttcttgcaaacttgtgtttttgaaaatgattattattgttaattttattcaaagcatggttctgttgtctaaattttattagttgtaggtgtgtggctaaattgtacataattgttagtaattcaattttgaattacttgtatatggttgttggcaattggattcattaaagaaaatggggtttctattgtgtgcattaattatttctccgatatttaattgtttcttcaggttattaaaattctctcaacgttgttgacattggg

SEQ ID NO: 83632 - DNA, 499 bp, Citrus sinensis
  Intron number 1 from transcript orange1.1g047384m (locus o range1.1g047384m.g) derived from phytozome v7.0 (chr-ID sc affold00029; pos 351530 to 352028)
aacgcattcctcaaaagctcaacatctcctggtaggtaagggtaagcatatcaaaagttttgaagtatgttttgttccacactggtaatttatttatttaacgttttttcattaagaaactcaagttgaaacttattaaggtatgaggactacaataagtaaacaagttgtccaccaaagccaaatcagcctaggcagaacctttaaatctatacacaagtaaaaaaatcccctcaatccctgaaaaaataaaataatctcattatacaaatctccaacggacagataacttgcccaaaactggcttcccaatttgaatttatgaagaagaaagaaatgtcttgaaattcctttctctgtgatgcctgtggagaagctagctacgtaggtgataatattatctgtttatttgattacatgagtgcagttctctggtttctgtttgccttgatctttcacaaatcaagatacttttcctgtgaatgcagtgctgggaagg

SEQ ID NO: 83633 - DNA, 468 bp, Citrus sinensis
  Intron number 1 from transcript orange1.1g029287m (locus o range1.1g029287m.g) derived from phytozome v7.0 (chr-ID sc affold00031; pos 550469 to 550936)
tttcgtcttaggtaataaccgtgttctacttactggcacgataaaggatctggataaatgcttgtaggctggtatcatgaaaaattactttgatgtccttacaattctataaattcaaacatacttaagaaattatcattcctataaggaactcaagtagagcttaaaggaattattttcgagggtgtattgatgtagataacatgttctttggttttttgttcctgagcttgtttgcatcttccatagatgataatcagttttcaagactaaatagctttgaagaatattaaatacatgtagtaaccttaaaaaggttagaactatgcatgttcctggcaatcttcctttgatattgcttgcgaaggtgtcttgtgatgcatatatgtgttagctttgtattgctaatgtatgacagaatttgcttcccatactctcaggtggccctggtagtggaaaaggtacgca

SEQ ID NO: 83634 - DNA, 669 bp, Citrus sinensis
  Intron number 1 from transcript orange1.1g007793m (locus o range1.1g007793m.g) derived from phytozome v7.0 (chr-ID sc affold00001; pos 3628242 to 3628910 reverse strand)
ttgccagattatttactttagtagaaagggatttggtgagctccgaagttaacggtaagctgtagctagcgttttgaattttatccgtaggttgaagagtaaaaaattctattgaatttatgaattgcattattttgatactaaatttgagatttttatgtacagcattctctgtgttttggattattttgggatcattgggtggtatggttgtcaaattggggggaaatgcatatttcaatgctttactccctattttgttttaggcactgactgtctttccgctgccatatttgctgaggtggctgtttctgctctcgttttaaccgttagaaatttgcttatgcatgcgaattttttacttcaccgagatgtttgaggttatatgccttacaatcttgaaagtttgaggttgttgattacagttgttagatgatgtagtttaatttacagaaattgaaatttgagggagttgagattaaaaattcctctggtagtcatatattaggacctcaaattttagaaattgttatataattcttattgattttgatggctgaaatccgtcctcttttcagggacctttcttctggcggcaaagctttaaattcacgatttgtacatttttccacgactggattatagacttcacaatccttttccttctca

SEQ ID NO: 83635 - DNA, 610 bp, Citrus sinensis
  Intron number 2 from transcript orange1.1g015998m (locus o range1.1g015998m.g) derived from phytozome v7.0 (chr-ID sc affold00001; pos 3529644 to 3530253 reverse strand)
aatatcactcccagaacgcttcttcttattcagtattttttttttttttctccctctctcttttctctttaatcttgtttattattattattatttttcctttttgtttttgaagttttggcatatgataggtagaatcccctgcatattcgttgtgtctgttgagtatgagttgtggtggtctcctaagcccaacctaaatttgatcttacatattccattgaatcaatcgattgtctgtgttgtttacctgttcttgattgattgtgtgtataactgtttgaagattgagagtgattagaataatcttgcttttattggagacataattgtttgattgatgacacaggcggcggattactagttcatttcatttgtgtgtttttcttcacttcgcacattttgtggacaagtacgcttttggggaaacatctctgttctgcttgaattagtataggaattagattatgcatgcatgttttgtatttcactagtaaactggagcgttctgatgaaaatttgctatataatgactcgtttttttccccctttttcctttaatctgacttgtgtagaaggaatttgtcctccttcgtttgaaaaaaaaatc

SEQ ID NO: 83636 - DNA, 743 bp, Citrus sinensis
  Intron number 2 from transcript orange1.1g048398m (locus o range1.1g048398m.g) derived from phytozome v7.0 (chr-ID sc affold00041; pos 67722 to 68464 reverse strand)
gagcattcaaaaccgctccattgtttacccagcctgtaattctactaatttctttgtttcttatttatcggttatctcctatatgcatgttcttctatatttgtttaacaattaaaagagttaggataataaaaatggcatcattctctcaaccaagccagctgatagcagtgtttcagaatccttttaagaaactttacatcaatgtcatttgtttcctgatcttcgctagaaaaatatgaataaataaataaactgactagatgtttgattccagagcttaccatttttcttttctactagttaagtatctatattgcttcacataagactaatactggtttccgtttcttggataatattatgatactgtgagagggtatatttgtcgtcttctcagatactttggcaatgtgataggacattctaatgattaattgcagcttgaaatggaatgcattggcatacttcaagtattcagttttgttgataagtaacacatattggggtctgttgctttcggagctatttgaaagataaatgaacaactagctgaacaacaaatttgattcttttttattgtgagatattctgaagcactactatttttctttttccccttttttatcttttggtgttttaatttttgctcaactcacatcttctcgtgtaaaactttgaattgtgatcaaataaaaattaataagcaagctcatttttaacagattatcttaatccctttc

SEQ ID NO: 83637 - DNA, 975 bp, Citrus sinensis
  Intron number 1 from transcript orange1.1g041525m (locus o range1.1g041525m.g) derived from phytozome v7.0 (chr-ID sc affold00001; pos 2242724 to 2243698 reverse strand)
caaagaggatttcgccagatcgtattttgtcacaggttttgtttgccaatgcactaatcaaccttcgaattttactaaacagtttcttttaggtctgatttttgcttgcggtccgttataattaattactaagaggatgatcatggttgattggggttgttttagactgggtttatatcaagagaattggtgtggttgtatttatcgtgaaatttgttttcttattagtttatcagtcattaaatggaatattgattagtactgttgaggtgatactttcttttttatggtagaaactaaagctttctcagatcttttaaaatgatgactcgttgcttttccctctcttgaacctgatacaatgactgattttaccggaattgatgcctatgaatttctgattattgagtgggattcgaagaatgtgaggcttttgtacaagtttcagaatcttgtacttcgaaacccatattccttggaccttggaaaagcacattttggtagctttcttatgatattaaagatcgaaacggcatttcgtcattaaaagttacaattttttttatatctaactatctgattcgattcactgtactgaaaggtctattactctagttcccactttctgacttggtaatgtgcacatagtcacctgctacaacaacggttgcattttctcaccattattccttgaatattcactgaacaagtttaatccctttgccccttggcgataaaactgttaccagacatgttgtaacttgtaagtggacacaagatatgctcaaggattgccatcctagaatgatagatagacagttcagagattagaacgactggacgaaaatagcatccttatctgaacaatcaaaggaagattctttgtttgtgtaatatctgcactccactctgaataagcattaccttctaacagctggattgaatattctgaaatgtcagggaacattacactcg

SEQ ID NO: 83638 - DNA, 605 bp, Citrus sinensis
  Intron number 1 from transcript orange1.1g021633m (locus o range1.1g021633m.g) derived from phytozome v7.0 (chr-ID sc affold00020; pos 1014769 to 1015373)
gattcatctgattggcttcaggtaattatataccatgcattgacactttcattgcctctatatatgtctttcatcagcttcaatcattgtttctcaaactaatttaggctacgatcagttctattttaattaattggcatggctgggaactccattttcaaatgaagacacttccagtttcctcaagctggctaattcgcaatacaagatttgatcatttacatgcgcagtttcgattcaacctttttttattccccctttttcaaaagttttctaccattttcaaggaacttattttaggtacaagaattcaaaatatgcgtgattaataatagaatttgccatttcagcaatgctacaaagcagtttgcttttcgggttctgtgtagccattgtattttctagcattcccattcagacattccactagttgatgtctgaaaaggcaagtgagaatgtttagtacttgcagtactcgacatccaagagaagacaaaagaatgtctatatcccaattaagctgaagcatttaaaatgcatttcgcattattaatttgtttcccatttcagggttcgatccacgaggagtctggcttggattcttc

SEQ ID NO: 83639 - DNA, 839 bp, Citrus sinensis
  Intron number 2 from transcript orange1.1g010294m (locus o range1.1g010294m.g) derived from phytozome v7.0 (chr-ID sc affold00006; pos 2123827 to 2124665)
caggtcagatattgtcaattctatttgtgcttgcgtgcaactggggacgttaggctttcatcttttgccgtctgattttaaaatgggttgccttatcgaaagaaaaaccatctagttcattattacgctatggtatcaaaatctacgtaggtaaaatgaaactggataattttattattatttaggaaagactgccaaaatgtaccaattctatcacataccaaaatgtaccaattttatcacataagaaaagtttgttttctagttacgtttgcagttacagtctcagatggggatcacctggtgaactgtgattgtgcttatgagtgcagtggctaaatgcaagttactagtgtaactggttgaaatgggagctggaagttgaaatgctgcaggatatatgatactctctctgctatatagctgaaattttagataattttttattagcaaatcttggactgagaagtttacattataagtgagatgcacacactcgtgcatctcttttatgaaaaattttcatattgccttgtggagataatgtctagatttacaagggtagaactggaaatgaaatgggatctctatttctgtttggaaaggagccttgtatcagttgcatttgggaggatcttatttgagattcagttttgatactgcaagtttttatttcctttcattaatataattttactaatgcctgtgtgcaagatttgaaggttattgattgattatcagacattctctccctgaagaattgcattagtttcacttattagaaagatggaaattgatttgcaggcagaaaactctcggtcatcgtactcactgcagtg

SEQ ID NO: 83640 - DNA, 672 bp, Citrus sinensis
  Intron number 1 from transcript orange1.1g008230m (locus o range1.1g008230m.g) derived from phytozome v7.0 (chr-ID sc affold00015; pos 1604254 to 1604925 reverse strand)
cttttattgtttttttttttaatatatacattcaggtttggtttctttatctccctctctttttttttttcctcggtgatatgttttccgttgttggtgtgttcactgtgttcttcttttctgggcttggcttcacattgtctgtcataaattataatgattaataatactgcctgcgtaatgcatgtttcaccttataagtttttttttatccctttcataggcagctctttgttcgcaaaatcgtgtttcttgctttcgtcttcttttatctcatccatcggggacccttttggcagtgttttgattttctcttcaaattttccaaaattttcaaagtcaatatgtaattgtcaaaacagcagcttctatgaactttaacacaaacattttctcattttcctcttcttgacttactttttgtaattttctaaacaatacttgccaagggacgttgattggtccagtttcttacctcaactaattgaatgatcttttcatccaagcctgcaagtttaaatttcaattgatttgcatgtttctctctgtttatgatacctacatttgtactctttcttactggtacgtttgtaaggtttaaatagcttctctaacgcagaaatatttagttatttaattttaacaggtttcagttaataaaagtcctgcata

SEQ ID NO: 83641 - DNA, 843 bp, Citrus sinensis
  Intron number 1 from transcript orange1.1g029998m (locus o range1.1g030037m.g) derived from phytozome v7.0 (chr-ID sc affold00020; pos 1264693 to 1265535 reverse strand)
ggttattcattttctgtgaatctggataagcttctgtaagaacctaaactctttttttttttttgaaatgattataaagtaaatttttattcgaggccatagatcttgatttaactttttgtttatatttttctctaatgaattgaaaaacaaggaattaggtactttttccttgaggatttaaatcttatttacaaatctaaattccttgcttttatttttgtgctcgctgtttctctcgcaattggaccaatgtgattgctgtggttgcgtcttggatcaggcaccatagtcctgtatttgatgatattctgataatatttatttgaattcatagtgcaaattttgtcctttatagtgaagtaaaattgtttgagggcagttaattatatttccattttaagttacgataattgtttggttctattcttagtcatttgtgttttgcaagttgatttatttatttatttctgataaccgtgagcttaattgggtacaactgtttaacttgattgtatcttaaattagatgttactcatatagttgtgtcatcaaatgtcttgacatactgatttcatttattttatcggcagacttgtcacctgttccttgtttgagcattggacaaaagtctgaggtttctgattctgtgatatttgttttactgtctcattttgctcggagcttgtgtatctctgtttggtaggtgcttattctttttattttatgaacttaaactgtataaagatcattacttcttcatttgcactgcctctgggatagagcgttgatctatataatggatatataacaggctgtgatttaaattgcataaagatcaaa

SEQ ID NO: 83642 - DNA, 657 bp, Citrus sinensis
  Intron number 2 from transcript orange1.1g040214m (locus o range1.1g040214m.g) derived from phytozome v7.0 (chr-ID sc affold00075; pos 258163 to 258819 reverse strand)
ataaggtataatttttgctcatgtatagtgcttgaaactgcgattttcaacattcttaatgtaattttaatggaaggctaacgacccaaatcatatggtttgagtacttttttcgtattcagggtaaactggaatgcaaattatacgtcttcttctaacaatattttctattcctactttatggctgattggtattttattatgtgtccttatttgccttctatagctgcttaaaaatgattggaagatgtttccaatttggtacttttttgaaagtttttgagaacgaaagtttcataccatggaagttgtatgagtatgagttgttattaactttacgggtggacttccttattgatggacatatacaattagggctatgttttcaaggaactggtccatagccattttactgatattagaatatggttgacaaacaacatcctgttctatgcatgatttaagtcgtattttccatgtcacctttcctgcttgcatggtttttagtcattgcaatgattctctgtgttttgttgctgacacatatcatatactttgtttagttttatgattacttggaacttagaaatggtttttgactgtttatttgttgcctctgaagcgcaaggctctgttggaggtggtcaaggagactgt

SEQ ID NO: 83643 - DNA, 904 bp, Citrus sinensis
  Intron number 2 from transcript orange1.1g027109m (locus o range1.1g026603m.g) derived from phytozome v7.0 (chr-ID sc affold00013; pos 289496 to 290399)
taagagaaagcgaggtgctgatcaacaccataacagtaatgaccctcctgcttcttcgggtacctttttttttaaatttttttatttgtgaagtttgtttgccccgttctgtttggttttcgagaaaatgtggacaattagaagaacagaaggcgcaaatttcaattttggaattatatttgagttcaattttgagacttctactttgggtttcgttgattgcagtttaattttatacccataaaagtaaattgtagggttagggtttttttattatttttttattatctctgttttatttatttttgtatgttgatcaacatttttgggaattgattatcacagattgatcatctgtaccaaagatctttcttttttttttcttttttttcgtttcccccacttagtacataagcaagttctgttttaagtccagctgaaatattctttacaagattcttctgtgatagtgaattcattgcactgaatatattatctgaattttaatttcaaacaatatttgagtcccaacttgaatcaccatattgcatgctgctcatctcttgaatgatgaatgtaaaatttcttattattttattctaccatccgattgataaatgctacatcagttggcactcaaattgggactttttgtgagtgtgggtcgtttatctggtatgctcttctttggcttaaaattttgtttgctatttcttatgatatcacctgttgcattagcagatcctttttgtgttgtctgtgattgcattttgcttccctttctggattcagaagtttaagctgttaggtctgcttgttcaattgttgttttgttgtgtttgacaagaatgtgtaattttggactgatctaacttttgctcctatttaatttagacaacattcc

SEQ ID NO: 83644 - DNA, 840 bp, Citrus sinensis
  Intron number 1 from transcript orange1.1g038845m (locus o range1.1g038845m.g) derived from phytozome v7.0 (chr-ID sc affold00015; pos 1582793 to 1583632)
aatctttttacgtcaacgattggcttagtattctctctctctctctctcttcttttcttcataatcataggcttttgacaatcaatcaagtttgtgctttacgtactgaaagaaaattggaaaattgaatttctttaacaatcataatgatctatgattcttttttttttttctttttctaactctgccagctaatctttcttatttttagtaattatttgtttctctatacaatcttagctgtaaattgcagttttaatttgggcaattgtgacatcgtgaaaagccatcttaattcattcttatctacgtattctttatacttaacgcaaaaattttccccttaactattgctgtaactcataggaaattttgattgtatgcatgcgtgcccaatttgaagaaaattatgattcttttttttttctagtaatcttttaagtcatgaaaaaactttatggcatatatgttttagttttaagaaataaaagaagaggagatatgaataaatgaattttttgtcaagtcaaataatgaaattgatattaaatctttttttttttaattctctctctatctctgtttttgtcccttttcttttctcttatttcttttaaccaaacatgaatttaagataccagatcaagaagaaactgattttaattttatctcttcggtggtaagatacaaaatgtaattaaaataattgattatatgcacataataaattcagagtcacgtacaaatgatgaagtttcatcctaatttgtgcacttagatatttatttatttatttattattattttttgtttttacaagttttcaactttgacaagaac

SEQ ID NO: 83645 - DNA, 591 bp, Citrus sinensis; identical to SEQ ID NO: 82538
  Intron number 1 from transcript orange1.1g011234m (locus o range1.1g011180m.g) derived from phytozome v7.0 (chr-ID sc affold00015; pos 803036 to 803626)

SEQ ID NO: 83646 - DNA, 628 bp, Citrus sinensis
  Intron number 1 from transcript orange1.1g045584m (locus o range1.1g045584m.g) derived from phytozome v7.0 (chr-ID sc affold06540; pos 1920 to 2547 reverse strand)
agtcttggattttgaaggtatggttaccgaattatttggaattaataacatcttcattttttaataaaaattttctgtttaaataagtttttttttttattatatatttaagaattgggtattttagctacttccggttgcttagacttattaggtagcctaaaaattgaattgcaatgaagaagaactaacgttcaaattatttttgtggacatggtacaaaaaatttgtattagtttgcttagaaattcttggggatattgtatttaagggcgtctatgttgctgtatctataactaacatcagtcccatttcctgttatcggtaacattgttcaattgtgtgtatactttgtgtatctgcgtattcgagcaatgtatgcttcgaatcttttgaaattggtaatgacaatattgttagtggtgatggaaatattagttttcccatttgttaaataacgaagtagcttgattaattaataaaatatatgtcttctttgtttgcttagtcactattatttctttactatatataattcaacttaaaaatggaccatatgtaatgttcttaccttacaaatgtcgtgatgttatgctactgactgcagatttttaaagcctttggttgg

SEQ ID NO: 83647 - DNA, 198 bp, Citrus sinensis
  Intron number 1 from transcript orange1.1g033749m (locus o range1.1g033760m.g) derived from phytozome v7.0 (chr-ID sc affold00001; pos 3176787 to 3176984)
ctttgatattcttttgttgccctcttcaagcaaaggtataacagcagactcttgacctttttctttgtaaaggtcttccttctattccaggcaagaaaattaaagaaaactcctatctacggtttctctcttcttttgtttttgtttttgttttttgattattattattttcaataaagggaataaaaataattaaga

SEQ ID NO: 83648 - DNA, 750 bp, Citrus sinensis
  Intron number 1 from transcript orange1.1g001807m (locus o range1.1g001807m.g) derived from phytozome v7.0 (chr-ID sc affold00029; pos 102925 to 103674)
gactctactctctctagttccgcgtcatcctaaaggtaccgttttttttgcagtgtttcagtcttaaactgcaaatcgaatcttgaagatttgcttttcttctgctgtatttgcaggtttttttttaaaatacagagttacacttttcgcttcggtgcactctattttttaaaaaagaaacttttaatttgcatttttgcaataacttcgaactttttgttgaaattatagcttttttatcagcttttttatcagctttttgatagtgattttacagtttttttttatttgaatagaaaaatgcaggtgccggttttatttcgatcagtgcaatttcaataaacgaagtaattttggtgtaattgagagagctattagaatataatatatatatatatatatattttgatgtgatgcatcatctgagaatgtctcttgaattttcaccctcactgattcagctattcgtctctctttaaaatattcctcttttcttgttttccttttcactcaaatcaaggcctttttgttttgagttgattgtcttattatttgcactgaacttacagcttatgtttgaagtgctatattagttgttcgcttggcatctgtgtgtcctacggttctgaaagttttggcgttttactcagttttggttagcttcaagtcgagagttttggttaattttaagtaaattttagtacttctaactgaacttccttgttttgattttctctttgttaagtacgt

SEQ ID NO: 83649 - DNA, 510 bp, Citrus sinensis
  Intron number 2 from transcript orange1.1g011776m (locus o range1.1g011776m.g) derived from phytozome v7.0 (chr-ID sc affold00001; pos 5495357 to 5495866)
ggtgtcgttacaatcaccctcgcaatcgtgctgcggtaattatgattgtttcgattatttgcctaaatttcttgcattacatgttttgagatgtgagtattaccttattttttgtgttttttttagtttgatgggtaattactgttcggtcaagtctgggttaggttttgatatggaaaatttgagtgtgcatctcattcaatataaggtgttaatattgtttaaatatttgtttgttaaatcagtaagctgaggaaaagataagggacttacctagtctatgttgaattgttgtattttacgctaccaagaaatgaagcttctgtcttagtctgcgccacaccatgagaaatttatgattgaaatatggaatttgattcatttcttctattttggtcttttgacggctactgaagccagcatttgtgtaaattggattgtactcactttcttctgatttttctgctctgcttaggttgaggctgctgtaagggctacaggagattatcc

SEQ ID NO: 83650 - DNA, 999 bp, Citrus sinensis
  Intron number 3 from transcript orange1.1g011393m (locus o range1.1g011393m.g) derived from phytozome v7.0 (chr-ID sc affold00001; pos 1377044 to 1378042 reverse strand)
tgaatcggcgagcgggtggcacatctacgagcaaggtatgtttcatctaatttatgtgtataactaacagtaggttctgttcttaatgtggtgtaacctgtgacatttcttgattcaacattagaaaatggagttagttttatatgaattaccaggaagttgaagcttgtataaagtaccaatgtacttgtgtattcttccttttaaattaggaggataagatatattactggatttttattggtgctgtattttcaagtatctattttggtatgaaatgtgcctactttttttaaggaaaattttttcttatctctgaatgacatatgtttgttctaataagggatttttgtatcttcagtatcaagtttaatgttcaaacaaacatgtgataagcatccagaaaaaagtcgttttcgtcaaatgctaatgtggagaaaagaagacctctttgatttgtggtgcctctattagtagtcatttgaagtaaggtgttgatgaacgggtaagaaatattgagaagggtaggaaattcgtgtgaaataagcaaactggggatatgatcaaatgtatctaataaacacttttttagatatcgatatggacttcacaaaacccttgtcaatgtgataagaaggatgtgtgttatggttgttgaaggatgttttatgagggttttggaattgcttctgctctaacaaaggaaatatgttcagggaaccaactgaatctgttttatcaaaaggcaagttattggtaatagtgaccaacaactacaagtttaactcaaatcaaggttgttggtacttggaatcatttttcttcttttcggttccttactggtgtttgtaatgatgcattgattcctataatcatcattgttctttcttcttgaagaaaatttgtgcaaatttttgggctgtgggttgctgataaattttgatcatatattactgtcatgtttttattttaaaaaatatttgcagagcacctcaccgc

SEQ ID NO: 83651 - DNA, 486 bp, Citrus sinensis
  Intron number 1 from transcript orange1.1g036799m (locus o range1.1g036799m.g) derived from phytozome v7.0 (chr-ID sc affold00695; pos 12646 to 13131)
ggaggtgtgaactttacctgttctgttctttcatgtttaaggatttttcatgccaatcatgctgacctcaaggagatgcgatgacataattaattacaattggtgtatcaactaagctattatcttaaatcttccaattctattaatccagtgtttgttgctgtaacttattagttcagcccaagttgaaaggccgataaatttcagttcttccacgattaaggttttccagcgtggtcttttgattcaaaggtagtattttctgttacatttgtaatcgtcagtttgttgttgcaaacagttgagaatcctggttcttgcatttggtatcatgttatttatgtgccttatttgcagggataaagaagccccaaggttaacagagagtggtttttaatttttggaatgtgtgttaatcacaagattttggattccctcttgtttgagctagtggaacttattttcctatgtttaaatttgcagctg

SEQ ID NO: 83652 - DNA, 530 bp, Citrus sinensis
  Intron number 3 from transcript orange1.1g025194m (locus o range1.1g024106m.g) derived from phytozome v7.0 (chr-ID sc affold00001; pos 372177 to 372706 reverse strand)
ttttcggagattcaaatttgttgtggtgggtgagcttgttgtaaaatactaatttctatttttgaattattgtttttttgttgttaggttaatatgtaattccgaagatggtgaaatttggcaactgcaaatttcttattgaaatatttgattacaaacatgtcacctgtgtttctactcattaaactctgttcagtatttcttaatttgataagcattacttttcatgctgcttcaatttgcttttaaatttttatgaacgtttaagtttgtgtggatcttcttcattatgatttctgcttgttgatttctttggaaattctgaaaatccttatgcttgaaaaacatactctgtggatactattttgcgacatggaaattctataaatatcattgtaaataaatgatgaacttgaggagagatgatagctcgcactttgcagttgaaggtctaagtggtccattttcatgagcagatggttttatttgttacagctgaggttgtcgcaggatcagctgcgtggctgggt

SEQ ID NO: 83653 - DNA, 808 bp, Citrus sinensis
  Intron number 1 from transcript orange1.1g018442m (locus o range1.1g018442m.g) derived from phytozome v7.0 (chr-ID sc affold00193; pos 20145 to 20952)
aaattttcgacccacctcacctgttacaacaaaaagtatactcttttttcgttcaaacttcttgttacttctttgcatgttcattttttgttcttgctttaaagttttgtactttcttgtgtttcttgaaattcttgaatttaaaactcatgtaaaaatgtgctcaaatttgaatgtggcatgcatgctgtaatgggttgtgtgtgatttgtattcgtgggtttgttttcatttttgtgtttgtttattatatggtgatgattgtggtgcaagaagtggttttatttaaaaaaaattaataaaaaaattgggtagtgcatctgttgatatctgataaaggaagttagggttttaaagaagtgtgtgtgtgaaattcttgttttacaagattattagatgttagggatggagcaggggagcaagtaattctagtaagggtgatgaaaacctttgatgatctctagctagataatctctagcaagtaatccttaacatacaacatggttttcttggtaatgaaaattttgagtcttatatttaggattctaagtcattttattttgattgcgaaggaaggcgtgtgtgttttgtgatgtatggaacttctggatcacaattccatgtgcgctggctattttctgaaaattttgtttcgttgcttgtcttgttcaaaacaaaacacgtaagcttccaatgttttgtttgcatgaggagttcttttgagcaccagtagattgtgattttgacatgatttggctgacatcagtatctttttctgtttaatggtagattgcagagcttgcagta

SEQ ID NO: 83654 - DNA, 665 bp, Citrus sinensis
  Intron number 2 from transcript orange1.1g022498m (locus o range1.1g022498m.g) derived from phytozome v7.0 (chr-ID sc affold00001; pos 1638729 to 1639393 reverse strand)
agatactggactcacatttcaactgaggaatctaggtgagattgttataatagctatgtaattctgcactgtgttgcccccggagctgtttgaaattagtagtggtcaattgcttcgctggtgcttttaatatcattcgtggtcattttgcaatgtattgacactgaattatccattggaatttagcattttgtcgctctacgtttcctctactatcagattgtgtctcaatttcgtgtgcagtgtacagactccatttggcctttcataatatttgcggagttgattctttttctgctatatctttcagttatggagtgctcagaaattggtttttcagcaacattcaatctgattgatgcttttaagctgagttcacacattcatattttgatgtgcgtttactcactgctagtaattagattacaatgatacagttggccacctgctaagtttacaccatttttcttatttctaggaactttgatttattcacattcattcaaatattttgtccaaacgaaacatagatttattgcgttgtttatgctttatagtggtctccttttctcccactgcctgatgaatgaagcaatttgtttgggacctgtccctttctttgcatgttaggttccaatcagtggcgtatcttcaacaaatctggt

SEQ ID NO: 83655 - DNA, 332 bp, Citrus sinensis
  Intron number 1 from transcript orange1.1g022498m (locus o range1.1g022498m.g) derived from phytozome v7.0 (chr-ID sc affold00001; pos 1639475 to 1639806 reverse strand)
gtggcaataaggtttgtttatttccatttattttctttgtttttcgacattataaaaaatctgtgattgggtttccgtacagaaatgttttgatgcatccgtcaaaccataatcgtttgatcctcgataatcttcaaacttggttgctgtttttgataataatacatcttggtcagatcatgacaagttttctccgaaatttgggaaattttatatttttcattcacaatctctagcaagtgtatgttatctttttgcaaagaacctttgaattggtgcagatgtttactgtgtatagggggattcaaaatgattttggttatgtacaggag

SEQ ID NO: 83656 - DNA, 398 bp, Citrus sinensis
  Intron number 2 from transcript orange1.1g046899m (locus o range1.1g046899m.g) derived from phytozome v7.0 (chr-ID sc affold00032; pos 872803 to 873200)
acaagaatcgccaacgtctttacctttctgaacaggcaagtttcagtttgtaaaacaatcaactgtgtatttcttattttttatagttggtgagctcctttcaagtttcttggtgcagaacatattttatattctgttgccattcttcttattcttcttataatttcctgtactcagactgatggcagtgttccaaatactcttgtaatagcaaactgtgaggttgtcaagcctcgagttgcagctgcagagcacatatcacaggtgacattattgtgaatggttattacccctttttcggccactcgtcctcatttgatttcttctatatctgattgaattggatttgtctcattgcataattatattattcttttcttgcttaatcttacagttca

SEQ ID NO: 83657 - DNA, 425 bp, Citrus sinensis
  Intron number 3 from transcript orange1.1g023992m (locus o range1.1g023992m.g) derived from phytozome v7.0 (chr-ID sc affold00334; pos 77298 to 77722)
agtttactctctcggtgccaagctccactggcctggtattctctgcttcaacttttgcattttgcacttgtgttgctggattttaattacctatttgtcggaagtgctctctgtttagtgtccaaacatatattaatttagactattgtttccctagctagaacgtgtctcttgtctatgcttagagaacctaaacagctttgaacactgcacattcttctcagtactttatctttatgtttttttctccttgggtatatacctaggcatgcaaaagttgttcaagacactaatgtatgactaaatatgtcattctgtaataagctttcgcatgcttgttattttcaatatttaaggaatttggctgggaatgctaattttgaattatatggtgcagggactttcagcaacaggtctgaagaagg

SEQ ID NO: 83658 - DNA, 935 bp, Citrus sinensis
  Intron number 1 from transcript orange1.1g022431m (locus o range1.1g022431m.g) derived from phytozome v7.0 (chr-ID sc affold00015; pos 1747734 to 1748668 reverse strand)
tggcatttcagaacttgatagtataacacctcaaggtatgcatgatcctcttttcttttcttttttcctttcttcaatttttattttataattttgaagtttgatattgattgcagtgtttgctggtctgatgttcttatgattgtagttgttggatcttgaaaacattggctgatttaatatgtatctctctctctctctctttttatctttcgtagttcttaactatactcttgatcttgttgggttattcagtttcttgttctttatttgtttaattaagtcagttttcttgtttagctcaacctgtgggtctatttagatctccaagtctcttaccgtttgaagtcagttgtattactgcatgaatcaacacgtatctagttcatttgctttcttaaagctattctttttctctgttttaatttttcaaatttagcatttatgttcacatttcctctattcctttgtaatacttttgaaaattctgtctttttgtttgaggaaccaactcctgaggtatctggtgctcttgcctaattgattaaattgttgatgactaaaggagtttagtttcccaaaaagtgtccacctttgtatgataacctcatgttgtgatgtacatctttagattatggtacatggacaagcatcttgacatgttataagctctaagagtaatgatatttagcctgagccaaaacagaggcaagcgagaaatgactgtgttgcatgctgtaacacatgggttttaaatcattttttcttagtcttaaaaacccaaaccataaacgacagtaaaacactgtcctttctagcttgcttatgttttggcgcagaataaatattattgctcgctctaatagcctaaatatggctctaaactcgagtcaacggcaggcactacctcattggcgaccagtctgctgcttgga

SEQ ID NO: 83659 - DNA, 865 bp, Citrus sinensis
  Intron number 1 from transcript orange1.1g016574m (locus o range1.1g016574m.g) derived from phytozome v7.0 (chr-ID sc affold00021; pos 401288 to 402152 reverse strand)
gctctattttagtcacacttggcgacatagctcaagtaagttttttaactcttaaataattttgctattttgcaattattaatcagtgtttggagcagcgattcaaatagttctctcagccgtgaattggacccacttaacttaaaacacgtaaaagaaggggccacaaaaacaaccacatggcaaattaaaaagcaataatttcgacatttaacgtatttgtgtttgataagtaagcataattaaattattaatttttagaaattcataataatgtgtgttataagcatgactcaatcaatttccagatgagtagatataagttaaaccgaaattatttgatttggtgagtcttcaatgtatgttgcatcaccgtacgtctcttttctctatcacttttttttaattaattaaagttggctcgtgggaattttataaggtagttcaaatttgacttatttcagatttatatcatttatacatgctaattttttttcccagatttatttatatatcgcgttaataaataataattgaatgtcactatctcaaatcttctaaaaaaaatcttaaatttttgccaatgtaactactcatcaaagctttgtattattaggacattcaatttttttttttagtatgctcgggtgaatatgaattcctaacttcgtaagtctgtatttttaaaaatagatataattaagctagactactttgtgaaagcactaatttgacactaattgtaattaaacagtgcaacttaatctcaacctgtattcttaaaacataaggacatcttcattggggattcccttaaattattataacaaattttcttatatagaatgtgggctaaatgataggt

SEQ ID NO: 83660 - DNA, 491 bp, Citrus sinensis
  Intron number 2 from transcript orange1.1g015675m (locus o range1.1g007901m.g) derived from phytozome v7.0 (chr-ID sc affold00001; pos 919421 to 919911)
aagaatactgaacaacgttttctgccttgtatgatatgatatgtaaacatgtttttattattattattattattataatattatcacatctttagagaaaagaagtttgtaattcatctaatgcatgtcattggatcatacctttcgttcctggttcacttttgctggtttgtaaattattgtaacagtttcatgatttatttattgtagctctatcatatggtagattcttatgcagtagttgtttgttttccaaaaatgcagtagttattggtgtttgtaattcaagttcttggtatcccatatcaccactacttaaataattaacttttcattctcaattttgttgagagtaaaaatgaatgtaaataaataattaatcatctcttgtgttgctatcttgttaaacttgtatctttttgacttagcagttatattattgaatgttgcactttatcttggaatgctatgttgcagtttggccaatctgc

SEQ ID NO: 83661 - DNA, 1021 bp, Citrus sinensis
  Intron number 2 from transcript orange1.1g034423m (locus o range1.1g034423m.g) derived from phytozome v7.0 (chr-ID sc affold00032; pos 392320 to 393340 reverse strand)
gtggtgctcctatactcaagcaagcaaagttcaaggtgcccctttgatcactatgttaatttgtgttttcgtaaaattgtcaactttttaacatattataggtgaaaatccttaagggttttgtttatgacgagtttttgcatgtgggtagttcaaataagagtaaaattcatagtcttctgttgtttttctctctcttttttcttttaatctatgattttgatataatgtatgtgtttgtattagaagatcaagattttgaaatcctttttgggttttgcatttgtgtgatttttatgtgtaggctcttgggcaaagagtaaattttgatggcctgaaagaatttcaatctttgtagttgttattgctgttgtcaaactctgggattgccactgtattggtttgttaactattgacaatattccttatagtgaggtttgtgagatattggggagttgtggattgaatttattgacagtaaacttgatgcgaagtttaattggaaggagattttgcaggagctaagtgctaatatatgttagtacactgtaacttttttttttttcagctttgctactaaaatataaataattgtttgtttcagtttgttaaatggaaaatatcgacttcttttgctaactttataccatggagaattagagatgcctcaatgtaaggcctttttcttttctgtttctgaagatatttaaccgtgacactgagataaggttaggacttaatagcaaaattgaatcataacaaatggaacatgattgaaggtaattaatatataagccatttctgaaggtaaaaaaatagtgtactttaaagttcaacatcttctggtttttaatgattttgtctggcttgaactatttccccccctttatcaagaaaccttgtttttttcatttaaggagaagggcgatcttggttttcatataattgctgtatgttaatatttatatgctgtacactttgggcagatatctggatctgataagtttgcaaaagtgattga

SEQ ID NO: 83662 - DNA, 532 bp, Citrus sinensis
  Intron number 2 from transcript orange1.1g017198m (locus o range1.1g011268m.g) derived from phytozome v7.0 (chr-ID sc affold00012; pos 238311 to 238842)
ggagcattcatctgacattgtcgaaacctctgcaggcaatgtactatttctttgatatatttcttttgattttgattttgatttttgaatgaatgattataagctcatttgcaacgtaggttttaaaagaacaaagtagcagtttcatttttgaacatatcgcgcatctatgctgataagttttgtgattggaatcccagttaattatgatattctacttatttctttgtccaattttattggatgatggtcgcatcaaagaattaggaaaaatgaaatttcattagtaaaagacttaaaataacttggatgataacttgttttattgcattccctgagaatgttatgaagtgaaaactcaacagaatttgcagagataatgctagttcaacagaatagcatgtcattcgaatgtttcattttcttatgctattctttcctgcttgttatttatccctacccttctttcttgttcgatatacacttgcagaagagttatgtttttattaattgttatgtttttcctcagcag

SEQ ID NO: 83663 - DNA, 501 bp, Citrus sinensis
  Intron number 1 from transcript orange1.1g013455m (locus o range1.1g013455m.g) derived from phytozome v7.0 (chr-ID sc affold00680; pos 67194 to 67694 reverse strand)
ctggtgagaatttgattaaccctttactgattatcattatttttaattccgtggtttttattttaaagcatacctgttagtttgctttgcctactttcttcttttatcctcatagtattaaaattaccgacattcatctgaccacattatgtaatgagaacttttgctaagcacacaaattccttcttttgcgctttactttctggcaaaaaaatttacttacttattaaagaatctggattcttctgcaaattcttttcagaatatgaaaaaggtctgcaatgattatcacttaaacccacaaataaaatgaagcttatggaagggtaaattgagtcattgatcttccaaatgtctgcttttgcatttgcttttgcttttgggtttcttttgagccactaaaatgctcgcatttgaaattttaaagtagctttatcgagaagctaactttactctcttttgacagttactgagcttgtagaaggggattcatcaaggaaa

SEQ ID NO: 83664 - DNA, 828 bp, Citrus sinensis
  Intron number 3 from transcript orange1.1g003152m (locus o range1.1g002232m.g) derived from phytozome v7.0 (chr-ID sc affold00358; pos 140038 to 140865 reverse strand)
gcaagtatttacttaagaaacaattgtgcacaaattatgtaactatagacaaaatacacacacatctcatacatgcatctcataaattatccaaactcacactcagacataagcatgcattaatgattcacataatatgcatgttcacttttcttcttgttcacttttcttcttgtggttatattagtaagaacggttaaaggcttatgtggaaagcagtattctattccttcgtggtaacttctgctagtctgattttcgatatacagatatgttttatgccactggtatatgtcaagatttaagaatacttttaagctgatttgcaagcacaagcagtcagacgagggtagtgagaaggattagtgattttggattaagttataggttggatgattagaaagagagagagatatgaaagaatgacgtgcctcttgtcttgagatgactgttttatttcattctcatgatagtgtattgcagttatgcttgttttgggtcatgccagggtaacaagggaatctggaaaatttaacctgcgaatcaaagtgagaaaagaaatagtcaggttatcacttggttcacattatttggtatcatttgggtctactgtgtccaagcttgtatgaaacaaactttatcacaactgcagctttatttataagctatttgtatgcttcagcatgatatagaatgtgaaagatggacgtataatgtactttatggtccttgaaagacttatccctagtccaagatccgggttagtttatgtaatggaaaaaaattgctgcaggggtgcttcactttgttcaggcaattttcatcctg

SEQ ID NO: 83665 - DNA, 318 bp, Citrus sinensis; identical to SEQ ID NO: 80615
  Intron number 3 from transcript orange1.1g000226m (locus o range1.1g000222m.g) derived from phytozome v7.0 (chr-ID sc affold00013; pos 1276553 to 1276870 reverse strand)

SEQ ID NO: 83666 - DNA, 444 bp, Citrus sinensis
  Intron number 2 from transcript orange1.1g000226m (locus o range1.1g000222m.g) derived from phytozome v7.0 (chr-ID sc affold00013; pos 1277542 to 1277985 reverse strand)
gcttgaagtagttgaatttgtggcttctaagcctggtaattttacttcaatttcttttctgttaattttcttttatttatttgtattttccgtgctttaaggctgttattagttgcaaataattcatcttcaatgttctaatttgattgaataagtgactgtcatatcaaataccatacttttcgagttccaaaactcggaaaacatgttgtagtggtcatttcaactccaaattttattaatatttgttctctggttcaaaattgatgtaggcgtgaattggtcactgtagtttcattctgtgatttatgaatcatctactcttaaaaatgagatgtatatatgttttccaagttctattggttggtttgctatttgcatgagttttttaggggctgattattgccaggactttgaatattgacatctggagaacctgggaga

SEQ ID NO: 83667 - DNA, 799 bp, Citrus sinensis
  Intron number 1 from transcript orange1.1g013848m (locus o range1.1g012303m.g) derived from phytozome v7.0 (chr-ID sc affold00020; pos 384285 to 385083 reverse strand)
ttgctgaaactgaacagtttttactaaggtatgctaagccaatcattcctgtacggttattatcaaatgctttctctcagattttcactttatgtttctttgttgctaaatttagtactagacaaaattggttgctgggtctgcgaatgctggtgaagatctgaccttttttgcagtcttgagtgattttgcattgaagggtttgctctctctttttttttttttttgggttgggactttgggactattttccctagttcattttcaattttaatcttatttgttctactatgacttttggaaattatgtatttgtgggagaaaaattccaaactttatctgttgttcttaatgacacctagactttacaaagttttgactggcttttgaaatttttggataattatggaattaaagatgcattttcatattgtggtcacgcttcaagtctttgatttctttctttttccaaattgtcattgtttttcttgttgaccgcacatttttggatatttgcaatataaaatatatattcctaagcatctaattggatttttccaatatggtgaatagtgcatggaaaaatttagaaaaattccagttaacggcacacgatggagtactttcagtcagttcagttgtcactaattgtgctttatctttatcattgcgagttctcttttggtcaacttgggttcagaacgttgaatttgcttaaggtctttacagttatggtcaattcacttagtttttttcatattggttggatgttgcagaatatctgttggttatagagttg

SEQ ID NO: 83668 - DNA, 658 bp, Citrus sinensis
  Intron number 1 from transcript orange1.1g000005m (locus o range1.1g000001m.g) derived from phytozome v7.0 (chr-ID sc affold00032; pos 593481 to 594138 reverse strand)
agaaactgaatcagtctcttaaaactgaaattttggttagttttcggttcacttttaatctttaaactctgtttgaatcccgggaaaaattaatttgtttccaaaaaattttcccagtaaactttactcctctggactcacctcttcttcgcaagctctagcgttttctggatattcttaattaaaaaaaaaagcgaatttttagttcacgtgaaaatcaaaatttaacgtataagttagttgttttgtctacttatttaagagaagctgtatccttcaggttgcttttaatgaacagctgcataacgtttttagtgttttttcttcttccttttttttttaagataaaatgggtaatgtttgtccatgaaattttctgcgaagttgaattttcttttttggtttgttagttttgtagggaatctatgagaattgaatttcagctgaaaattattggccttttcacctggtttctttttgtctatttagtgtcatttctctgctattgataatatgttatttggtgatgtgctgttttaacccgagaaaagagaattgtatttggattgtatgttactgtcattagaattgtaaacaaaacttatcacacaatttgactacctgtaggtttgtagatacatattatcttgagttataa

SEQ ID NO: 83669 - DNA, 696 bp, Citrus sinensis
  Intron number 1 from transcript orange1.1g022653m (locus o range1.1g022175m.g) derived from phytozome v7.0 (chr-ID sc affold00031; pos 877734 to 878429)
gtaagctactttaggatttctgtttcttccttcaggtactctctttatcccttcactttcatacgcttctattttattggttaccaagatagcatttattcaccattatttcttattttctcgcaaaaacaagaaactttatccctgtttcttttttcttgatgggtattttttcgagtttagctatactttgtctgtgaagtaatcaaatacataaacttgaattagaggttttctgcattagcctttataggtaatccttttcccttaatggtgggctttgatgtcgtggcaaaatataatggaagcaaagttacaatatattgcgactgcagaagattcttttgctgctgttgcctttaataattagaaattctatgctttttgatgagcgtggttgtttattgtaagactttgaatgtgtttctaattgatgcttccacgttttggtactatgattaaagctttatcaagtcgtataaacatttgtttaccttgttactttaattttaaattttggtggctctgagttgcactaacacacacacacacacacaaaactttatgtttgtaattctgaaatgaacttcaacatttttatctttgagaaaataattctaattgatgtgaaggtcccttatagatatttatatttatttatgatgtgaaggtttacttaattttgagagaaacaaa

SEQ ID NO: 83670 - DNA, 535 bp, Citrus sinensis
  Intron number 3 from transcript orange1.1g036739m (locus o range1.1g036739m.g) derived from phytozome v7.0 (chr-ID sc affold00015; pos 159738 to 160272 reverse strand)
atcctcgtctgataaaagtgagtttgagatatatagttgcatttcataaattgaggtttatattttgctctttagattcctgtatgcaatgtggttagagactagctagtattttcttaccttgggaaattactttctccaaaggcattttaattggtcatagtgttgatgatctgtcatagcccttcaaatttaaattcatactttgaggttcaaaattagtcaggaaatcaccccactaaaatgcgcatgtttatttttttggtttaatgatcctttttggcttgtcaagcagagatgcattgctgtaggattgcatgtttggtgatcctcatataatcttttgatccatttgcaattattgtttgattactgcagttagtttacctgattgagtacctcgctcaaaatgatgaaacattttttttttctttttatagcaatcaagatggagagaatgatactacttacagtcatattgcttgtttcttgtcttgcagacattcctttatcaaattctacgtggcattgccta

SEQ ID NO: 83671 - DNA, 628 bp, Citrus sinensis
  Intron number 1 from transcript orange1.1g020930m (locus o range1.1g020930m.g) derived from phytozome v7.0 (chr-ID sc affold00015; pos 1380954 to 1381581)
ttgataaggaggaagaatttgtcatccgttttcaggtaccgttattttgccaactttgttttcaaaatcatatttttgtataggtgtatttagaaatttgtttgtttatcaatgaacattgaattggagttaattgattagaaaatcctaaagggacatatttttcatgggaaaggagagacctttgattggatagtagaatatgtatgttgctgtctgtgtatttagagtctgttagttttgtcaatgattatagtggaatgaattagaatgaatttgattataacaggagcatttttttcattgtttgagggtatttatgtgggtgtatttgagattacgttatcttatcaatcaaaattttcattgtactgtttattttgttgataagagagatttgatgaaggttttagacaataatcattataaattctgtttgcatcaatgatttgttcagtattttccttgatggaaccaaatgacctgtcattgaagaattctatggatgatgttttgcatatttaggatggcaaggccccacgttattattctactatggctattttgatcttttcttctttttgttacaataggagctgaaggacagaattgagcgagtcaaggagaa

SEQ ID NO: 83672 - DNA, 803 bp, Citrus sinensis
  Intron number 1 from transcript orange1.1g026878m (locus o range1.1g021037m.g) derived from phytozome v7.0 (chr-ID sc affold00006; pos 1212983 to 1213785)
gtgagcaacagagtgcttgatttggaggtcatcttctctcctttgctttcttcctcactataacattacgaaaatatttagtgctttagtaatctgtatgatacagactgcactatttcaaaagtgcactctttgaggcagaaacactcaatataattgcttctcttttcttcatcaactgtcagtttttcacattaacctgatctggtggttaaacatttctagattgcatcttcatatgcgatttagaagtggtaaatgctattaaatgaaactgcaccttgcaaacttaccaaaaccatgctatcatgatggatcacatcttcttgtgtccattttttttaattgaataaatcgagaaattcagtcacaccagttttattctttcaacatttaattatttactggctctcttaatcagttaaacatatgaaattagttccttgtctttttgaaagtttcattttgatggcttgggaggagctacggctgctggtacatgtgctaatatttctctgatacactttgcccattacaaaaatttgcaatagaagttcctttcccaaaaaaaaaaaaaaaggtttataataaagttcattgtatggacatgaggcaattctacttggatggaactacaatgagaaattttatttaagagaaaaatcttttcccactgagacgaggaaaatttgctttcattaatttttattgcccttttcggaaagggatacagaaatcattactatcgcttggacatcttgccaacagttgggacgagtgggtaggtgtggaccggctgctga

SEQ ID NO: 83673 - DNA, 413 bp, Citrus sinensis
  Intron number 1 from transcript orange1.1g036471m (locus o range1.1g036471m.g) derived from phytozome v7.0 (chr-ID sc affold00008; pos 365824 to 366236 reverse strand)
tgaaaacgaacggacaggtatcaaaagttacataaggtattaggactagttcatcttcatgaacatatacacgttcgttcatagtctttctgctctgtactactcacattattaaacagttgtaaaagctaggtctatttcgataacatgccacaaacgaattcctctctttatacactgatttctttatttggttatttcaactgacttctcaaaaaaaaaaaaaaactgactccttacccgggattggaagaagccgctaattcatctcaggaagacaaaaatataagtttgagatgtgcagtctctctgtttctgtgcgatgctgtcaagaatttggatgctctaattacataactgctgtatttattgtctaaactaacaccattttctttgtatttgtgttgcaggac

SEQ ID NO: 83674 - DNA, 700 bp, Citrus sinensis
  Intron number 1 from transcript orange1.1g041691m (locus o range1.1g041691m.g) derived from phytozome v7.0 (chr-ID sc affold00030; pos 1088316 to 1089015 reverse strand)
ggtaggtgttaatatatattacaagtgaaccatatttcagttaatgaataaaaaaagaaaatatttaactacttaatttccagaaaagaaatagtaaaagtggtctctttgtgatgttgttgtgcctttgtgacttgaaaaatataatgagagtttctgtagctcgctctgctatatttgttggtagtttactgtttgaagtttgtgttagggaattatattattcattacgctatccaagtattcttggttattgcagttgcgcttaaaagtttgcttggttttggatgtggtttggcattttgctgtagaattcttatgttctgtctcagcaacaatttgtcctggtggtaatcaacagcaatagaactagtattctctaagatgcttcatgaatctgtgatcttggttctgcaatagaatataaggctataagccatacttcaaatctttagaactagtattctcttaagactactactgcagctttctgttacgctgtgtgaggcttctatttatgcacaattagaagagtaatttctttggtaatagataatattccatgtgtattgaagcatttgattttattattgtaaattacttctgatttactcaaaagcagaaagcattggaagagttccatcattcttattcttgttcccctttcaggggtggattcaaattttttgatactgctcaa

SEQ ID NO: 83675 - DNA, 241 bp, Citrus sinensis
  Intron number 1 from transcript orange1.1g017740m (locus o range1.1g017740m.g) derived from phytozome v7.0 (chr-ID sc affold00001; pos 755847 to 756087)
ggagccctgtagagtcttggttactggtgctacaggcaagctagctctgaagaaaatggatttgtagattttattatttttttttaatctttcatttcctgtttgaatatgcaccattggctatcaatgtgggctggattctagaattgatgccagatttcgtttttgatatatttgtcagaattttaagtcaaattctaacaactggaaaaattaatttgatcaacagggcaaatcggtt

SEQ ID NO: 83676 - DNA, 840 bp, Citrus sinensis
  Intron number 2 from transcript orange1.1g033439m (locus o range1.1g033457m.g) derived from phytozome v7.0 (chr-ID sc affold00001; pos 5535469 to 5536308)
gtactccaaacaaaccttttgtcagattcacgcaggttttgctttgatgcatttcgaatcaagttcctctttcttttcggtgctttttgaatttagtttctgtttaaatttcgttcaatggctgtcagaatgttagagaactattctgttcttttttgtatttttggctatttagtcgcagatgattggaaacgtccactttgttttgtaatttaggttacaagaaaattgaagataaatttttcatttccagtttggttttatgagtgcaatgagattatgtctgtaaaaacttctttcgaatggaaaaggcttttgttaagataaaatgactatgctatgtggaagagcacttatcaaatgcttctgtgaaaagtgtgtcaattgcctttctcatcttcagaacacttttagaagaagcgcttttctcatcttcagaacatttttcagaagaagtgcttgtctagaaaacacttcagccttttttttccttcatgagaagtgttttcgtttatttagccaaacactacaaaataaatgcagaaattattgtatctagattgaggcagctttagtgacatcaaaagcactcatcaaatgtgtgcgaatagatagcatttacaagcgagttgagttgagtggaattgatagtccacattttctttgagcataagatatacaaggtgcaagggtccttttttcatccttctccgcttgttttttattttccccacatttctaggaagctggacatatagcaattaaaaaaacttggatttaagtagtatatgtgggttcttagcaggtaagtagggtgagacagaattctggaactgggac

SEQ ID NO: 83677 - DNA, 455 bp, Citrus sinensis
  Intron number 3 from transcript orange1.1g043946m (locus o range1.1g043946m.g) derived from phytozome v7.0 (chr-ID sc affold00092; pos 433830 to 434284)
tggagcaagacgggaagactgtaaaactccaaattgtgaggctctcttcttaatcttatgttttttcttagatttgttgatgatttagtgcattgtctatttgtgttcgtgttcgcttactttttcctttcgtttgtttatgtttatgtgtgtttattttactctttaacgagttggtatacatgagtttatgctataagtcagtacaatcatattggtgcttcttgttttcactgagaatttttccttgaatattttgtttcattgaggtctttcacccccttttctttgtgttttaacttttgtcaatggattttgatttgatccttggtgcatctccatgatattgtttgtgtgcagtttttgtttctcaccagtgtttctttatagctagtgatttcatttgttttgaacatgcagtgggacactgcagggcaagaacgattcaggacaat

SEQ ID NO: 83678 - DNA, 873 bp, Citrus sinensis
  Intron number 1 from transcript orange1.1g024485m (locus o range1.1g020389m.g) derived from phytozome v7.0 (chr-ID sc affold00097; pos 170338 to 171210 reverse strand)
cccgagcacgacaagttccttgaagctcttcagctgtaagtatgcattaaactcttcatttccctctcgttttgaagctctttaaactgtttggtttttaattgagttgtgtatgcttcagttgaatgttcgtatttgttattgatacttttggtggcttttctctaatttttggttagggtttgagagtttggaagtgattggattttgtttggatgtcgagaaaattttgaatgagaataaacgagtttagctcctatttggattttaagaaatccagtgagggaattcaagaaattttacttttttttacttcaaatttttgttaaaattagttttttattatttcaaaactttgaatttttgttcccaaaaaaaaggtttgagggaagctgaggaaaattaacattttttctatttgaaacattcagtttatttcttttttgaaaagaaaaaaagggggaagaaaatgttagctattaattaagttattagaagctatttcatttgcaaaatggatgttttctatatgaattgactgatttgtttctttgcttgagttggtcatttgttgggaatttatattactcaaattgacaattgaaagaaaaaagtctcaaatttttagatggggattcgcaaatagttaattctcttattaggtgcatcaaagaagcccatttttaaagttaatttcttctggaaaacattcattgtattgtgaggcacgggcaactgctgtggaaacaaagtaaaaggtacccagtaggtgcttctaaatagtgtatgttgtatgatcctcatgaatggagcattttttaaaaccaattctaaatattgtttaaaactttcaggattactggttctttattg

SEQ ID NO: 83679 - DNA, 908 bp, Citrus sinensis
  Intron number 1 from transcript orange1.1g036402m (locus o range1.1g036402m.g) derived from phytozome v7.0 (chr-ID sc affold00363; pos 25689 to 26596 reverse strand)
tgtcaaaaaagattttggagggccaattaattgccatttattaaaaaatctacatccataatttttgtccctctcttactgaaggtttttgctatatatatctttttttctaatagaagcaagcaaggataacattagctaggtggtttcacagtctcaaaacacgtgcatgacacgtgggccacatgagatttctcaccattgcatgctttcctattcgtaactctccctttaaagctgcctttccttctcactttaattaaacgctccattaaatcactttcttcaccattgttgcttcttttgatctctctctctctcaaaaattattattattgttaatattattttgcaagttactgaaatggatgcaagagatgatggacgcattaggacaggttagctttcatttcagtcttagtatccattatttgttttcactgtttttgtatgctcatcactacgaaactgacgaagctttgaagcagcaggcataatgctagcatgtcaatctggcatttgcagataatggagagagagagattcgtatacctaatccaatcatattaaataaattgactaccatatatattacttattaaatattctcatcattttatagcaatattaaataagtttgggagattttcagtttctccttacttacttatctatttatttatttattttattaattattagtgtgaggaaaattttaaaattttatgaaaataataaaagagtaagtgatatatactgaacccgataattttcctgtaaaatttcatatcatcgggatacaaaactcttagtagtgtacttaaatttatagttttctttttctgatatctaattaattgtttcatattttgattcatcatcaggaagcatgttgtccggaacagccc

SEQ ID NO: 83680 - DNA, 768 bp, Citrus sinensis
  Intron number 1 from transcript orange1.1g039275m (locus o range1.1g039275m.g) derived from phytozome v7.0 (chr-ID sc affold00177; pos 159804 to 160571)
ctcttctggtcctggtgcttggattttggcaaaaggtttcattaacaatacatagaaaatgtggtgtttggtaggaatatttttctaactactgccatcatagaaatgtatgcaaaaatgtggtagaataaatacggccctagctattttttacaaaataccaaagaatttgaagacagtttttctttccaaactccatgattgttggtcttgctcaacacagtcttgaaatataagtgtgcaacccaagagggggggtgaattggaattttaaaaattatcctagcaaatccacataataagcaatctaatgtcttaataaaaattgaaagcaataagttcaataaaagcacaataattaaagagtaagggagaagagaaacaaacacacgaatttttacgtggttcggcaatctccgcatacgtccacgcctccaagcgatccaagcttgaagatttcactatccaagcctttccaaggcttcaaccaattacaattgacttcaaggtgtcaataaacctttacaacaaagagattatctcccaatctcttcactcaagtgtctcacacactcaaactcttacaattgaaatgaagaaatgaaagttacaatgaaactcactcaatgagtagattttcaaaaatgaagaacaatgaatgattcaatgttttgtgttttgcaagttgaaggctcaagatatctcgtgtgctttttgtttttgcttgttggagagcttcaaattgagttggatttgagttcttatagt

SEQ ID NO: 83681 - DNA, 831 bp, Citrus sinensis
  Intron number 3 from transcript orange1.1g045847m (locus o range1.1g045847m.g) derived from phytozome v7.0 (chr-ID sc affold00042; pos 351230 to 352060 reverse strand)
aaatcaagggaagaagtgaaggtttgctggttaattaattaatgaattaattttatttttttttaattcatcttcttaagatttatttaatttatttttacaacaatattttgattttagaaacagggtaacttatcaagatgaactcagttcaacgatttgcaacttgaatgtccatttatgatgtatctatgaagattgtgtagccacgcactcaattgtttctttaataactatcaagcaccatcttgaaatttaacttcgatactcaattttcaatttcgctattttaataacattgatgagttagaataataaggtgttgtttctggtacccgctttaatattttttttaattttctaaaaataaaaatatgtaaaacatgtttggtacgccttttttatttatttttttaaaaaagaaagttaatatgagtagaaaacgtgtcattttttttagtaatttagaagtggaaaatggcactttccaattttttgggataaattatcaaaaaagattcattcatttcatttttagataatctttttgaaataaagtaccaaatttgtacttcatgaaatccaaaacctgtgataccaaactagtgcagtgcggtggttctacaaaaataatgcccagcaatgaaactaacacaacaaaagaataaaaaatgtacgatgataaatagataggggattttctcaagaataaatggaatattggagttctgctgcatcgcatgtactttctaaattttagttcatttagagctcgtgcgttgtatgtgctttgatccaatatataactcacttgtatatttattaatgtag

SEQ ID NO: 83682 - DNA, 414 bp, Citrus sinensis
  Intron number 1 from transcript orange1.1g037740m (locus o range1.1g037740m.g) derived from phytozome v7.0 (chr-ID sc affold00129; pos 181032 to 181445)
ttgatctagaccttggtttcacgctcttcaatcatgtaagtgttactctaacttattccttttgcctcttcattttacattgctttaatttgttggcaaaaagaaaagtttgaatctgaaaactattaattcaataatgtgatgcattttttcattcatgtaaataaaacttgcaagtaaatgaagctgagtattttagtatcaccagggtttggttgggcgagttttcgacaattttatttttcagttttagctgtccatgtttgagtcctgagtaggccgtaaaaaacttcaaaatcattttttactatgcgccaaacatactatttttattattattattattattatttttaaatgctgagttattgagcaaagattccggtgatttgacaggcgacatctccgaatacg

SEQ ID NO: 83683 - DNA, 689 bp, Citrus sinensis
  Intron number 2 from transcript orange1.1g022265m (locus o range1.1g022265m.g) derived from phytozome v7.0 (chr-ID sc affold00029; pos 1040424 to 1041112)
tcagcggtcgccatactgtgttccaagactctgaggtgtgtaactctcttatttttgcttacatttgcatctttctttgccttgtttttgctggtgaatagttaaaaattgtaattgtttcttgatttcttccctgtgggattgggaagaagcaatgtgaggaagagaaaggggtagagtgtacgatgccttcaaatcgagaaaactcagtcttagttaaactttgtgaaataatgacaaaaggaatgaattcttttgaagggaggaatcactatcaaattaatatctacaacacttccatcatatcaattaatcacagagaaagaatgatgactcacctactcttctttcttctcttctccttctaccaaaaatggagtaatgattgcagtttagccatgacctcggcataaataatcccattttcacaattttatttccatgtgatctttttgatccggtgaaactccaaatgaccaggtttgggttcttattctgatttatggttttcatgttagtcatagagctgttcctttgtgttcttccattaagaaaaacattttaacttattttcttttgattattccagggaaaagcacttctcttgggtatattattcagattcttatctttgagcatattgaattattgcagggatatatctttgttgatagggacggaaaacattt

SEQ ID NO: 83684 - DNA, 506 bp, Citrus sinensis
  Intron number 1 from transcript orange1.1g016790m (locus o range1.1g016790m.g) derived from phytozome v7.0 (chr-ID sc affold00084; pos 160934 to 161439 reverse strand)
atttgttaacaagcatctctttccttatctgcatagtgagttttgttttgttttattttttggttttgattggagctttgtgtgttttgtatgatgcattttcatgttttttgtgtaatgttcatgcaatcatgggttggtttcaaaatttgatcttcttttttgaaaattgttttcttttttaatttttgatggggtcattaaagctattgaaaaattttgcttttcagtaaatagaatgagatttttattttatttggttaaattttgtggaaatagaatgaatttgaatgcagaggaagagaggaagttggaatttgaagttcagtgaatgtttgttagtgcgcttaaatcaccgtgaaacgagcatttgacgtaattgagtttgtctttttgttaaaagtacagaaaattaggtgaattttgatattttgtattttgaagtaacagatttttgtttgtacgtcctctttctaaaattgcatgctttgaatctagaatttgca

SEQ ID NO: 83685 - DNA, 309 bp, Citrus sinensis
  Intron number 1 from transcript orange1.1g018049m (locus o range1.1g018057m.g) derived from phytozome v7.0 (chr-ID sc affold00015; pos 1779953 to 1780261)
tgccggtgttgctaacagtcgctagaagttagccggtaagcatctttctgctcagccatttctttttttgatttatcattcgtcatgttcgtacttctagtttgaatttttgggtttagatttggcgcaataatcaattagaagttttctttggcaaatttttgtgttagaacgatctcattataataatatttgttatctttttttccgggtttcaatcattgatgtgaaatgtgaaatggaagattaaaagtcttggtttttttttgactaattttttattctgtttccttttcgtaggaacctaaa

SEQ ID NO: 83686 - DNA, 549 bp, Citrus sinensis
  Intron number 1 from transcript orange1.1g014975m (locus o range1.1g014975m.g) derived from phytozome v7.0 (chr-ID sc affold00122; pos 99912 to 100460 reverse strand)
cagaacctgcagacagaacagaagatcgacaagaggtaccaacaccactctccagctaatagtttcttttctttctttctttctttttaatctcaaattctattaatttttgtcagttttgattttcgcaataatttttttagtgtaatctgatatcaagaatccacatctctgataacaaaagaaaagtcacaagaatcctgcatattgttcttgacaaaacattttcaggggtctcgactacgcttgttctgaatcattttgcaatgttattgtcactgatgactttctgctagagtgagattttctgatccgcaacatgtggaatccaataacagcactcaaagctgtctattatctaaactagaatcttttacgggtactgatgtgcttcatagttatttcttataaactaattcatttactttggctcactgggtttaattttcaatcaatgtacacgcgatcaatgtaaaactttcaattgccacaaatttccaggtgttttaggtgacaaggttcaaaactggttccagaggcagtttcctg

SEQ ID NO: 83687 - DNA, 958 bp, Citrus sinensis
  Intron number 1 from transcript orange1.1g035441m (locus o range1.1g035441m.g) derived from phytozome v7.0 (chr-ID sc affold00012; pos 186634 to 187591)
ctaaaccagaacagcattcaactctcatttcaaaggtactttcttgtttctctaactctattgattttagaattggtttaatattgcatgaattttgaaatgcttgacaatatgatggatgtgtcgaatattatgaatacaattattttctagtccagtttcatggtatatttggacagaacatttacatactgatgaaagtgctgaaaatttatgaatacaatttctacttttattagtattatgacccagatgccactcattgatggttctgttttaagaagaatgagtgatcctctctgatcctttaggccaaagagcatttccacacccatgaagaattttaactgttaccatatcttctgtggaatgaaacttgaagctgacaagctacaacttactttttatactccttttacataatcaaatgatctatatgacatgggtcacctgtgagttctctttcaccacatgcatgtagaaacccagtaattgatgtggaaatatatgcttagtttggttactttcatttttaactggctgatgttaagcctttttcgggagcgaggcctaagtgatagttataaacatttatgcagtcttctttggccgttgatttgaatgtaaaaattgcgcatatctttcttgcggtatcaagtatgtatataaacatttgatttgtatattcaaatcatcagccctttctcaggagcaaggtctaagtggtagttataaacatttatgcaaatcttcattggcggatgatttgaatttacaaattacacatacattgcttgcagtatcaagtatgtgttgaaaagattaagaaccaaaaacatgagtttggtattgccttttgataattccactaccatgcaccagatgaccacattagaaatagtgttcactttttagaatgccattatacataaaaaaaactttctttttgcagaaagaa

SEQ ID NO: 83688 - DNA, 528 bp, Citrus sinensis
  Intron number 1 from transcript orange1.1g048313m (locus o range1.1g048313m.g) derived from phytozome v7.0 (chr-ID sc affold00042; pos 174122 to 174649 reverse strand)
gttctttcatatttacgttgttaagtgttgctgaggtagatcaccacattactagtatcaataagggatgcagaatctgcagatatttgtttgtgaaaggattaagtaagtcatttgattcatgactattcacacttttaggtaattagctatgtgtttaatatttatttctttgcatgcatacactgggtttacatatttttgtttttttatgtaggaattgttaatacttatggactgcggagttgtggatgtgtattgtacttctcatggattttttttcttcttttttccctaattgacatgggtgtggctgttactgactctccaatacatcaatagaaattataaagtttttcagtaccaaatactgtactatatctggcactgttataagtatccatatatttgttcaatatttttgactaatttcttcttgatattcttccatactgtacattatatcagatactaaatacaatctgatgatatccttttgtatgtatgcatggcaaattcagtgtggaa

SEQ ID NO: 83689 - DNA, 744 bp, Citrus sinensis
  Intron number 1 from transcript orange1.1g018545m (locus o range1.1g018545m.g) derived from phytozome v7.0 (chr-ID sc affold00021; pos 74272 to 75015)
ccgttttcaggtaaaattttccaaagttcattgcttcactgatgattcttaatcttaccaatgctctggctgatgctgttgtttggcgtactttgcacgaacttgtatttgatcaatgatgagtgtttgttttgttgctgtgtttgattgttttatttctgatttcctgtttcgtggggttttctgtcacatgcataatttgctatatgaagtaaaatatttactctctctgtgatattttggtggttatatgatgtaatattattttgtagcattagtgctatgctatcaaacatctatttctagtgaggactgtagctttctctgtttggtaatgtattgatttttggaaaataataataataataattaaggggaaaagaaaagaaaaacatgggtgtttttgtgttgaatgcactttttttttcccggaaaaatgttgtttggctgtagtttctgtttatattgtaaactctgtaacaaaacgtgggaaagatacgactgtttggcttgattttttccctttctttttagcatatgtatgataagaataaaaaacagagaatgaaaaagttagtatatgttgtgatcttaggttacatttcttattatgtaatgtcattgtggcttaaatgctattattgacggagaattaatgccaatcattggcttgtggcacttgtaagttgtataattgtaatgttgccctccgcgtgtaccatcagggctcaccgtatatttagc

SEQ ID NO: 83690 - DNA, 815 bp, Citrus sinensis
  Intron number 1 from transcript orange1.1g014780m (locus o range1.1g011420m.g) derived from phytozome v7.0 (chr-ID sc affold00283; pos 77154 to 77968 reverse strand)
aatttgagtttggctttagaacaaattgtggtaatactctgatggtttcttactatccctttagttgctgctatgtttgcccacatgactttttgatctgagattacacagtgcctcggtttccatatctgtatttgtatgagtgaccctatttaagaaactttccctatttttggaaaacagggttctggtctgtttactaggtttgcattcagactcaggattaaggaagaattaacttccataaacatgcaagtgcaccccaaacactgctgatccagcacactataagtaattgatgctacttgaattcactcatcgagtgaggaagaatggttgtgttttcactcaagcatctattgtggctataattggttaatatggacaatattatttaagcatttggagtttttgaaattactgtgcaatgagtttgcaattaatgtgatcatgctttttctttgctggctataagtaacctgcagatgttcacaaatttcacaaatttggttagcctttgaatccttatgtgggtaaccactaatcagagttgagtactcaaaaacatttgaatcttatgtgcagcagatgcctgtgagtaagatgatatgatatatattcgaggaggtgctggggaaagtgagacattttttgttgaaaatgataatttttttttgggttgaaaatgaaatcatactttggggtctgtgattattttttattaaccccctttttctaataatctctaaatactgatttatatttgtgatccttgataaggtgggctggattcttttactactcaaggagaagat

SEQ ID NO: 83691 - DNA, 256 bp, Citrus sinensis
  Intron number 1 from transcript orange1.1g004355m (locus o range1.1g004355m.g) derived from phytozome v7.0 (chr-ID sc affold00006; pos 2695653 to 2695908)
gtttgtcttcggtcgtcactcactaaaagttcttggtaggtatggttctcgctcatacaggtcacaattttacaattttataaacgtgttatttgcagttttgcactgttcggtgatcaaaaccctaggtttaatgtttatgttaatatagtttctttttgttttcttctttctttgttttgatgcgttctgtgtcgagaaaagctcattttagtgttgtattggttgatttctgtgaggcatttagggtttccaa

SEQ ID NO: 83692 - DNA, 847 bp, Citrus sinensis
  Intron number 1 from transcript orange1.1g047783m (locus o range1.1g047783m.g) derived from phytozome v7.0 (chr-ID sc affold09769; pos 346 to 1192 reverse strand)
cagcgaaccctcaccttcggttcgattcttgcaaggtaaatgcttagtgtctttttcttttcaatttgtcctttgaattgggtccagaaatcatggggtttgtatttagaatgagtttttttttgtaaaaacttattagttctgatttacatgaaatggtgacaaatttttgtttgtaaatctgtcatgaggatgataatcatgattcaagtaattgattttggtgcactaagctgcagaaacaatagcattaatctggtttttgtttttgatgttacaaaactacagaaaaaagttaaatccttttgccaaaaactgtaaaaacagcaagcaaatttgtgttgctttttctgctgttcaaaagtgcataaacagttgttgtttctgctatccaaaaatacagaaacgactgctatttttgctattgaaatgtgtaaagacagctgttgtttttgctgttgaaatgtgcaaagcggttgtaccttcaaaattaaggaaaactatactatttatgaatttattttatcaaaattatagagttttagcgctatgctcaagttttactcgtatcatcattggagttggacacagtttaatagttgacgatgaaaactggtagtctttaaccaacttctgcaaaagatagacttcctactaggagagttgactggcacaatttctaaagaattaatgaagttggaatagtagatatttgggtgacggctttctaattcattgataagttgaattttttaatggagctaaagcttttgtgctttcctatgagatcttatgttggtcgcataatgcaggtattaaagctaggggttttatatttgggcctcct

SEQ ID NO: 83693 - DNA, 846 bp, Citrus sinensis
  Intron number 1 from transcript orange1.1g039657m (locus o range1.1g039657m.g) derived from phytozome v7.0 (chr-ID sc affold01056; pos 4623 to 5468 reverse strand)
tcggcttgggctgtttgatagtatcatctactgttgtaagcaaatatttttgaaacttggatttagtgctgatttttgtgtttatcttttaatattctcaatctgcaatgaaatttaattaccttatctaataactcgccatggtttttctaaaaaagtcggtacaaaaatcatattagcacaaaattattgttcatttagcattatagctgcttctattgtgatttaaagctattcaattctgcctgtaaaggtgtactcgtcgacaaactaaaggaggagaaatatgatcatgaagcttgctcaaatgattccagagccaatagtggtctcaatattccacaaaactatgaagcatgcatcaacttcctcaagctgatcaagatttcaatcagagttcttagtgggtcaattaatctaacactttacatatttttgtatttaacaattggagtttgatcatcattttgtttgttttcccagcaacagcacagggtgaggcagatgatgaagaaaatcctcaacataagagcagcaaaccacttggtaacagcaattaattacttaagctccaaatttctttatcccaaaatcttgggaaaggttatcaagaagttcttattattataggagacacaattttgggatcatcttcatcagcaacagattcggaatcaaaggaccaagtaactggatcatcggatgcaagaaaaggatcaacagatggtattgattgtcacatttgtagtcggtgaaaatcctttgtgtttaatttccttcgtgtttgaagctgatctttgattgttcttgtgactgtttctgaaggcatagacctatcaaaaaagg

SEQ ID NO: 83694 - DNA, 500 bp, Citrus sinensis
  Intron number 2 from transcript orange1.1g005858m (locus o range1.1g005858m.g) derived from phytozome v7.0 (chr-ID sc affold00001; pos 728896 to 729395 reverse strand)
ttacaactgttttgattgtatttgcaggagacgaggtatgctctttcgatccatttctctaatggaacagattttgttcttcaatcgtcataaacgtctgttttttttttcttctttcctcttattttgaattttggacttatttccactttcccaaacatgtattgggcaaaatttatgatacttattttgaattatttattggactttaaattttatagcatttcactttgttggtgtaaaatgtgtttagatttatgaacagaaaccctaattccagaatcgtggagaatatttctgttgctttcactctgtactggaaattgctgcatcaaactttctgattgattttaacttctttcagatctagttgtgcaagactgtttaatattgcagtgagcttagttttggccttcattaaacttacgtaattgaatagcattcagatgtaagacaactgcactgtttagccttttctaacctatgtgcattatttccag

SEQ ID NO: 83695 - DNA, 656 bp, Citrus sinensis
  Intron number 2 from transcript orange1.1g044137m (locus o range1.1g044137m.g) derived from phytozome v7.0 (chr-ID sc affold00092; pos 453098 to 453753 reverse strand)
cccttgaaagaagctgtaagtattctttccgactcttaatttcttaatcataccttcttcttattaattaaaatgagttgatgggtttaaatttcacaggctccatctcatcctcaagatcacgattcccttgcctcagttaaaagtattcctacttcaacttcatcacaagtaagtatagtataatcattttcttgttttcctaggattccacagtcaatttatatttttaccacttctccaattttttttttaagtttttgtttttaatctttgaattgttagtgtcattctaataatgatttgattaatcaataaaagttttcaaaacaaagtggacagtcagtctttgggaaagcacttggtcttttagtctgaactaatagaactaattcatgtagtttttatatttttaaaaactatttaaaatatgaatgatattattttcatagttatgttgttagatcttattaacttttcaagagtataataatttcattttatatgacaagcaacatgtgaaaattaaatgataagtagaatttaacgaaaacatattttgaatttctcttgcattaataatcgtgtaattaaaatgaaagcagcatcacttattttgaatttctcttgcttaatacagtaccaaatccattgca

SEQ ID NO: 83696 - DNA, 554 bp, Citrus sinensis
  Intron number 1 from transcript orange1.1g001425m (locus o range1.1g001425m.g) derived from phytozome v7.0 (chr-ID sc affold00001; pos 5432705 to 5433258 reverse strand)
gactcactggagccaatcctctggcgcaggaggtgcgttttcgaaaattaattcaatttactttatgaagaagagaaaacattaatcctgtagttaatactcgctaactttttttttcttggtttttttttgtttgaattattgaactgatacttttgttttaggagttttagttctttgaatgcttccttattatggctcactggattcaacttatgttattaggcaaatatcatgctaatgctactgagcatagcagacactagaatttaaagaatttgcacacaatcacacaagacttcccaggggaattgacaaaacctaaaataaggccttttttttccttgggcaaagtaacctattatttgagtttaacatttaacttagtactgtatattactagttaaatcttatgcaataacactagtagggggctttcaattaatatattttactgcctttctttgaataaaaagtatttatcatgttaactaatgtgtattttcttggcacatgcaggcagctggtgccctatcaataaaaattggtgagtt

SEQ ID NO: 83697 - DNA, 1002 bp, Citrus sinensis
  Intron number 2 from transcript orange1.1g037204m (locus o range1.1g037204m.g) derived from phytozome v7.0 (chr-ID sc affold00031; pos 218267 to 219268 reverse strand)
cttacggcaatcaggttttcaattttattttttaaatttaaaagtatcttttaatttcttcagtttttaaatcagtgtttttgtccttttttttttaatggtgattctggatttcatttttaggaaggaaattgataattagatttttgtttgcttaaatggaaagtgatgaccagtgatgtagaaatttttatgtatttaactgtaggctttttaatttcattttatttttgagagcagagcagagaaagtatattagggtaaagttcagttggctggagttaataaatgcatggatgtaagatcagtttgggtttgaattgcagtggttttagtcaacaattgctgtgaaattgaatcacttgtcgttaagttataaagttggcgattagcagttgagtaaacttcagttgtgccttttaaattaagttcaagcacaacaaccagaaatgggctcgtagtcttagtctttgcattgggttcttttcatttgagatcctgttcctgggcgaaatgcttttgtgctcttgaaggagatatttgtttatttcagcttaacactataatacaagtagaccacaatgcctaattgaaaatgttttgttcggacccagaatagtctcaaacttgtaaaccatcgttgcggtggggggcacctccttagctccttgccttcttctcatgattgatggtttgagtgtcccagtttgttgtgctagtgttttctttgaatttcctgagttcactttgaagtatgcttggccagagcacatatcaaacttcttatgaaagttgaactaatttaagggattttgagtggaattctcgtaacctattagtagatgtgttgttgctccatattaaatacaacagaaagcaattctttatgtaatgcattcattttgtttctaaaggtcaggtttatctagaaatataaaactacactattcttatagtcaaatgtggattactaatatatttgaaacatttgtaatcagattt

SEQ ID NO: 83698 - DNA, 542 bp, Citrus sinensis
  Intron number 2 from transcript orange1.1g035529m (locus o range1.1g035529m.g) derived from phytozome v7.0 (chr-ID sc affold00001; pos 1806162 to 1806703 reverse strand)
gtaattcgcgatattgttcccttaagtgctatcaggtaggcagaatcttattctaggagtaccagattttaacgaatgttatgttgttgacgaacaggcaaatcataagggtaggtgaaggatcaaatttgaaagtcaaaagcttgatttatcatttttctcaaatttactagttttgtattatgccttttgatatccgtaattgtttatagttatggattactacagcatgttcataattatatgcatcctgtacaaggttgatattagtcagacataagcaactctgcttcaactatgagatattttaccattgtttagcagcctggtgctttgtgttttaaagtttttcttccatatatttgtcagggaaaaagtgagacataaaagatcaattataatttgaatgtcttcctagtggtccttatctttctcaagcgctaagggaattagtatattatgtttatgttcatatgttgaaaatctttccatggttctcttttgctgtatagtctcatagtcgacgttgtactgaatccttc

SEQ ID NO: 83699 - DNA, 635 bp, Citrus sinensis
  Intron number 1 from transcript orange1.1g035529m (locus o range1.1g035529m.g) derived from phytozome v7.0 (chr-ID sc affold00001; pos 1806707 to 1807341 reverse strand)
tcattgaatcctccttctcgaataatctgccacgtgtatgtttttctataaatctcgagcttcatttttcttcttttggtgattttattttattttatttgttgaaaggggtgatttttagtttaatcatgctaaagttgtttattttgtaattaaatttgatgctcagtttggttgcttttatgttcgttgattttaagatcactgttgtcaatgtgttagtgcaattttggttttccgaaattcatgtaactggagcatgctatgcgtttataagtagactgtttattgcttgaaagacgaatagatgcttttatgctcgttgatttaacatcactgttgccaaaatgttaatgcaattttgattttctgaaattcatttaactggagcatgttgtcaattgttgtacctttataagcagaggctgtttattgcttgaaagacgaatagcttaaaatgttaagaaatcttagttatgtaaaatcctactttttgacaattgcagtgtctttggtctttgttttacttgttatgttggtttaaattgatgaattctcttctcttcgtgttagtttgatattttcccctccattgtgcaggtgtcagaagcaattttcgcagtatacttgccctc

SEQ ID NO: 83700 - DNA, 937 bp, Citrus sinensis
  Intron number 1 from transcript orange1.1g039108m (locus o range1.1g039108m.g) derived from phytozome v7.0 (chr-ID sc affold00326; pos 80984 to 81920)
gaatcagcggcattttgtacgatagggctgaaaaggtatcttactatcatttactattagttttgcctttgttctttttatcttctctaaaggcaaagctaacagtaaatgatagtatgataccctataattttgatggagtattctttgtggtcaaaattatagggtatcattctatcagttaccgttagctttgcctttgttcttttccatcttctccatattatttctatataacacattattcactcatgaatgcccattggtctgcatttaaagtgatctaatttgataacccatttgtttattctgacatctctatttggaattttacattatgacaagagaaacataagagcataggcctttcttctttcgagtgtacatctaggcgtcttaatccattcttggttaaatatggataattataaattagcatcaagctgtttctctagttttcatttagtgaaaaataaatatttcctaaaattttctcactgtttggggtgggaatttcaccatgctacttgtcacaagtatttactctttcttgattgagacaagactgtacctgattggaaattgggatttaatggtctacaatctgcttgattctgctgtttagtttagagagtaaggctcaaaagtatgttcaggcattagtatggcctaaataagctcttattgcaactttgacaatggttgtttacttgagcagcagacttgggcctaaataataatggcacctgttacaaatagtactgtgagagtagaatatatcagtggataatggagaaccaataatattaatgttctagggttgttataggctagaaagtgtaattagggaaatgtttcttgaaaaatctagatttttttttttttggttttcctcctaaaagaattgtgaagtctgctgttaatagaaattcatttc

SEQ ID NO: 83701 - DNA, 842 bp, Citrus sinensis
  Intron number 1 from transcript orange1.1g008335m (locus o range1.1g008335m.g) derived from phytozome v7.0 (chr-ID sc affold00326; pos 64905 to 65746)
cggggagagtacctctccgctcagtcaatagcagggtaacataatttattcacctaattttaatttctcagtatttgtcaaaatgacagatatgtgttgttgatctactatagtaatatagaaattaacacctaattaactttcttttgtttatattttgagcagttttgcatacatagtgtgattgattgactgactacatatagttgagaagaaaatttagacacaaaccttagcaagtttcatttttagccagtaactagacagtttgatggttgattgtcgttttttcttagtcccttgatttttctgtaacccacttttgatgattgaagtataaccaagtctcaattacctaattactcaaactccatacttgccgctgaatggttttcaggtagtttatttgacaggacacctgagttcaaatctaaggggtggtagaggctaaaaaattgattttgggctttgctcacactcccaacttcttaaggagaaaaggaaaaatttccagacttctcataccatcacaagaaaccttgcctgttgaatcacatttgttttcaatatcttattttctttatctcttggtttcgttgagaggctattttgacgatttaagaatactcattttcatttgatctaatgttaccttcacgcattgattttcgaatattgattttcaaattatgttcttttgatggttgcaaaagaatttaccttctacttgattgagaaatgtgagtgcgtgcgtatatatatttgtatttttattgctctttatcttatctgactttcatctctatatcataggattctgaggtgccttgtaaacataagaa

SEQ ID NO: 83702 - DNA, 683 bp, Citrus sinensis
  Intron number 1 from transcript orange1.1g017180m (locus o range1.1g017180m.g) derived from phytozome v7.0 (chr-ID sc affold00111; pos 378050 to 378732 reverse strand)
cctccgttgtcgaaaaacagtcaaccccatcaaaggtcagatcattttgcttacaggttcttattttcttgtcattatttttttgatgattacgaaataatggctttgatggatgggaaaatctcagtatttgtttaatttacgtgggttgaatttttcaatcatatacaatgaaatgttttctttttgttttatccagatgagcccgtttattttagcaattgaaagttgaaatgtcaaaagaagttgggcaccaactgaagtgatatgaataggttttgattcatttccatggtagtctttatgtgtttatcaatggctattattgtacgtttgtagttgctaagaacacttcaagtgcgaattggatgattaatgatatgacaaaaaaaaaattaaagggatcattaatggaaccttttttttcaatttctgtaaaagaattagatgaacttgtataaaattctatgtgatacagaactgttttattgtagctttaacttaatttctaaatacaactctttctacaataataacagcgagaatacggagtttaattagcaacttatgatttcatttgtttttcaatggatgccaagtggttgtgaatttttttagtactgtcttggttattgtgttttggctcatagtggtctcattttatttcagactggtaattggca

SEQ ID NO: 83703 - DNA, 620 bp, Citrus sinensis
  Intron number 1 from transcript orange1.1g034299m (locus o range1.1g034299m.g) derived from phytozome v7.0 (chr-ID sc affold00105; pos 167897 to 168516 reverse strand)
agctctgcgcatacgagctctctgtctctcttactgtaagctttcttcttctgtttgttctttgcatattttctatttgcattttagggttttaattttattcagcttatacttgattttcatcagtaatttcacgacattattatgtacaaatttagttattttggtggtttattttgcattctgattgctggtggtaaatgggtttttaggctttgttctattctattaatctttcgagatttacgcttctagggttttatgttgttggttttcttggtcttattttatttaattttttaaaatctaaataacaatgttattgagttatgattaatattcttctctttttggcctctctgtaacgtgattggtgcttgctttgaccaaatagtcatggtgggtcattttctttttgttaaggatgccagataactttgttaaattgaccatatttctattccattctatcttgcatagccgctaaagatgctatacgttgagtatttattatctatactgttgtcaatatcatatatctaatttgtgtttttgctctctcatgaaatcaaacttgctttgcagaatttttgtttgctaccagtctcgtgaaggatttt

SEQ ID NO: 83704 - DNA, 735 bp, Citrus sinensis
  Intron number 2 from transcript orange1.1g046556m (locus o range1.1g046556m.g) derived from phytozome v7.0 (chr-ID sc affold00006; pos 2736216 to 2736950)
tcttccctactcgttctcacactgttgcggctcaggtatgagactctcctgagccaacagattatccttagctgaaattttgagtatgtttctgactgttttgcttctgctttgctgcccgcagctcaagtatttggcaccttagttctggatatcccctttgttattttagggatgatgttatagaaggaaaaaaaaaaataacaatgaacatattggaatattattttttctttggttccaaattttgtgccatatagtttttgctttatattactagttacaaatagatgtaaatatatatttggatgtctaaatgcatatttgagaatttgttgtttaatctatttgtttgatgatgcattttggaagtgtaaacacatgcctaatcaaactggatggtgttcacttcttgttgtaagtttcatgaagtatttgtccaaattgttatcaaatcagagtttgatttcttgcttttcttggatatcctttgaaacatgctatttgacagcaaaacttccatctttatttattaatttttctttctaaagttttttagctatgaaatattatggtcacttattcttgtctttttcaattttatgtggctgtgccttttcctttgacaaagtcttttgaacatgtatagcttgaccctgtgtagattttgttgttactggcttggtttccctgattgtgatagttaactctgatattctatacagggtggtatta

SEQ ID NO: 83705 - DNA, 862 bp, Citrus sinensis
  Intron number 3 from transcript orange1.1g032760m (locus o range1.1g032760m.g) derived from phytozome v7.0 (chr-ID sc affold00144; pos 31203 to 32064)
ctaagaagtttgagcccaagtacaggcttatcagggtaagttttaagtgctcatcgttcttatgggactgcagattgtcactatgtttatatgttcttgcattgttttattattcaattttggttattctgtgaaaatccattagataacttgtgagtttaattataagccaattattctttttttttataagaattattgaccaattattcctcaaaaggggaaaaaaggaacataacagaagctaattattcatatattataataggtgcagttgatttatacatgcttccgttgggtagatattaaaaacttaactacagatatcactcttgatagtttattatttttgttctcatgatttggttttctaattatagtctttctgacaacttgatagtggagtggaacacgttgctaaaatcttctttctttgtttcattttgacgacatgtctcttatttaactaattgagactcctgtatgtggccgtcgtatagcatacattctctgcttgagctatttatacacttcccttctgttgtaaagttgtctgattacccaatagaaatctcatatgatcaatctttgagtggttagggcctggtaggttgccattctgtttgtgccatcggacccatttaagaaactgctgtacttgattgatctaagcaactgatttggtttaaaagtcttctgttttatcttttgaatgatggggagactgttgtggatatctcttctgttctatttgcatgtccacaagttacttgttcctgtggtggttttacttgaattgagttttgtgcattgatgtttctttaactagttcttatgattatatgttgtcttgcaatgcaga

SEQ ID NO: 83706 - DNA, 921 bp, Citrus sinensis
  Intron number 2 from transcript orange1.1g032893m (locus o range1.1g032893m.g) derived from phytozome v7.0 (chr-ID sc affold00001; pos 3119386 to 3120306)
attgttggcttgtaatttctggaaaggtttttcatctgactcggtggatgtttgttttacttgttaatttgttattattattattattttcccttcatctcatggatttttctgttcttattctctttactgcatgtcgagaacaaaaaaagttgtactttttaatctaatatttagctgtatctaagaatcattttgatccagtagatagactgttcagattaaagatctagaagtaaatttttttcggaccaaattgaggtgagaacatgagagaaacatgctgttgaaagactgaaagtctctacgattcattttaggtttttttattttctttttccatttttcttctggatattattactaatattttattgtggtatgtattgtttggtgagagaattagaaaatggtaacatgccgttgaaagtctgtacaattcatgatatttgttgacaaaattttcattaccgtctatagtattccgtagaggaataagaaatatctattatcttttcagtgaagaacttcaaggaaaattctgcaaatgcctgctgaatgtacgatcaagtgttttataatgtttgatttataaaattcaagtatatgattcaagacttctatgtcttgcataagaactaaaaaatagcttacagggaataaaatactgtagtttgcagtttgccacttgtgaagagctaaacatacgaaaaagttgtaatcaggggccagatcgcttggccaagcttgttctaatccctctgtgttttttctttttaaatttgttatgtatgtttgaggtagatcattgacaatttcaggacatgcatctatccggtacctcatgtaatacttttgcttttcaattcaacaagccattaaatagcgtataactttcagaagccctgtatcaggtctata

SEQ ID NO: 83707 - DNA, 444 bp, Citrus sinensis
  Intron number 1 from transcript orange1.1g028463m (locus o range1.1g028463m.g) derived from phytozome v7.0 (chr-ID sc affold00031; pos 863949 to 864392 reverse strand)
tttccctcgccgtcgtgacgacttcttctcaggtagtcgtcttctatttcccgtccccagccctgtttcttttaaaacgctaatcttattttgctgttgaactaaaaatgcttggcggcgttttagtgtgacagagagaagaaataaactaaaaacagctatttttactcgctatcagaaaccgataattccttttaaacgctaatcttatttttctgctgagcggctgtttggtgtgacagaggaagaataaactcaaaagagctattttacttgttattggaagcagatagttcattttttctaaaatgaattttgaaaaatataattctaagaaataatcgttcgttaataccatttgttggaaacaggccgatgagtttgattagattctttctcttggtctctgtgatagtaattgacatttatttcgtggtgcaatag

SEQ ID NO: 83708 - DNA, 816 bp, Citrus sinensis
  Intron number 1 from transcript orange1.1g002948m (locus o range1.1g002948m.g) derived from phytozome v7.0 (chr-ID sc affold00084; pos 181331 to 182146)
acgaccctgtatcggcaaattccagagttgggaaggtacgttctttgtgttaaatcagtttcaagatttgggttcttgttaatttttgcctttctttgtatttttctttgatttcttgaaattgtgtggtttgaacgttagggttttgtagtattttctatgtggatgattaagtgcaaaaccctaaaagagaaaaaatcaaaatcagaagtgtttattaacttgtcttcagtgtaaatagggcttaccaatattatgtttctcctttgttaatgcttgaattaatcattgaaatatgaactgaattttttcgatgctggagttttatctttatagtgcctttttcgtagttactctgacattgggacttttgtcgggaacatatagcagtaatatattaattttaaaaaaagtttcttaaaattgaattgtgagggtacggttgtgtttgtattctaaattactttggaagaacatgacaatgatgataggggaatcgttataattggatcttatttcccacttaatatgtaactaggcttgcgattctgaatttgttaattacttggtttaatcacaagcattgtatcgagagggttcagtttcaaactaatattgagtaatttttccttttactagcatatttagtgtgtggatatcaattgcaacatcccgatcatttctcatttgctaattctcttgtgttgtttagttattcagcatttgagttcagtaaaatttttcccccttttgtttcataattctttctacttgaataatgtagagtaaatcacctaaagggaacaaccaatcaac

SEQ ID NO: 83709 - DNA, 395 bp, Citrus sinensis
  Intron number 1 from transcript orange1.1g025759m (locus o range1.1g023982m.g) derived from phytozome v7.0 (chr-ID sc affold00001; pos 4403683 to 4404077 reverse strand)
caagcagaaactcatcaggcttcttctaaaagaaggtgggttgttggctactcttttggttgtgttcttgtcttttcccgttaatttcatcagattaaagaaggcaattaagttgaaagctatttttcttgagcattaatgattttgagtccctatatccatgtagctaagctaaggtaagagattttgttgtgggctcttataggaaggtgactgagaagactgttgttaaagtgaagattggagaaaatcctgggaagctaaagaacgaagggccaccttctgatttttggtcttggaggaaatatggacaaaagcccatcaaaggatctccctatcccaggtttcaacttcttttttcttattaaaaacaaaaaagaaaaacaaatttctcc

SEQ ID NO: 83710 - DNA, 730 bp, Citrus sinensis
  Intron number 2 from transcript orange1.1g024909m (locus o range1.1g024910m.g) derived from phytozome v7.0 (chr-ID sc affold00900; pos 7972 to 8701 reverse strand)
tagaacccgtcgttgctgccgctgccaccgtcgaagtttttcttctttccagaatactgtccttttaaactcgtacgttatctgggttttgtttggagttgtcgttaaatagaacttctgctttcgtatgttcatttctgtacctatcttatgtgcttgccatgaaatgatatgtgcaagagaattaatgtgtgtatatttgtgcatatcgggatgatacatgcagcagtatctttctgaaacttagtaaagctatacttcggagttcttattgctcgtatgacatttaaatagtgaattttttatttggattggtgtttccttcaattttttttttcccctttgactggattgtgctgctgtgaaaaatggccgttttttagagtaataatgtcgggtcattttgggaagcatcagaaatgcttcaactgaaaaaatccaaagaaccaaaccaaattgatctaatgcagttcagtttttttgaagtttggtttgaaactttccaaattgattggtttggtttctgaaaaaaccaaagcaaacttgaagtgcctagtcctaattgaagtttcaaagctttgtgttattaattttttataattttaaattgttgttggtattgctagaaaggtatgattggctgaaatagtgttcttgaatgcagagtgagagaatattgtgtttgaaatttgttaagatttgaggagttagaatttttagcgttttccga

SEQ ID NO: 83711 - DNA, 915 bp, Citrus sinensis
  Intron number 2 from transcript orange1.1g006917m (locus o range1.1g006917m.g) derived from phytozome v7.0 (chr-ID sc affold00029; pos 567832 to 568746 reverse strand)
gaggagaattgtactacgcagcaaatctgtgacaagtaataatttcttgttacattcatgcagtcttttattttttcctttctttctttttttttcctttttggccatttgcagcaagcagttgtgatcataccttccttatttttattttcaaaaattgcatttgttaacctttacttcaatcgagggcagcaaatctgtgataactgaaggtggctggaattttttaccttcacacatatttgtagcttgtggagaacttctcacaatcgttggcctcgatttcggaggggtgagtacctgaaataggcactccgacacttaaattagtgtttgattaagattaaagaaagaagaaaaatggagaaaatgagtttctctctctaggtatgaacaaaatgattttttggaggccaaagaccaatcagggtaacagatgttgtattaattcggtatgaccaatcagggttatttcgatgctggagcatagaatcaagactgcaccttaatccaattcagtgcaaatcatattatctattgtcatctaatggaaacccataattagaaaactagtaataaccatgtaggtgtcttcaaagttgaggcagcagtccctttcatatcgttgaaattcagagagtcttattgcatacgatatctgatggaatgaatgtgagtgctgaaagttgctctaagatgtaacattgttgaaattctaataattgcatagctgagcgttgtgatatttgtcttgcttgaagatgttgttctgtttgttactcatatctttgatttcaagtgacgaccatgttaatcctgtatatccctggatgaagcatatttcttttgttgcatctgaaagcatacatgaatttcttccatctcttacttgttcttccggcaattgcagatact

SEQ ID NO: 83712 - DNA, 652 bp, Citrus sinensis
  Intron number 2 from transcript orange1.1g014468m (locus o range1.1g014468m.g) derived from phytozome v7.0 (chr-ID sc affold00015; pos 1416665 to 1417316)
tgatccgtcgaacaagcaaaattcaagaacttactgtaagcattgaaaatgaacttccaattgattttgaatcgccttctaggttatgaaatttattttaaaagcttaattgttcacttttagaatgttatcaaatcttaaatgtactaaaagaaaaataaattaataaataataaaaagccatcttcatagaacaaattcgtgtttttatgattgcattcagcattcactttctagaatgtaaaatcgaacctaccaagttgtatgagggcttagaatgttcgcatctgtaaattgtgtaccaccttcatcaaagttctaaaatgcagttctttgatatttgggacataaatttttggaattacctgttcagaactgtatatagttattcctaccaattaaaaaaaaaaagttacatagtttatttattttggggcatctgttgcatgtgcaatgtaatactgagcagacttgtaataaattactgcaatgtgcaattttctatacatgttagtcctccagggattagaatcatgccggatatatcaccctaactatgattgtgttttttgatgaatctgtactgtttttttccttctttcacttcattaaatcagatttttgatgattatgggttctcccctgcagaaag

SEQ ID NO: 83713 - DNA, 620 bp, Citrus sinensis
  Intron number 3 from transcript orange1.1g027416m (locus o range1.1g027416m.g) derived from phytozome v7.0 (chr-ID sc affold10566; pos 752 to 1371 reverse strand)
tgccaacttgtcgtaaaaggtcagtttatctttcatgtctctctacacccacacaccatgcaaaatcagctaagattcagttaattcagatatgaatatccagacatgaatggttcagtttttattggaaatagttattctggtgttagtgtagatagatagagttccttggtccttttcatttgctttcttcactgtaaatcagtaccctgttgaatttaaccatataaaggatgctttcaaaggatattctggcccatgcaatgggttgtttgaagcaaagatgatggtgttcattcgcattgatcttaggcagtgatacatgaaaatggaagtctgaactagtgagacatacttactgtttctgtaaattgatctagtttgatttccagcattttttggggcaagcttttagctgatagtcttacattacttatgaccacaaaattcattttggaggtcttgtgaaggactcccacctgccagctagcataagttctttgaataaagcaaggcagaataatagttcttaccatatctcaagaacatgaactagagagatgagtactatcttctggtcatagcacattttgttttctattcagagattgcaaacggga

SEQ ID NO: 83714 - DNA, 888 bp, Citrus sinensis
  Intron number 3 from transcript orange1.1g030601m (locus o range1.1g030601m.g) derived from phytozome v7.0 (chr-ID sc affold00013; pos 306697 to 307584)
tctctttgctcttcctcaatctcaaaaggaagcaggtaaagctccttcaatccatttctgctttcatgatcacattgtgtgttaatatgcttacttgaagtgcccaaggatctctgacactatttttccaagttgtatctccagttttgtgtttaattagtcacttctttcgttatgcgtcgggattattttgccggctttttacaattgcacaggacatcctttaatctctactagtaatacacttttaatattaaaacatttcatgttcccttttcctttttttttttcaataagcttcatggtctgatacgagaaagacacatgtgctttgacaagtatgaggataataaaagtagatatctttgctgtgtcaacttccttctaattctaatacttttagaaggttattgcactgaaactggcacgcagccttagtgttctattgacatagttctgtttatgtcaatatcatcacagcttgaagctttatctttgactttcattttcctttttcttaagatctctcataatatgatcagatgacataattccttaaattcttaataaaaagctgttgaggttaataactctatgaaaagtcccaatattagttcatgaaagctacaatactacaaatcatctttaattgctctccatgcaagaaatgacgctaagagttgctggatcagaaaatcatatcgaatgttgatgtttatgtgatcctttgatatgtttgctttgagttttcttcacgataagtggttgacatgtgatttttactggcgacgttgactttgtggatcttgaatcttcatttcctgttttttgactttcgaattccaaaatgcagagctattcaggaattatctgaagcagataagagag

SEQ ID NO: 83715 - DNA, 925 bp, Citrus sinensis
  Intron number 1 from transcript orange1.1g014028m (locus o range1.1g014028m.g) derived from phytozome v7.0 (chr-ID sc affold00077; pos 273420 to 274344)
gcctgcagaggaatattgctgtttttccaaggtatgtaccatactaaggatttagttccttttttcctgttagctgagtatattttatatttatgaattattgatattttgctttgtgagtacaaattctaatagtgctggcttgcaaaatagatggtgtgaaattgattagatatggcaaaatagtcccctgcatttttcactggagttgacgtgtttattctgttgggagttgggacttgggatttttgactgtgcacatgctgtacgtactcgtctatttgtatgtgaacgtgtagtagcttacttttctcctttatctgaatcttgaattgcgtggtttcaatgggaatggaaggagggagggcaagtttcgcctttttatgtcttcttcatgagttgatactgatatgcttcattctttatgacaacatgctgaaaagaaacttgctgggtggctaggaagagaactcagacatccactcttctcaagttaaatgcatacctcctgtcatctcaagttaaacagttgacatggtggcatattctcttctgtttttgacatcctgatatgtatatagactgcacttttccttaccactcaacaaaattttatgcatgtcccattatccactttacagaatctgaatctgaggtatcagatgtttttcttctagatgcaagttatttttggctccatcatttgtcattgcctctttaggagtggtatacagtttttaatgtatttgacatctggcttagattttatttggatgcttctatacttggagcagattcttaatatgttaaatctctttctatgctttgagaatatggttcattattaatgtatgttattctttcctttgtctcttggtattattataaagagcttgaggttgactctccaaagagcctggaaaac

SEQ ID NO: 83716 - DNA, 945 bp, Citrus sinensis
  Intron number 1 from transcript orange1.1g018428m (locus o range1.1g018428m.g) derived from phytozome v7.0 (chr-ID sc affold00054; pos 378486 to 379430)
gcaccagagatcccaattccgataccccacctagggtttgccctctctctccccctcaccccgcttctcttatgtcccaaaacggcacttgcccaaatgtcgtttgcttttcaatttctttttctgggtctaatcgctgatctggggatatttgatcctattatcacgcggggtgtttacaatttttgaaattttgtgatatttttattgtttttgttatgtggagacaagaaagttatgtttttgattaatttattttggcattttttctgtgttgaaacactgtacctgttattagttttttgaaaattgttaatgcaaatacgtttggtatttgtttatatgtatatattgtatgtagtaatggtgtttttttttttccaacatctttttttaaaaatatttttgttctagggaagtggaagtgatgataattgtgtaatatggctagttttgagcccaaggaacgaaatgtatgaatttatcgcataaaaaggccctgttttcagcaattaacaaactttgatgatatagtatatgttacttatgggtgtgaaggggcttttggaaatcaggttttttcctgtttatttccttcttcattatcttagtatgtttaaatgcttacggactggaagtttggtttaacctattcatgctttgacttggcgtgccttcctgcttatatctggttatcgcatcattatcaaatgtttctcgattatttgattgatgctctcatattgctttgttaagacttgattctgatctgtgtctggcaatttcttttcatcttctgtatgtcgatggatttatgctgagttgctgacctatatttatttctgatcgtgctgtaaaatttttctgttttgtcatttttccctgctttctaatgtttgtatatgtgtgtttttctttttttgtagaaacaagctgccaagaagg

SEQ ID NO: 83717 - DNA, 862 bp, Citrus sinensis
  Intron number 1 from transcript orange1.1g031058m (locus o range1.1g031062m.g) derived from phytozome v7.0 (chr-ID sc affold00001; pos 759462 to 760323)
gcctaagctccgttttgtctatattaggctgtgaggtgagtggaagctagataaatttgtttataataattttatttgtgattattatacgttaaagtgagatgaaagtgaagtgagggattgcttattggagagagctttggtttgtttggcctcatcggggtctattttaaacttattttgtgaatcattctccactgcatgaacaatacaagctgaagatttgttaacataatggcttgttctgaagaaatgagagagattgcaaagaaagcttttgaacgttccaattattttgatacaagaaggtcctggaactgttgttatatttcattagtaaaacaaaactgatttaggggtaggccgtatttccagctatcgagaaaaaaaagttgttatttgagaaaaattcaatttttgtgtttttgtagttgaattaaagcaaaacacaggagatactggaattattagataacctcgcaccatttgaaatcttgaattgtgtggcttattggttcattcccaatgttagaatgttttatgattgtggtggtgcagtgagatgtgagaaatataaaaattaccatagttcttagatgaaactgttttaaaatttctcttcctgttgaaaaccctagtcgcataatttattatatgcctttttctgtactcgctaacttttttatgctgattggcttttggtgcaatcaatttgaataaagtcatgatttgttatgcatataatatgtagatgaagataagtcagcttctacagtttctcaataccctgtagcattagagtttctgctacaggttttattgattacaaatatgttttgaatggtatattcaggattgaaaa

SEQ ID NO: 83718 - DNA, 484 bp, Citrus sinensis
  Intron number 2 from transcript orange1.1g031058m (locus o range1.1g031062m.g) derived from phytozome v7.0 (chr-ID sc affold00001; pos 760376 to 760859)
aagctgagcatcttctcttcgctcgacatcaggtgattcaacccaaacagtttgtgtttcttaacgtcatcattttcacacgtttgtttgaatttgtgttctatttggttgttgaagaatgtatatcacattctcaatattctttgacaactgaagttaatgcatttggcttcttttgaaagcgacaagaataagttgaaattagaagccacaagaaactgtaagattttttgaatctagaaataaagtgccacagaaggctcatattttgatgttcaggctaagagaaacaataagttatgtatatttgagcgcagtacaagcatttgatctattcaggtttcaggttttcttggtaattgtaaaagcatacagcataaaatacaatattggttttcttttccttggtttccttaagccattgatggatattattgatctttggtgatggaaatgcagttggttgaaagtgacatagtgagga

SEQ ID NO: 83719 - DNA, 960 bp, Citrus sinensis
  Intron number 3 from transcript orange1.1g031058m (locus o range1.1g031062m.g) derived from phytozome v7.0 (chr-ID sc affold00001; pos 761079 to 762038)
ctgctcataccattctggagacaggtcccttctgcaacctatacaatttgatagaactatgcttttaaaattgctttacagaagaaaatatggctgagaagtgaaaattacttgaatttcatgtgatgatttaataaccgttgaattctggtttttcttggttatttagggaatacttaattgccgaatatcagtctgcacatgaaccaagtttgtgctatttagacatttatttggtttacgaataaacagtgactgtctgcattttttcaactttcaacgacagcgtataaggttcttgatgctttgaaatgcttgtttatctaaaagaattcgtgtttgtttattgaactttcttcacttcagcatatttctcggtagataggataagatttaactgatggtttgttgagcattttgattttgaaggcttccacacatgtcatgacatggaggacttaattagaatttgaggaattcattggcatgattagtaattatcctaaataatgactgaaacacttagaagcaaatgatcgtggagtcgattaatctaactttctatgtattaaggtcaatcctattcaaacatttattaccatgatatgatattctttcttctctccaaaaaatcaccaggtactcattttgtaataactaaggcacaaagtttattcctttgatgacattgaattgccaccaatgacagtttatactcaattgatccaaactaatacgtttctttttaggggactcttaaaggcattttctcagggaattttctcatagctgttgtatcatgttgggatatgggtcatgaaacccttggttgagtcctattattttgttgttcttttgtttaggatgctaaactacacattctttcgtggtgggttccttgtatcttattattgtttcatggcagatcaaacacgactagattttgaagccaaaaaattg

SEQ ID NO: 83720 - DNA, 590 bp, Citrus sinensis
  Intron number 1 from transcript orange1.1g022698m (locus o range1.1g022698m.g) derived from phytozome v7.0 (chr-ID sc affold00012; pos 523240 to 523829 reverse strand)
gaaggtaattaactcaattctttatgatttaagctgacccatcatacataattagaaataaatgaaacagctctaatatgaggtgtatttttatttaaaaattggttatatgaagatttgttaatttatttccgattttaattttttttttttgggggggatagtttacttctaatttatggacttcccatataaaaaaagtaattttttatttagtaattttaccttttcttttgggtaatttcgtaagcataaatgataaacctgccatcattgaagccttgaagggactgacgtatcaaaacttgggagatttggctatcaatttgtgatgggtatttatttttttttttttccataagaatcagaattattctgaacttttgcttttgaagctttgtcatttctctactttattactcatctgaaacatctaggaattaatatccaagcacagacaaaatgggaatcctttgcttcttttggtttgattctggatgtagtaagcaaaggtcattgaataattacatgaaagattactaacaagtgaaatgaattttccttctttgtgcatataggtgtacaagagt

SEQ ID NO: 83721 - DNA, 637 bp, Citrus sinensis
  Intron number 1 from transcript orange1.1g045392m (locus o range1.1g045392m.g) derived from phytozome v7.0 (chr-ID sc affold08610; pos 1430 to 2066)
gcgttaataaatgatgagtaatttagcaaatttagcataaatcaagtattagcgctgaatctggccaggttgtttgcagtttgcttgtttccaagggtcactcttcgcagttctaatgagactgcattatactttcttggtggcagaatttgcaaagaatcctaagcaagtccctgggaactcaccaagcaaatttggatgtgatatatttgatcttggaaaatgctactttcaccaggtcaaaccctgaactaaaccaaaacaacgtcgttttgatttcttttttttttcttttttgcttccatgaaatgtagtcgtttcagacgagtgaaaatagaaaaaacgtagagaaacagaaaaacgcagctgtttttctttctcttcctcttcctcttcaattcaccacactcgagcaaaatgcagaatgttttagctcttatcttcctcaaaggtgacaggatttggcacagacaaggcaaaagcaaaagcttaaacaagatagagtttcggcatttacggattcaccacacccgagcaaaaacttgaacaacagctgtgatgtgtgtgtgtgtgtgtgtgtctatttttctcattgctttaagcgaagggagaggaaacgggaaggaaaagttttggt

SEQ ID NO: 83722 - DNA, 848 bp, Citrus sinensis
  Intron number 1 from transcript orange1.1g000053m (locus o range1.1g000053m.g) derived from phytozome v7.0 (chr-ID sc affold00085; pos 454529 to 455376 reverse strand)
aagatctttttaaggacaaggtttgcttttcttctccattttcatcctcattttgcagccttttgaataatttttttggaatatttatttcttcgggatgtgaagatttggccatgctaacttacatctatacaaaaaatgctcttttggaattgggacttggattctttctcaatttcaccatttgttttatgagactacaaaattaaaaatagaataaaccttgacctcatgttgtaacagataataaaatacatgtgctgtaaaaatcccttaaagtttaaagcagtttctaagaactcttttctaattggttagtttctagcatttccctttttgtgtttgaagtttgtttgatattttaattagtatgtccagcatctctccttcaattatataaattgatgtttgcctatattaatgatgtatatatcattttggttttaaaggaaggcagaatttacctgttatcaaaattactattcaaaatctaagaatggaacttatagctggtaatgtgtttgtgaatgtttaacatcaagtttcttgggcttagctatttcagttttcagtcaccttcagtgattgtggcacgaagattatagattgcttaggcaaagttctatgagtctcctaagtgactattgctctacatgaacatttacattaccagtcctcttatatgcacgactgtaaacattcatgtgtgttttctgcttctgcttgtgctgttctccccattatagatatttctgctagctaagtatgtcttattatttaattgtacgctaagtgctacttcattcctttcaggtgaaacgaattccgttctcgtttcggtctgtcgg

SEQ ID NO: 83723 - DNA, 667 bp, Citrus sinensis; identical to SEQ ID NO: 80545
  Intron number 1 from transcript orange1.1g022609m (locus o range1.1g015269m.g) derived from phytozome v7.0 (chr-ID sc affold00043; pos 112679 to 113345)

SEQ ID NO: 83724 - DNA, 592 bp, Citrus sinensis
  Intron number 4 from transcript orange1.1g026871m (locus o range1.1g026871m.g) derived from phytozome v7.0 (chr-ID sc affold00006; pos 217539 to 218130 reverse strand)
agcaagtgtaagtacacctctgctttaaataaacattttgatttttttttttggttcaggtatttagaaagagtggaaaactaaatgactgtgttccatgccggtttgcaaaattgttatgaggagaatgaattgggaaattgaattttcaaatatgagtgagttaaggtaggattattatcccaaaatatattcaagaacaaaaaaaaaaatgaaattgtgtttgctaatggtattttggaactgtggaagaaaaaccagtttttatgttgtcttcacatctcgttctgttggaatcatcgccttaaaaaaggtacccaatgacacctgacttttccaataactctgctatatgttggaagtttcttaggagaaatcttctgtaaagtaataccacattcaccagcatgtggtcttaaatgttttattgtcccatgcttgctgtatttttataccattagatgccagctctttctctcttggatgaaccttcttttttcagagttttactttttaatttattttaaaccttttactttaaaatgtacatacagaagtgcatacaagcctactcggacttactgaccattta

SEQ ID NO: 83725 - DNA, 944 bp, Citrus sinensis
  Intron number 1 from transcript orange1.1g048634m (locus o range1.1g048634m.g) derived from phytozome v7.0 (chr-ID sc affold00912; pos 37036 to 37979)
gtttcctttctcaggtacactatttgaagctattgctttttgctttgattagctattggtttttgctgtttctatttctaaatagatattaaaatgaaaatttgctcataatcatatcctttcatgcacgattgcaacgaaggggtaagataaattattttaactgggattagcgatagaatcaaaatttagaaaattttcttcctacacaaagagaccaaaagtttgaaagcaaatacaagaattaagttattaaatggtttttattttggggttgttattgttgatcgagaatgaaggcttgttgtgtgacccagcgtgtcagagtaataccttttttctttttttaatcctattctttccaatgtaactcacgtacctattgaatcgtgaaccgaagaatcaagtcctacggggccacttcttaccactggacttcagagtaatctttatttatcagcttcacaatttttttaacagctcaccaagtatctgggattcaagatttcgaacagaattttcaatagattctcggagaagtactgcttttttctgaacttgcctgggagtttacatttgtccttttctgaactttcaagtgatcttgtgatgagttctgagactgcttctttagtgcacattttaatcctttcctgcatccagacgttaattcgactattcaaattgaatcatttatttgcaactcttttgaactttgattatttgctaacttagcaactagtaacaggagcatatgcttgttgattgaaactattcacaggagaatatgcttattgattaaaactatgtgattgtaatgttcaataggtgaatctgcactcaagggcttttatttcatgatattccgcactaaatctgcattgctactttaggtgtttatttattttttccccatcttgaacaggtaccaattaccactggca

SEQ ID NO: 83726 - DNA, 942 bp, Citrus sinensis
  Intron number 1 from transcript orange1.1g004866m (locus o range1.1g004839m.g) derived from phytozome v7.0 (chr-ID sc affold00006; pos 2141314 to 2142255 reverse strand)
gagctttccactcctcccctccgctggggcccctggtattattaatacgatcacatttctctcatatctcctttcgcgttcatctttttctttccgcagatgctactaaatgaacacgaattaagccgctgtttggggaaaatgtgtggaaactttggtgcctgttagtgctcgtgcgaatttcttaaagaatataacaaaattaaaatttgttccaattataaattaggatgcatttggagtgtctttaacagaaagcactttcgctcaaaagtgctttgtgtgaaggttcttttatcgttaaagagtgtggaaaatcacatattaacactatatggtaagtacaaaagctcttatgtcactgccgaaaacgctcttaaaacaatttattagcctgtttgatgctttattagttggtgctaaatgaatgtcacgtgtttcatcaattgtttgatgattagtttcacatgcagtttggatgcactagaaggaatgcaaagaaaaatataaatcttatgtttctttggttttctagaagcatgaatatctgacaactaaagctcatatcaagctaaccatgtaattttggtagtttgttctggttactaattatttaaattatgataattttgtgagattctttcagccatctggtttctaagaaaaacagaattttgaatgtattaattgaagtaggtaatttttggaaatcaagggactttagcagaggaaacagtattagaaagttactatgggtacattttccttccttcttctaggaagggttcactttttataatcacaaatcatccagatggatcattatttattctgtttcaggatctgaatattgtttcagaatctgaatggtccttttactatttgaaggtgatcttcatcaccgcaggttgtattatcggcgtgttgaagaaggaaagcagt

SEQ ID NO: 83727 - DNA, 182 bp, Citrus sinensis
  Intron number 1 from transcript orange1.1g034959m (locus o range1.1g034959m.g) derived from phytozome v7.0 (chr-ID sc affold00006; pos 721053 to 721234 reverse strand)
gaatcagcctccagttggtgctccccctcctcaaggttacctgtttctttctttttggctaataaagaaaagaagctgttaagatctcgtggttattcaattaaagctaataataacataagttttgaatttattaattaattgtagggtatccacccaaggacgcataccctccaccaggg

SEQ ID NO: 83728 - DNA, 547 bp, Citrus sinensis
  Intron number 1 from transcript orange1.1g010525m (locus o range1.1g009593m.g) derived from phytozome v7.0 (chr-ID sc affold00487; pos 87018 to 87564)
actttggctggtaagaatgtgtagaggtttgcagttttttcactgaaaaaataaacaaattagctttacattacagacgagaaaaattcgagctggattttcacaattttagaatttttgttgagttataccttgtttggagtgcttcttcataatcacaagcgctttgtgataagcagaacctgtttttttttttgggtaaatttaattaacttaacttaaaagtgcttttatataaaatacttttgtttgaaaatgctttctatgaagtcaccattagtacaacttaatccatgaaaaatgcaaacttttcactgactattattcaagtcaaacttaggtcaaacaccagtatgtgagtgttggaatatttatttgtatatatttacagtcttagatatatttccattgagtcatgctttgttttgttttccgatttttaggttacattacacatggattgatatagggacaccaaatgtttcttttcttgttgcattggatgctggcagtgatctgctttggattccgtgtgattgtgtacgat

SEQ ID NO: 83729 - DNA, 327 bp, Citrus sinensis
  Intron number 2 from transcript orange1.1g033184m (locus o range1.1g033184m.g) derived from phytozome v7.0 (chr-ID sc affold04492; pos 5250 to 5576 reverse strand)
ttttcaacaaggtaagattcccttttcatatttttagatagtgagttcagcaatacaatttattatgcttgtgagcacatgcgaagataccggagagcaaaaaacttattctagaattgaggaggaatattgtcttacctctttgattatcgaaatggtatagagaatggattatagacagtcgttttgattagtgttggtgagaagattattatttgctggagtagaaactgtttaatatgattcttaggcgataatagaactataatcctcttcttgattttagcaagaaacaccaagcctctgataactgcctggtttttgcag

SEQ ID NO: 83730 - DNA, 573 bp, Citrus sinensis
  Intron number 1 from transcript orange1.1g033184m (locus o range1.1g033184m.g) derived from phytozome v7.0 (chr-ID sc affold04492; pos 5820 to 6392 reverse strand)
actcagggggcattggtgcagctctatacagagaggtgatttcaatatctaatttgcattcacgtggcatgccttttcttttgtctatgttctactttccattttaattttatcattcttatctgctaggttggtggtaaactggtgatatatgaagacgtgtactagttcttgatctttttaattttcttgttagattatgctttgaaagttattgtttctttagtctgcaaaagaattgtcagaattttttaagattatgtaaatgtttacaacattaattagatgttgaggacatgtgagtgtgacattatcatatttccaaagtagactattttttagcttctagctgcttgatttgtttgtcatcctcaaagtttggataacattgatattttatatatagtgttatggtccctgaaattggttggatgttttccctttttcttttgaagaacaattcttcattattcattttatgtaattttttcagaacccagtgtgatgattgtggaaggaatttgattcccaatgtcttctttcattgatatgcttgtttttggtgaaaccagg

SEQ ID NO: 83731 - DNA, 760 bp, Citrus sinensis
  Intron number 1 from transcript orange1.1g045994m (locus o range1.1g045994m.g) derived from phytozome v7.0 (chr-ID sc affold00006; pos 58155 to 58914)
ataaacgagaacaatttaacaagattgagcaggtttgtttcaagtggaaattattgatgcccatacgggataaactgaaagatattttgctttgtttgatgccttgtattcgtatatattctgctgtaaatttctatttcaagttcttggttggcctttatcatttcatagaaagtgcatcgtgtgattcaaataaacatctaggttgactgtgcttacccttacaaaacttaatgcattttttattatgtgtggaagacagtcatagcattagcatgaaatcatatttgatctttttcatcttaagccgttcttatcgtcctactaacaatcatttatacattgaaccatgatggggttggccacctgaatcatgctttccttgtctagaattgtacgatcttcagttgctgtcatctctccatttttcttttttccttcccatttggtgattctaatattaatccgaccccattcatgctgaaaaccaatattgcacttatttagattatgtattttctttttcttttcttccagagtgaaaaggatcacatttaacagaattttccaaaaccttataatctttacttatgccactttgttccattaaaagttggctgctgagtaagcgatactttcttttgagtttaagtaaggaggcttctgttcatgatccttgacttgtttaggagccttttgtaaattactattgaaatgttccgcaggaactggaaaaactatctcataaattttcagagaa

SEQ ID NO: 83732 - DNA, 617 bp, Citrus sinensis
  Intron number 1 from transcript orange1.1g010482m (locus o range1.1g009516m.g) derived from phytozome v7.0 (chr-ID sc affold00052; pos 267573 to 268189 reverse strand)
cagagctacactcctgctttctctcgccaggcaagcacttgacttggcctttttttttttttttcaaaattatatactaaccgatcagccttgctactctttttgtatctgagaaagtttgttatgcgttctgggtactgttctatccatatgaatctccaaaacttagttttattgaaatatttggttaatctgagggtgatcattttgggatagtgtttactcagctgcttgatttcgtgtttttttttttcataattgagatgatgttgtgtatgatcgattgactgaatgcagctatgacattacatgtttttctttcgtagagctgtcttgggttgttatgaattttccagtctctttgaatcaaaggtcttttgttctcttaatgtcatttaagatgtaatatatgttgtttaacggtgctagcttttcagtttctttagtgttccaattctgcactttgggaaatttttttcaatgtatagctgaaaggaaaggtttgtgaaatttataaacaagggaattgtatgccagatgagtgtggggatgaagagcgttactgaccggcttcgtgattctggccttttacggactcagggtcttattggagggaa

SEQ ID NO: 83733 - DNA, 847 bp, Citrus sinensis
  Intron number 2 from transcript orange1.1g023601m (locus o range1.1g023601m.g) derived from phytozome v7.0 (chr-ID sc affold00006; pos 1269141 to 1269987)
tactgcgattcggttaacggaggtcttatacacaggtatattttttcctatttatattttggacttgtatccttctcaggcgttatctcttaaaactaaagaaagcattagtttggctaattttattcccatccaatacatatgtatatggattattattctaatactattttcaatttggtacattccacgtcatttattaaaatatcacgatttttaaaatatctgccacctgaacttcctatcttcataattatatattggtttttaatgattattgattgattagaactgctctggttcctttttgatacttggaacttggaagtctaatggatactgttgtttggcaaagcaaactaaggttgaatttagaccaatgggtcaattttaaattgattattgtctgatccgcaaaacttctagattaattgaaactttcatttatttatgtacctttttgtttatttctaaagatagaaatgaaaccacccctctcccagcgatgtaaggagattcaaagtccaaacgccttgtactgcccctcagtggtcttacaagttaaaccaagtagcacccacaacaactaattgtgttgatacttgtttaccccttgaaatttatattaacaagaaaaatttaatggtaaatatatgaaagactgtatgtattaccctgatgtcttctcttccaggccttcaagctttcatacgagacgaaagtttccaggctccctttctgtttaggttttttggatgatgacttatgaattatgacatatatagtaaactgcttattaccattgttgatagttacaatccattggaaagaagggagtcttgcaagg

SEQ ID NO: 83734 - DNA, 513 bp, Citrus sinensis
  Intron number 1 from transcript orange1.1g001970m (locus o range1.1g001970m.g) derived from phytozome v7.0 (chr-ID sc affold00030; pos 178436 to 178948)
gtcacctccgaaccctcgctccctggaaacaagaggtactgttttgtttcctcagaaacctctagaaaagctgaaacgataatcataatttttaactccaatgcttcctcttatgttttgtacttttgttagcttctaataaccaatatgtgccaatttaaagaaacacttgaaagagccttacaaattttttcaggcttagctctctggaggtttttagctcagaaaataaataatgctttttatgcactgaattgaataacaaggagagtatgtttaattatgtttttggtgaattttgaatcatttttgcatattgaaatgtaatatgaattcattattacgcaaattttgcttgttcttgcaagtttctatgtggtgttatcacacttgttgaaatttgtaaaattacatcgaacctaatcaacctactgaactattagctacctatgactttatcctgaatatttttgttatttattttagaaattttgattcttcttcaggttacag

SEQ ID NO: 83735 - DNA, 608 bp, Citrus sinensis
  Intron number 3 from transcript orange1.1g001970m (locus o range1.1g001970m.g) derived from phytozome v7.0 (chr-ID sc affold00030; pos 179253 to 179860)
agaaagctgtatgtttaaccatatactctgacccttctatagtatatgtgtacttttagacatttgacttactggagatttgcttgatgttcttgaattttcttatgctgtctttggggttatggagctcagccctaacattggaattattggtatccttcttctgaaaaattagcgtctgacacaactatttctaattgattccaattcctaagctattattccaactgttgcttttgttttactaatctttatgaataattcatttccgtattgtcgatttattcttttttatctgatacttattgttgcagtaatgcaaaagtatggtgtatttttagttatctggttcttattgttgcagtaatgaaaaagtatgatgttcagagaatgtttacttgaaaatacattaaaaagtcttattcttaggcagttgcttttggaagataattatagttgtgtgtaacgtttcttcatgaaaattcatgaaattttgtaatgttcttagctaacttgtcttaaccgtataaatatgatttaagatctaaaattcatgttgcttttgccttttaggaatttgaaggtaaatccttcgggacatctttgca

SEQ ID NO: 83736 - DNA, 387 bp, Citrus sinensis
  Intron number 1 from transcript orange1.1g028788m (locus o range1.1g028788m.g) derived from phytozome v7.0 (chr-ID sc affold00013; pos 1383830 to 1384216)
aaaatcgcccaatcgggacctgcgttcaagttcaggtactgcttctgcaatttaattcattcattttcttttagcttaccttgtttctaattgcactgcatattttgatttttatcagtatatgtgaaattttacaactatattcgatgcgccgtgaatattaatctactgcatataattcttgttagtttctttgctacttttgggtaatttaagatggttttggtttaatatttaattgaaattttaatttcctctcttattatatgttccggagattttttacctgtttacaactcttgaaacgtctcttcgtgaagcaatatcttatgaacatgaatgacgccatactttcggtttagagagtgcagccactgctcgacaatc

SEQ ID NO: 83737 - DNA, 588 bp, Citrus sinensis
  Intron number 1 from transcript orange1.1g027098m (locus o range1.1g022918m.g) derived from phytozome v7.0 (chr-ID sc affold00295; pos 141235 to 141822 reverse strand)
actctgtcgaaggtaacctaaatttcagtttttccgttttcattcaaacagaattttaaggtttagcaaacgggttctgtgtctatttcaatttagtctgttcaatcatcatatcttgattttgttcctttgcagaacttgtttcctctcatgttcttttctttgagtttccaagattgtgatcttgttcattaagttttggtgcttgcaatgaaatagtcgtctgtcaattagctaattttgctcttttgtgttgtcttgcttgagtttatgtgaactatatatctaaaaaaagggataaaagcaaatttggttgttattgtcagcctgcaggttgaactaaaactcaagtttcttttttctttatcccgttttctcttgttgacatccatttctgactttcttttctctagatttatctaagatagaaactaaaataaatacagtgaaaagttttgaattggaaatgtttagtttcaacttaactagttggatattatggtgcttgtctttctctctctctctctcttttaaatatatatgaatttgactttgagttgtatctgataggttctcttaaatattggt

SEQ ID NO: 83738 - DNA, 836 bp, Citrus sinensis
  Intron number 1 from transcript orange1.1g032321m (locus o range1.1g032324m.g) derived from phytozome v7.0 (chr-ID sc affold00037; pos 478658 to 479493 reverse strand)
ctgactctatactcttggtgagttctaaattttgcttgtttcttcttcttactttttaaacaactctgcttcacttagtttcctcaatttacggaaattttgttcaatttgctgcttgatttcctctttattattgtttgagtatgcctttgctatgtgtgttaactgcatggtagttatcataatttcttggttactatttatttaattgtgtttatgttggttaattatattccttgattgatattagattaagatgatattccttgatattaaataatagttaattggaagatcaaacacgcaaattaatttatgattcattcatgcatcctaaatattgattttcactagggacccacaaaaatcatttcttttatctgggtttgttcccccatcaaacacacaaaaagacaccattatagtcctaagttcatttatatatttggtgtttgtgctttagtcgattaataaagtaatgaatggttagccatttttaaattcattggagggtctagattgtgtagacatacgaacccaatacatcacttgtttttaatattaagtaggtgaacgtgactttcactgaaagatggaaaatcttgtctatttgtgcgctcagaattagttcagtatagtgatattgtttcttaattatgcaaatgtgtattttgtattgtgttttgcgtttcatttctgaccaaaacagtggatgtttgttttatttatgcaaatattagcaatattatgatatttatttgaaagatgtcttgtatggctataaaatgtttgattattttaatctataatgataatggtgttttgtttcaccttag

SEQ ID NO: 83739 - DNA, 594 bp, Citrus sinensis
  Intron number 1 from transcript orange1.1g012295m (locus o range1.1g012295m.g) derived from phytozome v7.0 (chr-ID sc affold00013; pos 2007447 to 2008040 reverse strand)
agtccggaaagccttttgaaagaactggtaattttatctttctttttttcctctctggtgctttgtacgtttggtttctatttcatgctttttcctttaataaaaaaattcattaaattttcagcctaagcatgagggaatatttctgcttatatatcttccttttatctttgtaatagaagacaaggattattatatatagcgttgaaactatctggcttttgggcccttttgatactcttagcatcaggacattttacatgtcaaagctagtggaaaaattgaacccagcatccgaatttaggtgatacatgtctttctgcaatactcatatactgttaaagttctgataagccaaaataatttactcttgcatgtgattggctcaagagacaagtaattgcttttcctttaattccggaaagtgtctttaatatgtaactagtgcacagtgaatgttcaattttataaaggattcattttatgacgcacttagaattaatttcagtagtcttatgaaattcgcataccaacagttatgataattttataatattctattaaagagtaatttgttttctcgttagggaccat

SEQ ID NO: 83740 - DNA, 1023 bp, Citrus sinensis
  Intron number 1 from transcript orange1.1g019157m (locus o range1.1g019157m.g) derived from phytozome v7.0 (chr-ID sc affold00103; pos 384373 to 385395 reverse strand)
aatttgtgggacattcaggaggacgttggcctcaggtgagggtttattttgtcctagattttttgctgatttactttgtataattatttatgtgtagaaatttctaactatggattcttttggatggatttgattttataccgtgatcattgataaacagattctgaacatggtacatttaatttgtttttatgaatgaggatgttaggtcttaaaacggcttgactgaactgcctcctgaacaaatgttcttttgcatatgtgtattagctagagaatgtattactagtaaatgcgacaaatttctgttgcactcttgggtggtaaatggattatgggagatcatttgaaccaactttggtgcctgtagaagtgaggtgatcagtatgcttggagttgactaacaagtaaaaacaacttgagtcagataaattctgaaggattagacaaaagaaaagcatttaaatttagatgaatatgattatattttctcatatgatcttttgtttcgtgccttgcttgccagattttatttgcacttttcactcatatccctgcatgagtgagttgattcataaataacctgagttctcatccaaagaatgctatctttactgaaaactagatcagaaaatctaccaattgatgcatgtcttgtctattttcaaaaggggtactcatagtctttaggttttccttgaaagtgttatcattgaagtccactcaagtcaatcattcttagattctactgcttagattagttgcttaaattattttgaatgaaatagagaagcatgtactcagcagtatgcggtcaaaggcatacgttgcttcatatgatggtaaaaaatgtttgaacaccacttgaaatattccacattcttttccaataatttggcagattattatcaaatcactccgaagacttgctctcttttattgtcacttcaatatttcatgcatcttttgagtttagaaattaactaagctcctattaccgctgatttcaggtagactctgctg

SEQ ID NO: 83741 - DNA, 292 bp, Citrus sinensis
  Intron number 1 from transcript orange1.1g036908m (locus o range1.1g036908m.g) derived from phytozome v7.0 (chr-ID sc affold00020; pos 24998 to 25289 reverse strand)
tggtatccaccgactttgttggtgacagtaggtaagtaattgatactgttagaaatgattctcaagatatgtaccttttgttttcttatggtttgttggagacactgaatgactcatctatggggtaagagactcagatgggattttatcgcctcttttccatgggcctacatttggacaataaatatgcataagcttatatagttatatttaccatttttgcaactgtcgttgaagatgaccaattgaattaatttgctatctgtttgattttgcaggtcaagtatctttg

SEQ ID NO: 83742 - DNA, 575 bp, Citrus sinensis
  Intron number 3 from transcript orange1.1g033465m (locus o range1.1g033465m.g) derived from phytozome v7.0 (chr-ID sc affold00015; pos 1477287 to 1477861)
ttgttgttcaacctccttctacagaaaaaggtaaaatatctttattttggaaaaataggggcaacgaatgttgtctgataatccaggcacatattttgctcctcctcctctcatgctgttttgggttaggaacactggaaccatgtacgaagttgacagaatattatatatcaagattaatgcgattcctttcttcattgttactttttttttttaagtttttggggaaaaaaattgcggagaaatgcgtaatcaatatttcgcctttgtttcacgtttgaggtttccaaactctttatttcaaaatattttttattttttaacaaaatatttttattttttaacaaaatatttttattttttaagttacataaaattccatccttgattacctctcaagtggaaaaggcaccaactacagccaaccactcagatatgattacctaataccttcagcattttccccaactggcaaaatttatttcgttatgtttcacatgctttgtgttaaagtgtttactgtttctgtttgtaatgtagcagaaaagaaagcagctagtcaaccaaagcagaac

SEQ ID NO: 83743 - DNA, 532 bp, Citrus sinensis
  Intron number 1 from transcript orange1.1g004472m (locus o range1.1g004476m.g) derived from phytozome v7.0 (chr-ID sc affold00043; pos 692878 to 693409)
caaaattgcccgaataaccgctgcttctagttaaggttcttttcgccaaccaagcatctcctctttaacatcacttattggtgtattcattcatttatttatatttgagtggcaatttcccttcgagaattgtataatgcactgacaaaataatttcgtttgggtaaaattgaattatcgagaaattaggttttcggttatcaaaatttaaaaatttttgattgctacgaggtttagggttcatctgtgaagtgaaatttgttaaggcttagtaggttgaaaactgaaaagttttaaacttagcaaatagaaactagcttttagtttttgacaagttagtggttttactgataagtgattggattctgcttcaggtcattaaccctagaactgatttttattcattatccacagttactgattttattatgaattagccgtaaagctttttttttttcgaattaaaatgtaataacgctatacgcttgaggtccgttttcttaatcttatagtcttaaattttgtagacaat

SEQ ID NO: 83744 - DNA, 157 bp, Citrus sinensis
  Intron number 3 from transcript orange1.1g030289m (locus o range1.1g030289m.g) derived from phytozome v7.0 (chr-ID sc affold00006; pos 1273068 to 1273224)
taggagggcaggataaggtatgtttttgtttcagcgtgtccataaaagaagtgaaattaattgtggactagaagttgaagagaaaatcaaattgcgttttttgggttctattttgattgcagataagaccattgtggcgacactactttcaaaacac

SEQ ID NO: 83745 - DNA, 501 bp, Citrus sinensis
  Intron number 1 from transcript orange1.1g008122m (locus o range1.1g008122m.g) derived from phytozome v7.0 (chr-ID sc affold00020; pos 1379637 to 1380137 reverse strand)
aagaagaaagtccacgacatgtaagttttagtacttttcttgatgatcctctgggttaaaattgctaaatttcatttatttatttattttatttctttgcattttagtttgattgtaaatgcttgtgctcttgtgtttgttttgatcatctttgtttaggaatgaggaatataatgtgactagtgaatcctgtgtttgatataaatggataaattagtttgtaggactagaattcatatctcgaccctctgtttagttgctgtcgagtttaggaaagcacttaaaagaaactatactaggtagactattggttttttgtcactgaaatgtagctacatattcacttcgtgaaggttactatagctacttttgatccgtaagaattttctttttttagtttccctaacataatgcactttccaacaggattccatgtcatttgtttagaatcgagagctaataaatcactttatttgttttactttctttgcaggttctacc

SEQ ID NO: 83746 - DNA, 679 bp, Citrus sinensis
  Intron number 2 from transcript orange1.1g046110m (locus o range1.1g046110m.g) derived from phytozome v7.0 (chr-ID sc affold00464; pos 127142 to 127820 reverse strand)
ccgggaaggttgcagtccctgctcaggctcaggaagtaagtttaggtttatgtcttatttaatttgatctttcaattacaatgatcttcgtgcttataagaataatatgactatccttattggcttgctatcaacataaatattgttggattgattatgagcttgtttggtgtttttttcagcacatttccatatattttcaccatgtgtattttttcctaggcagggcatttcataatttgtctatagctctagaagttttgaaacaagtaataatacagtagagctgtttctgatggtcatcatcattttttccccttatagattcatacatgcagcaaagaattatatttgtttctcaatccatcttcagactcctatgtttgtggatgctcgcttttacacatctgcctaaatactcgcacaaacccacagataattatgcttgtgtcattacctttttcagatgggtgcacataaatatttttgtactttgtgtttacatattgaatacaagtaaatagattttttcagtctatttcaattattactttatctctttttgccagcaaaacttgctcacataattgctctctgctgtgcttctaaagttgatattctgtcaatttttttgcaatcatttttctcagaccatgttttaaatatatgtgacaggtcc

SEQ ID NO: 83747 - DNA, 465 bp, Citrus sinensis
  Intron number 1 from transcript orange1.1g046110m (locus o range1.1g046110m.g) derived from phytozome v7.0 (chr-ID sc affold00464; pos 127860 to 128324 reverse strand)
tgggtaagcatacagtgcaaacaaatatgaaatgctagggatatataattaaaagaagactaaaactgaaagactgtgtttgttagtttgttttgtgtgttaatttgtttcttcaccttctgcaatgaatctccatgcatttgaagttagtttctttctttcttttttcttttcttttttttcttttgtgtgtgtgtttgtttgtttgtttgcttgcttgcttgctttagggttcttcctaagagaagcatcaaagtaatagaggactgaagttgagagggctttatatatatccacatccatccattattgcttcttttctgatcttaggtacatgaggtttgcttttcttataggatgattatctatggtcagaaaaagactatacattttgtaatattagattctacactgcatgaacaattaattatttgttctcttttagaaaaatatccaactgggaca

SEQ ID NO: 83748 - DNA, 884 bp, Citrus sinensis
  Intron number 3 from transcript orange1.1g005132m (locus o range1.1g003259m.g) derived from phytozome v7.0 (chr-ID sc affold00090; pos 233552 to 234435 reverse strand)
tacctccaccttttgctcaaggtctttcttcttgcctgtatttttatgtttttgtgacacaaatggtcataaactgattcttttctatttggttaacatattcagctggcaattttctttaatttacaaatgctgaattggctttctagcatttctcaaagctttctaatttcttgctgctcatttttggcctcccaaccagatcatgtttaggatatattcgagttcaatctgattagtgacatgtcaatgttagttacaggtgtattggatccatttgatttggatttcttcaatagctttagatccattgtcatgttctagaattacgtagaccaggcctattaactctcataggtattctgtgtccaaatgttgatttatgggtttaaatttttattggctccgttggttaactaaattaattaccctcctaaggcactgaccccattggttttctttgatttttataactggattacagttgctttcttcctttttagaagatactaaatagatggatctagaatatgattgattaattgttagcattccttaggctgaaaaagtaaaagagaagtgttagcattcattttgtgactacttggaagggaattgagaacacttctctttgtttctccatatcagtccttttctggatcatgtttacaagaaatgtttaatcatggaagaagtttggatccttaccatctccgatattttcatccatttttctatgttttcgtctgaaattttcatgtagttgaacacttcatatgaaaacacaaaatcattttacattttattttttcttattaaattcttttaacagaatcctcttttatgcagaaacggctaaagcaccgaaaaccaaggcttatagt

SEQ ID NO: 83749 - DNA, 638 bp, Citrus sinensis
  Intron number 1 from transcript orange1.1g005859m (locus o range1.1g005859m.g) derived from phytozome v7.0 (chr-ID sc affold00001; pos 1179048 to 1179685)
actaatcttcaaggttggttgctactattggttcttggtttttccgcagaagagtataagcttttttttttctttttttctttttatccgtatccaaattattacatttgaattctattacacgtgtgtttttctggattggcctttaagcccaaaaatttattacatatttttacttcggttaactcaatcactgtagattgaactgtgtaaaataaaaagctctgattttaattttttaaatctaggctttattcaatgatctacatttatcgttattcttactgattccctgtggttacttatacatgtggggcatgtaatgatggtcatttttttagctcatcagtaggttgttaagtaaaaagcttaaatctttaacgttgagttctttcaaatgtttttgggttgtgataattacttggataaatgaaattaaattgaagcttgggtgataattaatgattcttgaattcaacgttacaggtttatttccagactttaggttcacttagttgactaatctagcttgaaccttgagcaacattatcagatttcatgcttattgttggaagtacattgtgattttcatcaatggagctttaacagtggatctttttttatacagttctacagct

SEQ ID NO: 83750 - DNA, 601 bp, Citrus sinensis
  Intron number 2 from transcript orange1.1g033847m (locus o range1.1g033847m.g) derived from phytozome v7.0 (chr-ID sc affold00423; pos 69566 to 70166)
atacttttcttcttaacagtgtgcatcatcacaaggcatgactctctcttatccatcgattttattatataatttgttttcttctttgcatgataaaggcttttcatattttcaacttaaatttgatttgtacgatctctcataccatacataaacagattcttttcaccaagagttgcatttagtattgatcaactcatactactcaacattgactagttgaatacctacttacaaaattctgttttcgccatgctagaggaatattgtatggtttatagctcaatcgcattacaatagcaagtattgctgatgggtaaaataataatggttaaggaattataatggtatatgcctgtgaaatttatttttcttaaagtcttgtatgaatgaaaactaacccactaacaatcttggtttgagcagaatttgaatgctacctagtggattttgcttgtctagtttgtcttgttgtctacaagggtagttaaatgggggtaatggaagatcttatactgcaatgaactattccatcgtgtgttatactgatactgtgacgaatgcaggacttattgttctcgtacaacattgctgtagatag

SEQ ID NO: 83751 - DNA, 551 bp, Citrus sinensis
  Intron number 2 from transcript orange1.1g003062m (locus o range1.1g003062m.g) derived from phytozome v7.0 (chr-ID sc affold00367; pos 22283 to 22833 reverse strand)
ttgaagaggtaatgcctttcgtttctcatgacatgcagatatttagtacagccgtggaatatttttacactgcatttttatgattttcatttgtttaaaattattcaaattgttaaattttctgtgtgattgatagagtattttattccattttttgatagtggggattctattacacaatctaggctagagaactatcttgttagtggggacacaatgagaaaggaagctcttagccatgcatcgcttccctgctcccctcttaataatcatatgtatggtgaggatttttatcacgttgaaagctcaggagcaattgcaactcttagttccagcgttcatttgatacacttttactgctcacggctcccttctgatgggtataccattttggactcattcttgcatattacgctaagctcttcattatgtatttattctttaagacttttgtactgttttcgtactatgggttaatgcagtgttgcatacttatgttgattttattttctatagatattttaagcctactccaaagtttgatataaaca

SEQ ID NO: 83752 - DNA, 358 bp, Citrus sinensis
  Intron number 1 from transcript orange1.1g036741m (locus o range1.1g036741m.g) derived from phytozome v7.0 (chr-ID sc affold00015; pos 397030 to 397387)
ccattgagcaagaggtgggtgagattggatgttgttttggttgtttttattcgctgtttgattaatcaagtgatgttatattgttctagtatgattgagcttttcagttgaagttttcttttctctctagctaggcctaggtaatgataagtaatttcagtttaatttactataatagtgagaaagtagaaccatggatattttttaacctttgagaatgaggatctgaggaaacaaattttaagcttcacttcgtccaaccttccccttctcttgtcttttgaattgagcattaatctattgctattgctgtaattgttcaggtcagaatccacaagtttttggagaaaacgaaaaa

SEQ ID NO: 83753 - DNA, 579 bp, Citrus sinensis; identical to SEQ ID NO: 82783
  Intron number 2 from transcript orange1.1g015460m (locus o range1.1g015397m.g) derived from phytozome v7.0 (chr-ID sc affold00008; pos 1289681 to 1290259 reverse strand)

SEQ ID NO: 83754 - DNA, 490 bp, Citrus sinensis
  Intron number 2 from transcript orange1.1g001266m (locus o range1.1g001266m.g) derived from phytozome v7.0 (chr-ID sc affold00042; pos 556785 to 557274 reverse strand)
actgtggcatttcgtttgctggtgcgctatcattcgtttaaatctatttgtttggttggtttaacaacttgctagtgaaaacatgataggtggtgtttccggtgcaattgtaaagtgctttttcagtaaaagcattttttgtagatagattttgtgcacttttaatttaaatcctattaattgcttcttcaaaatgcaatgagagtgctttcttgccatttcaaaaagtatccattgagtacttaagcaatcacgaacattctttttctaattctgaagaaacaattttgtctgtttccaacaaacactgtaaattttctattaatcttatagacaggattagaatgtttttgattcaagatcaaggaaatcagtcaatttgatgttgacttggttgaattgagattgtactatagcataaactacaatttttttccactaaataatcaaactttggtaaatgttataggtgaagagcacccgagggaaa

SEQ ID NO: 83755 - DNA, 487 bp, Citrus sinensis
  Intron number 2 from transcript orange1.1g034147m (locus o range1.1g031610m.g) derived from phytozome v7.0 (chr-ID sc affold00059; pos 164517 to 165003 reverse strand)
tgtatcatattcttccttttcttcttttcaatttctgcgtttattctttttgttgatctcttctgttttatgtatgctgctgcttatgtaggttgtgatttatatgtatacaaaagactcatcaaatgcatcttcttctgaaagcacttgcgctattttccattttcacccaaaacggtcttgcagtatttttatgttccaacaagtgatgattgaaatgtttcaaaataggcattcaatgctggatctcaacagttctaaaaacactcacaaataacaaataaaatgctctcttacatgtttgatgtgaatacatcaaaattttggacggcctcagttccaatttttaagagtctgacgtctggttataggcaaaaagtgcaatcaaactattgtctcatattcagcatgctttttttggtccgatcaagtaactgttcgagggaatgcaggagatcttctctagttggtctcacaaaactgacca

SEQ ID NO: 83756 - DNA, 863 bp, Citrus sinensis
  Intron number 2 from transcript orange1.1g026603m (locus o range1.1g026603m.g) derived from phytozome v7.0 (chr-ID sc affold00013; pos 289537 to 290399)
accctcctgcttcttcgggtacctttttttttaaatttttttatttgtgaagtttgtttgccccgttctgtttggttttcgagaaaatgtggacaattagaagaacagaaggcgcaaatttcaattttggaattatatttgagttcaattttgagacttctactttgggtttcgttgattgcagtttaattttatacccataaaagtaaattgtagggttagggtttttttattatttttttattatctctgttttatttatttttgtatgttgatcaacatttttgggaattgattatcacagattgatcatctgtaccaaagatctttcttttttttttcttttttttcgtttcccccacttagtacataagcaagttctgttttaagtccagctgaaatattctttacaagattcttctgtgatagtgaattcattgcactgaatatattatctgaattttaatttcaaacaatatttgagtcccaacttgaatcaccatattgcatgctgctcatctcttgaatgatgaatgtaaaatttcttattattttattctaccatccgattgataaatgctacatcagttggcactcaaattgggactttttgtgagtgtgggtcgtttatctggtatgctcttctttggcttaaaattttgtttgctatttcttatgatatcacctgttgcattagcagatcctttttgtgttgtctgtgattgcattttgcttccctttctggattcagaagtttaagctgttaggtctgcttgttcaattgttgttttgttgtgtttgacaagaatgtgtaattttggactgatctaacttttgctcctatttaatttagacaacattcc

SEQ ID NO: 83757 - DNA, 678 bp, Citrus sinensis
  Intron number 1 from transcript orange1.1g023405m (locus o range1.1g021768m.g) derived from phytozome v7.0 (chr-ID sc affold00092; pos 103030 to 103707 reverse strand)
aggtatcattgttcttttgggcgttttatgttaattttttttaatagggagtttaatttgttaagttagtcgtactttagtatcaagggtttattgtactgtacttgtgatgctgcaataaaaattagggttttatttcatattattagtgtaaaattcattgccttcgtcacttagcacagccaagttctgatgtgttttgtgaattggcttaaatgcaaggatttgttttctgactggaattctttttttttttcaataaatatatttgtcttttacaaggcaatggcatttggtttgttcttgatgatcatttacccctataaatgtactctcaactgtgttgcttgtatgcctttagactctcattttcagttttcaagctttcgtgtagaatatcaaattgctttggagaagcatgtgtattctgtaacatgcacggtaaactttaatagtctcaattaattaatttggttggctttgtagtgattatgattccaagaatttgaatgctttcatcgagctattgtaaacttatgcaccccacttaccacccatctccttccaatttcctgttgtgttgggtttgcatcctcttctgaagtaaaccgagataaatctaatacggatgctctgcttgcaggttcttggtgttgaaaggacagcatctcaacagga

SEQ ID NO: 83758 - DNA, 852 bp, Citrus sinensis
  Intron number 2 from transcript orange1.1g037427m (locus o range1.1g037427m.g) derived from phytozome v7.0 (chr-ID sc affold00129; pos 255907 to 256758)
ttaaaggtaattaagcttcatatcttctaaggtctactagacgcaaaaataagcttcatttattagtctgtcgctgtaatcagatatttgtaatgccctactgcttccttgattaactctatttaagtcttggcatatatcacatacgcagaattggattccttgagcaacttaaatgtgttggacatgggcatgaatgaaatcgaagattttagtgttcgtcctaaaggtaattaaatgaaagattcaactacatttggagaacatttaattcatcatttgtgagggaaggctaaaaactcagagccaggaatggttaatttggttgtgttttttgagaataatatgtaaattctaacataaaacagttagtaaaattgctttggtaccagttcgctaaagacgttatgtaatattctcgtgtttgaattcagttctagattttaattaacaatgtttctaaacagattacagtagcttgaggaggttgcatgcccttgttctagatgatgtcacaattagagatggaagcaagttttttcaggcaatgggatcattcccatccctcaagactctttcccttcagttcagtaatttcacaggaactgtgaatagtcaaggtgcggaggttacaaggattaaaataaaagataaagaaaaacacacacactcgcatcctatctaataatataatgtgttttgtcctttagtacattagaatattatttttatttttattttgttatttgattaaaatgagtgaacctcatttagaaaaaggactatatataataaaaaaaaattcttttttcaatagaaacgttggacaatttcaccaacttggaggatttg

SEQ ID NO: 83759 - DNA, 401 bp, Citrus sinensis
  Intron number 1 from transcript orange1.1g040505m (locus o range1.1g040505m.g) derived from phytozome v7.0 (chr-ID sc affold02978; pos 7437 to 7837 reverse strand)
aatttgcacccggatcattcggcactgttgcaagggcaagctttctgtatcctcaacttatccggagatttgcaaaggatatgttttcatttgttaagaatcaactattcaaagagataatcaaactcccataagatgaagctctttcaaaatataatatattgatatgcatgtcataaaattttgccttttttttttgtttccttcatcatttatttctttattcggacagggtttgaagcaacactaatattttgcactaagcattatgcatgtactagttccatgcattcaaattacgtaacagtaatcccccgtgtgcttttcaacacatacagtgttaacattttcttcaaataatttcaggaaagaaacaagcggaaacctctccctccaggccc

SEQ ID NO: 83760 - DNA, 714 bp, Citrus sinensis
  Intron number 3 from transcript orange1.1g033207m (locus o range1.1g033207m.g) derived from phytozome v7.0 (chr-ID sc affold00032; pos 283360 to 284073)
gaggtactatagcttgctctgtttttcattttttattttcattacatcataaaatcacaaattaacaattacattaattgagtcattgtattataagtatgatttttatctagtaaatttcacatattgagatcaagtgattatgaatctaatgcattggagtagagttctttttctttttccttttttttaatggtgatggcaatttgtgtgaccgaaaattggaaagcacaaatcaaatgtgatgaatgtttttcatagccgtaaggaaacaagagcacaaggatacgtacttttcttcttcattcttcaaataagaaggctttggcattgaatgaaaataaataaataaataaggctctactgagttactacatttgcagctataaaggaataagctacttgaattttcatgatggtagttccgtttataggaaatttactggattctcaatgatgtgtccgaggctgcaatgcgatgatttggtgtggatatattaactcgtctgtatcttgccaatataactcaaaatatgccctcatttctttgactctaatattggaagtaaagcttacattcaattgctacattgtttaccacatgggtttagtttctgtaattaaaaggtttttctgaatgacgtatcagttatttcttgttcatgtctttattttttatctgcttatattttattgtaggagagccatttgttg

SEQ ID NO: 83761 - DNA, 788 bp, Citrus sinensis
  Intron number 2 from transcript orange1.1g001976m (locus o range1.1g001975m.g) derived from phytozome v7.0 (chr-ID sc affold00187; pos 128348 to 129135 reverse strand)
tggtgaattctttttgtttttgtttttgttgaaaggtgagattgctgttctctttgggttacataattttaaggtcaaacttgcggttggttctgattttgattttttttcctttgggggatcaagcgtgagttgaatgaagaaaattttgtttttttatattttttctttaaagcgcgatcgttttgtcatttttgtgaattttgcggtggaaatgctgaattttgatggaatcttgaatgttaagattgattttgttgtgatttagctcaactaagctctgaaggtgttgtgttaggtttaattattattatttttttaattttggagaaaaaatgttttgaggcattttttaataatattcattttttcaattttcattttctcacgaaccaaacaaggcatttaggtttggttgttggtaggtaagcttgtggatttcatttttatggtattatccttttcatttcactatctctcaaattttaaggaaaaagaagaaaaatctccgtttaattttttaatgttaaatatttaatctcttagaaagacatatacaaagtgaacgacttttctctgagtttttttttaaaggagtaattttttcctttttaattggatagtctgatatgagaatttaagtggtagaaaattatcatatctgaagtaaaaggaatttgaaaattttgcaggaaaaaaagatcatgaagtagcagactagctagtgatagaatttgagcttttgtctctgtttttggttttctatccagtcatcaaactgctgcgct

SEQ ID NO: 83762 - DNA, 743 bp, Citrus sinensis
  Intron number 1 from transcript orange1.1g048600m (locus o range1.1g048600m.g) derived from phytozome v7.0 (chr-ID sc affold00043; pos 125187 to 125929 reverse strand)
aagaagagggcagtacggctccctttccagagagggtaagcatttttataaattaaaattaaaaattatttgggttggtttataatttaaacttttgtatttttggtaaagaaaatttcagctgggttggtgttggatctgtgcaattttggtttatgctgttgatcaatatgatttaatgatgttatctgaaaatttctccttgaaattgtaaatttgtgtttttctggtggtgtattttgatttatttgtgtcgtttgaagtgtttcctgcttagaatgtgctatggttgtgattgaaaagaagacctgtttcttcatctgaatgattttggcggatttgaagcacatgaggttttttttatttctgccaattattataaattttagctttaagttatgcatttattctattccatttataatgtgtattggaactgtttattgagtttttatgcctttttatggaacgacgttgtacaaaaactttttgttggttcttggctgtgctgatcactgccgtctatcactctttgatattagaataaaattatacttagtagactttgtgattgcatttttatggcaattctagcattttttagatttgagtatcattgtgatttattatcttttcaatattcattgttttgcaataactgtaactttacaatttccatttattgttttcatgtatcactttctgaaggttcaagtaggagggtcacctgtgtacaaaataga

SEQ ID NO: 83763 - DNA, 404 bp, Citrus sinensis
  Intron number 2 from transcript orange1.1g006129m (locus o range1.1g005867m.g) derived from phytozome v7.0 (chr-ID sc affold00001; pos 4188330 to 4188733)
ataagcaccaacctctttatactgctggtttcaaggtaatgagtttcttgcattcttataattttttaaaattattaacgactttctcatctgcttttagttttgcatttgcttctctaatatttcaagatcattttagacttcccttgcctgtccagcaccgctaagctattgtcattagactttcttttagccatcgtaactggcgctttattctccatcgtattaatacttgagttgacattaaagaggtttgcatttttcctttttgtttcaagcagcacatgctccataggatggaatttcttctttcctctaatttgaatttttcaagttagaaatttcttctttcatttttgtttgcatgtacactaaagaactggaactcttgtgttgttatacaa

SEQ ID NO: 83764 - DNA, 1027 bp, Citrus sinensis
  Intron number 1 from transcript orange1.1g007525m (locus o range1.1g007525m.g) derived from phytozome v7.0 (chr-ID sc affold00012; pos 1041940 to 1042966)
ggaggactggtagaaagggaccaatctcgcggtctatacacacccatttcgacattttgctttaatttgccagtttggtacctttttttcagatttttggttcatgatatgtatagctttatatgttatacttatatgtaagtaaattaaaaaggatttagggttcctgttttgactttatctttttgcaatcttttaagtacgtgtgtatatatatgatattgaggaaatgaaaattgtacaaacattttggtggtggcacgaaaattatttgaatattcaaagaagcaaaatgatgctgctggttaacaaacactggcacatgttgttttcagaacttcgactgttttggtgggacgatcatgcatgtcattatttgaatggctagaaggataaatgattcaataagattctgaaaattccaaaatttggtcacaacccaagtttgaaaattttccaaattcattgtcttagattggacttttgcttacagtttcacatttgagagtaaagagtcgctatgacaagttggtagtcaaaaagttttgagtggaaaaactaatagccatttttaataccagcgtactaattggggccaaagtcaatttcacactcagcaactttgcctctcatttgaaggttataaattcagaaattatcttgtttgagaacagcagaatttgacaggaagataaaaacataacaataatctcagctcttataacaaacaagaaaaatgagataattaatgagattacatgccaacactcttcttgatatgtgctacctatagttctaataaaattggcaaactatgtatgtcatttacgtgctttccataatatttctgttagttgcacaccataacctacaaaaagattttgcttttgaaaaaaaaaaaaatgaaacttaattccttaaaccctcttaaaacccaccttatccaaaattgtctaacactctaactggtcaaaaaaaccaaaaatgggtagcaccaaactgttactgagaccaaaccctctccctt

SEQ ID NO: 83765 - DNA, 505 bp, Citrus sinensis
  Intron number 1 from transcript orange1.1g026950m (locus o range1.1g026950m.g) derived from phytozome v7.0 (chr-ID sc affold01166; pos 12948 to 13452 reverse strand)
cttctttcattgcaaagatcaagtgcaaatctctggtaaaaggatctcacactttacaaagagaatcaaaattaatcacgcaaaagtttctcctttccatggtttctcctgtttatttctatttcattgttcccttttttctttgataactccaattaatttataaattatcccaagaatctcatcaacagagagcttttagaggactcgcgatgctttctcaaattaaccatttctttcagttttatttctacttttataatcctttggtgaaaggaaaatagttttctttaactcttgcacttttttgttcgttctttcttcattaatatggtttaaaaaagaaaatactaagattaggatgtatatgcatctactatagctaatttttttaacgtaaattgactcaattaccaagaaaaatttccatgcaaatgctttctcatcctcttttcttgtgcttctaattatgaattttctgctttaatacaaccttttttagggc

SEQ ID NO: 83766 - DNA, 782 bp, Citrus sinensis
  Intron number 1 from transcript orange1.1g048393m (locus o range1.1g048393m.g) derived from phytozome v7.0 (chr-ID sc affold04353; pos 421 to 1202)
agttagagaaagaggtaattaagtgatttttcttcaattcaaatttttctccaccacatgattcgaatcttgtgatgatcataactgtgttgatttttaaataacgtattaaatatgtgaattccttgcaggtaaagatttaattatgttaaagctgatgcatattcagcataataatcaactgaaggtcacgtagagctttgctgattattttttttaaaatcttgaaacacgtgtatattactaattatatataattaattttagatgcataatttattttattgtttttgttattgttattattattatttttaatcgaccaacaatctatagatctaaaaaaaagcaagtctacagcgaaatgagttgagaaatttatttagtgagagcttcataaccagggctcatattttgatcaaatattaaggagataaaaatttcgttttccaaatttattgtcttaatagtaattatttcactgttttattttcactttgtgcttaattctgtttgttgcgggaacaaacatattacgtaaatatttttattcaataaacaataattatgtctgactttgtgaaaaaaatctgcataaagaaattagatcaaattaaatctaaatcaaatgtaccctcgtataagcgggatttaaactaacaaaccttatcccatagaattttactagttgaatcaactgtaaatgataatttttcttttgaccttatttgatatttaagattttacaatttgtagtggaataatttcttacaggtaaccga

SEQ ID NO: 83767 - DNA, 1060 bp, Citrus sinensis
  Intron number 1 from transcript orange1.1g034046m (locus o range1.1g034046m.g) derived from phytozome v7.0 (chr-ID sc affold00008; pos 1294373 to 1295432 reverse strand)
cattttatacgcttttaatcataatttgcttcctggtaagatcgaacttttttttttcgattttttcttaagcacttgttctgaagtttggtagcttatgctcgaattagttcccttaggttgataaaaattgtggattttattgcggctattacttgaattgtttgtgtgtgaacgtttttgtttgttttttttttctgggttggtggaaatgggatctaaatcgaggaaacaaatatagtttattgtgaatgcccttttcattttgatttgttatcaattggtaggtttgctcttgtttttgttgaatgcagttttgactctcgcaacttaacttcattatcctggaaaggatgctaaccatctcgcattaagaagtatctcctcaagcttaacagagaaagttaagcctaacgcttttttatacacgtgtacttgagtgccaccagccgtactagttgatattttttttttgttccgttattttaaaaacaatgtataactagaaaattggataacaccatgcttttttttttcaattataagttattgcaatggaagtgtgcttcaccgggagagggaagcgccatggatgtggttggattacatatggcttggccattaacaatttaacattttatggaaagcctatgtgatgggagttagggttttccattaatcccgtaatctgtccagactgcagggaactttgaaattagaaaaagtaaataaaccctggccaacatttgcaatgatagacctttttttcttaaagacagtctaggaactggttttatctctttctaaaatggttccttaagtcgaaacttcgaagccaaaagtagcccctcctcttcttaggggattgctccatttcttttttgagtatattataaaattgatatcaattattatacttttcctgatctgtgctccaatgcagttcataggagcatcttgttgaagcatcatcatttttcctctttgatgataagattttgaagtgttttcacactttctgacaggttcaacaaatttgactccttactctgcaactctg

SEQ ID NO: 83768 - DNA, 553 bp, Citrus sinensis
  Intron number 1 from transcript orange1.1g046102m (locus o range1.1g046102m.g) derived from phytozome v7.0 (chr-ID sc affold00250; pos 224706 to 225258 reverse strand)
actggtgacgaattggtgatgatgatgatttaaattaatgaatttgggagatgaaaaggagaggaaatggtggcggctgtgaattgatgaatttgggagatgaaaaggaaaggaaatggttggtggccatgagctaaaagcaaactagggtttgtttgtttccttcttttcctttgattttttaattttgtatttatattaaaataaatgtactcgggtctaggttccggacttacgggttcaattgaaccgggaactggaactggatatatctggggttcaaaaaatgtgataacggacccgcatattatttaaatacgatacgggtcaaacccggaccaggttgtccgggtttatgcgggtccagtccgagtacgagttattttgccatgcctagtcgtagctttcaaagttcatgatattctctatttcccacttggttggaatattctattgcaaatgatgctgctttttgtttactctgctttttgtttactctgctttctttttaataaaccatctgggcataaaggagcaaaatttttcacggtag

SEQ ID NO: 83769 - DNA, 681 bp, Citrus sinensis
  Intron number 2 from transcript orange1.1g046695m (locus o range1.1g046695m.g) derived from phytozome v7.0 (chr-ID sc affold00404; pos 40312 to 40992)
caaaaattctaagtggcttgcagagaatcttgaaggcaagcatttatttgagtatgcagttacttcacggtcttattcattactaagtgatttgcaatagattttagttactaagtgatttagagtagattttaatctcttttttcgtaaattgtatttttttatttttgctttactgccctttacatgatttttactgaatgattcctcctataaacaaaactctgtcttgtttagggatatcgatttgttttctatttggggaaatatctgtctaatggatcttatgttttttgtcttatatttgaccggcttaaggatattcattttacattctaatggtggcatcttgaaatttgtaagctggtacacgattggataattttagtcactcctcctccccccccccccccccccacaaaacctttgtatacttgtactggcattgcctaattccaatactcgagctatttggatatgattggatttcccaagctctaaatttgaaattataagagtttagtgctctatcacttgaaccaccaaactgtccaacaattaatcatttgaacgaccaaacgttgaagaattgagagtttcctaacaagagttgactctgtagccatttgaatgaccaaaatgctgaacaggaaactgaccaagcgttttctatcttcagag

SEQ ID NO: 83770 - DNA, 561 bp, Citrus sinensis
  Intron number 1 from transcript orange1.1g038432m (locus o range1.1g038432m.g) derived from phytozome v7.0 (chr-ID sc affold00219; pos 167515 to 168075 reverse strand)
tccgcttttgtaagcactaacctttaatttcccaagttttcttgttatatttatcaaattaaatgttacaaattaattttttttaagttcttttaattaaaatttcaaaacagaagagtagcactttcatccctcttagaatttatttttaccaattagatccttgttaaaattttaatatctaacttcatccgtagcattaaaataatattagaaaaaacttagtgctgaaggaaaaatattaccttttctcttacaaattgattatctgaggctcttaaaaatcaaaattaattattaattatttgttgaaaaaaatcaaatataaccttcaacagtggtttttttaattttttgttttgtgaatattttaacaccaatgatgaaatggtgtgagtcctaggggtaaaaacaatttctttagaaggaccaaaatgtcagtgcactgaaattgagaaattaaagtgcagcgactgcaacacataaagcatctcaaagtgtaacattaatgaatttgtgtctacaggtgacattattctggtgcattgtgctggctgcctc

SEQ ID NO: 83771 - DNA, 533 bp, Citrus sinensis
  Intron number 1 from transcript orange1.1g041166m (locus o range1.1g041166m.g) derived from phytozome v7.0 (chr-ID sc affold09973; pos 92 to 624)
tctaccaagcacaaaaattcagctcctttgcaagggtaacttcattcttctaatattatccaacttttaaagtttcgtgcattttctgtttggttcccgagaaaaccgaaggaaaataattgaagcagtgtaacaacgttcattcttctctattttttatttttgattgcttatttcaaacttactaacgattgagcagttggttgcagagaattcaaaatggacaggtaagcttctcaaaatgaataaaataataacgttaatatataataatcaatcatacaatcatacttgaggattgattaattctctcaacactgtttaattttggttgtgttcagataacagttgatggccgagttgttaatgatcccaacattatcctcaggttccataatcggtgacttttagcagtttatttgatttgctattgtttatgtatgctaagtagagattgttatgtatgttgttttgttgatgtcaaatcgaatattttagtgctggttcagaactagtttatcatagacttcctt

SEQ ID NO: 83772 - DNA, 909 bp, Citrus sinensis
  Intron number 2 from transcript orange1.1g041166m (locus o range1.1g041166m.g) derived from phytozome v7.0 (chr-ID sc affold09973; pos 676 to 1584)
atttggtaaatttgctttggcttgattttgtattcacttgtttgttttcataagttttcagatttgttgaagttggaagggtatttaaattggtctaaagctttgttcggaatgtcatgctcaattctcattatggtttttttagtaccccgattgaagttctgtgtcatattcttggtttgatgtaattttgactttattatagtaaacgtctctaaatgatcctctgccatttaataaaacttggatatcagacgatttgaatctaatgtttctgtcattgtgttactgagacgaaaacccaacctcaaataagcaaaatatttatgtatcaggtgcaatcatagagtactttttgcttctgttcaacatccattcaaggaccatcacaataataagcttttcttcaggttcatttcagtattacgctcatagagtacttttgctttatctttagaaaataaaaaataaaaaaggaaaggaaagggtgcttttgctaccattcaacatcccctcaagacccatgattataataaggctggcttcatagaatacttttacttttgttcaaatcatgtttagatgatttctctcattgctcatgtattttgtacaaggaataacaaacaacaatcagtcagatgatacgatacgaaaagttctggtgcttagcttagataccccattgataattgtgtattgctttaagatctggataatttgaaaacttttacatatatctttaatttctttcattcttagacaagttgttagctcccaaaataaagccttggagcaagtatatgttaacttacatgtaatcatctgcccttgtagttttcaacataaattaattaaattgttttggattcagattgctttaaacaagccttctggtctgcaagtttt

SEQ ID NO: 83773 - DNA, 410 bp, Citrus sinensis
  Intron number 2 from transcript orange1.1g042442m (locus o range1.1g042442m.g) derived from phytozome v7.0 (chr-ID sc affold00001; pos 819107 to 819516)
gttaaatcatcgcttggtcctgttggactcgacatgttactgcatttacatttctgtttctttcacactgtgctttgtagatattgtagaagtttcaatttgaattagttgtggaaatacaagaactgtggatagcttagttgagcttaatgagtctatagaatcatttgaaacacataaaacgtgtgattttttcttctttgatttatatttgcccccattcgatcatcatgaagtggatttcattggtgctggtagtatcaggttagggtagtgaaagttatttttgcatcatattccttctaagtttttaggaaaggggaagacaaatcaagttcgtatttcttgaattcaaattgtttgcttaaaatatgcctaacacttttttattttttttggattaattgcag

SEQ ID NO: 83774 - DNA, 1000 bp, Citrus sinensis
  Intron number 2 from transcript orange1.1g031513m (locus o range1.1g031513m.g) derived from phytozome v7.0 (chr-ID sc affold06388; pos 1121 to 2120)
gaaaggcttggggaattgttcataaagacggttagtctatttgatttgtgatttcttttaactgattttatctagcattttggcattcaaattgtcacttgaaattggtgaaaaaaaatgtacttgttcacataatcatttgttttttgtgtctcattgttatggattttgtatatttctgtgggtgaagaagggcgatctactggacaaaaattttctttgagcatttttaacatctttgagcgagctgattagtttgggaagttctcacaatacaaaattgctatggggctcagtgagtagggatagtttttctaaattgatttctgtgtgaaataaataaacttattttgctgttgaaaatttcggtttagtttcatgtatcggagttgtttcttccttcacatcctaatttgtggttgttgggggaatattttgtgactaatcatttgaaaatttagtagcaaagaaattcaaggaatttttgttgctataagaaattgaaattgtgagaacttaagctgcctaagattttttatgttggaccacctttgatgattgctcttgtgaggggtgaattgccagttgagggtatgaaacagaataggtggtagtgggaatcactgaagcaaaataggtggttactaataagaatttgtcagagttacatttccgtaagtagattaagtagctagaacagagttttcatacaatatgccttttatacacatactccttcttatagagcatatcaaatgttcgaggtcatagttgattttttcaatctgcaattaatagccagtggcagctgcttcttaagattggaccaatttccctcattttagtcattcttgaaattgtatgaactgctaaaattctgtattatagttactgtgtgtttagtttctaaatggcaatgttattttcatataaatgaagattgatgttgctggtgataaatgcaggcctaccagccactgacgctcccaggaaaataagt

SEQ ID NO: 83775 - DNA, 764 bp, Citrus sinensis
  Intron number 2 from transcript orange1.1g033644m (locus o range1.1g031437m.g) derived from phytozome v7.0 (chr-ID sc affold00217; pos 110671 to 111434)
ttttgttgctggggcaaccgttctgggctacaaaggtgataattctttctttaggtggtcagctttttctttttgctttgattcttactgtcaagaatttaatgaattagatacgaaaagagtagttaacctagtgtccttctggacttgcatggtttacattaatttcctcattttggtgttttggtttgatgattagctgttgtctagagagatgtacataacaaacattaaatgctttcttccagttgactagctgttcttgttacatcaatttcgttgcagtttcttgtatctttatttgtattttttttttcagtttttgtatttttcttgtgaggaacataaaatataaagtcacaactagctgttcttgttgaaatgccaatgcttgaggccaagatctggtatgcagagtctaaactaagataaaaaattgcctctgttgattaagaggtgctggttagatttagatttcaatttttcttcctggaatgatgtttaatgtcactagataacaacctttttaggtacttgttccaaaatcgtgattaatttatcacggagttggctattatcacttatctcaaacttttgctgtaatccattggtttgggaccttatcctcgtgtctttctcttagtttctgcccatattttgaatcttcaacatgtcaaaatgattcctttaattttcacatccactcaaaagcttcaaatgttgatgaactaaaggcagaatttttcaggcatattaccttgaag

SEQ ID NO: 83776 - DNA, 593 bp, Citrus sinensis
  Intron number 2 from transcript orange1.1g000453m (locus o range1.1g000421m.g) derived from phytozome v7.0 (chr-ID sc affold00032; pos 606883 to 607475 reverse strand)
gaaagaaagtaagtgctttgcattaattatgagtttgacttatatttgtactcataattaactacttgtctcaattgaaatacctgtgccgaacatccatgatggattaaagacttgagattataaaagtgtaattttagtattctattgaggaatgctacaaagaacatagactattttgaggtacaaattcaaatatttagcctttaacttgtgggtctgaaagtgagaatattatgtcctggaagaaagtcctgatataaatattaactctgtttgaaaattttcatttaaggaaagaaagaaagtggtaaaagataattcaagcaacttttctttctcaactctagatataacttctaagagttgatatttatagctcttttttccagctcttttttcccctcgtagtttgtttaaaataaatttatgagaaatgaaaattgatttctaattttttttcctaagaaaaacatagaaatcttactgctttgttagcgctgctagggacagtttaaggacaggttaaatattgatttctaaatatttttctttaaaccattgcgaatgatgatgtggttttagttacctgg

SEQ ID NO: 83777 - DNA, 1024 bp, Citrus sinensis
  Intron number 1 from transcript orange1.1g024312m (locus o range1.1g024312m.g) derived from phytozome v7.0 (chr-ID sc affold00086; pos 138647 to 139670)
atcaattcttttctgctcacatctctccacttcaggcgagtgattaaatcttgaatttttttttttattcttttacaatttagcccaattcttttccgtagtgtaaataacaagttaatcctggggaaatagtggcacattttcactggttgttgtgtaaagagtttaagggatatgattgatatgctctgtttgtgatttgatagatacagatcagaccatcatcatctattgatctttggaactcactggagcaactaggtttatgttccagtgagttccaaattttggacccactccttccttaaaataatttccagggcccaccattaaacgggtgctttttatttttttattttttcccaaatttgaggtcaataaacctcacatgcggtatgcctgtatggctgtatctgtatgtgccccttttcttggatcaatattttgggttgtgactatagtatattgggtgtcgtactagaatataaaaataccgtccattcttagatttaattaatttgtgttaactttataattttgaaaatgttcagactgtagtgcacgatatatttaaagttaggccccagtatttgggctacactaaattaattgatttgctacactgcttttggcttaaacaagcatgacttcatcgacatgagccatcctttgttgtggggtatatgcaattatctaagaagatgaaaatttttgtaaccattatgaaccccaggaaagtttgtgccaacaatagggtaataataagtaataaccaacacaaccacctccattattatgaaaggctaatgaattttggccccagataaaggtaatcaatcaagcccacagcagctagctttgtcttcattgcaaaagatagaaaaagggcacgttatgttattgttgccagccttgacttgtatgtaaagacatggttagcagtttggtggtgggttgcttgcttttattaaggttttgattcttctttttttttctccccccctttgtatttttcacagtcagg

SEQ ID NO: 83778 - DNA, 834 bp, Citrus sinensis
  Intron number 1 from transcript orange1.1g012453m (locus o range1.1g011114m.g) derived from phytozome v7.0 (chr-ID sc affold00006; pos 679286 to 680119 reverse strand)
tttcgcgtgctgtcaggtaagttttttttcactttgctctgtcttttgtcttatttatttattccttttgaacgttttaagtatgggtgttttgattttttattttttttctgctttgagggtttaagctgtgtaagtggatctgctatgcgagattgagcaattggtactattgttaattgaagttggtattgagacggatatgattgtttgatgattgattatcgatagctggtttttctcatgttgaagtgataaaaataataataataaataataaaatgccccgcttttctttatttatagataaacgtgtaaaactaacttcattgtccaatatttaggaagtttttgtggtaacagacactggatttattgtttttatattgatcttttttttttccccactggctttaatgtttatgagtaagcatgaagctgggattgaatttaattctcttcccattttgaatttttggcaattttttaactaaatcatgaagttaataacccggtatatttcattttatccaccaatgatcctgtatggcaatcatgaaagagcgcaatttgagaaatttaggggattttttacaatcaaatcagttatatgaaattctttatcatgatattgctcaaagtttctgaaaatgatagctttttgaccaaatagagattagcatggttgtgacttatgtttggtcgggtttattatctccgtaggttgcattttcttaattgcagcattatcttggggataaaaaggaagagaaaaatgaggatgaggaacaaatacaaaaaaccaaccactttcccttgcaatgcagggagcaa

SEQ ID NO: 83779 - DNA, 421 bp, Citrus sinensis
  Intron number 1 from transcript orange1.1g035341m (locus o range1.1g035341m.g) derived from phytozome v7.0 (chr-ID sc affold00042; pos 104966 to 105386 reverse strand)
gtgtgtgggggtggggcagtgtttggttgaggaatgggggtggtgaatggccagtgatgcttctctatcgatcatcaatgtgcatgcactcttattttctaactttttgtcctcttcgtttctcttctttaaacgcctctctcttccttagatgatcaagtttaattaatttgcttttgcatatatatgtgtttgagtgtttaattaacttctaaatgatcaacaatcgttatgtactaaaaggttagaaacttatagtagctttaaaagtggagaacttgttgggtatttcctttggaagaaagaggaaaaaaggttaccaacaaagtgttggctccactggcaatgaagtttccttaagtggtttgactaggtttgctccccagttcgagtcgcaggaaagtcgtctttgttgggagaa

SEQ ID NO: 83780 - DNA, 801 bp, Citrus sinensis
  Intron number 2 from transcript orange1.1g015505m (locus o range1.1g015547m.g) derived from phytozome v7.0 (chr-ID sc affold00001; pos 2466467 to 2467267)
gtattttctccttgctttgcatgtaagctaagaatcattttaagatatgtcttctctgattttgatttatgggattttcttatttagttctttttttttgggggggggggggggttgattattctgattttgttgttatttctgttgatttcaaattaattattttaaaaatcatagcaatggggattagatgttctcatttttgaggaattataggtctcataatgtggagataaacctttgtgcctgtacgtaatttgcattagaaattattttaatcatgaaaactttgagtcaaattattttagtattcctgtagtttggcccttatttccagtttgattgtagaatcttgatgttctaattgcagtttattgtgtatttttcttatatctgcttctggcggtaaaaagtataaatctgaaaactgatttatgtttatataatgcactggatgagctttctgtaatttttgctgctgtcctacaaaattgagaggtgtaaggtgttagcagggtttcaggattcttacataatttattttactactgttcttttttcctttgaattttaatatgccaagcatgacacttttctcctgtctgatgttatgtgatatgttgtcaagggatttgacttactttgacttgggatatattctttggtgatgattatctgatgctttcttaattggtgatgagaagttctcatctgttttcatgtagaactcgattttcttgttcttttttaatttgttaattttgtctgttgaagtcttttttaatgtactttctctagatt

SEQ ID NO: 83781 - DNA, 929 bp, Citrus sinensis
  Intron number 2 from transcript orange1.1g047609m (locus o range1.1g047609m.g) derived from phytozome v7.0 (chr-ID sc affold00403; pos 9964 to 10892)
ttggagatccttgtctttctcattcgcatataaaggttgtttcttgttatagctgtaagcctctttctaatcttaacttcttcttttttctatttttatttatttatgtattattattattattatttttctttttatcatttcgttttcatttgctttgttacttttaatgtgtatcggcttttactttgttgccgtgtttaaattagattagtcagcagtgagtagcatgcttgcatgcgtgtttatagtggaaattagacaacagattgacctggagaaagtttcatgaggtaccgttaaggtgaaactagatgctatttttgcatgttttgtcataaagttttggtggagattgtcataacctttctgcatttggaaacagtggtattaaaaggatagttgtgatgtgtttaagctgcgtaggtataggaaaccatgggatagaagctgcagaccgaaaatagtatacaagtcagtattgttaatgtattttttgagcataaactgtggtcttgcttttggtacatagatcctttggagtcgaatgatgtttaccttctcaataggtctagtaatggatcttggagaaggttatattaggaaacccccatcttaatttgcatctgctaatagtttttgggaactcatgtcactttctcatgttggcatgatatgtcagttattttcattttcatttctaatagaatttgatgactgaggttaaaatgcaaacttgtatgagttggttttgagtcaatcggtattttaccaaaaaaaaaaagggctgttcttctgtttgtttctattttccttttttgagtgaattgcgaattattagtctttattttttctttattgttaaaatttgttaataaattttgattattgtccatattgcaggtaagcagaattcttaagccagaaaa

SEQ ID NO: 83782 - DNA, 948 bp, Citrus sinensis
  Intron number 2 from transcript orange1.1g036028m (locus o range1.1g036028m.g) derived from phytozome v7.0 (chr-ID sc affold04812; pos 3762 to 4709 reverse strand)
gctgaagcaactggggtctttgataccgttcaagggtaatttgtaattatatcttcatttaaaaaaaaattaaatgcatgtcattttcgtatgtaaatataatgtatcaaaataaatgccatacgatcgattttttaattttagttatgttatgtatttttcgtaaactataggttgatgccctacttttagatgatgcaaaacgatttttctttgaagtgtgattgaaaaggctctgccaattgtttttatttggatgtccaaaaaaatgtctccagaaaaaggagtttgtaaattcagagaaaagttaaaaaagaaaaaaatcagacgatcgaaaaacagagcaaaggaaaaaaatcataaaaaattttaatgtgcctttagtattatttttcaaatggttttgtatttattttgtaataaagaaataattaatttttaattgctaacactttaattaaaatgtactgatttactgaaaataattttaaattaatttctgtcatttcttttttaattaactatttttagcacaatatatttaataaatttaaacacaagaaaaatgaaaattgtaatgacatgaaaattgtaaaacacaatatggatgttctcagcattcctttgttaaagtagaaaatgggttgtatgactaagatgtgtcattttttgagtaattagtaattttttctaagatccaaataaattaattatattatctcactaatcaattaatgaatttacaattaatgaatgtcacatcttttagaataattttttgagttaaaaaatttaggatggataccactgctcaattaaaatttagaaattcattttacgttgcatgtagcaaaagaagcacattttggagaatcaattttgacaataaccacttaatttaaataaattgaaggtatccaaacactcctggaatttggacaaaagagc

SEQ ID NO: 83783 - DNA, 613 bp, Citrus sinensis
  Intron number 1 from transcript orange1.1g035044m (locus o range1.1g035044m.g) derived from phytozome v7.0 (chr-ID sc affold03605; pos 5040 to 5652 reverse strand)
gatttgtctcttacttgtaaggtaatctcttcttgtagggtgtttaattgaattaaaaacagaatattatttgcattatagagtacaggcataaattcattatctatgtcagttcattcatgattttactccaaatggagtaatagatcaccattaatttattgatacatcgtccatgtttgttttcgtcttcaatttttatattacaatatctaatctatttagtattcgtaaaaaaacatacgagaaaaagttggaaaaacactttaggggtgattgtgtacactttcgtatggcacaaatagcgttaggctttgttttttaagtggacgacgtgtccattttttgtgttacatcttactcattaatatatttttgagtttcttatggaaaaaaaattgaaaaaacactttaagtgaaaaaaatttgtatttcaatttatatgtaacagtgaattggaaaataaattctaccaataattaaaagaatacttttcttttaattattaaaaagataaggtagttactcattacccatataaatggacagttttaatttgttccatatctatacaacagaagagcttcagacacggtttgcagcgttccacgat

SEQ ID NO: 83784 - DNA, 417 bp, Citrus sinensis
  Intron number 1 from transcript orange1.1g047452m (locus o range1.1g047452m.g) derived from phytozome v7.0 (chr-ID sc affold00171; pos 139927 to 140343 reverse strand)
gtggatccagttactccaagctttagatcagcaaggtaataacaaacttttagcagtttgcaattagcaacttcataggaggaagaaatattaattagagcattgccatagtatcccatgcattgatgtttattgatttaggttttttttaaaaaattttcccgttttaaaatgtgactatccttgtaaaggatctcaacctttaaaatctcaaaatatatgaggctgttcctgctatagcctaggccattactaaggtcaattgtgggcctgaaaatttatgtctcatgaaattgtatgggtttgtattgtgaaagaaataggtcctacttgatgttgaagccatttatgttgattctatttcttttatttctttgggcagaacttcctggttggcctttgcttactcctttgaaa

SEQ ID NO: 83785 - DNA, 702 bp, Citrus sinensis
  Intron number 1 from transcript orange1.1g032520m (locus o range1.1g032520m.g) derived from phytozome v7.0 (chr-ID sc affold00015; pos 1052492 to 1053193)
ccgcctcgcactgacggttttgttaatctgtcaaggttcgttatttatttatttgtttattaagtttctgatcattgaatgatgctgagaaaatggagtaaaaaacaaagattttactgtattactttttctttaaaaaagggaaatcatcgttcttgtttgctttccgagaaaccgaaggaaaacaatctaatcttcagtagctttttttttttttcccaactcagctttatcgtttttgaagtttggatgcagagaaaaatagagattcgttgttcggttttgtaaaattttctcttcttgtttggtttcccagaaaaggaggggaaaaggaaatcgtatcttcaagctgattttgttttttgattatttccattcacgttttagtcgattttgttaaaaatcttgctttctttctttcttgtttggtttcctagaaaagcgaggaaataataggattcccgcgaaaatctctctcttttgaaatctccggttttcacgttttagtcgattttgttaaaaatcttgctttctttctttcttgtttggtttcctagaaaagcgaggaaataataggattcccgcgaaaatctctctcttttgaaatctccggtttgggccgggctgaaatccttatcccgatatatttagacccggctgtcgctgacccgtttttcctgttcttttggcaggaattggctg

SEQ ID NO: 83786 - DNA, 771 bp, Citrus sinensis
  Intron number 1 from transcript orange1.1g021626m (locus o range1.1g021626m.g) derived from phytozome v7.0 (chr-ID sc affold00001; pos 200239 to 201009)
ttgctgatttcggaagagtcaatcacaaccgttgagagtgatgggcgttgacattcgccacgttcgtgatttgattttctctggaagtacggttttgccctcctgctttgtggttcattttcttttcttttaaaaatattcaatttttattttggttgacaacatcaacagagagagtaaaaaaaaaaaaaaaaaagagagaaattacaaattttaggtgagggaaactgggaattgggaaagatagaaaaagaagagaaagtctttggggggttggttgtttgttccctgtataatttcatatatatatatatatatttatctattgtataattgcgaatttgaactgaacattttcaatttgagtgagttgcgcaaattatacagtgataatcaatcttagtaattagcatttccttcttctaggtaggcatgccatgtagtgataagtaataacaagtgctgtttgtttgtgtactttaatctcttgttgatttgattctctgtaagtgccgagttggccactgttaacataattaacatgctcgtaattaactaacacatttcaaattgttgggtcggttacatttctctgctggtgggtgggtgggtgggtgggtgggtcaatataacaatttgttgaataaagtttttgatcaaatggagatggtgggtacaagtgtgtactaaacaaaaggagtatgatggtctcgttggcatctactacttgttgcagtggtagcgatcgtgccagtgctagtgggggggtcg

SEQ ID NO: 83787 - DNA, 940 bp, Citrus sinensis
  Intron number 1 from transcript orange1.1g011672m (locus o range1.1g011672m.g) derived from phytozome v7.0 (chr-ID sc affold00001; pos 5691747 to 5692686 reverse strand)
gaggtggaggtcccgtgtcgagttccgagtgctaggtaggtattgtaatttaatttgatttttggttccgctatgtgggcgttcatagatttttttcactattcatctgtggtttacttagagtgctcgtctaaattttgtttctagcataggcatagcttagccggctgtgtcattcttgtttaaacatttgaaattcgaatgtctgtacacactttgatctgagatttaacttctttaagctgaaattttgcattcaaagatggtaaatttttatttttttcctgtagtgcaaactgaacttcagagggttcaaaaattacgtttttgaattgaaacccccaggcctccttctttttgctacgaaattgaagggaaaatttaaattaatatcaagttggtatatcagctccttaaactgtaaaagtcgaagattaacaactctgctgttgtttctacctaaatttttcaattttctctgaagtgaaaagaatggaattgatgtaaagaatagtcatcaggtggggtcctgttgctgttcaaggcttttgttgtaagtatcatgtggtcaatagataagactgtagatttctttccaagggtatccgatgtttcatatgtggttggtctagctgctaaaaagaggacaccaaagaaaaccaatctcaaatttgactacaatgttcactattttactaatttttatatcgttcaagcatgtaaaaccatatgctatttgctttctcattcttccgatgtgtttcaaagggacatatgcatttcacctgccaatttgcaaaaataaagtttgcatatgtgtggcatagttcctgtagaaccttttttcttttgtgaataatgccatcgtgtttatatgtatgactatagctcatggttacaaattttcagtgcaagtgtatttggcgtctcagcagaatct

SEQ ID NO: 83788 - DNA, 948 bp, Citrus sinensis
  Intron number 1 from transcript orange1.1g022410m (locus o range1.1g015745m.g) derived from phytozome v7.0 (chr-ID sc affold00001; pos 4004273 to 4005220 reverse strand)
agcctgtctcaaccgacctgtgcagctctcaagtggttggtttccctttctagatattcttgaattatgatgggttctttagttgattacatgtagagcagttttatgttttatgatatcgaattgattatttgctatcagccgacttaaatacttcatttggatgatgtttttatgttagttgctgaagaattgttgttgtagtgtagtttcttgttgaagcatgaattctagagtcttgttggtgaaaattaattgatcttctcggtaattacttttgacacggggcttcccctattgactttaatcaatttgagattttttcttggacacaggttagttatatgccaacaaaactaatgtatatcatccatagcgactaatttctttaaaaacttttgaagaatacaatcgggctaggttagatttgaggaatctgattctttgatgaaaagatgtggaattcacatattatgtttgactgacttgaccactaattggtaaagcgattcatgtatcatgagaaaaaggcatatcttttagaactttacccatttatttatttatttattttgggtgcaatttaaccttgcacaagtgcattgttttcaccttagttgactggacatgatagaggactgtttttgtgaatattaccatgtgaatggatgagctgcattagatacttattctcatccatgtgaatttggaactactttctatatatccatgtgtggttggttttatagtgaagttatttgtaatttctttttggacagctgttatcttctgaatctgaaatggtatacttaatgtcagattaattttctattgtaggatataaaacctgtagaaaaaattccagatgtgagtcttgagtctgccgtcctgcaatttgtccccagcattcgttctggtagttttgctgacattggtcctcgtagatac

SEQ ID NO: 83789 - DNA, 907 bp, Citrus sinensis
  Intron number 1 from transcript orange1.1g039982m (locus o range1.1g039982m.g) derived from phytozome v7.0 (chr-ID sc affold00360; pos 87414 to 88320)
agttttcaagttcaaggttctttttttttcttttcttttttcttctttctaaaagccatttttgagagatctctaaatctttatctttgataaaattagacttttttttccaattttttggttggttggttggttggtttggtctatgtatgcatggctctatttcatagcgcctttagattagtgttgttgaattgtgataaaccctttaaccgaaaaaccaaaaaaaaaaaagtttgtttaattgctaaaagaaaaaaagaaaagttcatatagagtttgaaaatatgtagaagaagaagaacagagtaatgatgtaataaattaaaagttttaattcttttttgaagggaaaattggtactaacagtaaataactaatttaagtaagaaaatcttatattgaggaagaaaaaaaaaggggtaaaagatcattgggcaaagagagaaaaaaggtaaagaacttgcctaacaaggaaatagtgcaaatggtgtgttgggccgggccccaaatccatgcaaaaccctacatggacctaactttaggcccagtttatcctgaaaaagtcccacttttttgtgtttttttgggtaactctaattacaattctgataatagagagagtgcactactcccttatatttatatatatatttggttaattctcaatcaaagctttctggagctcaaaaactaggcgggcttgacccatatgacgggcttactaaaccctcaacaaacaaaacgggctaaacccatagtgggtccagtttatccctttgatgatattattatttacagtaggagtttttttattttgacagttatagtaggaaataattagtcattagtttaaaaaattttatatttatttattgactgtataatttaccgtatgtattgtagc

SEQ ID NO: 83790 - DNA, 991 bp, Citrus sinensis
  Intron number 1 from transcript orange1.1g041957m (locus o range1.1g041957m.g) derived from phytozome v7.0 (chr-ID sc affold00363; pos 80871 to 81861 reverse strand)
ctggttcaattcactatccgcggagccctcgagaggtattatatatacttttgttaatcctcttcatttctttcgttatacaaatatgtcatgcatgatattgatccgtggagatattctaaagtttctgcttagaattttctttagacatatttcatttatgattttgatttatattatttatttttgtatcgatgggtgctttaacaaaatgtcattttatgataaaatttggaataacgacaattttcatgaatgccagcctcgataccatcttgtaaattatattagttatatttgtatgagcaatttaaaactatgtgctacgtgttaatttctcgaacattttttttgatctttattttgccataacttatcaaataataatttcattgaaaaaaaacacgtggatgccactatgagttggttaatatatactgtttaattaataaattctctttgctaaataactagatatatatgggctcctcgaaaaaatcggaaaggccagtgcgtttctctggatcttccctcctacacgacagtaacatatgtataacatctatgagattgttgaagcaatatttgtattttgcttgtggcttactccaatgtttcattggtaaaaaggaaaaaaattaaaaaccattttcttattaatgtatcgtttgactttttgtattaattattgattaatacggaagtgcccttttgaactatatgatttaaaaattacgtaagtggagtacataagtttaaattactatgcatcatggagtatataagtttatattaatattaataattttatttttttatctaatagtcactaatcattgatataaattttacttcagagaaattcagataaatcaagtagtgaaacgcatttattttagaatttaacaagttttattacgtaagagtaaaacaaaatttaaaattgactatccattgatattaaaagaaaattgtactgaaattatatcag

SEQ ID NO: 83791 - DNA, 785 bp, Citrus sinensis
  Intron number 1 from transcript orange1.1g003801m (locus o range1.1g003801m.g) derived from phytozome v7.0 (chr-ID sc affold00013; pos 350488 to 351272)
tcaacaatttgtttgcataggaaaattacgacaaggtgctttgcattttgcttaaatacaaaaaaaaaaaaaatgtggtgagaagatccgtttatgatttatctctctcttaaaaagtctgcattctgcaatcttgatttagtaactaaaaattagttatttacaccgagaaaataattatttttttaatgagaaataaactttccatttaaaagggaataaatttttttcaatgagaaataataaactttccatctaaaagtcaaattgtaatgtcgagaatttaatagagagatttgaatattatttcatgagtacgtttttttttgtttgaagagataaaataattttattttttaattatttactttttttttgtcacgccattctcatgcggaaaagatgttacgtgtttaaatttgaacaagattcccctgagagaaaaagtggttctattaaaaaagagagagagagagaaaaaaaccaacaaccataaataaataaataaaaaattggaaaaacaaaaagaatcgaactttatcgcacacgacaaaatacgtgctgtcacgaggcaagtgaggtgtgacgtttaagagagcacgacttaaactgaagctgaaactctcggtggaaatctgtaattgtagcacttttcgttttcagttgtagaatccaactcgctctcaaactccatctctttcgacttcaattcaatttaattctaccttctaatcttttataatctctctgtacaatggtaaataaataaatataatcatccacag

SEQ ID NO: 83792 - DNA, 471 bp, Citrus sinensis
  Intron number 3 from transcript orange1.1g003801m (locus o range1.1g003801m.g) derived from phytozome v7.0 (chr-ID sc affold00013; pos 351932 to 352402)
cgggaatattgtcgtttcggactttggttattaaggtacgtttgtttatattattcatacttaattggttgataagccatgctttaaggcggtatcgtgattgtttatgtaaatggtgagggatacatgttggttactgcttgctttttcatgttagctttcagaagggcttcgtgagtatgttaatttggatagagttgtaggcttcaaaattactcagtcactactaactctggtatctcagtctcttctctgattttcttttgatggtagtttttatacattaataggattctttgttttatctgaccaaacttgctgaaagtcagtctttggatattctattctacactaggataaatgtttcatgtaccttttaagttaagtttattgttttctaaagtaaaggtatctttcatgtttgttcaatgtgcagataattggaagcatttctgctgtttcatcttctct

SEQ ID NO: 83793 - DNA, 595 bp, Citrus sinensis
  Intron number 1 from transcript orange1.1g023338m (locus o range1.1g023338m.g) derived from phytozome v7.0 (chr-ID sc affold00275; pos 109737 to 110331)
gtacacattcaccaacactaacgcgagaaaaatcggtgagtttatttttttggtttaatttttaaattcaattttattttttcttttgcatttgcgcatgttagcaaataaactggataaatgctgaaacgcgccatatgcaagtcgaacttctgcacattccggttgcgtataccgattacgacacgtggataacatgtggctgattcgttctattagaatgactaaaacacccctagtaatggcgtggttggctgttgggcggttaactagttttcaccaatttggattttacaagtgccgtgggaccactttaagaataaagtgcagcagtgtatgcctttattattaattaatttatgacgtggtgtgcaataaagattacaattgtggattcttccattgtttcataggaaatggaccccacgtgatctgtttttataaattcctgactgtagatttagggagtagatttttttcttgggcggctgggatttttttacggctggcccacatgtggcgtaagttctttttgacttcttcttgctatttggatacagggcctaaggagttcatccaagtgtttcacagtctt

SEQ ID NO: 83794 - DNA, 770 bp, Citrus sinensis
  Intron number 2 from transcript orange1.1g013334m (locus o range1.1g013334m.g) derived from phytozome v7.0 (chr-ID sc affold00054; pos 456489 to 457258)
tttcttagtgcaattctgaatttctgtctttacaagtaagtttctttcttcgtttagggtgcgtttggggcagtgcagatattccctagaatatggcatggggagcagctgtgctgccaaagcgcacacttactcatccaaaattcaatgacagtcacttgctgttgttattgagtgttgggatgatgagttttccaacaaatgcttcttattgttattggtgcttagtagaagaatgaaggattatgtatgctttgtttttgttttcaacaataaccaatgagactacctataaacttgatgttgggaaagcttatggatggtctggcctgcatctttgcttactatcttaacattccaccattgttcattaagtacctgtctatcaatgtagtgagatgctttaaataatttttatgctgattagctatgctatcataggtgtgaatcacctaaatgacagtctgtcttattgttttcctttttgttgacaatccttaacgactaaggctccttccaagtttcggtccttctctttgaatttacatttatagttctaatcgattgaacctattgattttttcatgctttcccattgcttctttacatgatatgaggaggaaacttgttggctccttctatgctgcacaagcactgaagagtcgtttaagtcaatggcaacgtgaatttccttctgttcttctatagttataatccattcacatttagtcatgttgctttttccttttttaaatctcagagacacaaaa

SEQ ID NO: 83795 - DNA, 603 bp, Citrus sinensis
  Intron number 1 from transcript orange1.1g009147m (locus o range1.1g009147m.g) derived from phytozome v7.0 (chr-ID sc affold00403; pos 47943 to 48545)
gaagctgctttttcaagaacctggtcaagttccaagtaagttgattattttggtacatggacatggtttaacttttcagattctacaaaaaaattgtatccctaagtttccgattgtgttttctttgcggctaaatatattgttctttgcttgcaaaggagtgattctagacaaagcagccggtgtgttgctttttgaaaagggtttgcatcaatttgcactccagcttaaacccgtttttggcttttgtccgttcacaatgaaacaaaagcactttttttttcctttctcgcacgctttaaatatgaagcctcgttaggtttaatctccttctcttcaattcacaaaaaccatgaggagtttctctctcgctccgacgtaacttgtaaagtttctgttcagcttcttgttttgttttgattcagttttcttgatgtgtacgttgagtttctctcagccatgatgaagtgttttttttttttcagaaagggctgcctgcccgtgatggcttgttccagatgaataaatttggtgaaattttgacgaagctgacgaaagtctaatgaatgcgacattattttgtttgacaggtcaaaatcaaac

SEQ ID NO: 83796 - DNA, 843 bp, Citrus sinensis
  Intron number 2 from transcript orange1.1g025698m (locus o range1.1g025698m.g) derived from phytozome v7.0 (chr-ID sc affold00059; pos 566451 to 567293)
accagaaactgtacgtaacctacaagttttggatcttgttattgtttttccccattttgtttatttactgaaaaagcttaaaattttgcttcttgttttattgaagattcagtctctcaattagagatatttgtcgtagtattttttatattaagatttttcccggatcctttctatgaatgttataatagcaaaattttatggaaatatgggagaagaagagagttttccatgatgttggttcttatgttagtatttctttctttttcgtgttatgaattgcggattgaaagctaaattgaacccggatggatgggttgatatactcattttgattattagagttgaatattttaaatgtaacggcattatatgtaattatcttccaaggtcttcaagccaacagcaagtttaacctttttactctgtttaagttgcctgactttaggcatgtagtcaacatttatatctgctttcttgtgcttctttgaaagttctttcaaccaatgtccaatgtggtgtaaattctttcttatttctatttgaaatgctatattatgtgaaatgccgaagcgattagatgctagcattttagttgtgcgagttttattttctacatacttaattaatgtagtttttggtgttattttaatttcatggcgtgccgtctcatgtaatgtgatggttaccagttggggattttttttttaaattttttatgagacatcaattttcatttatccactgctgtgctatttgtatgttatcttgaggccgggagttctgactaacaaatataatgatgcagtcgagcattttttgacaagaggatctctcaagaag

SEQ ID NO: 83797 - DNA, 648 bp, Citrus sinensis; identical to SEQ ID NO: 82270
  Intron number 1 from transcript orange1.1g009638m (locus o range1.1g008453m.g) derived from phytozome v7.0 (chr-ID sc affold00020; pos 1363701 to 1364348 reverse strand)

SEQ ID NO: 83798 - DNA, 1035 bp, Citrus sinensis
  Intron number 2 from transcript orange1.1g039981m (locus o range1.1g039981m.g) derived from phytozome v7.0 (chr-ID sc affold00043; pos 160237 to 161271)
tcttggccattgcatctcaaatcttggtttctttggtaatttcattacctagtttcctatatatgtttcttctactatcttaattagtaagagtcgttctctagtacagacatttgcaagcagaattacacatgatacttatttctataatttagcacacactatagttatttatttattcttagcttttgcatcgtggaaactagatatttccgtccgactttaatgagcgtgtataagagattttatttattgaaacaataagcacttacaatataattctgtctttctatctgaatctgttaatttgcctaatcatttatgtaattggttagatagctgccggcatgtgagtcagcaatcagtcatgcaactttcatattgttcagcgctattttaactctcatatttagtgtgagcagatgctactaaacacagttgtataaacacttgcaatcacagttcatcagttaatgactctaagacatatttttctcaaatttgctctctctagatccttcactctctctctctctctctctctctctctgctttcttgttaaccaagaaaagtgtttgataaaacttaactaaaatttctcctacaaaacaattaccaaaataataataataataaaggataataatattcttcatttttattctacaccaatcaattaacattacgtgatcttttaagacgtcatttagatatcaattgatgcattgacaaaaagatagggaaccaatagtaccacaaaatccttgagcatgagcatgggtaaattggcaaaagtcattgaaaatattcatacttagtagtaaattaactttttaaacaatcataattaacactgaatgtttgaaaaattgttttgagtttggcttagaagtctaattgaggtgatagataaaagtttaacaataatatttaaagtgagactcacaagttttttccagtgaaacatgagactaaaattaagaaatgggaattttgcaggacggaggtccaacgtggcaagtgcagctaggaag

SEQ ID NO: 83799 - DNA, 691 bp, Citrus sinensis
  Intron number 2 from transcript orange1.1g015960m (locus o range1.1g015960m.g) derived from phytozome v7.0 (chr-ID sc affold01406; pos 7123 to 7813 reverse strand)
aaccttccttcggttgttcacatcaccaatttcgggtattatttatagtttgtgtctgcggtctaactgataatttacctgaatgatttgaaattgttaagtctttggaggctgttgttgattaattaaggagatgtttattcaatcctttctatatttgctgccgagcaaagttggaaggggctgcccaccctttgctctttctgcccctacctattgtcatttcacgagaggtattctgaaattaaggttattgtttttcatttgagtatttaactctctgcattttaggttagtagtttgttgtctttttctttttcttttctatcttcttattattatttttcaatacattattttgctatctttaatttttcttgcaactttaagccattttacgcactaagggtgaggggtgtgatatcataacacctttcgcaccaggagtattcttatggttatactagtatctaattagcatatataatagtcattcaaacagttttactattacatgttttagtagtaaccatacatgacctccaattgttatgagggtatgagtggctgcttggtgtggttaaggattgcaaattgttttttatttttctaacgaacactaaaattattttactaattttaattttctgttgttgaatttgcttgtttggtgattttaaatatttgtaga

SEQ ID NO: 83800 - DNA, 878 bp, Citrus sinensis
  Intron number 1 from transcript orange1.1g038946m (locus o range1.1g038946m.g) derived from phytozome v7.0 (chr-ID sc affold00085; pos 396525 to 397402 reverse strand)
agagagcaggtgtgaatctgatctctagttgaaggaacataatgctgcgttatggcttaagttttattcttgttatcttctctccgaaacttaaaaattagatcatcattttcactgtctgatggttgaatttgatatttagttgaacgaatataattctaccatcctatgatgttcggaatatggtactttcaggatagttgtaaattatgcataatgtttgcatttctttggaatacttctcacttagaaataacttaaaaggtgcggttaattgcactttccagaactacaggtaatatgtgtataaggtgataatggcttacaatgatgtaattgttaatattcatagtagtcaaatattccagaactgcagaatactatactttatcacgaagtgttgataggatttgttgttggtgggtttgaggataaatttttcttttctcattgtcaacaagaacttttctgtgtaatgtgtatagcttattttgtagttagcatctccctcctttcttctctgtttgatatgcctgtagaagtgattaaagttgtttgcataatgtcagcatgcaacgtgcttaagacggcttcaatcttacagaattttcagcattaaatgagctaaactgggtttagtttggtttatgatgacacgcaaaaatgaaacttgacatctacttttgaatttacctcggtgtgtttgtttgcattagtcttttttctgtggttttccctagaaattcttgccttagtttatagtagttgagaaaaaagaggaaaaaaatccttgcttataattttgtaggagttttcgggcaataaatttgataatcagattaacttcttattcctgtaggtacgatttatttagaaag

SEQ ID NO: 83801 - DNA, 277 bp, Citrus sinensis
  Intron number 1 from transcript orange1.1g027691m (locus o range1.1g027691m.g) derived from phytozome v7.0 (chr-ID sc affold00001; pos 1508720 to 1508996 reverse strand)
tggtttcttctttctctttggattttgcccatttggtaagactgtttacctttcttttgtttctctttttggtttctttagagcttcttacgagttagtaacaatcagcacaaaaagatttgtattgttgttcttcgtttcttttctttcatcaaactgatcccttttttgtgttttgcatagctgtttaactgatttttctttattattattattactattatttttgcatactttttcagcttcttgaaaggcaaaaaggattaaaaaaatcttt

SEQ ID NO: 83802 - DNA, 560 bp, Citrus sinensis
  Intron number 1 from transcript orange1.1g027292m (locus o range1.1g027292m.g) derived from phytozome v7.0 (chr-ID sc affold00059; pos 587866 to 588425 reverse strand)
aaggcacagatctgggacactgctggccaagaacggtgccttttttttttcacttctcaattcttcttcttttacgtgtgtaatagcttctgatctgattgtttctgtatcgcatgtttttactttagatttttgctgaaactgtattgtgggttaggttcagtagcagttttgaaccactgggttcggttgatgcctttgaatgtttgtgatttcatccaaatatgggttatttgtcgatgtgtattaactatgcatatcagattgatctttgcggtttaaagtgcgttgatttaatcgcttaaaacttgtgtttgatttctgtgatacaagtgaattgggggatcctgtttagtgatcggattattagtgttattggattggacataagagttacttactctcgaatgatcctgctgcatgagttgtggatttaatttgtacagtttgtcatggcacaccaggcattggatttataatttgtcgatttccttcctctccttgtccttttggtgtaatgagcagatacagggctgttacaagtgcatattacagaggtg

SEQ ID NO: 83803 - DNA, 493 bp, Citrus sinensis
  Intron number 2 from transcript orange1.1g035460m (locus o range1.1g035460m.g) derived from phytozome v7.0 (chr-ID sc affold00102; pos 436103 to 436595)
ccatcaccaagaattgatctctctcttcttattctgtaagtgccctacactcttttcttctcttcaagcttttggaaatatttttgtaaattttgtttttcataactattaaaaattgttacatttttttttcagatgttctggtgatatatatattttctgaattcgggtctaaatcagtctagtcattattcatgagtttgattttttggcaatcgaatggagttatagaatgaatctttttttttttcaatattctataatattatgttataaatctattgatatttattatccgaaatagaaagaagatttcgatttaaagtttctcgttttgagaaccctcttaagacaccatgacccgcattaatttgtgccatttattggtcttaattattgttcaacggctatgatacaaaaaggaagtggatttagacgtgggaatcaatatcttttaaactctctaatttttcgttttgaattgttttgacag

SEQ ID NO: 83804 - DNA, 521 bp, Citrus sinensis
  Intron number 3 from transcript orange1.1g027662m (locus o range1.1g027662m.g) derived from phytozome v7.0 (chr-ID sc affold00201; pos 248822 to 249342)
cctcgagaggtatgtttgttctatatcttcaaaaagtcttcaaactttttcctgttatattaaaaacaaaagcaaaagaaaacaaatacaatccctgcagagattttctttttattttccctctctctctccttccaccattgatggcttttacattttcatagcatgatccactatgctagttgcacaccggctttttttttaatgaatcaacggtcaggatttgagtgtgagtaagacgtatcttgaacactccaatttcagcgcaaacttaattagtactgaattcttatccatttgatttatgttattatcctttcttttttatctctcatttagctttaaaaaaaaaaaaacttttgaagtctttgatcagtcaatgcctgcaaaactcatcatttctttactgcacaacacaacactccaaacttctcagtattccaattttcaatctcttcatcgactacttttctgtgtcctttgtagttaactggtgaaacagtaggggaagttaaagcagt

SEQ ID NO: 83805 - DNA, 774 bp, Citrus sinensis
  Intron number 3 from transcript orange1.1g043050m (locus o range1.1g043050m.g) derived from phytozome v7.0 (chr-ID sc affold10626; pos 437 to 1210)
cctggtgcagctagagcttgggtttcaactctacagtaagtttttagatcttgttctacaaattactacactggatatgttttgttatttctacactggtatgataacttgtttctaggtatctgctatgtaagaagattaaaagctgttactatagaacttgaaaatctagaatgcatcagtatcttgtcagtcaatgttggaaacagcaatagagaaaacgttttgggagctacaaatgtggattatgactttaatacaatgcaaattttaaggttttctgaagaacctggatttttcttaaaactataatgtcacgagttctttagcacgagattatccttccatgccttgccttgtggaggaaaccactagttgtttattttcatcctatgttctgctgtaatggacaattgttaatttcattttggtttaaatgagttctgtagtgcaaatggtctaacttgcacatgctgtagaggcaagaaagaacgaatggatcaaaatttgtataaataaatggaaaacggccttgcgttcagttggttattatgatattcagttaaaccattttcatttggctgatcgtgttttgtactataattgatgtattccctgcctttaaggtccatacaagtcagctgttttcccttttcaatatgggtattggagctagcattatcttaatgttgattttctcatctgacttgcccctgttttgttgccttccaataaccagtgcagcacagttggttctgaaagcccataaagagg

SEQ ID NO: 83806 - DNA, 413 bp, Citrus sinensis
  Intron number 2 from transcript orange1.1g014325m (locus o range1.1g014325m.g) derived from phytozome v7.0 (chr-ID sc affold00015; pos 1528486 to 1528898)
agacaccaagaacattataaggtagatcttttcaacctattacattttcaaataccattttttatcatgtatttggtcttcctatttctgtatgtaatggaccttatagaagtttgtgacgaattaactgtccactggtgataatcctctgttctgaggttataaatagaaggaaattaggaagttcgatttcatttactttgatgaactttatgttgtatgtgcttggtatgatgacaaaaagaggcttctgcaggcatctacttcaatttcttttatgtttttcagcatagctactaatgtttcttgttaatcgtaaaattttagctgccaaaattttttattacttttaaatcctttgatgtatatagctcttgatccggtagtatttgttattttcaggtttataattt

SEQ ID NO: 83807 - DNA, 425 bp, Citrus sinensis
  Intron number 5 from transcript orange1.1g014367m (locus o range1.1g014367m.g) derived from phytozome v7.0 (chr-ID sc affold00001; pos 1563511 to 1563935 reverse strand)
atcaaaaccacctcactcaccacgaaatttggaaggtactaaagctcttccggtgatacctttttctctggtggttacatttacagcaaatgcggaaagaacctcatttagtgctgaaattcttgaattctcttgcttgagccttaattttttatgcagaacaacgtgtcctcagtgactctctttagtttacgtgaaactcaaaagcaaaaactttttattgctcaatgaatgaacatgtaaattgagtaaatgatgcatattgctgctacttttcagattattacaatttttaaaaaattaaataaataaaattacctagtgtaatctattttctttcttccatagcatgtcatgttcaggcatgactgactttctcctacaattaacagtttctgatttctaacgtgcagtgtagtatttgg

SEQ ID NO: 83808 - DNA, 596 bp, Citrus sinensis
  Intron number 2 from transcript orange1.1g037671m (locus o range1.1g037671m.g) derived from phytozome v7.0 (chr-ID sc affold00006; pos 1520051 to 1520646 reverse strand)
tgaccgggatcacggacaaaggtgttgttcagctggtatgtgattgttatctttcagaaaacaaatattgtcagaaagattggttttgttggttgtctaaattctgtcctgaagtgatctgttctgatgcataaccggagatagcaaaagatacgaataacttgaagaaatgcaaacatgaattttaacagttagatattggccattctagagcttgataacctcagatagatttcaaatgaacctaatgactttaacaattggtgattcgtttattgatcgtttgtcctgtcgtatggtattatgcattttatggtttccatggactaaatccacggtaattttgaggtgtttctcaagcttgaaactgatgatgccttcaatgatttggtgtcagattgtattgaatttggattcaaatcatttccatgccaagttagttgaataaagagatgtctttgttgctttcattaattaaactaatctcgttcaatacttgcgagtaattttcgtggaagccttgcttagatcattttcagatttaccccttttcttcaacagatatcaagagctagttctttgcaacacctgaatat

SEQ ID NO: 83809 - DNA, 584 bp, Citrus sinensis
  Intron number 1 from transcript orange1.1g037671m (locus o range1.1g037671m.g) derived from phytozome v7.0 (chr-ID sc affold00006; pos 1520713 to 1521296 reverse strand)
cctacagcctcaaagaacttgaaatgtactcttttctttctctcttaattttgtgttactgtttttttccctcctgttctgggcgaaaagattgacggatgatgaaattaatgttctgaattaaggatatcggagaaatttcaaatggaaattgtatgacttgaaacaatttgatggaaatccttttttataatcttcaaaaatacattttaaatatgcttaaaatggggacaaaagccattttgattaatttagtaagcttgattctagattttggcggttgcatacaccaatagtttttaggcctgggtgggatcaatttgtttttgtattaatgaaagttctgggcagtctgtctgctcggccaggtgtggcttttcggcggtagctaagctatgaattttggacgtgatgcatttgattagatatttcagctatgttttttggaaatgccacaaatgtttttttcgtgcggtgtacctgtaccaaaagctgctttctattagttcttcacatttcagcttctgacttgtctcattgtattttcagttcgaggagccgttggggttgtcaaataactgaca

SEQ ID NO: 83810 - DNA, 809 bp, Citrus sinensis; identical to SEQ ID NO: 81776
  Intron number 1 from transcript orange1.1g015252m (locus o range1.1g014854m.g) derived from phytozome v7.0 (chr-ID sc affold00001; pos 2219355 to 2220163 reverse strand)

SEQ ID NO: 83811 - DNA, 337 bp, Citrus sinensis
  Intron number 1 from transcript orange1.1g047807m (locus o range1.1g047807m.g) derived from phytozome v7.0 (chr-ID sc affold00703; pos 48737 to 49073 reverse strand)
ttcgaatccggaggctactattggtgcgtctgcacgttcatccatgcttgctttctttattggatttgaatttagtactgagttttttttttttttctaggttattatgattagtagcagatattcgatgaaagataaatgatagaagattataaaattacactggatcaaaattcttctttatcgtacaatatgaattgcattgagagtacccggactcaaaggttctctctctctgtggctggagatcaaatatataattgcttggcgattaatataatttttcttgaatttaatggcaggagattggtattttacccaaagggaaaagggagca

SEQ ID NO: 83812 - DNA, 921 bp, Citrus sinensis
  Intron number 2 from transcript orange1.1g003174m (locus o range1.1g003174m.g) derived from phytozome v7.0 (chr-ID sc affold00633; pos 47573 to 48493)
ctgatcaaggtcatctcttccatcctacttaaacatataattacattcatagatgtcgtagctgttcttgtgtgtgttatttatgatagtttttcttattgttttttgtattatgtcttcgagtataacttttatttggtcctctcttggcacaattattatgatttgatggatatggtttgggtcaaaactcctgaattagtgactggttgagtttatttgtttgagtagcagttttgcggctagattttgtgcggttccaaattcgtggtcacctctcatctctgatcagagggttacagtaaagatagaaaccttatgctacttcaatcgcatgtgctgaggtttctgtagtcaaggagattttatgctgctgttaaatgagctaatttgcattcaccgtcttttcccccttaatgaatttttgatgaattatggtggctagagtataccaatttatttctgtaaaaccctacaagatttttaaggccagacaccatggtagatacagcacatctcatgtcatgctcatttatatgcagtagctctctgtccttttttatgcgtacatattctatacaagtccccttccagtgagggatccctcattggaaaattaatatatatatatatatatatatattgattatattaggctggattagtaattactttttcattctttattacttggaaaattatgggtaaatgtttcctctttttccattcttcaatttcgttgcagtgctgcatactttatgtgtttgacattttctggaattaaatgttagttcttgaattgttaaaattggaggaaactagtaacgaaatggagggtttcactattctgaggtttttattttttaatttgtggaaatattggcaggagctcattcatccaagggcctcaacacatttgaa

SEQ ID NO: 83813 - DNA, 385 bp, Citrus sinensis
  Intron number 1 from transcript orange1.1g015924m (locus o range1.1g015827m.g) derived from phytozome v7.0 (chr-ID sc affold00015; pos 999447 to 999831 reverse strand)
atccctgggatcttccaagtaagactgtatatctttgctgcatgactttcacactagaacttttagcagactcatttttcataaacaaacacacaatgtttgcaaaagcttaacatcattattattgtctaaacattcttctgctttcatttgtctacacatatatgctttcgcctttgcttaatcttatatctccaatactcagctagaactttgagcataaggttaaaacttgcagtcctttgttaaaactaatttcgacaactctttctggcatgcttacaataattgcttctagtactaaacttggttgttaatagctcatttttggtttttttttgtactagaagagcttgcgacagcaggagagaaagagtggtacttc

SEQ ID NO: 83814 - DNA, 966 bp, Citrus sinensis
  Intron number 2 from transcript orange1.1g024787m (locus o range1.1g024787m.g) derived from phytozome v7.0 (chr-ID sc affold00020; pos 1225832 to 1226797 reverse strand)
ctttttctcactttttccttgaccatttgtttgaggtaattttttttttttaaatttttgtcccctttctattgatatggtatgtccctgagcgtgaccacaatcattttgtttattgcttgaaaatgttggtttggaaatcgttttgcgagatatgtattttgaatcgtgtgaatagcagaattgaaactgatcgaagcctatatatatgttgagtgatcaatgtagatgtttggagagctagagagagacttctacttctgctatttatctaggctttgaaaatgatatggtgaacttcagagtacaaatcatgtgcaagataaactttaagctgtgtgccagtcattggtttaggaggatggcacgtgccctttctgtaagattctggatgaactagttacgccaaaagaattgccttagtagatgcactgcttacaagtgacagtgctattgtcaatttagtacattttcagaataattaaaatcagggcatagtatgaatctgtttttttggtttccacaaaaaaacagttaagacaaagttttataccagcagcaatgcttctcaattttggtaaaaatttcagacaagtcgcatctcttaatttggaacttactggagatggctgaaattttctttaattcttcattcttcacgattcatcttgttaaaggatttattttattctttgactaaattgggcttttaagacctgataggtgtgaggattcctcaattttaagactctgttcagagaagagaaacagctcaaattgcctttatgattttctggtttgtgtgattgcctcactcccaaatactgcaaattcaaaagtaaccgctgcattcatggaaggccaaatggcaaacacccccgcaactcccttcctccttttggtgcctctgggtgccacatcttattgtttgttatattgatggatcaaacattgtatcacaggaaa

SEQ ID NO: 83815 - DNA, 979 bp, Citrus sinensis
  Intron number 1 from transcript orange1.1g037387m (locus o range1.1g037387m.g) derived from phytozome v7.0 (chr-ID sc affold00099; pos 236145 to 237123 reverse strand)
gtatatcctggaatcctatcgcggcaaacaagtacgtatgcttgaccatattattattattcccggtgtcctagtactaactagaaccatgttttttattttagggttgggtgtagaagataatgaagagcaacaaaccattgcttcatcatttatcatggcagaaaagtttatgaaatatccatagtccagaacaaaactccaatagtttcactctaagttatcttaatcatcttctaacacagtgcttaacagtagatgtccactaaaacacaaccaaaccaaataatggttgaggtttctttttgaaggagtaaatggtgcaatggctgcaaaagcatcgtttcaatagagcgtagcttcgacaattccccctaacttgcacactttttaagctgggaaactttgatctgctcttggtcatatactcatataaatgcttattaaatcaccgtgatcaccaggtttgggataaccattttactgaaatgtgagtttttaaatttctaaagaaacttaaaaggttcgaaacttattttaactatttcagaacttgaagatgaacattttagtagaactggtaacattttcgataagcaccgtatgacagcaagaaaatcagacacatggactgcatcaaattgtcaataacacaagacaataaacacgctattacaagggaagaactaaataggcatggttcatggattattttagttttttttttcgcaaaaataagcaatcttcaattcactagacttctttgcttgactaagaagtgtcgacattcaatcataattgttaagacttcttcatcaggtaacacatcctaggaaagatctggatggtgattcctttgcagcattatgttcttttcctttctataggagtcctgtctgaaaatctttgtgatattatatatgttgtttaatgttattccatagcatttaaccactggctatagtccaatttttgcaga

SEQ ID NO: 83816 - DNA, 671 bp, Citrus sinensis
  Intron number 2 from transcript orange1.1g012166m (locus o range1.1g011420m.g) derived from phytozome v7.0 (chr-ID sc affold00283; pos 78097 to 78767 reverse strand)
ccaagaatgtgagagatttctagttttatctagaagtgaaaacatgtgtagtttactgatctttgcagaattgggtgaattttcattaattgtcgcataacaaacttactgcaataagtttaggagttcgcatattctcttttctttcctgccttggttttagaaatttgatttatgttttatttcttcttgtttatgaacaaatgattcatctatttcattttcgttgtgattatatttaatggaaatcgatgcttgttcctcatgatttaagagtttcattatgggcatttacattcacctttgttttatatctattgcaatagcttgtcttgcgtactaaatgtatccttgttttatattttttgtaataacttatgttgtgtaccaagtgtgcctacctaagcagacgtcttggagttcagttttcatttaatttgtcattaagttttcttcataagatgaaatgttctttgaagttattgtggttgtttaattatgcaattgtgaaattaaattagtattacaattttttgtaaatttcccattttttcttagatattcttgtagtatcttaattattttattattgtatttatttagctatttatttctttggtcattgctttccctcaggtaaaggtagaagaatcctttgttcctgcttttaa

SEQ ID NO: 83817 - DNA, 496 bp, Citrus sinensis
  Intron number 2 from transcript orange1.1g030321m (locus o range1.1g030321m.g) derived from phytozome v7.0 (chr-ID sc affold07194; pos 2018 to 2513 reverse strand)
caactgcctgattttatagggtaaaagctatcatttgctttctataaaatgtcaagccagaggatctgcagtttggcattttgaattccttccgtaaacaaataattcttcttttattcaaggttgccaatggatagggaaaattcattactatgcaacttacaaaatgctatctttgtttctataggatgagggccttgaaatccagttttctttaaatatgagaacccatgaaagatgccccaagctaataacaagatttcagattccaaaccatgattcaaatgcaaataagcgctaagcaaagccatccaatgcttatcatccattttctgctctgtctctcttcttccttttcgttttggggtacaattactagtatggaaatttttgtggggaataatggctcaaatgtccagttaatatcaaaatatttttctccatttgtaagacactatatctggaatgctgtatttcagggaatattatccagacc

SEQ ID NO: 83818 - DNA, 498 bp, Citrus sinensis
  Intron number 1 from transcript orange1.1g040162m (locus o range1.1g040162m.g) derived from phytozome v7.0 (chr-ID sc affold00090; pos 215783 to 216280)
ttcagaaccctctcttgaccaaagcactttttcaggtttcaattattattgtttttttaaattcctaaattacgtttttctgtcttatttctagataaaatttgcctcaatttttctttcttgctttttttttatgcttactatatggaatttaattttgcttttgtcactgtgataatttggttcaattagggtttcagttttgtgaatattaggttgaaagattcttcttcttatgttagctagcgagcttcgtgattcaagcgcttatgtatggaatagttcatcttgtatcattgtagttttcctgcgtcgctgagtctgtgtaaagtgttgattctcaaaacaattttcttcatgaatttatttgtatcaccatactaggtgctaaatgatgtttttgttgattgaaatttactctgtttctttaaccagcaactacttcattgattgctgatcaaaattattatgatccacttgtttaaacaggcacaaatt

SEQ ID NO: 83819 - DNA, 578 bp, Citrus sinensis
  Intron number 2 from transcript orange1.1g032967m (locus o range1.1g032967m.g) derived from phytozome v7.0 (chr-ID sc affold00008; pos 326881 to 327458 reverse strand)
ggcttccaggcggttatcaattacggggcatcgtacgttttcgatgttttcacagaaattattaattaaaatccttgttatctccttgcgggttcataatgaattcaaacgagcaccaggtgtttgatagaaagcatgtttgggcaggaggagcacttgaaaagcttaagtatcatttgtgctccaacaatgtatagataaatattctcttgaaaaattgttttccagaagacgctagggatcctaactataattgccatgttagtcgattaataatgtttataaataaattgccgcgtcaattgggactcaaatgctggaataatagttgaagtccttaaaattattgtttgtttttcttttgaagacttttttagtgctcccaaaagcagtctctgtatttgttgctttaagacttgaatgataacataaaccgtaagcttattgttattacacttgtttcatgtctctgctaatattggctgaagtgcaaaaaaaaaaagtattagtgttccacatttgtgaaattgttatcgttttcaggtgtggagtgtgcaaccagattctccccgcattct

SEQ ID NO: 83820 - DNA, 700 bp, Citrus sinensis; identical to SEQ ID NO: 82368
  Intron number 1 from transcript orange1.1g028556m (locus o range1.1g028479m.g) derived from phytozome v7.0 (chr-ID sc affold00001; pos 1080098 to 1080797)

SEQ ID NO: 83821 - DNA, 491 bp, Citrus sinensis; identical to SEQ ID NO: 82650
  Intron number 1 from transcript orange1.1g016215m (locus o range1.1g015873m.g) derived from phytozome v7.0 (chr-ID sc affold00001; pos 3946805 to 3947295 reverse strand)

SEQ ID NO: 83822 - DNA, 922 bp, Citrus sinensis
  Intron number 1 from transcript orange1.1g023376m (locus o range1.1g023376m.g) derived from phytozome v7.0 (chr-ID sc affold00084; pos 167837 to 168758 reverse strand)
acgcgcgccatctctctcaccgtccctccccctcggtaaccagttgtttgtataaagcttcaatttttcggccaagatgcttatgaaacttttaactttgattttcttcgtcattatttatttttgtttattttattattattattataatatattttttttgcattgacagaaaattaaagttgttgttaatgttattcatttgatttagttacttacaaagaagccatcgagtttgcaattcagaaataatttcttatgaaaaaaaaatcaggctgtaatttggatatataacatagcaaatacgaataaaaattattttttgtattcattatgttggaaaatgtcttggaaatgggaatgggattttgattttagtgggaaattggaattgtaaaaatttgcggtgaaaaatgaagattaggaagaaatgctgctctagctgctaagttatgcataatattaagcttatacatatcatttcaagtaggtttggcatattaaaagaagaatgtaaaagaaggaaaattaaaaggattaagatgtattttaccttcggggaaagttgtatttattgccttgattttctcacttctttgggtagtgctccaatccatgcagttgatgccgagtcatagatcaatctgttgtaatcatgcagtgtgctgggttaattgttccattgctctagcacttcctttccttcgtaggattctaatttacttgtgcgagtgtgatactaaaattgactgtttttctgtttatattcttcatgcacagaaatgaacaccaattgatttcatctgtatcaattttggatagtgattaactgctgaaagataagtcttattttgcccattctcatttttgtgtttcactttgtgcaggagcgtgcatcagtttggcttgatcaaggaaccag

SEQ ID NO: 83823 - DNA, 492 bp, Citrus sinensis
  Intron number 1 from transcript orange1.1g033248m (locus o range1.1g033248m.g) derived from phytozome v7.0 (chr-ID sc affold00013; pos 774126 to 774617)
gtgtcgccaactttgatcctgttaagcgtacctaaaggaggttctcactattgtgtgaattttctttgccccttttattgcattgttgttgcttcattgtctagctcttgttaattagcaatatatatataaatgcaagcctttgtctgattcagcatttgcaacagaaaataaaaccaaaatcaaaatagaaacttgaacggaggaatgcctcaagattcattaataaaacttgaaaaaagctgtcatattatgactatctatataacatattgactcctataaacaatccaatggagccaacaccaacaatattgtctaaaaaccaaatgcttttcaacaaattgatttctctagagaagttttttaacttaaacattccatatcccaaccctctaaattgttttgcttttttcttctctctgtacagcaattcccccaaccatatagaggctaattaagacctcaatggctgttattataggccacacc

SEQ ID NO: 83824 - DNA, 650 bp, Citrus sinensis
  Intron number 1 from transcript orange1.1g007786m (locus o range1.1g007793m.g) derived from phytozome v7.0 (chr-ID sc affold00001; pos 3628242 to 3628891 reverse strand)
agtagaaagggatttggtgagctccgaagttaacggtaagctgtagctagcgttttgaattttatccgtaggttgaagagtaaaaaattctattgaatttatgaattgcattattttgatactaaatttgagatttttatgtacagcattctctgtgttttggattattttgggatcattgggtggtatggttgtcaaattggggggaaatgcatatttcaatgctttactccctattttgttttaggcactgactgtctttccgctgccatatttgctgaggtggctgtttctgctctcgttttaaccgttagaaatttgcttatgcatgcgaattttttacttcaccgagatgtttgaggttatatgccttacaatcttgaaagtttgaggttgttgattacagttgttagatgatgtagtttaatttacagaaattgaaatttgagggagttgagattaaaaattcctctggtagtcatatattaggacctcaaattttagaaattgttatataattcttattgattttgatggctgaaatccgtcctcttttcagggacctttcttctggcggcaaagctttaaattcacgatttgtacatttttccacgactggattatagacttcacaatccttttccttctca

SEQ ID NO: 83825 - DNA, 1050 bp, Citrus sinensis
  Intron number 3 from transcript orange1.1g045447m (locus o range1.1g045447m.g) derived from phytozome v7.0 (chr-ID sc affold00052; pos 119247 to 120296 reverse strand)
ctcgtgctcaggctacgtgcactcgtcttacgcaggtgattttgtacaaactttcattatatttgttgtgttagtctttattattattggctaagcaagctcatttaggttctttagattctgagggtgcagtagctatgttggtcaacgaaattaatgttttggttgtgtataccacaattcatttatgaaatgtacttatttaaaagaatacataattcttgtatttatgtgataatttctgagagggaaaaaaagggggaaaaaacacctctcagctttgaatgcttgcattattagtgtttggttaccgctttgatcggtgcttatgatctgtcaaataagattataacctgtcatataagcttttttcttttcaagatgattgaaataagttaagtaaatgggataaaaaattcttttcaggtcctctgcaatattatttgtagaatcaaaatgcatatttttatttttgtacatttatgagaaattagagtctgagacagtgtaagcaagagcaagtgtcctcaaggagcttgaaagcgtctgctgtactggatgtttttgggtttttgttgtttgcttaggatattaatttgtggaagagctttttagttcaagtgtaatataggtagactataaatgctttgttatgattgtcagatagaaaagtgggatgaggggaggtaatgattcggagtggaaatatgttttggatgtcttgctatgtttaatgccttctgtgattatgctgtagcagtttcaagagttgtgtataaatcacttgaaattttttgcctgctgatagatttccaaggttattatttgagtcaagtttacattttcactgattctttgccatttgtccattgcactctctgacttgaatgccgttggactaactagctgtgtttttaagatttcagttcttttgatgctttattcttgttctgatacatttcaaatttttaacttggttgttctggagtgaatcttcatttgacatctcattcttggatgattaggggaaggagcttattgagaggcata

SEQ ID NO: 83826 - DNA, 547 bp, Citrus sinensis
  Intron number 2 from transcript orange1.1g045832m (locus o range1.1g045832m.g) derived from phytozome v7.0 (chr-ID sc affold00221; pos 97836 to 98382)
ttcagaagaaagagaaacttttaattaaatctcaagtgttggacaaatccaatggttgagattgaaggtcctgacaaaaatttctatcaagacgtcccactagtaaaaccaatttagctatatatatatatggggtatacatatgtatgtatgtatgtatattatatggtaatttctattttgacctcattttattattatcattcttttcattgaagcatttatacacattaggtttatttatgctttttgttttctcttgagtatgcttgtccatctgacttgatcatgcattgatgcttgtattatgaattctgtattctgatatgcaaattatgccttgcagtgctggactttaccaggcagcttctggagacaggagtagagaatgatttagtcctttctttagttgttttctccctccagtatcttctagtaaaccatgagtattggaaatacaaggtgaagcatgttcgttggaaaataacattaaaggtgtgttattgttttagtcagctgttacattaccaggagactttgatttgga

SEQ ID NO: 83827 - DNA, 893 bp, Citrus sinensis
  Intron number 2 from transcript orange1.1g018197m (locus o range1.1g018197m.g) derived from phytozome v7.0 (chr-ID sc affold00085; pos 248571 to 249463)
ctgagtggtaagtgatttcttgctcttatttttccatagcatgcctctttcagagttcagttgtcctatttatcaaattttcagtagaaatgaattttctttattgaaacatttagggcactgattcttcatgggcagtgctattcaaagactgtttaagctgcttgcattctatagaacatgtgcaaagagaaacatggatgtgtgggcagtttattgttacaagctttgttgggctcctggtggaaaatgtgttattttaccctatattgggtttagcatatttgtgttagtgggttacttttgggttgtgccgaggtaaaaaactaaaggctaatttgggattgttgttgggatggtcaaaagcgatttttgataagttaaaagttgattttggtgtttgataaaataattttaccattctaaaactgaaaaacaaggaacggatggcttttcagaataagatattgagcagtaggttttattattgaatataattccaaatacattctcgtctaaattatacaaatccaaaattgtccttacataaattattcaattccaactttaaatacattgaaaaaaagaaagtaaaaaagtcattaagatataataccatttttttagtaaaaaataaataatgtaagtcaactttctttgtttagatatttgaatctttgtatctttgttcctcttactttaatctttttaatatggctgtgttttttaatttgttactgtaagttctattttagatttcgtgctttacaatttagattctatcttaagcttattacattcaacaccgtaatctttttatttgatgatgtgctgcatttttatttttccctaattgatacattgttgaaggtttaagagattgactggcagaa

SEQ ID NO: 83828 - DNA, 977 bp, Citrus sinensis
  Intron number 1 from transcript orange1.1g024947m (locus o range1.1g024947m.g) derived from phytozome v7.0 (chr-ID sc affold00293; pos 75257 to 76233 reverse strand)
gtcattagtcataatcctgataacgacactactaggtactgcctctctcttgttttgttacttcaagttattgccctttttttggtttatttggtatttggtttgattgtatttgtttttctttttcttcttaagagtttttaatgggtgggttttggtagaattttgtgaccaactattttaactttaatttggtgaatcatgagcttgttcgacgaatggattgtaagcaattttttaatttattttctggttccttgatatctatgaacaatacaaatggggggttttaatttgaagtgtttgatggttttattttttaattttttttatgagtaaattggatggttatattctctttgttccatcggactggtgcatgattgttttgagctggttagctattgagcttttcatcttttgggacctgtaattttggttaataaattttatggttcaagttattcagtagcgggtaatctatcattttgtcttctctaatgtttgtctgttttgttgttctgagatgtctggttttgatgtgaaagattctaatgtgtatatgtatgtatgtattaaggattggattgttcattcaaagtttttggactttgaaatgatattggtcgcgtatcatttaagtatgttcttgcggtgtagcaacaattaaattgtattcaggagtggtgagatttgtacatgtgtattttcaactttctgagcttttgaagttggaatttttgaataaatttctttctatagcaacattgtggctcgacagtgaggcattggctaagttggataaaacccttggcttgaagtttgcagatgagatggtttttaattgtacttctatcggtgtttctgatttttctatttgaagtagttgttaaatggcttttaatttgttgatttggatggtgttggtgtatatacggataggattaagctcccatctggtgccaagaagattgtgc

SEQ ID NO: 83829 - DNA, 705 bp, Citrus sinensis
  Intron number 3 from transcript orange1.1g003967m (locus o range1.1g003967m.g) derived from phytozome v7.0 (chr-ID sc affold00013; pos 1364575 to 1365279 reverse strand)
ataacagctcaagatcacatcagataatcagattggtgagtattattagtgcaccattttaattttcttaatatagctgttattgtaaacttattcattgaacttctaaactatgtctgctcctcgtctctgcatcctgttttttcagtgcccttcattttcttttgagtaaactttgaatctgtagtcagagaattctatatattttgctggttgtgaaccatactgcctcagtgcaagcactttttactggtcaaatggggggtccttactttcttcgcacatgttttcttcattcagtctacttattgcttttttcatcaattgaaaaagaaaattcactgactcacattattcataagtttattgctgcaattgttggctatattactcaatgagacttcgtttgagatctcccaatgtcctaaagttttgctattttctttttgttcaaacttccattctttacaaatcatatagctacttaacataggaaatttgcttttcctgcctattcgttacctcaagtatgataaaggtcatttatatgataggttctcaggcattttccaactacatctattatttatctataaccatgagttgtatttcttctttagatgaaaatgcatattcctaacatcttgtgccgatgggtcacattttatttcagacaattgagagcagtctccgggaaaattcagg

SEQ ID NO: 83830 - DNA, 884 bp, Citrus sinensis
  Intron number 1 from transcript orange1.1g007287m (locus o range1.1g001765m.g) derived from phytozome v7.0 (chr-ID sc affold00122; pos 59560 to 60443)
tgattttgaggtaagatgatgttgcgaaatcacttctttaatgtgcttgattgttcttcttttagtgactgttgttgggttggtttctccagcttgatttatatgttgagctggatttttgtgtttgatgatttcagtgaaacgatttttgccttcttttttttaatgtttttgcgggtgatttactcattgcttgaaattatgttatcaatgtttctattattgtatattcattttggctttgatagattctttcaagacatatttttctctcccagctgcttgttctccttcttcttcttcttcttctttttcggctcccaaataatgggttaataaatagctttacttatctgattagtgtccccgttaagcatatgatgagtgttttctgctggcttaatgacatgtggcaaaatttggatcaaaattaataataatcattgtggttgggtatgtatttttgcactagttgttggttattatcttgaattttcttttctctttttaatatcatgctagaatgtgagaattaccatgtgaaagtcaggaagtacctgcctgccaaaatatatttagatggttctttggaattttgtcatcataatgaatagtacgtttctggaattttttttggggacctgaaatagtggaggccgctatcaatgaaaagtacatttaattaaagggaagaaagaatgtttgaatggtttagcatacaccatatttcttgcaaatattatgtaggagttttagtaatgagaaaaatataaggaattaaagaaataaaaatgattgtctttcacaatatatgctgatattctgacctatatttcacttctgttgcaggtttctctcttaattgttctttagttggatagtta

SEQ ID NO: 83831 - DNA, 827 bp, Citrus sinensis
  Intron number 2 from transcript orange1.1g034280m (locus o range1.1g034280m.g) derived from phytozome v7.0 (chr-ID sc affold00012; pos 799709 to 800535 reverse strand)
ctaaatatgtaagtatcaaattatatattcgtgaatgtgattatgcttattcatgttgcattttttaattttttctgtttatttgcataaaattttgcaactttaatttttttttctgtggcacatttgggtggattgtcaatttcagtgatagttggttagattccccacccaccccaaaatcaagtgttgaattatttgaattgtttatgttaaggttgacgggaccatcacatagttaaacgaaatttggtaaagttgcgatagagtaattttttcagcatatgtcaggttgaataaaaatatttgcttggtaaatatatttgtgcgagtatgattatggtttatctattttgtctgttatgaaggatgatagaagttatttatggcagatcttttttgaaatttattcatagatttgaagcacttgggttgcctagaatctgctatatatatgtgaggaaattctttgaatgtggaaaataatatgtagaatttgtggatttgaatagaatccactgccgagtgattagtatgtgtctagtctaacaattccctgacttaagtaacatcatagatttattttgttgttgcattgtcatactcttacaactcatgctctttattggtggtggctggtgagttttactttgacctatctatttaacctctttgtttgatgtgtaagaaaggtaacttgaacacttctgattattaatgtcaatatacaatttatcttactgcaattttaaatcattcttttcttttgatcctctaatttgatcctttttctttattggaacagtaagactaagaagggaagacca

SEQ ID NO: 83832 - DNA, 1014 bp, Citrus sinensis
  Intron number 3 from transcript orange1.1g029729m (locus o range1.1g027612m.g) derived from phytozome v7.0 (chr-ID sc affold00008; pos 1993513 to 1994526 reverse strand)
gagaatattgaaaaggtagggatgctttgtttgtttcataagtgatttgttgggttttctacaggatagatgtatcagtagtttgttctcacttgcttttagatgctgggttcattctttcttttccttttgccttttacagttattgaatattttacaagtgttcctatttgtgttagaaatagttaaaagtgaagctggggggaagattgcaaaattattgtattgaaaatgtcatgggagaaaaacaaagaaactcaaaattaaagaaaaataagtgacaaattggaaaatggattgctgagagcctgatgcagttacaatttcactttatatctatctgcagctcattaatactttcattttaaggtctgattggtagcaagtcgttagttctctttttagactctctattgaagcaggctattaggcatgccaaacaatttggcttctccttcctcaatgtctaagaaaagtaacatgtacacatgtgattgcattcgagaaggtgagaggtgttgttaaatgtgtttttctcttgatgaggttttaggaatagtatcatgaatttggaaatttcatttccctaatttgtatcttatagcacctcacttgaatcatatttattatgccacgaaggtttttttgtgcttttgagaattatatgtataaccagttaataattatttgcacgatttaatctctgtgtagtttaagttgcatagcagataatgttccgacaaaaagatcgataactgcacacttctaggataaaattctatgttggaaaagttgactaactccattttttcttttttatgtaaaatgcaaatatcctcttattgaatcaaaataatgtgtggtacattctgttgacttatacggactatttggacctcaatgccttttcatcccttgtttgtcactgttgtggtatagtcatcactgactcatccttgagttttgatgcaggttttagataggggggaaaagattgagctactggtcgataag

SEQ ID NO: 83833 - DNA, 609 bp, Citrus sinensis
  Intron number 3 from transcript orange1.1g000607m (locus o range1.1g000607m.g) derived from phytozome v7.0 (chr-ID sc affold00367; pos 86228 to 86836 reverse strand)
tcttcttggttccaaaagtggttctggtacctcaggtatgctcagatatgtgtttgtggattcatatccagtggaactctttttttctttttttcaaaattcagccagcaattgcagaggggggaaagattgccccttatttaatagaattgaaaagttttttgccattaagattttaaaatgcttgatctgggttaaagataaaagagataaatatgacatttctttgtatttatacaagtagcttccaaacaagcttcatgagttttagatttgtttgttgaagcttaagtttttgaaattcagactggaactaatgtgaaaatcattatatttcaaattcagatattagttctaccatcgaatttcagaacttgttaacaccaaagaagaaaatcttacacatttgacttctattaataactcttattaaaacttttagatttggtttttgtttatgtccaaaagttgtatattgccgacattgtagaattagtggatgttccctggagttcaaattcaaaagtttgatttttcattgctttgattttgattttatattttatgctttaatttttttttttaaactagcaagctgaagctattaaa

SEQ ID NO: 83834 - DNA, 538 bp, Citrus sinensis
  Intron number 1 from transcript orange1.1g006078m (locus o range1.1g004579m.g) derived from phytozome v7.0 (chr-ID sc affold00268; pos 166629 to 167166 reverse strand)
tctttttttttggcttctctttcatcactccctctgtaagttgttcatcgtattcatattcttagcacattcacatcacacactaatcacagtcactacaaagttttaatccgatcccaaattcttccctttcccgaccaaattagattttcacatatccattttactccaagttagttttttattttttaaatttttaagcctgctgaatgactttcaatggtgtgattttgattacccatttggataaaatgaaaaagctgtgatctttgttttaaagtttgaatttttattttatgtcattattactgtgtttttttttgtggttttggggggggcgcgggggattgtaattgttagaggggtgtcaattgtgtgagtttgatttctacccatttggaaaaaagaaaaagaaaaagcagtgacccatttggaaaaatgaaaaaatgaaaaagcagtgatctttattattaagattgaattttgatcttgattttgatttttttttttttttgggaatgactgttacaggtgaaaa

SEQ ID NO: 83835 - DNA, 874 bp, Citrus sinensis
  Intron number 1 from transcript orange1.1g001120m (locus o range1.1g000982m.g) derived from phytozome v7.0 (chr-ID sc affold00001; pos 4316895 to 4317768 reverse strand)
gttgtggcggattcgtcgaggtgaatctttatctctttattattattgcctttttctggctgcggagagaatgcaagaaaagaaagaaaatggaagaaaagaaggaggaatctaaaatcttggataaataaggctaattcccagatacctagctatgacggagtctttttccactgaacgtaaaaatgcggatctaacgttcttgtgttttaaattggcatcaattttgttgttaggagagtcagtctaacaaggaatcgctgttttataggcgagttcatccttgataaaatcgaggaaagcaacggatgcaagattggattattctcatgttactgtaagaataaccactgtttcttactaaaataatcggttatactattgacttttttttttttttaaatgtaacatgagtcttgaaatttgttgtgggatataactatatctttttccaaattttaggttgaactgcgtacattggatggactggtgaaggagagtacccagtgtgctcccaatggttattactttattccagtatatgacaaggtgtgtttcaaatttagttgttcttgcgttagtctttagattatatagtacttactattgctccgtgcttgctgttacagagagtggggcaaattctattaaccattaagtgattattattttcccaataatgtcttcaaagttaggttttattccataaattttttatttatcccttccaaacaacccagtgacccatggagccaaggcctatcatacatatgcttgttttatacagcctgttcttgcatttatttgagttcatctgatcagttttatttctatttcagggttcttttgtgattaaagtcaacggaccggaagg

SEQ ID NO: 83836 - DNA, 534 bp, Citrus sinensis
  Intron number 1 from transcript orange1.1g028096m (locus o range1.1g028096m.g) derived from phytozome v7.0 (chr-ID sc affold00015; pos 503293 to 503826 reverse strand)
aggtaaattatcagatctattggttgtttagactaatgaattaagcgttttagtttagtttattcttttatgatgttgttaatgtagaatgaggaggttgattttgtgtaattaaattgagataatgcattgccattttgttaatttgtttccatttgtaagagtaaacattgtgttgtgatgccattttattgagattgtggaattggtgccttattaaatcaatcccttcaatttgattatgatactaagctgttgattattgtgtcatctgaaaataatacatcatacgtgtctgaaatgaaaccaaattctgaagggattattttgtgaagagcggtgctgcttatattatagtctgtgtttgttttgaggattttgtttaaatttgctttttatttgatcaaattttccattaactggaaaccagtgaatctttgagtaaacatcgtaggagcagtctagaattgaatgagaatgatttcatgccacctgacgaccccacgggtttgttgttacaggctttcaactggc

SEQ ID NO: 83837 - DNA, 712 bp, Citrus sinensis
  Intron number 1 from transcript orange1.1g043927m (locus o range1.1g043927m.g) derived from phytozome v7.0 (chr-ID sc affold00352; pos 38340 to 39051)
cctctggaggtccccctacaggtttgcttcaatatttgtgatttattgatgattcattagtgtcaaatgatgtactgttcattggcgtctttttgtattggttgtattaatttcaaattagtgatggaatctgactgaggcaaacgggttacagggctaatgtttgtttgcacctgatgtagtctatgacttgcaccatggcttatgtaactacaattcttcagcagtttcttaattgttgcagttaattgtgtttggttgttctcaagaacagttctttgattctgagagcatgcttttatcataatcgtttcaatatagaagctagaagattcttttgggtacacagcacacagtatcagatgattcacatttgtttttcttagatatgaaagttattattattcttttcaaacttttgaatcctaaccggaccaatattgtgtgacagtgcgctttcttatgaatttacggttttgaacttttgctttgattttgatctgtacccaatttcatgatggctgataaatgataataaggtatattttgtcggggactgggatagtaattttgtcttcatgtcatcgcagtgtgttgtattttatgatctcattgatatgtttgggcggtttgtgttttgctctctttcttcctgtcccagcttcattttctgcttactttgccctttgtgttcactttatagggggatcca

SEQ ID NO: 83838 - DNA, 574 bp, Citrus sinensis
  Intron number 1 from transcript orange1.1g042493m (locus o range1.1g042493m.g) derived from phytozome v7.0 (chr-ID sc affold02885; pos 349 to 922)
ccagcatcaggtataatattgtgtctggcatagataccattggaattctttgtttctgttgaatgttttccagcagctatatctgtcactagtgcttttaagtgaagttttaagtttccgtgtgaaaattttgttacatatcaagtggaaggcactgcactgaagcattggtacttctagatggcttgttctggatggtagatttcaatccattgcttttatttcttggatcatgtttatcattgaggactttcttggccagagatagagctgactggcgctaccatcatcattggtagcgcaaaacagtcaaaattcctatgggatgctttttgacttagagaagacgtcttcaagaatttatggatttaaatcttcacatgatgttcaactattgatagtctaaccttggtacaggatgtacagctgtcttcaaagtttgtgctcataaacgaataacctgtctttaatctttatgatacccgttaaatttgttagctttctgggatttggaggttgtaaatgtccataaacaacagtgtcttctcttccttacagtgtgcatcagattact

SEQ ID NO: 83839 - DNA, 654 bp, Citrus sinensis
  Intron number 1 from transcript orange1.1g031883m (locus o range1.1g031883m.g) derived from phytozome v7.0 (chr-ID sc affold07872; pos 1195 to 1848 reverse strand)
ctcttaccgtctccaacacttggattcacgccaaggtcatccctcaccgttttcttattttgatttttttcttttaaattttctaattcgtgtgagatagatcatagataagggtgggttgaaagatagatagacggatagatataagatagaaatagaatttttgtcaatagaccaaagaataggaatcgctatgccctttgattaggttttcttcttattgatatgatacgttatagattttgttgttggatccctgtcctgtccaatatacatgttaattgctgtattctgaaactgttaaatagcattatagagtttgttaattctcagtgatttgatttggatattatttgtggctgtggaccacccttgagatggtttgacctccagcaatacgagttgtgtagtgttcatgtccaagattttctgataattagcctacaggttgttaagaatccaatcccttggtctatcctttctgtgacaagctttacactcgttcctgctttgatgatgctgtctgtttcccatctaattgaaattgatttaggattaggaacctatactcaggcaaatgacagggagacgctattaacgtcttctgctttaatttgctcttgctgtttctgagtccattgttttgttgacagg

SEQ ID NO: 83840 - DNA, 1024 bp, Citrus sinensis
  Intron number 2 from transcript orange1.1g020756m (locus o range1.1g013871m.g) derived from phytozome v7.0 (chr-ID sc affold00037; pos 505653 to 506676)
acaaaaaccacgtaattaaaattattgttgacatattacatttttgaggaaaattaagatttggaaccattttctttaatattcaaagttcttgtgtatcagtgagatttataaagtctgtatctaattatgattatatcacaaattgaggtcaccaaatcatagcggaggattgaaaatctgacattgtgtgtttatctatgctttgctactgtgtttgaacatatgtgctaatcggtattatgtttttcataatttttcaattgtttatagtatgtttatccttcaggccgtcaatcagatttagttcagatgaagctgttgcatgccgtatggcaacaaacgaaatacaattttttgatactacggattttcctaaaggaatcttatatcggttaagagttcctggggtggctgcttttgaggtttctaaggcacctggttctcatgtggcggtatttgttccagaatctaaggtttgtcctccctgttttcagcttagtctgggagctcaattttgtttacgttaatggatgggggaactaatgcagaaatggcttaagatgtcaagccttgcatgcaagttactgattacaattttcctatttgttcgtatcttgggtgaaaaatgtactgagactttgtctgtttgaattgtcaaccatgtcatagatctgaaggtttacacaagtatctagttcatgtgttgttatatcgatgtattacttgaaggcttaaaatttgttaaagctgaactttcagaagtttcaaattttattgatgttggaggagtataatgggaagaagacgacattatggaatattgatctatctttgtgatctcgtcggttgtggtagatctgatctgggccaacattctaggttatcaagacaattagcgtttcactttggtctgaagggttccttcttgtatttgattttcaagtagattttatattcgacttataaatattaaaaaaatgttttttgacaatgtaggggagtcctgccagtgtccagatat

SEQ ID NO: 83841 - DNA, 724 bp, Citrus sinensis
  Intron number 2 from transcript orange1.1g026914m (locus o range1.1g026914m.g) derived from phytozome v7.0 (chr-ID sc affold00055; pos 7824 to 8547)
tgcacaaaagttctgtgctacccaaaacagttcaggtacttttctatttcactcccttttggctgctgagaaactactggaaattgacaccaaaaggggaaaaaaaagtttcttggttttatatttttcatgtttttgagttgttaattttaagcgtttttaaggataccaagcagagttttattttcaaaactttttttctttttgcaatttgaaaattatatattaatggtatgaaattactttgtccgaaagaaatgtagctaaattatgtcgttttattatttttgctttgagtgcgcttgtaagtgatcttgtagaaagcttgcattttctgttaaaaaaaaacactttatgaaagagctcctattaattgcttttcctaaagggaatttcaaatgcttttctaacctaatcacaaaagcaagtttatatatttcaaacactacaagagataaatagaaatgactttagttattctgctgatagtatctgctggtaaaactttttgggtagtataagagatcagggcccatcaagcttttactaaaaattttctgtcaaaaaataaaagaaaggaaaagaaaaaatttaggagtaatttttacttttttttaaagattttatttgcctgtttttagcaaccaaactcattactggtatgtcctgtgtaatttggagagtttatttgaggtttacagagtagttgttcacagggaaagtc

SEQ ID NO: 83842 - DNA, 788 bp, Citrus sinensis
  Intron number 1 from transcript orange1.1g012605m (locus o range1.1g012605m.g) derived from phytozome v7.0 (chr-ID sc affold00008; pos 2346234 to 2347021)
atctcatctccgaggaatctgggtattaagagaaggtcagatttattatttaatttctttttcacctgttgcttgcatgaattaactaaaaacaaactggattattattattattaatttatttattattaaagtattacttgacccggggggcttattaaatgttgctatgatgccggctgtatttagagaaataatgaaatttattgtattttcataaaatcatgtatatatgaggatctgcagcaattagggtttggtattaagcacaagaacagttgttagagagggggcggggtgtgatttcaggtgagattgctctcctagtcaaaatttgaataccaaaagtgaataatatatctatcttgatgatgtgtttttatcaacctgaaaaaggtaatctaactgttgtcacaataagattcacatactttgctttcatgttgttttcagaaaatacttttcctttttcttctctaactagcctggaaagataaccatgtattggtccatttgttcttccaaatatgccaacctttcctctttcttcaagagaaaaatatagagaacttcggctaaaaattaaagtgataaggtgatgaatatatgcctcatgcatcatcatgctgatgttattactgttattgttatttttctgaaattaatttctgtttgtgagaaaattgaagaaacatacatggtcgaatgttccaattatttacagagttattttatactgttattataacacaggaagagccaggcgaagaaggtggtttgtattccgg

SEQ ID NO: 83843 - DNA, 823 bp, Citrus sinensis
  Intron number 1 from transcript orange1.1g009630m (locus o range1.1g009630m.g) derived from phytozome v7.0 (chr-ID sc affold00020; pos 1638243 to 1639065)
aggagactggtaagttgtcattgttgttcaggttttatattttcttagaagtttatatttgattaatgaatgatgttagcaaaggacttgcaacttctgggctgattgatttttgagtgattgtattggtgaaaagaataaatattggtgagagctgtgatagatattgttgttgttgttgttgttgaagttaaatcaacgggtggaattaatctgctgtgcggtttaatgggtagctgttagggtgtgttttggtaattcttatgtttccatagtattataaggtatgagggggtagaacctgatactgcaaatcgatggcatgcttctcttttatatgcatgtggtttagtgcatttctgtgtataatgggttagagaaacatttaattctgtctttgcatgtcactgcctcaaattctgaagtcctataattattatttaatatgagattgattttttaatttatttttctcttcaaggggggaaaattaatttgatatttcatcgtttttctattttatacttttgggttgtgtttgcaaattcatgttatgctgagatcaaccttgtcaaatcacccttgtagggattaggcatgggtaacttgcacttctctaagatttggcctgctcatgtaaccattttatcaacgaacatgaatgttttttattgcttttctcttcaagcagagatcagaaccaatttggagttgctagctcatattgattaattatatattttgaataattgtttttcttgctagtttttggtcattttttggacaaccaaattgggtaatttttttggactcactgcagttg

SEQ ID NO: 83844 - DNA, 682 bp, Citrus sinensis
  Intron number 1 from transcript orange1.1g029178m (locus o range1.1g029178m.g) derived from phytozome v7.0 (chr-ID sc affold00029; pos 554498 to 555179)
ctgttccagcttctaaaaagaaagatcagcaaaaggcataaattttctgctttcctttttatattagttctctacattcatttctaagagctgtaaggaagaatcctgttttaggttagattttggccatgtttaggtgagaatttcaagccaatttttcttgaggcgtttctttttttttttgtatttacatgcagtgcacagaagtgtgatatgcttattgtttcctgaagaaacatattagaagcatcacccatttaccttgctaatatagttatgttctctagagctttttatgtgttcttccaatgttgaatgaagtaagcagttcagtattttcccagatatttgaagagaagaatggtaggctaagttatttggactgttggaatgaggcttgatttaagtttgatgtgtcttaaataaattttgagaaatagacagaaggaaaaaaagggttcacatgtctgtttgtatgaaatttaaatagttttttcataaaataggtcgaattaagcatgtcttttcacctcccttgcacctaagtttggactcttcaactgacgtattagcttctcagtgtattatctagatctacagatgtgcacgtattttctgttccttctttttgtctcagaaattctaagcctgcatcttttcattcaggctgagacatccgtgg

SEQ ID NO: 83845 - DNA, 926 bp, Citrus sinensis
  Intron number 2 from transcript orange1.1g043469m (locus o range1.1g043469m.g) derived from phytozome v7.0 (chr-ID sc affold00075; pos 414736 to 415661 reverse strand)
tggacaaagacaccatctcggctgagtttctgtaagtcatatctccttcatccagtcctctgtttacttcgacattctgaaaatagggatagtgtggcagtgtacttgcacatattgtgggggctgctcaatatatttgatatgagtacttgaatgattactttaacgcgcaattttttatctttccattttaaggattcattagggagtgctaatgttgagaacatagttaatgtagcaggttttgaatttaacatttcagcatgcataaataaagagagatacttgtctggaattgaaccagaggtcttgacattagcttgaagatgtgctaatgtaatgctaagatgtggatcttctattaagaaaattgacaatcataagccattgcttaaaagcttgagtttctgattctcattgcatattttagctggtgagcctagaatatcagtactactagtttgttacttctcgcttatgtaaaaatttatttagatctacatattactgtcaacaatagtatgataaagaaaatattgctatttagtttctcttttaaacctttggatatgtgacattagcatgacattgtgaatttaaaaaattatttctaagagatctagttccatctggatgctgttcttgaatctccagttagcatgtttagctctttgtgcttatatttgctctctagtttctggttgttggagtgggcgggaggtgggtgttgtttatttgctaatatagtaataaatattataggctggtttagccattgcatgtcttcttatttatgcaattcaatgtgagttcaaagtacatgtagcatgttactataaattgactgtgacatttgtgaattgggaattatcagtcgcaatttctatgtacaacacactgacttcgcgattgttttgagtgcagaa

SEQ ID NO: 83846 - DNA, 439 bp, Citrus clementina
  Intron number 1 from transcript clementine0.9_025688m (loc us clementine0.9_025688m.g) derived from phytozome v7.0 (c hr-ID scaffold_82; pos 1035846 to 1036284)
ctgtaccatcttcttcaccgtctgcaacggccaaagtaagtagggctacaaagttttggttttctggtgttgtgttgtgttgtgttgccttttatcacctgtaggattgtaaaaagttaatgttattcgtttgattggtcagagaagaaaaaagcatgacccatttgtgaaactttcttggacagtataaaggtttgaaattctaatgctttagccggaaagattaacaagaaatgaatattaaaaaaaaattaccttgaattatttggttttgatgaatttttgacaaaaaccgggtccaacccggcacgaaccgggttttaatcgggtctggtaactgcgctgtgtcttcaattcaagtatatcagcagctatcaatggtttcataactgttaacattaacatgtgttttgtttgttggtggtgttgatccagcaag

SEQ ID NO: 83847 - DNA, 894 bp, Citrus clementina
  Intron number 2 from transcript clementine0.9_025688m (loc us clementine0.9_025688m.g) derived from phytozome v7.0 (c hr-ID scaffold_82; pos 1036597 to 1037490)
ccaggtggtataattggtgaaattgccagaatcaggtatgtttatgttcctcaatattgattctattaggtcgtacatcttattgttggtttcttaacaaatttgaacctttgtttttagtagctgcacaaatatttactgattttgttactcaaaatattgatttttggttgaaagttttgtactcaacaagtataaaaaggttggagtgaaaatatttgcacacagcggaaaaaaaaaataaaaattgaagtctctccttcctttctcccttgctttctaaattttcttcaccacaattaacattactttgttgttctaaaatgttgcacttagagtgcaactgcatgtacaatagtgtcataatatcctaaggtcagttcgctttgttttaaattacattttacactgggaaatcttccttagagtgaaactgtgtttcagatagtgcaacagttgcattccttaatgtttaactgtcgttgctgtcaattagttcatgtggtttgctgtgttgttgttttcttctttcactgtttattattgtttttatgtccactggtttgctgttttagctgtttactgactcgctgttcttgctggtctgatttgttgagctgctgttttttggtccttatgcctctcattttccttaagagttattacatatctctgattaatttggtgatgcattaaggggtaagattaattatgtcttggttatttgtaactgtttttttcttctttttagttaataaatcccctttctctgacaattcttgagataatattacaagcattgttagtgtagatatttgggaattctttttgtggattttgagattgaatataaaattttttacgtatgttctttcaggtttcttgtcaactgac

SEQ ID NO: 83848 - DNA, 687 bp, Citrus clementina
  Intron number 1 from transcript clementine0.9_023162m (loc us clementine0.9_021015m.g) derived from phytozome v7.0 (c hr-ID scaffold_23; pos 3231213 to 3231899 reverse strand)
gactccgccgtcggcaagtctcagatactggcaaggtttgctcgaaacgagttcagtttggactctaaagccaccattggagttgagtttcaaactaggactttagttattcaacataagagcgtcaaggcacagatctgggacactgctggccaagaacggtgcctttttttttttcacttctcaattcttcttcttttacgtgtgtaatagcttctgatctgattgtttctgtatcgcatgtttttactttagatttttgctgaaactgtattgtgggttaggttcagtagcagttttgaaccactgggttcggttgatgcctttgaatgtttgtgatttcatccaaatatgggttatttgtcgatgtgtattaactatgcatatcagattgatctttgcggtttaaagtgcgttgatttaatcgcttaaaacttgtgtttgatttctgtgatacaagtgaattgggggatcctgtttagtgatcggattattagtgttattggattggacataagagttacttactctcgaatgatcctgctgcatgagttgtggatttaatttgtacagtttgtcatggcacaccaggcattggatttataatttatcgatttccttcctctccttgtccttttggtgtaatgagcagatacagggctgttacaagtgcatattacagaggtg

SEQ ID NO: 83849 - DNA, 344 bp, Citrus clementina
  Intron number 2 from transcript clementine0.9_034190m (loc us clementine0.9_034190m.g) derived from phytozome v7.0 (c hr-ID scaffold_1; pos 5421677 to 5422020 reverse strand)
aggttttgctcatttagatttcaatcttcttaatgctttcattggccactgacgtacatttttccctaaaatgtttcacttttaccattcatcctcttgcctaaactcaaaatttcaagtaaataggcttctaacctcaattttttcaaagtaaatagcagaagcttttatcagcatttcggaaaaaatatcagcagtcataatttttcttaggagttggcattatttcaattcacaaactttatttcattttgaattagtatgtgtttttctgattttgttgatggtgaaagaaattagaagttccttttttttaaattttcctttcttccaggtggatatat

SEQ ID NO: 83850 - DNA, 876 bp, Citrus clementina
  Intron number 1 from transcript clementine0.9_028996m (loc us clementine0.9_028996m.g) derived from phytozome v7.0 (c hr-ID scaffold_51; pos 1227985 to 1228860 reverse strand)
cggtgctcatagaatcccttatatttgcattggaggttagtttttagttaaatccaaaacttcatccttttattatctttctatgcttttgattccaattgtctagttctaagcgcatgccttcttttggtagtaaaatgaaaagtaaatgtagatccatatgtatttcagaatcctattaacgatggcattttgcttggttgagttgactgactttactgatccttcaagcttcttagaccagcttaatcctgaaacaaactttacagactgcaatgttttatttgtaatgttgtattagtacaaagtcaagcatcttcagaactgatggtttttaatatttaaatcgaagtgattcaatttagactttggagacatcgatgtggatatattgtttcttatatatgacaaatcttgttattatcctttcggctattgaaatgttttcgttgtaatcctgatttattgcaatgttgaggatggtcggttaattgtaaaacacaagtaattcagttttggagatatccgtttgtaccataatttttattctatcttctatctccagaactcaagctgttttctctaagatagttgattgattatttatttttagcaaattcttaagactatagaagcaaagaaatctaatcttgtgacctggggcatgggaggcctaagtctaaggagtgactagggactcattctgccaagaagtttgcagctgccctttcagcttattagtcaaacgaacaactaagattgcaaataaaacgtccaacaacttaagtgattggtgatttattaactaattagaaattctcacataaatcaaacttctcagtctttctgcagattttgtcctgggggccgttggca

SEQ ID NO: 83851 - DNA, 915 bp, Citrus clementina
  Intron number 2 from transcript clementine0.9_000489m (loc us clementine0.9_000180m.g) derived from phytozome v7.0 (c hr-ID scaffold_20; pos 3939196 to 3940110 reverse strand)
cttttggtagacctataggtaaatttcttttcctttcttttcctttcttttcctttcttttcctttcttttttatttaataaaagcactacacaacgaggacaatgcatgttaataggtgtttctgtcatggtttaatgtaagggtttaaaaattagttgtagatgaacagataaaccttcccaattggaggggttagaattagttgtgtttacatcttgtgttgtttgcttttggtcttcattcatgcagtttgcatgtcttgggtccgtcagtttcttgtaagcctacatcggcaactgaactatgctactatctcagggtagtgtcttgacttgatcattgcttctattgtttatgaaaaattgaggttagaaggattatcagtatgcagattttttgttgcttagttgtgattttggttgaaagggtttaaacagagaaaagattaatagtatttgcttgtaatattccttgatattcattgttattactacctaagtttggtccttattgggagctgatgagttcaaattgctgagtaattgggcttgaagctctcgccttaccaacgagccgactgctgatgaccgttggtcacgactactgccaaaaagctccaatgaagatgaatatttcacatggaggagtgtgcatctttatgttgggtgttcttctgtcgtgatcttccttgtcacatggtcatttaacatgttagtctgcattttcattacatctctgttggtttatttttgaattctgtttcttcttatagtacattgactaattgactctgtgtagaacaacatatgacagctttggttttgcttgcttcagtttttgtggttttatttgctgaaggtactcaacagtggtttgcctaataacttcttatactacgctaggaccagcagca

SEQ ID NO: 83852 - DNA, 811 bp, Citrus clementina
  Intron number 2 from transcript clementine0.9_007168m (loc us clementine0.9_007168m.g) derived from phytozome v7.0 (c hr-ID scaffold_23; pos 2967239 to 2968049 reverse strand)
acagagtgcttcttaaggtctgtctgtgccttaattgttatttcgtttcttcattgattttgtgtttttgttagttgtttacgctctgaatgttgcttataaaattcaacattctttctatttgctactttaccacttggaacaacaaaaacaatgagctgcattggtggtattctcatcacttttggatattattatgtgaattgtcgttttatgttcagaatttgtgaggatacaacacacagtcatgtaaccaaattttccgatgtagagctcgagctccttgtctgttcataaaagctagaatcatgaatttattacttccgaacaccaacaattctttaacaatgttttaatagttgcaattcattgttacaactcccttcattacaagtttttgcagtactctgcttacgactatcccatatctttcctgagtaatcttctttagaacctttgaaattttatcttaatattttttattaagtgatggggaaactattggatacaatgatgaatcagaccatatgcaacttgggaactatggttagagttgatacattatcgactgcagtaaaagtttaagatgaagtatgagacaaattaaggagagaataagtgtgaaagatgaaaattcatgcaagctatggtgttaataattctgacaaaggcctattgttaaatctctgaagctctggtggaagatttgactaaaaatgatttggttctttgaaatgttgtaactgatttttcttgaaataatgaaacattttcaggtcataaatttctcatcacccacatctgctggtgc

SEQ ID NO: 83853 - DNA, 591 bp, Citrus clementina
  Intron number 1 from transcript clementine0.9_008515m (loc us clementine0.9_008515m.g) derived from phytozome v7.0 (c hr-ID scaffold_53; pos 1115379 to 1115969 reverse strand)
agtggtacaagtactaattgtaattatttttgttttcttttcttaagtcattatttttgttatgaattttattttcacagaactgttaaagtttacaaccttatgtgtgaatttaatttctttctatatttatcatcttcgggtttccatctaagcaaagtgaagatacataatttttttttccctttaaagtgatatatcagcatcattagttgaagggatatgttttgcatgaggttgaggatatgtaaaagtctcttgtttcgtttttgagaaaggataggagctgtgtgaaatttgttcatttaacgggattgtctataatcacttagtaagtatgtgtcgatttgtttttattgggtatgctaagctttgtgtgaggtttcacctaataacttgctcagtttgattattttgccaaaattgaacattgaagcatgagcattcatagcgattttctttaggttgggagaaaataaatgtgttaatatggaggtattgtgattgtaactgcatttggatatcattgcatgattattgtttacctcttttgatatgtgtatgatttgtaatttttgggtctatcagcag

SEQ ID NO: 83854 - DNA, 341 bp, Citrus clementina
  Intron number 2 from transcript clementine0.9_012814m (loc us clementine0.9_010931m.g) derived from phytozome v7.0 (c hr-ID scaffold_23; pos 2136945 to 2137285 reverse strand)
ttcaagcttttttccgtttcatctcatactctcaggtttctaatttttttttctaacaaaaaaatataattttgtttttcgtgtttacgttgtttggttgttatcttttcgaattcgctgtcgattttgtaaataggatagatagatgatcgagggataactatatgatagcaataataaccttcaaaagtaaactaagggttaatatttaaattagtcagccaagaaatgctacaactcaaagcaatgattttcttatttttcatattaggagttgtgtgtgtttgtgtgttgagaacaagagtgttggtttgatatgttgacatttctgtgaaacagca

SEQ ID NO: 83855 - DNA, 786 bp, Citrus clementina
  Intron number 1 from transcript clementine0.9_015581m (loc us clementine0.9_015586m.g) derived from phytozome v7.0 (c hr-ID scaffold_53; pos 1337170 to 1337955)
aagaggatctgctgaaaggtacttggtatccggttatattcttattatagttttgatggctcttgtagtttttggatttcttttgtttaattagtttagttatgtgattgggattgctgtatattcatttgtgattttgctcacaattatataaagggatttgttaacatatgaagatcattcattttcctcatgttatgggataatacagatggtacttccaatgtaattacaaaagtaagtcattaattccaaatttgtctccctaaaatataccgtggtaagaaaattgtgtttctctactgttgcttttcatgtggcggtcaattgtattttactttgctgctttgattagtaatgttgaactatggttacaccttcagttgtttttgttttgtatcatcctagtcctattttctcaacctgcactggtttcaggtaaataagtcttcaatattcttacagctgggaggaagaggagatgaggaaagttggtgttgaattagattagttagtgtttcctagcaaatgaaacgatgaactacaacacgaagcacataagtcattctgtagatttcatctctgctatttatgcatacacttgtatagttgtattgagacaattagtatttccttaatacactcacaagacatccttgactttcttctatgagcacagatgatcttgttttctctttgcttttttggaattggcaaattgctaaatatgagtgttctttaatgattgcagaggttgagcagcttttggagccagaggagagagaa

SEQ ID NO: 83856 - DNA, 978 bp, Citrus clementina
  Intron number 1 from transcript clementine0.9_006123m (loc us clementine0.9_004308m.g) derived from phytozome v7.0 (c hr-ID scaffold_143; pos 157393 to 158370 reverse strand)
gaagccaccattggcgatttggtttcaatttcgaggttttaaaagtactttactttctccaccattaacgctttataatttacgcctgccaagccaaagtgctgccaacctttggaagtgcttttgttgggttcaatacaaagcacttttgaggagttttggctctttttttatattgtgctcaaaggtgggaaaattgacctttgaggtgttgctcaagccttgatcttaggtgggtcggtaattgttttggacttcttttgtttgttgctttgcattgaaaccaagatattagtcctaagaaccttgttgattgatgctttggtttgtgttgcttgtatttgattattgtatattttccgggttttaggcaaattttatattgggattaatgagcaaaggtggtttagaacatgctaaacgaaaaattggcaacttgccattggtgttttgaggggttagaagctggttcctcgtacttacccatgttagtaaattgtatattctgttgaattacttattactagctgtttagtcttattaatttacatagtctagagaggaaaactcggtccgtgatttgaggtttcggtgggttatttaaggggtctgtgagctttttgtttagatgcataggaggagtgcttgagagaagtggtctttaatgtggaattttggtctcgattacaagacatgctgagctctgatgagggtgtagatgatgtgttctttgactccactgattgtttgtcattcgaagaatcagttgtatcagaagaagaattggggcccgggaaattagattatgatatttggatgagtgagccacgaagtgtgaaggaaagacgtaagaattttttatgtaaaatgggtcttgttgagttttcttcaaagaatgagattacttttgatgattcatcgcagatgatgggattggataggattattgaatgtagtggagctgtttcaggttcttcg

SEQ ID NO: 83857 - DNA, 533 bp, Citrus clementina
  Intron number 1 from transcript clementine0.9_001442m (loc us clementine0.9_001442m.g) derived from phytozome v7.0 (c hr-ID scaffold_20; pos 1466163 to 1466695 reverse strand)
ccaacgcctcaacctctatagatctggttcctcaggtcagtctttcttctttttttttctttttttttttaaatttttgtcgttgaatatttttgtggagatatacatgtgggttgcttgattgattgatttaattatgctttgttgttattttacctggctgtagcagatcggatatttgttagttaccttttctgttcttcttcttcttcttattattatttgattttgatttttgctttcgaaaataattgaatagagttaggttacgctttggtggttgtgatttgaaagtaaaaaaaaaaaaaatccgtttgatgaagcctggtagagtcgtcttagaaagaattgttttggaaaggaggcctattaattaccacttttagggatttttaaaaatgttggtctgatgggaatttatgttatttggcgggtgatagtctttgcttctgagtaaagttttttgggcttgtggtaacatgtgtttattttctgcagattttgtgcaaatttgaaattggtcgaatattttt

SEQ ID NO: 83858 - DNA, 641 bp, Citrus clementina
  Intron number 2 from transcript clementine0.9_016304m (loc us clementine0.9_009730m.g) derived from phytozome v7.0 (c hr-ID scaffold_53; pos 563475 to 564115)
ttattcacttggtaagtgctgtctacttgcttgttatcacgtctggttttgcataatctgatgttatgagcccgtgtatgcttctcattatccaagcttgaaatgacatgttaaactctaaagttactgtggagcagatgtggcttagtgtttcatgatcagagtctttaaaggtgaaaccatacatgtttaaaatcaattgaactgcagttggtgtatgccacttataattagttaacttggaggatctgaacgaagactgtttttatctgttttttacaacttgattaaattctgtcaattttgattataaccaattggatcacagatggttatgcctcttatttagatgcttttgttggagacagtttggaaattttatcatgtccgtcatacacctttctaaggtctatcttgaggcatatatgtacaggtgtcattctgcacttatatcttatctgtttgcaatttcttttcttcccccacaacccccccccccccccggggcgttgaaatgatgtttgagatggttcctggtggtatatttatcgtacatctttaatttttctttaggatgtgatcatgtctatctggtacttgttttaggtcttttctgcttttggctttgtgcataagattgc

SEQ ID NO: 83859 - DNA, 656 bp, Citrus clementina
  Intron number 4 from transcript clementine0.9_009005m (loc us clementine0.9_009005m.g) derived from phytozome v7.0 (c hr-ID scaffold_29; pos 2814222 to 2814877 reverse strand)
caggtatgaaagttaatctaagactttgtgtttcagattgtactcttacatttgtgcttgatggcatgaagtagaacttgtttctactgccgtgcaggaaaattaaattttactccatattgtcacttgcagtgacaattttcagtcaacaaagtggatttgtaatgcatttaaaggtttttggtagcattttgggtacagctggaaggtttacatgacaatttatgtgttaatttatattaataattttcttcttagaggttaagtaaaacaggttgattgcatttttcatgcatctaccaaatttatgactaggcatagaatggaagataaatgtaaaactactgaaatatctgtgaaatgctcttagttcaagcggctgagtagcttctttgccttgaatggccggatttgggctcttctattgttgtgtgtacattttttgagaaataaaaaatgaagttagtttactgaagtttaatatcttctgaagttggttttaattaccttgaggacactgagggtgtttgatctttgcagtttattcccattttgaatggttttctttgttctgttcatttctttttatttttttccttactagtcatgtagttaaaccaacacatttggatacagcttgctttttttgcttgcag

SEQ ID NO: 83860 - DNA, 564 bp, Citrus clementina; identical to SEQ ID NO: 82384
  Intron number 3 from transcript clementine0.9_026268m (loc us clementine0.9_026268m.g) derived from phytozome v7.0 (c hr-ID scaffold_38; pos 408687 to 409250)

SEQ ID NO: 83861 - DNA, 562 bp, Citrus clementina
  Intron number 1 from transcript clementine0.9_006682m (loc us clementine0.9_006685m.g) derived from phytozome v7.0 (c hr-ID scaffold_53; pos 558715 to 559276 reverse strand)
ctctcttctgccgtcaccggcatctatcaaacgacgtacagtatctgtccttatatttacaatttcttgattcaatttatttgttgctattttaattttaatttttttgggaaatagcgtttgactttaccgtccattgatcagatctacgttgcatgtttcatttttacatatcatgtgtaaatttcttaactctatgatgaaattatctatgagttcaactggaagatgccgtttctctatcagcaacaatttattggaggattttgtccttcattttttattttttggtaaatgctattgaatcttgggtttgaatttttttattttattacgggtgagtctgtaaaagtagaagcttgctttgggtaattggctgcattgcctgtttatgttcagattgatgcattaagatcgcttagcagtttgatttgcctcccaagtgatggaacggttaatttatagtttgtgtaaacaatttagaagataaattttggttacatgataagcattttcatgtattggtctttgattttgcacagacataaacaccaatattgtc

SEQ ID NO: 83862 - DNA, 656 bp, Citrus clementina
  Intron number 3 from transcript clementine0.9_005414m (loc us clementine0.9_002864m.g) derived from phytozome v7.0 (c hr-ID scaffold_5; pos 1025472 to 1026127)
tttggagccacaacattgattgtcaaggtagatcaacttatagttaaatttacaagctcatatatgaaatgaaaatttttaactaagctttacatcggtttcaataaggattttgtggctttagttagagtagaatcttgcttatattggtggattgaatcggaagaagaatttccacagtgggttgatttctgttctgaaaatgacatttcaaacacaaacttgcctgctcattgccactaaatttagacaaggaaatgggtccatgttccagtttacttcggaaatttatccatttcttgagtttcgtaatatctagcaatcatctgttcttctttggctcataactttatattaacaaaagattgtagaaatccatgaacatccattgaaaaatccattaccacttgaaggttgtataggttctcaaagtcgttttatgtggcagtttgtatatttccccccaaaaaaaaatttaacttagaaaatgaagctaggaaatgggagcaatgagacctggaatatctgaataattattacttctttttttttttcaccccatctcgctctgttttgaattagttaagtaggcctgatttcttcagtttattatgattgtagattattggaagcattggagctgtggccgcagggct

SEQ ID NO: 83863 - DNA, 480 bp, Citrus clementina; identical to SEQ ID NO: 79687
  Intron number 4 from transcript clementine0.9_013819m (loc us clementine0.9_013819m.g) derived from phytozome v7.0 (c hr-ID scaffold_63; pos 961606 to 962085)

SEQ ID NO: 83864 - DNA, 918 bp, Citrus clementina
  Intron number 1 from transcript clementine0.9_008222m (loc us clementine0.9_008222m.g) derived from phytozome v7.0 (c hr-ID scaffold_63; pos 915061 to 915978)
cgggtaccgccggcggccttatttcatcttagctggtaatgaagaaatttcagctttgaaatttacgtctattttgctagcactttaaataatgaaatgaaatctgtaatcgcatataatgttaaatagttaaactatttaaataatgttaaatagtccaatctggtgtgtgcaatatactgaaatgaaatcctgtgtaggatgctctaataggggtgtctgtaatcgcatggtgtcttattctatctcgtgttaaatttaaataaacatggatacgacacatttattaatcgtgttgaaatatcaaaatatggttacaacttatccatttattaattgtgttgaactatttaacatatttaatataaaaattaatttaaaaaataataaatatgtcaatattattcttaaaaataggtcatatataaattaacatgacattaatatgacacatataagtttataatataatatggatatgacataaataattaatttaacgtgagtatatatttagttattttttttcaataagattacaacatattaactgatatttgtgccataaacatgtaattatgtagaggtggtccaacatggatatgacatagttttttatcatataatgttgtgtcaaccaatttattatttgtatcattaattaccaacacgaataagacaaagttgtgttgtatctgtatcgtgtaattgtatcatgacccattttgctaggcttcttgttagattttctactcctaagccagttaagatttgataggctatgttgtccttcatttagctagcagccctgcaaactggatgtgcaatttcacggggtattcaaaagttgcttcattgatgcaatctcatcagatggttccttccatgatgatttcaggttgtctcggtgtgttctcc

SEQ ID NO: 83865 - DNA, 746 bp, Citrus clementina
  Intron number 1 from transcript clementine0.9_003639m (loc us clementine0.9_003639m.g) derived from phytozome v7.0 (c hr-ID scaffold_33; pos 1607993 to 1608738)
tcccatttgtctctccgcctgcccctcctccacacgtaagctctccctcccagtctatatatatatatatacatattgcgttattggatgtgggtttgttaagattttagttttttatttctgcaatatttgattttaaggtcccacagtgggcactttgttaatgttagatgtatcagtgattgtcattcttgattagattcttttttttttcttttttgtgggatatattataatttagagcaaaaacttatgtgggtttgcttttttatttcttttaatttatagtttttcagtttttcatctacatatcattccattgtttttgtaagaacaagtgagctcgtgggtctcaagtccattatttttttcgttttgaaaataaggttttcaatgaggatctttaaagatacaaacgtcatatttggttgtgggtgccagttactttaatatagaagagatttggggttcaaacgccgctcaatggcttttgttgtatataatgtttggtcaaataaagaaaatctcttactaagtagacttgactttattttacattcatacgaacatgattgataagcaatattcactaaagctgatcatcctaatgttttatctttattactcttttctattcgactgttccatttttcttagaattccagatttgtgaagcttgtgatttaattgctgtccttgtttttcttacagtcaatcttttggatcagaaatcagacgcaatataa

SEQ ID NO: 83866 - DNA, 557 bp, Citrus clementina
  Intron number 3 from transcript clementine0.9_029358m (loc us clementine0.9_029358m.g) derived from phytozome v7.0 (c hr-ID scaffold_38; pos 443045 to 443601)
cgccctcttgcagactctttattggcccaggtggcaaatctttgttttgcttttgttttcttttcttgctgattctatcatgcttctttgcattaaaaggggaaaattgtctaattaaatcacaatggtaaaaaaaccgaattattgttttgaagaaggtagtattgctgcctgggtattcaaagtcccaaaatcattataccgttgaggttcgaccagagaacgaagataagagtatatgaaactaaaagctataattacatggtcacatgattttaactgcttaggctgcatgactatacttaatgaaatgtgccgataatgatcataactgacgaaaagaataaccagcatgaacattttgcaccgctgtatgatgactacaattcctgtgatgtaacaggctccatatatggataatggattattcatagtgagttggagttagttatatacaacatcttaaatggcatacctttacttttaaatcaagtaaataagttcctctgtccctcatgccttggcttaattcattttgattcttgttgcagacctct

SEQ ID NO: 83867 - DNA, 760 bp, Citrus clementina
  Intron number 1 from transcript clementine0.9_009501m (loc us clementine0.9_009501m.g) derived from phytozome v7.0 (c hr-ID scaffold_23; pos 1898105 to 1898864)
tttcgcgtgctgtcaggtaagtttttttttcactttgctctgtcttttgtcttatttatttattccttttgaacgttttaagtatgggtgttttgattttttattttttttctgctttgagggtttaagctgtgtaagtggatctgctatgcgagattgagcaattggtactattgttaattgaagttggtattgagacggatatgattgtttgatgattgattatcgatagctggtttttctcatgttgaagtgataaaaataataataataaataataaaatgccccgcttttctttatttatagataaacgtgtaaaactaacttcattgtccaatatttaggaagtttttgtggtaacagacactggatttattgtttttatattgatctttttttttttccccactggctttaatgtttatgagtaagcatgaagctgggattgaatttaattctcttcccattttgaatttttggcaattttttaactaaatcatgaagttaataacccggtatatttcattttatccaccaatgatcctgtatggcaatcatgaaagagcgcaatttgagaaatttaggggattttttacaatcaaatcagttatatgaaattctttatcatgatattgctcaaagtttctgaaaatgatagctttttgaccaaatagagattagcatggttgtgacttatgtttggtcgggtttattatctccgtaggttgcattttcttaattgcagcattatcttgggga

SEQ ID NO: 83868 - DNA, 549 bp, Citrus clementina
  Intron number 4 from transcript clementine0.9_021685m (loc us clementine0.9_017626m.g) derived from phytozome v7.0 (c hr-ID scaffold_53; pos 1395210 to 1395758 reverse strand)
tggggaaatacgcaattacttttcaggctgaagaagtaagtaacctacttctaccaaatgttttgtattttcttgcacagaaatgacctttcacaggcttaatgaggatattttacataattgcatgttgataaaaacaacctttgtggtgattcctcttctgagtgaaaaaatgataaaaactaaaaattgaatgatatcatgatgatcattagtgcagatgcacaagtagctatcctagtgtggaaccttgacaatgtattgcattatattaagcagtttaaagttgcattctaggccacagtgaattgatagactctgttctttttcgagactgtttaattcttctgaaaattatgtccaatatttttataaaaatccgtagttggacatttatttgtcaagccatggagttctgattcactggtccaacctatttgaaatattgcagtgcattgactgatttacagattaagtttgtaacacttggtttttagtggttaacattcatcacttgaacactttgatatgtccgatttacaggtggac

SEQ ID NO: 83869 - DNA, 678 bp, Citrus clementina
  Intron number 2 from transcript clementine0.9_012963m (loc us clementine0.9_012963m.g) derived from phytozome v7.0 (c hr-ID scaffold_10; pos 5597382 to 5598059)
tactgtcaacgcgggagagattctctacttgtaagatttatattctttttttctttataaatgaatgcatttcgactccagttataatatcttcaggtttgcagttaggctgtgattgttctgaaaagcgttttgaatgaaatgagtatacgggaatggtctacttggatatatatcttgcaatggaacaagggaaaatcaagtttagtatctgtttctggttggagtggcatgttttgacgataagtgatgaaaataaaaatagttgcattcaagcatccatttcatatatcagttgtatacaaagacacgaattttattggatgatgctttttattgtttagttagataaagtgttgagttagtctgtcctgtacataaatatagcatgcagggttgtgggcataaaccgcatgtaagattcatttataagcaataggcctgtggggtaacttcttaagtacatccctctttcattacctacaaggaaaacaaagtttctctggttccagaaatgttaataaagaatcaagctttggtttaggatggtgcaaaatggtggacaaagaaaaatattataatgtttgaacttgactttttgaatggtcagattaatttggtttcgaaaagcagctcgtaactctgaggtcaatgtggtggagttaatgcaggccaagc

SEQ ID NO: 83870 - DNA, 451 bp, Citrus clementina
  Intron number 2 from transcript clementine0.9_032829m (loc us clementine0.9_032829m.g) derived from phytozome v7.0 (c hr-ID scaffold_38; pos 1093161 to 1093611)
aaatctgtttagtttggttgattttcttgttgggtctggaatcaaggtatggatgcagtctagatgcattaaagtgctttaacttcatgaaaaaagagatttttaaagaaactgatttgtttttgtgctgaattggctggttgatgcatgccaaaccatttgtaagctacaaccacctgggaaacaacgatggaatgatccctcagcccctcaaaagtctaaaatcttaatatccaaaagcgatgttattgatgatgtggtcttcagcagttgtatactttatcagcctagtgagcaaccccatcactcatcaaggtaacctcacattattggttgacaagagaaatattaacgtgtatacagcaattatattgaacgtcttttgtttgtaattaatgcagtgagtatggctaccaattgtgctttgcatatttcttttgttggcgatagc

SEQ ID NO: 83871 - DNA, 980 bp, Citrus clementina; identical to SEQ ID NO: 79532
  Intron number 1 from transcript clementine0.9_013287m (loc us clementine0.9_013304m.g) derived from phytozome v7.0 (c hr-ID scaffold_1; pos 10969339 to 10970318 reverse strand)

SEQ ID NO: 83872 - DNA, 668 bp, Citrus clementina; identical to SEQ ID NO: 83127
  Intron number 1 from transcript clementine0.9_010936m (loc us clementine0.9_010947m.g) derived from phytozome v7.0 (c hr-ID scaffold_1; pos 9364774 to 9365441 reverse strand)

SEQ ID NO: 83873 - DNA, 600 bp, Citrus clementina
  Intron number 1 from transcript clementine0.9_017538m (loc us clementine0.9_017538m.g) derived from phytozome v7.0 (c hr-ID scaffold_98; pos 258836 to 259435 reverse strand)
gaggaagctcatccaagttctccattagtgcacaggttggtataaaaaatatcatttttttttttcagtttatgaatctagagagtttttgtttttgccgttatgcctttttaaggtattattttgtaacttatttgctctgtttcttggatgataaggtatatctattgtggttcatgattgatttattattttaattgtatgagcttcagtgactagtttgaaacgtgtttggaaacctagttatgattgaaatttaactttggtggtagctttgcctttgaggatcttacagagatctatgtttgagctggatttttgttgattataaatagaaaaacgttattagtaatagaccattttgctaaatcagtgagaaataatatgattgtgaagattgtattttgtgtattttttggcctttaattattcttcatgattgaagttcttctgacttatgtttattctccttagtatttagtttttgatggttatgttttgttttgattttaaatagtcgaggtgaattaatacctatatttttcttctttgatggggacaatagactggccttagaattgggaaggcacaaaggtggtg

SEQ ID NO: 83874 - DNA, 850 bp, Citrus clementina
  Intron number 2 from transcript clementine0.9_016516m (loc us clementine0.9_016516m.g) derived from phytozome v7.0 (c hr-ID scaffold_29; pos 1832079 to 1832928 reverse strand)
gagagaaagcttccttcaaattggtcaagcagcaggtaattttatcttgtactattcaagttgtatgttatgaatggaacaacattaagccatacctttacattcaaatgtgttctaacaactctgcatgctacattagaattttttttatattgttacatggtctttatgatagtagacgtggaatatttttctagattggctgagcattttatagtctcttcatgcctgaaggtatgtgttctggatcttttactacagaaaaatgcgctgtcatttttagcattttaggatcactgataactagttgagtgcaaagggctttctggttttgcaaaaggaacagaattaagggtaaatattctagttacagaacatgtatggttttgaaaatattaattggcattaattgattaaatcatgatagtaaacagcaaatttgtgggtgcattttcttgtctatacactaactagttgctgttaaattgaaggcaactagtcttatcttcaagccaagggaagaggttataagacaacctagcttgagtcagaaaccaagaaagcagaagcaactaaagtacctactgagacaaacaagccgtgtctgccccatatagatgaataccgtcttatggaagctgacattaacccagctagacattttcaaatttcttgtttctttatgaaatttgaccaaagcaagaataaagttgaagtagaacaatttgctcctccgtattgttttaataattcaaatctctaattttacaatcttcttgcgtgtacatgaaagtactaatataatcttgttccaggagcatcatcggagtaaactgttatcagcttacaa

SEQ ID NO: 83875 - DNA, 227 bp, Citrus clementina
  Intron number 4 from transcript clementine0.9_029880m (loc us clementine0.9_029880m.g) derived from phytozome v7.0 (c hr-ID scaffold_1; pos 3431355 to 3431581 reverse strand)
tatacgcagagtttacatttcgaatattggatcaagttcgggcaatgcatgaatcttcttaaggcatattgcttgttttaatacgcaactaatttagttgccactggcagcttgaccgagtgattttgattttctaagcagttttctttaacttttgattttaaaagtacctttaacctaaaataataataataataaacttaatttgaggctatagaattcaaata

SEQ ID NO: 83876 - DNA, 680 bp, Citrus clementina
  Intron number 2 from transcript clementine0.9_000506m (loc us clementine0.9_000506m.g) derived from phytozome v7.0 (c hr-ID scaffold_29; pos 523600 to 524279 reverse strand)
agaataagttggattcctctgctgaacctaagcaggttactgttgctaagctatctacattcatgttgtttatgaattatttgttttgttggccagcgttcaatctatgttttgtggattgtgcaaatagcccatgagagccattgcatgttgtgaatttctgagcttagtgtaaacatatttttagtggaagttcataagggtatgttttcaactcttcggctgaactttaaaaacagggattcctagcatttgcccagttatacttgaccgagttcttagttgatttatttacagagtctatcttaaataactacaaagtgtctatctgatacatggaaatcccctaggattccacttgcttgtactcttaagtttgaaactagggattattgcccgtacagtctttaatggttaacccataagatatgatatcttctgttggttttgaggaacctctaaactcttggttggaaacttgaccttggattatacagaaggtgcacatttgtaaaagcaatttcattagtgctagctgtaagcaattggtttgcacatatactggtagtcctgggttcaaattggctatttgtttgtggtttcttagcatgctctctagatttatagtgatgaggttcacacttctgtggtttctcatgtaggttaatgttgggtgcaga

SEQ ID NO: 83877 - DNA, 843 bp, Citrus clementina
  Intron number 1 from transcript clementine0.9_031551m (loc us clementine0.9_031551m.g) derived from phytozome v7.0 (c hr-ID scaffold_29; pos 1781206 to 1782048 reverse strand)
ccgttctgaaagaagtggaagaagctaaaggcaaagtgattgtttgggggatatacttcgacaagaccagtcatgccccggacgatgagccagtctccttataatggagcagatgagcagatgtctggtagcaggtgttcacgaacaagaatattttgctcgttcacgaatgcacccttcacgatgagccagcctccttataatggagcagatgagcaaatgtctggtagcaggtgtccacaaacaggaatattctgctcgttcacgaatgcaccctccacgggaccacagcaggtgccggcctcctactaggagcttaagaccattcctgctagaggttaaagtgggtagacccggtcaatggcggttgacaagacgcgcactcctgcccgagaatcaaggcacaaagtccactcagccacaactacgataatgaagcacccacttccgagagttgagggaggtaatggacgtggatcgtaggaaaggccggattcaaaggaagattataaaaaggtaaccaatgaaggtaaatgggttagactttttgagattggaacttcggaaaagagctttctattgagagatcataaaaagtcataatattagtggccgtgtttcctagaaagacaaaacctacgtttttgacttgagagtcggagagtttacaccggaaaaacacccagcgtgctctgacctattattgtgtacgcaggagtctgcggagaggaagtcttacgaggagaaatcctggtcgtggatgagttagttgaggagagattctggtcgtggacgagaagaaaaccagaatctcgcatcaacagtgattttgtttattgacga

SEQ ID NO: 83878 - DNA, 318 bp, Citrus clementina
  Intron number 1 from transcript clementine0.9_006294m (loc us clementine0.9_006294m.g) derived from phytozome v7.0 (c hr-ID scaffold_27; pos 266122 to 266439)
ggcttcagctttggggattcctcgcattcttcgaggttaaaaattattcttttttactcattattttggttactaagaaagttgtgacaattcaattttattttggactcatgtattaggatatttaggatttgcgtatttattttatcgaatttgcaatggacatgccacatttaagagatattgaagactgttagaatcagctaagcgagcttgaggttttatgtgttttgtaacaggtccttgtattttatgatctttttaatcttttgagttgtgttttttttttttttttcaaatgtgaatgtctggcagata

SEQ ID NO: 83879 - DNA, 721 bp, Citrus clementina
  Intron number 1 from transcript clementine0.9_016472m (loc us clementine0.9_015402m.g) derived from phytozome v7.0 (c hr-ID scaffold_63; pos 381082 to 381802)
cttttggtcaatatctgttagtaattttgttatcgtcatactcaatatcgatttaaaatgtttatttattttttaaaatattagtgatatttgattgattaattaatttcttggtcactgtggaatttattgcttgtgtttatacgtggtagatgttatctcaagcttagacttttattttttatgatgatagctgttgaatttcaaatctaaaatcgttagattaatatgggcttaagttgcttttttttttttattaatttgcagtacttttttttggggtaaaaaaaaaaagagagagagagagagagagagaagtttctcagctttttgttaaatgttgtttggttttcctgaaaatgaagcccttcttactcagtcaatgcatttttaccggggttagattggcaaacttttatttctttgatttgggctttggaaattaattaaaggttccaaattttaatttgtttttacaaactaccaagtgttcttccaatttaccgggcaactaaatggattagcatgctacactgcacccaagtatatattgaactcattggaagtttcttgagtatttgaatgtttcttcgtggaagcgttgatgtggaaatgaatagttttaatcttttgcttttttcccaagcacattattattgttttcttcaggcttaactcatgatcactgttatcttctaccatgtgcagtcatctttcgagc
